United States Patent Application Publication US 2019/0048337 A1 - sequence listing, part 18

SEQ ID NO: 589245 - RNA, 20 nt, Artificial Sequence
  Synthetic
cgagaccacgaacccaccgg

SEQ ID NO: 589246 - RNA, 21 nt, Artificial Sequence
  Synthetic
gcgagaccacgaacccaccgg

SEQ ID NO: 589247 - RNA, 22 nt, Artificial Sequence
  Synthetic
agcgagaccacgaacccaccgg

SEQ ID NO: 589248 - RNA, 23 nt, Artificial Sequence
  Synthetic
cagcgagaccacgaacccaccgg

SEQ ID NO: 589249 - RNA, 24 nt, Artificial Sequence
  Synthetic
ucagcgagaccacgaacccaccgg

SEQ ID NO: 589250 - RNA, 18 nt, Artificial Sequence
  Synthetic
aggguggauuacccccgg

SEQ ID NO: 589251 - RNA, 19 nt, Artificial Sequence
  Synthetic
uaggguggauuacccccgg

SEQ ID NO: 589252 - RNA, 20 nt, Artificial Sequence
  Synthetic
cuaggguggauuacccccgg

SEQ ID NO: 589253 - RNA, 21 nt, Artificial Sequence
  Synthetic
ccuaggguggauuacccccgg

SEQ ID NO: 589254 - RNA, 22 nt, Artificial Sequence
  Synthetic
gccuaggguggauuacccccgg

SEQ ID NO: 589255 - RNA, 23 nt, Artificial Sequence
  Synthetic
ggccuaggguggauuacccccgg

SEQ ID NO: 589256 - RNA, 24 nt, Artificial Sequence
  Synthetic
uggccuaggguggauuacccccgg

SEQ ID NO: 589257 - RNA, 18 nt, Artificial Sequence
  Synthetic
cggcagcaaagcccccgg

SEQ ID NO: 589258 - RNA, 19 nt, Artificial Sequence
  Synthetic
gcggcagcaaagcccccgg

SEQ ID NO: 589259 - RNA, 20 nt, Artificial Sequence
  Synthetic
agcggcagcaaagcccccgg

SEQ ID NO: 589260 - RNA, 21 nt, Artificial Sequence
  Synthetic
cagcggcagcaaagcccccgg

SEQ ID NO: 589261 - RNA, 22 nt, Artificial Sequence
  Synthetic
ccagcggcagcaaagcccccgg

SEQ ID NO: 589262 - RNA, 23 nt, Artificial Sequence
  Synthetic
gccagcggcagcaaagcccccgg

SEQ ID NO: 589263 - RNA, 24 nt, Artificial Sequence
  Synthetic
agccagcggcagcaaagcccccgg

SEQ ID NO: 589264 - RNA, 18 nt, Artificial Sequence
  Synthetic
aauuccccuugcccccgg

SEQ ID NO: 589265 - RNA, 19 nt, Artificial Sequence
  Synthetic
gaauuccccuugcccccgg

SEQ ID NO: 589266 - RNA, 20 nt, Artificial Sequence
  Synthetic
agaauuccccuugcccccgg

SEQ ID NO: 589267 - RNA, 21 nt, Artificial Sequence
  Synthetic
gagaauuccccuugcccccgg

SEQ ID NO: 589268 - RNA, 22 nt, Artificial Sequence
  Synthetic
agagaauuccccuugcccccgg

SEQ ID NO: 589269 - RNA, 23 nt, Artificial Sequence
  Synthetic
cagagaauuccccuugcccccgg

SEQ ID NO: 589270 - RNA, 24 nt, Artificial Sequence
  Synthetic
acagagaauuccccuugcccccgg

SEQ ID NO: 589271 - RNA, 18 nt, Artificial Sequence
  Synthetic
uugcucuugucgccccgg

SEQ ID NO: 589272 - RNA, 19 nt, Artificial Sequence
  Synthetic
uuugcucuugucgccccgg

SEQ ID NO: 589273 - RNA, 20 nt, Artificial Sequence
  Synthetic
uuuugcucuugucgccccgg

SEQ ID NO: 589274 - RNA, 21 nt, Artificial Sequence
  Synthetic
guuuugcucuugucgccccgg

SEQ ID NO: 589275 - RNA, 22 nt, Artificial Sequence
  Synthetic
aguuuugcucuugucgccccgg

SEQ ID NO: 589276 - RNA, 23 nt, Artificial Sequence
  Synthetic
gaguuuugcucuugucgccccgg

SEQ ID NO: 589277 - RNA, 24 nt, Artificial Sequence
  Synthetic
agaguuuugcucuugucgccccgg

SEQ ID NO: 589278 - RNA, 18 nt, Artificial Sequence
  Synthetic
gugagccaccacgcccgg

SEQ ID NO: 589279 - RNA, 19 nt, Artificial Sequence
  Synthetic
cgugagccaccacgcccgg

SEQ ID NO: 589280 - RNA, 20 nt, Artificial Sequence
  Synthetic
gcgugagccaccacgcccgg

SEQ ID NO: 589281 - RNA, 21 nt, Artificial Sequence
  Synthetic
ggcgugagccaccacgcccgg

SEQ ID NO: 589282 - RNA, 22 nt, Artificial Sequence
  Synthetic
aggcgugagccaccacgcccgg

SEQ ID NO: 589283 - RNA, 23 nt, Artificial Sequence
  Synthetic
caggcgugagccaccacgcccgg

SEQ ID NO: 589284 - RNA, 24 nt, Artificial Sequence
  Synthetic
acaggcgugagccaccacgcccgg

SEQ ID NO: 589285 - RNA, 18 nt, Artificial Sequence
  Synthetic
ucucacucugucgcccgg

SEQ ID NO: 589286 - RNA, 19 nt, Artificial Sequence
  Synthetic
gucucacucugucgcccgg

SEQ ID NO: 589287 - RNA, 20 nt, Artificial Sequence
  Synthetic
agucucacucugucgcccgg

SEQ ID NO: 589288 - RNA, 21 nt, Artificial Sequence
  Synthetic
gagucucacucugucgcccgg

SEQ ID NO: 589289 - RNA, 22 nt, Artificial Sequence
  Synthetic
ggagucucacucugucgcccgg

SEQ ID NO: 589290 - RNA, 23 nt, Artificial Sequence
  Synthetic
cggagucucacucugucgcccgg

SEQ ID NO: 589291 - RNA, 24 nt, Artificial Sequence
  Synthetic
acggagucucacucugucgcccgg

SEQ ID NO: 589292 - RNA, 18 nt, Artificial Sequence
  Synthetic
gaggaccuuacgucccgg

SEQ ID NO: 589293 - RNA, 19 nt, Artificial Sequence
  Synthetic
agaggaccuuacgucccgg

SEQ ID NO: 589294 - RNA, 20 nt, Artificial Sequence
  Synthetic
cagaggaccuuacgucccgg

SEQ ID NO: 589295 - RNA, 21 nt, Artificial Sequence
  Synthetic
gcagaggaccuuacgucccgg

SEQ ID NO: 589296 - RNA, 22 nt, Artificial Sequence
  Synthetic
ugcagaggaccuuacgucccgg

SEQ ID NO: 589297 - RNA, 23 nt, Artificial Sequence
  Synthetic
augcagaggaccuuacgucccgg

SEQ ID NO: 589298 - RNA, 24 nt, Artificial Sequence
  Synthetic
aaugcagaggaccuuacgucccgg

SEQ ID NO: 589299 - RNA, 18 nt, Artificial Sequence
  Synthetic
acagcauguugcggccgg

SEQ ID NO: 589300 - RNA, 19 nt, Artificial Sequence
  Synthetic
aacagcauguugcggccgg

SEQ ID NO: 589301 - RNA, 20 nt, Artificial Sequence
  Synthetic
aaacagcauguugcggccgg

SEQ ID NO: 589302 - RNA, 21 nt, Artificial Sequence
  Synthetic
aaaacagcauguugcggccgg

SEQ ID NO: 589303 - RNA, 22 nt, Artificial Sequence
  Synthetic
uaaaacagcauguugcggccgg

SEQ ID NO: 589304 - RNA, 23 nt, Artificial Sequence
  Synthetic
uuaaaacagcauguugcggccgg

SEQ ID NO: 589305 - RNA, 24 nt, Artificial Sequence
  Synthetic
auuaaaacagcauguugcggccgg

SEQ ID NO: 589306 - RNA, 18 nt, Artificial Sequence
  Synthetic
uuuuaaaagagaugccgg

SEQ ID NO: 589307 - RNA, 19 nt, Artificial Sequence
  Synthetic
cuuuuaaaagagaugccgg

SEQ ID NO: 589308 - RNA, 20 nt, Artificial Sequence
  Synthetic
ucuuuuaaaagagaugccgg

SEQ ID NO: 589309 - RNA, 21 nt, Artificial Sequence
  Synthetic
uucuuuuaaaagagaugccgg

SEQ ID NO: 589310 - RNA, 22 nt, Artificial Sequence
  Synthetic
uuucuuuuaaaagagaugccgg

SEQ ID NO: 589311 - RNA, 23 nt, Artificial Sequence
  Synthetic
uuuucuuuuaaaagagaugccgg

SEQ ID NO: 589312 - RNA, 24 nt, Artificial Sequence
  Synthetic
auuuucuuuuaaaagagaugccgg

SEQ ID NO: 589313 - RNA, 18 nt, Artificial Sequence
  Synthetic
ucuagaacuguaauccgg

SEQ ID NO: 589314 - RNA, 19 nt, Artificial Sequence
  Synthetic
aucuagaacuguaauccgg

SEQ ID NO: 589315 - RNA, 20 nt, Artificial Sequence
  Synthetic
caucuagaacuguaauccgg

SEQ ID NO: 589316 - RNA, 21 nt, Artificial Sequence
  Synthetic
ucaucuagaacuguaauccgg

SEQ ID NO: 589317 - RNA, 22 nt, Artificial Sequence
  Synthetic
cucaucuagaacuguaauccgg

SEQ ID NO: 589318 - RNA, 23 nt, Artificial Sequence
  Synthetic
ucucaucuagaacuguaauccgg

SEQ ID NO: 589319 - RNA, 24 nt, Artificial Sequence
  Synthetic
aucucaucuagaacuguaauccgg

SEQ ID NO: 589320 - RNA, 18 nt, Artificial Sequence
  Synthetic
agagcuaaguaacuccgg

SEQ ID NO: 589321 - RNA, 19 nt, Artificial Sequence
  Synthetic
cagagcuaaguaacuccgg

SEQ ID NO: 589322 - RNA, 20 nt, Artificial Sequence
  Synthetic
ucagagcuaaguaacuccgg

SEQ ID NO: 589323 - RNA, 21 nt, Artificial Sequence
  Synthetic
aucagagcuaaguaacuccgg

SEQ ID NO: 589324 - RNA, 22 nt, Artificial Sequence
  Synthetic
caucagagcuaaguaacuccgg

SEQ ID NO: 589325 - RNA, 23 nt, Artificial Sequence
  Synthetic
acaucagagcuaaguaacuccgg

SEQ ID NO: 589326 - RNA, 24 nt, Artificial Sequence
  Synthetic
cacaucagagcuaaguaacuccgg

SEQ ID NO: 589327 - RNA, 18 nt, Artificial Sequence
  Synthetic
aauaaauguuuguuccgg

SEQ ID NO: 589328 - RNA, 19 nt, Artificial Sequence
  Synthetic
aaauaaauguuuguuccgg

SEQ ID NO: 589329 - RNA, 20 nt, Artificial Sequence
  Synthetic
aaaauaaauguuuguuccgg

SEQ ID NO: 589330 - RNA, 21 nt, Artificial Sequence
  Synthetic
uaaaauaaauguuuguuccgg

SEQ ID NO: 589331 - RNA, 22 nt, Artificial Sequence
  Synthetic
guaaaauaaauguuuguuccgg

SEQ ID NO: 589332 - RNA, 23 nt, Artificial Sequence
  Synthetic
aguaaaauaaauguuuguuccgg

SEQ ID NO: 589333 - RNA, 24 nt, Artificial Sequence
  Synthetic
aaguaaaauaaauguuuguuccgg

SEQ ID NO: 589334 - RNA, 18 nt, Artificial Sequence
  Synthetic
ccuucucuggcaaagcgg

SEQ ID NO: 589335 - RNA, 19 nt, Artificial Sequence
  Synthetic
uccuucucuggcaaagcgg

SEQ ID NO: 589336 - RNA, 20 nt, Artificial Sequence
  Synthetic
auccuucucuggcaaagcgg

SEQ ID NO: 589337 - RNA, 21 nt, Artificial Sequence
  Synthetic
aauccuucucuggcaaagcgg

SEQ ID NO: 589338 - RNA, 22 nt, Artificial Sequence
  Synthetic
aaauccuucucuggcaaagcgg

SEQ ID NO: 589339 - RNA, 23 nt, Artificial Sequence
  Synthetic
aaaauccuucucuggcaaagcgg

SEQ ID NO: 589340 - RNA, 24 nt, Artificial Sequence
  Synthetic
aaaaauccuucucuggcaaagcgg

SEQ ID NO: 589341 - RNA, 18 nt, Artificial Sequence
  Synthetic
uacucaugaguaaagcgg

SEQ ID NO: 589342 - RNA, 19 nt, Artificial Sequence
  Synthetic
uuacucaugaguaaagcgg

SEQ ID NO: 589343 - RNA, 20 nt, Artificial Sequence
  Synthetic
auuacucaugaguaaagcgg

SEQ ID NO: 589344 - RNA, 21 nt, Artificial Sequence
  Synthetic
aauuacucaugaguaaagcgg

SEQ ID NO: 589345 - RNA, 22 nt, Artificial Sequence
  Synthetic
aaauuacucaugaguaaagcgg

SEQ ID NO: 589346 - RNA, 23 nt, Artificial Sequence
  Synthetic
aaaauuacucaugaguaaagcgg

SEQ ID NO: 589347 - RNA, 24 nt, Artificial Sequence
  Synthetic
aaaaauuacucaugaguaaagcgg

SEQ ID NO: 589348 - RNA, 18 nt, Artificial Sequence
  Synthetic
ugaguacagagcaagcgg

SEQ ID NO: 589349 - RNA, 19 nt, Artificial Sequence
  Synthetic
uugaguacagagcaagcgg

SEQ ID NO: 589350 - RNA, 20 nt, Artificial Sequence
  Synthetic
uuugaguacagagcaagcgg

SEQ ID NO: 589351 - RNA, 21 nt, Artificial Sequence
  Synthetic
guuugaguacagagcaagcgg

SEQ ID NO: 589352 - RNA, 22 nt, Artificial Sequence
  Synthetic
aguuugaguacagagcaagcgg

SEQ ID NO: 589353 - RNA, 23 nt, Artificial Sequence
  Synthetic
aaguuugaguacagagcaagcgg

SEQ ID NO: 589354 - RNA, 24 nt, Artificial Sequence
  Synthetic
gaaguuugaguacagagcaagcgg

SEQ ID NO: 589355 - RNA, 18 nt, Artificial Sequence
  Synthetic
gaaguggggaagaagcgg

SEQ ID NO: 589356 - RNA, 19 nt, Artificial Sequence
  Synthetic
ggaaguggggaagaagcgg

SEQ ID NO: 589357 - RNA, 20 nt, Artificial Sequence
  Synthetic
gggaaguggggaagaagcgg

SEQ ID NO: 589358 - RNA, 21 nt, Artificial Sequence
  Synthetic
agggaaguggggaagaagcgg

SEQ ID NO: 589359 - RNA, 22 nt, Artificial Sequence
  Synthetic
aagggaaguggggaagaagcgg

SEQ ID NO: 589360 - RNA, 23 nt, Artificial Sequence
  Synthetic
uaagggaaguggggaagaagcgg

SEQ ID NO: 589361 - RNA, 24 nt, Artificial Sequence
  Synthetic
auaagggaaguggggaagaagcgg

SEQ ID NO: 589362 - RNA, 18 nt, Artificial Sequence
  Synthetic
agagagagagagaagcgg

SEQ ID NO: 589363 - RNA, 19 nt, Artificial Sequence
  Synthetic
gagagagagagagaagcgg

SEQ ID NO: 589364 - RNA, 20 nt, Artificial Sequence
  Synthetic
agagagagagagagaagcgg

SEQ ID NO: 589365 - RNA, 21 nt, Artificial Sequence
  Synthetic
gagagagagagagagaagcgg

SEQ ID NO: 589366 - RNA, 22 nt, Artificial Sequence
  Synthetic
agagagagagagagagaagcgg

SEQ ID NO: 589367 - RNA, 23 nt, Artificial Sequence
  Synthetic
gagagagagagagagagaagcgg

SEQ ID NO: 589368 - RNA, 24 nt, Artificial Sequence
  Synthetic
agagagagagagagagagaagcgg

SEQ ID NO: 589369 - RNA, 18 nt, Artificial Sequence
  Synthetic
ucuacauggaaacagcgg

SEQ ID NO: 589370 - RNA, 19 nt, Artificial Sequence
  Synthetic
aucuacauggaaacagcgg

SEQ ID NO: 589371 - RNA, 20 nt, Artificial Sequence
  Synthetic
caucuacauggaaacagcgg

SEQ ID NO: 589372 - RNA, 21 nt, Artificial Sequence
  Synthetic
ucaucuacauggaaacagcgg

SEQ ID NO: 589373 - RNA, 22 nt, Artificial Sequence
  Synthetic
gucaucuacauggaaacagcgg

SEQ ID NO: 589374 - RNA, 23 nt, Artificial Sequence
  Synthetic
agucaucuacauggaaacagcgg

SEQ ID NO: 589375 - RNA, 24 nt, Artificial Sequence
  Synthetic
cagucaucuacauggaaacagcgg

SEQ ID NO: 589376 - RNA, 18 nt, Artificial Sequence
  Synthetic
agugaaaaggaugagcgg

SEQ ID NO: 589377 - RNA, 19 nt, Artificial Sequence
  Synthetic
cagugaaaaggaugagcgg

SEQ ID NO: 589378 - RNA, 20 nt, Artificial Sequence
  Synthetic
ucagugaaaaggaugagcgg

SEQ ID NO: 589379 - RNA, 21 nt, Artificial Sequence
  Synthetic
cucagugaaaaggaugagcgg

SEQ ID NO: 589380 - RNA, 22 nt, Artificial Sequence
  Synthetic
ucucagugaaaaggaugagcgg

SEQ ID NO: 589381 - RNA, 23 nt, Artificial Sequence
  Synthetic
aucucagugaaaaggaugagcgg

SEQ ID NO: 589382 - RNA, 24 nt, Artificial Sequence
  Synthetic
gaucucagugaaaaggaugagcgg

SEQ ID NO: 589383 - RNA, 18 nt, Artificial Sequence
  Synthetic
uccagaggcuacuagcgg

SEQ ID NO: 589384 - RNA, 19 nt, Artificial Sequence
  Synthetic
guccagaggcuacuagcgg

SEQ ID NO: 589385 - RNA, 20 nt, Artificial Sequence
  Synthetic
aguccagaggcuacuagcgg

SEQ ID NO: 589386 - RNA, 21 nt, Artificial Sequence
  Synthetic
uaguccagaggcuacuagcgg

SEQ ID NO: 589387 - RNA, 22 nt, Artificial Sequence
  Synthetic
guaguccagaggcuacuagcgg

SEQ ID NO: 589388 - RNA, 23 nt, Artificial Sequence
  Synthetic
aguaguccagaggcuacuagcgg

SEQ ID NO: 589389 - RNA, 24 nt, Artificial Sequence
  Synthetic
aaguaguccagaggcuacuagcgg

SEQ ID NO: 589390 - RNA, 18 nt, Artificial Sequence
  Synthetic
ugugggaggccaaggcgg

SEQ ID NO: 589391 - RNA, 19 nt, Artificial Sequence
  Synthetic
cugugggaggccaaggcgg

SEQ ID NO: 589392 - RNA, 20 nt, Artificial Sequence
  Synthetic
acugugggaggccaaggcgg

SEQ ID NO: 589393 - RNA, 21 nt, Artificial Sequence
  Synthetic
cacugugggaggccaaggcgg

SEQ ID NO: 589394 - RNA, 22 nt, Artificial Sequence
  Synthetic
gcacugugggaggccaaggcgg

SEQ ID NO: 589395 - RNA, 23 nt, Artificial Sequence
  Synthetic
agcacugugggaggccaaggcgg

SEQ ID NO: 589396 - RNA, 24 nt, Artificial Sequence
  Synthetic
cagcacugugggaggccaaggcgg

SEQ ID NO: 589397 - RNA, 18 nt, Artificial Sequence
  Synthetic
acucugucacccaggcgg

SEQ ID NO: 589398 - RNA, 19 nt, Artificial Sequence
  Synthetic
cacucugucacccaggcgg

SEQ ID NO: 589399 - RNA, 20 nt, Artificial Sequence
  Synthetic
ucacucugucacccaggcgg

SEQ ID NO: 589400 - RNA, 21 nt, Artificial Sequence
  Synthetic
cucacucugucacccaggcgg

SEQ ID NO: 589401 - RNA, 22 nt, Artificial Sequence
  Synthetic
ucucacucugucacccaggcgg

SEQ ID NO: 589402 - RNA, 23 nt, Artificial Sequence
  Synthetic
gucucacucugucacccaggcgg

SEQ ID NO: 589403 - RNA, 24 nt, Artificial Sequence
  Synthetic
ggucucacucugucacccaggcgg

SEQ ID NO: 589404 - RNA, 18 nt, Artificial Sequence
  Synthetic
uuagaggucaagaggcgg

SEQ ID NO: 589405 - RNA, 19 nt, Artificial Sequence
  Synthetic
cuuagaggucaagaggcgg

SEQ ID NO: 589406 - RNA, 20 nt, Artificial Sequence
  Synthetic
ccuuagaggucaagaggcgg

SEQ ID NO: 589407 - RNA, 21 nt, Artificial Sequence
  Synthetic
gccuuagaggucaagaggcgg

SEQ ID NO: 589408 - RNA, 22 nt, Artificial Sequence
  Synthetic
ugccuuagaggucaagaggcgg

SEQ ID NO: 589409 - RNA, 23 nt, Artificial Sequence
  Synthetic
uugccuuagaggucaagaggcgg

SEQ ID NO: 589410 - RNA, 24 nt, Artificial Sequence
  Synthetic
auugccuuagaggucaagaggcgg

SEQ ID NO: 589411 - RNA, 18 nt, Artificial Sequence
  Synthetic
ucgcuugaacccgggcgg

SEQ ID NO: 589412 - RNA, 19 nt, Artificial Sequence
  Synthetic
aucgcuugaacccgggcgg

SEQ ID NO: 589413 - RNA, 20 nt, Artificial Sequence
  Synthetic
aaucgcuugaacccgggcgg

SEQ ID NO: 589414 - RNA, 21 nt, Artificial Sequence
  Synthetic
gaaucgcuugaacccgggcgg

SEQ ID NO: 589415 - RNA, 22 nt, Artificial Sequence
  Synthetic
agaaucgcuugaacccgggcgg

SEQ ID NO: 589416 - RNA, 23 nt, Artificial Sequence
  Synthetic
gagaaucgcuugaacccgggcgg

SEQ ID NO: 589417 - RNA, 24 nt, Artificial Sequence
  Synthetic
ggagaaucgcuugaacccgggcgg

SEQ ID NO: 589418 - RNA, 18 nt, Artificial Sequence
  Synthetic
uccauggaucaggggcgg

SEQ ID NO: 589419 - RNA, 19 nt, Artificial Sequence
  Synthetic
uuccauggaucaggggcgg

SEQ ID NO: 589420 - RNA, 20 nt, Artificial Sequence
  Synthetic
uuuccauggaucaggggcgg

SEQ ID NO: 589421 - RNA, 21 nt, Artificial Sequence
  Synthetic
uuuuccauggaucaggggcgg

SEQ ID NO: 589422 - RNA, 22 nt, Artificial Sequence
  Synthetic
uuuuuccauggaucaggggcgg

SEQ ID NO: 589423 - RNA, 23 nt, Artificial Sequence
  Synthetic
auuuuuccauggaucaggggcgg

SEQ ID NO: 589424 - RNA, 24 nt, Artificial Sequence
  Synthetic
aauuuuuccauggaucaggggcgg

SEQ ID NO: 589425 - RNA, 18 nt, Artificial Sequence
  Synthetic
caccauucuacauggcgg

SEQ ID NO: 589426 - RNA, 19 nt, Artificial Sequence
  Synthetic
ucaccauucuacauggcgg

SEQ ID NO: 589427 - RNA, 20 nt, Artificial Sequence
  Synthetic
cucaccauucuacauggcgg

SEQ ID NO: 589428 - RNA, 21 nt, Artificial Sequence
  Synthetic
acucaccauucuacauggcgg

SEQ ID NO: 589429 - RNA, 22 nt, Artificial Sequence
  Synthetic
gacucaccauucuacauggcgg

SEQ ID NO: 589430 - RNA, 23 nt, Artificial Sequence
  Synthetic
ggacucaccauucuacauggcgg

SEQ ID NO: 589431 - RNA, 24 nt, Artificial Sequence
  Synthetic
uggacucaccauucuacauggcgg

SEQ ID NO: 589432 - RNA, 18 nt, Artificial Sequence
  Synthetic
acagguguuacuuggcgg

SEQ ID NO: 589433 - RNA, 19 nt, Artificial Sequence
  Synthetic
aacagguguuacuuggcgg

SEQ ID NO: 589434 - RNA, 20 nt, Artificial Sequence
  Synthetic
gaacagguguuacuuggcgg

SEQ ID NO: 589435 - RNA, 21 nt, Artificial Sequence
  Synthetic
agaacagguguuacuuggcgg

SEQ ID NO: 589436 - RNA, 22 nt, Artificial Sequence
  Synthetic
cagaacagguguuacuuggcgg

SEQ ID NO: 589437 - RNA, 23 nt, Artificial Sequence
  Synthetic
ucagaacagguguuacuuggcgg

SEQ ID NO: 589438 - RNA, 24 nt, Artificial Sequence
  Synthetic
gucagaacagguguuacuuggcgg

SEQ ID NO: 589439 - RNA, 18 nt, Artificial Sequence
  Synthetic
gaaaacaggaguuggcgg

SEQ ID NO: 589440 - RNA, 19 nt, Artificial Sequence
  Synthetic
ggaaaacaggaguuggcgg

SEQ ID NO: 589441 - RNA, 20 nt, Artificial Sequence
  Synthetic
aggaaaacaggaguuggcgg

SEQ ID NO: 589442 - RNA, 21 nt, Artificial Sequence
  Synthetic
caggaaaacaggaguuggcgg

SEQ ID NO: 589443 - RNA, 22 nt, Artificial Sequence
  Synthetic
ucaggaaaacaggaguuggcgg

SEQ ID NO: 589444 - RNA, 23 nt, Artificial Sequence
  Synthetic
aucaggaaaacaggaguuggcgg

SEQ ID NO: 589445 - RNA, 24 nt, Artificial Sequence
  Synthetic
caucaggaaaacaggaguuggcgg

SEQ ID NO: 589446 - RNA, 18 nt, Artificial Sequence
  Synthetic
gcaggggccuguuggcgg

SEQ ID NO: 589447 - RNA, 19 nt, Artificial Sequence
  Synthetic
cgcaggggccuguuggcgg

SEQ ID NO: 589448 - RNA, 20 nt, Artificial Sequence
  Synthetic
ccgcaggggccuguuggcgg

SEQ ID NO: 589449 - RNA, 21 nt, Artificial Sequence
  Synthetic
gccgcaggggccuguuggcgg

SEQ ID NO: 589450 - RNA, 22 nt, Artificial Sequence
  Synthetic
ggccgcaggggccuguuggcgg

SEQ ID NO: 589451 - RNA, 23 nt, Artificial Sequence
  Synthetic
uggccgcaggggccuguuggcgg

SEQ ID NO: 589452 - RNA, 24 nt, Artificial Sequence
  Synthetic
auggccgcaggggccuguuggcgg

SEQ ID NO: 589453 - RNA, 18 nt, Artificial Sequence
  Synthetic
uauggacaucuuuggcgg

SEQ ID NO: 589454 - RNA, 19 nt, Artificial Sequence
  Synthetic
auauggacaucuuuggcgg

SEQ ID NO: 589455 - RNA, 20 nt, Artificial Sequence
  Synthetic
gauauggacaucuuuggcgg

SEQ ID NO: 589456 - RNA, 21 nt, Artificial Sequence
  Synthetic
ggauauggacaucuuuggcgg

SEQ ID NO: 589457 - RNA, 22 nt, Artificial Sequence
  Synthetic
aggauauggacaucuuuggcgg

SEQ ID NO: 589458 - RNA, 23 nt, Artificial Sequence
  Synthetic
uaggauauggacaucuuuggcgg

SEQ ID NO: 589459 - RNA, 24 nt, Artificial Sequence
  Synthetic
uuaggauauggacaucuuuggcgg

SEQ ID NO: 589460 - RNA, 18 nt, Artificial Sequence
  Synthetic
caaguguuuuaaaugcgg

SEQ ID NO: 589461 - RNA, 19 nt, Artificial Sequence
  Synthetic
ccaaguguuuuaaaugcgg

SEQ ID NO: 589462 - RNA, 20 nt, Artificial Sequence
  Synthetic
cccaaguguuuuaaaugcgg

SEQ ID NO: 589463 - RNA, 21 nt, Artificial Sequence
  Synthetic
acccaaguguuuuaaaugcgg

SEQ ID NO: 589464 - RNA, 22 nt, Artificial Sequence
  Synthetic
cacccaaguguuuuaaaugcgg

SEQ ID NO: 589465 - RNA, 23 nt, Artificial Sequence
  Synthetic
ccacccaaguguuuuaaaugcgg

SEQ ID NO: 589466 - RNA, 24 nt, Artificial Sequence
  Synthetic
accacccaaguguuuuaaaugcgg

SEQ ID NO: 589467 - RNA, 18 nt, Artificial Sequence
  Synthetic
cacccguguucuuugcgg

SEQ ID NO: 589468 - RNA, 19 nt, Artificial Sequence
  Synthetic
ccacccguguucuuugcgg

SEQ ID NO: 589469 - RNA, 20 nt, Artificial Sequence
  Synthetic
accacccguguucuuugcgg

SEQ ID NO: 589470 - RNA, 21 nt, Artificial Sequence
  Synthetic
uaccacccguguucuuugcgg

SEQ ID NO: 589471 - RNA, 22 nt, Artificial Sequence
  Synthetic
auaccacccguguucuuugcgg

SEQ ID NO: 589472 - RNA, 23 nt, Artificial Sequence
  Synthetic
uauaccacccguguucuuugcgg

SEQ ID NO: 589473 - RNA, 24 nt, Artificial Sequence
  Synthetic
auauaccacccguguucuuugcgg

SEQ ID NO: 589474 - RNA, 18 nt, Artificial Sequence
  Synthetic
uaaagagaguaaaaucgg

SEQ ID NO: 589475 - RNA, 19 nt, Artificial Sequence
  Synthetic
cuaaagagaguaaaaucgg

SEQ ID NO: 589476 - RNA, 20 nt, Artificial Sequence
  Synthetic
ucuaaagagaguaaaaucgg

SEQ ID NO: 589477 - RNA, 21 nt, Artificial Sequence
  Synthetic
uucuaaagagaguaaaaucgg

SEQ ID NO: 589478 - RNA, 22 nt, Artificial Sequence
  Synthetic
guucuaaagagaguaaaaucgg

SEQ ID NO: 589479 - RNA, 23 nt, Artificial Sequence
  Synthetic
aguucuaaagagaguaaaaucgg

SEQ ID NO: 589480 - RNA, 24 nt, Artificial Sequence
  Synthetic
caguucuaaagagaguaaaaucgg

SEQ ID NO: 589481 - RNA, 18 nt, Artificial Sequence
  Synthetic
agaaagccuacacaucgg

SEQ ID NO: 589482 - RNA, 19 nt, Artificial Sequence
  Synthetic
aagaaagccuacacaucgg

SEQ ID NO: 589483 - RNA, 20 nt, Artificial Sequence
  Synthetic
gaagaaagccuacacaucgg

SEQ ID NO: 589484 - RNA, 21 nt, Artificial Sequence
  Synthetic
ggaagaaagccuacacaucgg

SEQ ID NO: 589485 - RNA, 22 nt, Artificial Sequence
  Synthetic
gggaagaaagccuacacaucgg

SEQ ID NO: 589486 - RNA, 23 nt, Artificial Sequence
  Synthetic
ugggaagaaagccuacacaucgg

SEQ ID NO: 589487 - RNA, 24 nt, Artificial Sequence
  Synthetic
augggaagaaagccuacacaucgg

SEQ ID NO: 589488 - RNA, 18 nt, Artificial Sequence
  Synthetic
uuugguagaauucaucgg

SEQ ID NO: 589489 - RNA, 19 nt, Artificial Sequence
  Synthetic
guuugguagaauucaucgg

SEQ ID NO: 589490 - RNA, 20 nt, Artificial Sequence
  Synthetic
uguuugguagaauucaucgg

SEQ ID NO: 589491 - RNA, 21 nt, Artificial Sequence
  Synthetic
auguuugguagaauucaucgg

SEQ ID NO: 589492 - RNA, 22 nt, Artificial Sequence
  Synthetic
uauguuugguagaauucaucgg

SEQ ID NO: 589493 - RNA, 23 nt, Artificial Sequence
  Synthetic
auauguuugguagaauucaucgg

SEQ ID NO: 589494 - RNA, 24 nt, Artificial Sequence
  Synthetic
uauauguuugguagaauucaucgg

SEQ ID NO: 589495 - RNA, 18 nt, Artificial Sequence
  Synthetic
gugcuaaagggauaucgg

SEQ ID NO: 589496 - RNA, 19 nt, Artificial Sequence
  Synthetic
agugcuaaagggauaucgg

SEQ ID NO: 589497 - RNA, 20 nt, Artificial Sequence
  Synthetic
aagugcuaaagggauaucgg

SEQ ID NO: 589498 - RNA, 21 nt, Artificial Sequence
  Synthetic
uaagugcuaaagggauaucgg

SEQ ID NO: 589499 - RNA, 22 nt, Artificial Sequence
  Synthetic
guaagugcuaaagggauaucgg

SEQ ID NO: 589500 - RNA, 23 nt, Artificial Sequence
  Synthetic
gguaagugcuaaagggauaucgg

SEQ ID NO: 589501 - RNA, 24 nt, Artificial Sequence
  Synthetic
ugguaagugcuaaagggauaucgg

SEQ ID NO: 589502 - RNA, 18 nt, Artificial Sequence
  Synthetic
uucaacaagacaccucgg

SEQ ID NO: 589503 - RNA, 19 nt, Artificial Sequence
  Synthetic
uuucaacaagacaccucgg

SEQ ID NO: 589504 - RNA, 20 nt, Artificial Sequence
  Synthetic
auuucaacaagacaccucgg

SEQ ID NO: 589505 - RNA, 21 nt, Artificial Sequence
  Synthetic
gauuucaacaagacaccucgg

SEQ ID NO: 589506 - RNA, 22 nt, Artificial Sequence
  Synthetic
ugauuucaacaagacaccucgg

SEQ ID NO: 589507 - RNA, 23 nt, Artificial Sequence
  Synthetic
augauuucaacaagacaccucgg

SEQ ID NO: 589508 - RNA, 24 nt, Artificial Sequence
  Synthetic
aaugauuucaacaagacaccucgg

SEQ ID NO: 589509 - RNA, 18 nt, Artificial Sequence
  Synthetic
ccagcccccaauccucgg

SEQ ID NO: 589510 - RNA, 19 nt, Artificial Sequence
  Synthetic
cccagcccccaauccucgg

SEQ ID NO: 589511 - RNA, 20 nt, Artificial Sequence
  Synthetic
ccccagcccccaauccucgg

SEQ ID NO: 589512 - RNA, 21 nt, Artificial Sequence
  Synthetic
uccccagcccccaauccucgg

SEQ ID NO: 589513 - RNA, 22 nt, Artificial Sequence
  Synthetic
uuccccagcccccaauccucgg

SEQ ID NO: 589514 - RNA, 23 nt, Artificial Sequence
  Synthetic
uuuccccagcccccaauccucgg

SEQ ID NO: 589515 - RNA, 24 nt, Artificial Sequence
  Synthetic
auuuccccagcccccaauccucgg

SEQ ID NO: 589516 - RNA, 18 nt, Artificial Sequence
  Synthetic
uaacagcggaucucucgg

SEQ ID NO: 589517 - RNA, 19 nt, Artificial Sequence
  Synthetic
cuaacagcggaucucucgg

SEQ ID NO: 589518 - RNA, 20 nt, Artificial Sequence
  Synthetic
acuaacagcggaucucucgg

SEQ ID NO: 589519 - RNA, 21 nt, Artificial Sequence
  Synthetic
gacuaacagcggaucucucgg

SEQ ID NO: 589520 - RNA, 22 nt, Artificial Sequence
  Synthetic
agacuaacagcggaucucucgg

SEQ ID NO: 589521 - RNA, 23 nt, Artificial Sequence
  Synthetic
cagacuaacagcggaucucucgg

SEQ ID NO: 589522 - RNA, 24 nt, Artificial Sequence
  Synthetic
ucagacuaacagcggaucucucgg

SEQ ID NO: 589523 - RNA, 18 nt, Artificial Sequence
  Synthetic
gauaaaauguucucucgg

SEQ ID NO: 589524 - RNA, 19 nt, Artificial Sequence
  Synthetic
agauaaaauguucucucgg

SEQ ID NO: 589525 - RNA, 20 nt, Artificial Sequence
  Synthetic
uagauaaaauguucucucgg

SEQ ID NO: 589526 - RNA, 21 nt, Artificial Sequence
  Synthetic
uuagauaaaauguucucucgg

SEQ ID NO: 589527 - RNA, 22 nt, Artificial Sequence
  Synthetic
guuagauaaaauguucucucgg

SEQ ID NO: 589528 - RNA, 23 nt, Artificial Sequence
  Synthetic
uguuagauaaaauguucucucgg

SEQ ID NO: 589529 - RNA, 24 nt, Artificial Sequence
  Synthetic
auguuagauaaaauguucucucgg

SEQ ID NO: 589530 - RNA, 18 nt, Artificial Sequence
  Synthetic
aacucagccccaagucgg

SEQ ID NO: 589531 - RNA, 19 nt, Artificial Sequence
  Synthetic
uaacucagccccaagucgg

SEQ ID NO: 589532 - RNA, 20 nt, Artificial Sequence
  Synthetic
cuaacucagccccaagucgg

SEQ ID NO: 589533 - RNA, 21 nt, Artificial Sequence
  Synthetic
ucuaacucagccccaagucgg

SEQ ID NO: 589534 - RNA, 22 nt, Artificial Sequence
  Synthetic
uucuaacucagccccaagucgg

SEQ ID NO: 589535 - RNA, 23 nt, Artificial Sequence
  Synthetic
guucuaacucagccccaagucgg

SEQ ID NO: 589536 - RNA, 24 nt, Artificial Sequence
  Synthetic
aguucuaacucagccccaagucgg

SEQ ID NO: 589537 - RNA, 18 nt, Artificial Sequence
  Synthetic
agaaaacaacuaugucgg

SEQ ID NO: 589538 - RNA, 19 nt, Artificial Sequence
  Synthetic
uagaaaacaacuaugucgg

SEQ ID NO: 589539 - RNA, 20 nt, Artificial Sequence
  Synthetic
cuagaaaacaacuaugucgg

SEQ ID NO: 589540 - RNA, 21 nt, Artificial Sequence
  Synthetic
ucuagaaaacaacuaugucgg

SEQ ID NO: 589541 - RNA, 22 nt, Artificial Sequence
  Synthetic
uucuagaaaacaacuaugucgg

SEQ ID NO: 589542 - RNA, 23 nt, Artificial Sequence
  Synthetic
uuucuagaaaacaacuaugucgg

SEQ ID NO: 589543 - RNA, 24 nt, Artificial Sequence
  Synthetic
cuuucuagaaaacaacuaugucgg

SEQ ID NO: 589544 - RNA, 18 nt, Artificial Sequence
  Synthetic
cuaagaaagugccuucgg

SEQ ID NO: 589545 - RNA, 19 nt, Artificial Sequence
  Synthetic
ucuaagaaagugccuucgg

SEQ ID NO: 589546 - RNA, 20 nt, Artificial Sequence
  Synthetic
aucuaagaaagugccuucgg

SEQ ID NO: 589547 - RNA, 21 nt, Artificial Sequence
  Synthetic
aaucuaagaaagugccuucgg

SEQ ID NO: 589548 - RNA, 22 nt, Artificial Sequence
  Synthetic
gaaucuaagaaagugccuucgg

SEQ ID NO: 589549 - RNA, 23 nt, Artificial Sequence
  Synthetic
agaaucuaagaaagugccuucgg

SEQ ID NO: 589550 - RNA, 24 nt, Artificial Sequence
  Synthetic
uagaaucuaagaaagugccuucgg

SEQ ID NO: 589551 - RNA, 18 nt, Artificial Sequence
  Synthetic
uccagcauuuugcuucgg

SEQ ID NO: 589552 - RNA, 19 nt, Artificial Sequence
  Synthetic
uuccagcauuuugcuucgg

SEQ ID NO: 589553 - RNA, 20 nt, Artificial Sequence
  Synthetic
uuuccagcauuuugcuucgg

SEQ ID NO: 589554 - RNA, 21 nt, Artificial Sequence
  Synthetic
auuuccagcauuuugcuucgg

SEQ ID NO: 589555 - RNA, 22 nt, Artificial Sequence
  Synthetic
gauuuccagcauuuugcuucgg

SEQ ID NO: 589556 - RNA, 23 nt, Artificial Sequence
  Synthetic
ggauuuccagcauuuugcuucgg

SEQ ID NO: 589557 - RNA, 24 nt, Artificial Sequence
  Synthetic
gggauuuccagcauuuugcuucgg

SEQ ID NO: 589558 - RNA, 18 nt, Artificial Sequence
  Synthetic
auaaaacaucaauuucgg

SEQ ID NO: 589559 - RNA, 19 nt, Artificial Sequence
  Synthetic
uauaaaacaucaauuucgg

SEQ ID NO: 589560 - RNA, 20 nt, Artificial Sequence
  Synthetic
auauaaaacaucaauuucgg

SEQ ID NO: 589561 - RNA, 21 nt, Artificial Sequence
  Synthetic
uauauaaaacaucaauuucgg

SEQ ID NO: 589562 - RNA, 22 nt, Artificial Sequence
  Synthetic
auauauaaaacaucaauuucgg

SEQ ID NO: 589563 - RNA, 23 nt, Artificial Sequence
  Synthetic
cauauauaaaacaucaauuucgg

SEQ ID NO: 589564 - RNA, 24 nt, Artificial Sequence
  Synthetic
ccauauauaaaacaucaauuucgg

SEQ ID NO: 589565 - RNA, 18 nt, Artificial Sequence
  Synthetic
augaagcauggaaaaggg

SEQ ID NO: 589566 - RNA, 19 nt, Artificial Sequence
  Synthetic
aaugaagcauggaaaaggg

SEQ ID NO: 589567 - RNA, 20 nt, Artificial Sequence
  Synthetic
aaaugaagcauggaaaaggg

SEQ ID NO: 589568 - RNA, 21 nt, Artificial Sequence
  Synthetic
aaaaugaagcauggaaaaggg

SEQ ID NO: 589569 - RNA, 22 nt, Artificial Sequence
  Synthetic
aaaaaugaagcauggaaaaggg

SEQ ID NO: 589570 - RNA, 23 nt, Artificial Sequence
  Synthetic
aaaaaaugaagcauggaaaaggg

SEQ ID NO: 589571 - RNA, 24 nt, Artificial Sequence
  Synthetic
aaaaaaaugaagcauggaaaaggg

SEQ ID NO: 589572 - RNA, 18 nt, Artificial Sequence
  Synthetic
gaagucccuuuaaaaggg

SEQ ID NO: 589573 - RNA, 19 nt, Artificial Sequence
  Synthetic
ugaagucccuuuaaaaggg

SEQ ID NO: 589574 - RNA, 20 nt, Artificial Sequence
  Synthetic
augaagucccuuuaaaaggg

SEQ ID NO: 589575 - RNA, 21 nt, Artificial Sequence
  Synthetic
caugaagucccuuuaaaaggg

SEQ ID NO: 589576 - RNA, 22 nt, Artificial Sequence
  Synthetic
ccaugaagucccuuuaaaaggg

SEQ ID NO: 589577 - RNA, 23 nt, Artificial Sequence
  Synthetic
uccaugaagucccuuuaaaaggg

SEQ ID NO: 589578 - RNA, 24 nt, Artificial Sequence
  Synthetic
uuccaugaagucccuuuaaaaggg

SEQ ID NO: 589579 - RNA, 18 nt, Artificial Sequence
  Synthetic
augguggaaggcaaaggg

SEQ ID NO: 589580 - RNA, 19 nt, Artificial Sequence
  Synthetic
caugguggaaggcaaaggg

SEQ ID NO: 589581 - RNA, 20 nt, Artificial Sequence
  Synthetic
ccaugguggaaggcaaaggg

SEQ ID NO: 589582 - RNA, 21 nt, Artificial Sequence
  Synthetic
accaugguggaaggcaaaggg

SEQ ID NO: 589583 - RNA, 22 nt, Artificial Sequence
  Synthetic
aaccaugguggaaggcaaaggg

SEQ ID NO: 589584 - RNA, 23 nt, Artificial Sequence
  Synthetic
caaccaugguggaaggcaaaggg

SEQ ID NO: 589585 - RNA, 24 nt, Artificial Sequence
  Synthetic
ccaaccaugguggaaggcaaaggg

SEQ ID NO: 589586 - RNA, 18 nt, Artificial Sequence
  Synthetic
accugcuuaggcaaaggg

SEQ ID NO: 589587 - RNA, 19 nt, Artificial Sequence
  Synthetic
aaccugcuuaggcaaaggg

SEQ ID NO: 589588 - RNA, 20 nt, Artificial Sequence
  Synthetic
uaaccugcuuaggcaaaggg

SEQ ID NO: 589589 - RNA, 21 nt, Artificial Sequence
  Synthetic
uuaaccugcuuaggcaaaggg

SEQ ID NO: 589590 - RNA, 22 nt, Artificial Sequence
  Synthetic
guuaaccugcuuaggcaaaggg

SEQ ID NO: 589591 - RNA, 23 nt, Artificial Sequence
  Synthetic
aguuaaccugcuuaggcaaaggg

SEQ ID NO: 589592 - RNA, 24 nt, Artificial Sequence
  Synthetic
aaguuaaccugcuuaggcaaaggg

SEQ ID NO: 589593 - RNA, 18 nt, Artificial Sequence
  Synthetic
uguggcaaccucaaaggg

SEQ ID NO: 589594 - RNA, 19 nt, Artificial Sequence
  Synthetic
cuguggcaaccucaaaggg

SEQ ID NO: 589595 - RNA, 20 nt, Artificial Sequence
  Synthetic
ccuguggcaaccucaaaggg

SEQ ID NO: 589596 - RNA, 21 nt, Artificial Sequence
  Synthetic
gccuguggcaaccucaaaggg

SEQ ID NO: 589597 - RNA, 22 nt, Artificial Sequence
  Synthetic
agccuguggcaaccucaaaggg

SEQ ID NO: 589598 - RNA, 23 nt, Artificial Sequence
  Synthetic
cagccuguggcaaccucaaaggg

SEQ ID NO: 589599 - RNA, 24 nt, Artificial Sequence
  Synthetic
ucagccuguggcaaccucaaaggg

SEQ ID NO: 589600 - RNA, 18 nt, Artificial Sequence
  Synthetic
caaaaaaaggggaaaggg

SEQ ID NO: 589601 - RNA, 19 nt, Artificial Sequence
  Synthetic
acaaaaaaaggggaaaggg

SEQ ID NO: 589602 - RNA, 20 nt, Artificial Sequence
  Synthetic
cacaaaaaaaggggaaaggg

SEQ ID NO: 589603 - RNA, 21 nt, Artificial Sequence
  Synthetic
acacaaaaaaaggggaaaggg

SEQ ID NO: 589604 - RNA, 22 nt, Artificial Sequence
  Synthetic
cacacaaaaaaaggggaaaggg

SEQ ID NO: 589605 - RNA, 23 nt, Artificial Sequence
  Synthetic
ucacacaaaaaaaggggaaaggg

SEQ ID NO: 589606 - RNA, 24 nt, Artificial Sequence
  Synthetic
gucacacaaaaaaaggggaaaggg

SEQ ID NO: 589607 - RNA, 18 nt, Artificial Sequence
  Synthetic
uacacugcugggaaaggg

SEQ ID NO: 589608 - RNA, 19 nt, Artificial Sequence
  Synthetic
guacacugcugggaaaggg

SEQ ID NO: 589609 - RNA, 20 nt, Artificial Sequence
  Synthetic
uguacacugcugggaaaggg

SEQ ID NO: 589610 - RNA, 21 nt, Artificial Sequence
  Synthetic
cuguacacugcugggaaaggg

SEQ ID NO: 589611 - RNA, 22 nt, Artificial Sequence
  Synthetic
ucuguacacugcugggaaaggg

SEQ ID NO: 589612 - RNA, 23 nt, Artificial Sequence
  Synthetic
aucuguacacugcugggaaaggg

SEQ ID NO: 589613 - RNA, 24 nt, Artificial Sequence
  Synthetic
uaucuguacacugcugggaaaggg

SEQ ID NO: 589614 - RNA, 18 nt, Artificial Sequence
  Synthetic
uuuguugaauggaaaggg

SEQ ID NO: 589615 - RNA, 19 nt, Artificial Sequence
  Synthetic
cuuuguugaauggaaaggg

SEQ ID NO: 589616 - RNA, 20 nt, Artificial Sequence
  Synthetic
ucuuuguugaauggaaaggg

SEQ ID NO: 589617 - RNA, 21 nt, Artificial Sequence
  Synthetic
uucuuuguugaauggaaaggg

SEQ ID NO: 589618 - RNA, 22 nt, Artificial Sequence
  Synthetic
uuucuuuguugaauggaaaggg

SEQ ID NO: 589619 - RNA, 23 nt, Artificial Sequence
  Synthetic
uuuucuuuguugaauggaaaggg

SEQ ID NO: 589620 - RNA, 24 nt, Artificial Sequence
  Synthetic
uuuuucuuuguugaauggaaaggg

SEQ ID NO: 589621 - RNA, 18 nt, Artificial Sequence
  Synthetic
gagguucucuggaaaggg

SEQ ID NO: 589622 - RNA, 19 nt, Artificial Sequence
  Synthetic
ggagguucucuggaaaggg

SEQ ID NO: 589623 - RNA, 20 nt, Artificial Sequence
  Synthetic
gggagguucucuggaaaggg

SEQ ID NO: 589624 - RNA, 21 nt, Artificial Sequence
  Synthetic
agggagguucucuggaaaggg

SEQ ID NO: 589625 - RNA, 22 nt, Artificial Sequence
  Synthetic
gagggagguucucuggaaaggg

SEQ ID NO: 589626 - RNA, 23 nt, Artificial Sequence
  Synthetic
ugagggagguucucuggaaaggg

SEQ ID NO: 589627 - RNA, 24 nt, Artificial Sequence
  Synthetic
cugagggagguucucuggaaaggg

SEQ ID NO: 589628 - RNA, 18 nt, Artificial Sequence
  Synthetic
aaacaaguggugaaaggg

SEQ ID NO: 589629 - RNA, 19 nt, Artificial Sequence
  Synthetic
gaaacaaguggugaaaggg

SEQ ID NO: 589630 - RNA, 20 nt, Artificial Sequence
  Synthetic
ugaaacaaguggugaaaggg

SEQ ID NO: 589631 - RNA, 21 nt, Artificial Sequence
  Synthetic
uugaaacaaguggugaaaggg

SEQ ID NO: 589632 - RNA, 22 nt, Artificial Sequence
  Synthetic
uuugaaacaaguggugaaaggg

SEQ ID NO: 589633 - RNA, 23 nt, Artificial Sequence
  Synthetic
guuugaaacaaguggugaaaggg

SEQ ID NO: 589634 - RNA, 24 nt, Artificial Sequence
  Synthetic
aguuugaaacaaguggugaaaggg

SEQ ID NO: 589635 - RNA, 18 nt, Artificial Sequence
  Synthetic
cagacuggaaauaaaggg

SEQ ID NO: 589636 - RNA, 19 nt, Artificial Sequence
  Synthetic
acagacuggaaauaaaggg

SEQ ID NO: 589637 - RNA, 20 nt, Artificial Sequence
  Synthetic
cacagacuggaaauaaaggg

SEQ ID NO: 589638 - RNA, 21 nt, Artificial Sequence
  Synthetic
acacagacuggaaauaaaggg

SEQ ID NO: 589639 - RNA, 22 nt, Artificial Sequence
  Synthetic
cacacagacuggaaauaaaggg

SEQ ID NO: 589640 - RNA, 23 nt, Artificial Sequence
  Synthetic
acacacagacuggaaauaaaggg

SEQ ID NO: 589641 - RNA, 24 nt, Artificial Sequence
  Synthetic
uacacacagacuggaaauaaaggg

SEQ ID NO: 589642 - RNA, 18 nt, Artificial Sequence
  Synthetic
guugaaauauauaaaggg

SEQ ID NO: 589643 - RNA, 19 nt, Artificial Sequence
  Synthetic
uguugaaauauauaaaggg

SEQ ID NO: 589644 - RNA, 20 nt, Artificial Sequence
  Synthetic
auguugaaauauauaaaggg

SEQ ID NO: 589645 - RNA, 21 nt, Artificial Sequence
  Synthetic
cauguugaaauauauaaaggg

SEQ ID NO: 589646 - RNA, 22 nt, Artificial Sequence
  Synthetic
ucauguugaaauauauaaaggg

SEQ ID NO: 589647 - RNA, 23 nt, Artificial Sequence
  Synthetic
cucauguugaaauauauaaaggg

SEQ ID NO: 589648 - RNA, 24 nt, Artificial Sequence
  Synthetic
acucauguugaaauauauaaaggg

SEQ ID NO: 589649 - RNA, 18 nt, Artificial Sequence
  Synthetic
uguuggccugcuaaaggg

SEQ ID NO: 589650 - RNA, 19 nt, Artificial Sequence
  Synthetic
auguuggccugcuaaaggg

SEQ ID NO: 589651 - RNA, 20 nt, Artificial Sequence
  Synthetic
uauguuggccugcuaaaggg

SEQ ID NO: 589652 - RNA, 21 nt, Artificial Sequence
  Synthetic
guauguuggccugcuaaaggg

SEQ ID NO: 589653 - RNA, 22 nt, Artificial Sequence
  Synthetic
aguauguuggccugcuaaaggg

SEQ ID NO: 589654 - RNA, 23 nt, Artificial Sequence
  Synthetic
gaguauguuggccugcuaaaggg

SEQ ID NO: 589655 - RNA, 24 nt, Artificial Sequence
  Synthetic
ugaguauguuggccugcuaaaggg

SEQ ID NO: 589656 - RNA, 18 nt, Artificial Sequence
  Synthetic
acggacugugcuaaaggg

SEQ ID NO: 589657 - RNA, 19 nt, Artificial Sequence
  Synthetic
uacggacugugcuaaaggg

SEQ ID NO: 589658 - RNA, 20 nt, Artificial Sequence
  Synthetic
guacggacugugcuaaaggg

SEQ ID NO: 589659 - RNA, 21 nt, Artificial Sequence
  Synthetic
aguacggacugugcuaaaggg

SEQ ID NO: 589660 - RNA, 22 nt, Artificial Sequence
  Synthetic
aaguacggacugugcuaaaggg

SEQ ID NO: 589661 - RNA, 23 nt, Artificial Sequence
  Synthetic
caaguacggacugugcuaaaggg

SEQ ID NO: 589662 - RNA, 24 nt, Artificial Sequence
  Synthetic
acaaguacggacugugcuaaaggg

SEQ ID NO: 589663 - RNA, 18 nt, Artificial Sequence
  Synthetic
uagacugaaaguaaaggg

SEQ ID NO: 589664 - RNA, 19 nt, Artificial Sequence
  Synthetic
auagacugaaaguaaaggg

SEQ ID NO: 589665 - RNA, 20 nt, Artificial Sequence
  Synthetic
cauagacugaaaguaaaggg

SEQ ID NO: 589666 - RNA, 21 nt, Artificial Sequence
  Synthetic
gcauagacugaaaguaaaggg

SEQ ID NO: 589667 - RNA, 22 nt, Artificial Sequence
  Synthetic
ugcauagacugaaaguaaaggg

SEQ ID NO: 589668 - RNA, 23 nt, Artificial Sequence
  Synthetic
augcauagacugaaaguaaaggg

SEQ ID NO: 589669 - RNA, 24 nt, Artificial Sequence
  Synthetic
caugcauagacugaaaguaaaggg

SEQ ID NO: 589670 - RNA, 18 nt, Artificial Sequence
  Synthetic
aucugcuaccuuaaaggg

SEQ ID NO: 589671 - RNA, 19 nt, Artificial Sequence
  Synthetic
aaucugcuaccuuaaaggg

SEQ ID NO: 589672 - RNA, 20 nt, Artificial Sequence
  Synthetic
gaaucugcuaccuuaaaggg

SEQ ID NO: 589673 - RNA, 21 nt, Artificial Sequence
  Synthetic
ggaaucugcuaccuuaaaggg

SEQ ID NO: 589674 - RNA, 22 nt, Artificial Sequence
  Synthetic
gggaaucugcuaccuuaaaggg

SEQ ID NO: 589675 - RNA, 23 nt, Artificial Sequence
  Synthetic
agggaaucugcuaccuuaaaggg

SEQ ID NO: 589676 - RNA, 24 nt, Artificial Sequence
  Synthetic
aagggaaucugcuaccuuaaaggg

SEQ ID NO: 589677 - RNA, 18 nt, Artificial Sequence
  Synthetic
ucagagucucuuaaaggg

SEQ ID NO: 589678 - RNA, 19 nt, Artificial Sequence
  Synthetic
aucagagucucuuaaaggg

SEQ ID NO: 589679 - RNA, 20 nt, Artificial Sequence
  Synthetic
uaucagagucucuuaaaggg

SEQ ID NO: 589680 - RNA, 21 nt, Artificial Sequence
  Synthetic
auaucagagucucuuaaaggg

SEQ ID NO: 589681 - RNA, 22 nt, Artificial Sequence
  Synthetic
uauaucagagucucuuaaaggg

SEQ ID NO: 589682 - RNA, 23 nt, Artificial Sequence
  Synthetic
uuauaucagagucucuuaaaggg

SEQ ID NO: 589683 - RNA, 24 nt, Artificial Sequence
  Synthetic
auuauaucagagucucuuaaaggg

SEQ ID NO: 589684 - RNA, 18 nt, Artificial Sequence
  Synthetic
gagggagggaaacaaggg

SEQ ID NO: 589685 - RNA, 19 nt, Artificial Sequence
  Synthetic
ggagggagggaaacaaggg

SEQ ID NO: 589686 - RNA, 20 nt, Artificial Sequence
  Synthetic
gggagggagggaaacaaggg

SEQ ID NO: 589687 - RNA, 21 nt, Artificial Sequence
  Synthetic
ggggagggagggaaacaaggg

SEQ ID NO: 589688 - RNA, 22 nt, Artificial Sequence
  Synthetic
uggggagggagggaaacaaggg

SEQ ID NO: 589689 - RNA, 23 nt, Artificial Sequence
  Synthetic
guggggagggagggaaacaaggg

SEQ ID NO: 589690 - RNA, 24 nt, Artificial Sequence
  Synthetic
aguggggagggagggaaacaaggg

SEQ ID NO: 589691 - RNA, 18 nt, Artificial Sequence
  Synthetic
cagugcagaagacaaggg

SEQ ID NO: 589692 - RNA, 19 nt, Artificial Sequence
  Synthetic
ccagugcagaagacaaggg

SEQ ID NO: 589693 - RNA, 20 nt, Artificial Sequence
  Synthetic
cccagugcagaagacaaggg

SEQ ID NO: 589694 - RNA, 21 nt, Artificial Sequence
  Synthetic
gcccagugcagaagacaaggg

SEQ ID NO: 589695 - RNA, 22 nt, Artificial Sequence
  Synthetic
agcccagugcagaagacaaggg

SEQ ID NO: 589696 - RNA, 23 nt, Artificial Sequence
  Synthetic
cagcccagugcagaagacaaggg

SEQ ID NO: 589697 - RNA, 24 nt, Artificial Sequence
  Synthetic
gcagcccagugcagaagacaaggg

SEQ ID NO: 589698 - RNA, 18 nt, Artificial Sequence
  Synthetic
agguguccuacccaaggg

SEQ ID NO: 589699 - RNA, 19 nt, Artificial Sequence
  Synthetic
gagguguccuacccaaggg

SEQ ID NO: 589700 - RNA, 20 nt, Artificial Sequence
  Synthetic
ggagguguccuacccaaggg

SEQ ID NO: 589701 - RNA, 21 nt, Artificial Sequence
  Synthetic
uggagguguccuacccaaggg

SEQ ID NO: 589702 - RNA, 22 nt, Artificial Sequence
  Synthetic
uuggagguguccuacccaaggg

SEQ ID NO: 589703 - RNA, 23 nt, Artificial Sequence
  Synthetic
auuggagguguccuacccaaggg

SEQ ID NO: 589704 - RNA, 24 nt, Artificial Sequence
  Synthetic
cauuggagguguccuacccaaggg

SEQ ID NO: 589705 - RNA, 18 nt, Artificial Sequence
  Synthetic
uacaucuaggcccaaggg

SEQ ID NO: 589706 - RNA, 19 nt, Artificial Sequence
  Synthetic
cuacaucuaggcccaaggg

SEQ ID NO: 589707 - RNA, 20 nt, Artificial Sequence
  Synthetic
acuacaucuaggcccaaggg

SEQ ID NO: 589708 - RNA, 21 nt, Artificial Sequence
  Synthetic
uacuacaucuaggcccaaggg

SEQ ID NO: 589709 - RNA, 22 nt, Artificial Sequence
  Synthetic
uuacuacaucuaggcccaaggg

SEQ ID NO: 589710 - RNA, 23 nt, Artificial Sequence
  Synthetic
guuacuacaucuaggcccaaggg

SEQ ID NO: 589711 - RNA, 24 nt, Artificial Sequence
  Synthetic
uguuacuacaucuaggcccaaggg

SEQ ID NO: 589712 - RNA, 18 nt, Artificial Sequence
  Synthetic
uuuacuguaucccaaggg

SEQ ID NO: 589713 - RNA, 19 nt, Artificial Sequence
  Synthetic
auuuacuguaucccaaggg

SEQ ID NO: 589714 - RNA, 20 nt, Artificial Sequence
  Synthetic
uauuuacuguaucccaaggg

SEQ ID NO: 589715 - RNA, 21 nt, Artificial Sequence
  Synthetic
auauuuacuguaucccaaggg

SEQ ID NO: 589716 - RNA, 22 nt, Artificial Sequence
  Synthetic
aauauuuacuguaucccaaggg

SEQ ID NO: 589717 - RNA, 23 nt, Artificial Sequence
  Synthetic
caauauuuacuguaucccaaggg

SEQ ID NO: 589718 - RNA, 24 nt, Artificial Sequence
  Synthetic
ucaauauuuacuguaucccaaggg

SEQ ID NO: 589719 - RNA, 18 nt, Artificial Sequence
  Synthetic
aauguugccuuccaaggg

SEQ ID NO: 589720 - RNA, 19 nt, Artificial Sequence
  Synthetic
aaauguugccuuccaaggg

SEQ ID NO: 589721 - RNA, 20 nt, Artificial Sequence
  Synthetic
caaauguugccuuccaaggg

SEQ ID NO: 589722 - RNA, 21 nt, Artificial Sequence
  Synthetic
acaaauguugccuuccaaggg

SEQ ID NO: 589723 - RNA, 22 nt, Artificial Sequence
  Synthetic
uacaaauguugccuuccaaggg

SEQ ID NO: 589724 - RNA, 23 nt, Artificial Sequence
  Synthetic
uuacaaauguugccuuccaaggg

SEQ ID NO: 589725 - RNA, 24 nt, Artificial Sequence
  Synthetic
auuacaaauguugccuuccaaggg

SEQ ID NO: 589726 - RNA, 18 nt, Artificial Sequence
  Synthetic
gcauccaaacagcaaggg

SEQ ID NO: 589727 - RNA, 19 nt, Artificial Sequence
  Synthetic
ggcauccaaacagcaaggg

SEQ ID NO: 589728 - RNA, 20 nt, Artificial Sequence
  Synthetic
uggcauccaaacagcaaggg

SEQ ID NO: 589729 - RNA, 21 nt, Artificial Sequence
  Synthetic
cuggcauccaaacagcaaggg

SEQ ID NO: 589730 - RNA, 22 nt, Artificial Sequence
  Synthetic
gcuggcauccaaacagcaaggg

SEQ ID NO: 589731 - RNA, 23 nt, Artificial Sequence
  Synthetic
ggcuggcauccaaacagcaaggg

SEQ ID NO: 589732 - RNA, 24 nt, Artificial Sequence
  Synthetic
uggcuggcauccaaacagcaaggg

SEQ ID NO: 589733 - RNA, 18 nt, Artificial Sequence
  Synthetic
gaagggaacaggcaaggg

SEQ ID NO: 589734 - RNA, 19 nt, Artificial Sequence
  Synthetic
ggaagggaacaggcaaggg

SEQ ID NO: 589735 - RNA, 20 nt, Artificial Sequence
  Synthetic
aggaagggaacaggcaaggg

SEQ ID NO: 589736 - RNA, 21 nt, Artificial Sequence
  Synthetic
gaggaagggaacaggcaaggg

SEQ ID NO: 589737 - RNA, 22 nt, Artificial Sequence
  Synthetic
ggaggaagggaacaggcaaggg

SEQ ID NO: 589738 - RNA, 23 nt, Artificial Sequence
  Synthetic
gggaggaagggaacaggcaaggg

SEQ ID NO: 589739 - RNA, 24 nt, Artificial Sequence
  Synthetic
agggaggaagggaacaggcaaggg

SEQ ID NO: 589740 - RNA, 18 nt, Artificial Sequence
  Synthetic
gcggguggggggcaaggg

SEQ ID NO: 589741 - RNA, 19 nt, Artificial Sequence
  Synthetic
ggcggguggggggcaaggg

SEQ ID NO: 589742 - RNA, 20 nt, Artificial Sequence
  Synthetic
uggcggguggggggcaaggg

SEQ ID NO: 589743 - RNA, 21 nt, Artificial Sequence
  Synthetic
uuggcggguggggggcaaggg

SEQ ID NO: 589744 - RNA, 22 nt, Artificial Sequence
  Synthetic
guuggcggguggggggcaaggg

SEQ ID NO: 589745 - RNA, 23 nt, Artificial Sequence
  Synthetic
uguuggcggguggggggcaaggg

SEQ ID NO: 589746 - RNA, 24 nt, Artificial Sequence
  Synthetic
cuguuggcggguggggggcaaggg

SEQ ID NO: 589747 - RNA, 18 nt, Artificial Sequence
  Synthetic
agagaucaaaaucaaggg

SEQ ID NO: 589748 - RNA, 19 nt, Artificial Sequence
  Synthetic
aagagaucaaaaucaaggg

SEQ ID NO: 589749 - RNA, 20 nt, Artificial Sequence
  Synthetic
aaagagaucaaaaucaaggg

SEQ ID NO: 589750 - RNA, 21 nt, Artificial Sequence
  Synthetic
aaaagagaucaaaaucaaggg

SEQ ID NO: 589751 - RNA, 22 nt, Artificial Sequence
  Synthetic
caaaagagaucaaaaucaaggg

SEQ ID NO: 589752 - RNA, 23 nt, Artificial Sequence
  Synthetic
acaaaagagaucaaaaucaaggg

SEQ ID NO: 589753 - RNA, 24 nt, Artificial Sequence
  Synthetic
uacaaaagagaucaaaaucaaggg

SEQ ID NO: 589754 - RNA, 18 nt, Artificial Sequence
  Synthetic
uaaccugggaaucaaggg

SEQ ID NO: 589755 - RNA, 19 nt, Artificial Sequence
  Synthetic
guaaccugggaaucaaggg

SEQ ID NO: 589756 - RNA, 20 nt, Artificial Sequence
  Synthetic
gguaaccugggaaucaaggg

SEQ ID NO: 589757 - RNA, 21 nt, Artificial Sequence
  Synthetic
ugguaaccugggaaucaaggg

SEQ ID NO: 589758 - RNA, 22 nt, Artificial Sequence
  Synthetic
gugguaaccugggaaucaaggg

SEQ ID NO: 589759 - RNA, 23 nt, Artificial Sequence
  Synthetic
agugguaaccugggaaucaaggg

SEQ ID NO: 589760 - RNA, 24 nt, Artificial Sequence
  Synthetic
cagugguaaccugggaaucaaggg

SEQ ID NO: 589761 - RNA, 18 nt, Artificial Sequence
  Synthetic
aggcaggguaaucaaggg

SEQ ID NO: 589762 - RNA, 19 nt, Artificial Sequence
  Synthetic
uaggcaggguaaucaaggg

SEQ ID NO: 589763 - RNA, 20 nt, Artificial Sequence
  Synthetic
auaggcaggguaaucaaggg

SEQ ID NO: 589764 - RNA, 21 nt, Artificial Sequence
  Synthetic
gauaggcaggguaaucaaggg

SEQ ID NO: 589765 - RNA, 22 nt, Artificial Sequence
  Synthetic
ggauaggcaggguaaucaaggg

SEQ ID NO: 589766 - RNA, 23 nt, Artificial Sequence
  Synthetic
gggauaggcaggguaaucaaggg

SEQ ID NO: 589767 - RNA, 24 nt, Artificial Sequence
  Synthetic
agggauaggcaggguaaucaaggg

SEQ ID NO: 589768 - RNA, 18 nt, Artificial Sequence
  Synthetic
aacacagagccucaaggg

SEQ ID NO: 589769 - RNA, 19 nt, Artificial Sequence
  Synthetic
gaacacagagccucaaggg

SEQ ID NO: 589770 - RNA, 20 nt, Artificial Sequence
  Synthetic
ugaacacagagccucaaggg

SEQ ID NO: 589771 - RNA, 21 nt, Artificial Sequence
  Synthetic
cugaacacagagccucaaggg

SEQ ID NO: 589772 - RNA, 22 nt, Artificial Sequence
  Synthetic
ccugaacacagagccucaaggg

SEQ ID NO: 589773 - RNA, 23 nt, Artificial Sequence
  Synthetic
cccugaacacagagccucaaggg

SEQ ID NO: 589774 - RNA, 24 nt, Artificial Sequence
  Synthetic
ccccugaacacagagccucaaggg

SEQ ID NO: 589775 - RNA, 18 nt, Artificial Sequence
  Synthetic
accggggccugucaaggg

SEQ ID NO: 589776 - RNA, 19 nt, Artificial Sequence
  Synthetic
caccggggccugucaaggg

SEQ ID NO: 589777 - RNA, 20 nt, Artificial Sequence
  Synthetic
acaccggggccugucaaggg

SEQ ID NO: 589778 - RNA, 21 nt, Artificial Sequence
  Synthetic
cacaccggggccugucaaggg

SEQ ID NO: 589779 - RNA, 22 nt, Artificial Sequence
  Synthetic
acacaccggggccugucaaggg

SEQ ID NO: 589780 - RNA, 23 nt, Artificial Sequence
  Synthetic
cacacaccggggccugucaaggg

SEQ ID NO: 589781 - RNA, 24 nt, Artificial Sequence
  Synthetic
ucacacaccggggccugucaaggg

SEQ ID NO: 589782 - RNA, 18 nt, Artificial Sequence
  Synthetic
gagaaaaacauucaaggg

SEQ ID NO: 589783 - RNA, 19 nt, Artificial Sequence
  Synthetic
ggagaaaaacauucaaggg

SEQ ID NO: 589784 - RNA, 20 nt, Artificial Sequence
  Synthetic
uggagaaaaacauucaaggg

SEQ ID NO: 589785 - RNA, 21 nt, Artificial Sequence
  Synthetic
auggagaaaaacauucaaggg

SEQ ID NO: 589786 - RNA, 22 nt, Artificial Sequence
  Synthetic
cauggagaaaaacauucaaggg

SEQ ID NO: 589787 - RNA, 23 nt, Artificial Sequence
  Synthetic
ccauggagaaaaacauucaaggg

SEQ ID NO: 589788 - RNA, 24 nt, Artificial Sequence
  Synthetic
cccauggagaaaaacauucaaggg

SEQ ID NO: 589789 - RNA, 18 nt, Artificial Sequence
  Synthetic
uucauacaaaaagaaggg

SEQ ID NO: 589790 - RNA, 19 nt, Artificial Sequence
  Synthetic
uuucauacaaaaagaaggg

SEQ ID NO: 589791 - RNA, 20 nt, Artificial Sequence
  Synthetic
guuucauacaaaaagaaggg

SEQ ID NO: 589792 - RNA, 21 nt, Artificial Sequence
  Synthetic
aguuucauacaaaaagaaggg

SEQ ID NO: 589793 - RNA, 22 nt, Artificial Sequence
  Synthetic
aaguuucauacaaaaagaaggg

SEQ ID NO: 589794 - RNA, 23 nt, Artificial Sequence
  Synthetic
uaaguuucauacaaaaagaaggg

SEQ ID NO: 589795 - RNA, 24 nt, Artificial Sequence
  Synthetic
auaaguuucauacaaaaagaaggg

SEQ ID NO: 589796 - RNA, 18 nt, Artificial Sequence
  Synthetic
ggaggaagaaaagaaggg

SEQ ID NO: 589797 - RNA, 19 nt, Artificial Sequence
  Synthetic
uggaggaagaaaagaaggg

SEQ ID NO: 589798 - RNA, 20 nt, Artificial Sequence
  Synthetic
auggaggaagaaaagaaggg

SEQ ID NO: 589799 - RNA, 21 nt, Artificial Sequence
  Synthetic
aauggaggaagaaaagaaggg

SEQ ID NO: 589800 - RNA, 22 nt, Artificial Sequence
  Synthetic
gaauggaggaagaaaagaaggg

SEQ ID NO: 589801 - RNA, 23 nt, Artificial Sequence
  Synthetic
ggaauggaggaagaaaagaaggg

SEQ ID NO: 589802 - RNA, 24 nt, Artificial Sequence
  Synthetic
aggaauggaggaagaaaagaaggg

SEQ ID NO: 589803 - RNA, 18 nt, Artificial Sequence
  Synthetic
aaaaagaaaagagaaggg

SEQ ID NO: 589804 - RNA, 19 nt, Artificial Sequence
  Synthetic
gaaaaagaaaagagaaggg

SEQ ID NO: 589805 - RNA, 20 nt, Artificial Sequence
  Synthetic
agaaaaagaaaagagaaggg

SEQ ID NO: 589806 - RNA, 21 nt, Artificial Sequence
  Synthetic
cagaaaaagaaaagagaaggg

SEQ ID NO: 589807 - RNA, 22 nt, Artificial Sequence
  Synthetic
gcagaaaaagaaaagagaaggg

SEQ ID NO: 589808 - RNA, 23 nt, Artificial Sequence
  Synthetic
ggcagaaaaagaaaagagaaggg

SEQ ID NO: 589809 - RNA, 24 nt, Artificial Sequence
  Synthetic
aggcagaaaaagaaaagagaaggg

SEQ ID NO: 589810 - RNA, 18 nt, Artificial Sequence
  Synthetic
cugggcagccuagaaggg

SEQ ID NO: 589811 - RNA, 19 nt, Artificial Sequence
  Synthetic
gcugggcagccuagaaggg

SEQ ID NO: 589812 - RNA, 20 nt, Artificial Sequence
  Synthetic
agcugggcagccuagaaggg

SEQ ID NO: 589813 - RNA, 21 nt, Artificial Sequence
  Synthetic
cagcugggcagccuagaaggg

SEQ ID NO: 589814 - RNA, 22 nt, Artificial Sequence
  Synthetic
ccagcugggcagccuagaaggg

SEQ ID NO: 589815 - RNA, 23 nt, Artificial Sequence
  Synthetic
uccagcugggcagccuagaaggg

SEQ ID NO: 589816 - RNA, 24 nt, Artificial Sequence
  Synthetic
cuccagcugggcagccuagaaggg

SEQ ID NO: 589817 - RNA, 18 nt, Artificial Sequence
  Synthetic
uuaaaaaaaaaggaaggg

SEQ ID NO: 589818 - RNA, 19 nt, Artificial Sequence
  Synthetic
auuaaaaaaaaaggaaggg

SEQ ID NO: 589819 - RNA, 20 nt, Artificial Sequence
  Synthetic
aauuaaaaaaaaaggaaggg

SEQ ID NO: 589820 - RNA, 21 nt, Artificial Sequence
  Synthetic
aaauuaaaaaaaaaggaaggg

SEQ ID NO: 589821 - RNA, 22 nt, Artificial Sequence
  Synthetic
gaaauuaaaaaaaaaggaaggg

SEQ ID NO: 589822 - RNA, 23 nt, Artificial Sequence
  Synthetic
agaaauuaaaaaaaaaggaaggg

SEQ ID NO: 589823 - RNA, 24 nt, Artificial Sequence
  Synthetic
cagaaauuaaaaaaaaaggaaggg

SEQ ID NO: 589824 - RNA, 18 nt, Artificial Sequence
  Synthetic
guagaaagaaaggaaggg

SEQ ID NO: 589825 - RNA, 19 nt, Artificial Sequence
  Synthetic
gguagaaagaaaggaaggg

SEQ ID NO: 589826 - RNA, 20 nt, Artificial Sequence
  Synthetic
agguagaaagaaaggaaggg

SEQ ID NO: 589827 - RNA, 21 nt, Artificial Sequence
  Synthetic
gagguagaaagaaaggaaggg

SEQ ID NO: 589828 - RNA, 22 nt, Artificial Sequence
  Synthetic
agagguagaaagaaaggaaggg

SEQ ID NO: 589829 - RNA, 23 nt, Artificial Sequence
  Synthetic
gagagguagaaagaaaggaaggg

SEQ ID NO: 589830 - RNA, 24 nt, Artificial Sequence
  Synthetic
agagagguagaaagaaaggaaggg

SEQ ID NO: 589831 - RNA, 18 nt, Artificial Sequence
  Synthetic
aauaugccacaggaaggg

SEQ ID NO: 589832 - RNA, 19 nt, Artificial Sequence
  Synthetic
uaauaugccacaggaaggg

SEQ ID NO: 589833 - RNA, 20 nt, Artificial Sequence
  Synthetic
uuaauaugccacaggaaggg

SEQ ID NO: 589834 - RNA, 21 nt, Artificial Sequence
  Synthetic
uuuaauaugccacaggaaggg

SEQ ID NO: 589835 - RNA, 22 nt, Artificial Sequence
  Synthetic
cuuuaauaugccacaggaaggg

SEQ ID NO: 589836 - RNA, 23 nt, Artificial Sequence
  Synthetic
ucuuuaauaugccacaggaaggg

SEQ ID NO: 589837 - RNA, 24 nt, Artificial Sequence
  Synthetic
cucuuuaauaugccacaggaaggg

SEQ ID NO: 589838 - RNA, 18 nt, Artificial Sequence
  Synthetic
guagggagagaggaaggg

SEQ ID NO: 589839 - RNA, 19 nt, Artificial Sequence
  Synthetic
aguagggagagaggaaggg

SEQ ID NO: 589840 - RNA, 20 nt, Artificial Sequence
  Synthetic
gaguagggagagaggaaggg

SEQ ID NO: 589841 - RNA, 21 nt, Artificial Sequence
  Synthetic
ggaguagggagagaggaaggg

SEQ ID NO: 589842 - RNA, 22 nt, Artificial Sequence
  Synthetic
gggaguagggagagaggaaggg

SEQ ID NO: 589843 - RNA, 23 nt, Artificial Sequence
  Synthetic
ggggaguagggagagaggaaggg

SEQ ID NO: 589844 - RNA, 24 nt, Artificial Sequence
  Synthetic
uggggaguagggagagaggaaggg

SEQ ID NO: 589845 - RNA, 18 nt, Artificial Sequence
  Synthetic
ucaagguuagaggaaggg

SEQ ID NO: 589846 - RNA, 19 nt, Artificial Sequence
  Synthetic
uucaagguuagaggaaggg

SEQ ID NO: 589847 - RNA, 20 nt, Artificial Sequence
  Synthetic
auucaagguuagaggaaggg

SEQ ID NO: 589848 - RNA, 21 nt, Artificial Sequence
  Synthetic
uauucaagguuagaggaaggg

SEQ ID NO: 589849 - RNA, 22 nt, Artificial Sequence
  Synthetic
uuauucaagguuagaggaaggg

SEQ ID NO: 589850 - RNA, 23 nt, Artificial Sequence
  Synthetic
auuauucaagguuagaggaaggg

SEQ ID NO: 589851 - RNA, 24 nt, Artificial Sequence
  Synthetic
aauuauucaagguuagaggaaggg

SEQ ID NO: 589852 - RNA, 18 nt, Artificial Sequence
  Synthetic
gggaagggaagggaaggg

SEQ ID NO: 589853 - RNA, 19 nt, Artificial Sequence
  Synthetic
agggaagggaagggaaggg

SEQ ID NO: 589854 - RNA, 20 nt, Artificial Sequence
  Synthetic
gagggaagggaagggaaggg

SEQ ID NO: 589855 - RNA, 21 nt, Artificial Sequence
  Synthetic
ggagggaagggaagggaaggg

SEQ ID NO: 589856 - RNA, 22 nt, Artificial Sequence
  Synthetic
gggagggaagggaagggaaggg

SEQ ID NO: 589857 - RNA, 23 nt, Artificial Sequence
  Synthetic
ggggagggaagggaagggaaggg

SEQ ID NO: 589858 - RNA, 24 nt, Artificial Sequence
  Synthetic
aggggagggaagggaagggaaggg

SEQ ID NO: 589859 - RNA, 21 nt, Artificial Sequence
  Synthetic
agaggggagggaagggaaggg

SEQ ID NO: 589860 - RNA, 22 nt, Artificial Sequence
  Synthetic
gagaggggagggaagggaaggg

SEQ ID NO: 589861 - RNA, 23 nt, Artificial Sequence
  Synthetic
agagaggggagggaagggaaggg

SEQ ID NO: 589862 - RNA, 24 nt, Artificial Sequence
  Synthetic
gagagaggggagggaagggaaggg

SEQ ID NO: 589863 - RNA, 23 nt, Artificial Sequence
  Synthetic
ggagaggggagggaagggaaggg

SEQ ID NO: 589864 - RNA, 24 nt, Artificial Sequence
  Synthetic
aggagaggggagggaagggaaggg

SEQ ID NO: 589865 - RNA, 18 nt, Artificial Sequence
  Synthetic
cuuuaaauaagggaaggg

SEQ ID NO: 589866 - RNA, 19 nt, Artificial Sequence
  Synthetic
ccuuuaaauaagggaaggg

SEQ ID NO: 589867 - RNA, 20 nt, Artificial Sequence
  Synthetic
uccuuuaaauaagggaaggg

SEQ ID NO: 589868 - RNA, 21 nt, Artificial Sequence
  Synthetic
guccuuuaaauaagggaaggg

SEQ ID NO: 589869 - RNA, 22 nt, Artificial Sequence
  Synthetic
uguccuuuaaauaagggaaggg

SEQ ID NO: 589870 - RNA, 23 nt, Artificial Sequence
  Synthetic
auguccuuuaaauaagggaaggg

SEQ ID NO: 589871 - RNA, 24 nt, Artificial Sequence
  Synthetic
cauguccuuuaaauaagggaaggg

SEQ ID NO: 589872 - RNA, 18 nt, Artificial Sequence
  Synthetic
agagaggggagggaaggg

SEQ ID NO: 589873 - RNA, 19 nt, Artificial Sequence
  Synthetic
gagagaggggagggaaggg

SEQ ID NO: 589874 - RNA, 20 nt, Artificial Sequence
  Synthetic
ugagagaggggagggaaggg

SEQ ID NO: 589875 - RNA, 21 nt, Artificial Sequence
  Synthetic
gugagagaggggagggaaggg

SEQ ID NO: 589876 - RNA, 22 nt, Artificial Sequence
  Synthetic
ugugagagaggggagggaaggg

SEQ ID NO: 589877 - RNA, 23 nt, Artificial Sequence
  Synthetic
gugugagagaggggagggaaggg

SEQ ID NO: 589878 - RNA, 24 nt, Artificial Sequence
  Synthetic
ugugugagagaggggagggaaggg

SEQ ID NO: 589879 - RNA, 18 nt, Artificial Sequence
  Synthetic
ggagaggggagggaaggg

SEQ ID NO: 589880 - RNA, 19 nt, Artificial Sequence
  Synthetic
aggagaggggagggaaggg

SEQ ID NO: 589881 - RNA, 20 nt, Artificial Sequence
  Synthetic
aaggagaggggagggaaggg

SEQ ID NO: 589882 - RNA, 21 nt, Artificial Sequence
  Synthetic
gaaggagaggggagggaaggg

SEQ ID NO: 589883 - RNA, 22 nt, Artificial Sequence
  Synthetic
ggaaggagaggggagggaaggg

SEQ ID NO: 589884 - RNA, 23 nt, Artificial Sequence
  Synthetic
gggaaggagaggggagggaaggg

SEQ ID NO: 589885 - RNA, 24 nt, Artificial Sequence
  Synthetic
agggaaggagaggggagggaaggg

SEQ ID NO: 589886 - RNA, 18 nt, Artificial Sequence
  Synthetic
uaaagguagggggaaggg

SEQ ID NO: 589887 - RNA, 19 nt, Artificial Sequence
  Synthetic
auaaagguagggggaaggg

SEQ ID NO: 589888 - RNA, 20 nt, Artificial Sequence
  Synthetic
aauaaagguagggggaaggg

SEQ ID NO: 589889 - RNA, 21 nt, Artificial Sequence
  Synthetic
aaauaaagguagggggaaggg

SEQ ID NO: 589890 - RNA, 22 nt, Artificial Sequence
  Synthetic
aaaauaaagguagggggaaggg

SEQ ID NO: 589891 - RNA, 23 nt, Artificial Sequence
  Synthetic
aaaaauaaagguagggggaaggg

SEQ ID NO: 589892 - RNA, 24 nt, Artificial Sequence
  Synthetic
caaaaauaaagguagggggaaggg

SEQ ID NO: 589893 - RNA, 18 nt, Artificial Sequence
  Synthetic
ugucaucuaugggaaggg

SEQ ID NO: 589894 - RNA, 19 nt, Artificial Sequence
  Synthetic
augucaucuaugggaaggg

SEQ ID NO: 589895 - RNA, 20 nt, Artificial Sequence
  Synthetic
gaugucaucuaugggaaggg

SEQ ID NO: 589896 - RNA, 21 nt, Artificial Sequence
  Synthetic
ugaugucaucuaugggaaggg

SEQ ID NO: 589897 - RNA, 22 nt, Artificial Sequence
  Synthetic
augaugucaucuaugggaaggg

SEQ ID NO: 589898 - RNA, 23 nt, Artificial Sequence
  Synthetic
aaugaugucaucuaugggaaggg

SEQ ID NO: 589899 - RNA, 24 nt, Artificial Sequence
  Synthetic
caaugaugucaucuaugggaaggg

SEQ ID NO: 589900 - RNA, 18 nt, Artificial Sequence
  Synthetic
accugaugcugggaaggg

SEQ ID NO: 589901 - RNA, 19 nt, Artificial Sequence
  Synthetic
uaccugaugcugggaaggg

SEQ ID NO: 589902 - RNA, 20 nt, Artificial Sequence
  Synthetic
uuaccugaugcugggaaggg

SEQ ID NO: 589903 - RNA, 21 nt, Artificial Sequence
  Synthetic
guuaccugaugcugggaaggg

SEQ ID NO: 589904 - RNA, 22 nt, Artificial Sequence
  Synthetic
gguuaccugaugcugggaaggg

SEQ ID NO: 589905 - RNA, 23 nt, Artificial Sequence
  Synthetic
ugguuaccugaugcugggaaggg

SEQ ID NO: 589906 - RNA, 24 nt, Artificial Sequence
  Synthetic
gugguuaccugaugcugggaaggg

SEQ ID NO: 589907 - RNA, 18 nt, Artificial Sequence
  Synthetic
gagguaaauauggaaggg

SEQ ID NO: 589908 - RNA, 19 nt, Artificial Sequence
  Synthetic
ggagguaaauauggaaggg

SEQ ID NO: 589909 - RNA, 20 nt, Artificial Sequence
  Synthetic
aggagguaaauauggaaggg

SEQ ID NO: 589910 - RNA, 21 nt, Artificial Sequence
  Synthetic
aaggagguaaauauggaaggg

SEQ ID NO: 589911 - RNA, 22 nt, Artificial Sequence
  Synthetic
gaaggagguaaauauggaaggg

SEQ ID NO: 589912 - RNA, 23 nt, Artificial Sequence
  Synthetic
ggaaggagguaaauauggaaggg

SEQ ID NO: 589913 - RNA, 24 nt, Artificial Sequence
  Synthetic
uggaaggagguaaauauggaaggg

SEQ ID NO: 589914 - RNA, 18 nt, Artificial Sequence
  Synthetic
ggaaaacacuuggaaggg

SEQ ID NO: 589915 - RNA, 19 nt, Artificial Sequence
  Synthetic
uggaaaacacuuggaaggg

SEQ ID NO: 589916 - RNA, 20 nt, Artificial Sequence
  Synthetic
auggaaaacacuuggaaggg

SEQ ID NO: 589917 - RNA, 21 nt, Artificial Sequence
  Synthetic
uauggaaaacacuuggaaggg

SEQ ID NO: 589918 - RNA, 22 nt, Artificial Sequence
  Synthetic
guauggaaaacacuuggaaggg

SEQ ID NO: 589919 - RNA, 23 nt, Artificial Sequence
  Synthetic
aguauggaaaacacuuggaaggg

SEQ ID NO: 589920 - RNA, 24 nt, Artificial Sequence
  Synthetic
uaguauggaaaacacuuggaaggg

SEQ ID NO: 589921 - RNA, 18 nt, Artificial Sequence
  Synthetic
uagguuugggaugaaggg

SEQ ID NO: 589922 - RNA, 19 nt, Artificial Sequence
  Synthetic
auagguuugggaugaaggg

SEQ ID NO: 589923 - RNA, 20 nt, Artificial Sequence
  Synthetic
aauagguuugggaugaaggg

SEQ ID NO: 589924 - RNA, 21 nt, Artificial Sequence
  Synthetic
caauagguuugggaugaaggg

SEQ ID NO: 589925 - RNA, 22 nt, Artificial Sequence
  Synthetic
ucaauagguuugggaugaaggg

SEQ ID NO: 589926 - RNA, 23 nt, Artificial Sequence
  Synthetic
uucaauagguuugggaugaaggg

SEQ ID NO: 589927 - RNA, 24 nt, Artificial Sequence
  Synthetic
auucaauagguuugggaugaaggg

SEQ ID NO: 589928 - RNA, 18 nt, Artificial Sequence
  Synthetic
uaaccuuuggaugaaggg

SEQ ID NO: 589929 - RNA, 19 nt, Artificial Sequence
  Synthetic
cuaaccuuuggaugaaggg

SEQ ID NO: 589930 - RNA, 20 nt, Artificial Sequence
  Synthetic
ucuaaccuuuggaugaaggg

SEQ ID NO: 589931 - RNA, 21 nt, Artificial Sequence
  Synthetic
cucuaaccuuuggaugaaggg

SEQ ID NO: 589932 - RNA, 22 nt, Artificial Sequence
  Synthetic
acucuaaccuuuggaugaaggg

SEQ ID NO: 589933 - RNA, 23 nt, Artificial Sequence
  Synthetic
cacucuaaccuuuggaugaaggg

SEQ ID NO: 589934 - RNA, 24 nt, Artificial Sequence
  Synthetic
ccacucuaaccuuuggaugaaggg

SEQ ID NO: 589935 - RNA, 18 nt, Artificial Sequence
  Synthetic
caagaaucuacugaaggg

SEQ ID NO: 589936 - RNA, 19 nt, Artificial Sequence
  Synthetic
gcaagaaucuacugaaggg

SEQ ID NO: 589937 - RNA, 20 nt, Artificial Sequence
  Synthetic
agcaagaaucuacugaaggg

SEQ ID NO: 589938 - RNA, 21 nt, Artificial Sequence
  Synthetic
aagcaagaaucuacugaaggg

SEQ ID NO: 589939 - RNA, 22 nt, Artificial Sequence
  Synthetic
caagcaagaaucuacugaaggg

SEQ ID NO: 589940 - RNA, 23 nt, Artificial Sequence
  Synthetic
acaagcaagaaucuacugaaggg

SEQ ID NO: 589941 - RNA, 24 nt, Artificial Sequence
  Synthetic
uacaagcaagaaucuacugaaggg

SEQ ID NO: 589942 - RNA, 18 nt, Artificial Sequence
  Synthetic
agccaugaaagugaaggg

SEQ ID NO: 589943 - RNA, 19 nt, Artificial Sequence
  Synthetic
uagccaugaaagugaaggg

SEQ ID NO: 589944 - RNA, 20 nt, Artificial Sequence
  Synthetic
uuagccaugaaagugaaggg

SEQ ID NO: 589945 - RNA, 21 nt, Artificial Sequence
  Synthetic
auuagccaugaaagugaaggg

SEQ ID NO: 589946 - RNA, 22 nt, Artificial Sequence
  Synthetic
uauuagccaugaaagugaaggg

SEQ ID NO: 589947 - RNA, 23 nt, Artificial Sequence
  Synthetic
auauuagccaugaaagugaaggg

SEQ ID NO: 589948 - RNA, 24 nt, Artificial Sequence
  Synthetic
uauauuagccaugaaagugaaggg

SEQ ID NO: 589949 - RNA, 18 nt, Artificial Sequence
  Synthetic
ugacucaucagugaaggg

SEQ ID NO: 589950 - RNA, 19 nt, Artificial Sequence
  Synthetic
gugacucaucagugaaggg

SEQ ID NO: 589951 - RNA, 20 nt, Artificial Sequence
  Synthetic
agugacucaucagugaaggg

SEQ ID NO: 589952 - RNA, 21 nt, Artificial Sequence
  Synthetic
gagugacucaucagugaaggg

SEQ ID NO: 589953 - RNA, 22 nt, Artificial Sequence
  Synthetic
agagugacucaucagugaaggg

SEQ ID NO: 589954 - RNA, 23 nt, Artificial Sequence
  Synthetic
aagagugacucaucagugaaggg

SEQ ID NO: 589955 - RNA, 24 nt, Artificial Sequence
  Synthetic
gaagagugacucaucagugaaggg

SEQ ID NO: 589956 - RNA, 18 nt, Artificial Sequence
  Synthetic
uaggagcugguugaaggg

SEQ ID NO: 589957 - RNA, 19 nt, Artificial Sequence
  Synthetic
cuaggagcugguugaaggg

SEQ ID NO: 589958 - RNA, 20 nt, Artificial Sequence
  Synthetic
acuaggagcugguugaaggg

SEQ ID NO: 589959 - RNA, 21 nt, Artificial Sequence
  Synthetic
aacuaggagcugguugaaggg

SEQ ID NO: 589960 - RNA, 22 nt, Artificial Sequence
  Synthetic
caacuaggagcugguugaaggg

SEQ ID NO: 589961 - RNA, 23 nt, Artificial Sequence
  Synthetic
ucaacuaggagcugguugaaggg

SEQ ID NO: 589962 - RNA, 24 nt, Artificial Sequence
  Synthetic
cucaacuaggagcugguugaaggg

SEQ ID NO: 589963 - RNA, 18 nt, Artificial Sequence
  Synthetic
uucccuuucuuauaaggg

SEQ ID NO: 589964 - RNA, 19 nt, Artificial Sequence
  Synthetic
cuucccuuucuuauaaggg

SEQ ID NO: 589965 - RNA, 20 nt, Artificial Sequence
  Synthetic
ucuucccuuucuuauaaggg

SEQ ID NO: 589966 - RNA, 21 nt, Artificial Sequence
  Synthetic
cucuucccuuucuuauaaggg

SEQ ID NO: 589967 - RNA, 22 nt, Artificial Sequence
  Synthetic
acucuucccuuucuuauaaggg

SEQ ID NO: 589968 - RNA, 23 nt, Artificial Sequence
  Synthetic
uacucuucccuuucuuauaaggg

SEQ ID NO: 589969 - RNA, 24 nt, Artificial Sequence
  Synthetic
uuacucuucccuuucuuauaaggg

SEQ ID NO: 589970 - RNA, 18 nt, Artificial Sequence
  Synthetic
cuaaaugcucccuaaggg

SEQ ID NO: 589971 - RNA, 19 nt, Artificial Sequence
  Synthetic
acuaaaugcucccuaaggg

SEQ ID NO: 589972 - RNA, 20 nt, Artificial Sequence
  Synthetic
cacuaaaugcucccuaaggg

SEQ ID NO: 589973 - RNA, 21 nt, Artificial Sequence
  Synthetic
acacuaaaugcucccuaaggg

SEQ ID NO: 589974 - RNA, 22 nt, Artificial Sequence
  Synthetic
cacacuaaaugcucccuaaggg

SEQ ID NO: 589975 - RNA, 23 nt, Artificial Sequence
  Synthetic
ccacacuaaaugcucccuaaggg

SEQ ID NO: 589976 - RNA, 24 nt, Artificial Sequence
  Synthetic
accacacuaaaugcucccuaaggg

SEQ ID NO: 589977 - RNA, 18 nt, Artificial Sequence
  Synthetic
ucugggagcuccuaaggg

SEQ ID NO: 589978 - RNA, 19 nt, Artificial Sequence
  Synthetic
cucugggagcuccuaaggg

SEQ ID NO: 589979 - RNA, 20 nt, Artificial Sequence
  Synthetic
acucugggagcuccuaaggg

SEQ ID NO: 589980 - RNA, 21 nt, Artificial Sequence
  Synthetic
uacucugggagcuccuaaggg

SEQ ID NO: 589981 - RNA, 22 nt, Artificial Sequence
  Synthetic
cuacucugggagcuccuaaggg

SEQ ID NO: 589982 - RNA, 23 nt, Artificial Sequence
  Synthetic
gcuacucugggagcuccuaaggg

SEQ ID NO: 589983 - RNA, 24 nt, Artificial Sequence
  Synthetic
ugcuacucugggagcuccuaaggg

SEQ ID NO: 589984 - RNA, 18 nt, Artificial Sequence
  Synthetic
aguauucugagcuaaggg

SEQ ID NO: 589985 - RNA, 19 nt, Artificial Sequence
  Synthetic
caguauucugagcuaaggg

SEQ ID NO: 589986 - RNA, 20 nt, Artificial Sequence
  Synthetic
acaguauucugagcuaaggg

SEQ ID NO: 589987 - RNA, 21 nt, Artificial Sequence
  Synthetic
uacaguauucugagcuaaggg

SEQ ID NO: 589988 - RNA, 22 nt, Artificial Sequence
  Synthetic
uuacaguauucugagcuaaggg

SEQ ID NO: 589989 - RNA, 23 nt, Artificial Sequence
  Synthetic
auuacaguauucugagcuaaggg

SEQ ID NO: 589990 - RNA, 24 nt, Artificial Sequence
  Synthetic
cauuacaguauucugagcuaaggg

SEQ ID NO: 589991 - RNA, 18 nt, Artificial Sequence
  Synthetic
aauggugguugcuaaggg

SEQ ID NO: 589992 - RNA, 19 nt, Artificial Sequence
  Synthetic
caauggugguugcuaaggg

SEQ ID NO: 589993 - RNA, 20 nt, Artificial Sequence
  Synthetic
acaauggugguugcuaaggg

SEQ ID NO: 589994 - RNA, 21 nt, Artificial Sequence
  Synthetic
uacaauggugguugcuaaggg

SEQ ID NO: 589995 - RNA, 22 nt, Artificial Sequence
  Synthetic
guacaauggugguugcuaaggg

SEQ ID NO: 589996 - RNA, 23 nt, Artificial Sequence
  Synthetic
aguacaauggugguugcuaaggg

SEQ ID NO: 589997 - RNA, 24 nt, Artificial Sequence
  Synthetic
aaguacaauggugguugcuaaggg

SEQ ID NO: 589998 - RNA, 18 nt, Artificial Sequence
  Synthetic
gaagccaggcaguaaggg

SEQ ID NO: 589999 - RNA, 19 nt, Artificial Sequence
  Synthetic
ggaagccaggcaguaaggg

SEQ ID NO: 590000 - RNA, 20 nt, Artificial Sequence
  Synthetic
aggaagccaggcaguaaggg

SEQ ID NO: 590001 - RNA, 21 nt, Artificial Sequence
  Synthetic
caggaagccaggcaguaaggg

SEQ ID NO: 590002 - RNA, 22 nt, Artificial Sequence
  Synthetic
ucaggaagccaggcaguaaggg

SEQ ID NO: 590003 - RNA, 23 nt, Artificial Sequence
  Synthetic
gucaggaagccaggcaguaaggg

SEQ ID NO: 590004 - RNA, 24 nt, Artificial Sequence
  Synthetic
agucaggaagccaggcaguaaggg

SEQ ID NO: 590005 - RNA, 18 nt, Artificial Sequence
  Synthetic
aaauguuaauauuaaggg

SEQ ID NO: 590006 - RNA, 19 nt, Artificial Sequence
  Synthetic
uaaauguuaauauuaaggg

SEQ ID NO: 590007 - RNA, 20 nt, Artificial Sequence
  Synthetic
cuaaauguuaauauuaaggg

SEQ ID NO: 590008 - RNA, 21 nt, Artificial Sequence
  Synthetic
ccuaaauguuaauauuaaggg

SEQ ID NO: 590009 - RNA, 22 nt, Artificial Sequence
  Synthetic
accuaaauguuaauauuaaggg

SEQ ID NO: 590010 - RNA, 23 nt, Artificial Sequence
  Synthetic
caccuaaauguuaauauuaaggg

SEQ ID NO: 590011 - RNA, 24 nt, Artificial Sequence
  Synthetic
acaccuaaauguuaauauuaaggg

SEQ ID NO: 590012 - RNA, 18 nt, Artificial Sequence
  Synthetic
uugugacaguauuaaggg

SEQ ID NO: 590013 - RNA, 19 nt, Artificial Sequence
  Synthetic
auugugacaguauuaaggg

SEQ ID NO: 590014 - RNA, 20 nt, Artificial Sequence
  Synthetic
cauugugacaguauuaaggg

SEQ ID NO: 590015 - RNA, 21 nt, Artificial Sequence
  Synthetic
ccauugugacaguauuaaggg

SEQ ID NO: 590016 - RNA, 22 nt, Artificial Sequence
  Synthetic
gccauugugacaguauuaaggg

SEQ ID NO: 590017 - RNA, 23 nt, Artificial Sequence
  Synthetic
ugccauugugacaguauuaaggg

SEQ ID NO: 590018 - RNA, 24 nt, Artificial Sequence
  Synthetic
uugccauugugacaguauuaaggg

SEQ ID NO: 590019 - RNA, 18 nt, Artificial Sequence
  Synthetic
cauacaucuaguuaaggg

SEQ ID NO: 590020 - RNA, 19 nt, Artificial Sequence
  Synthetic
acauacaucuaguuaaggg

SEQ ID NO: 590021 - RNA, 20 nt, Artificial Sequence
  Synthetic
aacauacaucuaguuaaggg

SEQ ID NO: 590022 - RNA, 21 nt, Artificial Sequence
  Synthetic
aaacauacaucuaguuaaggg

SEQ ID NO: 590023 - RNA, 22 nt, Artificial Sequence
  Synthetic
aaaacauacaucuaguuaaggg

SEQ ID NO: 590024 - RNA, 23 nt, Artificial Sequence
  Synthetic
uaaaacauacaucuaguuaaggg

SEQ ID NO: 590025 - RNA, 24 nt, Artificial Sequence
  Synthetic
guaaaacauacaucuaguuaaggg

SEQ ID NO: 590026 - RNA, 18 nt, Artificial Sequence
  Synthetic
aaaacaucacguuaaggg

SEQ ID NO: 590027 - RNA, 19 nt, Artificial Sequence
  Synthetic
aaaaacaucacguuaaggg

SEQ ID NO: 590028 - RNA, 20 nt, Artificial Sequence
  Synthetic
aaaaaacaucacguuaaggg

SEQ ID NO: 590029 - RNA, 21 nt, Artificial Sequence
  Synthetic
gaaaaaacaucacguuaaggg

SEQ ID NO: 590030 - RNA, 22 nt, Artificial Sequence
  Synthetic
ugaaaaaacaucacguuaaggg

SEQ ID NO: 590031 - RNA, 23 nt, Artificial Sequence
  Synthetic
uugaaaaaacaucacguuaaggg

SEQ ID NO: 590032 - RNA, 24 nt, Artificial Sequence
  Synthetic
guugaaaaaacaucacguuaaggg

SEQ ID NO: 590033 - RNA, 18 nt, Artificial Sequence
  Synthetic
aaccauugacuuuaaggg

SEQ ID NO: 590034 - RNA, 19 nt, Artificial Sequence
  Synthetic
gaaccauugacuuuaaggg

SEQ ID NO: 590035 - RNA, 20 nt, Artificial Sequence
  Synthetic
agaaccauugacuuuaaggg

SEQ ID NO: 590036 - RNA, 21 nt, Artificial Sequence
  Synthetic
cagaaccauugacuuuaaggg

SEQ ID NO: 590037 - RNA, 22 nt, Artificial Sequence
  Synthetic
ucagaaccauugacuuuaaggg

SEQ ID NO: 590038 - RNA, 23 nt, Artificial Sequence
  Synthetic
gucagaaccauugacuuuaaggg

SEQ ID NO: 590039 - RNA, 24 nt, Artificial Sequence
  Synthetic
ugucagaaccauugacuuuaaggg

SEQ ID NO: 590040 - RNA, 18 nt, Artificial Sequence
  Synthetic
aaauuaugaaaaacaggg

SEQ ID NO: 590041 - RNA, 19 nt, Artificial Sequence
  Synthetic
gaaauuaugaaaaacaggg

SEQ ID NO: 590042 - RNA, 20 nt, Artificial Sequence
  Synthetic
ggaaauuaugaaaaacaggg

SEQ ID NO: 590043 - RNA, 21 nt, Artificial Sequence
  Synthetic
uggaaauuaugaaaaacaggg

SEQ ID NO: 590044 - RNA, 22 nt, Artificial Sequence
  Synthetic
guggaaauuaugaaaaacaggg

SEQ ID NO: 590045 - RNA, 23 nt, Artificial Sequence
  Synthetic
aguggaaauuaugaaaaacaggg

SEQ ID NO: 590046 - RNA, 24 nt, Artificial Sequence
  Synthetic
uaguggaaauuaugaaaaacaggg

SEQ ID NO: 590047 - RNA, 18 nt, Artificial Sequence
  Synthetic
gaaaauagggaaacaggg

SEQ ID NO: 590048 - RNA, 19 nt, Artificial Sequence
  Synthetic
agaaaauagggaaacaggg

SEQ ID NO: 590049 - RNA, 20 nt, Artificial Sequence
  Synthetic
gagaaaauagggaaacaggg

SEQ ID NO: 590050 - RNA, 21 nt, Artificial Sequence
  Synthetic
agagaaaauagggaaacaggg

SEQ ID NO: 590051 - RNA, 22 nt, Artificial Sequence
  Synthetic
gagagaaaauagggaaacaggg

SEQ ID NO: 590052 - RNA, 23 nt, Artificial Sequence
  Synthetic
ugagagaaaauagggaaacaggg

SEQ ID NO: 590053 - RNA, 24 nt, Artificial Sequence
  Synthetic
uugagagaaaauagggaaacaggg

SEQ ID NO: 590054 - RNA, 18 nt, Artificial Sequence
  Synthetic
uagggggaugaaacaggg

SEQ ID NO: 590055 - RNA, 19 nt, Artificial Sequence
  Synthetic
guagggggaugaaacaggg

SEQ ID NO: 590056 - RNA, 20 nt, Artificial Sequence
  Synthetic
gguagggggaugaaacaggg

SEQ ID NO: 590057 - RNA, 21 nt, Artificial Sequence
  Synthetic
ggguagggggaugaaacaggg

SEQ ID NO: 590058 - RNA, 22 nt, Artificial Sequence
  Synthetic
aggguagggggaugaaacaggg

SEQ ID NO: 590059 - RNA, 23 nt, Artificial Sequence
  Synthetic
uaggguagggggaugaaacaggg

SEQ ID NO: 590060 - RNA, 24 nt, Artificial Sequence
  Synthetic
guaggguagggggaugaaacaggg

SEQ ID NO: 590061 - RNA, 18 nt, Artificial Sequence
  Synthetic
agugagaaaagaacaggg

SEQ ID NO: 590062 - RNA, 19 nt, Artificial Sequence
  Synthetic
aagugagaaaagaacaggg

SEQ ID NO: 590063 - RNA, 20 nt, Artificial Sequence
  Synthetic
gaagugagaaaagaacaggg

SEQ ID NO: 590064 - RNA, 21 nt, Artificial Sequence
  Synthetic
ugaagugagaaaagaacaggg

SEQ ID NO: 590065 - RNA, 22 nt, Artificial Sequence
  Synthetic
gugaagugagaaaagaacaggg

SEQ ID NO: 590066 - RNA, 23 nt, Artificial Sequence
  Synthetic
ugugaagugagaaaagaacaggg

SEQ ID NO: 590067 - RNA, 24 nt, Artificial Sequence
  Synthetic
augugaagugagaaaagaacaggg

SEQ ID NO: 590068 - RNA, 18 nt, Artificial Sequence
  Synthetic
guagccauccuaacaggg

SEQ ID NO: 590069 - RNA, 19 nt, Artificial Sequence
  Synthetic
aguagccauccuaacaggg

SEQ ID NO: 590070 - RNA, 20 nt, Artificial Sequence
  Synthetic
uaguagccauccuaacaggg

SEQ ID NO: 590071 - RNA, 21 nt, Artificial Sequence
  Synthetic
auaguagccauccuaacaggg

SEQ ID NO: 590072 - RNA, 22 nt, Artificial Sequence
  Synthetic
uauaguagccauccuaacaggg

SEQ ID NO: 590073 - RNA, 23 nt, Artificial Sequence
  Synthetic
uuauaguagccauccuaacaggg

SEQ ID NO: 590074 - RNA, 24 nt, Artificial Sequence
  Synthetic
uuuauaguagccauccuaacaggg

SEQ ID NO: 590075 - RNA, 18 nt, Artificial Sequence
  Synthetic
gaacacauagacacaggg

SEQ ID NO: 590076 - RNA, 19 nt, Artificial Sequence
  Synthetic
agaacacauagacacaggg

SEQ ID NO: 590077 - RNA, 20 nt, Artificial Sequence
  Synthetic
gagaacacauagacacaggg

SEQ ID NO: 590078 - RNA, 21 nt, Artificial Sequence
  Synthetic
ugagaacacauagacacaggg

SEQ ID NO: 590079 - RNA, 22 nt, Artificial Sequence
  Synthetic
augagaacacauagacacaggg

SEQ ID NO: 590080 - RNA, 23 nt, Artificial Sequence
  Synthetic
gaugagaacacauagacacaggg

SEQ ID NO: 590081 - RNA, 24 nt, Artificial Sequence
  Synthetic
cgaugagaacacauagacacaggg

SEQ ID NO: 590082 - RNA, 18 nt, Artificial Sequence
  Synthetic
gggcuggaggacacaggg

SEQ ID NO: 590083 - RNA, 19 nt, Artificial Sequence
  Synthetic
agggcuggaggacacaggg

SEQ ID NO: 590084 - RNA, 20 nt, Artificial Sequence
  Synthetic
uagggcuggaggacacaggg

SEQ ID NO: 590085 - RNA, 21 nt, Artificial Sequence
  Synthetic
guagggcuggaggacacaggg

SEQ ID NO: 590086 - RNA, 22 nt, Artificial Sequence
  Synthetic
gguagggcuggaggacacaggg

SEQ ID NO: 590087 - RNA, 23 nt, Artificial Sequence
  Synthetic
ggguagggcuggaggacacaggg

SEQ ID NO: 590088 - RNA, 24 nt, Artificial Sequence
  Synthetic
aggguagggcuggaggacacaggg

SEQ ID NO: 590089 - RNA, 18 nt, Artificial Sequence
  Synthetic
gaacacauggacacaggg

SEQ ID NO: 590090 - RNA, 19 nt, Artificial Sequence
  Synthetic
agaacacauggacacaggg

SEQ ID NO: 590091 - RNA, 20 nt, Artificial Sequence
  Synthetic
gagaacacauggacacaggg

SEQ ID NO: 590092 - RNA, 21 nt, Artificial Sequence
  Synthetic
ugagaacacauggacacaggg

SEQ ID NO: 590093 - RNA, 22 nt, Artificial Sequence
  Synthetic
augagaacacauggacacaggg

SEQ ID NO: 590094 - RNA, 23 nt, Artificial Sequence
  Synthetic
aaugagaacacauggacacaggg

SEQ ID NO: 590095 - RNA, 24 nt, Artificial Sequence
  Synthetic
caaugagaacacauggacacaggg

SEQ ID NO: 590096 - RNA, 22 nt, Artificial Sequence
  Synthetic
gugagaacacauggacacaggg

SEQ ID NO: 590097 - RNA, 23 nt, Artificial Sequence
  Synthetic
agugagaacacauggacacaggg

SEQ ID NO: 590098 - RNA, 24 nt, Artificial Sequence
  Synthetic
cagugagaacacauggacacaggg

SEQ ID NO: 590099 - RNA, 18 nt, Artificial Sequence
  Synthetic
aaacauauggacacaggg

SEQ ID NO: 590100 - RNA, 19 nt, Artificial Sequence
  Synthetic
aaaacauauggacacaggg

SEQ ID NO: 590101 - RNA, 20 nt, Artificial Sequence
  Synthetic
gaaaacauauggacacaggg

SEQ ID NO: 590102 - RNA, 21 nt, Artificial Sequence
  Synthetic
ugaaaacauauggacacaggg

SEQ ID NO: 590103 - RNA, 22 nt, Artificial Sequence
  Synthetic
augaaaacauauggacacaggg

SEQ ID NO: 590104 - RNA, 23 nt, Artificial Sequence
  Synthetic
aaugaaaacauauggacacaggg

SEQ ID NO: 590105 - RNA, 24 nt, Artificial Sequence
  Synthetic
caaugaaaacauauggacacaggg

SEQ ID NO: 590106 - RNA, 18 nt, Artificial Sequence
  Synthetic
cccugcaaacccacaggg

SEQ ID NO: 590107 - RNA, 19 nt, Artificial Sequence
  Synthetic
acccugcaaacccacaggg

SEQ ID NO: 590108 - RNA, 20 nt, Artificial Sequence
  Synthetic
uacccugcaaacccacaggg

SEQ ID NO: 590109 - RNA, 21 nt, Artificial Sequence
  Synthetic
cuacccugcaaacccacaggg

SEQ ID NO: 590110 - RNA, 22 nt, Artificial Sequence
  Synthetic
ucuacccugcaaacccacaggg

SEQ ID NO: 590111 - RNA, 23 nt, Artificial Sequence
  Synthetic
cucuacccugcaaacccacaggg

SEQ ID NO: 590112 - RNA, 24 nt, Artificial Sequence
  Synthetic
gcucuacccugcaaacccacaggg

SEQ ID NO: 590113 - RNA, 18 nt, Artificial Sequence
  Synthetic
acauuguauuagacaggg

SEQ ID NO: 590114 - RNA, 19 nt, Artificial Sequence
  Synthetic
cacauuguauuagacaggg

SEQ ID NO: 590115 - RNA, 20 nt, Artificial Sequence
  Synthetic
ccacauuguauuagacaggg

SEQ ID NO: 590116 - RNA, 21 nt, Artificial Sequence
  Synthetic
cccacauuguauuagacaggg

SEQ ID NO: 590117 - RNA, 22 nt, Artificial Sequence
  Synthetic
acccacauuguauuagacaggg

SEQ ID NO: 590118 - RNA, 23 nt, Artificial Sequence
  Synthetic
aacccacauuguauuagacaggg

SEQ ID NO: 590119 - RNA, 24 nt, Artificial Sequence
  Synthetic
aaacccacauuguauuagacaggg

SEQ ID NO: 590120 - RNA, 18 nt, Artificial Sequence
  Synthetic
acaguagagucuacaggg

SEQ ID NO: 590121 - RNA, 19 nt, Artificial Sequence
  Synthetic
gacaguagagucuacaggg

SEQ ID NO: 590122 - RNA, 20 nt, Artificial Sequence
  Synthetic
ugacaguagagucuacaggg

SEQ ID NO: 590123 - RNA, 21 nt, Artificial Sequence
  Synthetic
uugacaguagagucuacaggg

SEQ ID NO: 590124 - RNA, 22 nt, Artificial Sequence
  Synthetic
auugacaguagagucuacaggg

SEQ ID NO: 590125 - RNA, 23 nt, Artificial Sequence
  Synthetic
uauugacaguagagucuacaggg

SEQ ID NO: 590126 - RNA, 24 nt, Artificial Sequence
  Synthetic
auauugacaguagagucuacaggg

SEQ ID NO: 590127 - RNA, 18 nt, Artificial Sequence
  Synthetic
uggucuguggccccaggg

SEQ ID NO: 590128 - RNA, 19 nt, Artificial Sequence
  Synthetic
cuggucuguggccccaggg

SEQ ID NO: 590129 - RNA, 20 nt, Artificial Sequence
  Synthetic
acuggucuguggccccaggg

SEQ ID NO: 590130 - RNA, 21 nt, Artificial Sequence
  Synthetic
uacuggucuguggccccaggg

SEQ ID NO: 590131 - RNA, 22 nt, Artificial Sequence
  Synthetic
guacuggucuguggccccaggg

SEQ ID NO: 590132 - RNA, 23 nt, Artificial Sequence
  Synthetic
uguacuggucuguggccccaggg

SEQ ID NO: 590133 - RNA, 24 nt, Artificial Sequence
  Synthetic
cuguacuggucuguggccccaggg

SEQ ID NO: 590134 - RNA, 18 nt, Artificial Sequence
  Synthetic
cagccuggcaucccaggg

SEQ ID NO: 590135 - RNA, 19 nt, Artificial Sequence
  Synthetic
ccagccuggcaucccaggg

SEQ ID NO: 590136 - RNA, 20 nt, Artificial Sequence
  Synthetic
accagccuggcaucccaggg

SEQ ID NO: 590137 - RNA, 21 nt, Artificial Sequence
  Synthetic
aaccagccuggcaucccaggg

SEQ ID NO: 590138 - RNA, 22 nt, Artificial Sequence
  Synthetic
gaaccagccuggcaucccaggg

SEQ ID NO: 590139 - RNA, 23 nt, Artificial Sequence
  Synthetic
ugaaccagccuggcaucccaggg

SEQ ID NO: 590140 - RNA, 24 nt, Artificial Sequence
  Synthetic
uugaaccagccuggcaucccaggg

SEQ ID NO: 590141 - RNA, 18 nt, Artificial Sequence
  Synthetic
ucuaacgugcagccaggg

SEQ ID NO: 590142 - RNA, 19 nt, Artificial Sequence
  Synthetic
uucuaacgugcagccaggg

SEQ ID NO: 590143 - RNA, 20 nt, Artificial Sequence
  Synthetic
auucuaacgugcagccaggg

SEQ ID NO: 590144 - RNA, 21 nt, Artificial Sequence
  Synthetic
gauucuaacgugcagccaggg

SEQ ID NO: 590145 - RNA, 22 nt, Artificial Sequence
  Synthetic
ugauucuaacgugcagccaggg

SEQ ID NO: 590146 - RNA, 23 nt, Artificial Sequence
  Synthetic
gugauucuaacgugcagccaggg

SEQ ID NO: 590147 - RNA, 24 nt, Artificial Sequence
  Synthetic
agugauucuaacgugcagccaggg

SEQ ID NO: 590148 - RNA, 18 nt, Artificial Sequence
  Synthetic
uaaaucagggagccaggg

SEQ ID NO: 590149 - RNA, 19 nt, Artificial Sequence
  Synthetic
auaaaucagggagccaggg

SEQ ID NO: 590150 - RNA, 20 nt, Artificial Sequence
  Synthetic
aauaaaucagggagccaggg

SEQ ID NO: 590151 - RNA, 21 nt, Artificial Sequence
  Synthetic
aaauaaaucagggagccaggg

SEQ ID NO: 590152 - RNA, 22 nt, Artificial Sequence
  Synthetic
uaaauaaaucagggagccaggg

SEQ ID NO: 590153 - RNA, 23 nt, Artificial Sequence
  Synthetic
uuaaauaaaucagggagccaggg

SEQ ID NO: 590154 - RNA, 24 nt, Artificial Sequence
  Synthetic
auuaaauaaaucagggagccaggg

SEQ ID NO: 590155 - RNA, 18 nt, Artificial Sequence
  Synthetic
auuugggaggggccaggg

SEQ ID NO: 590156 - RNA, 19 nt, Artificial Sequence
  Synthetic
cauuugggaggggccaggg

SEQ ID NO: 590157 - RNA, 20 nt, Artificial Sequence
  Synthetic
ccauuugggaggggccaggg

SEQ ID NO: 590158 - RNA, 21 nt, Artificial Sequence
  Synthetic
gccauuugggaggggccaggg

SEQ ID NO: 590159 - RNA, 22 nt, Artificial Sequence
  Synthetic
ugccauuugggaggggccaggg

SEQ ID NO: 590160 - RNA, 23 nt, Artificial Sequence
  Synthetic
gugccauuugggaggggccaggg

SEQ ID NO: 590161 - RNA, 24 nt, Artificial Sequence
  Synthetic
cgugccauuugggaggggccaggg

SEQ ID NO: 590162 - RNA, 18 nt, Artificial Sequence
  Synthetic
aguagcagcuggccaggg

SEQ ID NO: 590163 - RNA, 19 nt, Artificial Sequence
  Synthetic
gaguagcagcuggccaggg

SEQ ID NO: 590164 - RNA, 20 nt, Artificial Sequence
  Synthetic
ugaguagcagcuggccaggg

SEQ ID NO: 590165 - RNA, 21 nt, Artificial Sequence
  Synthetic
augaguagcagcuggccaggg

SEQ ID NO: 590166 - RNA, 22 nt, Artificial Sequence
  Synthetic
gaugaguagcagcuggccaggg

SEQ ID NO: 590167 - RNA, 23 nt, Artificial Sequence
  Synthetic
ggaugaguagcagcuggccaggg

SEQ ID NO: 590168 - RNA, 24 nt, Artificial Sequence
  Synthetic
gggaugaguagcagcuggccaggg

SEQ ID NO: 590169 - RNA, 18 nt, Artificial Sequence
  Synthetic
cuauuaggguggccaggg

SEQ ID NO: 590170 - RNA, 19 nt, Artificial Sequence
  Synthetic
acuauuaggguggccaggg

SEQ ID NO: 590171 - RNA, 20 nt, Artificial Sequence
  Synthetic
gacuauuaggguggccaggg

SEQ ID NO: 590172 - RNA, 21 nt, Artificial Sequence
  Synthetic
agacuauuaggguggccaggg

SEQ ID NO: 590173 - RNA, 22 nt, Artificial Sequence
  Synthetic
cagacuauuaggguggccaggg

SEQ ID NO: 590174 - RNA, 23 nt, Artificial Sequence
  Synthetic
ucagacuauuaggguggccaggg

SEQ ID NO: 590175 - RNA, 24 nt, Artificial Sequence
  Synthetic
aucagacuauuaggguggccaggg

SEQ ID NO: 590176 - RNA, 18 nt, Artificial Sequence
  Synthetic
caauauuagcugccaggg

SEQ ID NO: 590177 - RNA, 19 nt, Artificial Sequence
  Synthetic
acaauauuagcugccaggg

SEQ ID NO: 590178 - RNA, 20 nt, Artificial Sequence
  Synthetic
uacaauauuagcugccaggg

SEQ ID NO: 590179 - RNA, 21 nt, Artificial Sequence
  Synthetic
auacaauauuagcugccaggg

SEQ ID NO: 590180 - RNA, 22 nt, Artificial Sequence
  Synthetic
aauacaauauuagcugccaggg

SEQ ID NO: 590181 - RNA, 23 nt, Artificial Sequence
  Synthetic
aaauacaauauuagcugccaggg

SEQ ID NO: 590182 - RNA, 24 nt, Artificial Sequence
  Synthetic
aaaauacaauauuagcugccaggg

SEQ ID NO: 590183 - RNA, 18 nt, Artificial Sequence
  Synthetic
caaccuaugccuccaggg

SEQ ID NO: 590184 - RNA, 19 nt, Artificial Sequence
  Synthetic
acaaccuaugccuccaggg

SEQ ID NO: 590185 - RNA, 20 nt, Artificial Sequence
  Synthetic
cacaaccuaugccuccaggg

SEQ ID NO: 590186 - RNA, 21 nt, Artificial Sequence
  Synthetic
ccacaaccuaugccuccaggg

SEQ ID NO: 590187 - RNA, 22 nt, Artificial Sequence
  Synthetic
accacaaccuaugccuccaggg

SEQ ID NO: 590188 - RNA, 23 nt, Artificial Sequence
  Synthetic
caccacaaccuaugccuccaggg

SEQ ID NO: 590189 - RNA, 24 nt, Artificial Sequence
  Synthetic
ucaccacaaccuaugccuccaggg

SEQ ID NO: 590190 - RNA, 18 nt, Artificial Sequence
  Synthetic
agcaaaacuaaagcaggg

SEQ ID NO: 590191 - RNA, 19 nt, Artificial Sequence
  Synthetic
gagcaaaacuaaagcaggg

SEQ ID NO: 590192 - RNA, 20 nt, Artificial Sequence
  Synthetic
ggagcaaaacuaaagcaggg

SEQ ID NO: 590193 - RNA, 21 nt, Artificial Sequence
  Synthetic
aggagcaaaacuaaagcaggg

SEQ ID NO: 590194 - RNA, 22 nt, Artificial Sequence
  Synthetic
gaggagcaaaacuaaagcaggg

SEQ ID NO: 590195 - RNA, 23 nt, Artificial Sequence
  Synthetic
ugaggagcaaaacuaaagcaggg

SEQ ID NO: 590196 - RNA, 24 nt, Artificial Sequence
  Synthetic
cugaggagcaaaacuaaagcaggg

SEQ ID NO: 590197 - RNA, 18 nt, Artificial Sequence
  Synthetic
gguggauguccagcaggg

SEQ ID NO: 590198 - RNA, 19 nt, Artificial Sequence
  Synthetic
ugguggauguccagcaggg

SEQ ID NO: 590199 - RNA, 20 nt, Artificial Sequence
  Synthetic
gugguggauguccagcaggg

SEQ ID NO: 590200 - RNA, 21 nt, Artificial Sequence
  Synthetic
agugguggauguccagcaggg

SEQ ID NO: 590201 - RNA, 22 nt, Artificial Sequence
  Synthetic
uagugguggauguccagcaggg

SEQ ID NO: 590202 - RNA, 23 nt, Artificial Sequence
  Synthetic
uuagugguggauguccagcaggg

SEQ ID NO: 590203 - RNA, 24 nt, Artificial Sequence
  Synthetic
cuuagugguggauguccagcaggg

SEQ ID NO: 590204 - RNA, 18 nt, Artificial Sequence
  Synthetic
uucuacauggcagcaggg

SEQ ID NO: 590205 - RNA, 19 nt, Artificial Sequence
  Synthetic
auucuacauggcagcaggg

SEQ ID NO: 590206 - RNA, 20 nt, Artificial Sequence
  Synthetic
cauucuacauggcagcaggg

SEQ ID NO: 590207 - RNA, 21 nt, Artificial Sequence
  Synthetic
acauucuacauggcagcaggg

SEQ ID NO: 590208 - RNA, 22 nt, Artificial Sequence
  Synthetic
cacauucuacauggcagcaggg

SEQ ID NO: 590209 - RNA, 23 nt, Artificial Sequence
  Synthetic
acacauucuacauggcagcaggg

SEQ ID NO: 590210 - RNA, 24 nt, Artificial Sequence
  Synthetic
aacacauucuacauggcagcaggg

SEQ ID NO: 590211 - RNA, 18 nt, Artificial Sequence
  Synthetic
gccacaaggucagcaggg

SEQ ID NO: 590212 - RNA, 19 nt, Artificial Sequence
  Synthetic
agccacaaggucagcaggg

SEQ ID NO: 590213 - RNA, 20 nt, Artificial Sequence
  Synthetic
gagccacaaggucagcaggg

SEQ ID NO: 590214 - RNA, 21 nt, Artificial Sequence
  Synthetic
agagccacaaggucagcaggg

SEQ ID NO: 590215 - RNA, 22 nt, Artificial Sequence
  Synthetic
cagagccacaaggucagcaggg

SEQ ID NO: 590216 - RNA, 23 nt, Artificial Sequence
  Synthetic
ucagagccacaaggucagcaggg

SEQ ID NO: 590217 - RNA, 24 nt, Artificial Sequence
  Synthetic
cucagagccacaaggucagcaggg

SEQ ID NO: 590218 - RNA, 18 nt, Artificial Sequence
  Synthetic
agucagauaugagcaggg

SEQ ID NO: 590219 - RNA, 19 nt, Artificial Sequence
  Synthetic
uagucagauaugagcaggg

SEQ ID NO: 590220 - RNA, 20 nt, Artificial Sequence
  Synthetic
cuagucagauaugagcaggg

SEQ ID NO: 590221 - RNA, 21 nt, Artificial Sequence
  Synthetic
gcuagucagauaugagcaggg

SEQ ID NO: 590222 - RNA, 22 nt, Artificial Sequence
  Synthetic
agcuagucagauaugagcaggg

SEQ ID NO: 590223 - RNA, 23 nt, Artificial Sequence
  Synthetic
uagcuagucagauaugagcaggg

SEQ ID NO: 590224 - RNA, 24 nt, Artificial Sequence
  Synthetic
auagcuagucagauaugagcaggg

SEQ ID NO: 590225 - RNA, 18 nt, Artificial Sequence
  Synthetic
gaaagaaacugagcaggg

SEQ ID NO: 590226 - RNA, 19 nt, Artificial Sequence
  Synthetic
ggaaagaaacugagcaggg

SEQ ID NO: 590227 - RNA, 20 nt, Artificial Sequence
  Synthetic
aggaaagaaacugagcaggg

SEQ ID NO: 590228 - RNA, 21 nt, Artificial Sequence
  Synthetic
gaggaaagaaacugagcaggg

SEQ ID NO: 590229 - RNA, 22 nt, Artificial Sequence
  Synthetic
agaggaaagaaacugagcaggg

SEQ ID NO: 590230 - RNA, 23 nt, Artificial Sequence
  Synthetic
aagaggaaagaaacugagcaggg

SEQ ID NO: 590231 - RNA, 24 nt, Artificial Sequence
  Synthetic
aaagaggaaagaaacugagcaggg

SEQ ID NO: 590232 - RNA, 18 nt, Artificial Sequence
  Synthetic
gagaguggcuuagcaggg

SEQ ID NO: 590233 - RNA, 19 nt, Artificial Sequence
  Synthetic
ugagaguggcuuagcaggg

SEQ ID NO: 590234 - RNA, 20 nt, Artificial Sequence
  Synthetic
cugagaguggcuuagcaggg

SEQ ID NO: 590235 - RNA, 21 nt, Artificial Sequence
  Synthetic
ucugagaguggcuuagcaggg

SEQ ID NO: 590236 - RNA, 22 nt, Artificial Sequence
  Synthetic
aucugagaguggcuuagcaggg

SEQ ID NO: 590237 - RNA, 23 nt, Artificial Sequence
  Synthetic
aaucugagaguggcuuagcaggg

SEQ ID NO: 590238 - RNA, 24 nt, Artificial Sequence
  Synthetic
gaaucugagaguggcuuagcaggg

SEQ ID NO: 590239 - RNA, 18 nt, Artificial Sequence
  Synthetic
cagggaguacaggcaggg

SEQ ID NO: 590240 - RNA, 19 nt, Artificial Sequence
  Synthetic
acagggaguacaggcaggg

SEQ ID NO: 590241 - RNA, 20 nt, Artificial Sequence
  Synthetic
cacagggaguacaggcaggg

SEQ ID NO: 590242 - RNA, 21 nt, Artificial Sequence
  Synthetic
ccacagggaguacaggcaggg

SEQ ID NO: 590243 - RNA, 22 nt, Artificial Sequence
  Synthetic
gccacagggaguacaggcaggg

SEQ ID NO: 590244 - RNA, 23 nt, Artificial Sequence
  Synthetic
agccacagggaguacaggcaggg

SEQ ID NO: 590245 - RNA, 24 nt, Artificial Sequence
  Synthetic
uagccacagggaguacaggcaggg

SEQ ID NO: 590246 - RNA, 18 nt, Artificial Sequence
  Synthetic
gagagggugguggcaggg

SEQ ID NO: 590247 - RNA, 19 nt, Artificial Sequence
  Synthetic
ggagagggugguggcaggg

SEQ ID NO: 590248 - RNA, 20 nt, Artificial Sequence
  Synthetic
gggagagggugguggcaggg

SEQ ID NO: 590249 - RNA, 21 nt, Artificial Sequence
  Synthetic
ugggagagggugguggcaggg

SEQ ID NO: 590250 - RNA, 22 nt, Artificial Sequence
  Synthetic
uugggagagggugguggcaggg

SEQ ID NO: 590251 - RNA, 23 nt, Artificial Sequence
  Synthetic
uuugggagagggugguggcaggg

SEQ ID NO: 590252 - RNA, 24 nt, Artificial Sequence
  Synthetic
cuuugggagagggugguggcaggg

SEQ ID NO: 590253 - RNA, 18 nt, Artificial Sequence
  Synthetic
uauuguaaguuggcaggg

SEQ ID NO: 590254 - RNA, 19 nt, Artificial Sequence
  Synthetic
auauuguaaguuggcaggg

SEQ ID NO: 590255 - RNA, 20 nt, Artificial Sequence
  Synthetic
uauauuguaaguuggcaggg

SEQ ID NO: 590256 - RNA, 21 nt, Artificial Sequence
  Synthetic
cuauauuguaaguuggcaggg

SEQ ID NO: 590257 - RNA, 22 nt, Artificial Sequence
  Synthetic
ucuauauuguaaguuggcaggg

SEQ ID NO: 590258 - RNA, 23 nt, Artificial Sequence
  Synthetic
uucuauauuguaaguuggcaggg

SEQ ID NO: 590259 - RNA, 24 nt, Artificial Sequence
  Synthetic
cuucuauauuguaaguuggcaggg

SEQ ID NO: 590260 - RNA, 18 nt, Artificial Sequence
  Synthetic
aaguuaagcaaugcaggg

SEQ ID NO: 590261 - RNA, 19 nt, Artificial Sequence
  Synthetic
caaguuaagcaaugcaggg

SEQ ID NO: 590262 - RNA, 20 nt, Artificial Sequence
  Synthetic
ucaaguuaagcaaugcaggg

SEQ ID NO: 590263 - RNA, 21 nt, Artificial Sequence
  Synthetic
aucaaguuaagcaaugcaggg

SEQ ID NO: 590264 - RNA, 22 nt, Artificial Sequence
  Synthetic
aaucaaguuaagcaaugcaggg

SEQ ID NO: 590265 - RNA, 23 nt, Artificial Sequence
  Synthetic
caaucaaguuaagcaaugcaggg

SEQ ID NO: 590266 - RNA, 24 nt, Artificial Sequence
  Synthetic
ucaaucaaguuaagcaaugcaggg

SEQ ID NO: 590267 - RNA, 18 nt, Artificial Sequence
  Synthetic
ccuauauuugacucaggg

SEQ ID NO: 590268 - RNA, 19 nt, Artificial Sequence
  Synthetic
accuauauuugacucaggg

SEQ ID NO: 590269 - RNA, 20 nt, Artificial Sequence
  Synthetic
aaccuauauuugacucaggg

SEQ ID NO: 590270 - RNA, 21 nt, Artificial Sequence
  Synthetic
caaccuauauuugacucaggg

SEQ ID NO: 590271 - RNA, 22 nt, Artificial Sequence
  Synthetic
ccaaccuauauuugacucaggg

SEQ ID NO: 590272 - RNA, 23 nt, Artificial Sequence
  Synthetic
accaaccuauauuugacucaggg

SEQ ID NO: 590273 - RNA, 24 nt, Artificial Sequence
  Synthetic
caccaaccuauauuugacucaggg

SEQ ID NO: 590274 - RNA, 18 nt, Artificial Sequence
  Synthetic
gaaagaagaaagucaggg

SEQ ID NO: 590275 - RNA, 19 nt, Artificial Sequence
  Synthetic
ggaaagaagaaagucaggg

SEQ ID NO: 590276 - RNA, 20 nt, Artificial Sequence
  Synthetic
aggaaagaagaaagucaggg

SEQ ID NO: 590277 - RNA, 21 nt, Artificial Sequence
  Synthetic
aaggaaagaagaaagucaggg

SEQ ID NO: 590278 - RNA, 22 nt, Artificial Sequence
  Synthetic
gaaggaaagaagaaagucaggg

SEQ ID NO: 590279 - RNA, 23 nt, Artificial Sequence
  Synthetic
agaaggaaagaagaaagucaggg

SEQ ID NO: 590280 - RNA, 24 nt, Artificial Sequence
  Synthetic
aagaaggaaagaagaaagucaggg

SEQ ID NO: 590281 - RNA, 18 nt, Artificial Sequence
  Synthetic
ggauuaacggggucaggg

SEQ ID NO: 590282 - RNA, 19 nt, Artificial Sequence
  Synthetic
gggauuaacggggucaggg

SEQ ID NO: 590283 - RNA, 20 nt, Artificial Sequence
  Synthetic
ugggauuaacggggucaggg

SEQ ID NO: 590284 - RNA, 21 nt, Artificial Sequence
  Synthetic
cugggauuaacggggucaggg

SEQ ID NO: 590285 - RNA, 22 nt, Artificial Sequence
  Synthetic
acugggauuaacggggucaggg

SEQ ID NO: 590286 - RNA, 23 nt, Artificial Sequence
  Synthetic
aacugggauuaacggggucaggg

SEQ ID NO: 590287 - RNA, 24 nt, Artificial Sequence
  Synthetic
aaacugggauuaacggggucaggg

SEQ ID NO: 590288 - RNA, 18 nt, Artificial Sequence
  Synthetic
acauccagugugucaggg

SEQ ID NO: 590289 - RNA, 19 nt, Artificial Sequence
  Synthetic
aacauccagugugucaggg

SEQ ID NO: 590290 - RNA, 20 nt, Artificial Sequence
  Synthetic
aaacauccagugugucaggg

SEQ ID NO: 590291 - RNA, 21 nt, Artificial Sequence
  Synthetic
aaaacauccagugugucaggg

SEQ ID NO: 590292 - RNA, 22 nt, Artificial Sequence
  Synthetic
aaaaacauccagugugucaggg

SEQ ID NO: 590293 - RNA, 23 nt, Artificial Sequence
  Synthetic
caaaaacauccagugugucaggg

SEQ ID NO: 590294 - RNA, 24 nt, Artificial Sequence
  Synthetic
ucaaaaacauccagugugucaggg

SEQ ID NO: 590295 - RNA, 18 nt, Artificial Sequence
  Synthetic
agaauauggauuucaggg

SEQ ID NO: 590296 - RNA, 19 nt, Artificial Sequence
  Synthetic
cagaauauggauuucaggg

SEQ ID NO: 590297 - RNA, 20 nt, Artificial Sequence
  Synthetic
ucagaauauggauuucaggg

SEQ ID NO: 590298 - RNA, 21 nt, Artificial Sequence
  Synthetic
uucagaauauggauuucaggg

SEQ ID NO: 590299 - RNA, 22 nt, Artificial Sequence
  Synthetic
cuucagaauauggauuucaggg

SEQ ID NO: 590300 - RNA, 23 nt, Artificial Sequence
  Synthetic
acuucagaauauggauuucaggg

SEQ ID NO: 590301 - RNA, 24 nt, Artificial Sequence
  Synthetic
uacuucagaauauggauuucaggg

SEQ ID NO: 590302 - RNA, 18 nt, Artificial Sequence
  Synthetic
caaaugagaguuucaggg

SEQ ID NO: 590303 - RNA, 19 nt, Artificial Sequence
  Synthetic
ucaaaugagaguuucaggg

SEQ ID NO: 590304 - RNA, 20 nt, Artificial Sequence
  Synthetic
uucaaaugagaguuucaggg

SEQ ID NO: 590305 - RNA, 21 nt, Artificial Sequence
  Synthetic
auucaaaugagaguuucaggg

SEQ ID NO: 590306 - RNA, 22 nt, Artificial Sequence
  Synthetic
cauucaaaugagaguuucaggg

SEQ ID NO: 590307 - RNA, 23 nt, Artificial Sequence
  Synthetic
gcauucaaaugagaguuucaggg

SEQ ID NO: 590308 - RNA, 24 nt, Artificial Sequence
  Synthetic
agcauucaaaugagaguuucaggg

SEQ ID NO: 590309 - RNA, 18 nt, Artificial Sequence
  Synthetic
gaauuuggcguuucaggg

SEQ ID NO: 590310 - RNA, 19 nt, Artificial Sequence
  Synthetic
agaauuuggcguuucaggg

SEQ ID NO: 590311 - RNA, 20 nt, Artificial Sequence
  Synthetic
gagaauuuggcguuucaggg

SEQ ID NO: 590312 - RNA, 21 nt, Artificial Sequence
  Synthetic
agagaauuuggcguuucaggg

SEQ ID NO: 590313 - RNA, 22 nt, Artificial Sequence
  Synthetic
aagagaauuuggcguuucaggg

SEQ ID NO: 590314 - RNA, 23 nt, Artificial Sequence
  Synthetic
uaagagaauuuggcguuucaggg

SEQ ID NO: 590315 - RNA, 24 nt, Artificial Sequence
  Synthetic
uuaagagaauuuggcguuucaggg

SEQ ID NO: 590316 - RNA, 18 nt, Artificial Sequence
  Synthetic
gaaaaaaaagaaagaggg

SEQ ID NO: 590317 - RNA, 19 nt, Artificial Sequence
  Synthetic
agaaaaaaaagaaagaggg

SEQ ID NO: 590318 - RNA, 20 nt, Artificial Sequence
  Synthetic
aagaaaaaaaagaaagaggg

SEQ ID NO: 590319 - RNA, 21 nt, Artificial Sequence
  Synthetic
aaagaaaaaaaagaaagaggg

SEQ ID NO: 590320 - RNA, 22 nt, Artificial Sequence
  Synthetic
aaaagaaaaaaaagaaagaggg

SEQ ID NO: 590321 - RNA, 23 nt, Artificial Sequence
  Synthetic
aaaaagaaaaaaaagaaagaggg

SEQ ID NO: 590322 - RNA, 24 nt, Artificial Sequence
  Synthetic
gaaaaagaaaaaaaagaaagaggg

SEQ ID NO: 590323 - RNA, 18 nt, Artificial Sequence
  Synthetic
agagauacagaaagaggg

SEQ ID NO: 590324 - RNA, 19 nt, Artificial Sequence
  Synthetic
gagagauacagaaagaggg

SEQ ID NO: 590325 - RNA, 20 nt, Artificial Sequence
  Synthetic
ugagagauacagaaagaggg

SEQ ID NO: 590326 - RNA, 21 nt, Artificial Sequence
  Synthetic
augagagauacagaaagaggg

SEQ ID NO: 590327 - RNA, 22 nt, Artificial Sequence
  Synthetic
uaugagagauacagaaagaggg

SEQ ID NO: 590328 - RNA, 23 nt, Artificial Sequence
  Synthetic
auaugagagauacagaaagaggg

SEQ ID NO: 590329 - RNA, 24 nt, Artificial Sequence
  Synthetic
uauaugagagauacagaaagaggg

SEQ ID NO: 590330 - RNA, 18 nt, Artificial Sequence
  Synthetic
ccuaaucuggcaagaggg

SEQ ID NO: 590331 - RNA, 19 nt, Artificial Sequence
  Synthetic
accuaaucuggcaagaggg

SEQ ID NO: 590332 - RNA, 20 nt, Artificial Sequence
  Synthetic
gaccuaaucuggcaagaggg

SEQ ID NO: 590333 - RNA, 21 nt, Artificial Sequence
  Synthetic
ugaccuaaucuggcaagaggg

SEQ ID NO: 590334 - RNA, 22 nt, Artificial Sequence
  Synthetic
gugaccuaaucuggcaagaggg

SEQ ID NO: 590335 - RNA, 23 nt, Artificial Sequence
  Synthetic
ugugaccuaaucuggcaagaggg

SEQ ID NO: 590336 - RNA, 24 nt, Artificial Sequence
  Synthetic
augugaccuaaucuggcaagaggg

SEQ ID NO: 590337 - RNA, 18 nt, Artificial Sequence
  Synthetic
uauauugauugaagaggg

SEQ ID NO: 590338 - RNA, 19 nt, Artificial Sequence
  Synthetic
cuauauugauugaagaggg

SEQ ID NO: 590339 - RNA, 20 nt, Artificial Sequence
  Synthetic
ccuauauugauugaagaggg

SEQ ID NO: 590340 - RNA, 21 nt, Artificial Sequence
  Synthetic
cccuauauugauugaagaggg

SEQ ID NO: 590341 - RNA, 22 nt, Artificial Sequence
  Synthetic
gcccuauauugauugaagaggg

SEQ ID NO: 590342 - RNA, 23 nt, Artificial Sequence
  Synthetic
ggcccuauauugauugaagaggg

SEQ ID NO: 590343 - RNA, 24 nt, Artificial Sequence
  Synthetic
uggcccuauauugauugaagaggg

SEQ ID NO: 590344 - RNA, 18 nt, Artificial Sequence
  Synthetic
uucauggcacacagaggg

SEQ ID NO: 590345 - RNA, 19 nt, Artificial Sequence
  Synthetic
auucauggcacacagaggg

SEQ ID NO: 590346 - RNA, 20 nt, Artificial Sequence
  Synthetic
cauucauggcacacagaggg

SEQ ID NO: 590347 - RNA, 21 nt, Artificial Sequence
  Synthetic
ucauucauggcacacagaggg

SEQ ID NO: 590348 - RNA, 22 nt, Artificial Sequence
  Synthetic
aucauucauggcacacagaggg

SEQ ID NO: 590349 - RNA, 23 nt, Artificial Sequence
  Synthetic
gaucauucauggcacacagaggg

SEQ ID NO: 590350 - RNA, 24 nt, Artificial Sequence
  Synthetic
ugaucauucauggcacacagaggg

SEQ ID NO: 590351 - RNA, 18 nt, Artificial Sequence
  Synthetic
auguguauauacagaggg

SEQ ID NO: 590352 - RNA, 19 nt, Artificial Sequence
  Synthetic
uauguguauauacagaggg

SEQ ID NO: 590353 - RNA, 20 nt, Artificial Sequence
  Synthetic
auauguguauauacagaggg

SEQ ID NO: 590354 - RNA, 21 nt, Artificial Sequence
  Synthetic
gauauguguauauacagaggg

SEQ ID NO: 590355 - RNA, 22 nt, Artificial Sequence
  Synthetic
ggauauguguauauacagaggg

SEQ ID NO: 590356 - RNA, 23 nt, Artificial Sequence
  Synthetic
aggauauguguauauacagaggg

SEQ ID NO: 590357 - RNA, 24 nt, Artificial Sequence
  Synthetic
uaggauauguguauauacagaggg

SEQ ID NO: 590358 - RNA, 18 nt, Artificial Sequence
  Synthetic
cauauaaacuccagaggg

SEQ ID NO: 590359 - RNA, 19 nt, Artificial Sequence
  Synthetic
acauauaaacuccagaggg

SEQ ID NO: 590360 - RNA, 20 nt, Artificial Sequence
  Synthetic
aacauauaaacuccagaggg

SEQ ID NO: 590361 - RNA, 21 nt, Artificial Sequence
  Synthetic
aaacauauaaacuccagaggg

SEQ ID NO: 590362 - RNA, 22 nt, Artificial Sequence
  Synthetic
uaaacauauaaacuccagaggg

SEQ ID NO: 590363 - RNA, 23 nt, Artificial Sequence
  Synthetic
guaaacauauaaacuccagaggg

SEQ ID NO: 590364 - RNA, 24 nt, Artificial Sequence
  Synthetic
uguaaacauauaaacuccagaggg

SEQ ID NO: 590365 - RNA, 18 nt, Artificial Sequence
  Synthetic
cccaaaguuagcagaggg

SEQ ID NO: 590366 - RNA, 19 nt, Artificial Sequence
  Synthetic
gcccaaaguuagcagaggg

SEQ ID NO: 590367 - RNA, 20 nt, Artificial Sequence
  Synthetic
agcccaaaguuagcagaggg

SEQ ID NO: 590368 - RNA, 21 nt, Artificial Sequence
  Synthetic
aagcccaaaguuagcagaggg

SEQ ID NO: 590369 - RNA, 22 nt, Artificial Sequence
  Synthetic
uaagcccaaaguuagcagaggg

SEQ ID NO: 590370 - RNA, 23 nt, Artificial Sequence
  Synthetic
cuaagcccaaaguuagcagaggg

SEQ ID NO: 590371 - RNA, 24 nt, Artificial Sequence
  Synthetic
acuaagcccaaaguuagcagaggg

SEQ ID NO: 590372 - RNA, 18 nt, Artificial Sequence
  Synthetic
agagagagagagagaggg

SEQ ID NO: 590373 - RNA, 19 nt, Artificial Sequence
  Synthetic
gagagagagagagagaggg

SEQ ID NO: 590374 - RNA, 20 nt, Artificial Sequence
  Synthetic
ggagagagagagagagaggg

SEQ ID NO: 590375 - RNA, 21 nt, Artificial Sequence
  Synthetic
uggagagagagagagagaggg

SEQ ID NO: 590376 - RNA, 22 nt, Artificial Sequence
  Synthetic
auggagagagagagagagaggg

SEQ ID NO: 590377 - RNA, 23 nt, Artificial Sequence
  Synthetic
uauggagagagagagagagaggg

SEQ ID NO: 590378 - RNA, 24 nt, Artificial Sequence
  Synthetic
auauggagagagagagagagaggg

SEQ ID NO: 590379 - RNA, 18 nt, Artificial Sequence
  Synthetic
cuaaugugugagagaggg

SEQ ID NO: 590380 - RNA, 19 nt, Artificial Sequence
  Synthetic
ucuaaugugugagagaggg

SEQ ID NO: 590381 - RNA, 20 nt, Artificial Sequence
  Synthetic
cucuaaugugugagagaggg

SEQ ID NO: 590382 - RNA, 21 nt, Artificial Sequence
  Synthetic
ucucuaaugugugagagaggg

SEQ ID NO: 590383 - RNA, 22 nt, Artificial Sequence
  Synthetic
uucucuaaugugugagagaggg

SEQ ID NO: 590384 - RNA, 23 nt, Artificial Sequence
  Synthetic
uuucucuaaugugugagagaggg

SEQ ID NO: 590385 - RNA, 24 nt, Artificial Sequence
  Synthetic
cuuucucuaaugugugagagaggg

SEQ ID NO: 590386 - RNA, 18 nt, Artificial Sequence
  Synthetic
aacaaauaaaggagaggg

SEQ ID NO: 590387 - RNA, 19 nt, Artificial Sequence
  Synthetic
caacaaauaaaggagaggg

SEQ ID NO: 590388 - RNA, 20 nt, Artificial Sequence
  Synthetic
ccaacaaauaaaggagaggg

SEQ ID NO: 590389 - RNA, 21 nt, Artificial Sequence
  Synthetic
accaacaaauaaaggagaggg

SEQ ID NO: 590390 - RNA, 22 nt, Artificial Sequence
  Synthetic
aaccaacaaauaaaggagaggg

SEQ ID NO: 590391 - RNA, 23 nt, Artificial Sequence
  Synthetic
caaccaacaaauaaaggagaggg

SEQ ID NO: 590392 - RNA, 24 nt, Artificial Sequence
  Synthetic
ucaaccaacaaauaaaggagaggg

SEQ ID NO: 590393 - RNA, 18 nt, Artificial Sequence
  Synthetic
gggaagggaaggagaggg

SEQ ID NO: 590394 - RNA, 19 nt, Artificial Sequence
  Synthetic
agggaagggaaggagaggg

SEQ ID NO: 590395 - RNA, 20 nt, Artificial Sequence
  Synthetic
aagggaagggaaggagaggg

SEQ ID NO: 590396 - RNA, 21 nt, Artificial Sequence
  Synthetic
gaagggaagggaaggagaggg

SEQ ID NO: 590397 - RNA, 22 nt, Artificial Sequence
  Synthetic
ggaagggaagggaaggagaggg

SEQ ID NO: 590398 - RNA, 23 nt, Artificial Sequence
  Synthetic
gggaagggaagggaaggagaggg

SEQ ID NO: 590399 - RNA, 24 nt, Artificial Sequence
  Synthetic
agggaagggaagggaaggagaggg

SEQ ID NO: 590400 - RNA, 18 nt, Artificial Sequence
  Synthetic
aagagaggcaggagaggg

SEQ ID NO: 590401 - RNA, 19 nt, Artificial Sequence
  Synthetic
gaagagaggcaggagaggg

SEQ ID NO: 590402 - RNA, 20 nt, Artificial Sequence
  Synthetic
agaagagaggcaggagaggg

SEQ ID NO: 590403 - RNA, 21 nt, Artificial Sequence
  Synthetic
aagaagagaggcaggagaggg

SEQ ID NO: 590404 - RNA, 22 nt, Artificial Sequence
  Synthetic
caagaagagaggcaggagaggg

SEQ ID NO: 590405 - RNA, 23 nt, Artificial Sequence
  Synthetic
gcaagaagagaggcaggagaggg

SEQ ID NO: 590406 - RNA, 24 nt, Artificial Sequence
  Synthetic
agcaagaagagaggcaggagaggg

SEQ ID NO: 590407 - RNA, 18 nt, Artificial Sequence
  Synthetic
uggugcagagggagaggg

SEQ ID NO: 590408 - RNA, 19 nt, Artificial Sequence
  Synthetic
guggugcagagggagaggg

SEQ ID NO: 590409 - RNA, 20 nt, Artificial Sequence
  Synthetic
gguggugcagagggagaggg

SEQ ID NO: 590410 - RNA, 21 nt, Artificial Sequence
  Synthetic
agguggugcagagggagaggg

SEQ ID NO: 590411 - RNA, 22 nt, Artificial Sequence
  Synthetic
gagguggugcagagggagaggg

SEQ ID NO: 590412 - RNA, 23 nt, Artificial Sequence
  Synthetic
ggagguggugcagagggagaggg

SEQ ID NO: 590413 - RNA, 24 nt, Artificial Sequence
  Synthetic
aggagguggugcagagggagaggg

SEQ ID NO: 590414 - RNA, 18 nt, Artificial Sequence
  Synthetic
gggagagaguggagaggg

SEQ ID NO: 590415 - RNA, 19 nt, Artificial Sequence
  Synthetic
agggagagaguggagaggg

SEQ ID NO: 590416 - RNA, 20 nt, Artificial Sequence
  Synthetic
gagggagagaguggagaggg

SEQ ID NO: 590417 - RNA, 21 nt, Artificial Sequence
  Synthetic
agagggagagaguggagaggg

SEQ ID NO: 590418 - RNA, 22 nt, Artificial Sequence
  Synthetic
gagagggagagaguggagaggg

SEQ ID NO: 590419 - RNA, 23 nt, Artificial Sequence
  Synthetic
agagagggagagaguggagaggg

SEQ ID NO: 590420 - RNA, 24 nt, Artificial Sequence
  Synthetic
gagagagggagagaguggagaggg

SEQ ID NO: 590421 - RNA, 18 nt, Artificial Sequence
  Synthetic
uauucaaaauugagaggg

SEQ ID NO: 590422 - RNA, 19 nt, Artificial Sequence
  Synthetic
guauucaaaauugagaggg

SEQ ID NO: 590423 - RNA, 20 nt, Artificial Sequence
  Synthetic
gguauucaaaauugagaggg

SEQ ID NO: 590424 - RNA, 21 nt, Artificial Sequence
  Synthetic
ggguauucaaaauugagaggg

SEQ ID NO: 590425 - RNA, 22 nt, Artificial Sequence
  Synthetic
aggguauucaaaauugagaggg

SEQ ID NO: 590426 - RNA, 23 nt, Artificial Sequence
  Synthetic
uaggguauucaaaauugagaggg

SEQ ID NO: 590427 - RNA, 24 nt, Artificial Sequence
  Synthetic
auaggguauucaaaauugagaggg

SEQ ID NO: 590428 - RNA, 18 nt, Artificial Sequence
  Synthetic
guaaaucaguugagaggg

SEQ ID NO: 590429 - RNA, 19 nt, Artificial Sequence
  Synthetic
aguaaaucaguugagaggg

SEQ ID NO: 590430 - RNA, 20 nt, Artificial Sequence
  Synthetic
aaguaaaucaguugagaggg

SEQ ID NO: 590431 - RNA, 21 nt, Artificial Sequence
  Synthetic
caaguaaaucaguugagaggg

SEQ ID NO: 590432 - RNA, 22 nt, Artificial Sequence
  Synthetic
acaaguaaaucaguugagaggg

SEQ ID NO: 590433 - RNA, 23 nt, Artificial Sequence
  Synthetic
gacaaguaaaucaguugagaggg

SEQ ID NO: 590434 - RNA, 24 nt, Artificial Sequence
  Synthetic
cgacaaguaaaucaguugagaggg

SEQ ID NO: 590435 - RNA, 18 nt, Artificial Sequence
  Synthetic
auacagggaaauagaggg

SEQ ID NO: 590436 - RNA, 19 nt, Artificial Sequence
  Synthetic
aauacagggaaauagaggg

SEQ ID NO: 590437 - RNA, 20 nt, Artificial Sequence
  Synthetic
aaauacagggaaauagaggg

SEQ ID NO: 590438 - RNA, 21 nt, Artificial Sequence
  Synthetic
uaaauacagggaaauagaggg

SEQ ID NO: 590439 - RNA, 22 nt, Artificial Sequence
  Synthetic
auaaauacagggaaauagaggg

SEQ ID NO: 590440 - RNA, 23 nt, Artificial Sequence
  Synthetic
gauaaauacagggaaauagaggg

SEQ ID NO: 590441 - RNA, 24 nt, Artificial Sequence
  Synthetic
agauaaauacagggaaauagaggg

SEQ ID NO: 590442 - RNA, 18 nt, Artificial Sequence
  Synthetic
gccacugcgaauagaggg

SEQ ID NO: 590443 - RNA, 19 nt, Artificial Sequence
  Synthetic
ggccacugcgaauagaggg

SEQ ID NO: 590444 - RNA, 20 nt, Artificial Sequence
  Synthetic
gggccacugcgaauagaggg

SEQ ID NO: 590445 - RNA, 21 nt, Artificial Sequence
  Synthetic
ggggccacugcgaauagaggg

SEQ ID NO: 590446 - RNA, 22 nt, Artificial Sequence
  Synthetic
cggggccacugcgaauagaggg

SEQ ID NO: 590447 - RNA, 23 nt, Artificial Sequence
  Synthetic
gcggggccacugcgaauagaggg

SEQ ID NO: 590448 - RNA, 24 nt, Artificial Sequence
  Synthetic
ugcggggccacugcgaauagaggg

SEQ ID NO: 590449 - RNA, 18 nt, Artificial Sequence
  Synthetic
acacuuggagauagaggg

SEQ ID NO: 590450 - RNA, 19 nt, Artificial Sequence
  Synthetic
aacacuuggagauagaggg

SEQ ID NO: 590451 - RNA, 20 nt, Artificial Sequence
  Synthetic
gaacacuuggagauagaggg

SEQ ID NO: 590452 - RNA, 21 nt, Artificial Sequence
  Synthetic
ugaacacuuggagauagaggg

SEQ ID NO: 590453 - RNA, 22 nt, Artificial Sequence
  Synthetic
cugaacacuuggagauagaggg

SEQ ID NO: 590454 - RNA, 23 nt, Artificial Sequence
  Synthetic
acugaacacuuggagauagaggg

SEQ ID NO: 590455 - RNA, 24 nt, Artificial Sequence
  Synthetic
aacugaacacuuggagauagaggg

SEQ ID NO: 590456 - RNA, 18 nt, Artificial Sequence
  Synthetic
cuggggacuacuagaggg

SEQ ID NO: 590457 - RNA, 19 nt, Artificial Sequence
  Synthetic
ccuggggacuacuagaggg

SEQ ID NO: 590458 - RNA, 20 nt, Artificial Sequence
  Synthetic
cccuggggacuacuagaggg

SEQ ID NO: 590459 - RNA, 21 nt, Artificial Sequence
  Synthetic
acccuggggacuacuagaggg

SEQ ID NO: 590460 - RNA, 22 nt, Artificial Sequence
  Synthetic
gacccuggggacuacuagaggg

SEQ ID NO: 590461 - RNA, 23 nt, Artificial Sequence
  Synthetic
agacccuggggacuacuagaggg

SEQ ID NO: 590462 - RNA, 24 nt, Artificial Sequence
  Synthetic
uagacccuggggacuacuagaggg

SEQ ID NO: 590463 - RNA, 18 nt, Artificial Sequence
  Synthetic
uuucguucucaacgaggg

SEQ ID NO: 590464 - RNA, 19 nt, Artificial Sequence
  Synthetic
guuucguucucaacgaggg

SEQ ID NO: 590465 - RNA, 20 nt, Artificial Sequence
  Synthetic
uguuucguucucaacgaggg

SEQ ID NO: 590466 - RNA, 21 nt, Artificial Sequence
  Synthetic
uuguuucguucucaacgaggg

SEQ ID NO: 590467 - RNA, 22 nt, Artificial Sequence
  Synthetic
uuuguuucguucucaacgaggg

SEQ ID NO: 590468 - RNA, 23 nt, Artificial Sequence
  Synthetic
cuuuguuucguucucaacgaggg

SEQ ID NO: 590469 - RNA, 24 nt, Artificial Sequence
  Synthetic
ucuuuguuucguucucaacgaggg

SEQ ID NO: 590470 - RNA, 18 nt, Artificial Sequence
  Synthetic
gaaauaaagaagcgaggg

SEQ ID NO: 590471 - RNA, 19 nt, Artificial Sequence
  Synthetic
agaaauaaagaagcgaggg

SEQ ID NO: 590472 - RNA, 20 nt, Artificial Sequence
  Synthetic
uagaaauaaagaagcgaggg

SEQ ID NO: 590473 - RNA, 21 nt, Artificial Sequence
  Synthetic
auagaaauaaagaagcgaggg

SEQ ID NO: 590474 - RNA, 22 nt, Artificial Sequence
  Synthetic
uauagaaauaaagaagcgaggg

SEQ ID NO: 590475 - RNA, 23 nt, Artificial Sequence
  Synthetic
auauagaaauaaagaagcgaggg

SEQ ID NO: 590476 - RNA, 24 nt, Artificial Sequence
  Synthetic
aauauagaaauaaagaagcgaggg

SEQ ID NO: 590477 - RNA, 18 nt, Artificial Sequence
  Synthetic
acugguaucuaucgaggg

SEQ ID NO: 590478 - RNA, 19 nt, Artificial Sequence
  Synthetic
aacugguaucuaucgaggg

SEQ ID NO: 590479 - RNA, 20 nt, Artificial Sequence
  Synthetic
gaacugguaucuaucgaggg

SEQ ID NO: 590480 - RNA, 21 nt, Artificial Sequence
  Synthetic
ugaacugguaucuaucgaggg

SEQ ID NO: 590481 - RNA, 22 nt, Artificial Sequence
  Synthetic
uugaacugguaucuaucgaggg

SEQ ID NO: 590482 - RNA, 23 nt, Artificial Sequence
  Synthetic
auugaacugguaucuaucgaggg

SEQ ID NO: 590483 - RNA, 24 nt, Artificial Sequence
  Synthetic
aauugaacugguaucuaucgaggg

SEQ ID NO: 590484 - RNA, 18 nt, Artificial Sequence
  Synthetic
cuggaucauaaaggaggg

SEQ ID NO: 590485 - RNA, 19 nt, Artificial Sequence
  Synthetic
acuggaucauaaaggaggg

SEQ ID NO: 590486 - RNA, 20 nt, Artificial Sequence
  Synthetic
aacuggaucauaaaggaggg

SEQ ID NO: 590487 - RNA, 21 nt, Artificial Sequence
  Synthetic
caacuggaucauaaaggaggg

SEQ ID NO: 590488 - RNA, 22 nt, Artificial Sequence
  Synthetic
gcaacuggaucauaaaggaggg

SEQ ID NO: 590489 - RNA, 23 nt, Artificial Sequence
  Synthetic
agcaacuggaucauaaaggaggg

SEQ ID NO: 590490 - RNA, 24 nt, Artificial Sequence
  Synthetic
aagcaacuggaucauaaaggaggg

SEQ ID NO: 590491 - RNA, 18 nt, Artificial Sequence
  Synthetic
agagaaccagaaggaggg

SEQ ID NO: 590492 - RNA, 19 nt, Artificial Sequence
  Synthetic
aagagaaccagaaggaggg

SEQ ID NO: 590493 - RNA, 20 nt, Artificial Sequence
  Synthetic
gaagagaaccagaaggaggg

SEQ ID NO: 590494 - RNA, 21 nt, Artificial Sequence
  Synthetic
ggaagagaaccagaaggaggg

SEQ ID NO: 590495 - RNA, 22 nt, Artificial Sequence
  Synthetic
aggaagagaaccagaaggaggg

SEQ ID NO: 590496 - RNA, 23 nt, Artificial Sequence
  Synthetic
caggaagagaaccagaaggaggg

SEQ ID NO: 590497 - RNA, 24 nt, Artificial Sequence
  Synthetic
ccaggaagagaaccagaaggaggg

SEQ ID NO: 590498 - RNA, 18 nt, Artificial Sequence
  Synthetic
acuacagaggaaggaggg

SEQ ID NO: 590499 - RNA, 19 nt, Artificial Sequence
  Synthetic
gacuacagaggaaggaggg

SEQ ID NO: 590500 - RNA, 20 nt, Artificial Sequence
  Synthetic
ggacuacagaggaaggaggg

SEQ ID NO: 590501 - RNA, 21 nt, Artificial Sequence
  Synthetic
gggacuacagaggaaggaggg

SEQ ID NO: 590502 - RNA, 22 nt, Artificial Sequence
  Synthetic
ggggacuacagaggaaggaggg

SEQ ID NO: 590503 - RNA, 23 nt, Artificial Sequence
  Synthetic
uggggacuacagaggaaggaggg

SEQ ID NO: 590504 - RNA, 24 nt, Artificial Sequence
  Synthetic
cuggggacuacagaggaaggaggg

SEQ ID NO: 590505 - RNA, 18 nt, Artificial Sequence
  Synthetic
gggagggaggaaggaggg

SEQ ID NO: 590506 - RNA, 19 nt, Artificial Sequence
  Synthetic
agggagggaggaaggaggg

SEQ ID NO: 590507 - RNA, 20 nt, Artificial Sequence
  Synthetic
gagggagggaggaaggaggg

SEQ ID NO: 590508 - RNA, 21 nt, Artificial Sequence
  Synthetic
ggagggagggaggaaggaggg

SEQ ID NO: 590509 - RNA, 22 nt, Artificial Sequence
  Synthetic
gggagggagggaggaaggaggg

SEQ ID NO: 590510 - RNA, 23 nt, Artificial Sequence
  Synthetic
agggagggagggaggaaggaggg

SEQ ID NO: 590511 - RNA, 24 nt, Artificial Sequence
  Synthetic
gagggagggagggaggaaggaggg

SEQ ID NO: 590512 - RNA, 18 nt, Artificial Sequence
  Synthetic
aauggaaagggaggaggg

SEQ ID NO: 590513 - RNA, 19 nt, Artificial Sequence
  Synthetic
gaauggaaagggaggaggg

SEQ ID NO: 590514 - RNA, 20 nt, Artificial Sequence
  Synthetic
ugaauggaaagggaggaggg

SEQ ID NO: 590515 - RNA, 21 nt, Artificial Sequence
  Synthetic
uugaauggaaagggaggaggg

SEQ ID NO: 590516 - RNA, 22 nt, Artificial Sequence
  Synthetic
guugaauggaaagggaggaggg

SEQ ID NO: 590517 - RNA, 23 nt, Artificial Sequence
  Synthetic
uguugaauggaaagggaggaggg

SEQ ID NO: 590518 - RNA, 24 nt, Artificial Sequence
  Synthetic
uuguugaauggaaagggaggaggg

SEQ ID NO: 590519 - RNA, 18 nt, Artificial Sequence
  Synthetic
cuacuagagggaggaggg

SEQ ID NO: 590520 - RNA, 19 nt, Artificial Sequence
  Synthetic
acuacuagagggaggaggg

SEQ ID NO: 590521 - RNA, 20 nt, Artificial Sequence
  Synthetic
gacuacuagagggaggaggg

SEQ ID NO: 590522 - RNA, 21 nt, Artificial Sequence
  Synthetic
ggacuacuagagggaggaggg

SEQ ID NO: 590523 - RNA, 22 nt, Artificial Sequence
  Synthetic
gggacuacuagagggaggaggg

SEQ ID NO: 590524 - RNA, 23 nt, Artificial Sequence
  Synthetic
ggggacuacuagagggaggaggg

SEQ ID NO: 590525 - RNA, 24 nt, Artificial Sequence
  Synthetic
uggggacuacuagagggaggaggg

SEQ ID NO: 590526 - RNA, 18 nt, Artificial Sequence
  Synthetic
cuaagggcuggaggaggg

SEQ ID NO: 590527 - RNA, 19 nt, Artificial Sequence
  Synthetic
gcuaagggcuggaggaggg

SEQ ID NO: 590528 - RNA, 20 nt, Artificial Sequence
  Synthetic
ugcuaagggcuggaggaggg

SEQ ID NO: 590529 - RNA, 21 nt, Artificial Sequence
  Synthetic
uugcuaagggcuggaggaggg

SEQ ID NO: 590530 - RNA, 22 nt, Artificial Sequence
  Synthetic
guugcuaagggcuggaggaggg

SEQ ID NO: 590531 - RNA, 23 nt, Artificial Sequence
  Synthetic
gguugcuaagggcuggaggaggg

SEQ ID NO: 590532 - RNA, 24 nt, Artificial Sequence
  Synthetic
ugguugcuaagggcuggaggaggg

SEQ ID NO: 590533 - RNA, 18 nt, Artificial Sequence
  Synthetic
gagaaugagugaggaggg

SEQ ID NO: 590534 - RNA, 19 nt, Artificial Sequence
  Synthetic
ggagaaugagugaggaggg

SEQ ID NO: 590535 - RNA, 20 nt, Artificial Sequence
  Synthetic
aggagaaugagugaggaggg

SEQ ID NO: 590536 - RNA, 21 nt, Artificial Sequence
  Synthetic
aaggagaaugagugaggaggg

SEQ ID NO: 590537 - RNA, 22 nt, Artificial Sequence
  Synthetic
gaaggagaaugagugaggaggg

SEQ ID NO: 590538 - RNA, 23 nt, Artificial Sequence
  Synthetic
agaaggagaaugagugaggaggg

SEQ ID NO: 590539 - RNA, 24 nt, Artificial Sequence
  Synthetic
aagaaggagaaugagugaggaggg

SEQ ID NO: 590540 - RNA, 18 nt, Artificial Sequence
  Synthetic
uaucccuggugaggaggg

SEQ ID NO: 590541 - RNA, 19 nt, Artificial Sequence
  Synthetic
uuaucccuggugaggaggg

SEQ ID NO: 590542 - RNA, 20 nt, Artificial Sequence
  Synthetic
uuuaucccuggugaggaggg

SEQ ID NO: 590543 - RNA, 21 nt, Artificial Sequence
  Synthetic
guuuaucccuggugaggaggg

SEQ ID NO: 590544 - RNA, 22 nt, Artificial Sequence
  Synthetic
aguuuaucccuggugaggaggg

SEQ ID NO: 590545 - RNA, 23 nt, Artificial Sequence
  Synthetic
uaguuuaucccuggugaggaggg

SEQ ID NO: 590546 - RNA, 24 nt, Artificial Sequence
  Synthetic
cuaguuuaucccuggugaggaggg

SEQ ID NO: 590547 - RNA, 18 nt, Artificial Sequence
  Synthetic
cuaaguaacuccggaggg

SEQ ID NO: 590548 - RNA, 19 nt, Artificial Sequence
  Synthetic
gcuaaguaacuccggaggg

SEQ ID NO: 590549 - RNA, 20 nt, Artificial Sequence
  Synthetic
agcuaaguaacuccggaggg

SEQ ID NO: 590550 - RNA, 21 nt, Artificial Sequence
  Synthetic
gagcuaaguaacuccggaggg

SEQ ID NO: 590551 - RNA, 22 nt, Artificial Sequence
  Synthetic
agagcuaaguaacuccggaggg

SEQ ID NO: 590552 - RNA, 23 nt, Artificial Sequence
  Synthetic
cagagcuaaguaacuccggaggg

SEQ ID NO: 590553 - RNA, 24 nt, Artificial Sequence
  Synthetic
ucagagcuaaguaacuccggaggg

SEQ ID NO: 590554 - RNA, 18 nt, Artificial Sequence
  Synthetic
uggggaagaagcggaggg

SEQ ID NO: 590555 - RNA, 19 nt, Artificial Sequence
  Synthetic
guggggaagaagcggaggg

SEQ ID NO: 590556 - RNA, 20 nt, Artificial Sequence
  Synthetic
aguggggaagaagcggaggg

SEQ ID NO: 590557 - RNA, 21 nt, Artificial Sequence
  Synthetic
aaguggggaagaagcggaggg

SEQ ID NO: 590558 - RNA, 22 nt, Artificial Sequence
  Synthetic
gaaguggggaagaagcggaggg

SEQ ID NO: 590559 - RNA, 23 nt, Artificial Sequence
  Synthetic
ggaaguggggaagaagcggaggg

SEQ ID NO: 590560 - RNA, 24 nt, Artificial Sequence
  Synthetic
gggaaguggggaagaagcggaggg

SEQ ID NO: 590561 - RNA, 18 nt, Artificial Sequence
  Synthetic
aaaagccaaaagggaggg

SEQ ID NO: 590562 - RNA, 19 nt, Artificial Sequence
  Synthetic
caaaagccaaaagggaggg

SEQ ID NO: 590563 - RNA, 20 nt, Artificial Sequence
  Synthetic
acaaaagccaaaagggaggg

SEQ ID NO: 590564 - RNA, 21 nt, Artificial Sequence
  Synthetic
cacaaaagccaaaagggaggg

SEQ ID NO: 590565 - RNA, 22 nt, Artificial Sequence
  Synthetic
gcacaaaagccaaaagggaggg

SEQ ID NO: 590566 - RNA, 23 nt, Artificial Sequence
  Synthetic
agcacaaaagccaaaagggaggg

SEQ ID NO: 590567 - RNA, 24 nt, Artificial Sequence
  Synthetic
uagcacaaaagccaaaagggaggg

SEQ ID NO: 590568 - RNA, 18 nt, Artificial Sequence
  Synthetic
aaaaggggaaagggaggg

SEQ ID NO: 590569 - RNA, 19 nt, Artificial Sequence
  Synthetic
aaaaaggggaaagggaggg

SEQ ID NO: 590570 - RNA, 20 nt, Artificial Sequence
  Synthetic
aaaaaaggggaaagggaggg

SEQ ID NO: 590571 - RNA, 21 nt, Artificial Sequence
  Synthetic
aaaaaaaggggaaagggaggg

SEQ ID NO: 590572 - RNA, 22 nt, Artificial Sequence
  Synthetic
caaaaaaaggggaaagggaggg

SEQ ID NO: 590573 - RNA, 23 nt, Artificial Sequence
  Synthetic
acaaaaaaaggggaaagggaggg

SEQ ID NO: 590574 - RNA, 24 nt, Artificial Sequence
  Synthetic
cacaaaaaaaggggaaagggaggg

SEQ ID NO: 590575 - RNA, 18 nt, Artificial Sequence
  Synthetic
gaagaaagucagggaggg

SEQ ID NO: 590576 - RNA, 19 nt, Artificial Sequence
  Synthetic
agaagaaagucagggaggg

SEQ ID NO: 590577 - RNA, 20 nt, Artificial Sequence
  Synthetic
aagaagaaagucagggaggg

SEQ ID NO: 590578 - RNA, 21 nt, Artificial Sequence
  Synthetic
aaagaagaaagucagggaggg

SEQ ID NO: 590579 - RNA, 22 nt, Artificial Sequence
  Synthetic
gaaagaagaaagucagggaggg

SEQ ID NO: 590580 - RNA, 23 nt, Artificial Sequence
  Synthetic
ggaaagaagaaagucagggaggg

SEQ ID NO: 590581 - RNA, 24 nt, Artificial Sequence
  Synthetic
aggaaagaagaaagucagggaggg

SEQ ID NO: 590582 - RNA, 18 nt, Artificial Sequence
  Synthetic
aaaaagaaagagggaggg

SEQ ID NO: 590583 - RNA, 19 nt, Artificial Sequence
  Synthetic
aaaaaagaaagagggaggg

SEQ ID NO: 590584 - RNA, 20 nt, Artificial Sequence
  Synthetic
aaaaaaagaaagagggaggg

SEQ ID NO: 590585 - RNA, 21 nt, Artificial Sequence
  Synthetic
aaaaaaaagaaagagggaggg

SEQ ID NO: 590586 - RNA, 22 nt, Artificial Sequence
  Synthetic
gaaaaaaaagaaagagggaggg

SEQ ID NO: 590587 - RNA, 23 nt, Artificial Sequence
  Synthetic
agaaaaaaaagaaagagggaggg

SEQ ID NO: 590588 - RNA, 24 nt, Artificial Sequence
  Synthetic
aagaaaaaaaagaaagagggaggg

SEQ ID NO: 590589 - RNA, 18 nt, Artificial Sequence
  Synthetic
gagaguggagagggaggg

SEQ ID NO: 590590 - RNA, 19 nt, Artificial Sequence
  Synthetic
agagaguggagagggaggg

SEQ ID NO: 590591 - RNA, 20 nt, Artificial Sequence
  Synthetic
gagagaguggagagggaggg

SEQ ID NO: 590592 - RNA, 21 nt, Artificial Sequence
  Synthetic
ggagagaguggagagggaggg

SEQ ID NO: 590593 - RNA, 22 nt, Artificial Sequence
  Synthetic
gggagagaguggagagggaggg

SEQ ID NO: 590594 - RNA, 23 nt, Artificial Sequence
  Synthetic
agggagagaguggagagggaggg

SEQ ID NO: 590595 - RNA, 24 nt, Artificial Sequence
  Synthetic
gagggagagaguggagagggaggg

SEQ ID NO: 590596 - RNA, 18 nt, Artificial Sequence
  Synthetic
gggaggaaggagggaggg

SEQ ID NO: 590597 - RNA, 19 nt, Artificial Sequence
  Synthetic
agggaggaaggagggaggg

SEQ ID NO: 590598 - RNA, 20 nt, Artificial Sequence
  Synthetic
gagggaggaaggagggaggg

SEQ ID NO: 590599 - RNA, 21 nt, Artificial Sequence
  Synthetic
ggagggaggaaggagggaggg

SEQ ID NO: 590600 - RNA, 22 nt, Artificial Sequence
  Synthetic
gggagggaggaaggagggaggg

SEQ ID NO: 590601 - RNA, 23 nt, Artificial Sequence
  Synthetic
agggagggaggaaggagggaggg

SEQ ID NO: 590602 - RNA, 24 nt, Artificial Sequence
  Synthetic
gagggagggaggaaggagggaggg

SEQ ID NO: 590603 - RNA, 18 nt, Artificial Sequence
  Synthetic
ggggaaagggagggaggg

SEQ ID NO: 590604 - RNA, 19 nt, Artificial Sequence
  Synthetic
aggggaaagggagggaggg

SEQ ID NO: 590605 - RNA, 20 nt, Artificial Sequence
  Synthetic
aaggggaaagggagggaggg

SEQ ID NO: 590606 - RNA, 21 nt, Artificial Sequence
  Synthetic
aaaggggaaagggagggaggg

SEQ ID NO: 590607 - RNA, 22 nt, Artificial Sequence
  Synthetic
aaaaggggaaagggagggaggg

SEQ ID NO: 590608 - RNA, 23 nt, Artificial Sequence
  Synthetic
aaaaaggggaaagggagggaggg

SEQ ID NO: 590609 - RNA, 24 nt, Artificial Sequence
  Synthetic
aaaaaaggggaaagggagggaggg

SEQ ID NO: 590610 - RNA, 18 nt, Artificial Sequence
  Synthetic
aaagucagggagggaggg

SEQ ID NO: 590611 - RNA, 19 nt, Artificial Sequence
  Synthetic
gaaagucagggagggaggg

SEQ ID NO: 590612 - RNA, 20 nt, Artificial Sequence
  Synthetic
agaaagucagggagggaggg

SEQ ID NO: 590613 - RNA, 21 nt, Artificial Sequence
  Synthetic
aagaaagucagggagggaggg

SEQ ID NO: 590614 - RNA, 22 nt, Artificial Sequence
  Synthetic
gaagaaagucagggagggaggg

SEQ ID NO: 590615 - RNA, 23 nt, Artificial Sequence
  Synthetic
agaagaaagucagggagggaggg

SEQ ID NO: 590616 - RNA, 24 nt, Artificial Sequence
  Synthetic
aagaagaaagucagggagggaggg

SEQ ID NO: 590617 - RNA, 18 nt, Artificial Sequence
  Synthetic
ggaaggagggagggaggg

SEQ ID NO: 590618 - RNA, 19 nt, Artificial Sequence
  Synthetic
aggaaggagggagggaggg

SEQ ID NO: 590619 - RNA, 20 nt, Artificial Sequence
  Synthetic
gaggaaggagggagggaggg

SEQ ID NO: 590620 - RNA, 21 nt, Artificial Sequence
  Synthetic
ggaggaaggagggagggaggg

SEQ ID NO: 590621 - RNA, 22 nt, Artificial Sequence
  Synthetic
gggaggaaggagggagggaggg

SEQ ID NO: 590622 - RNA, 23 nt, Artificial Sequence
  Synthetic
agggaggaaggagggagggaggg

SEQ ID NO: 590623 - RNA, 24 nt, Artificial Sequence
  Synthetic
gagggaggaaggagggagggaggg

SEQ ID NO: 590624 - RNA, 18 nt, Artificial Sequence
  Synthetic
ucagggagggagggaggg

SEQ ID NO: 590625 - RNA, 19 nt, Artificial Sequence
  Synthetic
gucagggagggagggaggg

SEQ ID NO: 590626 - RNA, 20 nt, Artificial Sequence
  Synthetic
agucagggagggagggaggg

SEQ ID NO: 590627 - RNA, 21 nt, Artificial Sequence
  Synthetic
aagucagggagggagggaggg

SEQ ID NO: 590628 - RNA, 22 nt, Artificial Sequence
  Synthetic
aaagucagggagggagggaggg

SEQ ID NO: 590629 - RNA, 23 nt, Artificial Sequence
  Synthetic
gaaagucagggagggagggaggg

SEQ ID NO: 590630 - RNA, 24 nt, Artificial Sequence
  Synthetic
agaaagucagggagggagggaggg

SEQ ID NO: 590631 - RNA, 18 nt, Artificial Sequence
  Synthetic
ggagggagggagggaggg

SEQ ID NO: 590632 - RNA, 19 nt, Artificial Sequence
  Synthetic
aggagggagggagggaggg

SEQ ID NO: 590633 - RNA, 20 nt, Artificial Sequence
  Synthetic
aaggagggagggagggaggg

SEQ ID NO: 590634 - RNA, 21 nt, Artificial Sequence
  Synthetic
gaaggagggagggagggaggg

SEQ ID NO: 590635 - RNA, 22 nt, Artificial Sequence
  Synthetic
ggaaggagggagggagggaggg

SEQ ID NO: 590636 - RNA, 23 nt, Artificial Sequence
  Synthetic
aggaaggagggagggagggaggg

SEQ ID NO: 590637 - RNA, 24 nt, Artificial Sequence
  Synthetic
gaggaaggagggagggagggaggg

SEQ ID NO: 590638 - RNA, 18 nt, Artificial Sequence
  Synthetic
gggaagggaaggggaggg

SEQ ID NO: 590639 - RNA, 19 nt, Artificial Sequence
  Synthetic
agggaagggaaggggaggg

SEQ ID NO: 590640 - RNA, 20 nt, Artificial Sequence
  Synthetic
gagggaagggaaggggaggg

SEQ ID NO: 590641 - RNA, 21 nt, Artificial Sequence
  Synthetic
ggagggaagggaaggggaggg

SEQ ID NO: 590642 - RNA, 22 nt, Artificial Sequence
  Synthetic
gggagggaagggaaggggaggg

SEQ ID NO: 590643 - RNA, 23 nt, Artificial Sequence
  Synthetic
ggggagggaagggaaggggaggg

SEQ ID NO: 590644 - RNA, 24 nt, Artificial Sequence
  Synthetic
aggggagggaagggaaggggaggg

SEQ ID NO: 590645 - RNA, 18 nt, Artificial Sequence
  Synthetic
gugugagagaggggaggg

SEQ ID NO: 590646 - RNA, 19 nt, Artificial Sequence
  Synthetic
ugugugagagaggggaggg

SEQ ID NO: 590647 - RNA, 20 nt, Artificial Sequence
  Synthetic
augugugagagaggggaggg

SEQ ID NO: 590648 - RNA, 21 nt, Artificial Sequence
  Synthetic
aaugugugagagaggggaggg

SEQ ID NO: 590649 - RNA, 22 nt, Artificial Sequence
  Synthetic
uaaugugugagagaggggaggg

SEQ ID NO: 590650 - RNA, 23 nt, Artificial Sequence
  Synthetic
cuaaugugugagagaggggaggg

SEQ ID NO: 590651 - RNA, 24 nt, Artificial Sequence
  Synthetic
ucuaaugugugagagaggggaggg

SEQ ID NO: 590652 - RNA, 18 nt, Artificial Sequence
  Synthetic
gggaaggagaggggaggg

SEQ ID NO: 590653 - RNA, 19 nt, Artificial Sequence
  Synthetic
agggaaggagaggggaggg

SEQ ID NO: 590654 - RNA, 20 nt, Artificial Sequence
  Synthetic
aagggaaggagaggggaggg

SEQ ID NO: 590655 - RNA, 21 nt, Artificial Sequence
  Synthetic
gaagggaaggagaggggaggg

SEQ ID NO: 590656 - RNA, 22 nt, Artificial Sequence
  Synthetic
ggaagggaaggagaggggaggg

SEQ ID NO: 590657 - RNA, 23 nt, Artificial Sequence
  Synthetic
gggaagggaaggagaggggaggg

SEQ ID NO: 590658 - RNA, 24 nt, Artificial Sequence
  Synthetic
agggaagggaaggagaggggaggg

SEQ ID NO: 590659 - RNA, 18 nt, Artificial Sequence
  Synthetic
gggaaggggaggggaggg

SEQ ID NO: 590660 - RNA, 19 nt, Artificial Sequence
  Synthetic
agggaaggggaggggaggg

SEQ ID NO: 590661 - RNA, 20 nt, Artificial Sequence
  Synthetic
aagggaaggggaggggaggg

SEQ ID NO: 590662 - RNA, 21 nt, Artificial Sequence
  Synthetic
gaagggaaggggaggggaggg

SEQ ID NO: 590663 - RNA, 22 nt, Artificial Sequence
  Synthetic
ggaagggaaggggaggggaggg

SEQ ID NO: 590664 - RNA, 23 nt, Artificial Sequence
  Synthetic
gggaagggaaggggaggggaggg

SEQ ID NO: 590665 - RNA, 24 nt, Artificial Sequence
  Synthetic
agggaagggaaggggaggggaggg

SEQ ID NO: 590666 - RNA, 18 nt, Artificial Sequence
  Synthetic
ggggaggggaggggaggg

SEQ ID NO: 590667 - RNA, 19 nt, Artificial Sequence
  Synthetic
aggggaggggaggggaggg

SEQ ID NO: 590668 - RNA, 20 nt, Artificial Sequence
  Synthetic
aaggggaggggaggggaggg

SEQ ID NO: 590669 - RNA, 21 nt, Artificial Sequence
  Synthetic
gaaggggaggggaggggaggg

SEQ ID NO: 590670 - RNA, 22 nt, Artificial Sequence
  Synthetic
ggaaggggaggggaggggaggg

SEQ ID NO: 590671 - RNA, 23 nt, Artificial Sequence
  Synthetic
gggaaggggaggggaggggaggg

SEQ ID NO: 590672 - RNA, 24 nt, Artificial Sequence
  Synthetic
agggaaggggaggggaggggaggg

SEQ ID NO: 590673 - RNA, 20 nt, Artificial Sequence
  Synthetic
gaggggaggggaggggaggg

SEQ ID NO: 590674 - RNA, 21 nt, Artificial Sequence
  Synthetic
ggaggggaggggaggggaggg

SEQ ID NO: 590675 - RNA, 22 nt, Artificial Sequence
  Synthetic
gggaggggaggggaggggaggg

SEQ ID NO: 590676 - RNA, 23 nt, Artificial Sequence
  Synthetic
ggggaggggaggggaggggaggg

SEQ ID NO: 590677 - RNA, 24 nt, Artificial Sequence
  Synthetic
aggggaggggaggggaggggaggg

SEQ ID NO: 590678 - RNA, 18 nt, Artificial Sequence
  Synthetic
ugugggguggggggaggg

SEQ ID NO: 590679 - RNA, 19 nt, Artificial Sequence
  Synthetic
cugugggguggggggaggg

SEQ ID NO: 590680 - RNA, 20 nt, Artificial Sequence
  Synthetic
gcugugggguggggggaggg

SEQ ID NO: 590681 - RNA, 21 nt, Artificial Sequence
  Synthetic
ugcugugggguggggggaggg

SEQ ID NO: 590682 - RNA, 22 nt, Artificial Sequence
  Synthetic
cugcugugggguggggggaggg

SEQ ID NO: 590683 - RNA, 23 nt, Artificial Sequence
  Synthetic
ccugcugugggguggggggaggg

SEQ ID NO: 590684 - RNA, 24 nt, Artificial Sequence
  Synthetic
gccugcugugggguggggggaggg

SEQ ID NO: 590685 - RNA, 21 nt, Artificial Sequence
  Synthetic
uguugugggguggggggaggg

SEQ ID NO: 590686 - RNA, 22 nt, Artificial Sequence
  Synthetic
cuguugugggguggggggaggg

SEQ ID NO: 590687 - RNA, 23 nt, Artificial Sequence
  Synthetic
acuguugugggguggggggaggg

SEQ ID NO: 590688 - RNA, 24 nt, Artificial Sequence
  Synthetic
aacuguugugggguggggggaggg

SEQ ID NO: 590689 - RNA, 24 nt, Artificial Sequence
  Synthetic
gacuguugugggguggggggaggg

SEQ ID NO: 590690 - RNA, 23 nt, Artificial Sequence
  Synthetic
ccuguugugggguggggggaggg

SEQ ID NO: 590691 - RNA, 24 nt, Artificial Sequence
  Synthetic
gccuguugugggguggggggaggg

SEQ ID NO: 590692 - RNA, 18 nt, Artificial Sequence
  Synthetic
cuacuagaguggggaggg

SEQ ID NO: 590693 - RNA, 19 nt, Artificial Sequence
  Synthetic
acuacuagaguggggaggg

SEQ ID NO: 590694 - RNA, 20 nt, Artificial Sequence
  Synthetic
gacuacuagaguggggaggg

SEQ ID NO: 590695 - RNA, 21 nt, Artificial Sequence
  Synthetic
ggacuacuagaguggggaggg

SEQ ID NO: 590696 - RNA, 22 nt, Artificial Sequence
  Synthetic
aggacuacuagaguggggaggg

SEQ ID NO: 590697 - RNA, 23 nt, Artificial Sequence
  Synthetic
gaggacuacuagaguggggaggg

SEQ ID NO: 590698 - RNA, 24 nt, Artificial Sequence
  Synthetic
ggaggacuacuagaguggggaggg

SEQ ID NO: 590699 - RNA, 18 nt, Artificial Sequence
  Synthetic
cuacuggaguggggaggg

SEQ ID NO: 590700 - RNA, 19 nt, Artificial Sequence
  Synthetic
ccuacuggaguggggaggg

SEQ ID NO: 590701 - RNA, 20 nt, Artificial Sequence
  Synthetic
gccuacuggaguggggaggg

SEQ ID NO: 590702 - RNA, 21 nt, Artificial Sequence
  Synthetic
agccuacuggaguggggaggg

SEQ ID NO: 590703 - RNA, 22 nt, Artificial Sequence
  Synthetic
aagccuacuggaguggggaggg

SEQ ID NO: 590704 - RNA, 23 nt, Artificial Sequence
  Synthetic
gaagccuacuggaguggggaggg

SEQ ID NO: 590705 - RNA, 24 nt, Artificial Sequence
  Synthetic
ggaagccuacuggaguggggaggg

SEQ ID NO: 590706 - RNA, 18 nt, Artificial Sequence
  Synthetic
aaaaacggggugggaggg

SEQ ID NO: 590707 - RNA, 19 nt, Artificial Sequence
  Synthetic
aaaaaacggggugggaggg

SEQ ID NO: 590708 - RNA, 20 nt, Artificial Sequence
  Synthetic
caaaaaacggggugggaggg

SEQ ID NO: 590709 - RNA, 21 nt, Artificial Sequence
  Synthetic
gcaaaaaacggggugggaggg

SEQ ID NO: 590710 - RNA, 22 nt, Artificial Sequence
  Synthetic
agcaaaaaacggggugggaggg

SEQ ID NO: 590711 - RNA, 23 nt, Artificial Sequence
  Synthetic
aagcaaaaaacggggugggaggg

SEQ ID NO: 590712 - RNA, 24 nt, Artificial Sequence
  Synthetic
aaagcaaaaaacggggugggaggg

SEQ ID NO: 590713 - RNA, 18 nt, Artificial Sequence
  Synthetic
ggacaaacgaauggaggg

SEQ ID NO: 590714 - RNA, 19 nt, Artificial Sequence
  Synthetic
aggacaaacgaauggaggg

SEQ ID NO: 590715 - RNA, 20 nt, Artificial Sequence
  Synthetic
aaggacaaacgaauggaggg

SEQ ID NO: 590716 - RNA, 21 nt, Artificial Sequence
  Synthetic
aaaggacaaacgaauggaggg

SEQ ID NO: 590717 - RNA, 22 nt, Artificial Sequence
  Synthetic
gaaaggacaaacgaauggaggg

SEQ ID NO: 590718 - RNA, 23 nt, Artificial Sequence
  Synthetic
ugaaaggacaaacgaauggaggg

SEQ ID NO: 590719 - RNA, 24 nt, Artificial Sequence
  Synthetic
cugaaaggacaaacgaauggaggg

SEQ ID NO: 590720 - RNA, 18 nt, Artificial Sequence
  Synthetic
guauagucacauggaggg

SEQ ID NO: 590721 - RNA, 19 nt, Artificial Sequence
  Synthetic
cguauagucacauggaggg

SEQ ID NO: 590722 - RNA, 20 nt, Artificial Sequence
  Synthetic
acguauagucacauggaggg

SEQ ID NO: 590723 - RNA, 21 nt, Artificial Sequence
  Synthetic
uacguauagucacauggaggg

SEQ ID NO: 590724 - RNA, 22 nt, Artificial Sequence
  Synthetic
auacguauagucacauggaggg

SEQ ID NO: 590725 - RNA, 23 nt, Artificial Sequence
  Synthetic
cauacguauagucacauggaggg

SEQ ID NO: 590726 - RNA, 24 nt, Artificial Sequence
  Synthetic
acauacguauagucacauggaggg

SEQ ID NO: 590727 - RNA, 18 nt, Artificial Sequence
  Synthetic
gugugugucccuggaggg

SEQ ID NO: 590728 - RNA, 19 nt, Artificial Sequence
  Synthetic
agugugugucccuggaggg

SEQ ID NO: 590729 - RNA, 20 nt, Artificial Sequence
  Synthetic
cagugugugucccuggaggg

SEQ ID NO: 590730 - RNA, 21 nt, Artificial Sequence
  Synthetic
ccagugugugucccuggaggg

SEQ ID NO: 590731 - RNA, 22 nt, Artificial Sequence
  Synthetic
accagugugugucccuggaggg

SEQ ID NO: 590732 - RNA, 23 nt, Artificial Sequence
  Synthetic
uaccagugugugucccuggaggg

SEQ ID NO: 590733 - RNA, 24 nt, Artificial Sequence
  Synthetic
auaccagugugugucccuggaggg

SEQ ID NO: 590734 - RNA, 18 nt, Artificial Sequence
  Synthetic
agcaauuucaguggaggg

SEQ ID NO: 590735 - RNA, 19 nt, Artificial Sequence
  Synthetic
gagcaauuucaguggaggg

SEQ ID NO: 590736 - RNA, 20 nt, Artificial Sequence
  Synthetic
agagcaauuucaguggaggg

SEQ ID NO: 590737 - RNA, 21 nt, Artificial Sequence
  Synthetic
gagagcaauuucaguggaggg

SEQ ID NO: 590738 - RNA, 22 nt, Artificial Sequence
  Synthetic
ugagagcaauuucaguggaggg

SEQ ID NO: 590739 - RNA, 23 nt, Artificial Sequence
  Synthetic
cugagagcaauuucaguggaggg

SEQ ID NO: 590740 - RNA, 24 nt, Artificial Sequence
  Synthetic
gcugagagcaauuucaguggaggg

SEQ ID NO: 590741 - RNA, 18 nt, Artificial Sequence
  Synthetic
cuagguacagguggaggg

SEQ ID NO: 590742 - RNA, 19 nt, Artificial Sequence
  Synthetic
acuagguacagguggaggg

SEQ ID NO: 590743 - RNA, 20 nt, Artificial Sequence
  Synthetic
cacuagguacagguggaggg

SEQ ID NO: 590744 - RNA, 21 nt, Artificial Sequence
  Synthetic
acacuagguacagguggaggg

SEQ ID NO: 590745 - RNA, 22 nt, Artificial Sequence
  Synthetic
gacacuagguacagguggaggg

SEQ ID NO: 590746 - RNA, 23 nt, Artificial Sequence
  Synthetic
ugacacuagguacagguggaggg

SEQ ID NO: 590747 - RNA, 24 nt, Artificial Sequence
  Synthetic
uugacacuagguacagguggaggg

SEQ ID NO: 590748 - RNA, 18 nt, Artificial Sequence
  Synthetic
cuacucuaggguggaggg

SEQ ID NO: 590749 - RNA, 19 nt, Artificial Sequence
  Synthetic
ucuacucuaggguggaggg

SEQ ID NO: 590750 - RNA, 20 nt, Artificial Sequence
  Synthetic
aucuacucuaggguggaggg

SEQ ID NO: 590751 - RNA, 21 nt, Artificial Sequence
  Synthetic
gaucuacucuaggguggaggg

SEQ ID NO: 590752 - RNA, 22 nt, Artificial Sequence
  Synthetic
ggaucuacucuaggguggaggg

SEQ ID NO: 590753 - RNA, 23 nt, Artificial Sequence
  Synthetic
aggaucuacucuaggguggaggg

SEQ ID NO: 590754 - RNA, 24 nt, Artificial Sequence
  Synthetic
caggaucuacucuaggguggaggg

SEQ ID NO: 590755 - RNA, 18 nt, Artificial Sequence
  Synthetic
cuauuagaguguggaggg

SEQ ID NO: 590756 - RNA, 19 nt, Artificial Sequence
  Synthetic
acuauuagaguguggaggg

SEQ ID NO: 590757 - RNA, 20 nt, Artificial Sequence
  Synthetic
gacuauuagaguguggaggg

SEQ ID NO: 590758 - RNA, 21 nt, Artificial Sequence
  Synthetic
ggacuauuagaguguggaggg

SEQ ID NO: 590759 - RNA, 22 nt, Artificial Sequence
  Synthetic
gggacuauuagaguguggaggg

SEQ ID NO: 590760 - RNA, 23 nt, Artificial Sequence
  Synthetic
agggacuauuagaguguggaggg

SEQ ID NO: 590761 - RNA, 24 nt, Artificial Sequence
  Synthetic
uagggacuauuagaguguggaggg

SEQ ID NO: 590762 - RNA, 18 nt, Artificial Sequence
  Synthetic
ggagaguagauuggaggg

SEQ ID NO: 590763 - RNA, 19 nt, Artificial Sequence
  Synthetic
uggagaguagauuggaggg

SEQ ID NO: 590764 - RNA, 20 nt, Artificial Sequence
  Synthetic
uuggagaguagauuggaggg

SEQ ID NO: 590765 - RNA, 21 nt, Artificial Sequence
  Synthetic
auuggagaguagauuggaggg

SEQ ID NO: 590766 - RNA, 22 nt, Artificial Sequence
  Synthetic
aauuggagaguagauuggaggg

SEQ ID NO: 590767 - RNA, 23 nt, Artificial Sequence
  Synthetic
uaauuggagaguagauuggaggg

SEQ ID NO: 590768 - RNA, 24 nt, Artificial Sequence
  Synthetic
cuaauuggagaguagauuggaggg

SEQ ID NO: 590769 - RNA, 18 nt, Artificial Sequence
  Synthetic
ggggaugacuuuggaggg

SEQ ID NO: 590770 - RNA, 19 nt, Artificial Sequence
  Synthetic
uggggaugacuuuggaggg

SEQ ID NO: 590771 - RNA, 20 nt, Artificial Sequence
  Synthetic
guggggaugacuuuggaggg

SEQ ID NO: 590772 - RNA, 21 nt, Artificial Sequence
  Synthetic
uguggggaugacuuuggaggg

SEQ ID NO: 590773 - RNA, 22 nt, Artificial Sequence
  Synthetic
uuguggggaugacuuuggaggg

SEQ ID NO: 590774 - RNA, 23 nt, Artificial Sequence
  Synthetic
auuguggggaugacuuuggaggg

SEQ ID NO: 590775 - RNA, 24 nt, Artificial Sequence
  Synthetic
aauuguggggaugacuuuggaggg

SEQ ID NO: 590776 - RNA, 18 nt, Artificial Sequence
  Synthetic
cugugaaauagaugaggg

SEQ ID NO: 590777 - RNA, 19 nt, Artificial Sequence
  Synthetic
acugugaaauagaugaggg

SEQ ID NO: 590778 - RNA, 20 nt, Artificial Sequence
  Synthetic
uacugugaaauagaugaggg

SEQ ID NO: 590779 - RNA, 21 nt, Artificial Sequence
  Synthetic
cuacugugaaauagaugaggg

SEQ ID NO: 590780 - RNA, 22 nt, Artificial Sequence
  Synthetic
acuacugugaaauagaugaggg

SEQ ID NO: 590781 - RNA, 23 nt, Artificial Sequence
  Synthetic
uacuacugugaaauagaugaggg

SEQ ID NO: 590782 - RNA, 24 nt, Artificial Sequence
  Synthetic
auacuacugugaaauagaugaggg

SEQ ID NO: 590783 - RNA, 18 nt, Artificial Sequence
  Synthetic
aggcccaagggaugaggg

SEQ ID NO: 590784 - RNA, 19 nt, Artificial Sequence
  Synthetic
uaggcccaagggaugaggg

SEQ ID NO: 590785 - RNA, 20 nt, Artificial Sequence
  Synthetic
cuaggcccaagggaugaggg

SEQ ID NO: 590786 - RNA, 21 nt, Artificial Sequence
  Synthetic
ucuaggcccaagggaugaggg

SEQ ID NO: 590787 - RNA, 22 nt, Artificial Sequence
  Synthetic
aucuaggcccaagggaugaggg

SEQ ID NO: 590788 - RNA, 23 nt, Artificial Sequence
  Synthetic
caucuaggcccaagggaugaggg

SEQ ID NO: 590789 - RNA, 24 nt, Artificial Sequence
  Synthetic
acaucuaggcccaagggaugaggg

SEQ ID NO: 590790 - RNA, 18 nt, Artificial Sequence
  Synthetic
gcagagccaugaugaggg

SEQ ID NO: 590791 - RNA, 19 nt, Artificial Sequence
  Synthetic
ugcagagccaugaugaggg

SEQ ID NO: 590792 - RNA, 20 nt, Artificial Sequence
  Synthetic
uugcagagccaugaugaggg

SEQ ID NO: 590793 - RNA, 21 nt, Artificial Sequence
  Synthetic
uuugcagagccaugaugaggg

SEQ ID NO: 590794 - RNA, 22 nt, Artificial Sequence
  Synthetic
uuuugcagagccaugaugaggg

SEQ ID NO: 590795 - RNA, 23 nt, Artificial Sequence
  Synthetic
uuuuugcagagccaugaugaggg

SEQ ID NO: 590796 - RNA, 24 nt, Artificial Sequence
  Synthetic
guuuuugcagagccaugaugaggg

SEQ ID NO: 590797 - RNA, 18 nt, Artificial Sequence
  Synthetic
ucucuaaugcuaugaggg

SEQ ID NO: 590798 - RNA, 19 nt, Artificial Sequence
  Synthetic
gucucuaaugcuaugaggg

SEQ ID NO: 590799 - RNA, 20 nt, Artificial Sequence
  Synthetic
ugucucuaaugcuaugaggg

SEQ ID NO: 590800 - RNA, 21 nt, Artificial Sequence
  Synthetic
augucucuaaugcuaugaggg

SEQ ID NO: 590801 - RNA, 22 nt, Artificial Sequence
  Synthetic
aaugucucuaaugcuaugaggg

SEQ ID NO: 590802 - RNA, 23 nt, Artificial Sequence
  Synthetic
aaaugucucuaaugcuaugaggg

SEQ ID NO: 590803 - RNA, 24 nt, Artificial Sequence
  Synthetic
caaaugucucuaaugcuaugaggg

SEQ ID NO: 590804 - RNA, 18 nt, Artificial Sequence
  Synthetic
auauaagcuuuaugaggg

SEQ ID NO: 590805 - RNA, 19 nt, Artificial Sequence
  Synthetic
aauauaagcuuuaugaggg

SEQ ID NO: 590806 - RNA, 20 nt, Artificial Sequence
  Synthetic
gaauauaagcuuuaugaggg

SEQ ID NO: 590807 - RNA, 21 nt, Artificial Sequence
  Synthetic
agaauauaagcuuuaugaggg

SEQ ID NO: 590808 - RNA, 22 nt, Artificial Sequence
  Synthetic
aagaauauaagcuuuaugaggg

SEQ ID NO: 590809 - RNA, 23 nt, Artificial Sequence
  Synthetic
caagaauauaagcuuuaugaggg

SEQ ID NO: 590810 - RNA, 24 nt, Artificial Sequence
  Synthetic
ccaagaauauaagcuuuaugaggg

SEQ ID NO: 590811 - RNA, 18 nt, Artificial Sequence
  Synthetic
cuccuauauuucugaggg

SEQ ID NO: 590812 - RNA, 19 nt, Artificial Sequence
  Synthetic
ucuccuauauuucugaggg

SEQ ID NO: 590813 - RNA, 20 nt, Artificial Sequence
  Synthetic
cucuccuauauuucugaggg

SEQ ID NO: 590814 - RNA, 21 nt, Artificial Sequence
  Synthetic
ucucuccuauauuucugaggg

SEQ ID NO: 590815 - RNA, 22 nt, Artificial Sequence
  Synthetic
uucucuccuauauuucugaggg

SEQ ID NO: 590816 - RNA, 23 nt, Artificial Sequence
  Synthetic
cuucucuccuauauuucugaggg

SEQ ID NO: 590817 - RNA, 24 nt, Artificial Sequence
  Synthetic
acuucucuccuauauuucugaggg

SEQ ID NO: 590818 - RNA, 18 nt, Artificial Sequence
  Synthetic
aaauuaucccagugaggg

SEQ ID NO: 590819 - RNA, 19 nt, Artificial Sequence
  Synthetic
aaaauuaucccagugaggg

SEQ ID NO: 590820 - RNA, 20 nt, Artificial Sequence
  Synthetic
caaaauuaucccagugaggg

SEQ ID NO: 590821 - RNA, 21 nt, Artificial Sequence
  Synthetic
ucaaaauuaucccagugaggg

SEQ ID NO: 590822 - RNA, 22 nt, Artificial Sequence
  Synthetic
cucaaaauuaucccagugaggg

SEQ ID NO: 590823 - RNA, 23 nt, Artificial Sequence
  Synthetic
ucucaaaauuaucccagugaggg

SEQ ID NO: 590824 - RNA, 24 nt, Artificial Sequence
  Synthetic
aucucaaaauuaucccagugaggg

SEQ ID NO: 590825 - RNA, 18 nt, Artificial Sequence
  Synthetic
guuaaugugcagugaggg

SEQ ID NO: 590826 - RNA, 19 nt, Artificial Sequence
  Synthetic
gguuaaugugcagugaggg

SEQ ID NO: 590827 - RNA, 20 nt, Artificial Sequence
  Synthetic
agguuaaugugcagugaggg

SEQ ID NO: 590828 - RNA, 21 nt, Artificial Sequence
  Synthetic
aagguuaaugugcagugaggg

SEQ ID NO: 590829 - RNA, 22 nt, Artificial Sequence
  Synthetic
uaagguuaaugugcagugaggg

SEQ ID NO: 590830 - RNA, 23 nt, Artificial Sequence
  Synthetic
uuaagguuaaugugcagugaggg

SEQ ID NO: 590831 - RNA, 24 nt, Artificial Sequence
  Synthetic
auuaagguuaaugugcagugaggg

SEQ ID NO: 590832 - RNA, 18 nt, Artificial Sequence
  Synthetic
uuugugagguagugaggg

SEQ ID NO: 590833 - RNA, 19 nt, Artificial Sequence
  Synthetic
uuuugugagguagugaggg

SEQ ID NO: 590834 - RNA, 20 nt, Artificial Sequence
  Synthetic
uuuuugugagguagugaggg

SEQ ID NO: 590835 - RNA, 21 nt, Artificial Sequence
  Synthetic
cuuuuugugagguagugaggg

SEQ ID NO: 590836 - RNA, 22 nt, Artificial Sequence
  Synthetic
acuuuuugugagguagugaggg

SEQ ID NO: 590837 - RNA, 23 nt, Artificial Sequence
  Synthetic
aacuuuuugugagguagugaggg

SEQ ID NO: 590838 - RNA, 24 nt, Artificial Sequence
  Synthetic
caacuuuuugugagguagugaggg

SEQ ID NO: 590839 - RNA, 18 nt, Artificial Sequence
  Synthetic
ugcaacuucucgugaggg

SEQ ID NO: 590840 - RNA, 19 nt, Artificial Sequence
  Synthetic
uugcaacuucucgugaggg

SEQ ID NO: 590841 - RNA, 20 nt, Artificial Sequence
  Synthetic
uuugcaacuucucgugaggg

SEQ ID NO: 590842 - RNA, 21 nt, Artificial Sequence
  Synthetic
auuugcaacuucucgugaggg

SEQ ID NO: 590843 - RNA, 22 nt, Artificial Sequence
  Synthetic
uauuugcaacuucucgugaggg

SEQ ID NO: 590844 - RNA, 23 nt, Artificial Sequence
  Synthetic
guauuugcaacuucucgugaggg

SEQ ID NO: 590845 - RNA, 24 nt, Artificial Sequence
  Synthetic
gguauuugcaacuucucgugaggg

SEQ ID NO: 590846 - RNA, 18 nt, Artificial Sequence
  Synthetic
uuggcugguccuugaggg

SEQ ID NO: 590847 - RNA, 19 nt, Artificial Sequence
  Synthetic
uuuggcugguccuugaggg

SEQ ID NO: 590848 - RNA, 20 nt, Artificial Sequence
  Synthetic
uuuuggcugguccuugaggg

SEQ ID NO: 590849 - RNA, 21 nt, Artificial Sequence
  Synthetic
auuuuggcugguccuugaggg

SEQ ID NO: 590850 - RNA, 22 nt, Artificial Sequence
  Synthetic
cauuuuggcugguccuugaggg

SEQ ID NO: 590851 - RNA, 23 nt, Artificial Sequence
  Synthetic
acauuuuggcugguccuugaggg

SEQ ID NO: 590852 - RNA, 24 nt, Artificial Sequence
  Synthetic
aacauuuuggcugguccuugaggg

SEQ ID NO: 590853 - RNA, 18 nt, Artificial Sequence
  Synthetic
gaaagugauucuugaggg

SEQ ID NO: 590854 - RNA, 19 nt, Artificial Sequence
  Synthetic
ggaaagugauucuugaggg

SEQ ID NO: 590855 - RNA, 20 nt, Artificial Sequence
  Synthetic
aggaaagugauucuugaggg

SEQ ID NO: 590856 - RNA, 21 nt, Artificial Sequence
  Synthetic
aaggaaagugauucuugaggg

SEQ ID NO: 590857 - RNA, 22 nt, Artificial Sequence
  Synthetic
gaaggaaagugauucuugaggg

SEQ ID NO: 590858 - RNA, 23 nt, Artificial Sequence
  Synthetic
agaaggaaagugauucuugaggg

SEQ ID NO: 590859 - RNA, 24 nt, Artificial Sequence
  Synthetic
cagaaggaaagugauucuugaggg

SEQ ID NO: 590860 - RNA, 18 nt, Artificial Sequence
  Synthetic
cagaaauggcuuugaggg

SEQ ID NO: 590861 - RNA, 19 nt, Artificial Sequence
  Synthetic
acagaaauggcuuugaggg

SEQ ID NO: 590862 - RNA, 20 nt, Artificial Sequence
  Synthetic
aacagaaauggcuuugaggg

SEQ ID NO: 590863 - RNA, 21 nt, Artificial Sequence
  Synthetic
gaacagaaauggcuuugaggg

SEQ ID NO: 590864 - RNA, 22 nt, Artificial Sequence
  Synthetic
agaacagaaauggcuuugaggg

SEQ ID NO: 590865 - RNA, 23 nt, Artificial Sequence
  Synthetic
aagaacagaaauggcuuugaggg

SEQ ID NO: 590866 - RNA, 24 nt, Artificial Sequence
  Synthetic
aaagaacagaaauggcuuugaggg

SEQ ID NO: 590867 - RNA, 18 nt, Artificial Sequence
  Synthetic
agaaagaaaacaauaggg

SEQ ID NO: 590868 - RNA, 19 nt, Artificial Sequence
  Synthetic
uagaaagaaaacaauaggg

SEQ ID NO: 590869 - RNA, 20 nt, Artificial Sequence
  Synthetic
uuagaaagaaaacaauaggg

SEQ ID NO: 590870 - RNA, 21 nt, Artificial Sequence
  Synthetic
uuuagaaagaaaacaauaggg

SEQ ID NO: 590871 - RNA, 22 nt, Artificial Sequence
  Synthetic
uuuuagaaagaaaacaauaggg

SEQ ID NO: 590872 - RNA, 23 nt, Artificial Sequence
  Synthetic
cuuuuagaaagaaaacaauaggg

SEQ ID NO: 590873 - RNA, 24 nt, Artificial Sequence
  Synthetic
gcuuuuagaaagaaaacaauaggg

SEQ ID NO: 590874 - RNA, 18 nt, Artificial Sequence
  Synthetic
gggucaggaagaauaggg

SEQ ID NO: 590875 - RNA, 19 nt, Artificial Sequence
  Synthetic
agggucaggaagaauaggg

SEQ ID NO: 590876 - RNA, 20 nt, Artificial Sequence
  Synthetic
gagggucaggaagaauaggg

SEQ ID NO: 590877 - RNA, 21 nt, Artificial Sequence
  Synthetic
ggagggucaggaagaauaggg

SEQ ID NO: 590878 - RNA, 22 nt, Artificial Sequence
  Synthetic
aggagggucaggaagaauaggg

SEQ ID NO: 590879 - RNA, 23 nt, Artificial Sequence
  Synthetic
aaggagggucaggaagaauaggg

SEQ ID NO: 590880 - RNA, 24 nt, Artificial Sequence
  Synthetic
aaaggagggucaggaagaauaggg

SEQ ID NO: 590881 - RNA, 18 nt, Artificial Sequence
  Synthetic
gagaaacuggagauaggg

SEQ ID NO: 590882 - RNA, 19 nt, Artificial Sequence
  Synthetic
ugagaaacuggagauaggg

SEQ ID NO: 590883 - RNA, 20 nt, Artificial Sequence
  Synthetic
gugagaaacuggagauaggg

SEQ ID NO: 590884 - RNA, 21 nt, Artificial Sequence
  Synthetic
ggugagaaacuggagauaggg

SEQ ID NO: 590885 - RNA, 22 nt, Artificial Sequence
  Synthetic
uggugagaaacuggagauaggg

SEQ ID NO: 590886 - RNA, 23 nt, Artificial Sequence
  Synthetic
auggugagaaacuggagauaggg

SEQ ID NO: 590887 - RNA, 24 nt, Artificial Sequence
  Synthetic
cauggugagaaacuggagauaggg

SEQ ID NO: 590888 - RNA, 18 nt, Artificial Sequence
  Synthetic
aaugaaagcaggauaggg

SEQ ID NO: 590889 - RNA, 19 nt, Artificial Sequence
  Synthetic
gaaugaaagcaggauaggg

SEQ ID NO: 590890 - RNA, 20 nt, Artificial Sequence
  Synthetic
agaaugaaagcaggauaggg

SEQ ID NO: 590891 - RNA, 21 nt, Artificial Sequence
  Synthetic
aagaaugaaagcaggauaggg

SEQ ID NO: 590892 - RNA, 22 nt, Artificial Sequence
  Synthetic
gaagaaugaaagcaggauaggg

SEQ ID NO: 590893 - RNA, 23 nt, Artificial Sequence
  Synthetic
ugaagaaugaaagcaggauaggg

SEQ ID NO: 590894 - RNA, 24 nt, Artificial Sequence
  Synthetic
gugaagaaugaaagcaggauaggg

SEQ ID NO: 590895 - RNA, 18 nt, Artificial Sequence
  Synthetic
gauacugguaggauaggg

SEQ ID NO: 590896 - RNA, 19 nt, Artificial Sequence
  Synthetic
ugauacugguaggauaggg

SEQ ID NO: 590897 - RNA, 20 nt, Artificial Sequence
  Synthetic
augauacugguaggauaggg

SEQ ID NO: 590898 - RNA, 21 nt, Artificial Sequence
  Synthetic
gaugauacugguaggauaggg

SEQ ID NO: 590899 - RNA, 22 nt, Artificial Sequence
  Synthetic
ugaugauacugguaggauaggg

SEQ ID NO: 590900 - RNA, 23 nt, Artificial Sequence
  Synthetic
gugaugauacugguaggauaggg

SEQ ID NO: 590901 - RNA, 24 nt, Artificial Sequence
  Synthetic
ugugaugauacugguaggauaggg

SEQ ID NO: 590902 - RNA, 18 nt, Artificial Sequence
  Synthetic
caguauagaaaccuaggg

SEQ ID NO: 590903 - RNA, 19 nt, Artificial Sequence
  Synthetic
acaguauagaaaccuaggg

SEQ ID NO: 590904 - RNA, 20 nt, Artificial Sequence
  Synthetic
aacaguauagaaaccuaggg

SEQ ID NO: 590905 - RNA, 21 nt, Artificial Sequence
  Synthetic
gaacaguauagaaaccuaggg

SEQ ID NO: 590906 - RNA, 22 nt, Artificial Sequence
  Synthetic
ugaacaguauagaaaccuaggg

SEQ ID NO: 590907 - RNA, 23 nt, Artificial Sequence
  Synthetic
uugaacaguauagaaaccuaggg

SEQ ID NO: 590908 - RNA, 24 nt, Artificial Sequence
  Synthetic
uuugaacaguauagaaaccuaggg

SEQ ID NO: 590909 - RNA, 18 nt, Artificial Sequence
  Synthetic
uuggucaaccuccuaggg

SEQ ID NO: 590910 - RNA, 19 nt, Artificial Sequence
  Synthetic
auuggucaaccuccuaggg

SEQ ID NO: 590911 - RNA, 20 nt, Artificial Sequence
  Synthetic
uauuggucaaccuccuaggg

SEQ ID NO: 590912 - RNA, 21 nt, Artificial Sequence
  Synthetic
auauuggucaaccuccuaggg

SEQ ID NO: 590913 - RNA, 22 nt, Artificial Sequence
  Synthetic
cauauuggucaaccuccuaggg

SEQ ID NO: 590914 - RNA, 23 nt, Artificial Sequence
  Synthetic
ccauauuggucaaccuccuaggg

SEQ ID NO: 590915 - RNA, 24 nt, Artificial Sequence
  Synthetic
gccauauuggucaaccuccuaggg

SEQ ID NO: 590916 - RNA, 18 nt, Artificial Sequence
  Synthetic
ggggguggggggcuaggg

SEQ ID NO: 590917 - RNA, 19 nt, Artificial Sequence
  Synthetic
aggggguggggggcuaggg

SEQ ID NO: 590918 - RNA, 20 nt, Artificial Sequence
  Synthetic
caggggguggggggcuaggg

SEQ ID NO: 590919 - RNA, 21 nt, Artificial Sequence
  Synthetic
ucaggggguggggggcuaggg

SEQ ID NO: 590920 - RNA, 22 nt, Artificial Sequence
  Synthetic
gucaggggguggggggcuaggg

SEQ ID NO: 590921 - RNA, 23 nt, Artificial Sequence
  Synthetic
ugucaggggguggggggcuaggg

SEQ ID NO: 590922 - RNA, 24 nt, Artificial Sequence
  Synthetic
cugucaggggguggggggcuaggg

SEQ ID NO: 590923 - RNA, 19 nt, Artificial Sequence
  Synthetic
uggggguggggggcuaggg

SEQ ID NO: 590924 - RNA, 20 nt, Artificial Sequence
  Synthetic
uuggggguggggggcuaggg

SEQ ID NO: 590925 - RNA, 21 nt, Artificial Sequence
  Synthetic
guuggggguggggggcuaggg

SEQ ID NO: 590926 - RNA, 22 nt, Artificial Sequence
  Synthetic
uguuggggguggggggcuaggg

SEQ ID NO: 590927 - RNA, 23 nt, Artificial Sequence
  Synthetic
cuguuggggguggggggcuaggg

SEQ ID NO: 590928 - RNA, 24 nt, Artificial Sequence
  Synthetic
ccuguuggggguggggggcuaggg

SEQ ID NO: 590929 - RNA, 18 nt, Artificial Sequence
  Synthetic
ggcuucuguuggcuaggg

SEQ ID NO: 590930 - RNA, 19 nt, Artificial Sequence
  Synthetic
cggcuucuguuggcuaggg

SEQ ID NO: 590931 - RNA, 20 nt, Artificial Sequence
  Synthetic
acggcuucuguuggcuaggg

SEQ ID NO: 590932 - RNA, 21 nt, Artificial Sequence
  Synthetic
cacggcuucuguuggcuaggg

SEQ ID NO: 590933 - RNA, 22 nt, Artificial Sequence
  Synthetic
ucacggcuucuguuggcuaggg

SEQ ID NO: 590934 - RNA, 23 nt, Artificial Sequence
  Synthetic
cucacggcuucuguuggcuaggg

SEQ ID NO: 590935 - RNA, 24 nt, Artificial Sequence
  Synthetic
ccucacggcuucuguuggcuaggg

SEQ ID NO: 590936 - RNA, 18 nt, Artificial Sequence
  Synthetic
ccaggaucuacucuaggg

SEQ ID NO: 590937 - RNA, 19 nt, Artificial Sequence
  Synthetic
accaggaucuacucuaggg

SEQ ID NO: 590938 - RNA, 20 nt, Artificial Sequence
  Synthetic
aaccaggaucuacucuaggg

SEQ ID NO: 590939 - RNA, 21 nt, Artificial Sequence
  Synthetic
aaaccaggaucuacucuaggg

SEQ ID NO: 590940 - RNA, 22 nt, Artificial Sequence
  Synthetic
gaaaccaggaucuacucuaggg

SEQ ID NO: 590941 - RNA, 23 nt, Artificial Sequence
  Synthetic
agaaaccaggaucuacucuaggg

SEQ ID NO: 590942 - RNA, 24 nt, Artificial Sequence
  Synthetic
cagaaaccaggaucuacucuaggg

SEQ ID NO: 590943 - RNA, 18 nt, Artificial Sequence
  Synthetic
cucaacaacccucuaggg

SEQ ID NO: 590944 - RNA, 19 nt, Artificial Sequence
  Synthetic
ucucaacaacccucuaggg

SEQ ID NO: 590945 - RNA, 20 nt, Artificial Sequence
  Synthetic
cucucaacaacccucuaggg

SEQ ID NO: 590946 - RNA, 21 nt, Artificial Sequence
  Synthetic
ccucucaacaacccucuaggg

SEQ ID NO: 590947 - RNA, 22 nt, Artificial Sequence
  Synthetic
uccucucaacaacccucuaggg

SEQ ID NO: 590948 - RNA, 23 nt, Artificial Sequence
  Synthetic
cuccucucaacaacccucuaggg

SEQ ID NO: 590949 - RNA, 24 nt, Artificial Sequence
  Synthetic
ucuccucucaacaacccucuaggg

SEQ ID NO: 590950 - RNA, 18 nt, Artificial Sequence
  Synthetic
aaauaacuggcucuaggg

SEQ ID NO: 590951 - RNA, 19 nt, Artificial Sequence
  Synthetic
caaauaacuggcucuaggg

SEQ ID NO: 590952 - RNA, 20 nt, Artificial Sequence
  Synthetic
ucaaauaacuggcucuaggg

SEQ ID NO: 590953 - RNA, 21 nt, Artificial Sequence
  Synthetic
gucaaauaacuggcucuaggg

SEQ ID NO: 590954 - RNA, 22 nt, Artificial Sequence
  Synthetic
ugucaaauaacuggcucuaggg

SEQ ID NO: 590955 - RNA, 23 nt, Artificial Sequence
  Synthetic
augucaaauaacuggcucuaggg

SEQ ID NO: 590956 - RNA, 24 nt, Artificial Sequence
  Synthetic
aaugucaaauaacuggcucuaggg

SEQ ID NO: 590957 - RNA, 18 nt, Artificial Sequence
  Synthetic
ccuuaaugaucucuaggg

SEQ ID NO: 590958 - RNA, 19 nt, Artificial Sequence
  Synthetic
uccuuaaugaucucuaggg

SEQ ID NO: 590959 - RNA, 20 nt, Artificial Sequence
  Synthetic
auccuuaaugaucucuaggg

SEQ ID NO: 590960 - RNA, 21 nt, Artificial Sequence
  Synthetic
uauccuuaaugaucucuaggg

SEQ ID NO: 590961 - RNA, 22 nt, Artificial Sequence
  Synthetic
guauccuuaaugaucucuaggg

SEQ ID NO: 590962 - RNA, 23 nt, Artificial Sequence
  Synthetic
gguauccuuaaugaucucuaggg

SEQ ID NO: 590963 - RNA, 24 nt, Artificial Sequence
  Synthetic
agguauccuuaaugaucucuaggg

SEQ ID NO: 590964 - RNA, 18 nt, Artificial Sequence
  Synthetic
ccaagaaauagaguaggg

SEQ ID NO: 590965 - RNA, 19 nt, Artificial Sequence
  Synthetic
accaagaaauagaguaggg

SEQ ID NO: 590966 - RNA, 20 nt, Artificial Sequence
  Synthetic
uaccaagaaauagaguaggg

SEQ ID NO: 590967 - RNA, 21 nt, Artificial Sequence
  Synthetic
cuaccaagaaauagaguaggg

SEQ ID NO: 590968 - RNA, 22 nt, Artificial Sequence
  Synthetic
ucuaccaagaaauagaguaggg

SEQ ID NO: 590969 - RNA, 23 nt, Artificial Sequence
  Synthetic
aucuaccaagaaauagaguaggg

SEQ ID NO: 590970 - RNA, 24 nt, Artificial Sequence
  Synthetic
uaucuaccaagaaauagaguaggg

SEQ ID NO: 590971 - RNA, 18 nt, Artificial Sequence
  Synthetic
cauccuagugagguaggg

SEQ ID NO: 590972 - RNA, 19 nt, Artificial Sequence
  Synthetic
acauccuagugagguaggg

SEQ ID NO: 590973 - RNA, 20 nt, Artificial Sequence
  Synthetic
aacauccuagugagguaggg

SEQ ID NO: 590974 - RNA, 21 nt, Artificial Sequence
  Synthetic
caacauccuagugagguaggg

SEQ ID NO: 590975 - RNA, 22 nt, Artificial Sequence
  Synthetic
acaacauccuagugagguaggg

SEQ ID NO: 590976 - RNA, 23 nt, Artificial Sequence
  Synthetic
cacaacauccuagugagguaggg

SEQ ID NO: 590977 - RNA, 24 nt, Artificial Sequence
  Synthetic
ccacaacauccuagugagguaggg

SEQ ID NO: 590978 - RNA, 18 nt, Artificial Sequence
  Synthetic
uuuggaugaaggguaggg

SEQ ID NO: 590979 - RNA, 19 nt, Artificial Sequence
  Synthetic
cuuuggaugaaggguaggg

SEQ ID NO: 590980 - RNA, 20 nt, Artificial Sequence
  Synthetic
ccuuuggaugaaggguaggg

SEQ ID NO: 590981 - RNA, 21 nt, Artificial Sequence
  Synthetic
accuuuggaugaaggguaggg

SEQ ID NO: 590982 - RNA, 22 nt, Artificial Sequence
  Synthetic
aaccuuuggaugaaggguaggg

SEQ ID NO: 590983 - RNA, 23 nt, Artificial Sequence
  Synthetic
uaaccuuuggaugaaggguaggg

SEQ ID NO: 590984 - RNA, 24 nt, Artificial Sequence
  Synthetic
cuaaccuuuggaugaaggguaggg

SEQ ID NO: 590985 - RNA, 18 nt, Artificial Sequence
  Synthetic
ugagggguggggguaggg

SEQ ID NO: 590986 - RNA, 19 nt, Artificial Sequence
  Synthetic
augagggguggggguaggg

SEQ ID NO: 590987 - RNA, 20 nt, Artificial Sequence
  Synthetic
gaugagggguggggguaggg

SEQ ID NO: 590988 - RNA, 21 nt, Artificial Sequence
  Synthetic
ugaugagggguggggguaggg

SEQ ID NO: 590989 - RNA, 22 nt, Artificial Sequence
  Synthetic
augaugagggguggggguaggg

SEQ ID NO: 590990 - RNA, 23 nt, Artificial Sequence
  Synthetic
caugaugagggguggggguaggg

SEQ ID NO: 590991 - RNA, 24 nt, Artificial Sequence
  Synthetic
ccaugaugagggguggggguaggg

SEQ ID NO: 590992 - RNA, 18 nt, Artificial Sequence
  Synthetic
aagcuauucaugguaggg

SEQ ID NO: 590993 - RNA, 19 nt, Artificial Sequence
  Synthetic
caagcuauucaugguaggg

SEQ ID NO: 590994 - RNA, 20 nt, Artificial Sequence
  Synthetic
ucaagcuauucaugguaggg

SEQ ID NO: 590995 - RNA, 21 nt, Artificial Sequence
  Synthetic
aucaagcuauucaugguaggg

SEQ ID NO: 590996 - RNA, 22 nt, Artificial Sequence
  Synthetic
uaucaagcuauucaugguaggg

SEQ ID NO: 590997 - RNA, 23 nt, Artificial Sequence
  Synthetic
cuaucaagcuauucaugguaggg

SEQ ID NO: 590998 - RNA, 24 nt, Artificial Sequence
  Synthetic
gcuaucaagcuauucaugguaggg

SEQ ID NO: 590999 - RNA, 18 nt, Artificial Sequence
  Synthetic
agcaucuugaaauuaggg

SEQ ID NO: 591000 - RNA, 19 nt, Artificial Sequence
  Synthetic
cagcaucuugaaauuaggg

SEQ ID NO: 591001 - RNA, 20 nt, Artificial Sequence
  Synthetic
ccagcaucuugaaauuaggg

SEQ ID NO: 591002 - RNA, 21 nt, Artificial Sequence
  Synthetic
accagcaucuugaaauuaggg

SEQ ID NO: 591003 - RNA, 22 nt, Artificial Sequence
  Synthetic
aaccagcaucuugaaauuaggg

SEQ ID NO: 591004 - RNA, 23 nt, Artificial Sequence
  Synthetic
gaaccagcaucuugaaauuaggg

SEQ ID NO: 591005 - RNA, 24 nt, Artificial Sequence
  Synthetic
ggaaccagcaucuugaaauuaggg

SEQ ID NO: 591006 - RNA, 18 nt, Artificial Sequence
  Synthetic
uaaaacacgagauuaggg

SEQ ID NO: 591007 - RNA, 19 nt, Artificial Sequence
  Synthetic
guaaaacacgagauuaggg

SEQ ID NO: 591008 - RNA, 20 nt, Artificial Sequence
  Synthetic
gguaaaacacgagauuaggg

SEQ ID NO: 591009 - RNA, 21 nt, Artificial Sequence
  Synthetic
agguaaaacacgagauuaggg

SEQ ID NO: 591010 - RNA, 22 nt, Artificial Sequence
  Synthetic
uagguaaaacacgagauuaggg

SEQ ID NO: 591011 - RNA, 23 nt, Artificial Sequence
  Synthetic
guagguaaaacacgagauuaggg

SEQ ID NO: 591012 - RNA, 24 nt, Artificial Sequence
  Synthetic
cguagguaaaacacgagauuaggg

SEQ ID NO: 591013 - RNA, 18 nt, Artificial Sequence
  Synthetic
uaaauuaggcccuuaggg

SEQ ID NO: 591014 - RNA, 19 nt, Artificial Sequence
  Synthetic
guaaauuaggcccuuaggg

SEQ ID NO: 591015 - RNA, 20 nt, Artificial Sequence
  Synthetic
uguaaauuaggcccuuaggg

SEQ ID NO: 591016 - RNA, 21 nt, Artificial Sequence
  Synthetic
uuguaaauuaggcccuuaggg

SEQ ID NO: 591017 - RNA, 22 nt, Artificial Sequence
  Synthetic
uuuguaaauuaggcccuuaggg

SEQ ID NO: 591018 - RNA, 23 nt, Artificial Sequence
  Synthetic
cuuuguaaauuaggcccuuaggg

SEQ ID NO: 591019 - RNA, 24 nt, Artificial Sequence
  Synthetic
gcuuuguaaauuaggcccuuaggg

SEQ ID NO: 591020 - RNA, 18 nt, Artificial Sequence
  Synthetic
acaaggaacuucuuaggg

SEQ ID NO: 591021 - RNA, 19 nt, Artificial Sequence
  Synthetic
uacaaggaacuucuuaggg

SEQ ID NO: 591022 - RNA, 20 nt, Artificial Sequence
  Synthetic
guacaaggaacuucuuaggg

SEQ ID NO: 591023 - RNA, 21 nt, Artificial Sequence
  Synthetic
aguacaaggaacuucuuaggg

SEQ ID NO: 591024 - RNA, 22 nt, Artificial Sequence
  Synthetic
aaguacaaggaacuucuuaggg

SEQ ID NO: 591025 - RNA, 23 nt, Artificial Sequence
  Synthetic
gaaguacaaggaacuucuuaggg

SEQ ID NO: 591026 - RNA, 24 nt, Artificial Sequence
  Synthetic
ggaaguacaaggaacuucuuaggg

SEQ ID NO: 591027 - RNA, 18 nt, Artificial Sequence
  Synthetic
ggauuauuauaguuaggg

SEQ ID NO: 591028 - RNA, 19 nt, Artificial Sequence
  Synthetic
aggauuauuauaguuaggg

SEQ ID NO: 591029 - RNA, 20 nt, Artificial Sequence
  Synthetic
caggauuauuauaguuaggg

SEQ ID NO: 591030 - RNA, 21 nt, Artificial Sequence
  Synthetic
ucaggauuauuauaguuaggg

SEQ ID NO: 591031 - RNA, 22 nt, Artificial Sequence
  Synthetic
aucaggauuauuauaguuaggg

SEQ ID NO: 591032 - RNA, 23 nt, Artificial Sequence
  Synthetic
caucaggauuauuauaguuaggg

SEQ ID NO: 591033 - RNA, 24 nt, Artificial Sequence
  Synthetic
ucaucaggauuauuauaguuaggg

SEQ ID NO: 591034 - RNA, 18 nt, Artificial Sequence
  Synthetic
ugagagcaggcguuaggg

SEQ ID NO: 591035 - RNA, 19 nt, Artificial Sequence
  Synthetic
augagagcaggcguuaggg

SEQ ID NO: 591036 - RNA, 20 nt, Artificial Sequence
  Synthetic
uaugagagcaggcguuaggg

SEQ ID NO: 591037 - RNA, 21 nt, Artificial Sequence
  Synthetic
guaugagagcaggcguuaggg

SEQ ID NO: 591038 - RNA, 22 nt, Artificial Sequence
  Synthetic
uguaugagagcaggcguuaggg

SEQ ID NO: 591039 - RNA, 23 nt, Artificial Sequence
  Synthetic
cuguaugagagcaggcguuaggg

SEQ ID NO: 591040 - RNA, 24 nt, Artificial Sequence
  Synthetic
acuguaugagagcaggcguuaggg

SEQ ID NO: 591041 - RNA, 18 nt, Artificial Sequence
  Synthetic
uagaaagggagguuaggg

SEQ ID NO: 591042 - RNA, 19 nt, Artificial Sequence
  Synthetic
auagaaagggagguuaggg

SEQ ID NO: 591043 - RNA, 20 nt, Artificial Sequence
  Synthetic
uauagaaagggagguuaggg

SEQ ID NO: 591044 - RNA, 21 nt, Artificial Sequence
  Synthetic
guauagaaagggagguuaggg

SEQ ID NO: 591045 - RNA, 22 nt, Artificial Sequence
  Synthetic
aguauagaaagggagguuaggg

SEQ ID NO: 591046 - RNA, 23 nt, Artificial Sequence
  Synthetic
gaguauagaaagggagguuaggg

SEQ ID NO: 591047 - RNA, 24 nt, Artificial Sequence
  Synthetic
ugaguauagaaagggagguuaggg

SEQ ID NO: 591048 - RNA, 18 nt, Artificial Sequence
  Synthetic
ggggaugggggguuaggg

SEQ ID NO: 591049 - RNA, 19 nt, Artificial Sequence
  Synthetic
aggggaugggggguuaggg

SEQ ID NO: 591050 - RNA, 20 nt, Artificial Sequence
  Synthetic
caggggaugggggguuaggg

SEQ ID NO: 591051 - RNA, 21 nt, Artificial Sequence
  Synthetic
ucaggggaugggggguuaggg

SEQ ID NO: 591052 - RNA, 22 nt, Artificial Sequence
  Synthetic
cucaggggaugggggguuaggg

SEQ ID NO: 591053 - RNA, 23 nt, Artificial Sequence
  Synthetic
ucucaggggaugggggguuaggg

SEQ ID NO: 591054 - RNA, 24 nt, Artificial Sequence
  Synthetic
cucucaggggaugggggguuaggg

SEQ ID NO: 591055 - RNA, 18 nt, Artificial Sequence
  Synthetic
caucauuguuauuuaggg

SEQ ID NO: 591056 - RNA, 19 nt, Artificial Sequence
  Synthetic
ccaucauuguuauuuaggg

SEQ ID NO: 591057 - RNA, 20 nt, Artificial Sequence
  Synthetic
cccaucauuguuauuuaggg

SEQ ID NO: 591058 - RNA, 21 nt, Artificial Sequence
  Synthetic
ucccaucauuguuauuuaggg

SEQ ID NO: 591059 - RNA, 22 nt, Artificial Sequence
  Synthetic
gucccaucauuguuauuuaggg

SEQ ID NO: 591060 - RNA, 23 nt, Artificial Sequence
  Synthetic
ggucccaucauuguuauuuaggg

SEQ ID NO: 591061 - RNA, 24 nt, Artificial Sequence
  Synthetic
aggucccaucauuguuauuuaggg

SEQ ID NO: 591062 - RNA, 18 nt, Artificial Sequence
  Synthetic
uauuguauuuauuuaggg

SEQ ID NO: 591063 - RNA, 19 nt, Artificial Sequence
  Synthetic
guauuguauuuauuuaggg

SEQ ID NO: 591064 - RNA, 20 nt, Artificial Sequence
  Synthetic
uguauuguauuuauuuaggg

SEQ ID NO: 591065 - RNA, 21 nt, Artificial Sequence
  Synthetic
uuguauuguauuuauuuaggg

SEQ ID NO: 591066 - RNA, 22 nt, Artificial Sequence
  Synthetic
auuguauuguauuuauuuaggg

SEQ ID NO: 591067 - RNA, 23 nt, Artificial Sequence
  Synthetic
uauuguauuguauuuauuuaggg

SEQ ID NO: 591068 - RNA, 24 nt, Artificial Sequence
  Synthetic
guauuguauuguauuuauuuaggg

SEQ ID NO: 591069 - RNA, 18 nt, Artificial Sequence
  Synthetic
aauuucagcacuuuaggg

SEQ ID NO: 591070 - RNA, 19 nt, Artificial Sequence
  Synthetic
uaauuucagcacuuuaggg

SEQ ID NO: 591071 - RNA, 20 nt, Artificial Sequence
  Synthetic
guaauuucagcacuuuaggg

SEQ ID NO: 591072 - RNA, 21 nt, Artificial Sequence
  Synthetic
uguaauuucagcacuuuaggg

SEQ ID NO: 591073 - RNA, 22 nt, Artificial Sequence
  Synthetic
cuguaauuucagcacuuuaggg

SEQ ID NO: 591074 - RNA, 23 nt, Artificial Sequence
  Synthetic
ucuguaauuucagcacuuuaggg

SEQ ID NO: 591075 - RNA, 24 nt, Artificial Sequence
  Synthetic
gucuguaauuucagcacuuuaggg

SEQ ID NO: 591076 - RNA, 18 nt, Artificial Sequence
  Synthetic
cacauagaagcuuuaggg

SEQ ID NO: 591077 - RNA, 19 nt, Artificial Sequence
  Synthetic
ucacauagaagcuuuaggg

SEQ ID NO: 591078 - RNA, 20 nt, Artificial Sequence
  Synthetic
aucacauagaagcuuuaggg

SEQ ID NO: 591079 - RNA, 21 nt, Artificial Sequence
  Synthetic
aaucacauagaagcuuuaggg

SEQ ID NO: 591080 - RNA, 22 nt, Artificial Sequence
  Synthetic
uaaucacauagaagcuuuaggg

SEQ ID NO: 591081 - RNA, 23 nt, Artificial Sequence
  Synthetic
uuaaucacauagaagcuuuaggg

SEQ ID NO: 591082 - RNA, 24 nt, Artificial Sequence
  Synthetic
uuuaaucacauagaagcuuuaggg

SEQ ID NO: 591083 - RNA, 18 nt, Artificial Sequence
  Synthetic
gcugguuucauuuuaggg

SEQ ID NO: 591084 - RNA, 19 nt, Artificial Sequence
  Synthetic
ugcugguuucauuuuaggg

SEQ ID NO: 591085 - RNA, 20 nt, Artificial Sequence
  Synthetic
uugcugguuucauuuuaggg

SEQ ID NO: 591086 - RNA, 21 nt, Artificial Sequence
  Synthetic
uuugcugguuucauuuuaggg

SEQ ID NO: 591087 - RNA, 22 nt, Artificial Sequence
  Synthetic
uuuugcugguuucauuuuaggg

SEQ ID NO: 591088 - RNA, 23 nt, Artificial Sequence
  Synthetic
cuuuugcugguuucauuuuaggg

SEQ ID NO: 591089 - RNA, 24 nt, Artificial Sequence
  Synthetic
gcuuuugcugguuucauuuuaggg

SEQ ID NO: 591090 - RNA, 18 nt, Artificial Sequence
  Synthetic
gaaaaagcaaaaaacggg

SEQ ID NO: 591091 - RNA, 19 nt, Artificial Sequence
  Synthetic
ugaaaaagcaaaaaacggg

SEQ ID NO: 591092 - RNA, 20 nt, Artificial Sequence
  Synthetic
cugaaaaagcaaaaaacggg

SEQ ID NO: 591093 - RNA, 21 nt, Artificial Sequence
  Synthetic
acugaaaaagcaaaaaacggg

SEQ ID NO: 591094 - RNA, 22 nt, Artificial Sequence
  Synthetic
aacugaaaaagcaaaaaacggg

SEQ ID NO: 591095 - RNA, 23 nt, Artificial Sequence
  Synthetic
aaacugaaaaagcaaaaaacggg

SEQ ID NO: 591096 - RNA, 24 nt, Artificial Sequence
  Synthetic
gaaacugaaaaagcaaaaaacggg

SEQ ID NO: 591097 - RNA, 18 nt, Artificial Sequence
  Synthetic
ccagaauuccaaaacggg

SEQ ID NO: 591098 - RNA, 19 nt, Artificial Sequence
  Synthetic
gccagaauuccaaaacggg

SEQ ID NO: 591099 - RNA, 20 nt, Artificial Sequence
  Synthetic
ggccagaauuccaaaacggg

SEQ ID NO: 591100 - RNA, 21 nt, Artificial Sequence
  Synthetic
aggccagaauuccaaaacggg

SEQ ID NO: 591101 - RNA, 22 nt, Artificial Sequence
  Synthetic
aaggccagaauuccaaaacggg

SEQ ID NO: 591102 - RNA, 23 nt, Artificial Sequence
  Synthetic
aaaggccagaauuccaaaacggg

SEQ ID NO: 591103 - RNA, 24 nt, Artificial Sequence
  Synthetic
gaaaggccagaauuccaaaacggg

SEQ ID NO: 591104 - RNA, 18 nt, Artificial Sequence
  Synthetic
aaauccaucaugaacggg

SEQ ID NO: 591105 - RNA, 19 nt, Artificial Sequence
  Synthetic
uaaauccaucaugaacggg

SEQ ID NO: 591106 - RNA, 20 nt, Artificial Sequence
  Synthetic
uuaaauccaucaugaacggg

SEQ ID NO: 591107 - RNA, 21 nt, Artificial Sequence
  Synthetic
uuuaaauccaucaugaacggg

SEQ ID NO: 591108 - RNA, 22 nt, Artificial Sequence
  Synthetic
uuuuaaauccaucaugaacggg

SEQ ID NO: 591109 - RNA, 23 nt, Artificial Sequence
  Synthetic
auuuuaaauccaucaugaacggg

SEQ ID NO: 591110 - RNA, 24 nt, Artificial Sequence
  Synthetic
cauuuuaaauccaucaugaacggg

SEQ ID NO: 591111 - RNA, 18 nt, Artificial Sequence
  Synthetic
aggaaaacagaccacggg

SEQ ID NO: 591112 - RNA, 19 nt, Artificial Sequence
  Synthetic
gaggaaaacagaccacggg

SEQ ID NO: 591113 - RNA, 20 nt, Artificial Sequence
  Synthetic
agaggaaaacagaccacggg

SEQ ID NO: 591114 - RNA, 21 nt, Artificial Sequence
  Synthetic
cagaggaaaacagaccacggg

SEQ ID NO: 591115 - RNA, 22 nt, Artificial Sequence
  Synthetic
acagaggaaaacagaccacggg

SEQ ID NO: 591116 - RNA, 23 nt, Artificial Sequence
  Synthetic
aacagaggaaaacagaccacggg

SEQ ID NO: 591117 - RNA, 24 nt, Artificial Sequence
  Synthetic
aaacagaggaaaacagaccacggg

SEQ ID NO: 591118 - RNA, 18 nt, Artificial Sequence
  Synthetic
aaaaauaaaauucacggg

SEQ ID NO: 591119 - RNA, 19 nt, Artificial Sequence
  Synthetic
caaaaauaaaauucacggg

SEQ ID NO: 591120 - RNA, 20 nt, Artificial Sequence
  Synthetic
ucaaaaauaaaauucacggg

SEQ ID NO: 591121 - RNA, 21 nt, Artificial Sequence
  Synthetic
uucaaaaauaaaauucacggg

SEQ ID NO: 591122 - RNA, 22 nt, Artificial Sequence
  Synthetic
uuucaaaaauaaaauucacggg

SEQ ID NO: 591123 - RNA, 23 nt, Artificial Sequence
  Synthetic
cuuucaaaaauaaaauucacggg

SEQ ID NO: 591124 - RNA, 24 nt, Artificial Sequence
  Synthetic
ucuuucaaaaauaaaauucacggg

SEQ ID NO: 591125 - RNA, 18 nt, Artificial Sequence
  Synthetic
caagaccgguaagacggg

SEQ ID NO: 591126 - RNA, 19 nt, Artificial Sequence
  Synthetic
ucaagaccgguaagacggg

SEQ ID NO: 591127 - RNA, 20 nt, Artificial Sequence
  Synthetic
aucaagaccgguaagacggg

SEQ ID NO: 591128 - RNA, 21 nt, Artificial Sequence
  Synthetic
gaucaagaccgguaagacggg

SEQ ID NO: 591129 - RNA, 22 nt, Artificial Sequence
  Synthetic
cgaucaagaccgguaagacggg

SEQ ID NO: 591130 - RNA, 23 nt, Artificial Sequence
  Synthetic
ccgaucaagaccgguaagacggg

SEQ ID NO: 591131 - RNA, 24 nt, Artificial Sequence
  Synthetic
accgaucaagaccgguaagacggg

SEQ ID NO: 591132 - RNA, 18 nt, Artificial Sequence
  Synthetic
accuuuuuauaauacggg

SEQ ID NO: 591133 - RNA, 19 nt, Artificial Sequence
  Synthetic
caccuuuuuauaauacggg

SEQ ID NO: 591134 - RNA, 20 nt, Artificial Sequence
  Synthetic
acaccuuuuuauaauacggg

SEQ ID NO: 591135 - RNA, 21 nt, Artificial Sequence
  Synthetic
uacaccuuuuuauaauacggg

SEQ ID NO: 591136 - RNA, 22 nt, Artificial Sequence
  Synthetic
uuacaccuuuuuauaauacggg

SEQ ID NO: 591137 - RNA, 23 nt, Artificial Sequence
  Synthetic
guuacaccuuuuuauaauacggg

SEQ ID NO: 591138 - RNA, 24 nt, Artificial Sequence
  Synthetic
aguuacaccuuuuuauaauacggg

SEQ ID NO: 591139 - RNA, 18 nt, Artificial Sequence
  Synthetic
aggaucaacagauacggg

SEQ ID NO: 591140 - RNA, 19 nt, Artificial Sequence
  Synthetic
gaggaucaacagauacggg

SEQ ID NO: 591141 - RNA, 20 nt, Artificial Sequence
  Synthetic
ugaggaucaacagauacggg

SEQ ID NO: 591142 - RNA, 21 nt, Artificial Sequence
  Synthetic
uugaggaucaacagauacggg

SEQ ID NO: 591143 - RNA, 22 nt, Artificial Sequence
  Synthetic
uuugaggaucaacagauacggg

SEQ ID NO: 591144 - RNA, 23 nt, Artificial Sequence
  Synthetic
auuugaggaucaacagauacggg

SEQ ID NO: 591145 - RNA, 24 nt, Artificial Sequence
  Synthetic
cauuugaggaucaacagauacggg

SEQ ID NO: 591146 - RNA, 18 nt, Artificial Sequence
  Synthetic
acaaauggguuauacggg

SEQ ID NO: 591147 - RNA, 19 nt, Artificial Sequence
  Synthetic
cacaaauggguuauacggg

SEQ ID NO: 591148 - RNA, 20 nt, Artificial Sequence
  Synthetic
ccacaaauggguuauacggg

SEQ ID NO: 591149 - RNA, 21 nt, Artificial Sequence
  Synthetic
accacaaauggguuauacggg

SEQ ID NO: 591150 - RNA, 22 nt, Artificial Sequence
  Synthetic
aaccacaaauggguuauacggg

SEQ ID NO: 591151 - RNA, 23 nt, Artificial Sequence
  Synthetic
aaaccacaaauggguuauacggg

SEQ ID NO: 591152 - RNA, 24 nt, Artificial Sequence
  Synthetic
caaaccacaaauggguuauacggg

SEQ ID NO: 591153 - RNA, 18 nt, Artificial Sequence
  Synthetic
aucagguuucccuacggg

SEQ ID NO: 591154 - RNA, 19 nt, Artificial Sequence
  Synthetic
uaucagguuucccuacggg

SEQ ID NO: 591155 - RNA, 20 nt, Artificial Sequence
  Synthetic
auaucagguuucccuacggg

SEQ ID NO: 591156 - RNA, 21 nt, Artificial Sequence
  Synthetic
gauaucagguuucccuacggg

SEQ ID NO: 591157 - RNA, 22 nt, Artificial Sequence
  Synthetic
ugauaucagguuucccuacggg

SEQ ID NO: 591158 - RNA, 23 nt, Artificial Sequence
  Synthetic
augauaucagguuucccuacggg

SEQ ID NO: 591159 - RNA, 24 nt, Artificial Sequence
  Synthetic
gaugauaucagguuucccuacggg

SEQ ID NO: 591160 - RNA, 18 nt, Artificial Sequence
  Synthetic
uggguucacacuuacggg

SEQ ID NO: 591161 - RNA, 19 nt, Artificial Sequence
  Synthetic
auggguucacacuuacggg

SEQ ID NO: 591162 - RNA, 20 nt, Artificial Sequence
  Synthetic
gauggguucacacuuacggg

SEQ ID NO: 591163 - RNA, 21 nt, Artificial Sequence
  Synthetic
ugauggguucacacuuacggg

SEQ ID NO: 591164 - RNA, 22 nt, Artificial Sequence
  Synthetic
gugauggguucacacuuacggg

SEQ ID NO: 591165 - RNA, 23 nt, Artificial Sequence
  Synthetic
agugauggguucacacuuacggg

SEQ ID NO: 591166 - RNA, 24 nt, Artificial Sequence
  Synthetic
aagugauggguucacacuuacggg

SEQ ID NO: 591167 - RNA, 18 nt, Artificial Sequence
  Synthetic
acugagcccaacaccggg

SEQ ID NO: 591168 - RNA, 19 nt, Artificial Sequence
  Synthetic
gacugagcccaacaccggg

SEQ ID NO: 591169 - RNA, 20 nt, Artificial Sequence
  Synthetic
agacugagcccaacaccggg

SEQ ID NO: 591170 - RNA, 21 nt, Artificial Sequence
  Synthetic
uagacugagcccaacaccggg

SEQ ID NO: 591171 - RNA, 22 nt, Artificial Sequence
  Synthetic
auagacugagcccaacaccggg

SEQ ID NO: 591172 - RNA, 23 nt, Artificial Sequence
  Synthetic
cauagacugagcccaacaccggg

SEQ ID NO: 591173 - RNA, 24 nt, Artificial Sequence
  Synthetic
acauagacugagcccaacaccggg

SEQ ID NO: 591174 - RNA, 18 nt, Artificial Sequence
  Synthetic
auuuuuccguggaccggg

SEQ ID NO: 591175 - RNA, 19 nt, Artificial Sequence
  Synthetic
aauuuuuccguggaccggg

SEQ ID NO: 591176 - RNA, 20 nt, Artificial Sequence
  Synthetic
caauuuuuccguggaccggg

SEQ ID NO: 591177 - RNA, 21 nt, Artificial Sequence
  Synthetic
acaauuuuuccguggaccggg

SEQ ID NO: 591178 - RNA, 22 nt, Artificial Sequence
  Synthetic
gacaauuuuuccguggaccggg

SEQ ID NO: 591179 - RNA, 23 nt, Artificial Sequence
  Synthetic
agacaauuuuuccguggaccggg

SEQ ID NO: 591180 - RNA, 24 nt, Artificial Sequence
  Synthetic
aagacaauuuuuccguggaccggg

SEQ ID NO: 591181 - RNA, 18 nt, Artificial Sequence
  Synthetic
ugaaaagaugguaccggg

SEQ ID NO: 591182 - RNA, 19 nt, Artificial Sequence
  Synthetic
cugaaaagaugguaccggg

SEQ ID NO: 591183 - RNA, 20 nt, Artificial Sequence
  Synthetic
acugaaaagaugguaccggg

SEQ ID NO: 591184 - RNA, 21 nt, Artificial Sequence
  Synthetic
gacugaaaagaugguaccggg

SEQ ID NO: 591185 - RNA, 22 nt, Artificial Sequence
  Synthetic
ugacugaaaagaugguaccggg

SEQ ID NO: 591186 - RNA, 23 nt, Artificial Sequence
  Synthetic
cugacugaaaagaugguaccggg

SEQ ID NO: 591187 - RNA, 24 nt, Artificial Sequence
  Synthetic
ucugacugaaaagaugguaccggg

SEQ ID NO: 591188 - RNA, 18 nt, Artificial Sequence
  Synthetic
cuggcucuguugcccggg

SEQ ID NO: 591189 - RNA, 19 nt, Artificial Sequence
  Synthetic
ucuggcucuguugcccggg

SEQ ID NO: 591190 - RNA, 20 nt, Artificial Sequence
  Synthetic
gucuggcucuguugcccggg

SEQ ID NO: 591191 - RNA, 21 nt, Artificial Sequence
  Synthetic
agucuggcucuguugcccggg

SEQ ID NO: 591192 - RNA, 22 nt, Artificial Sequence
  Synthetic
gagucuggcucuguugcccggg

SEQ ID NO: 591193 - RNA, 23 nt, Artificial Sequence
  Synthetic
agagucuggcucuguugcccggg

SEQ ID NO: 591194 - RNA, 24 nt, Artificial Sequence
  Synthetic
cagagucuggcucuguugcccggg

SEQ ID NO: 591195 - RNA, 21 nt, Artificial Sequence
  Synthetic
cauucugauaccaaagccggg

SEQ ID NO: 591196 - RNA, 22 nt, Artificial Sequence
  Synthetic
ucauucugauaccaaagccggg

SEQ ID NO: 591197 - RNA, 23 nt, Artificial Sequence
  Synthetic
aucauucugauaccaaagccggg

SEQ ID NO: 591198 - RNA, 24 nt, Artificial Sequence
  Synthetic
caucauucugauaccaaagccggg

SEQ ID NO: 591199 - RNA, 18 nt, Artificial Sequence
  Synthetic
gcguuuugggaggccggg

SEQ ID NO: 591200 - RNA, 19 nt, Artificial Sequence
  Synthetic
agcguuuugggaggccggg

SEQ ID NO: 591201 - RNA, 20 nt, Artificial Sequence
  Synthetic
cagcguuuugggaggccggg

SEQ ID NO: 591202 - RNA, 21 nt, Artificial Sequence
  Synthetic
ucagcguuuugggaggccggg

SEQ ID NO: 591203 - RNA, 22 nt, Artificial Sequence
  Synthetic
cucagcguuuugggaggccggg

SEQ ID NO: 591204 - RNA, 23 nt, Artificial Sequence
  Synthetic
ucucagcguuuugggaggccggg

SEQ ID NO: 591205 - RNA, 24 nt, Artificial Sequence
  Synthetic
aucucagcguuuugggaggccggg

SEQ ID NO: 591206 - RNA, 18 nt, Artificial Sequence
  Synthetic
uuuaaaagagaugccggg

SEQ ID NO: 591207 - RNA, 19 nt, Artificial Sequence
  Synthetic
uuuuaaaagagaugccggg

SEQ ID NO: 591208 - RNA, 20 nt, Artificial Sequence
  Synthetic
cuuuuaaaagagaugccggg

SEQ ID NO: 591209 - RNA, 21 nt, Artificial Sequence
  Synthetic
ucuuuuaaaagagaugccggg

SEQ ID NO: 591210 - RNA, 22 nt, Artificial Sequence
  Synthetic
uucuuuuaaaagagaugccggg

SEQ ID NO: 591211 - RNA, 23 nt, Artificial Sequence
  Synthetic
uuucuuuuaaaagagaugccggg

SEQ ID NO: 591212 - RNA, 24 nt, Artificial Sequence
  Synthetic
uuuucuuuuaaaagagaugccggg

SEQ ID NO: 591213 - RNA, 18 nt, Artificial Sequence
  Synthetic
accccuugugcuuccggg

SEQ ID NO: 591214 - RNA, 19 nt, Artificial Sequence
  Synthetic
gaccccuugugcuuccggg

SEQ ID NO: 591215 - RNA, 20 nt, Artificial Sequence
  Synthetic
ugaccccuugugcuuccggg

SEQ ID NO: 591216 - RNA, 21 nt, Artificial Sequence
  Synthetic
cugaccccuugugcuuccggg

SEQ ID NO: 591217 - RNA, 22 nt, Artificial Sequence
  Synthetic
ccugaccccuugugcuuccggg

SEQ ID NO: 591218 - RNA, 23 nt, Artificial Sequence
  Synthetic
cccugaccccuugugcuuccggg

SEQ ID NO: 591219 - RNA, 24 nt, Artificial Sequence
  Synthetic
ucccugaccccuugugcuuccggg

SEQ ID NO: 591220 - RNA, 18 nt, Artificial Sequence
  Synthetic
ucagcaaaggaaagcggg

SEQ ID NO: 591221 - RNA, 19 nt, Artificial Sequence
  Synthetic
aucagcaaaggaaagcggg

SEQ ID NO: 591222 - RNA, 20 nt, Artificial Sequence
  Synthetic
aaucagcaaaggaaagcggg

SEQ ID NO: 591223 - RNA, 21 nt, Artificial Sequence
  Synthetic
aaaucagcaaaggaaagcggg

SEQ ID NO: 591224 - RNA, 22 nt, Artificial Sequence
  Synthetic
aaaaucagcaaaggaaagcggg

SEQ ID NO: 591225 - RNA, 23 nt, Artificial Sequence
  Synthetic
caaaaucagcaaaggaaagcggg

SEQ ID NO: 591226 - RNA, 24 nt, Artificial Sequence
  Synthetic
ucaaaaucagcaaaggaaagcggg

SEQ ID NO: 591227 - RNA, 18 nt, Artificial Sequence
  Synthetic
agaaguuucaaaggcggg

SEQ ID NO: 591228 - RNA, 19 nt, Artificial Sequence
  Synthetic
cagaaguuucaaaggcggg

SEQ ID NO: 591229 - RNA, 20 nt, Artificial Sequence
  Synthetic
ucagaaguuucaaaggcggg

SEQ ID NO: 591230 - RNA, 21 nt, Artificial Sequence
  Synthetic
uucagaaguuucaaaggcggg

SEQ ID NO: 591231 - RNA, 22 nt, Artificial Sequence
  Synthetic
uuucagaaguuucaaaggcggg

SEQ ID NO: 591232 - RNA, 23 nt, Artificial Sequence
  Synthetic
uuuucagaaguuucaaaggcggg

SEQ ID NO: 591233 - RNA, 24 nt, Artificial Sequence
  Synthetic
cuuuucagaaguuucaaaggcggg

SEQ ID NO: 591234 - RNA, 18 nt, Artificial Sequence
  Synthetic
accauucuacauggcggg

SEQ ID NO: 591235 - RNA, 19 nt, Artificial Sequence
  Synthetic
caccauucuacauggcggg

SEQ ID NO: 591236 - RNA, 20 nt, Artificial Sequence
  Synthetic
ucaccauucuacauggcggg

SEQ ID NO: 591237 - RNA, 21 nt, Artificial Sequence
  Synthetic
cucaccauucuacauggcggg

SEQ ID NO: 591238 - RNA, 22 nt, Artificial Sequence
  Synthetic
acucaccauucuacauggcggg

SEQ ID NO: 591239 - RNA, 23 nt, Artificial Sequence
  Synthetic
gacucaccauucuacauggcggg

SEQ ID NO: 591240 - RNA, 24 nt, Artificial Sequence
  Synthetic
ggacucaccauucuacauggcggg

SEQ ID NO: 591241 - RNA, 18 nt, Artificial Sequence
  Synthetic
gggaagacccauggcggg

SEQ ID NO: 591242 - RNA, 19 nt, Artificial Sequence
  Synthetic
ggggaagacccauggcggg

SEQ ID NO: 591243 - RNA, 20 nt, Artificial Sequence
  Synthetic
aggggaagacccauggcggg

SEQ ID NO: 591244 - RNA, 21 nt, Artificial Sequence
  Synthetic
gaggggaagacccauggcggg

SEQ ID NO: 591245 - RNA, 22 nt, Artificial Sequence
  Synthetic
agaggggaagacccauggcggg

SEQ ID NO: 591246 - RNA, 23 nt, Artificial Sequence
  Synthetic
aagaggggaagacccauggcggg

SEQ ID NO: 591247 - RNA, 24 nt, Artificial Sequence
  Synthetic
gaagaggggaagacccauggcggg

SEQ ID NO: 591248 - RNA, 18 nt, Artificial Sequence
  Synthetic
aaaacaggaguuggcggg

SEQ ID NO: 591249 - RNA, 19 nt, Artificial Sequence
  Synthetic
gaaaacaggaguuggcggg

SEQ ID NO: 591250 - RNA, 20 nt, Artificial Sequence
  Synthetic
ggaaaacaggaguuggcggg

SEQ ID NO: 591251 - RNA, 21 nt, Artificial Sequence
  Synthetic
aggaaaacaggaguuggcggg

SEQ ID NO: 591252 - RNA, 22 nt, Artificial Sequence
  Synthetic
caggaaaacaggaguuggcggg

SEQ ID NO: 591253 - RNA, 23 nt, Artificial Sequence
  Synthetic
ucaggaaaacaggaguuggcggg

SEQ ID NO: 591254 - RNA, 24 nt, Artificial Sequence
  Synthetic
aucaggaaaacaggaguuggcggg

SEQ ID NO: 591255 - RNA, 18 nt, Artificial Sequence
  Synthetic
auaauagggguuggcggg

SEQ ID NO: 591256 - RNA, 19 nt, Artificial Sequence
  Synthetic
aauaauagggguuggcggg

SEQ ID NO: 591257 - RNA, 20 nt, Artificial Sequence
  Synthetic
aaauaauagggguuggcggg

SEQ ID NO: 591258 - RNA, 21 nt, Artificial Sequence
  Synthetic
aaaauaauagggguuggcggg

SEQ ID NO: 591259 - RNA, 22 nt, Artificial Sequence
  Synthetic
gaaaauaauagggguuggcggg

SEQ ID NO: 591260 - RNA, 23 nt, Artificial Sequence
  Synthetic
agaaaauaauagggguuggcggg

SEQ ID NO: 591261 - RNA, 24 nt, Artificial Sequence
  Synthetic
cagaaaauaauagggguuggcggg

SEQ ID NO: 591262 - RNA, 18 nt, Artificial Sequence
  Synthetic
caggggccuguuggcggg

SEQ ID NO: 591263 - RNA, 19 nt, Artificial Sequence
  Synthetic
gcaggggccuguuggcggg

SEQ ID NO: 591264 - RNA, 20 nt, Artificial Sequence
  Synthetic
cgcaggggccuguuggcggg

SEQ ID NO: 591265 - RNA, 21 nt, Artificial Sequence
  Synthetic
ccgcaggggccuguuggcggg

SEQ ID NO: 591266 - RNA, 22 nt, Artificial Sequence
  Synthetic
gccgcaggggccuguuggcggg

SEQ ID NO: 591267 - RNA, 23 nt, Artificial Sequence
  Synthetic
ggccgcaggggccuguuggcggg

SEQ ID NO: 591268 - RNA, 24 nt, Artificial Sequence
  Synthetic
uggccgcaggggccuguuggcggg

SEQ ID NO: 591269 - RNA, 18 nt, Artificial Sequence
  Synthetic
caaaagccauuuggcggg

SEQ ID NO: 591270 - RNA, 19 nt, Artificial Sequence
  Synthetic
ucaaaagccauuuggcggg

SEQ ID NO: 591271 - RNA, 20 nt, Artificial Sequence
  Synthetic
uucaaaagccauuuggcggg

SEQ ID NO: 591272 - RNA, 21 nt, Artificial Sequence
  Synthetic
cuucaaaagccauuuggcggg

SEQ ID NO: 591273 - RNA, 22 nt, Artificial Sequence
  Synthetic
ucuucaaaagccauuuggcggg

SEQ ID NO: 591274 - RNA, 23 nt, Artificial Sequence
  Synthetic
uucuucaaaagccauuuggcggg

SEQ ID NO: 591275 - RNA, 24 nt, Artificial Sequence
  Synthetic
cuucuucaaaagccauuuggcggg

SEQ ID NO: 591276 - RNA, 18 nt, Artificial Sequence
  Synthetic
auaaccuauaagugcggg

SEQ ID NO: 591277 - RNA, 19 nt, Artificial Sequence
  Synthetic
aauaaccuauaagugcggg

SEQ ID NO: 591278 - RNA, 20 nt, Artificial Sequence
  Synthetic
aaauaaccuauaagugcggg

SEQ ID NO: 591279 - RNA, 21 nt, Artificial Sequence
  Synthetic
uaaauaaccuauaagugcggg

SEQ ID NO: 591280 - RNA, 22 nt, Artificial Sequence
  Synthetic
auaaauaaccuauaagugcggg

SEQ ID NO: 591281 - RNA, 23 nt, Artificial Sequence
  Synthetic
uauaaauaaccuauaagugcggg

SEQ ID NO: 591282 - RNA, 24 nt, Artificial Sequence
  Synthetic
uuauaaauaaccuauaagugcggg

SEQ ID NO: 591283 - RNA, 18 nt, Artificial Sequence
  Synthetic
agcuauaacauccucggg

SEQ ID NO: 591284 - RNA, 19 nt, Artificial Sequence
  Synthetic
aagcuauaacauccucggg

SEQ ID NO: 591285 - RNA, 20 nt, Artificial Sequence
  Synthetic
uaagcuauaacauccucggg

SEQ ID NO: 591286 - RNA, 21 nt, Artificial Sequence
  Synthetic
cuaagcuauaacauccucggg

SEQ ID NO: 591287 - RNA, 22 nt, Artificial Sequence
  Synthetic
ucuaagcuauaacauccucggg

SEQ ID NO: 591288 - RNA, 23 nt, Artificial Sequence
  Synthetic
uucuaagcuauaacauccucggg

SEQ ID NO: 591289 - RNA, 24 nt, Artificial Sequence
  Synthetic
cuucuaagcuauaacauccucggg

SEQ ID NO: 591290 - RNA, 18 nt, Artificial Sequence
  Synthetic
agagaucuggagcucggg

SEQ ID NO: 591291 - RNA, 19 nt, Artificial Sequence
  Synthetic
aagagaucuggagcucggg

SEQ ID NO: 591292 - RNA, 20 nt, Artificial Sequence
  Synthetic
caagagaucuggagcucggg

SEQ ID NO: 591293 - RNA, 21 nt, Artificial Sequence
  Synthetic
ucaagagaucuggagcucggg

SEQ ID NO: 591294 - RNA, 22 nt, Artificial Sequence
  Synthetic
aucaagagaucuggagcucggg

SEQ ID NO: 591295 - RNA, 23 nt, Artificial Sequence
  Synthetic
aaucaagagaucuggagcucggg

SEQ ID NO: 591296 - RNA, 24 nt, Artificial Sequence
  Synthetic
aaaucaagagaucuggagcucggg

SEQ ID NO: 591297 - RNA, 18 nt, Artificial Sequence
  Synthetic
aguuugaaggcagucggg

SEQ ID NO: 591298 - RNA, 19 nt, Artificial Sequence
  Synthetic
caguuugaaggcagucggg

SEQ ID NO: 591299 - RNA, 20 nt, Artificial Sequence
  Synthetic
ccaguuugaaggcagucggg

SEQ ID NO: 591300 - RNA, 21 nt, Artificial Sequence
  Synthetic
cccaguuugaaggcagucggg

SEQ ID NO: 591301 - RNA, 22 nt, Artificial Sequence
  Synthetic
ucccaguuugaaggcagucggg

SEQ ID NO: 591302 - RNA, 23 nt, Artificial Sequence
  Synthetic
gucccaguuugaaggcagucggg

SEQ ID NO: 591303 - RNA, 24 nt, Artificial Sequence
  Synthetic
ugucccaguuugaaggcagucggg

SEQ ID NO: 591304 - RNA, 18 nt, Artificial Sequence
  Synthetic
gauaguggaggagucggg

SEQ ID NO: 591305 - RNA, 19 nt, Artificial Sequence
  Synthetic
ggauaguggaggagucggg

SEQ ID NO: 591306 - RNA, 20 nt, Artificial Sequence
  Synthetic
aggauaguggaggagucggg

SEQ ID NO: 591307 - RNA, 21 nt, Artificial Sequence
  Synthetic
aaggauaguggaggagucggg

SEQ ID NO: 591308 - RNA, 22 nt, Artificial Sequence
  Synthetic
gaaggauaguggaggagucggg

SEQ ID NO: 591309 - RNA, 23 nt, Artificial Sequence
  Synthetic
ggaaggauaguggaggagucggg

SEQ ID NO: 591310 - RNA, 24 nt, Artificial Sequence
  Synthetic
gggaaggauaguggaggagucggg

SEQ ID NO: 591311 - RNA, 18 nt, Artificial Sequence
  Synthetic
cuuuucuauauauucggg

SEQ ID NO: 591312 - RNA, 19 nt, Artificial Sequence
  Synthetic
acuuuucuauauauucggg

SEQ ID NO: 591313 - RNA, 20 nt, Artificial Sequence
  Synthetic
gacuuuucuauauauucggg

SEQ ID NO: 591314 - RNA, 21 nt, Artificial Sequence
  Synthetic
ugacuuuucuauauauucggg

SEQ ID NO: 591315 - RNA, 22 nt, Artificial Sequence
  Synthetic
cugacuuuucuauauauucggg

SEQ ID NO: 591316 - RNA, 23 nt, Artificial Sequence
  Synthetic
gcugacuuuucuauauauucggg

SEQ ID NO: 591317 - RNA, 24 nt, Artificial Sequence
  Synthetic
ugcugacuuuucuauauauucggg

SEQ ID NO: 591318 - RNA, 18 nt, Artificial Sequence
  Synthetic
ggagagacugaaaagggg

SEQ ID NO: 591319 - RNA, 19 nt, Artificial Sequence
  Synthetic
cggagagacugaaaagggg

SEQ ID NO: 591320 - RNA, 20 nt, Artificial Sequence
  Synthetic
acggagagacugaaaagggg

SEQ ID NO: 591321 - RNA, 21 nt, Artificial Sequence
  Synthetic
cacggagagacugaaaagggg

SEQ ID NO: 591322 - RNA, 22 nt, Artificial Sequence
  Synthetic
gcacggagagacugaaaagggg

SEQ ID NO: 591323 - RNA, 23 nt, Artificial Sequence
  Synthetic
agcacggagagacugaaaagggg

SEQ ID NO: 591324 - RNA, 24 nt, Artificial Sequence
  Synthetic
uagcacggagagacugaaaagggg

SEQ ID NO: 591325 - RNA, 18 nt, Artificial Sequence
  Synthetic
aggggagcugaaaagggg

SEQ ID NO: 591326 - RNA, 19 nt, Artificial Sequence
  Synthetic
aaggggagcugaaaagggg

SEQ ID NO: 591327 - RNA, 20 nt, Artificial Sequence
  Synthetic
gaaggggagcugaaaagggg

SEQ ID NO: 591328 - RNA, 21 nt, Artificial Sequence
  Synthetic
ggaaggggagcugaaaagggg

SEQ ID NO: 591329 - RNA, 22 nt, Artificial Sequence
  Synthetic
gggaaggggagcugaaaagggg

SEQ ID NO: 591330 - RNA, 23 nt, Artificial Sequence
  Synthetic
ugggaaggggagcugaaaagggg

SEQ ID NO: 591331 - RNA, 24 nt, Artificial Sequence
  Synthetic
gugggaaggggagcugaaaagggg

SEQ ID NO: 591332 - RNA, 18 nt, Artificial Sequence
  Synthetic
aaacggaaaagaaagggg

SEQ ID NO: 591333 - RNA, 19 nt, Artificial Sequence
  Synthetic
aaaacggaaaagaaagggg

SEQ ID NO: 591334 - RNA, 20 nt, Artificial Sequence
  Synthetic
caaaacggaaaagaaagggg

SEQ ID NO: 591335 - RNA, 21 nt, Artificial Sequence
  Synthetic
gcaaaacggaaaagaaagggg

SEQ ID NO: 591336 - RNA, 22 nt, Artificial Sequence
  Synthetic
ugcaaaacggaaaagaaagggg

SEQ ID NO: 591337 - RNA, 23 nt, Artificial Sequence
  Synthetic
augcaaaacggaaaagaaagggg

SEQ ID NO: 591338 - RNA, 24 nt, Artificial Sequence
  Synthetic
caugcaaaacggaaaagaaagggg

SEQ ID NO: 591339 - RNA, 18 nt, Artificial Sequence
  Synthetic
guuggccugcuaaagggg

SEQ ID NO: 591340 - RNA, 19 nt, Artificial Sequence
  Synthetic
uguuggccugcuaaagggg

SEQ ID NO: 591341 - RNA, 20 nt, Artificial Sequence
  Synthetic
auguuggccugcuaaagggg

SEQ ID NO: 591342 - RNA, 21 nt, Artificial Sequence
  Synthetic
uauguuggccugcuaaagggg

SEQ ID NO: 591343 - RNA, 22 nt, Artificial Sequence
  Synthetic
guauguuggccugcuaaagggg

SEQ ID NO: 591344 - RNA, 23 nt, Artificial Sequence
  Synthetic
aguauguuggccugcuaaagggg

SEQ ID NO: 591345 - RNA, 24 nt, Artificial Sequence
  Synthetic
gaguauguuggccugcuaaagggg

SEQ ID NO: 591346 - RNA, 18 nt, Artificial Sequence
  Synthetic
gagaguuauaacaagggg

SEQ ID NO: 591347 - RNA, 19 nt, Artificial Sequence
  Synthetic
ggagaguuauaacaagggg

SEQ ID NO: 591348 - RNA, 20 nt, Artificial Sequence
  Synthetic
uggagaguuauaacaagggg

SEQ ID NO: 591349 - RNA, 21 nt, Artificial Sequence
  Synthetic
guggagaguuauaacaagggg

SEQ ID NO: 591350 - RNA, 22 nt, Artificial Sequence
  Synthetic
aguggagaguuauaacaagggg

SEQ ID NO: 591351 - RNA, 23 nt, Artificial Sequence
  Synthetic
uaguggagaguuauaacaagggg

SEQ ID NO: 591352 - RNA, 24 nt, Artificial Sequence
  Synthetic
uuaguggagaguuauaacaagggg

SEQ ID NO: 591353 - RNA, 18 nt, Artificial Sequence
  Synthetic
uucagaagacacaagggg

SEQ ID NO: 591354 - RNA, 19 nt, Artificial Sequence
  Synthetic
uuucagaagacacaagggg

SEQ ID NO: 591355 - RNA, 20 nt, Artificial Sequence
  Synthetic
uuuucagaagacacaagggg

SEQ ID NO: 591356 - RNA, 21 nt, Artificial Sequence
  Synthetic
uuuuucagaagacacaagggg

SEQ ID NO: 591357 - RNA, 22 nt, Artificial Sequence
  Synthetic
cuuuuucagaagacacaagggg

SEQ ID NO: 591358 - RNA, 23 nt, Artificial Sequence
  Synthetic
gcuuuuucagaagacacaagggg

SEQ ID NO: 591359 - RNA, 24 nt, Artificial Sequence
  Synthetic
ggcuuuuucagaagacacaagggg

SEQ ID NO: 591360 - RNA, 18 nt, Artificial Sequence
  Synthetic
aaaauagguggcaagggg

SEQ ID NO: 591361 - RNA, 19 nt, Artificial Sequence
  Synthetic
aaaaauagguggcaagggg

SEQ ID NO: 591362 - RNA, 20 nt, Artificial Sequence
  Synthetic
gaaaaauagguggcaagggg

SEQ ID NO: 591363 - RNA, 21 nt, Artificial Sequence
  Synthetic
ugaaaaauagguggcaagggg

SEQ ID NO: 591364 - RNA, 22 nt, Artificial Sequence
  Synthetic
cugaaaaauagguggcaagggg

SEQ ID NO: 591365 - RNA, 23 nt, Artificial Sequence
  Synthetic
ucugaaaaauagguggcaagggg

SEQ ID NO: 591366 - RNA, 24 nt, Artificial Sequence
  Synthetic
gucugaaaaauagguggcaagggg

SEQ ID NO: 591367 - RNA, 18 nt, Artificial Sequence
  Synthetic
agaugggggaggaagggg

SEQ ID NO: 591368 - RNA, 19 nt, Artificial Sequence
  Synthetic
uagaugggggaggaagggg

SEQ ID NO: 591369 - RNA, 20 nt, Artificial Sequence
  Synthetic
guagaugggggaggaagggg

SEQ ID NO: 591370 - RNA, 21 nt, Artificial Sequence
  Synthetic
uguagaugggggaggaagggg

SEQ ID NO: 591371 - RNA, 22 nt, Artificial Sequence
  Synthetic
guguagaugggggaggaagggg

SEQ ID NO: 591372 - RNA, 23 nt, Artificial Sequence
  Synthetic
uguguagaugggggaggaagggg

SEQ ID NO: 591373 - RNA, 24 nt, Artificial Sequence
  Synthetic
guguguagaugggggaggaagggg

SEQ ID NO: 591374 - RNA, 18 nt, Artificial Sequence
  Synthetic
gggagggaagggaagggg

SEQ ID NO: 591375 - RNA, 19 nt, Artificial Sequence
  Synthetic
ggggagggaagggaagggg

SEQ ID NO: 591376 - RNA, 20 nt, Artificial Sequence
  Synthetic
aggggagggaagggaagggg

SEQ ID NO: 591377 - RNA, 21 nt, Artificial Sequence
  Synthetic
gaggggagggaagggaagggg

SEQ ID NO: 591378 - RNA, 22 nt, Artificial Sequence
  Synthetic
agaggggagggaagggaagggg

SEQ ID NO: 591379 - RNA, 23 nt, Artificial Sequence
  Synthetic
gagaggggagggaagggaagggg

SEQ ID NO: 591380 - RNA, 24 nt, Artificial Sequence
  Synthetic
ggagaggggagggaagggaagggg

SEQ ID NO: 591381 - RNA, 18 nt, Artificial Sequence
  Synthetic
ugggguggggggaagggg

SEQ ID NO: 591382 - RNA, 19 nt, Artificial Sequence
  Synthetic
gugggguggggggaagggg

SEQ ID NO: 591383 - RNA, 20 nt, Artificial Sequence
  Synthetic
ugugggguggggggaagggg

SEQ ID NO: 591384 - RNA, 21 nt, Artificial Sequence
  Synthetic
cugugggguggggggaagggg

SEQ ID NO: 591385 - RNA, 22 nt, Artificial Sequence
  Synthetic
gcugugggguggggggaagggg

SEQ ID NO: 591386 - RNA, 23 nt, Artificial Sequence
  Synthetic
ugcugugggguggggggaagggg

SEQ ID NO: 591387 - RNA, 24 nt, Artificial Sequence
  Synthetic
cugcugugggguggggggaagggg

SEQ ID NO: 591388 - RNA, 18 nt, Artificial Sequence
  Synthetic
caaauuuuggggaagggg

SEQ ID NO: 591389 - RNA, 19 nt, Artificial Sequence
  Synthetic
gcaaauuuuggggaagggg

SEQ ID NO: 591390 - RNA, 20 nt, Artificial Sequence
  Synthetic
ugcaaauuuuggggaagggg

SEQ ID NO: 591391 - RNA, 21 nt, Artificial Sequence
  Synthetic
uugcaaauuuuggggaagggg

SEQ ID NO: 591392 - RNA, 22 nt, Artificial Sequence
  Synthetic
cuugcaaauuuuggggaagggg

SEQ ID NO: 591393 - RNA, 23 nt, Artificial Sequence
  Synthetic
ccuugcaaauuuuggggaagggg

SEQ ID NO: 591394 - RNA, 24 nt, Artificial Sequence
  Synthetic
cccuugcaaauuuuggggaagggg

SEQ ID NO: 591395 - RNA, 18 nt, Artificial Sequence
  Synthetic
gggaggggugugaagggg

SEQ ID NO: 591396 - RNA, 19 nt, Artificial Sequence
  Synthetic
ggggaggggugugaagggg

SEQ ID NO: 591397 - RNA, 20 nt, Artificial Sequence
  Synthetic
gggggaggggugugaagggg

SEQ ID NO: 591398 - RNA, 21 nt, Artificial Sequence
  Synthetic
agggggaggggugugaagggg

SEQ ID NO: 591399 - RNA, 22 nt, Artificial Sequence
  Synthetic
aagggggaggggugugaagggg

SEQ ID NO: 591400 - RNA, 23 nt, Artificial Sequence
  Synthetic
gaagggggaggggugugaagggg

SEQ ID NO: 591401 - RNA, 24 nt, Artificial Sequence
  Synthetic
ggaagggggaggggugugaagggg

SEQ ID NO: 591402 - RNA, 18 nt, Artificial Sequence
  Synthetic
gcaccucauuauaagggg

SEQ ID NO: 591403 - RNA, 19 nt, Artificial Sequence
  Synthetic
ugcaccucauuauaagggg

SEQ ID NO: 591404 - RNA, 20 nt, Artificial Sequence
  Synthetic
augcaccucauuauaagggg

SEQ ID NO: 591405 - RNA, 21 nt, Artificial Sequence
  Synthetic
caugcaccucauuauaagggg

SEQ ID NO: 591406 - RNA, 22 nt, Artificial Sequence
  Synthetic
ucaugcaccucauuauaagggg

SEQ ID NO: 591407 - RNA, 23 nt, Artificial Sequence
  Synthetic
cucaugcaccucauuauaagggg

SEQ ID NO: 591408 - RNA, 24 nt, Artificial Sequence
  Synthetic
gcucaugcaccucauuauaagggg

SEQ ID NO: 591409 - RNA, 18 nt, Artificial Sequence
  Synthetic
ugugacaguauuaagggg

SEQ ID NO: 591410 - RNA, 19 nt, Artificial Sequence
  Synthetic
uugugacaguauuaagggg

SEQ ID NO: 591411 - RNA, 20 nt, Artificial Sequence
  Synthetic
auugugacaguauuaagggg

SEQ ID NO: 591412 - RNA, 21 nt, Artificial Sequence
  Synthetic
cauugugacaguauuaagggg

SEQ ID NO: 591413 - RNA, 22 nt, Artificial Sequence
  Synthetic
ccauugugacaguauuaagggg

SEQ ID NO: 591414 - RNA, 23 nt, Artificial Sequence
  Synthetic
gccauugugacaguauuaagggg

SEQ ID NO: 591415 - RNA, 24 nt, Artificial Sequence
  Synthetic
ugccauugugacaguauuaagggg

SEQ ID NO: 591416 - RNA, 18 nt, Artificial Sequence
  Synthetic
agcugaaugacacagggg

SEQ ID NO: 591417 - RNA, 19 nt, Artificial Sequence
  Synthetic
uagcugaaugacacagggg

SEQ ID NO: 591418 - RNA, 20 nt, Artificial Sequence
  Synthetic
auagcugaaugacacagggg

SEQ ID NO: 591419 - RNA, 21 nt, Artificial Sequence
  Synthetic
uauagcugaaugacacagggg

SEQ ID NO: 591420 - RNA, 22 nt, Artificial Sequence
  Synthetic
cuauagcugaaugacacagggg

SEQ ID NO: 591421 - RNA, 23 nt, Artificial Sequence
  Synthetic
ucuauagcugaaugacacagggg

SEQ ID NO: 591422 - RNA, 24 nt, Artificial Sequence
  Synthetic
uucuauagcugaaugacacagggg

SEQ ID NO: 591423 - RNA, 18 nt, Artificial Sequence
  Synthetic
ccugcaaacccacagggg

SEQ ID NO: 591424 - RNA, 19 nt, Artificial Sequence
  Synthetic
cccugcaaacccacagggg

SEQ ID NO: 591425 - RNA, 20 nt, Artificial Sequence
  Synthetic
acccugcaaacccacagggg

SEQ ID NO: 591426 - RNA, 21 nt, Artificial Sequence
  Synthetic
uacccugcaaacccacagggg

SEQ ID NO: 591427 - RNA, 22 nt, Artificial Sequence
  Synthetic
cuacccugcaaacccacagggg

SEQ ID NO: 591428 - RNA, 23 nt, Artificial Sequence
  Synthetic
ucuacccugcaaacccacagggg

SEQ ID NO: 591429 - RNA, 24 nt, Artificial Sequence
  Synthetic
cucuacccugcaaacccacagggg

SEQ ID NO: 591430 - RNA, 18 nt, Artificial Sequence
  Synthetic
aaaagagcuagacagggg

SEQ ID NO: 591431 - RNA, 19 nt, Artificial Sequence
  Synthetic
uaaaagagcuagacagggg

SEQ ID NO: 591432 - RNA, 20 nt, Artificial Sequence
  Synthetic
uuaaaagagcuagacagggg

SEQ ID NO: 591433 - RNA, 21 nt, Artificial Sequence
  Synthetic
uuuaaaagagcuagacagggg

SEQ ID NO: 591434 - RNA, 22 nt, Artificial Sequence
  Synthetic
cuuuaaaagagcuagacagggg

SEQ ID NO: 591435 - RNA, 23 nt, Artificial Sequence
  Synthetic
gcuuuaaaagagcuagacagggg

SEQ ID NO: 591436 - RNA, 24 nt, Artificial Sequence
  Synthetic
ugcuuuaaaagagcuagacagggg

SEQ ID NO: 591437 - RNA, 18 nt, Artificial Sequence
  Synthetic
ggggaaaggguacagggg

SEQ ID NO: 591438 - RNA, 19 nt, Artificial Sequence
  Synthetic
gggggaaaggguacagggg

SEQ ID NO: 591439 - RNA, 20 nt, Artificial Sequence
  Synthetic
ggggggaaaggguacagggg

SEQ ID NO: 591440 - RNA, 21 nt, Artificial Sequence
  Synthetic
uggggggaaaggguacagggg

SEQ ID NO: 591441 - RNA, 22 nt, Artificial Sequence
  Synthetic
auggggggaaaggguacagggg

SEQ ID NO: 591442 - RNA, 23 nt, Artificial Sequence
  Synthetic
aauggggggaaaggguacagggg

SEQ ID NO: 591443 - RNA, 24 nt, Artificial Sequence
  Synthetic
caauggggggaaaggguacagggg

SEQ ID NO: 591444 - RNA, 18 nt, Artificial Sequence
  Synthetic
acuggugguugccagggg

SEQ ID NO: 591445 - RNA, 19 nt, Artificial Sequence
  Synthetic
gacuggugguugccagggg

SEQ ID NO: 591446 - RNA, 20 nt, Artificial Sequence
  Synthetic
ggacuggugguugccagggg

SEQ ID NO: 591447 - RNA, 21 nt, Artificial Sequence
  Synthetic
uggacuggugguugccagggg

SEQ ID NO: 591448 - RNA, 22 nt, Artificial Sequence
  Synthetic
cuggacuggugguugccagggg

SEQ ID NO: 591449 - RNA, 23 nt, Artificial Sequence
  Synthetic
acuggacuggugguugccagggg

SEQ ID NO: 591450 - RNA, 24 nt, Artificial Sequence
  Synthetic
gacuggacuggugguugccagggg

SEQ ID NO: 591451 - RNA, 18 nt, Artificial Sequence
  Synthetic
aucagugguuuccagggg

SEQ ID NO: 591452 - RNA, 19 nt, Artificial Sequence
  Synthetic
uaucagugguuuccagggg

SEQ ID NO: 591453 - RNA, 20 nt, Artificial Sequence
  Synthetic
cuaucagugguuuccagggg

SEQ ID NO: 591454 - RNA, 21 nt, Artificial Sequence
  Synthetic
ccuaucagugguuuccagggg

SEQ ID NO: 591455 - RNA, 22 nt, Artificial Sequence
  Synthetic
accuaucagugguuuccagggg

SEQ ID NO: 591456 - RNA, 23 nt, Artificial Sequence
  Synthetic
uaccuaucagugguuuccagggg

SEQ ID NO: 591457 - RNA, 24 nt, Artificial Sequence
  Synthetic
uuaccuaucagugguuuccagggg

SEQ ID NO: 591458 - RNA, 18 nt, Artificial Sequence
  Synthetic
aauggugguuuccagggg

SEQ ID NO: 591459 - RNA, 19 nt, Artificial Sequence
  Synthetic
gaauggugguuuccagggg

SEQ ID NO: 591460 - RNA, 20 nt, Artificial Sequence
  Synthetic
agaauggugguuuccagggg

SEQ ID NO: 591461 - RNA, 21 nt, Artificial Sequence
  Synthetic
uagaauggugguuuccagggg

SEQ ID NO: 591462 - RNA, 22 nt, Artificial Sequence
  Synthetic
auagaauggugguuuccagggg

SEQ ID NO: 591463 - RNA, 23 nt, Artificial Sequence
  Synthetic
aauagaauggugguuuccagggg

SEQ ID NO: 591464 - RNA, 24 nt, Artificial Sequence
  Synthetic
aaauagaauggugguuuccagggg

SEQ ID NO: 591465 - RNA, 18 nt, Artificial Sequence
  Synthetic
acccuucuaaggcagggg

SEQ ID NO: 591466 - RNA, 19 nt, Artificial Sequence
  Synthetic
cacccuucuaaggcagggg

SEQ ID NO: 591467 - RNA, 20 nt, Artificial Sequence
  Synthetic
ccacccuucuaaggcagggg

SEQ ID NO: 591468 - RNA, 21 nt, Artificial Sequence
  Synthetic
uccacccuucuaaggcagggg

SEQ ID NO: 591469 - RNA, 22 nt, Artificial Sequence
  Synthetic
auccacccuucuaaggcagggg

SEQ ID NO: 591470 - RNA, 23 nt, Artificial Sequence
  Synthetic
gauccacccuucuaaggcagggg

SEQ ID NO: 591471 - RNA, 24 nt, Artificial Sequence
  Synthetic
ugauccacccuucuaaggcagggg

SEQ ID NO: 591472 - RNA, 18 nt, Artificial Sequence
  Synthetic
agggaguacaggcagggg

SEQ ID NO: 591473 - RNA, 19 nt, Artificial Sequence
  Synthetic
cagggaguacaggcagggg

SEQ ID NO: 591474 - RNA, 20 nt, Artificial Sequence
  Synthetic
acagggaguacaggcagggg

SEQ ID NO: 591475 - RNA, 21 nt, Artificial Sequence
  Synthetic
cacagggaguacaggcagggg

SEQ ID NO: 591476 - RNA, 22 nt, Artificial Sequence
  Synthetic
ccacagggaguacaggcagggg

SEQ ID NO: 591477 - RNA, 23 nt, Artificial Sequence
  Synthetic
gccacagggaguacaggcagggg

SEQ ID NO: 591478 - RNA, 24 nt, Artificial Sequence
  Synthetic
agccacagggaguacaggcagggg

SEQ ID NO: 591479 - RNA, 18 nt, Artificial Sequence
  Synthetic
cuggguaauaggcagggg

SEQ ID NO: 591480 - RNA, 19 nt, Artificial Sequence
  Synthetic
acuggguaauaggcagggg

SEQ ID NO: 591481 - RNA, 20 nt, Artificial Sequence
  Synthetic
aacuggguaauaggcagggg

SEQ ID NO: 591482 - RNA, 21 nt, Artificial Sequence
  Synthetic
gaacuggguaauaggcagggg

SEQ ID NO: 591483 - RNA, 22 nt, Artificial Sequence
  Synthetic
agaacuggguaauaggcagggg

SEQ ID NO: 591484 - RNA, 23 nt, Artificial Sequence
  Synthetic
uagaacuggguaauaggcagggg

SEQ ID NO: 591485 - RNA, 24 nt, Artificial Sequence
  Synthetic
uuagaacuggguaauaggcagggg

SEQ ID NO: 591486 - RNA, 18 nt, Artificial Sequence
  Synthetic
uggugaggagggcagggg

SEQ ID NO: 591487 - RNA, 19 nt, Artificial Sequence
  Synthetic
cuggugaggagggcagggg

SEQ ID NO: 591488 - RNA, 20 nt, Artificial Sequence
  Synthetic
ccuggugaggagggcagggg

SEQ ID NO: 591489 - RNA, 21 nt, Artificial Sequence
  Synthetic
cccuggugaggagggcagggg

SEQ ID NO: 591490 - RNA, 22 nt, Artificial Sequence
  Synthetic
ucccuggugaggagggcagggg

SEQ ID NO: 591491 - RNA, 23 nt, Artificial Sequence
  Synthetic
aucccuggugaggagggcagggg

SEQ ID NO: 591492 - RNA, 24 nt, Artificial Sequence
  Synthetic
uaucccuggugaggagggcagggg

SEQ ID NO: 591493 - RNA, 18 nt, Artificial Sequence
  Synthetic
uagugcugcaugcagggg

SEQ ID NO: 591494 - RNA, 19 nt, Artificial Sequence
  Synthetic
cuagugcugcaugcagggg

SEQ ID NO: 591495 - RNA, 20 nt, Artificial Sequence
  Synthetic
acuagugcugcaugcagggg

SEQ ID NO: 591496 - RNA, 21 nt, Artificial Sequence
  Synthetic
cacuagugcugcaugcagggg

SEQ ID NO: 591497 - RNA, 22 nt, Artificial Sequence
  Synthetic
acacuagugcugcaugcagggg

SEQ ID NO: 591498 - RNA, 23 nt, Artificial Sequence
  Synthetic
uacacuagugcugcaugcagggg

SEQ ID NO: 591499 - RNA, 24 nt, Artificial Sequence
  Synthetic
uuacacuagugcugcaugcagggg

SEQ ID NO: 591500 - RNA, 18 nt, Artificial Sequence
  Synthetic
uuuuaaauagugcagggg

SEQ ID NO: 591501 - RNA, 19 nt, Artificial Sequence
  Synthetic
auuuuaaauagugcagggg

SEQ ID NO: 591502 - RNA, 20 nt, Artificial Sequence
  Synthetic
uauuuuaaauagugcagggg

SEQ ID NO: 591503 - RNA, 21 nt, Artificial Sequence
  Synthetic
cuauuuuaaauagugcagggg

SEQ ID NO: 591504 - RNA, 22 nt, Artificial Sequence
  Synthetic
ucuauuuuaaauagugcagggg

SEQ ID NO: 591505 - RNA, 23 nt, Artificial Sequence
  Synthetic
uucuauuuuaaauagugcagggg

SEQ ID NO: 591506 - RNA, 24 nt, Artificial Sequence
  Synthetic
uuucuauuuuaaauagugcagggg

SEQ ID NO: 591507 - RNA, 18 nt, Artificial Sequence
  Synthetic
accggggccucucagggg

SEQ ID NO: 591508 - RNA, 19 nt, Artificial Sequence
  Synthetic
caccggggccucucagggg

SEQ ID NO: 591509 - RNA, 20 nt, Artificial Sequence
  Synthetic
acaccggggccucucagggg

SEQ ID NO: 591510 - RNA, 21 nt, Artificial Sequence
  Synthetic
cacaccggggccucucagggg

SEQ ID NO: 591511 - RNA, 22 nt, Artificial Sequence
  Synthetic
acacaccggggccucucagggg

SEQ ID NO: 591512 - RNA, 23 nt, Artificial Sequence
  Synthetic
cacacaccggggccucucagggg

SEQ ID NO: 591513 - RNA, 24 nt, Artificial Sequence
  Synthetic
ucacacaccggggccucucagggg

SEQ ID NO: 591514 - RNA, 18 nt, Artificial Sequence
  Synthetic
aaauacucaagucagggg

SEQ ID NO: 591515 - RNA, 19 nt, Artificial Sequence
  Synthetic
gaaauacucaagucagggg

SEQ ID NO: 591516 - RNA, 20 nt, Artificial Sequence
  Synthetic
agaaauacucaagucagggg

SEQ ID NO: 591517 - RNA, 21 nt, Artificial Sequence
  Synthetic
gagaaauacucaagucagggg

SEQ ID NO: 591518 - RNA, 22 nt, Artificial Sequence
  Synthetic
ggagaaauacucaagucagggg

SEQ ID NO: 591519 - RNA, 23 nt, Artificial Sequence
  Synthetic
uggagaaauacucaagucagggg

SEQ ID NO: 591520 - RNA, 24 nt, Artificial Sequence
  Synthetic
cuggagaaauacucaagucagggg

SEQ ID NO: 591521 - RNA, 18 nt, Artificial Sequence
  Synthetic
acuggggccugucagggg

SEQ ID NO: 591522 - RNA, 19 nt, Artificial Sequence
  Synthetic
cacuggggccugucagggg

SEQ ID NO: 591523 - RNA, 20 nt, Artificial Sequence
  Synthetic
acacuggggccugucagggg

SEQ ID NO: 591524 - RNA, 21 nt, Artificial Sequence
  Synthetic
cacacuggggccugucagggg

SEQ ID NO: 591525 - RNA, 22 nt, Artificial Sequence
  Synthetic
acacacuggggccugucagggg

SEQ ID NO: 591526 - RNA, 23 nt, Artificial Sequence
  Synthetic
cacacacuggggccugucagggg

SEQ ID NO: 591527 - RNA, 24 nt, Artificial Sequence
  Synthetic
ucacacacuggggccugucagggg

SEQ ID NO: 591528 - RNA, 18 nt, Artificial Sequence
  Synthetic
gaauauggauuucagggg

SEQ ID NO: 591529 - RNA, 19 nt, Artificial Sequence
  Synthetic
agaauauggauuucagggg

SEQ ID NO: 591530 - RNA, 20 nt, Artificial Sequence
  Synthetic
cagaauauggauuucagggg

SEQ ID NO: 591531 - RNA, 21 nt, Artificial Sequence
  Synthetic
ucagaauauggauuucagggg

SEQ ID NO: 591532 - RNA, 22 nt, Artificial Sequence
  Synthetic
uucagaauauggauuucagggg

SEQ ID NO: 591533 - RNA, 23 nt, Artificial Sequence
  Synthetic
cuucagaauauggauuucagggg

SEQ ID NO: 591534 - RNA, 24 nt, Artificial Sequence
  Synthetic
acuucagaauauggauuucagggg

SEQ ID NO: 591535 - RNA, 18 nt, Artificial Sequence
  Synthetic
auauuuuaaaaagagggg

SEQ ID NO: 591536 - RNA, 19 nt, Artificial Sequence
  Synthetic
uauauuuuaaaaagagggg

SEQ ID NO: 591537 - RNA, 20 nt, Artificial Sequence
  Synthetic
uuauauuuuaaaaagagggg

SEQ ID NO: 591538 - RNA, 21 nt, Artificial Sequence
  Synthetic
uuuauauuuuaaaaagagggg

SEQ ID NO: 591539 - RNA, 22 nt, Artificial Sequence
  Synthetic
uuuuauauuuuaaaaagagggg

SEQ ID NO: 591540 - RNA, 23 nt, Artificial Sequence
  Synthetic
uuuuuauauuuuaaaaagagggg

SEQ ID NO: 591541 - RNA, 24 nt, Artificial Sequence
  Synthetic
auuuuuauauuuuaaaaagagggg

SEQ ID NO: 591542 - RNA, 18 nt, Artificial Sequence
  Synthetic
aauuuuagguaagagggg

SEQ ID NO: 591543 - RNA, 19 nt, Artificial Sequence
  Synthetic
gaauuuuagguaagagggg

SEQ ID NO: 591544 - RNA, 20 nt, Artificial Sequence
  Synthetic
agaauuuuagguaagagggg

SEQ ID NO: 591545 - RNA, 21 nt, Artificial Sequence
  Synthetic
cagaauuuuagguaagagggg

SEQ ID NO: 591546 - RNA, 22 nt, Artificial Sequence
  Synthetic
ucagaauuuuagguaagagggg

SEQ ID NO: 591547 - RNA, 23 nt, Artificial Sequence
  Synthetic
gucagaauuuuagguaagagggg

SEQ ID NO: 591548 - RNA, 24 nt, Artificial Sequence
  Synthetic
ggucagaauuuuagguaagagggg

SEQ ID NO: 591549 - RNA, 18 nt, Artificial Sequence
  Synthetic
aagagugagacagagggg

SEQ ID NO: 591550 - RNA, 19 nt, Artificial Sequence
  Synthetic
aaagagugagacagagggg

SEQ ID NO: 591551 - RNA, 20 nt, Artificial Sequence
  Synthetic
aaaagagugagacagagggg

SEQ ID NO: 591552 - RNA, 21 nt, Artificial Sequence
  Synthetic
caaaagagugagacagagggg

SEQ ID NO: 591553 - RNA, 22 nt, Artificial Sequence
  Synthetic
ccaaaagagugagacagagggg

SEQ ID NO: 591554 - RNA, 23 nt, Artificial Sequence
  Synthetic
accaaaagagugagacagagggg

SEQ ID NO: 591555 - RNA, 24 nt, Artificial Sequence
  Synthetic
aaccaaaagagugagacagagggg

SEQ ID NO: 591556 - RNA, 18 nt, Artificial Sequence
  Synthetic
uaaugugugagagagggg

SEQ ID NO: 591557 - RNA, 19 nt, Artificial Sequence
  Synthetic
cuaaugugugagagagggg

SEQ ID NO: 591558 - RNA, 20 nt, Artificial Sequence
  Synthetic
ucuaaugugugagagagggg

SEQ ID NO: 591559 - RNA, 21 nt, Artificial Sequence
  Synthetic
cucuaaugugugagagagggg

SEQ ID NO: 591560 - RNA, 22 nt, Artificial Sequence
  Synthetic
ucucuaaugugugagagagggg

SEQ ID NO: 591561 - RNA, 23 nt, Artificial Sequence
  Synthetic
uucucuaaugugugagagagggg

SEQ ID NO: 591562 - RNA, 24 nt, Artificial Sequence
  Synthetic
uuucucuaaugugugagagagggg

SEQ ID NO: 591563 - RNA, 18 nt, Artificial Sequence
  Synthetic
ggaagggaaggagagggg

SEQ ID NO: 591564 - RNA, 19 nt, Artificial Sequence
  Synthetic
gggaagggaaggagagggg

SEQ ID NO: 591565 - RNA, 20 nt, Artificial Sequence
  Synthetic
agggaagggaaggagagggg

SEQ ID NO: 591566 - RNA, 21 nt, Artificial Sequence
  Synthetic
aagggaagggaaggagagggg

SEQ ID NO: 591567 - RNA, 22 nt, Artificial Sequence
  Synthetic
gaagggaagggaaggagagggg

SEQ ID NO: 591568 - RNA, 23 nt, Artificial Sequence
  Synthetic
ggaagggaagggaaggagagggg

SEQ ID NO: 591569 - RNA, 24 nt, Artificial Sequence
  Synthetic
gggaagggaagggaaggagagggg

SEQ ID NO: 591570 - RNA, 18 nt, Artificial Sequence
  Synthetic
ucuauauuucaggagggg

SEQ ID NO: 591571 - RNA, 19 nt, Artificial Sequence
  Synthetic
cucuauauuucaggagggg

SEQ ID NO: 591572 - RNA, 20 nt, Artificial Sequence
  Synthetic
ucucuauauuucaggagggg

SEQ ID NO: 591573 - RNA, 21 nt, Artificial Sequence
  Synthetic
uucucuauauuucaggagggg

SEQ ID NO: 591574 - RNA, 22 nt, Artificial Sequence
  Synthetic
cuucucuauauuucaggagggg

SEQ ID NO: 591575 - RNA, 23 nt, Artificial Sequence
  Synthetic
gcuucucuauauuucaggagggg

SEQ ID NO: 591576 - RNA, 24 nt, Artificial Sequence
  Synthetic
agcuucucuauauuucaggagggg

SEQ ID NO: 591577 - RNA, 18 nt, Artificial Sequence
  Synthetic
ugggaaucaagggagggg

SEQ ID NO: 591578 - RNA, 19 nt, Artificial Sequence
  Synthetic
cugggaaucaagggagggg

SEQ ID NO: 591579 - RNA, 20 nt, Artificial Sequence
  Synthetic
ccugggaaucaagggagggg

SEQ ID NO: 591580 - RNA, 21 nt, Artificial Sequence
  Synthetic
accugggaaucaagggagggg

SEQ ID NO: 591581 - RNA, 22 nt, Artificial Sequence
  Synthetic
aaccugggaaucaagggagggg

SEQ ID NO: 591582 - RNA, 23 nt, Artificial Sequence
  Synthetic
uaaccugggaaucaagggagggg

SEQ ID NO: 591583 - RNA, 24 nt, Artificial Sequence
  Synthetic
guaaccugggaaucaagggagggg

SEQ ID NO: 591584 - RNA, 18 nt, Artificial Sequence
  Synthetic
ggaagggaaggggagggg

SEQ ID NO: 591585 - RNA, 19 nt, Artificial Sequence
  Synthetic
gggaagggaaggggagggg

SEQ ID NO: 591586 - RNA, 20 nt, Artificial Sequence
  Synthetic
agggaagggaaggggagggg

SEQ ID NO: 591587 - RNA, 21 nt, Artificial Sequence
  Synthetic
gagggaagggaaggggagggg

SEQ ID NO: 591588 - RNA, 22 nt, Artificial Sequence
  Synthetic
ggagggaagggaaggggagggg

SEQ ID NO: 591589 - RNA, 23 nt, Artificial Sequence
  Synthetic
gggagggaagggaaggggagggg

SEQ ID NO: 591590 - RNA, 24 nt, Artificial Sequence
  Synthetic
ggggagggaagggaaggggagggg

SEQ ID NO: 591591 - RNA, 18 nt, Artificial Sequence
  Synthetic
ggaaggggaggggagggg

SEQ ID NO: 591592 - RNA, 19 nt, Artificial Sequence
  Synthetic
gggaaggggaggggagggg

SEQ ID NO: 591593 - RNA, 20 nt, Artificial Sequence
  Synthetic
agggaaggggaggggagggg

SEQ ID NO: 591594 - RNA, 21 nt, Artificial Sequence
  Synthetic
aagggaaggggaggggagggg

SEQ ID NO: 591595 - RNA, 22 nt, Artificial Sequence
  Synthetic
gaagggaaggggaggggagggg

SEQ ID NO: 591596 - RNA, 23 nt, Artificial Sequence
  Synthetic
ggaagggaaggggaggggagggg

SEQ ID NO: 591597 - RNA, 24 nt, Artificial Sequence
  Synthetic
gggaagggaaggggaggggagggg

SEQ ID NO: 591598 - RNA, 21 nt, Artificial Sequence
  Synthetic
aaggggaggggaggggagggg

SEQ ID NO: 591599 - RNA, 22 nt, Artificial Sequence
  Synthetic
gaaggggaggggaggggagggg

SEQ ID NO: 591600 - RNA, 23 nt, Artificial Sequence
  Synthetic
ggaaggggaggggaggggagggg

SEQ ID NO: 591601 - RNA, 24 nt, Artificial Sequence
  Synthetic
gggaaggggaggggaggggagggg

SEQ ID NO: 591602 - RNA, 21 nt, Artificial Sequence
  Synthetic
gaggggaggggaggggagggg

SEQ ID NO: 591603 - RNA, 22 nt, Artificial Sequence
  Synthetic
ggaggggaggggaggggagggg

SEQ ID NO: 591604 - RNA, 23 nt, Artificial Sequence
  Synthetic
gggaggggaggggaggggagggg

SEQ ID NO: 591605 - RNA, 24 nt, Artificial Sequence
  Synthetic
ggggaggggaggggaggggagggg

SEQ ID NO: 591606 - RNA, 18 nt, Artificial Sequence
  Synthetic
gugggguggggggagggg

SEQ ID NO: 591607 - RNA, 19 nt, Artificial Sequence
  Synthetic
ugugggguggggggagggg

SEQ ID NO: 591608 - RNA, 20 nt, Artificial Sequence
  Synthetic
uugugggguggggggagggg

SEQ ID NO: 591609 - RNA, 21 nt, Artificial Sequence
  Synthetic
guugugggguggggggagggg

SEQ ID NO: 591610 - RNA, 22 nt, Artificial Sequence
  Synthetic
uguugugggguggggggagggg

SEQ ID NO: 591611 - RNA, 23 nt, Artificial Sequence
  Synthetic
cuguugugggguggggggagggg

SEQ ID NO: 591612 - RNA, 24 nt, Artificial Sequence
  Synthetic
acuguugugggguggggggagggg

SEQ ID NO: 591613 - RNA, 18 nt, Artificial Sequence
  Synthetic
uauagucacauggagggg

SEQ ID NO: 591614 - RNA, 19 nt, Artificial Sequence
  Synthetic
guauagucacauggagggg

SEQ ID NO: 591615 - RNA, 20 nt, Artificial Sequence
  Synthetic
cguauagucacauggagggg

SEQ ID NO: 591616 - RNA, 21 nt, Artificial Sequence
  Synthetic
acguauagucacauggagggg

SEQ ID NO: 591617 - RNA, 22 nt, Artificial Sequence
  Synthetic
uacguauagucacauggagggg

SEQ ID NO: 591618 - RNA, 23 nt, Artificial Sequence
  Synthetic
auacguauagucacauggagggg

SEQ ID NO: 591619 - RNA, 24 nt, Artificial Sequence
  Synthetic
cauacguauagucacauggagggg

SEQ ID NO: 591620 - RNA, 18 nt, Artificial Sequence
  Synthetic
aagaugcugauggagggg

SEQ ID NO: 591621 - RNA, 19 nt, Artificial Sequence
  Synthetic
aaagaugcugauggagggg

SEQ ID NO: 591622 - RNA, 20 nt, Artificial Sequence
  Synthetic
gaaagaugcugauggagggg

SEQ ID NO: 591623 - RNA, 21 nt, Artificial Sequence
  Synthetic
agaaagaugcugauggagggg

SEQ ID NO: 591624 - RNA, 22 nt, Artificial Sequence
  Synthetic
gagaaagaugcugauggagggg

SEQ ID NO: 591625 - RNA, 23 nt, Artificial Sequence
  Synthetic
agagaaagaugcugauggagggg

SEQ ID NO: 591626 - RNA, 24 nt, Artificial Sequence
  Synthetic
cagagaaagaugcugauggagggg

SEQ ID NO: 591627 - RNA, 18 nt, Artificial Sequence
  Synthetic
gaaccacguauggagggg

SEQ ID NO: 591628 - RNA, 19 nt, Artificial Sequence
  Synthetic
agaaccacguauggagggg

SEQ ID NO: 591629 - RNA, 20 nt, Artificial Sequence
  Synthetic
cagaaccacguauggagggg

SEQ ID NO: 591630 - RNA, 21 nt, Artificial Sequence
  Synthetic
ucagaaccacguauggagggg

SEQ ID NO: 591631 - RNA, 22 nt, Artificial Sequence
  Synthetic
cucagaaccacguauggagggg

SEQ ID NO: 591632 - RNA, 23 nt, Artificial Sequence
  Synthetic
gcucagaaccacguauggagggg

SEQ ID NO: 591633 - RNA, 24 nt, Artificial Sequence
  Synthetic
agcucagaaccacguauggagggg

SEQ ID NO: 591634 - RNA, 18 nt, Artificial Sequence
  Synthetic
ggcccaagggaugagggg

SEQ ID NO: 591635 - RNA, 19 nt, Artificial Sequence
  Synthetic
aggcccaagggaugagggg

SEQ ID NO: 591636 - RNA, 20 nt, Artificial Sequence
  Synthetic
uaggcccaagggaugagggg

SEQ ID NO: 591637 - RNA, 21 nt, Artificial Sequence
  Synthetic
cuaggcccaagggaugagggg

SEQ ID NO: 591638 - RNA, 22 nt, Artificial Sequence
  Synthetic
ucuaggcccaagggaugagggg

SEQ ID NO: 591639 - RNA, 23 nt, Artificial Sequence
  Synthetic
aucuaggcccaagggaugagggg

SEQ ID NO: 591640 - RNA, 24 nt, Artificial Sequence
  Synthetic
caucuaggcccaagggaugagggg

SEQ ID NO: 591641 - RNA, 18 nt, Artificial Sequence
  Synthetic
cagagccaugaugagggg

SEQ ID NO: 591642 - RNA, 19 nt, Artificial Sequence
  Synthetic
gcagagccaugaugagggg

SEQ ID NO: 591643 - RNA, 20 nt, Artificial Sequence
  Synthetic
ugcagagccaugaugagggg

SEQ ID NO: 591644 - RNA, 21 nt, Artificial Sequence
  Synthetic
uugcagagccaugaugagggg

SEQ ID NO: 591645 - RNA, 22 nt, Artificial Sequence
  Synthetic
uuugcagagccaugaugagggg

SEQ ID NO: 591646 - RNA, 23 nt, Artificial Sequence
  Synthetic
uuuugcagagccaugaugagggg

SEQ ID NO: 591647 - RNA, 24 nt, Artificial Sequence
  Synthetic
uuuuugcagagccaugaugagggg

SEQ ID NO: 591648 - RNA, 18 nt, Artificial Sequence
  Synthetic
cgcauuugaagugagggg

SEQ ID NO: 591649 - RNA, 19 nt, Artificial Sequence
  Synthetic
acgcauuugaagugagggg

SEQ ID NO: 591650 - RNA, 20 nt, Artificial Sequence
  Synthetic
cacgcauuugaagugagggg

SEQ ID NO: 591651 - RNA, 21 nt, Artificial Sequence
  Synthetic
ccacgcauuugaagugagggg

SEQ ID NO: 591652 - RNA, 22 nt, Artificial Sequence
  Synthetic
uccacgcauuugaagugagggg

SEQ ID NO: 591653 - RNA, 23 nt, Artificial Sequence
  Synthetic
uuccacgcauuugaagugagggg

SEQ ID NO: 591654 - RNA, 24 nt, Artificial Sequence
  Synthetic
uuuccacgcauuugaagugagggg

SEQ ID NO: 591655 - RNA, 18 nt, Artificial Sequence
  Synthetic
aggguagggggugagggg

SEQ ID NO: 591656 - RNA, 19 nt, Artificial Sequence
  Synthetic
aaggguagggggugagggg

SEQ ID NO: 591657 - RNA, 20 nt, Artificial Sequence
  Synthetic
gaaggguagggggugagggg

SEQ ID NO: 591658 - RNA, 21 nt, Artificial Sequence
  Synthetic
ggaaggguagggggugagggg

SEQ ID NO: 591659 - RNA, 22 nt, Artificial Sequence
  Synthetic
gggaaggguagggggugagggg

SEQ ID NO: 591660 - RNA, 23 nt, Artificial Sequence
  Synthetic
ugggaaggguagggggugagggg

SEQ ID NO: 591661 - RNA, 24 nt, Artificial Sequence
  Synthetic
cugggaaggguagggggugagggg

SEQ ID NO: 591662 - RNA, 18 nt, Artificial Sequence
  Synthetic
cugucguggggugagggg

SEQ ID NO: 591663 - RNA, 19 nt, Artificial Sequence
  Synthetic
ccugucguggggugagggg

SEQ ID NO: 591664 - RNA, 20 nt, Artificial Sequence
  Synthetic
gccugucguggggugagggg

SEQ ID NO: 591665 - RNA, 21 nt, Artificial Sequence
  Synthetic
ggccugucguggggugagggg

SEQ ID NO: 591666 - RNA, 22 nt, Artificial Sequence
  Synthetic
gggccugucguggggugagggg

SEQ ID NO: 591667 - RNA, 23 nt, Artificial Sequence
  Synthetic
ggggccugucguggggugagggg

SEQ ID NO: 591668 - RNA, 24 nt, Artificial Sequence
  Synthetic
cggggccugucguggggugagggg

SEQ ID NO: 591669 - RNA, 18 nt, Artificial Sequence
  Synthetic
gaggugaguggugagggg

SEQ ID NO: 591670 - RNA, 19 nt, Artificial Sequence
  Synthetic
agaggugaguggugagggg

SEQ ID NO: 591671 - RNA, 20 nt, Artificial Sequence
  Synthetic
cagaggugaguggugagggg

SEQ ID NO: 591672 - RNA, 21 nt, Artificial Sequence
  Synthetic
ucagaggugaguggugagggg

SEQ ID NO: 591673 - RNA, 22 nt, Artificial Sequence
  Synthetic
aucagaggugaguggugagggg

SEQ ID NO: 591674 - RNA, 23 nt, Artificial Sequence
  Synthetic
uaucagaggugaguggugagggg

SEQ ID NO: 591675 - RNA, 24 nt, Artificial Sequence
  Synthetic
uuaucagaggugaguggugagggg

SEQ ID NO: 591676 - RNA, 18 nt, Artificial Sequence
  Synthetic
auauagcuaugugagggg

SEQ ID NO: 591677 - RNA, 19 nt, Artificial Sequence
  Synthetic
gauauagcuaugugagggg

SEQ ID NO: 591678 - RNA, 20 nt, Artificial Sequence
  Synthetic
ugauauagcuaugugagggg

SEQ ID NO: 591679 - RNA, 21 nt, Artificial Sequence
  Synthetic
uugauauagcuaugugagggg

SEQ ID NO: 591680 - RNA, 22 nt, Artificial Sequence
  Synthetic
auugauauagcuaugugagggg

SEQ ID NO: 591681 - RNA, 23 nt, Artificial Sequence
  Synthetic
gauugauauagcuaugugagggg

SEQ ID NO: 591682 - RNA, 24 nt, Artificial Sequence
  Synthetic
cgauugauauagcuaugugagggg

SEQ ID NO: 591683 - RNA, 18 nt, Artificial Sequence
  Synthetic
uaccuuacuugugagggg

SEQ ID NO: 591684 - RNA, 19 nt, Artificial Sequence
  Synthetic
auaccuuacuugugagggg

SEQ ID NO: 591685 - RNA, 20 nt, Artificial Sequence
  Synthetic
aauaccuuacuugugagggg

SEQ ID NO: 591686 - RNA, 21 nt, Artificial Sequence
  Synthetic
gaauaccuuacuugugagggg

SEQ ID NO: 591687 - RNA, 22 nt, Artificial Sequence
  Synthetic
ugaauaccuuacuugugagggg

SEQ ID NO: 591688 - RNA, 23 nt, Artificial Sequence
  Synthetic
cugaauaccuuacuugugagggg

SEQ ID NO: 591689 - RNA, 24 nt, Artificial Sequence
  Synthetic
acugaauaccuuacuugugagggg

SEQ ID NO: 591690 - RNA, 18 nt, Artificial Sequence
  Synthetic
ggagcccagcuugagggg

SEQ ID NO: 591691 - RNA, 19 nt, Artificial Sequence
  Synthetic
aggagcccagcuugagggg

SEQ ID NO: 591692 - RNA, 20 nt, Artificial Sequence
  Synthetic
aaggagcccagcuugagggg

SEQ ID NO: 591693 - RNA, 21 nt, Artificial Sequence
  Synthetic
aaaggagcccagcuugagggg

SEQ ID NO: 591694 - RNA, 22 nt, Artificial Sequence
  Synthetic
gaaaggagcccagcuugagggg

SEQ ID NO: 591695 - RNA, 23 nt, Artificial Sequence
  Synthetic
ugaaaggagcccagcuugagggg

SEQ ID NO: 591696 - RNA, 24 nt, Artificial Sequence
  Synthetic
augaaaggagcccagcuugagggg

SEQ ID NO: 591697 - RNA, 18 nt, Artificial Sequence
  Synthetic
gaauaauugcuugagggg

SEQ ID NO: 591698 - RNA, 19 nt, Artificial Sequence
  Synthetic
agaauaauugcuugagggg

SEQ ID NO: 591699 - RNA, 20 nt, Artificial Sequence
  Synthetic
aagaauaauugcuugagggg

SEQ ID NO: 591700 - RNA, 21 nt, Artificial Sequence
  Synthetic
aaagaauaauugcuugagggg

SEQ ID NO: 591701 - RNA, 22 nt, Artificial Sequence
  Synthetic
caaagaauaauugcuugagggg

SEQ ID NO: 591702 - RNA, 23 nt, Artificial Sequence
  Synthetic
acaaagaauaauugcuugagggg

SEQ ID NO: 591703 - RNA, 24 nt, Artificial Sequence
  Synthetic
aacaaagaauaauugcuugagggg

SEQ ID NO: 591704 - RNA, 18 nt, Artificial Sequence
  Synthetic
aaagugauucuugagggg

SEQ ID NO: 591705 - RNA, 19 nt, Artificial Sequence
  Synthetic
gaaagugauucuugagggg

SEQ ID NO: 591706 - RNA, 20 nt, Artificial Sequence
  Synthetic
ggaaagugauucuugagggg

SEQ ID NO: 591707 - RNA, 21 nt, Artificial Sequence
  Synthetic
aggaaagugauucuugagggg

SEQ ID NO: 591708 - RNA, 22 nt, Artificial Sequence
  Synthetic
aaggaaagugauucuugagggg

SEQ ID NO: 591709 - RNA, 23 nt, Artificial Sequence
  Synthetic
gaaggaaagugauucuugagggg

SEQ ID NO: 591710 - RNA, 24 nt, Artificial Sequence
  Synthetic
agaaggaaagugauucuugagggg

SEQ ID NO: 591711 - RNA, 18 nt, Artificial Sequence
  Synthetic
agaaauggcuuugagggg

SEQ ID NO: 591712 - RNA, 19 nt, Artificial Sequence
  Synthetic
cagaaauggcuuugagggg

SEQ ID NO: 591713 - RNA, 20 nt, Artificial Sequence
  Synthetic
acagaaauggcuuugagggg

SEQ ID NO: 591714 - RNA, 21 nt, Artificial Sequence
  Synthetic
aacagaaauggcuuugagggg

SEQ ID NO: 591715 - RNA, 22 nt, Artificial Sequence
  Synthetic
gaacagaaauggcuuugagggg

SEQ ID NO: 591716 - RNA, 23 nt, Artificial Sequence
  Synthetic
agaacagaaauggcuuugagggg

SEQ ID NO: 591717 - RNA, 24 nt, Artificial Sequence
  Synthetic
aagaacagaaauggcuuugagggg

SEQ ID NO: 591718 - RNA, 18 nt, Artificial Sequence
  Synthetic
cuucuuccuuaauagggg

SEQ ID NO: 591719 - RNA, 19 nt, Artificial Sequence
  Synthetic
ucuucuuccuuaauagggg

SEQ ID NO: 591720 - RNA, 20 nt, Artificial Sequence
  Synthetic
cucuucuuccuuaauagggg

SEQ ID NO: 591721 - RNA, 21 nt, Artificial Sequence
  Synthetic
acucuucuuccuuaauagggg

SEQ ID NO: 591722 - RNA, 22 nt, Artificial Sequence
  Synthetic
aacucuucuuccuuaauagggg

SEQ ID NO: 591723 - RNA, 23 nt, Artificial Sequence
  Synthetic
aaacucuucuuccuuaauagggg

SEQ ID NO: 591724 - RNA, 24 nt, Artificial Sequence
  Synthetic
gaaacucuucuuccuuaauagggg

SEQ ID NO: 591725 - RNA, 18 nt, Artificial Sequence
  Synthetic
ucuaaacauccauagggg

SEQ ID NO: 591726 - RNA, 19 nt, Artificial Sequence
  Synthetic
aucuaaacauccauagggg

SEQ ID NO: 591727 - RNA, 20 nt, Artificial Sequence
  Synthetic
aaucuaaacauccauagggg

SEQ ID NO: 591728 - RNA, 21 nt, Artificial Sequence
  Synthetic
aaaucuaaacauccauagggg

SEQ ID NO: 591729 - RNA, 22 nt, Artificial Sequence
  Synthetic
aaaaucuaaacauccauagggg

SEQ ID NO: 591730 - RNA, 23 nt, Artificial Sequence
  Synthetic
uaaaaucuaaacauccauagggg

SEQ ID NO: 591731 - RNA, 24 nt, Artificial Sequence
  Synthetic
cuaaaaucuaaacauccauagggg

SEQ ID NO: 591732 - RNA, 18 nt, Artificial Sequence
  Synthetic
aaccccuaagacuagggg

SEQ ID NO: 591733 - RNA, 19 nt, Artificial Sequence
  Synthetic
caaccccuaagacuagggg

SEQ ID NO: 591734 - RNA, 20 nt, Artificial Sequence
  Synthetic
ccaaccccuaagacuagggg

SEQ ID NO: 591735 - RNA, 21 nt, Artificial Sequence
  Synthetic
gccaaccccuaagacuagggg

SEQ ID NO: 591736 - RNA, 22 nt, Artificial Sequence
  Synthetic
ggccaaccccuaagacuagggg

SEQ ID NO: 591737 - RNA, 23 nt, Artificial Sequence
  Synthetic
uggccaaccccuaagacuagggg

SEQ ID NO: 591738 - RNA, 24 nt, Artificial Sequence
  Synthetic
auggccaaccccuaagacuagggg

SEQ ID NO: 591739 - RNA, 18 nt, Artificial Sequence
  Synthetic
uaguaguucagcuagggg

SEQ ID NO: 591740 - RNA, 19 nt, Artificial Sequence
  Synthetic
uuaguaguucagcuagggg

SEQ ID NO: 591741 - RNA, 20 nt, Artificial Sequence
  Synthetic
auuaguaguucagcuagggg

SEQ ID NO: 591742 - RNA, 21 nt, Artificial Sequence
  Synthetic
aauuaguaguucagcuagggg

SEQ ID NO: 591743 - RNA, 22 nt, Artificial Sequence
  Synthetic
uaauuaguaguucagcuagggg

SEQ ID NO: 591744 - RNA, 23 nt, Artificial Sequence
  Synthetic
auaauuaguaguucagcuagggg

SEQ ID NO: 591745 - RNA, 24 nt, Artificial Sequence
  Synthetic
aauaauuaguaguucagcuagggg

SEQ ID NO: 591746 - RNA, 18 nt, Artificial Sequence
  Synthetic
gcuucuguuggcuagggg

SEQ ID NO: 591747 - RNA, 19 nt, Artificial Sequence
  Synthetic
ggcuucuguuggcuagggg

SEQ ID NO: 591748 - RNA, 20 nt, Artificial Sequence
  Synthetic
cggcuucuguuggcuagggg

SEQ ID NO: 591749 - RNA, 21 nt, Artificial Sequence
  Synthetic
acggcuucuguuggcuagggg

SEQ ID NO: 591750 - RNA, 22 nt, Artificial Sequence
  Synthetic
cacggcuucuguuggcuagggg

SEQ ID NO: 591751 - RNA, 23 nt, Artificial Sequence
  Synthetic
ucacggcuucuguuggcuagggg

SEQ ID NO: 591752 - RNA, 24 nt, Artificial Sequence
  Synthetic
cucacggcuucuguuggcuagggg

SEQ ID NO: 591753 - RNA, 18 nt, Artificial Sequence
  Synthetic
ugcugggaaggguagggg

SEQ ID NO: 591754 - RNA, 19 nt, Artificial Sequence
  Synthetic
augcugggaaggguagggg

SEQ ID NO: 591755 - RNA, 20 nt, Artificial Sequence
  Synthetic
gaugcugggaaggguagggg

SEQ ID NO: 591756 - RNA, 21 nt, Artificial Sequence
  Synthetic
ugaugcugggaaggguagggg

SEQ ID NO: 591757 - RNA, 22 nt, Artificial Sequence
  Synthetic
cugaugcugggaaggguagggg

SEQ ID NO: 591758 - RNA, 23 nt, Artificial Sequence
  Synthetic
ccugaugcugggaaggguagggg

SEQ ID NO: 591759 - RNA, 24 nt, Artificial Sequence
  Synthetic
accugaugcugggaaggguagggg

SEQ ID NO: 591760 - RNA, 18 nt, Artificial Sequence
  Synthetic
gcaucuugaaauuagggg

SEQ ID NO: 591761 - RNA, 19 nt, Artificial Sequence
  Synthetic
agcaucuugaaauuagggg

SEQ ID NO: 591762 - RNA, 20 nt, Artificial Sequence
  Synthetic
cagcaucuugaaauuagggg

SEQ ID NO: 591763 - RNA, 21 nt, Artificial Sequence
  Synthetic
ccagcaucuugaaauuagggg

SEQ ID NO: 591764 - RNA, 22 nt, Artificial Sequence
  Synthetic
accagcaucuugaaauuagggg

SEQ ID NO: 591765 - RNA, 23 nt, Artificial Sequence
  Synthetic
aaccagcaucuugaaauuagggg

SEQ ID NO: 591766 - RNA, 24 nt, Artificial Sequence
  Synthetic
gaaccagcaucuugaaauuagggg

SEQ ID NO: 591767 - RNA, 18 nt, Artificial Sequence
  Synthetic
caaggaacuucuuagggg

SEQ ID NO: 591768 - RNA, 19 nt, Artificial Sequence
  Synthetic
acaaggaacuucuuagggg

SEQ ID NO: 591769 - RNA, 20 nt, Artificial Sequence
  Synthetic
uacaaggaacuucuuagggg

SEQ ID NO: 591770 - RNA, 21 nt, Artificial Sequence
  Synthetic
guacaaggaacuucuuagggg

SEQ ID NO: 591771 - RNA, 22 nt, Artificial Sequence
  Synthetic
aguacaaggaacuucuuagggg

SEQ ID NO: 591772 - RNA, 23 nt, Artificial Sequence
  Synthetic
aaguacaaggaacuucuuagggg

SEQ ID NO: 591773 - RNA, 24 nt, Artificial Sequence
  Synthetic
gaaguacaaggaacuucuuagggg

SEQ ID NO: 591774 - RNA, 18 nt, Artificial Sequence
  Synthetic
gcggguagggguuagggg

SEQ ID NO: 591775 - RNA, 19 nt, Artificial Sequence
  Synthetic
agcggguagggguuagggg

SEQ ID NO: 591776 - RNA, 20 nt, Artificial Sequence
  Synthetic
aagcggguagggguuagggg

SEQ ID NO: 591777 - RNA, 21 nt, Artificial Sequence
  Synthetic
aaagcggguagggguuagggg

SEQ ID NO: 591778 - RNA, 22 nt, Artificial Sequence
  Synthetic
gaaagcggguagggguuagggg

SEQ ID NO: 591779 - RNA, 23 nt, Artificial Sequence
  Synthetic
ggaaagcggguagggguuagggg

SEQ ID NO: 591780 - RNA, 24 nt, Artificial Sequence
  Synthetic
aggaaagcggguagggguuagggg

SEQ ID NO: 591781 - RNA, 18 nt, Artificial Sequence
  Synthetic
acucuaagaauuuagggg

SEQ ID NO: 591782 - RNA, 19 nt, Artificial Sequence
  Synthetic
gacucuaagaauuuagggg

SEQ ID NO: 591783 - RNA, 20 nt, Artificial Sequence
  Synthetic
ugacucuaagaauuuagggg

SEQ ID NO: 591784 - RNA, 21 nt, Artificial Sequence
  Synthetic
uugacucuaagaauuuagggg

SEQ ID NO: 591785 - RNA, 22 nt, Artificial Sequence
  Synthetic
guugacucuaagaauuuagggg

SEQ ID NO: 591786 - RNA, 23 nt, Artificial Sequence
  Synthetic
uguugacucuaagaauuuagggg

SEQ ID NO: 591787 - RNA, 24 nt, Artificial Sequence
  Synthetic
uuguugacucuaagaauuuagggg

SEQ ID NO: 591788 - RNA, 18 nt, Artificial Sequence
  Synthetic
auuucagcacuuuagggg

SEQ ID NO: 591789 - RNA, 19 nt, Artificial Sequence
  Synthetic
aauuucagcacuuuagggg

SEQ ID NO: 591790 - RNA, 20 nt, Artificial Sequence
  Synthetic
uaauuucagcacuuuagggg

SEQ ID NO: 591791 - RNA, 21 nt, Artificial Sequence
  Synthetic
guaauuucagcacuuuagggg

SEQ ID NO: 591792 - RNA, 22 nt, Artificial Sequence
  Synthetic
uguaauuucagcacuuuagggg

SEQ ID NO: 591793 - RNA, 23 nt, Artificial Sequence
  Synthetic
cuguaauuucagcacuuuagggg

SEQ ID NO: 591794 - RNA, 24 nt, Artificial Sequence
  Synthetic
ucuguaauuucagcacuuuagggg

SEQ ID NO: 591795 - RNA, 18 nt, Artificial Sequence
  Synthetic
gaacggucaguuuagggg

SEQ ID NO: 591796 - RNA, 19 nt, Artificial Sequence
  Synthetic
agaacggucaguuuagggg

SEQ ID NO: 591797 - RNA, 20 nt, Artificial Sequence
  Synthetic
aagaacggucaguuuagggg

SEQ ID NO: 591798 - RNA, 21 nt, Artificial Sequence
  Synthetic
uaagaacggucaguuuagggg

SEQ ID NO: 591799 - RNA, 22 nt, Artificial Sequence
  Synthetic
uuaagaacggucaguuuagggg

SEQ ID NO: 591800 - RNA, 23 nt, Artificial Sequence
  Synthetic
uuuaagaacggucaguuuagggg

SEQ ID NO: 591801 - RNA, 24 nt, Artificial Sequence
  Synthetic
cuuuaagaacggucaguuuagggg

SEQ ID NO: 591802 - RNA, 18 nt, Artificial Sequence
  Synthetic
aaaaagcaaaaaacgggg

SEQ ID NO: 591803 - RNA, 19 nt, Artificial Sequence
  Synthetic
gaaaaagcaaaaaacgggg

SEQ ID NO: 591804 - RNA, 20 nt, Artificial Sequence
  Synthetic
ugaaaaagcaaaaaacgggg

SEQ ID NO: 591805 - RNA, 21 nt, Artificial Sequence
  Synthetic
cugaaaaagcaaaaaacgggg

SEQ ID NO: 591806 - RNA, 22 nt, Artificial Sequence
  Synthetic
acugaaaaagcaaaaaacgggg

SEQ ID NO: 591807 - RNA, 23 nt, Artificial Sequence
  Synthetic
aacugaaaaagcaaaaaacgggg

SEQ ID NO: 591808 - RNA, 24 nt, Artificial Sequence
  Synthetic
aaacugaaaaagcaaaaaacgggg

SEQ ID NO: 591809 - RNA, 18 nt, Artificial Sequence
  Synthetic
aauccaucaugaacgggg

SEQ ID NO: 591810 - RNA, 19 nt, Artificial Sequence
  Synthetic
aaauccaucaugaacgggg

SEQ ID NO: 591811 - RNA, 20 nt, Artificial Sequence
  Synthetic
uaaauccaucaugaacgggg

SEQ ID NO: 591812 - RNA, 21 nt, Artificial Sequence
  Synthetic
uuaaauccaucaugaacgggg

SEQ ID NO: 591813 - RNA, 22 nt, Artificial Sequence
  Synthetic
uuuaaauccaucaugaacgggg

SEQ ID NO: 591814 - RNA, 23 nt, Artificial Sequence
  Synthetic
uuuuaaauccaucaugaacgggg

SEQ ID NO: 591815 - RNA, 24 nt, Artificial Sequence
  Synthetic
auuuuaaauccaucaugaacgggg

SEQ ID NO: 591816 - RNA, 18 nt, Artificial Sequence
  Synthetic
uggggugaggggacgggg

SEQ ID NO: 591817 - RNA, 19 nt, Artificial Sequence
  Synthetic
guggggugaggggacgggg

SEQ ID NO: 591818 - RNA, 20 nt, Artificial Sequence
  Synthetic
cguggggugaggggacgggg

SEQ ID NO: 591819 - RNA, 21 nt, Artificial Sequence
  Synthetic
ucguggggugaggggacgggg

SEQ ID NO: 591820 - RNA, 22 nt, Artificial Sequence
  Synthetic
gucguggggugaggggacgggg

SEQ ID NO: 591821 - RNA, 23 nt, Artificial Sequence
  Synthetic
ugucguggggugaggggacgggg

SEQ ID NO: 591822 - RNA, 24 nt, Artificial Sequence
  Synthetic
cugucguggggugaggggacgggg

SEQ ID NO: 591823 - RNA, 18 nt, Artificial Sequence
  Synthetic
ccauucuacauggcgggg

SEQ ID NO: 591824 - RNA, 19 nt, Artificial Sequence
  Synthetic
accauucuacauggcgggg

SEQ ID NO: 591825 - RNA, 20 nt, Artificial Sequence
  Synthetic
caccauucuacauggcgggg

SEQ ID NO: 591826 - RNA, 21 nt, Artificial Sequence
  Synthetic
ucaccauucuacauggcgggg

SEQ ID NO: 591827 - RNA, 22 nt, Artificial Sequence
  Synthetic
cucaccauucuacauggcgggg

SEQ ID NO: 591828 - RNA, 23 nt, Artificial Sequence
  Synthetic
acucaccauucuacauggcgggg

SEQ ID NO: 591829 - RNA, 24 nt, Artificial Sequence
  Synthetic
gacucaccauucuacauggcgggg

SEQ ID NO: 591830 - RNA, 18 nt, Artificial Sequence
  Synthetic
uggacaucuuuggcgggg

SEQ ID NO: 591831 - RNA, 19 nt, Artificial Sequence
  Synthetic
auggacaucuuuggcgggg

SEQ ID NO: 591832 - RNA, 20 nt, Artificial Sequence
  Synthetic
uauggacaucuuuggcgggg

SEQ ID NO: 591833 - RNA, 21 nt, Artificial Sequence
  Synthetic
auauggacaucuuuggcgggg

SEQ ID NO: 591834 - RNA, 22 nt, Artificial Sequence
  Synthetic
gauauggacaucuuuggcgggg

SEQ ID NO: 591835 - RNA, 23 nt, Artificial Sequence
  Synthetic
ggauauggacaucuuuggcgggg

SEQ ID NO: 591836 - RNA, 24 nt, Artificial Sequence
  Synthetic
aggauauggacaucuuuggcgggg

SEQ ID NO: 591837 - RNA, 18 nt, Artificial Sequence
  Synthetic
gcuauaacauccucgggg

SEQ ID NO: 591838 - RNA, 19 nt, Artificial Sequence
  Synthetic
agcuauaacauccucgggg

SEQ ID NO: 591839 - RNA, 20 nt, Artificial Sequence
  Synthetic
aagcuauaacauccucgggg

SEQ ID NO: 591840 - RNA, 21 nt, Artificial Sequence
  Synthetic
uaagcuauaacauccucgggg

SEQ ID NO: 591841 - RNA, 22 nt, Artificial Sequence
  Synthetic
cuaagcuauaacauccucgggg

SEQ ID NO: 591842 - RNA, 23 nt, Artificial Sequence
  Synthetic
ucuaagcuauaacauccucgggg

SEQ ID NO: 591843 - RNA, 24 nt, Artificial Sequence
  Synthetic
uucuaagcuauaacauccucgggg

SEQ ID NO: 591844 - RNA, 18 nt, Artificial Sequence
  Synthetic
auaguggaggagucgggg

SEQ ID NO: 591845 - RNA, 19 nt, Artificial Sequence
  Synthetic
gauaguggaggagucgggg

SEQ ID NO: 591846 - RNA, 20 nt, Artificial Sequence
  Synthetic
ggauaguggaggagucgggg

SEQ ID NO: 591847 - RNA, 21 nt, Artificial Sequence
  Synthetic
aggauaguggaggagucgggg

SEQ ID NO: 591848 - RNA, 22 nt, Artificial Sequence
  Synthetic
aaggauaguggaggagucgggg

SEQ ID NO: 591849 - RNA, 23 nt, Artificial Sequence
  Synthetic
gaaggauaguggaggagucgggg

SEQ ID NO: 591850 - RNA, 24 nt, Artificial Sequence
  Synthetic
ggaaggauaguggaggagucgggg

SEQ ID NO: 591851 - RNA, 18 nt, Artificial Sequence
  Synthetic
aaaaaaaaaggaaggggg

SEQ ID NO: 591852 - RNA, 19 nt, Artificial Sequence
  Synthetic
uaaaaaaaaaggaaggggg

SEQ ID NO: 591853 - RNA, 20 nt, Artificial Sequence
  Synthetic
uuaaaaaaaaaggaaggggg

SEQ ID NO: 591854 - RNA, 21 nt, Artificial Sequence
  Synthetic
auuaaaaaaaaaggaaggggg

SEQ ID NO: 591855 - RNA, 22 nt, Artificial Sequence
  Synthetic
aauuaaaaaaaaaggaaggggg

SEQ ID NO: 591856 - RNA, 23 nt, Artificial Sequence
  Synthetic
aaauuaaaaaaaaaggaaggggg

SEQ ID NO: 591857 - RNA, 24 nt, Artificial Sequence
  Synthetic
gaaauuaaaaaaaaaggaaggggg

SEQ ID NO: 591858 - RNA, 18 nt, Artificial Sequence
  Synthetic
agugaggagggaaggggg

SEQ ID NO: 591859 - RNA, 19 nt, Artificial Sequence
  Synthetic
gagugaggagggaaggggg

SEQ ID NO: 591860 - RNA, 20 nt, Artificial Sequence
  Synthetic
ugagugaggagggaaggggg

SEQ ID NO: 591861 - RNA, 21 nt, Artificial Sequence
  Synthetic
augagugaggagggaaggggg

SEQ ID NO: 591862 - RNA, 22 nt, Artificial Sequence
  Synthetic
aaugagugaggagggaaggggg

SEQ ID NO: 591863 - RNA, 23 nt, Artificial Sequence
  Synthetic
gaaugagugaggagggaaggggg

SEQ ID NO: 591864 - RNA, 24 nt, Artificial Sequence
  Synthetic
agaaugagugaggagggaaggggg

SEQ ID NO: 591865 - RNA, 18 nt, Artificial Sequence
  Synthetic
uaaguggaaauaaggggg

SEQ ID NO: 591866 - RNA, 19 nt, Artificial Sequence
  Synthetic
cuaaguggaaauaaggggg

SEQ ID NO: 591867 - RNA, 20 nt, Artificial Sequence
  Synthetic
ucuaaguggaaauaaggggg

SEQ ID NO: 591868 - RNA, 21 nt, Artificial Sequence
  Synthetic
uucuaaguggaaauaaggggg

SEQ ID NO: 591869 - RNA, 22 nt, Artificial Sequence
  Synthetic
guucuaaguggaaauaaggggg

SEQ ID NO: 591870 - RNA, 23 nt, Artificial Sequence
  Synthetic
aguucuaaguggaaauaaggggg

SEQ ID NO: 591871 - RNA, 24 nt, Artificial Sequence
  Synthetic
caguucuaaguggaaauaaggggg

SEQ ID NO: 591872 - RNA, 18 nt, Artificial Sequence
  Synthetic
ccacugucacuaaggggg

SEQ ID NO: 591873 - RNA, 19 nt, Artificial Sequence
  Synthetic
cccacugucacuaaggggg

SEQ ID NO: 591874 - RNA, 20 nt, Artificial Sequence
  Synthetic
ucccacugucacuaaggggg

SEQ ID NO: 591875 - RNA, 21 nt, Artificial Sequence
  Synthetic
gucccacugucacuaaggggg

SEQ ID NO: 591876 - RNA, 22 nt, Artificial Sequence
  Synthetic
ggucccacugucacuaaggggg

SEQ ID NO: 591877 - RNA, 23 nt, Artificial Sequence
  Synthetic
gggucccacugucacuaaggggg

SEQ ID NO: 591878 - RNA, 24 nt, Artificial Sequence
  Synthetic
ugggucccacugucacuaaggggg

SEQ ID NO: 591879 - RNA, 18 nt, Artificial Sequence
  Synthetic
uaccagcuacucaggggg

SEQ ID NO: 591880 - RNA, 19 nt, Artificial Sequence
  Synthetic
guaccagcuacucaggggg

SEQ ID NO: 591881 - RNA, 20 nt, Artificial Sequence
  Synthetic
aguaccagcuacucaggggg

SEQ ID NO: 591882 - RNA, 21 nt, Artificial Sequence
  Synthetic
uaguaccagcuacucaggggg

SEQ ID NO: 591883 - RNA, 22 nt, Artificial Sequence
  Synthetic
guaguaccagcuacucaggggg

SEQ ID NO: 591884 - RNA, 23 nt, Artificial Sequence
  Synthetic
uguaguaccagcuacucaggggg

SEQ ID NO: 591885 - RNA, 24 nt, Artificial Sequence
  Synthetic
cuguaguaccagcuacucaggggg

SEQ ID NO: 591886 - RNA, 18 nt, Artificial Sequence
  Synthetic
cuggggccugucaggggg

SEQ ID NO: 591887 - RNA, 19 nt, Artificial Sequence
  Synthetic
acuggggccugucaggggg

SEQ ID NO: 591888 - RNA, 20 nt, Artificial Sequence
  Synthetic
cacuggggccugucaggggg

SEQ ID NO: 591889 - RNA, 21 nt, Artificial Sequence
  Synthetic
acacuggggccugucaggggg

SEQ ID NO: 591890 - RNA, 22 nt, Artificial Sequence
  Synthetic
cacacuggggccugucaggggg

SEQ ID NO: 591891 - RNA, 23 nt, Artificial Sequence
  Synthetic
acacacuggggccugucaggggg

SEQ ID NO: 591892 - RNA, 24 nt, Artificial Sequence
  Synthetic
cacacacuggggccugucaggggg

SEQ ID NO: 591893 - RNA, 18 nt, Artificial Sequence
  Synthetic
agagugagacagaggggg

SEQ ID NO: 591894 - RNA, 19 nt, Artificial Sequence
  Synthetic
aagagugagacagaggggg

SEQ ID NO: 591895 - RNA, 20 nt, Artificial Sequence
  Synthetic
aaagagugagacagaggggg

SEQ ID NO: 591896 - RNA, 21 nt, Artificial Sequence
  Synthetic
aaaagagugagacagaggggg

SEQ ID NO: 591897 - RNA, 22 nt, Artificial Sequence
  Synthetic
caaaagagugagacagaggggg

SEQ ID NO: 591898 - RNA, 23 nt, Artificial Sequence
  Synthetic
ccaaaagagugagacagaggggg

SEQ ID NO: 591899 - RNA, 24 nt, Artificial Sequence
  Synthetic
accaaaagagugagacagaggggg

SEQ ID NO: 591900 - RNA, 18 nt, Artificial Sequence
  Synthetic
aagacaaaccagaggggg

SEQ ID NO: 591901 - RNA, 19 nt, Artificial Sequence
  Synthetic
gaagacaaaccagaggggg

SEQ ID NO: 591902 - RNA, 20 nt, Artificial Sequence
  Synthetic
agaagacaaaccagaggggg

SEQ ID NO: 591903 - RNA, 21 nt, Artificial Sequence
  Synthetic
aagaagacaaaccagaggggg

SEQ ID NO: 591904 - RNA, 22 nt, Artificial Sequence
  Synthetic
uaagaagacaaaccagaggggg

SEQ ID NO: 591905 - RNA, 23 nt, Artificial Sequence
  Synthetic
auaagaagacaaaccagaggggg

SEQ ID NO: 591906 - RNA, 24 nt, Artificial Sequence
  Synthetic
uauaagaagacaaaccagaggggg

SEQ ID NO: 591907 - RNA, 21 nt, Artificial Sequence
  Synthetic
cugugggguggggggaggggg

SEQ ID NO: 591908 - RNA, 22 nt, Artificial Sequence
  Synthetic
gcugugggguggggggaggggg

SEQ ID NO: 591909 - RNA, 23 nt, Artificial Sequence
  Synthetic
ugcugugggguggggggaggggg

SEQ ID NO: 591910 - RNA, 24 nt, Artificial Sequence
  Synthetic
cugcugugggguggggggaggggg

SEQ ID NO: 591911 - RNA, 18 nt, Artificial Sequence
  Synthetic
cuguuuacuuugaggggg

SEQ ID NO: 591912 - RNA, 19 nt, Artificial Sequence
  Synthetic
ccuguuuacuuugaggggg

SEQ ID NO: 591913 - RNA, 20 nt, Artificial Sequence
  Synthetic
cccuguuuacuuugaggggg

SEQ ID NO: 591914 - RNA, 21 nt, Artificial Sequence
  Synthetic
ucccuguuuacuuugaggggg

SEQ ID NO: 591915 - RNA, 22 nt, Artificial Sequence
  Synthetic
uucccuguuuacuuugaggggg

SEQ ID NO: 591916 - RNA, 23 nt, Artificial Sequence
  Synthetic
cuucccuguuuacuuugaggggg

SEQ ID NO: 591917 - RNA, 24 nt, Artificial Sequence
  Synthetic
acuucccuguuuacuuugaggggg

SEQ ID NO: 591918 - RNA, 18 nt, Artificial Sequence
  Synthetic
aaaaauaaagguaggggg

SEQ ID NO: 591919 - RNA, 19 nt, Artificial Sequence
  Synthetic
caaaaauaaagguaggggg

SEQ ID NO: 591920 - RNA, 20 nt, Artificial Sequence
  Synthetic
ucaaaaauaaagguaggggg

SEQ ID NO: 591921 - RNA, 21 nt, Artificial Sequence
  Synthetic
gucaaaaauaaagguaggggg

SEQ ID NO: 591922 - RNA, 22 nt, Artificial Sequence
  Synthetic
ugucaaaaauaaagguaggggg

SEQ ID NO: 591923 - RNA, 23 nt, Artificial Sequence
  Synthetic
augucaaaaauaaagguaggggg

SEQ ID NO: 591924 - RNA, 24 nt, Artificial Sequence
  Synthetic
gaugucaaaaauaaagguaggggg

SEQ ID NO: 591925 - RNA, 18 nt, Artificial Sequence
  Synthetic
uggggguaggguaggggg

SEQ ID NO: 591926 - RNA, 19 nt, Artificial Sequence
  Synthetic
guggggguaggguaggggg

SEQ ID NO: 591927 - RNA, 20 nt, Artificial Sequence
  Synthetic
gguggggguaggguaggggg

SEQ ID NO: 591928 - RNA, 21 nt, Artificial Sequence
  Synthetic
ggguggggguaggguaggggg

SEQ ID NO: 591929 - RNA, 22 nt, Artificial Sequence
  Synthetic
gggguggggguaggguaggggg

SEQ ID NO: 591930 - RNA, 23 nt, Artificial Sequence
  Synthetic
agggguggggguaggguaggggg

SEQ ID NO: 591931 - RNA, 24 nt, Artificial Sequence
  Synthetic
gagggguggggguaggguaggggg

SEQ ID NO: 591932 - RNA, 18 nt, Artificial Sequence
  Synthetic
ggacugucaauuaggggg

SEQ ID NO: 591933 - RNA, 19 nt, Artificial Sequence
  Synthetic
aggacugucaauuaggggg

SEQ ID NO: 591934 - RNA, 20 nt, Artificial Sequence
  Synthetic
gaggacugucaauuaggggg

SEQ ID NO: 591935 - RNA, 21 nt, Artificial Sequence
  Synthetic
ggaggacugucaauuaggggg

SEQ ID NO: 591936 - RNA, 22 nt, Artificial Sequence
  Synthetic
uggaggacugucaauuaggggg

SEQ ID NO: 591937 - RNA, 23 nt, Artificial Sequence
  Synthetic
auggaggacugucaauuaggggg

SEQ ID NO: 591938 - RNA, 24 nt, Artificial Sequence
  Synthetic
aauggaggacugucaauuaggggg

SEQ ID NO: 591939 - RNA, 18 nt, Artificial Sequence
  Synthetic
cucuaagaauuuaggggg

SEQ ID NO: 591940 - RNA, 19 nt, Artificial Sequence
  Synthetic
acucuaagaauuuaggggg

SEQ ID NO: 591941 - RNA, 20 nt, Artificial Sequence
  Synthetic
gacucuaagaauuuaggggg

SEQ ID NO: 591942 - RNA, 21 nt, Artificial Sequence
  Synthetic
ugacucuaagaauuuaggggg

SEQ ID NO: 591943 - RNA, 22 nt, Artificial Sequence
  Synthetic
uugacucuaagaauuuaggggg

SEQ ID NO: 591944 - RNA, 23 nt, Artificial Sequence
  Synthetic
guugacucuaagaauuuaggggg

SEQ ID NO: 591945 - RNA, 24 nt, Artificial Sequence
  Synthetic
uguugacucuaagaauuuaggggg

SEQ ID NO: 591946 - RNA, 18 nt, Artificial Sequence
  Synthetic
uaucacagcuaacggggg

SEQ ID NO: 591947 - RNA, 19 nt, Artificial Sequence
  Synthetic
auaucacagcuaacggggg

SEQ ID NO: 591948 - RNA, 20 nt, Artificial Sequence
  Synthetic
uauaucacagcuaacggggg

SEQ ID NO: 591949 - RNA, 21 nt, Artificial Sequence
  Synthetic
auauaucacagcuaacggggg

SEQ ID NO: 591950 - RNA, 22 nt, Artificial Sequence
  Synthetic
gauauaucacagcuaacggggg

SEQ ID NO: 591951 - RNA, 23 nt, Artificial Sequence
  Synthetic
agauauaucacagcuaacggggg

SEQ ID NO: 591952 - RNA, 24 nt, Artificial Sequence
  Synthetic
aagauauaucacagcuaacggggg

SEQ ID NO: 591953 - RNA, 18 nt, Artificial Sequence
  Synthetic
ugaaggguaguggggggg

SEQ ID NO: 591954 - RNA, 19 nt, Artificial Sequence
  Synthetic
gugaaggguaguggggggg

SEQ ID NO: 591955 - RNA, 20 nt, Artificial Sequence
  Synthetic
ugugaaggguaguggggggg

SEQ ID NO: 591956 - RNA, 21 nt, Artificial Sequence
  Synthetic
cugugaaggguaguggggggg

SEQ ID NO: 591957 - RNA, 22 nt, Artificial Sequence
  Synthetic
gcugugaaggguaguggggggg

SEQ ID NO: 591958 - RNA, 23 nt, Artificial Sequence
  Synthetic
ggcugugaaggguaguggggggg

SEQ ID NO: 591959 - RNA, 24 nt, Artificial Sequence
  Synthetic
aggcugugaaggguaguggggggg

SEQ ID NO: 591960 - RNA, 18 nt, Artificial Sequence
  Synthetic
uguuguuggguggggggg

SEQ ID NO: 591961 - RNA, 19 nt, Artificial Sequence
  Synthetic
uuguuguuggguggggggg

SEQ ID NO: 591962 - RNA, 20 nt, Artificial Sequence
  Synthetic
uuuguuguuggguggggggg

SEQ ID NO: 591963 - RNA, 21 nt, Artificial Sequence
  Synthetic
cuuuguuguuggguggggggg

SEQ ID NO: 591964 - RNA, 22 nt, Artificial Sequence
  Synthetic
ccuuuguuguuggguggggggg

SEQ ID NO: 591965 - RNA, 23 nt, Artificial Sequence
  Synthetic
uccuuuguuguuggguggggggg

SEQ ID NO: 591966 - RNA, 24 nt, Artificial Sequence
  Synthetic
auccuuuguuguuggguggggggg

SEQ ID NO: 591967 - RNA, 18 nt, Artificial Sequence
  Synthetic
gccaaauaugcugggggg

SEQ ID NO: 591968 - RNA, 19 nt, Artificial Sequence
  Synthetic
ugccaaauaugcugggggg

SEQ ID NO: 591969 - RNA, 20 nt, Artificial Sequence
  Synthetic
cugccaaauaugcugggggg

SEQ ID NO: 591970 - RNA, 21 nt, Artificial Sequence
  Synthetic
acugccaaauaugcugggggg

SEQ ID NO: 591971 - RNA, 22 nt, Artificial Sequence
  Synthetic
cacugccaaauaugcugggggg

SEQ ID NO: 591972 - RNA, 23 nt, Artificial Sequence
  Synthetic
gcacugccaaauaugcugggggg

SEQ ID NO: 591973 - RNA, 24 nt, Artificial Sequence
  Synthetic
ggcacugccaaauaugcugggggg

SEQ ID NO: 591974 - RNA, 18 nt, Artificial Sequence
  Synthetic
acuuuuggcucugggggg

SEQ ID NO: 591975 - RNA, 19 nt, Artificial Sequence
  Synthetic
uacuuuuggcucugggggg

SEQ ID NO: 591976 - RNA, 20 nt, Artificial Sequence
  Synthetic
uuacuuuuggcucugggggg

SEQ ID NO: 591977 - RNA, 21 nt, Artificial Sequence
  Synthetic
guuacuuuuggcucugggggg

SEQ ID NO: 591978 - RNA, 22 nt, Artificial Sequence
  Synthetic
gguuacuuuuggcucugggggg

SEQ ID NO: 591979 - RNA, 23 nt, Artificial Sequence
  Synthetic
ugguuacuuuuggcucugggggg

SEQ ID NO: 591980 - RNA, 24 nt, Artificial Sequence
  Synthetic
augguuacuuuuggcucugggggg

SEQ ID NO: 591981 - RNA, 23 nt, Artificial Sequence
  Synthetic
ggggccugucguggggugggggg

SEQ ID NO: 591982 - RNA, 24 nt, Artificial Sequence
  Synthetic
uggggccugucguggggugggggg

SEQ ID NO: 591983 - RNA, 18 nt, Artificial Sequence
  Synthetic
cugcuguggggugggggg

SEQ ID NO: 591984 - RNA, 19 nt, Artificial Sequence
  Synthetic
acugcuguggggugggggg

SEQ ID NO: 591985 - RNA, 20 nt, Artificial Sequence
  Synthetic
gacugcuguggggugggggg

SEQ ID NO: 591986 - RNA, 21 nt, Artificial Sequence
  Synthetic
ggacugcuguggggugggggg

SEQ ID NO: 591987 - RNA, 22 nt, Artificial Sequence
  Synthetic
gggacugcuguggggugggggg

SEQ ID NO: 591988 - RNA, 23 nt, Artificial Sequence
  Synthetic
ggggacugcuguggggugggggg

SEQ ID NO: 591989 - RNA, 24 nt, Artificial Sequence
  Synthetic
uggggacugcuguggggugggggg

SEQ ID NO: 591990 - RNA, 19 nt, Artificial Sequence
  Synthetic
ccugcuguggggugggggg

SEQ ID NO: 591991 - RNA, 20 nt, Artificial Sequence
  Synthetic
gccugcuguggggugggggg

SEQ ID NO: 591992 - RNA, 21 nt, Artificial Sequence
  Synthetic
ggccugcuguggggugggggg

SEQ ID NO: 591993 - RNA, 22 nt, Artificial Sequence
  Synthetic
gggccugcuguggggugggggg

SEQ ID NO: 591994 - RNA, 23 nt, Artificial Sequence
  Synthetic
ggggccugcuguggggugggggg

SEQ ID NO: 591995 - RNA, 24 nt, Artificial Sequence
  Synthetic
uggggccugcuguggggugggggg

SEQ ID NO: 591996 - RNA, 18 nt, Artificial Sequence
  Synthetic
cuguuguggggugggggg

SEQ ID NO: 591997 - RNA, 19 nt, Artificial Sequence
  Synthetic
acuguuguggggugggggg

SEQ ID NO: 591998 - RNA, 20 nt, Artificial Sequence
  Synthetic
aacuguuguggggugggggg

SEQ ID NO: 591999 - RNA, 21 nt, Artificial Sequence
  Synthetic
gaacuguuguggggugggggg

SEQ ID NO: 592000 - RNA, 22 nt, Artificial Sequence
  Synthetic
ggaacuguuguggggugggggg

SEQ ID NO: 592001 - RNA, 23 nt, Artificial Sequence
  Synthetic
gggaacuguuguggggugggggg

SEQ ID NO: 592002 - RNA, 24 nt, Artificial Sequence
  Synthetic
ugggaacuguuguggggugggggg

SEQ ID NO: 592003 - RNA, 19 nt, Artificial Sequence
  Synthetic
ccuguuguggggugggggg

SEQ ID NO: 592004 - RNA, 20 nt, Artificial Sequence
  Synthetic
gccuguuguggggugggggg

SEQ ID NO: 592005 - RNA, 21 nt, Artificial Sequence
  Synthetic
ggccuguuguggggugggggg

SEQ ID NO: 592006 - RNA, 22 nt, Artificial Sequence
  Synthetic
gggccuguuguggggugggggg

SEQ ID NO: 592007 - RNA, 23 nt, Artificial Sequence
  Synthetic
ggggccuguuguggggugggggg

SEQ ID NO: 592008 - RNA, 24 nt, Artificial Sequence
  Synthetic
cggggccuguuguggggugggggg

SEQ ID NO: 592009 - RNA, 18 nt, Artificial Sequence
  Synthetic
cuuuggagacuugggggg

SEQ ID NO: 592010 - RNA, 19 nt, Artificial Sequence
  Synthetic
gcuuuggagacuugggggg

SEQ ID NO: 592011 - RNA, 20 nt, Artificial Sequence
  Synthetic
ggcuuuggagacuugggggg

SEQ ID NO: 592012 - RNA, 21 nt, Artificial Sequence
  Synthetic
gggcuuuggagacuugggggg

SEQ ID NO: 592013 - RNA, 22 nt, Artificial Sequence
  Synthetic
ugggcuuuggagacuugggggg

SEQ ID NO: 592014 - RNA, 23 nt, Artificial Sequence
  Synthetic
augggcuuuggagacuugggggg

SEQ ID NO: 592015 - RNA, 24 nt, Artificial Sequence
  Synthetic
aaugggcuuuggagacuugggggg

SEQ ID NO: 592016 - RNA, 18 nt, Artificial Sequence
  Synthetic
gagguaagagaauggggg

SEQ ID NO: 592017 - RNA, 19 nt, Artificial Sequence
  Synthetic
ggagguaagagaauggggg

SEQ ID NO: 592018 - RNA, 20 nt, Artificial Sequence
  Synthetic
uggagguaagagaauggggg

SEQ ID NO: 592019 - RNA, 21 nt, Artificial Sequence
  Synthetic
cuggagguaagagaauggggg

SEQ ID NO: 592020 - RNA, 22 nt, Artificial Sequence
  Synthetic
gcuggagguaagagaauggggg

SEQ ID NO: 592021 - RNA, 23 nt, Artificial Sequence
  Synthetic
ggcuggagguaagagaauggggg

SEQ ID NO: 592022 - RNA, 24 nt, Artificial Sequence
  Synthetic
gggcuggagguaagagaauggggg

SEQ ID NO: 592023 - RNA, 18 nt, Artificial Sequence
  Synthetic
auuuuuuaaagauggggg

SEQ ID NO: 592024 - RNA, 19 nt, Artificial Sequence
  Synthetic
gauuuuuuaaagauggggg

SEQ ID NO: 592025 - RNA, 20 nt, Artificial Sequence
  Synthetic
ugauuuuuuaaagauggggg

SEQ ID NO: 592026 - RNA, 21 nt, Artificial Sequence
  Synthetic
uugauuuuuuaaagauggggg

SEQ ID NO: 592027 - RNA, 22 nt, Artificial Sequence
  Synthetic
auugauuuuuuaaagauggggg

SEQ ID NO: 592028 - RNA, 23 nt, Artificial Sequence
  Synthetic
aauugauuuuuuaaagauggggg

SEQ ID NO: 592029 - RNA, 24 nt, Artificial Sequence
  Synthetic
aaauugauuuuuuaaagauggggg

SEQ ID NO: 592030 - RNA, 18 nt, Artificial Sequence
  Synthetic
uauguguguagauggggg

SEQ ID NO: 592031 - RNA, 19 nt, Artificial Sequence
  Synthetic
guauguguguagauggggg

SEQ ID NO: 592032 - RNA, 20 nt, Artificial Sequence
  Synthetic
aguauguguguagauggggg

SEQ ID NO: 592033 - RNA, 21 nt, Artificial Sequence
  Synthetic
aaguauguguguagauggggg

SEQ ID NO: 592034 - RNA, 22 nt, Artificial Sequence
  Synthetic
aaaguauguguguagauggggg

SEQ ID NO: 592035 - RNA, 23 nt, Artificial Sequence
  Synthetic
aaaaguauguguguagauggggg

SEQ ID NO: 592036 - RNA, 24 nt, Artificial Sequence
  Synthetic
uaaaaguauguguguagauggggg

SEQ ID NO: 592037 - RNA, 18 nt, Artificial Sequence
  Synthetic
guuuccaggggcuggggg

SEQ ID NO: 592038 - RNA, 19 nt, Artificial Sequence
  Synthetic
gguuuccaggggcuggggg

SEQ ID NO: 592039 - RNA, 20 nt, Artificial Sequence
  Synthetic
ugguuuccaggggcuggggg

SEQ ID NO: 592040 - RNA, 21 nt, Artificial Sequence
  Synthetic
gugguuuccaggggcuggggg

SEQ ID NO: 592041 - RNA, 22 nt, Artificial Sequence
  Synthetic
ggugguuuccaggggcuggggg

SEQ ID NO: 592042 - RNA, 23 nt, Artificial Sequence
  Synthetic
uggugguuuccaggggcuggggg

SEQ ID NO: 592043 - RNA, 24 nt, Artificial Sequence
  Synthetic
auggugguuuccaggggcuggggg

SEQ ID NO: 592044 - RNA, 18 nt, Artificial Sequence
  Synthetic
gugaaguguugcuggggg

SEQ ID NO: 592045 - RNA, 19 nt, Artificial Sequence
  Synthetic
agugaaguguugcuggggg

SEQ ID NO: 592046 - RNA, 20 nt, Artificial Sequence
  Synthetic
cagugaaguguugcuggggg

SEQ ID NO: 592047 - RNA, 21 nt, Artificial Sequence
  Synthetic
gcagugaaguguugcuggggg

SEQ ID NO: 592048 - RNA, 22 nt, Artificial Sequence
  Synthetic
ugcagugaaguguugcuggggg

SEQ ID NO: 592049 - RNA, 23 nt, Artificial Sequence
  Synthetic
uugcagugaaguguugcuggggg

SEQ ID NO: 592050 - RNA, 24 nt, Artificial Sequence
  Synthetic
cuugcagugaaguguugcuggggg

SEQ ID NO: 592051 - RNA, 18 nt, Artificial Sequence
  Synthetic
agcauaagcgucuggggg

SEQ ID NO: 592052 - RNA, 19 nt, Artificial Sequence
  Synthetic
uagcauaagcgucuggggg

SEQ ID NO: 592053 - RNA, 20 nt, Artificial Sequence
  Synthetic
guagcauaagcgucuggggg

SEQ ID NO: 592054 - RNA, 21 nt, Artificial Sequence
  Synthetic
gguagcauaagcgucuggggg

SEQ ID NO: 592055 - RNA, 22 nt, Artificial Sequence
  Synthetic
ugguagcauaagcgucuggggg

SEQ ID NO: 592056 - RNA, 23 nt, Artificial Sequence
  Synthetic
augguagcauaagcgucuggggg

SEQ ID NO: 592057 - RNA, 24 nt, Artificial Sequence
  Synthetic
gaugguagcauaagcgucuggggg

SEQ ID NO: 592058 - RNA, 18 nt, Artificial Sequence
  Synthetic
gcaggaaacagguggggg

SEQ ID NO: 592059 - RNA, 19 nt, Artificial Sequence
  Synthetic
agcaggaaacagguggggg

SEQ ID NO: 592060 - RNA, 20 nt, Artificial Sequence
  Synthetic
gagcaggaaacagguggggg

SEQ ID NO: 592061 - RNA, 21 nt, Artificial Sequence
  Synthetic
agagcaggaaacagguggggg

SEQ ID NO: 592062 - RNA, 22 nt, Artificial Sequence
  Synthetic
gagagcaggaaacagguggggg

SEQ ID NO: 592063 - RNA, 23 nt, Artificial Sequence
  Synthetic
ggagagcaggaaacagguggggg

SEQ ID NO: 592064 - RNA, 24 nt, Artificial Sequence
  Synthetic
gggagagcaggaaacagguggggg

SEQ ID NO: 592065 - RNA, 18 nt, Artificial Sequence
  Synthetic
uggccugugagguggggg

SEQ ID NO: 592066 - RNA, 19 nt, Artificial Sequence
  Synthetic
uuggccugugagguggggg

SEQ ID NO: 592067 - RNA, 20 nt, Artificial Sequence
  Synthetic
auuggccugugagguggggg

SEQ ID NO: 592068 - RNA, 21 nt, Artificial Sequence
  Synthetic
uauuggccugugagguggggg

SEQ ID NO: 592069 - RNA, 22 nt, Artificial Sequence
  Synthetic
uuauuggccugugagguggggg

SEQ ID NO: 592070 - RNA, 23 nt, Artificial Sequence
  Synthetic
uuuauuggccugugagguggggg

SEQ ID NO: 592071 - RNA, 24 nt, Artificial Sequence
  Synthetic
uuuuauuggccugugagguggggg

SEQ ID NO: 592072 - RNA, 18 nt, Artificial Sequence
  Synthetic
ccugcugugggguggggg

SEQ ID NO: 592073 - RNA, 19 nt, Artificial Sequence
  Synthetic
gccugcugugggguggggg

SEQ ID NO: 592074 - RNA, 20 nt, Artificial Sequence
  Synthetic
ggccugcugugggguggggg

SEQ ID NO: 592075 - RNA, 21 nt, Artificial Sequence
  Synthetic
gggccugcugugggguggggg

SEQ ID NO: 592076 - RNA, 22 nt, Artificial Sequence
  Synthetic
ggggccugcugugggguggggg

SEQ ID NO: 592077 - RNA, 23 nt, Artificial Sequence
  Synthetic
uggggccugcugugggguggggg

SEQ ID NO: 592078 - RNA, 24 nt, Artificial Sequence
  Synthetic
cuggggccugcugugggguggggg

SEQ ID NO: 592079 - RNA, 18 nt, Artificial Sequence
  Synthetic
acuguugugggguggggg

SEQ ID NO: 592080 - RNA, 19 nt, Artificial Sequence
  Synthetic
aacuguugugggguggggg

SEQ ID NO: 592081 - RNA, 20 nt, Artificial Sequence
  Synthetic
gaacuguugugggguggggg

SEQ ID NO: 592082 - RNA, 21 nt, Artificial Sequence
  Synthetic
ggaacuguugugggguggggg

SEQ ID NO: 592083 - RNA, 22 nt, Artificial Sequence
  Synthetic
gggaacuguugugggguggggg

SEQ ID NO: 592084 - RNA, 23 nt, Artificial Sequence
  Synthetic
ugggaacuguugugggguggggg

SEQ ID NO: 592085 - RNA, 24 nt, Artificial Sequence
  Synthetic
cugggaacuguugugggguggggg

SEQ ID NO: 592086 - RNA, 21 nt, Artificial Sequence
  Synthetic
gggacuguugugggguggggg

SEQ ID NO: 592087 - RNA, 22 nt, Artificial Sequence
  Synthetic
ggggacuguugugggguggggg

SEQ ID NO: 592088 - RNA, 23 nt, Artificial Sequence
  Synthetic
uggggacuguugugggguggggg

SEQ ID NO: 592089 - RNA, 24 nt, Artificial Sequence
  Synthetic
cuggggacuguugugggguggggg

SEQ ID NO: 592090 - RNA, 21 nt, Artificial Sequence
  Synthetic
gggccuguugugggguggggg

SEQ ID NO: 592091 - RNA, 22 nt, Artificial Sequence
  Synthetic
ggggccuguugugggguggggg

SEQ ID NO: 592092 - RNA, 23 nt, Artificial Sequence
  Synthetic
cggggccuguugugggguggggg

SEQ ID NO: 592093 - RNA, 24 nt, Artificial Sequence
  Synthetic
ccggggccuguugugggguggggg

SEQ ID NO: 592094 - RNA, 18 nt, Artificial Sequence
  Synthetic
acucgaaccugguggggg

SEQ ID NO: 592095 - RNA, 19 nt, Artificial Sequence
  Synthetic
cacucgaaccugguggggg

SEQ ID NO: 592096 - RNA, 20 nt, Artificial Sequence
  Synthetic
ucacucgaaccugguggggg

SEQ ID NO: 592097 - RNA, 21 nt, Artificial Sequence
  Synthetic
aucacucgaaccugguggggg

SEQ ID NO: 592098 - RNA, 22 nt, Artificial Sequence
  Synthetic
aaucacucgaaccugguggggg

SEQ ID NO: 592099 - RNA, 23 nt, Artificial Sequence
  Synthetic
gaaucacucgaaccugguggggg

SEQ ID NO: 592100 - RNA, 24 nt, Artificial Sequence
  Synthetic
ggaaucacucgaaccugguggggg

SEQ ID NO: 592101 - RNA, 18 nt, Artificial Sequence
  Synthetic
uugggguggugguggggg

SEQ ID NO: 592102 - RNA, 19 nt, Artificial Sequence
  Synthetic
uuugggguggugguggggg

SEQ ID NO: 592103 - RNA, 20 nt, Artificial Sequence
  Synthetic
uuuugggguggugguggggg

SEQ ID NO: 592104 - RNA, 21 nt, Artificial Sequence
  Synthetic
cuuuugggguggugguggggg

SEQ ID NO: 592105 - RNA, 22 nt, Artificial Sequence
  Synthetic
ccuuuugggguggugguggggg

SEQ ID NO: 592106 - RNA, 23 nt, Artificial Sequence
  Synthetic
uccuuuugggguggugguggggg

SEQ ID NO: 592107 - RNA, 24 nt, Artificial Sequence
  Synthetic
cuccuuuugggguggugguggggg

SEQ ID NO: 592108 - RNA, 18 nt, Artificial Sequence
  Synthetic
auuggggguugguggggg

SEQ ID NO: 592109 - RNA, 19 nt, Artificial Sequence
  Synthetic
gauuggggguugguggggg

SEQ ID NO: 592110 - RNA, 20 nt, Artificial Sequence
  Synthetic
agauuggggguugguggggg

SEQ ID NO: 592111 - RNA, 21 nt, Artificial Sequence
  Synthetic
aagauuggggguugguggggg

SEQ ID NO: 592112 - RNA, 22 nt, Artificial Sequence
  Synthetic
caagauuggggguugguggggg

SEQ ID NO: 592113 - RNA, 23 nt, Artificial Sequence
  Synthetic
ucaagauuggggguugguggggg

SEQ ID NO: 592114 - RNA, 24 nt, Artificial Sequence
  Synthetic
uucaagauuggggguugguggggg

SEQ ID NO: 592115 - RNA, 18 nt, Artificial Sequence
  Synthetic
aaaaaaaaaaauuggggg

SEQ ID NO: 592116 - RNA, 19 nt, Artificial Sequence
  Synthetic
gaaaaaaaaaaauuggggg

SEQ ID NO: 592117 - RNA, 20 nt, Artificial Sequence
  Synthetic
agaaaaaaaaaaauuggggg

SEQ ID NO: 592118 - RNA, 21 nt, Artificial Sequence
  Synthetic
aagaaaaaaaaaaauuggggg

SEQ ID NO: 592119 - RNA, 22 nt, Artificial Sequence
  Synthetic
aaagaaaaaaaaaaauuggggg

SEQ ID NO: 592120 - RNA, 23 nt, Artificial Sequence
  Synthetic
aaaagaaaaaaaaaaauuggggg

SEQ ID NO: 592121 - RNA, 24 nt, Artificial Sequence
  Synthetic
aaaaagaaaaaaaaaaauuggggg

SEQ ID NO: 592122 - RNA, 18 nt, Artificial Sequence
  Synthetic
gucuggucaaauuggggg

SEQ ID NO: 592123 - RNA, 19 nt, Artificial Sequence
  Synthetic
agucuggucaaauuggggg

SEQ ID NO: 592124 - RNA, 20 nt, Artificial Sequence
  Synthetic
aagucuggucaaauuggggg

SEQ ID NO: 592125 - RNA, 21 nt, Artificial Sequence
  Synthetic
caagucuggucaaauuggggg

SEQ ID NO: 592126 - RNA, 22 nt, Artificial Sequence
  Synthetic
ucaagucuggucaaauuggggg

SEQ ID NO: 592127 - RNA, 23 nt, Artificial Sequence
  Synthetic
uucaagucuggucaaauuggggg

SEQ ID NO: 592128 - RNA, 24 nt, Artificial Sequence
  Synthetic
cuucaagucuggucaaauuggggg

SEQ ID NO: 592129 - RNA, 18 nt, Artificial Sequence
  Synthetic
augcugggggguuggggg

SEQ ID NO: 592130 - RNA, 19 nt, Artificial Sequence
  Synthetic
uaugcugggggguuggggg

SEQ ID NO: 592131 - RNA, 20 nt, Artificial Sequence
  Synthetic
auaugcugggggguuggggg

SEQ ID NO: 592132 - RNA, 21 nt, Artificial Sequence
  Synthetic
aauaugcugggggguuggggg

SEQ ID NO: 592133 - RNA, 22 nt, Artificial Sequence
  Synthetic
aaauaugcugggggguuggggg

SEQ ID NO: 592134 - RNA, 23 nt, Artificial Sequence
  Synthetic
caaauaugcugggggguuggggg

SEQ ID NO: 592135 - RNA, 24 nt, Artificial Sequence
  Synthetic
ccaaauaugcugggggguuggggg

SEQ ID NO: 592136 - RNA, 18 nt, Artificial Sequence
  Synthetic
acuggugccuguuggggg

SEQ ID NO: 592137 - RNA, 19 nt, Artificial Sequence
  Synthetic
cacuggugccuguuggggg

SEQ ID NO: 592138 - RNA, 20 nt, Artificial Sequence
  Synthetic
acacuggugccuguuggggg

SEQ ID NO: 592139 - RNA, 21 nt, Artificial Sequence
  Synthetic
cacacuggugccuguuggggg

SEQ ID NO: 592140 - RNA, 22 nt, Artificial Sequence
  Synthetic
acacacuggugccuguuggggg

SEQ ID NO: 592141 - RNA, 23 nt, Artificial Sequence
  Synthetic
cacacacuggugccuguuggggg

SEQ ID NO: 592142 - RNA, 24 nt, Artificial Sequence
  Synthetic
acacacacuggugccuguuggggg

SEQ ID NO: 592143 - RNA, 18 nt, Artificial Sequence
  Synthetic
aauccugaaaaaaugggg

SEQ ID NO: 592144 - RNA, 19 nt, Artificial Sequence
  Synthetic
aaauccugaaaaaaugggg

SEQ ID NO: 592145 - RNA, 20 nt, Artificial Sequence
  Synthetic
aaaauccugaaaaaaugggg

SEQ ID NO: 592146 - RNA, 21 nt, Artificial Sequence
  Synthetic
caaaauccugaaaaaaugggg

SEQ ID NO: 592147 - RNA, 22 nt, Artificial Sequence
  Synthetic
acaaaauccugaaaaaaugggg

SEQ ID NO: 592148 - RNA, 23 nt, Artificial Sequence
  Synthetic
uacaaaauccugaaaaaaugggg

SEQ ID NO: 592149 - RNA, 24 nt, Artificial Sequence
  Synthetic
auacaaaauccugaaaaaaugggg

SEQ ID NO: 592150 - RNA, 18 nt, Artificial Sequence
  Synthetic
aucugcaagccaaugggg

SEQ ID NO: 592151 - RNA, 19 nt, Artificial Sequence
  Synthetic
uaucugcaagccaaugggg

SEQ ID NO: 592152 - RNA, 20 nt, Artificial Sequence
  Synthetic
cuaucugcaagccaaugggg

SEQ ID NO: 592153 - RNA, 21 nt, Artificial Sequence
  Synthetic
gcuaucugcaagccaaugggg

SEQ ID NO: 592154 - RNA, 22 nt, Artificial Sequence
  Synthetic
ggcuaucugcaagccaaugggg

SEQ ID NO: 592155 - RNA, 23 nt, Artificial Sequence
  Synthetic
cggcuaucugcaagccaaugggg

SEQ ID NO: 592156 - RNA, 24 nt, Artificial Sequence
  Synthetic
gcggcuaucugcaagccaaugggg

SEQ ID NO: 592157 - RNA, 18 nt, Artificial Sequence
  Synthetic
gguaacugaaucaugggg

SEQ ID NO: 592158 - RNA, 19 nt, Artificial Sequence
  Synthetic
agguaacugaaucaugggg

SEQ ID NO: 592159 - RNA, 20 nt, Artificial Sequence
  Synthetic
gagguaacugaaucaugggg

SEQ ID NO: 592160 - RNA, 21 nt, Artificial Sequence
  Synthetic
ggagguaacugaaucaugggg

SEQ ID NO: 592161 - RNA, 22 nt, Artificial Sequence
  Synthetic
gggagguaacugaaucaugggg

SEQ ID NO: 592162 - RNA, 23 nt, Artificial Sequence
  Synthetic
ugggagguaacugaaucaugggg

SEQ ID NO: 592163 - RNA, 24 nt, Artificial Sequence
  Synthetic
gugggagguaacugaaucaugggg

SEQ ID NO: 592164 - RNA, 18 nt, Artificial Sequence
  Synthetic
cacagaaagaagaugggg

SEQ ID NO: 592165 - RNA, 19 nt, Artificial Sequence
  Synthetic
acacagaaagaagaugggg

SEQ ID NO: 592166 - RNA, 20 nt, Artificial Sequence
  Synthetic
uacacagaaagaagaugggg

SEQ ID NO: 592167 - RNA, 21 nt, Artificial Sequence
  Synthetic
cuacacagaaagaagaugggg

SEQ ID NO: 592168 - RNA, 22 nt, Artificial Sequence
  Synthetic
ccuacacagaaagaagaugggg

SEQ ID NO: 592169 - RNA, 23 nt, Artificial Sequence
  Synthetic
gccuacacagaaagaagaugggg

SEQ ID NO: 592170 - RNA, 24 nt, Artificial Sequence
  Synthetic
ugccuacacagaaagaagaugggg

SEQ ID NO: 592171 - RNA, 18 nt, Artificial Sequence
  Synthetic
cuuuuauugaagaugggg

SEQ ID NO: 592172 - RNA, 19 nt, Artificial Sequence
  Synthetic
ucuuuuauugaagaugggg

SEQ ID NO: 592173 - RNA, 20 nt, Artificial Sequence
  Synthetic
uucuuuuauugaagaugggg

SEQ ID NO: 592174 - RNA, 21 nt, Artificial Sequence
  Synthetic
cuucuuuuauugaagaugggg

SEQ ID NO: 592175 - RNA, 22 nt, Artificial Sequence
  Synthetic
ucuucuuuuauugaagaugggg

SEQ ID NO: 592176 - RNA, 23 nt, Artificial Sequence
  Synthetic
uucuucuuuuauugaagaugggg

SEQ ID NO: 592177 - RNA, 24 nt, Artificial Sequence
  Synthetic
uuucuucuuuuauugaagaugggg

SEQ ID NO: 592178 - RNA, 18 nt, Artificial Sequence
  Synthetic
ggaagucucuagaugggg

SEQ ID NO: 592179 - RNA, 19 nt, Artificial Sequence
  Synthetic
gggaagucucuagaugggg

SEQ ID NO: 592180 - RNA, 20 nt, Artificial Sequence
  Synthetic
ggggaagucucuagaugggg

SEQ ID NO: 592181 - RNA, 21 nt, Artificial Sequence
  Synthetic
uggggaagucucuagaugggg

SEQ ID NO: 592182 - RNA, 22 nt, Artificial Sequence
  Synthetic
uuggggaagucucuagaugggg

SEQ ID NO: 592183 - RNA, 23 nt, Artificial Sequence
  Synthetic
uuuggggaagucucuagaugggg

SEQ ID NO: 592184 - RNA, 24 nt, Artificial Sequence
  Synthetic
cuuuggggaagucucuagaugggg

SEQ ID NO: 592185 - RNA, 18 nt, Artificial Sequence
  Synthetic
guauguguguagaugggg

SEQ ID NO: 592186 - RNA, 19 nt, Artificial Sequence
  Synthetic
aguauguguguagaugggg

SEQ ID NO: 592187 - RNA, 20 nt, Artificial Sequence
  Synthetic
aaguauguguguagaugggg

SEQ ID NO: 592188 - RNA, 21 nt, Artificial Sequence
  Synthetic
aaaguauguguguagaugggg

SEQ ID NO: 592189 - RNA, 22 nt, Artificial Sequence
  Synthetic
aaaaguauguguguagaugggg

SEQ ID NO: 592190 - RNA, 23 nt, Artificial Sequence
  Synthetic
uaaaaguauguguguagaugggg

SEQ ID NO: 592191 - RNA, 24 nt, Artificial Sequence
  Synthetic
auaaaaguauguguguagaugggg

SEQ ID NO: 592192 - RNA, 18 nt, Artificial Sequence
  Synthetic
cgagagggugggaugggg

SEQ ID NO: 592193 - RNA, 19 nt, Artificial Sequence
  Synthetic
gcgagagggugggaugggg

SEQ ID NO: 592194 - RNA, 20 nt, Artificial Sequence
  Synthetic
ggcgagagggugggaugggg

SEQ ID NO: 592195 - RNA, 21 nt, Artificial Sequence
  Synthetic
gggcgagagggugggaugggg

SEQ ID NO: 592196 - RNA, 22 nt, Artificial Sequence
  Synthetic
agggcgagagggugggaugggg

SEQ ID NO: 592197 - RNA, 23 nt, Artificial Sequence
  Synthetic
aagggcgagagggugggaugggg

SEQ ID NO: 592198 - RNA, 24 nt, Artificial Sequence
  Synthetic
gaagggcgagagggugggaugggg

SEQ ID NO: 592199 - RNA, 18 nt, Artificial Sequence
  Synthetic
ugauuuaguuggaugggg

SEQ ID NO: 592200 - RNA, 19 nt, Artificial Sequence
  Synthetic
cugauuuaguuggaugggg

SEQ ID NO: 592201 - RNA, 20 nt, Artificial Sequence
  Synthetic
ucugauuuaguuggaugggg

SEQ ID NO: 592202 - RNA, 21 nt, Artificial Sequence
  Synthetic
uucugauuuaguuggaugggg

SEQ ID NO: 592203 - RNA, 22 nt, Artificial Sequence
  Synthetic
auucugauuuaguuggaugggg

SEQ ID NO: 592204 - RNA, 23 nt, Artificial Sequence
  Synthetic
gauucugauuuaguuggaugggg

SEQ ID NO: 592205 - RNA, 24 nt, Artificial Sequence
  Synthetic
agauucugauuuaguuggaugggg

SEQ ID NO: 592206 - RNA, 18 nt, Artificial Sequence
  Synthetic
gacuugcgcaauaugggg

SEQ ID NO: 592207 - RNA, 19 nt, Artificial Sequence
  Synthetic
agacuugcgcaauaugggg

SEQ ID NO: 592208 - RNA, 20 nt, Artificial Sequence
  Synthetic
uagacuugcgcaauaugggg

SEQ ID NO: 592209 - RNA, 21 nt, Artificial Sequence
  Synthetic
auagacuugcgcaauaugggg

SEQ ID NO: 592210 - RNA, 22 nt, Artificial Sequence
  Synthetic
uauagacuugcgcaauaugggg

SEQ ID NO: 592211 - RNA, 23 nt, Artificial Sequence
  Synthetic
cuauagacuugcgcaauaugggg

SEQ ID NO: 592212 - RNA, 24 nt, Artificial Sequence
  Synthetic
gcuauagacuugcgcaauaugggg

SEQ ID NO: 592213 - RNA, 18 nt, Artificial Sequence
  Synthetic
gauuaacuugauaugggg

SEQ ID NO: 592214 - RNA, 19 nt, Artificial Sequence
  Synthetic
agauuaacuugauaugggg

SEQ ID NO: 592215 - RNA, 20 nt, Artificial Sequence
  Synthetic
uagauuaacuugauaugggg

SEQ ID NO: 592216 - RNA, 21 nt, Artificial Sequence
  Synthetic
auagauuaacuugauaugggg

SEQ ID NO: 592217 - RNA, 22 nt, Artificial Sequence
  Synthetic
cauagauuaacuugauaugggg

SEQ ID NO: 592218 - RNA, 23 nt, Artificial Sequence
  Synthetic
acauagauuaacuugauaugggg

SEQ ID NO: 592219 - RNA, 24 nt, Artificial Sequence
  Synthetic
aacauagauuaacuugauaugggg

SEQ ID NO: 592220 - RNA, 18 nt, Artificial Sequence
  Synthetic
uuuauaggcuauaugggg

SEQ ID NO: 592221 - RNA, 19 nt, Artificial Sequence
  Synthetic
auuuauaggcuauaugggg

SEQ ID NO: 592222 - RNA, 20 nt, Artificial Sequence
  Synthetic
gauuuauaggcuauaugggg

SEQ ID NO: 592223 - RNA, 21 nt, Artificial Sequence
  Synthetic
agauuuauaggcuauaugggg

SEQ ID NO: 592224 - RNA, 22 nt, Artificial Sequence
  Synthetic
gagauuuauaggcuauaugggg

SEQ ID NO: 592225 - RNA, 23 nt, Artificial Sequence
  Synthetic
agagauuuauaggcuauaugggg

SEQ ID NO: 592226 - RNA, 24 nt, Artificial Sequence
  Synthetic
cagagauuuauaggcuauaugggg

SEQ ID NO: 592227 - RNA, 18 nt, Artificial Sequence
  Synthetic
ggggacauuuguaugggg

SEQ ID NO: 592228 - RNA, 19 nt, Artificial Sequence
  Synthetic
uggggacauuuguaugggg

SEQ ID NO: 592229 - RNA, 20 nt, Artificial Sequence
  Synthetic
cuggggacauuuguaugggg

SEQ ID NO: 592230 - RNA, 21 nt, Artificial Sequence
  Synthetic
ucuggggacauuuguaugggg

SEQ ID NO: 592231 - RNA, 22 nt, Artificial Sequence
  Synthetic
aucuggggacauuuguaugggg

SEQ ID NO: 592232 - RNA, 23 nt, Artificial Sequence
  Synthetic
caucuggggacauuuguaugggg

SEQ ID NO: 592233 - RNA, 24 nt, Artificial Sequence
  Synthetic
ccaucuggggacauuuguaugggg

SEQ ID NO: 592234 - RNA, 18 nt, Artificial Sequence
  Synthetic
aaaaagcaaaaacugggg

SEQ ID NO: 592235 - RNA, 19 nt, Artificial Sequence
  Synthetic
caaaaagcaaaaacugggg

SEQ ID NO: 592236 - RNA, 20 nt, Artificial Sequence
  Synthetic
gcaaaaagcaaaaacugggg

SEQ ID NO: 592237 - RNA, 21 nt, Artificial Sequence
  Synthetic
agcaaaaagcaaaaacugggg

SEQ ID NO: 592238 - RNA, 22 nt, Artificial Sequence
  Synthetic
aagcaaaaagcaaaaacugggg

SEQ ID NO: 592239 - RNA, 23 nt, Artificial Sequence
  Synthetic
aaagcaaaaagcaaaaacugggg

SEQ ID NO: 592240 - RNA, 24 nt, Artificial Sequence
  Synthetic
aaaagcaaaaagcaaaaacugggg

SEQ ID NO: 592241 - RNA, 18 nt, Artificial Sequence
  Synthetic
uuacauaaacaacugggg

SEQ ID NO: 592242 - RNA, 19 nt, Artificial Sequence
  Synthetic
guuacauaaacaacugggg

SEQ ID NO: 592243 - RNA, 20 nt, Artificial Sequence
  Synthetic
uguuacauaaacaacugggg

SEQ ID NO: 592244 - RNA, 21 nt, Artificial Sequence
  Synthetic
guguuacauaaacaacugggg

SEQ ID NO: 592245 - RNA, 22 nt, Artificial Sequence
  Synthetic
uguguuacauaaacaacugggg

SEQ ID NO: 592246 - RNA, 23 nt, Artificial Sequence
  Synthetic
auguguuacauaaacaacugggg

SEQ ID NO: 592247 - RNA, 24 nt, Artificial Sequence
  Synthetic
aauguguuacauaaacaacugggg

SEQ ID NO: 592248 - RNA, 18 nt, Artificial Sequence
  Synthetic
gggaagaaggaacugggg

SEQ ID NO: 592249 - RNA, 19 nt, Artificial Sequence
  Synthetic
ggggaagaaggaacugggg

SEQ ID NO: 592250 - RNA, 20 nt, Artificial Sequence
  Synthetic
aggggaagaaggaacugggg

SEQ ID NO: 592251 - RNA, 21 nt, Artificial Sequence
  Synthetic
uaggggaagaaggaacugggg

SEQ ID NO: 592252 - RNA, 22 nt, Artificial Sequence
  Synthetic
uuaggggaagaaggaacugggg

SEQ ID NO: 592253 - RNA, 23 nt, Artificial Sequence
  Synthetic
guuaggggaagaaggaacugggg

SEQ ID NO: 592254 - RNA, 24 nt, Artificial Sequence
  Synthetic
gguuaggggaagaaggaacugggg

SEQ ID NO: 592255 - RNA, 18 nt, Artificial Sequence
  Synthetic
uacuauguuucacugggg

SEQ ID NO: 592256 - RNA, 19 nt, Artificial Sequence
  Synthetic
uuacuauguuucacugggg

SEQ ID NO: 592257 - RNA, 20 nt, Artificial Sequence
  Synthetic
cuuacuauguuucacugggg

SEQ ID NO: 592258 - RNA, 21 nt, Artificial Sequence
  Synthetic
gcuuacuauguuucacugggg

SEQ ID NO: 592259 - RNA, 22 nt, Artificial Sequence
  Synthetic
ugcuuacuauguuucacugggg

SEQ ID NO: 592260 - RNA, 23 nt, Artificial Sequence
  Synthetic
gugcuuacuauguuucacugggg

SEQ ID NO: 592261 - RNA, 24 nt, Artificial Sequence
  Synthetic
agugcuuacuauguuucacugggg

SEQ ID NO: 592262 - RNA, 18 nt, Artificial Sequence
  Synthetic
uguuggagaugacugggg

SEQ ID NO: 592263 - RNA, 19 nt, Artificial Sequence
  Synthetic
auguuggagaugacugggg

SEQ ID NO: 592264 - RNA, 20 nt, Artificial Sequence
  Synthetic
cauguuggagaugacugggg

SEQ ID NO: 592265 - RNA, 21 nt, Artificial Sequence
  Synthetic
ucauguuggagaugacugggg

SEQ ID NO: 592266 - RNA, 22 nt, Artificial Sequence
  Synthetic
cucauguuggagaugacugggg

SEQ ID NO: 592267 - RNA, 23 nt, Artificial Sequence
  Synthetic
ucucauguuggagaugacugggg

SEQ ID NO: 592268 - RNA, 24 nt, Artificial Sequence
  Synthetic
gucucauguuggagaugacugggg

SEQ ID NO: 592269 - RNA, 18 nt, Artificial Sequence
  Synthetic
augcugauguuacugggg

SEQ ID NO: 592270 - RNA, 19 nt, Artificial Sequence
  Synthetic
gaugcugauguuacugggg

SEQ ID NO: 592271 - RNA, 20 nt, Artificial Sequence
  Synthetic
ugaugcugauguuacugggg

SEQ ID NO: 592272 - RNA, 21 nt, Artificial Sequence
  Synthetic
cugaugcugauguuacugggg

SEQ ID NO: 592273 - RNA, 22 nt, Artificial Sequence
  Synthetic
ucugaugcugauguuacugggg

SEQ ID NO: 592274 - RNA, 23 nt, Artificial Sequence
  Synthetic
gucugaugcugauguuacugggg

SEQ ID NO: 592275 - RNA, 24 nt, Artificial Sequence
  Synthetic
ggucugaugcugauguuacugggg

SEQ ID NO: 592276 - RNA, 18 nt, Artificial Sequence
  Synthetic
ucaggugaaaaccugggg

SEQ ID NO: 592277 - RNA, 19 nt, Artificial Sequence
  Synthetic
gucaggugaaaaccugggg

SEQ ID NO: 592278 - RNA, 20 nt, Artificial Sequence
  Synthetic
ggucaggugaaaaccugggg

SEQ ID NO: 592279 - RNA, 21 nt, Artificial Sequence
  Synthetic
aggucaggugaaaaccugggg

SEQ ID NO: 592280 - RNA, 22 nt, Artificial Sequence
  Synthetic
caggucaggugaaaaccugggg

SEQ ID NO: 592281 - RNA, 23 nt, Artificial Sequence
  Synthetic
acaggucaggugaaaaccugggg

SEQ ID NO: 592282 - RNA, 24 nt, Artificial Sequence
  Synthetic
gacaggucaggugaaaaccugggg

SEQ ID NO: 592283 - RNA, 18 nt, Artificial Sequence
  Synthetic
agugcaaaggcccugggg

SEQ ID NO: 592284 - RNA, 19 nt, Artificial Sequence
  Synthetic
aagugcaaaggcccugggg

SEQ ID NO: 592285 - RNA, 20 nt, Artificial Sequence
  Synthetic
caagugcaaaggcccugggg

SEQ ID NO: 592286 - RNA, 21 nt, Artificial Sequence
  Synthetic
gcaagugcaaaggcccugggg

SEQ ID NO: 592287 - RNA, 22 nt, Artificial Sequence
  Synthetic
agcaagugcaaaggcccugggg

SEQ ID NO: 592288 - RNA, 23 nt, Artificial Sequence
  Synthetic
cagcaagugcaaaggcccugggg

SEQ ID NO: 592289 - RNA, 24 nt, Artificial Sequence
  Synthetic
acagcaagugcaaaggcccugggg

SEQ ID NO: 592290 - RNA, 18 nt, Artificial Sequence
  Synthetic
gguuauuagauccugggg

SEQ ID NO: 592291 - RNA, 19 nt, Artificial Sequence
  Synthetic
ugguuauuagauccugggg

SEQ ID NO: 592292 - RNA, 20 nt, Artificial Sequence
  Synthetic
gugguuauuagauccugggg

SEQ ID NO: 592293 - RNA, 21 nt, Artificial Sequence
  Synthetic
ggugguuauuagauccugggg

SEQ ID NO: 592294 - RNA, 22 nt, Artificial Sequence
  Synthetic
uggugguuauuagauccugggg

SEQ ID NO: 592295 - RNA, 23 nt, Artificial Sequence
  Synthetic
auggugguuauuagauccugggg

SEQ ID NO: 592296 - RNA, 24 nt, Artificial Sequence
  Synthetic
aauggugguuauuagauccugggg

SEQ ID NO: 592297 - RNA, 18 nt, Artificial Sequence
  Synthetic
agcauuuaguagcugggg

SEQ ID NO: 592298 - RNA, 19 nt, Artificial Sequence
  Synthetic
cagcauuuaguagcugggg

SEQ ID NO: 592299 - RNA, 20 nt, Artificial Sequence
  Synthetic
acagcauuuaguagcugggg

SEQ ID NO: 592300 - RNA, 21 nt, Artificial Sequence
  Synthetic
gacagcauuuaguagcugggg

SEQ ID NO: 592301 - RNA, 22 nt, Artificial Sequence
  Synthetic
ggacagcauuuaguagcugggg

SEQ ID NO: 592302 - RNA, 23 nt, Artificial Sequence
  Synthetic
uggacagcauuuaguagcugggg

SEQ ID NO: 592303 - RNA, 24 nt, Artificial Sequence
  Synthetic
guggacagcauuuaguagcugggg

SEQ ID NO: 592304 - RNA, 18 nt, Artificial Sequence
  Synthetic
aauagaugagggcugggg

SEQ ID NO: 592305 - RNA, 19 nt, Artificial Sequence
  Synthetic
aaauagaugagggcugggg

SEQ ID NO: 592306 - RNA, 20 nt, Artificial Sequence
  Synthetic
gaaauagaugagggcugggg

SEQ ID NO: 592307 - RNA, 21 nt, Artificial Sequence
  Synthetic
ugaaauagaugagggcugggg

SEQ ID NO: 592308 - RNA, 22 nt, Artificial Sequence
  Synthetic
gugaaauagaugagggcugggg

SEQ ID NO: 592309 - RNA, 23 nt, Artificial Sequence
  Synthetic
ugugaaauagaugagggcugggg

SEQ ID NO: 592310 - RNA, 24 nt, Artificial Sequence
  Synthetic
cugugaaauagaugagggcugggg

SEQ ID NO: 592311 - RNA, 18 nt, Artificial Sequence
  Synthetic
gguuuccaggggcugggg

SEQ ID NO: 592312 - RNA, 19 nt, Artificial Sequence
  Synthetic
ugguuuccaggggcugggg

SEQ ID NO: 592313 - RNA, 20 nt, Artificial Sequence
  Synthetic
gugguuuccaggggcugggg

SEQ ID NO: 592314 - RNA, 21 nt, Artificial Sequence
  Synthetic
agugguuuccaggggcugggg

SEQ ID NO: 592315 - RNA, 22 nt, Artificial Sequence
  Synthetic
cagugguuuccaggggcugggg

SEQ ID NO: 592316 - RNA, 23 nt, Artificial Sequence
  Synthetic
ucagugguuuccaggggcugggg

SEQ ID NO: 592317 - RNA, 24 nt, Artificial Sequence
  Synthetic
aucagugguuuccaggggcugggg

SEQ ID NO: 592318 - RNA, 18 nt, Artificial Sequence
  Synthetic
ggauuauagaugcugggg

SEQ ID NO: 592319 - RNA, 19 nt, Artificial Sequence
  Synthetic
gggauuauagaugcugggg

SEQ ID NO: 592320 - RNA, 20 nt, Artificial Sequence
  Synthetic
ugggauuauagaugcugggg

SEQ ID NO: 592321 - RNA, 21 nt, Artificial Sequence
  Synthetic
uugggauuauagaugcugggg

SEQ ID NO: 592322 - RNA, 22 nt, Artificial Sequence
  Synthetic
auugggauuauagaugcugggg

SEQ ID NO: 592323 - RNA, 23 nt, Artificial Sequence
  Synthetic
gauugggauuauagaugcugggg

SEQ ID NO: 592324 - RNA, 24 nt, Artificial Sequence
  Synthetic
ggauugggauuauagaugcugggg

SEQ ID NO: 592325 - RNA, 18 nt, Artificial Sequence
  Synthetic
gcaaaagcagugcugggg

SEQ ID NO: 592326 - RNA, 19 nt, Artificial Sequence
  Synthetic
agcaaaagcagugcugggg

SEQ ID NO: 592327 - RNA, 20 nt, Artificial Sequence
  Synthetic
cagcaaaagcagugcugggg

SEQ ID NO: 592328 - RNA, 21 nt, Artificial Sequence
  Synthetic
acagcaaaagcagugcugggg

SEQ ID NO: 592329 - RNA, 22 nt, Artificial Sequence
  Synthetic
cacagcaaaagcagugcugggg

SEQ ID NO: 592330 - RNA, 23 nt, Artificial Sequence
  Synthetic
ccacagcaaaagcagugcugggg

SEQ ID NO: 592331 - RNA, 24 nt, Artificial Sequence
  Synthetic
accacagcaaaagcagugcugggg

SEQ ID NO: 592332 - RNA, 18 nt, Artificial Sequence
  Synthetic
gacacagaaacucugggg

SEQ ID NO: 592333 - RNA, 19 nt, Artificial Sequence
  Synthetic
ugacacagaaacucugggg

SEQ ID NO: 592334 - RNA, 20 nt, Artificial Sequence
  Synthetic
cugacacagaaacucugggg

SEQ ID NO: 592335 - RNA, 21 nt, Artificial Sequence
  Synthetic
acugacacagaaacucugggg

SEQ ID NO: 592336 - RNA, 22 nt, Artificial Sequence
  Synthetic
aacugacacagaaacucugggg

SEQ ID NO: 592337 - RNA, 23 nt, Artificial Sequence
  Synthetic
caacugacacagaaacucugggg

SEQ ID NO: 592338 - RNA, 24 nt, Artificial Sequence
  Synthetic
ccaacugacacagaaacucugggg

SEQ ID NO: 592339 - RNA, 18 nt, Artificial Sequence
  Synthetic
aaaucagaaacucugggg

SEQ ID NO: 592340 - RNA, 19 nt, Artificial Sequence
  Synthetic
uaaaucagaaacucugggg

SEQ ID NO: 592341 - RNA, 20 nt, Artificial Sequence
  Synthetic
guaaaucagaaacucugggg

SEQ ID NO: 592342 - RNA, 21 nt, Artificial Sequence
  Synthetic
aguaaaucagaaacucugggg

SEQ ID NO: 592343 - RNA, 22 nt, Artificial Sequence
  Synthetic
uaguaaaucagaaacucugggg

SEQ ID NO: 592344 - RNA, 23 nt, Artificial Sequence
  Synthetic
cuaguaaaucagaaacucugggg

SEQ ID NO: 592345 - RNA, 24 nt, Artificial Sequence
  Synthetic
gcuaguaaaucagaaacucugggg

SEQ ID NO: 592346 - RNA, 18 nt, Artificial Sequence
  Synthetic
gaaucaggaacucugggg

SEQ ID NO: 592347 - RNA, 19 nt, Artificial Sequence
  Synthetic
ugaaucaggaacucugggg

SEQ ID NO: 592348 - RNA, 20 nt, Artificial Sequence
  Synthetic
uugaaucaggaacucugggg

SEQ ID NO: 592349 - RNA, 21 nt, Artificial Sequence
  Synthetic
uuugaaucaggaacucugggg

SEQ ID NO: 592350 - RNA, 22 nt, Artificial Sequence
  Synthetic
uuuugaaucaggaacucugggg

SEQ ID NO: 592351 - RNA, 23 nt, Artificial Sequence
  Synthetic
auuuugaaucaggaacucugggg

SEQ ID NO: 592352 - RNA, 24 nt, Artificial Sequence
  Synthetic
cauuuugaaucaggaacucugggg

SEQ ID NO: 592353 - RNA, 18 nt, Artificial Sequence
  Synthetic
gggucuguggcucugggg

SEQ ID NO: 592354 - RNA, 19 nt, Artificial Sequence
  Synthetic
cgggucuguggcucugggg

SEQ ID NO: 592355 - RNA, 20 nt, Artificial Sequence
  Synthetic
acgggucuguggcucugggg

SEQ ID NO: 592356 - RNA, 21 nt, Artificial Sequence
  Synthetic
uacgggucuguggcucugggg

SEQ ID NO: 592357 - RNA, 22 nt, Artificial Sequence
  Synthetic
guacgggucuguggcucugggg

SEQ ID NO: 592358 - RNA, 23 nt, Artificial Sequence
  Synthetic
gguacgggucuguggcucugggg

SEQ ID NO: 592359 - RNA, 24 nt, Artificial Sequence
  Synthetic
ugguacgggucuguggcucugggg

SEQ ID NO: 592360 - RNA, 18 nt, Artificial Sequence
  Synthetic
gaaucagcaucucugggg

SEQ ID NO: 592361 - RNA, 19 nt, Artificial Sequence
  Synthetic
ugaaucagcaucucugggg

SEQ ID NO: 592362 - RNA, 20 nt, Artificial Sequence
  Synthetic
cugaaucagcaucucugggg

SEQ ID NO: 592363 - RNA, 21 nt, Artificial Sequence
  Synthetic
acugaaucagcaucucugggg

SEQ ID NO: 592364 - RNA, 22 nt, Artificial Sequence
  Synthetic
uacugaaucagcaucucugggg

SEQ ID NO: 592365 - RNA, 23 nt, Artificial Sequence
  Synthetic
cuacugaaucagcaucucugggg

SEQ ID NO: 592366 - RNA, 24 nt, Artificial Sequence
  Synthetic
ccuacugaaucagcaucucugggg

SEQ ID NO: 592367 - RNA, 18 nt, Artificial Sequence
  Synthetic
gucaaauguucucugggg

SEQ ID NO: 592368 - RNA, 19 nt, Artificial Sequence
  Synthetic
ugucaaauguucucugggg

SEQ ID NO: 592369 - RNA, 20 nt, Artificial Sequence
  Synthetic
cugucaaauguucucugggg

SEQ ID NO: 592370 - RNA, 21 nt, Artificial Sequence
  Synthetic
acugucaaauguucucugggg

SEQ ID NO: 592371 - RNA, 22 nt, Artificial Sequence
  Synthetic
uacugucaaauguucucugggg

SEQ ID NO: 592372 - RNA, 23 nt, Artificial Sequence
  Synthetic
auacugucaaauguucucugggg

SEQ ID NO: 592373 - RNA, 24 nt, Artificial Sequence
  Synthetic
gauacugucaaauguucucugggg

SEQ ID NO: 592374 - RNA, 18 nt, Artificial Sequence
  Synthetic
gauucuguaugucugggg

SEQ ID NO: 592375 - RNA, 19 nt, Artificial Sequence
  Synthetic
ugauucuguaugucugggg

SEQ ID NO: 592376 - RNA, 20 nt, Artificial Sequence
  Synthetic
augauucuguaugucugggg

SEQ ID NO: 592377 - RNA, 21 nt, Artificial Sequence
  Synthetic
caugauucuguaugucugggg

SEQ ID NO: 592378 - RNA, 22 nt, Artificial Sequence
  Synthetic
ucaugauucuguaugucugggg

SEQ ID NO: 592379 - RNA, 23 nt, Artificial Sequence
  Synthetic
aucaugauucuguaugucugggg

SEQ ID NO: 592380 - RNA, 24 nt, Artificial Sequence
  Synthetic
gaucaugauucuguaugucugggg

SEQ ID NO: 592381 - RNA, 18 nt, Artificial Sequence
  Synthetic
augucauggauucugggg

SEQ ID NO: 592382 - RNA, 19 nt, Artificial Sequence
  Synthetic
gaugucauggauucugggg

SEQ ID NO: 592383 - RNA, 20 nt, Artificial Sequence
  Synthetic
ugaugucauggauucugggg

SEQ ID NO: 592384 - RNA, 21 nt, Artificial Sequence
  Synthetic
uugaugucauggauucugggg

SEQ ID NO: 592385 - RNA, 22 nt, Artificial Sequence
  Synthetic
cuugaugucauggauucugggg

SEQ ID NO: 592386 - RNA, 23 nt, Artificial Sequence
  Synthetic
gcuugaugucauggauucugggg

SEQ ID NO: 592387 - RNA, 24 nt, Artificial Sequence
  Synthetic
agcuugaugucauggauucugggg

SEQ ID NO: 592388 - RNA, 18 nt, Artificial Sequence
  Synthetic
ugaauaagggaagugggg

SEQ ID NO: 592389 - RNA, 19 nt, Artificial Sequence
  Synthetic
augaauaagggaagugggg

SEQ ID NO: 592390 - RNA, 20 nt, Artificial Sequence
  Synthetic
uaugaauaagggaagugggg

SEQ ID NO: 592391 - RNA, 21 nt, Artificial Sequence
  Synthetic
cuaugaauaagggaagugggg

SEQ ID NO: 592392 - RNA, 22 nt, Artificial Sequence
  Synthetic
ucuaugaauaagggaagugggg

SEQ ID NO: 592393 - RNA, 23 nt, Artificial Sequence
  Synthetic
aucuaugaauaagggaagugggg

SEQ ID NO: 592394 - RNA, 24 nt, Artificial Sequence
  Synthetic
aaucuaugaauaagggaagugggg

SEQ ID NO: 592395 - RNA, 18 nt, Artificial Sequence
  Synthetic
aacuagaugccagugggg

SEQ ID NO: 592396 - RNA, 19 nt, Artificial Sequence
  Synthetic
uaacuagaugccagugggg

SEQ ID NO: 592397 - RNA, 20 nt, Artificial Sequence
  Synthetic
cuaacuagaugccagugggg

SEQ ID NO: 592398 - RNA, 21 nt, Artificial Sequence
  Synthetic
ucuaacuagaugccagugggg

SEQ ID NO: 592399 - RNA, 22 nt, Artificial Sequence
  Synthetic
cucuaacuagaugccagugggg

SEQ ID NO: 592400 - RNA, 23 nt, Artificial Sequence
  Synthetic
gcucuaacuagaugccagugggg

SEQ ID NO: 592401 - RNA, 24 nt, Artificial Sequence
  Synthetic
ggcucuaacuagaugccagugggg

SEQ ID NO: 592402 - RNA, 18 nt, Artificial Sequence
  Synthetic
aggacuacuagagugggg

SEQ ID NO: 592403 - RNA, 19 nt, Artificial Sequence
  Synthetic
gaggacuacuagagugggg

SEQ ID NO: 592404 - RNA, 20 nt, Artificial Sequence
  Synthetic
ggaggacuacuagagugggg

SEQ ID NO: 592405 - RNA, 21 nt, Artificial Sequence
  Synthetic
cggaggacuacuagagugggg

SEQ ID NO: 592406 - RNA, 22 nt, Artificial Sequence
  Synthetic
acggaggacuacuagagugggg

SEQ ID NO: 592407 - RNA, 23 nt, Artificial Sequence
  Synthetic
aacggaggacuacuagagugggg

SEQ ID NO: 592408 - RNA, 24 nt, Artificial Sequence
  Synthetic
aaacggaggacuacuagagugggg

SEQ ID NO: 592409 - RNA, 18 nt, Artificial Sequence
  Synthetic
cuggggccugucgugggg

SEQ ID NO: 592410 - RNA, 19 nt, Artificial Sequence
  Synthetic
acuggggccugucgugggg

SEQ ID NO: 592411 - RNA, 20 nt, Artificial Sequence
  Synthetic
cacuggggccugucgugggg

SEQ ID NO: 592412 - RNA, 21 nt, Artificial Sequence
  Synthetic
acacuggggccugucgugggg

SEQ ID NO: 592413 - RNA, 22 nt, Artificial Sequence
  Synthetic
cacacuggggccugucgugggg

SEQ ID NO: 592414 - RNA, 23 nt, Artificial Sequence
  Synthetic
acacacuggggccugucgugggg

SEQ ID NO: 592415 - RNA, 24 nt, Artificial Sequence
  Synthetic
cacacacuggggccugucgugggg

SEQ ID NO: 592416 - RNA, 18 nt, Artificial Sequence
  Synthetic
aauuucuggcaggugggg

SEQ ID NO: 592417 - RNA, 19 nt, Artificial Sequence
  Synthetic
caauuucuggcaggugggg

SEQ ID NO: 592418 - RNA, 20 nt, Artificial Sequence
  Synthetic
gcaauuucuggcaggugggg

SEQ ID NO: 592419 - RNA, 21 nt, Artificial Sequence
  Synthetic
ggcaauuucuggcaggugggg

SEQ ID NO: 592420 - RNA, 22 nt, Artificial Sequence
  Synthetic
gggcaauuucuggcaggugggg

SEQ ID NO: 592421 - RNA, 23 nt, Artificial Sequence
  Synthetic
ggggcaauuucuggcaggugggg

SEQ ID NO: 592422 - RNA, 24 nt, Artificial Sequence
  Synthetic
uggggcaauuucuggcaggugggg

SEQ ID NO: 592423 - RNA, 18 nt, Artificial Sequence
  Synthetic
gcacaggauggggugggg

SEQ ID NO: 592424 - RNA, 19 nt, Artificial Sequence
  Synthetic
ggcacaggauggggugggg

SEQ ID NO: 592425 - RNA, 20 nt, Artificial Sequence
  Synthetic
aggcacaggauggggugggg

SEQ ID NO: 592426 - RNA, 21 nt, Artificial Sequence
  Synthetic
uaggcacaggauggggugggg

SEQ ID NO: 592427 - RNA, 22 nt, Artificial Sequence
  Synthetic
auaggcacaggauggggugggg

SEQ ID NO: 592428 - RNA, 23 nt, Artificial Sequence
  Synthetic
uauaggcacaggauggggugggg

SEQ ID NO: 592429 - RNA, 24 nt, Artificial Sequence
  Synthetic
uuauaggcacaggauggggugggg

SEQ ID NO: 592430 - RNA, 18 nt, Artificial Sequence
  Synthetic
ccaggggcuggggugggg

SEQ ID NO: 592431 - RNA, 19 nt, Artificial Sequence
  Synthetic
uccaggggcuggggugggg

SEQ ID NO: 592432 - RNA, 20 nt, Artificial Sequence
  Synthetic
uuccaggggcuggggugggg

SEQ ID NO: 592433 - RNA, 21 nt, Artificial Sequence
  Synthetic
uuuccaggggcuggggugggg

SEQ ID NO: 592434 - RNA, 22 nt, Artificial Sequence
  Synthetic
guuuccaggggcuggggugggg

SEQ ID NO: 592435 - RNA, 23 nt, Artificial Sequence
  Synthetic
gguuuccaggggcuggggugggg

SEQ ID NO: 592436 - RNA, 24 nt, Artificial Sequence
  Synthetic
ugguuuccaggggcuggggugggg

SEQ ID NO: 592437 - RNA, 18 nt, Artificial Sequence
  Synthetic
cuuuguuguugggugggg

SEQ ID NO: 592438 - RNA, 19 nt, Artificial Sequence
  Synthetic
ccuuuguuguugggugggg

SEQ ID NO: 592439 - RNA, 20 nt, Artificial Sequence
  Synthetic
uccuuuguuguugggugggg

SEQ ID NO: 592440 - RNA, 21 nt, Artificial Sequence
  Synthetic
auccuuuguuguugggugggg

SEQ ID NO: 592441 - RNA, 22 nt, Artificial Sequence
  Synthetic
cauccuuuguuguugggugggg

SEQ ID NO: 592442 - RNA, 23 nt, Artificial Sequence
  Synthetic
ucauccuuuguuguugggugggg

SEQ ID NO: 592443 - RNA, 24 nt, Artificial Sequence
  Synthetic
uucauccuuuguuguugggugggg

SEQ ID NO: 592444 - RNA, 18 nt, Artificial Sequence
  Synthetic
gauuggggguuggugggg

SEQ ID NO: 592445 - RNA, 19 nt, Artificial Sequence
  Synthetic
agauuggggguuggugggg

SEQ ID NO: 592446 - RNA, 20 nt, Artificial Sequence
  Synthetic
aagauuggggguuggugggg

SEQ ID NO: 592447 - RNA, 21 nt, Artificial Sequence
  Synthetic
caagauuggggguuggugggg

SEQ ID NO: 592448 - RNA, 22 nt, Artificial Sequence
  Synthetic
ucaagauuggggguuggugggg

SEQ ID NO: 592449 - RNA, 23 nt, Artificial Sequence
  Synthetic
uucaagauuggggguuggugggg

SEQ ID NO: 592450 - RNA, 24 nt, Artificial Sequence
  Synthetic
uuucaagauuggggguuggugggg

SEQ ID NO: 592451 - RNA, 18 nt, Artificial Sequence
  Synthetic
cagaagagaaaugugggg

SEQ ID NO: 592452 - RNA, 19 nt, Artificial Sequence
  Synthetic
gcagaagagaaaugugggg

SEQ ID NO: 592453 - RNA, 20 nt, Artificial Sequence
  Synthetic
ugcagaagagaaaugugggg

SEQ ID NO: 592454 - RNA, 21 nt, Artificial Sequence
  Synthetic
gugcagaagagaaaugugggg

SEQ ID NO: 592455 - RNA, 22 nt, Artificial Sequence
  Synthetic
agugcagaagagaaaugugggg

SEQ ID NO: 592456 - RNA, 23 nt, Artificial Sequence
  Synthetic
cagugcagaagagaaaugugggg

SEQ ID NO: 592457 - RNA, 24 nt, Artificial Sequence
  Synthetic
ucagugcagaagagaaaugugggg

SEQ ID NO: 592458 - RNA, 18 nt, Artificial Sequence
  Synthetic
uggaagggaaaugugggg

SEQ ID NO: 592459 - RNA, 19 nt, Artificial Sequence
  Synthetic
guggaagggaaaugugggg

SEQ ID NO: 592460 - RNA, 20 nt, Artificial Sequence
  Synthetic
uguggaagggaaaugugggg

SEQ ID NO: 592461 - RNA, 21 nt, Artificial Sequence
  Synthetic
guguggaagggaaaugugggg

SEQ ID NO: 592462 - RNA, 22 nt, Artificial Sequence
  Synthetic
aguguggaagggaaaugugggg

SEQ ID NO: 592463 - RNA, 23 nt, Artificial Sequence
  Synthetic
caguguggaagggaaaugugggg

SEQ ID NO: 592464 - RNA, 24 nt, Artificial Sequence
  Synthetic
acaguguggaagggaaaugugggg

SEQ ID NO: 592465 - RNA, 18 nt, Artificial Sequence
  Synthetic
cuggggacugcugugggg

SEQ ID NO: 592466 - RNA, 19 nt, Artificial Sequence
  Synthetic
ucuggggacugcugugggg

SEQ ID NO: 592467 - RNA, 20 nt, Artificial Sequence
  Synthetic
cucuggggacugcugugggg

SEQ ID NO: 592468 - RNA, 21 nt, Artificial Sequence
  Synthetic
acucuggggacugcugugggg

SEQ ID NO: 592469 - RNA, 22 nt, Artificial Sequence
  Synthetic
cacucuggggacugcugugggg

SEQ ID NO: 592470 - RNA, 23 nt, Artificial Sequence
  Synthetic
acacucuggggacugcugugggg

SEQ ID NO: 592471 - RNA, 24 nt, Artificial Sequence
  Synthetic
cacacucuggggacugcugugggg

SEQ ID NO: 592472 - RNA, 18 nt, Artificial Sequence
  Synthetic
cuggggccugcugugggg

SEQ ID NO: 592473 - RNA, 19 nt, Artificial Sequence
  Synthetic
acuggggccugcugugggg

SEQ ID NO: 592474 - RNA, 20 nt, Artificial Sequence
  Synthetic
cacuggggccugcugugggg

SEQ ID NO: 592475 - RNA, 21 nt, Artificial Sequence
  Synthetic
acacuggggccugcugugggg

SEQ ID NO: 592476 - RNA, 22 nt, Artificial Sequence
  Synthetic
cacacuggggccugcugugggg

SEQ ID NO: 592477 - RNA, 23 nt, Artificial Sequence
  Synthetic
acacacuggggccugcugugggg

SEQ ID NO: 592478 - RNA, 24 nt, Artificial Sequence
  Synthetic
cacacacuggggccugcugugggg

SEQ ID NO: 592479 - RNA, 18 nt, Artificial Sequence
  Synthetic
aggaagcauagugugggg

SEQ ID NO: 592480 - RNA, 19 nt, Artificial Sequence
  Synthetic
gaggaagcauagugugggg

SEQ ID NO: 592481 - RNA, 20 nt, Artificial Sequence
  Synthetic
agaggaagcauagugugggg

SEQ ID NO: 592482 - RNA, 21 nt, Artificial Sequence
  Synthetic
aagaggaagcauagugugggg

SEQ ID NO: 592483 - RNA, 22 nt, Artificial Sequence
  Synthetic
aaagaggaagcauagugugggg

SEQ ID NO: 592484 - RNA, 23 nt, Artificial Sequence
  Synthetic
uaaagaggaagcauagugugggg

SEQ ID NO: 592485 - RNA, 24 nt, Artificial Sequence
  Synthetic
auaaagaggaagcauagugugggg

SEQ ID NO: 592486 - RNA, 18 nt, Artificial Sequence
  Synthetic
aauuagccaggugugggg

SEQ ID NO: 592487 - RNA, 19 nt, Artificial Sequence
  Synthetic
aaauuagccaggugugggg

SEQ ID NO: 592488 - RNA, 20 nt, Artificial Sequence
  Synthetic
aaaauuagccaggugugggg

SEQ ID NO: 592489 - RNA, 21 nt, Artificial Sequence
  Synthetic
aaaaauuagccaggugugggg

SEQ ID NO: 592490 - RNA, 22 nt, Artificial Sequence
  Synthetic
caaaaauuagccaggugugggg

SEQ ID NO: 592491 - RNA, 23 nt, Artificial Sequence
  Synthetic
acaaaaauuagccaggugugggg

SEQ ID NO: 592492 - RNA, 24 nt, Artificial Sequence
  Synthetic
uacaaaaauuagccaggugugggg

SEQ ID NO: 592493 - RNA, 18 nt, Artificial Sequence
  Synthetic
cugggaacuguugugggg

SEQ ID NO: 592494 - RNA, 19 nt, Artificial Sequence
  Synthetic
ccugggaacuguugugggg

SEQ ID NO: 592495 - RNA, 20 nt, Artificial Sequence
  Synthetic
cccugggaacuguugugggg

SEQ ID NO: 592496 - RNA, 21 nt, Artificial Sequence
  Synthetic
acccugggaacuguugugggg

SEQ ID NO: 592497 - RNA, 22 nt, Artificial Sequence
  Synthetic
cacccugggaacuguugugggg

SEQ ID NO: 592498 - RNA, 23 nt, Artificial Sequence
  Synthetic
acacccugggaacuguugugggg

SEQ ID NO: 592499 - RNA, 24 nt, Artificial Sequence
  Synthetic
cacacccugggaacuguugugggg

SEQ ID NO: 592500 - RNA, 21 nt, Artificial Sequence
  Synthetic
acucuggggacuguugugggg

SEQ ID NO: 592501 - RNA, 22 nt, Artificial Sequence
  Synthetic
cacucuggggacuguugugggg

SEQ ID NO: 592502 - RNA, 23 nt, Artificial Sequence
  Synthetic
acacucuggggacuguugugggg

SEQ ID NO: 592503 - RNA, 24 nt, Artificial Sequence
  Synthetic
cacacucuggggacuguugugggg

SEQ ID NO: 592504 - RNA, 21 nt, Artificial Sequence
  Synthetic
acaccggggccuguugugggg

SEQ ID NO: 592505 - RNA, 22 nt, Artificial Sequence
  Synthetic
cacaccggggccuguugugggg

SEQ ID NO: 592506 - RNA, 23 nt, Artificial Sequence
  Synthetic
acacaccggggccuguugugggg

SEQ ID NO: 592507 - RNA, 24 nt, Artificial Sequence
  Synthetic
cacacaccggggccuguugugggg

SEQ ID NO: 592508 - RNA, 18 nt, Artificial Sequence
  Synthetic
gaaaaaaaaaaauugggg

SEQ ID NO: 592509 - RNA, 19 nt, Artificial Sequence
  Synthetic
agaaaaaaaaaaauugggg

SEQ ID NO: 592510 - RNA, 20 nt, Artificial Sequence
  Synthetic
aagaaaaaaaaaaauugggg

SEQ ID NO: 592511 - RNA, 21 nt, Artificial Sequence
  Synthetic
aaagaaaaaaaaaaauugggg

SEQ ID NO: 592512 - RNA, 22 nt, Artificial Sequence
  Synthetic
aaaagaaaaaaaaaaauugggg

SEQ ID NO: 592513 - RNA, 23 nt, Artificial Sequence
  Synthetic
aaaaagaaaaaaaaaaauugggg

SEQ ID NO: 592514 - RNA, 24 nt, Artificial Sequence
  Synthetic
aaaaaagaaaaaaaaaaauugggg

SEQ ID NO: 592515 - RNA, 18 nt, Artificial Sequence
  Synthetic
aaaaagaaagaauugggg

SEQ ID NO: 592516 - RNA, 19 nt, Artificial Sequence
  Synthetic
aaaaaagaaagaauugggg

SEQ ID NO: 592517 - RNA, 20 nt, Artificial Sequence
  Synthetic
uaaaaaagaaagaauugggg

SEQ ID NO: 592518 - RNA, 21 nt, Artificial Sequence
  Synthetic
uuaaaaaagaaagaauugggg

SEQ ID NO: 592519 - RNA, 22 nt, Artificial Sequence
  Synthetic
uuuaaaaaagaaagaauugggg

SEQ ID NO: 592520 - RNA, 23 nt, Artificial Sequence
  Synthetic
auuuaaaaaagaaagaauugggg

SEQ ID NO: 592521 - RNA, 24 nt, Artificial Sequence
  Synthetic
aauuuaaaaaagaaagaauugggg

SEQ ID NO: 592522 - RNA, 18 nt, Artificial Sequence
  Synthetic
ggucauaaaacauugggg

SEQ ID NO: 592523 - RNA, 19 nt, Artificial Sequence
  Synthetic
gggucauaaaacauugggg

SEQ ID NO: 592524 - RNA, 20 nt, Artificial Sequence
  Synthetic
ggggucauaaaacauugggg

SEQ ID NO: 592525 - RNA, 21 nt, Artificial Sequence
  Synthetic
uggggucauaaaacauugggg

SEQ ID NO: 592526 - RNA, 22 nt, Artificial Sequence
  Synthetic
auggggucauaaaacauugggg

SEQ ID NO: 592527 - RNA, 23 nt, Artificial Sequence
  Synthetic
cauggggucauaaaacauugggg

SEQ ID NO: 592528 - RNA, 24 nt, Artificial Sequence
  Synthetic
acauggggucauaaaacauugggg

SEQ ID NO: 592529 - RNA, 18 nt, Artificial Sequence
  Synthetic
aagguucacugauugggg

SEQ ID NO: 592530 - RNA, 19 nt, Artificial Sequence
  Synthetic
gaagguucacugauugggg

SEQ ID NO: 592531 - RNA, 20 nt, Artificial Sequence
  Synthetic
cgaagguucacugauugggg

SEQ ID NO: 592532 - RNA, 21 nt, Artificial Sequence
  Synthetic
acgaagguucacugauugggg

SEQ ID NO: 592533 - RNA, 22 nt, Artificial Sequence
  Synthetic
gacgaagguucacugauugggg

SEQ ID NO: 592534 - RNA, 23 nt, Artificial Sequence
  Synthetic
agacgaagguucacugauugggg

SEQ ID NO: 592535 - RNA, 24 nt, Artificial Sequence
  Synthetic
aagacgaagguucacugauugggg

SEQ ID NO: 592536 - RNA, 18 nt, Artificial Sequence
  Synthetic
cuuuuacccugauugggg

SEQ ID NO: 592537 - RNA, 19 nt, Artificial Sequence
  Synthetic
ucuuuuacccugauugggg

SEQ ID NO: 592538 - RNA, 20 nt, Artificial Sequence
  Synthetic
uucuuuuacccugauugggg

SEQ ID NO: 592539 - RNA, 21 nt, Artificial Sequence
  Synthetic
auucuuuuacccugauugggg

SEQ ID NO: 592540 - RNA, 22 nt, Artificial Sequence
  Synthetic
cauucuuuuacccugauugggg

SEQ ID NO: 592541 - RNA, 23 nt, Artificial Sequence
  Synthetic
gcauucuuuuacccugauugggg

SEQ ID NO: 592542 - RNA, 24 nt, Artificial Sequence
  Synthetic
ugcauucuuuuacccugauugggg

SEQ ID NO: 592543 - RNA, 18 nt, Artificial Sequence
  Synthetic
aauaggugccuauugggg

SEQ ID NO: 592544 - RNA, 19 nt, Artificial Sequence
  Synthetic
gaauaggugccuauugggg

SEQ ID NO: 592545 - RNA, 20 nt, Artificial Sequence
  Synthetic
agaauaggugccuauugggg

SEQ ID NO: 592546 - RNA, 21 nt, Artificial Sequence
  Synthetic
aagaauaggugccuauugggg

SEQ ID NO: 592547 - RNA, 22 nt, Artificial Sequence
  Synthetic
gaagaauaggugccuauugggg

SEQ ID NO: 592548 - RNA, 23 nt, Artificial Sequence
  Synthetic
agaagaauaggugccuauugggg

SEQ ID NO: 592549 - RNA, 24 nt, Artificial Sequence
  Synthetic
cagaagaauaggugccuauugggg

SEQ ID NO: 592550 - RNA, 18 nt, Artificial Sequence
  Synthetic
ucacaaaaagacuugggg

SEQ ID NO: 592551 - RNA, 19 nt, Artificial Sequence
  Synthetic
uucacaaaaagacuugggg

SEQ ID NO: 592552 - RNA, 20 nt, Artificial Sequence
  Synthetic
uuucacaaaaagacuugggg

SEQ ID NO: 592553 - RNA, 21 nt, Artificial Sequence
  Synthetic
uuuucacaaaaagacuugggg

SEQ ID NO: 592554 - RNA, 22 nt, Artificial Sequence
  Synthetic
uuuuucacaaaaagacuugggg

SEQ ID NO: 592555 - RNA, 23 nt, Artificial Sequence
  Synthetic
auuuuucacaaaaagacuugggg

SEQ ID NO: 592556 - RNA, 24 nt, Artificial Sequence
  Synthetic
aauuuuucacaaaaagacuugggg

SEQ ID NO: 592557 - RNA, 18 nt, Artificial Sequence
  Synthetic
caccauauacccuugggg

SEQ ID NO: 592558 - RNA, 19 nt, Artificial Sequence
  Synthetic
ccaccauauacccuugggg

SEQ ID NO: 592559 - RNA, 20 nt, Artificial Sequence
  Synthetic
cccaccauauacccuugggg

SEQ ID NO: 592560 - RNA, 21 nt, Artificial Sequence
  Synthetic
ucccaccauauacccuugggg

SEQ ID NO: 592561 - RNA, 22 nt, Artificial Sequence
  Synthetic
gucccaccauauacccuugggg

SEQ ID NO: 592562 - RNA, 23 nt, Artificial Sequence
  Synthetic
ggucccaccauauacccuugggg

SEQ ID NO: 592563 - RNA, 24 nt, Artificial Sequence
  Synthetic
gggucccaccauauacccuugggg

SEQ ID NO: 592564 - RNA, 18 nt, Artificial Sequence
  Synthetic
gauuuaguaggcuugggg

SEQ ID NO: 592565 - RNA, 19 nt, Artificial Sequence
  Synthetic
ugauuuaguaggcuugggg

SEQ ID NO: 592566 - RNA, 20 nt, Artificial Sequence
  Synthetic
cugauuuaguaggcuugggg

SEQ ID NO: 592567 - RNA, 21 nt, Artificial Sequence
  Synthetic
ucugauuuaguaggcuugggg

SEQ ID NO: 592568 - RNA, 22 nt, Artificial Sequence
  Synthetic
cucugauuuaguaggcuugggg

SEQ ID NO: 592569 - RNA, 23 nt, Artificial Sequence
  Synthetic
acucugauuuaguaggcuugggg

SEQ ID NO: 592570 - RNA, 24 nt, Artificial Sequence
  Synthetic
aacucugauuuaguaggcuugggg

SEQ ID NO: 592571 - RNA, 18 nt, Artificial Sequence
  Synthetic
ucaaaaagaaaguugggg

SEQ ID NO: 592572 - RNA, 19 nt, Artificial Sequence
  Synthetic
gucaaaaagaaaguugggg

SEQ ID NO: 592573 - RNA, 20 nt, Artificial Sequence
  Synthetic
agucaaaaagaaaguugggg

SEQ ID NO: 592574 - RNA, 21 nt, Artificial Sequence
  Synthetic
gagucaaaaagaaaguugggg

SEQ ID NO: 592575 - RNA, 22 nt, Artificial Sequence
  Synthetic
ggagucaaaaagaaaguugggg

SEQ ID NO: 592576 - RNA, 23 nt, Artificial Sequence
  Synthetic
gggagucaaaaagaaaguugggg

SEQ ID NO: 592577 - RNA, 24 nt, Artificial Sequence
  Synthetic
ggggagucaaaaagaaaguugggg

SEQ ID NO: 592578 - RNA, 18 nt, Artificial Sequence
  Synthetic
auagucauagaguugggg

SEQ ID NO: 592579 - RNA, 19 nt, Artificial Sequence
  Synthetic
gauagucauagaguugggg

SEQ ID NO: 592580 - RNA, 20 nt, Artificial Sequence
  Synthetic
ugauagucauagaguugggg

SEQ ID NO: 592581 - RNA, 21 nt, Artificial Sequence
  Synthetic
augauagucauagaguugggg

SEQ ID NO: 592582 - RNA, 22 nt, Artificial Sequence
  Synthetic
aaugauagucauagaguugggg

SEQ ID NO: 592583 - RNA, 23 nt, Artificial Sequence
  Synthetic
gaaugauagucauagaguugggg

SEQ ID NO: 592584 - RNA, 24 nt, Artificial Sequence
  Synthetic
ggaaugauagucauagaguugggg

SEQ ID NO: 592585 - RNA, 18 nt, Artificial Sequence
  Synthetic
ugggugaugacguugggg

SEQ ID NO: 592586 - RNA, 19 nt, Artificial Sequence
  Synthetic
augggugaugacguugggg

SEQ ID NO: 592587 - RNA, 20 nt, Artificial Sequence
  Synthetic
caugggugaugacguugggg

SEQ ID NO: 592588 - RNA, 21 nt, Artificial Sequence
  Synthetic
acaugggugaugacguugggg

SEQ ID NO: 592589 - RNA, 22 nt, Artificial Sequence
  Synthetic
cacaugggugaugacguugggg

SEQ ID NO: 592590 - RNA, 23 nt, Artificial Sequence
  Synthetic
acacaugggugaugacguugggg

SEQ ID NO: 592591 - RNA, 24 nt, Artificial Sequence
  Synthetic
cacacaugggugaugacguugggg

SEQ ID NO: 592592 - RNA, 18 nt, Artificial Sequence
  Synthetic
ggcugggcuccguugggg

SEQ ID NO: 592593 - RNA, 19 nt, Artificial Sequence
  Synthetic
uggcugggcuccguugggg

SEQ ID NO: 592594 - RNA, 20 nt, Artificial Sequence
  Synthetic
cuggcugggcuccguugggg

SEQ ID NO: 592595 - RNA, 21 nt, Artificial Sequence
  Synthetic
gcuggcugggcuccguugggg

SEQ ID NO: 592596 - RNA, 22 nt, Artificial Sequence
  Synthetic
agcuggcugggcuccguugggg

SEQ ID NO: 592597 - RNA, 23 nt, Artificial Sequence
  Synthetic
uagcuggcugggcuccguugggg

SEQ ID NO: 592598 - RNA, 24 nt, Artificial Sequence
  Synthetic
uuagcuggcugggcuccguugggg

SEQ ID NO: 592599 - RNA, 18 nt, Artificial Sequence
  Synthetic
uaugcugggggguugggg

SEQ ID NO: 592600 - RNA, 19 nt, Artificial Sequence
  Synthetic
auaugcugggggguugggg

SEQ ID NO: 592601 - RNA, 20 nt, Artificial Sequence
  Synthetic
aauaugcugggggguugggg

SEQ ID NO: 592602 - RNA, 21 nt, Artificial Sequence
  Synthetic
aaauaugcugggggguugggg

SEQ ID NO: 592603 - RNA, 22 nt, Artificial Sequence
  Synthetic
caaauaugcugggggguugggg

SEQ ID NO: 592604 - RNA, 23 nt, Artificial Sequence
  Synthetic
ccaaauaugcugggggguugggg

SEQ ID NO: 592605 - RNA, 24 nt, Artificial Sequence
  Synthetic
gccaaauaugcugggggguugggg

SEQ ID NO: 592606 - RNA, 18 nt, Artificial Sequence
  Synthetic
aaagcuauuugguugggg

SEQ ID NO: 592607 - RNA, 19 nt, Artificial Sequence
  Synthetic
gaaagcuauuugguugggg

SEQ ID NO: 592608 - RNA, 20 nt, Artificial Sequence
  Synthetic
ugaaagcuauuugguugggg

SEQ ID NO: 592609 - RNA, 21 nt, Artificial Sequence
  Synthetic
uugaaagcuauuugguugggg

SEQ ID NO: 592610 - RNA, 22 nt, Artificial Sequence
  Synthetic
guugaaagcuauuugguugggg

SEQ ID NO: 592611 - RNA, 23 nt, Artificial Sequence
  Synthetic
gguugaaagcuauuugguugggg

SEQ ID NO: 592612 - RNA, 24 nt, Artificial Sequence
  Synthetic
ugguugaaagcuauuugguugggg

SEQ ID NO: 592613 - RNA, 18 nt, Artificial Sequence
  Synthetic
cacuggugccuguugggg

SEQ ID NO: 592614 - RNA, 19 nt, Artificial Sequence
  Synthetic
acacuggugccuguugggg

SEQ ID NO: 592615 - RNA, 20 nt, Artificial Sequence
  Synthetic
cacacuggugccuguugggg

SEQ ID NO: 592616 - RNA, 21 nt, Artificial Sequence
  Synthetic
acacacuggugccuguugggg

SEQ ID NO: 592617 - RNA, 22 nt, Artificial Sequence
  Synthetic
cacacacuggugccuguugggg

SEQ ID NO: 592618 - RNA, 23 nt, Artificial Sequence
  Synthetic
acacacacuggugccuguugggg

SEQ ID NO: 592619 - RNA, 24 nt, Artificial Sequence
  Synthetic
aacacacacuggugccuguugggg

SEQ ID NO: 592620 - RNA, 18 nt, Artificial Sequence
  Synthetic
auacauaggcuguugggg

SEQ ID NO: 592621 - RNA, 19 nt, Artificial Sequence
  Synthetic
cauacauaggcuguugggg

SEQ ID NO: 592622 - RNA, 20 nt, Artificial Sequence
  Synthetic
ucauacauaggcuguugggg

SEQ ID NO: 592623 - RNA, 21 nt, Artificial Sequence
  Synthetic
aucauacauaggcuguugggg

SEQ ID NO: 592624 - RNA, 22 nt, Artificial Sequence
  Synthetic
uaucauacauaggcuguugggg

SEQ ID NO: 592625 - RNA, 23 nt, Artificial Sequence
  Synthetic
auaucauacauaggcuguugggg

SEQ ID NO: 592626 - RNA, 24 nt, Artificial Sequence
  Synthetic
uauaucauacauaggcuguugggg

SEQ ID NO: 592627 - RNA, 18 nt, Artificial Sequence
  Synthetic
cuauuguugaauuugggg

SEQ ID NO: 592628 - RNA, 19 nt, Artificial Sequence
  Synthetic
ucuauuguugaauuugggg

SEQ ID NO: 592629 - RNA, 20 nt, Artificial Sequence
  Synthetic
gucuauuguugaauuugggg

SEQ ID NO: 592630 - RNA, 21 nt, Artificial Sequence
  Synthetic
ugucuauuguugaauuugggg

SEQ ID NO: 592631 - RNA, 22 nt, Artificial Sequence
  Synthetic
cugucuauuguugaauuugggg

SEQ ID NO: 592632 - RNA, 23 nt, Artificial Sequence
  Synthetic
ucugucuauuguugaauuugggg

SEQ ID NO: 592633 - RNA, 24 nt, Artificial Sequence
  Synthetic
uucugucuauuguugaauuugggg

SEQ ID NO: 592634 - RNA, 18 nt, Artificial Sequence
  Synthetic
aaaugacccgauuugggg

SEQ ID NO: 592635 - RNA, 19 nt, Artificial Sequence
  Synthetic
aaaaugacccgauuugggg

SEQ ID NO: 592636 - RNA, 20 nt, Artificial Sequence
  Synthetic
caaaaugacccgauuugggg

SEQ ID NO: 592637 - RNA, 21 nt, Artificial Sequence
  Synthetic
acaaaaugacccgauuugggg

SEQ ID NO: 592638 - RNA, 22 nt, Artificial Sequence
  Synthetic
uacaaaaugacccgauuugggg

SEQ ID NO: 592639 - RNA, 23 nt, Artificial Sequence
  Synthetic
guacaaaaugacccgauuugggg

SEQ ID NO: 592640 - RNA, 24 nt, Artificial Sequence
  Synthetic
cguacaaaaugacccgauuugggg

SEQ ID NO: 592641 - RNA, 18 nt, Artificial Sequence
  Synthetic
cuccauuuggauuugggg

SEQ ID NO: 592642 - RNA, 19 nt, Artificial Sequence
  Synthetic
ucuccauuuggauuugggg

SEQ ID NO: 592643 - RNA, 20 nt, Artificial Sequence
  Synthetic
aucuccauuuggauuugggg

SEQ ID NO: 592644 - RNA, 21 nt, Artificial Sequence
  Synthetic
aaucuccauuuggauuugggg

SEQ ID NO: 592645 - RNA, 22 nt, Artificial Sequence
  Synthetic
uaaucuccauuuggauuugggg

SEQ ID NO: 592646 - RNA, 23 nt, Artificial Sequence
  Synthetic
cuaaucuccauuuggauuugggg

SEQ ID NO: 592647 - RNA, 24 nt, Artificial Sequence
  Synthetic
ucuaaucuccauuuggauuugggg

SEQ ID NO: 592648 - RNA, 24 nt, Artificial Sequence
  Synthetic
aauguauauucuguugauuugggg

SEQ ID NO: 592649 - RNA, 18 nt, Artificial Sequence
  Synthetic
uuuaccauuuauuugggg

SEQ ID NO: 592650 - RNA, 19 nt, Artificial Sequence
  Synthetic
auuuaccauuuauuugggg

SEQ ID NO: 592651 - RNA, 20 nt, Artificial Sequence
  Synthetic
cauuuaccauuuauuugggg

SEQ ID NO: 592652 - RNA, 21 nt, Artificial Sequence
  Synthetic
acauuuaccauuuauuugggg

SEQ ID NO: 592653 - RNA, 22 nt, Artificial Sequence
  Synthetic
aacauuuaccauuuauuugggg

SEQ ID NO: 592654 - RNA, 23 nt, Artificial Sequence
  Synthetic
aaacauuuaccauuuauuugggg

SEQ ID NO: 592655 - RNA, 24 nt, Artificial Sequence
  Synthetic
caaacauuuaccauuuauuugggg

SEQ ID NO: 592656 - RNA, 18 nt, Artificial Sequence
  Synthetic
uaguuuaucacuuugggg

SEQ ID NO: 592657 - RNA, 19 nt, Artificial Sequence
  Synthetic
guaguuuaucacuuugggg

SEQ ID NO: 592658 - RNA, 20 nt, Artificial Sequence
  Synthetic
uguaguuuaucacuuugggg

SEQ ID NO: 592659 - RNA, 21 nt, Artificial Sequence
  Synthetic
auguaguuuaucacuuugggg

SEQ ID NO: 592660 - RNA, 22 nt, Artificial Sequence
  Synthetic
aauguaguuuaucacuuugggg

SEQ ID NO: 592661 - RNA, 23 nt, Artificial Sequence
  Synthetic
aaauguaguuuaucacuuugggg

SEQ ID NO: 592662 - RNA, 24 nt, Artificial Sequence
  Synthetic
uaaauguaguuuaucacuuugggg

SEQ ID NO: 592663 - RNA, 18 nt, Artificial Sequence
  Synthetic
auuuuuggggcuuugggg

SEQ ID NO: 592664 - RNA, 19 nt, Artificial Sequence
  Synthetic
gauuuuuggggcuuugggg

SEQ ID NO: 592665 - RNA, 20 nt, Artificial Sequence
  Synthetic
agauuuuuggggcuuugggg

SEQ ID NO: 592666 - RNA, 21 nt, Artificial Sequence
  Synthetic
aagauuuuuggggcuuugggg

SEQ ID NO: 592667 - RNA, 22 nt, Artificial Sequence
  Synthetic
uaagauuuuuggggcuuugggg

SEQ ID NO: 592668 - RNA, 23 nt, Artificial Sequence
  Synthetic
auaagauuuuuggggcuuugggg

SEQ ID NO: 592669 - RNA, 24 nt, Artificial Sequence
  Synthetic
aauaagauuuuuggggcuuugggg

SEQ ID NO: 592670 - RNA, 18 nt, Artificial Sequence
  Synthetic
aaacuugguucuuugggg

SEQ ID NO: 592671 - RNA, 19 nt, Artificial Sequence
  Synthetic
uaaacuugguucuuugggg

SEQ ID NO: 592672 - RNA, 20 nt, Artificial Sequence
  Synthetic
uuaaacuugguucuuugggg

SEQ ID NO: 592673 - RNA, 21 nt, Artificial Sequence
  Synthetic
uuuaaacuugguucuuugggg

SEQ ID NO: 592674 - RNA, 22 nt, Artificial Sequence
  Synthetic
uuuuaaacuugguucuuugggg

SEQ ID NO: 592675 - RNA, 23 nt, Artificial Sequence
  Synthetic
uuuuuaaacuugguucuuugggg

SEQ ID NO: 592676 - RNA, 24 nt, Artificial Sequence
  Synthetic
cuuuuuaaacuugguucuuugggg

SEQ ID NO: 592677 - RNA, 18 nt, Artificial Sequence
  Synthetic
uuguuugucaguuugggg

SEQ ID NO: 592678 - RNA, 19 nt, Artificial Sequence
  Synthetic
guuguuugucaguuugggg

SEQ ID NO: 592679 - RNA, 20 nt, Artificial Sequence
  Synthetic
uguuguuugucaguuugggg

SEQ ID NO: 592680 - RNA, 21 nt, Artificial Sequence
  Synthetic
guguuguuugucaguuugggg

SEQ ID NO: 592681 - RNA, 22 nt, Artificial Sequence
  Synthetic
aguguuguuugucaguuugggg

SEQ ID NO: 592682 - RNA, 23 nt, Artificial Sequence
  Synthetic
aaguguuguuugucaguuugggg

SEQ ID NO: 592683 - RNA, 24 nt, Artificial Sequence
  Synthetic
gaaguguuguuugucaguuugggg

SEQ ID NO: 592684 - RNA, 18 nt, Artificial Sequence
  Synthetic
cccuugcaaauuuugggg

SEQ ID NO: 592685 - RNA, 19 nt, Artificial Sequence
  Synthetic
ccccuugcaaauuuugggg

SEQ ID NO: 592686 - RNA, 20 nt, Artificial Sequence
  Synthetic
uccccuugcaaauuuugggg

SEQ ID NO: 592687 - RNA, 21 nt, Artificial Sequence
  Synthetic
uuccccuugcaaauuuugggg

SEQ ID NO: 592688 - RNA, 22 nt, Artificial Sequence
  Synthetic
uuuccccuugcaaauuuugggg

SEQ ID NO: 592689 - RNA, 23 nt, Artificial Sequence
  Synthetic
uuuuccccuugcaaauuuugggg

SEQ ID NO: 592690 - RNA, 24 nt, Artificial Sequence
  Synthetic
uuuuuccccuugcaaauuuugggg

SEQ ID NO: 592691 - RNA, 18 nt, Artificial Sequence
  Synthetic
uuugaaaggguuuugggg

SEQ ID NO: 592692 - RNA, 19 nt, Artificial Sequence
  Synthetic
uuuugaaaggguuuugggg

SEQ ID NO: 592693 - RNA, 20 nt, Artificial Sequence
  Synthetic
guuuugaaaggguuuugggg

SEQ ID NO: 592694 - RNA, 21 nt, Artificial Sequence
  Synthetic
cguuuugaaaggguuuugggg

SEQ ID NO: 592695 - RNA, 22 nt, Artificial Sequence
  Synthetic
ucguuuugaaaggguuuugggg

SEQ ID NO: 592696 - RNA, 23 nt, Artificial Sequence
  Synthetic
gucguuuugaaaggguuuugggg

SEQ ID NO: 592697 - RNA, 24 nt, Artificial Sequence
  Synthetic
ugucguuuugaaaggguuuugggg

SEQ ID NO: 592698 - RNA, 18 nt, Artificial Sequence
  Synthetic
agauucugccaaaauggg

SEQ ID NO: 592699 - RNA, 19 nt, Artificial Sequence
  Synthetic
cagauucugccaaaauggg

SEQ ID NO: 592700 - RNA, 20 nt, Artificial Sequence
  Synthetic
ccagauucugccaaaauggg

SEQ ID NO: 592701 - RNA, 21 nt, Artificial Sequence
  Synthetic
uccagauucugccaaaauggg

SEQ ID NO: 592702 - RNA, 22 nt, Artificial Sequence
  Synthetic
guccagauucugccaaaauggg

SEQ ID NO: 592703 - RNA, 23 nt, Artificial Sequence
  Synthetic
gguccagauucugccaaaauggg

SEQ ID NO: 592704 - RNA, 24 nt, Artificial Sequence
  Synthetic
ggguccagauucugccaaaauggg

SEQ ID NO: 592705 - RNA, 18 nt, Artificial Sequence
  Synthetic
agugugggagaaaauggg

SEQ ID NO: 592706 - RNA, 19 nt, Artificial Sequence
  Synthetic
gagugugggagaaaauggg

SEQ ID NO: 592707 - RNA, 20 nt, Artificial Sequence
  Synthetic
agagugugggagaaaauggg

SEQ ID NO: 592708 - RNA, 21 nt, Artificial Sequence
  Synthetic
gagagugugggagaaaauggg

SEQ ID NO: 592709 - RNA, 22 nt, Artificial Sequence
  Synthetic
ugagagugugggagaaaauggg

SEQ ID NO: 592710 - RNA, 23 nt, Artificial Sequence
  Synthetic
uugagagugugggagaaaauggg

SEQ ID NO: 592711 - RNA, 24 nt, Artificial Sequence
  Synthetic
uuugagagugugggagaaaauggg

SEQ ID NO: 592712 - RNA, 18 nt, Artificial Sequence
  Synthetic
ccaaccccagccaauggg

SEQ ID NO: 592713 - RNA, 19 nt, Artificial Sequence
  Synthetic
cccaaccccagccaauggg

SEQ ID NO: 592714 - RNA, 20 nt, Artificial Sequence
  Synthetic
acccaaccccagccaauggg

SEQ ID NO: 592715 - RNA, 21 nt, Artificial Sequence
  Synthetic
gacccaaccccagccaauggg

SEQ ID NO: 592716 - RNA, 22 nt, Artificial Sequence
  Synthetic
cgacccaaccccagccaauggg

SEQ ID NO: 592717 - RNA, 23 nt, Artificial Sequence
  Synthetic
acgacccaaccccagccaauggg

SEQ ID NO: 592718 - RNA, 24 nt, Artificial Sequence
  Synthetic
uacgacccaaccccagccaauggg

SEQ ID NO: 592719 - RNA, 18 nt, Artificial Sequence
  Synthetic
cacagaguaaucaauggg

SEQ ID NO: 592720 - RNA, 19 nt, Artificial Sequence
  Synthetic
acacagaguaaucaauggg

SEQ ID NO: 592721 - RNA, 20 nt, Artificial Sequence
  Synthetic
aacacagaguaaucaauggg

SEQ ID NO: 592722 - RNA, 21 nt, Artificial Sequence
  Synthetic
aaacacagaguaaucaauggg

SEQ ID NO: 592723 - RNA, 22 nt, Artificial Sequence
  Synthetic
aaaacacagaguaaucaauggg

SEQ ID NO: 592724 - RNA, 23 nt, Artificial Sequence
  Synthetic
uaaaacacagaguaaucaauggg

SEQ ID NO: 592725 - RNA, 24 nt, Artificial Sequence
  Synthetic
auaaaacacagaguaaucaauggg

SEQ ID NO: 592726 - RNA, 18 nt, Artificial Sequence
  Synthetic
uggagguaagagaauggg

SEQ ID NO: 592727 - RNA, 19 nt, Artificial Sequence
  Synthetic
cuggagguaagagaauggg

SEQ ID NO: 592728 - RNA, 20 nt, Artificial Sequence
  Synthetic
gcuggagguaagagaauggg

SEQ ID NO: 592729 - RNA, 21 nt, Artificial Sequence
  Synthetic
ggcuggagguaagagaauggg

SEQ ID NO: 592730 - RNA, 22 nt, Artificial Sequence
  Synthetic
gggcuggagguaagagaauggg

SEQ ID NO: 592731 - RNA, 23 nt, Artificial Sequence
  Synthetic
ugggcuggagguaagagaauggg

SEQ ID NO: 592732 - RNA, 24 nt, Artificial Sequence
  Synthetic
cugggcuggagguaagagaauggg

SEQ ID NO: 592733 - RNA, 18 nt, Artificial Sequence
  Synthetic
uaugaauaaccuaauggg

SEQ ID NO: 592734 - RNA, 19 nt, Artificial Sequence
  Synthetic
cuaugaauaaccuaauggg

SEQ ID NO: 592735 - RNA, 20 nt, Artificial Sequence
  Synthetic
acuaugaauaaccuaauggg

SEQ ID NO: 592736 - RNA, 21 nt, Artificial Sequence
  Synthetic
aacuaugaauaaccuaauggg

SEQ ID NO: 592737 - RNA, 22 nt, Artificial Sequence
  Synthetic
gaacuaugaauaaccuaauggg

SEQ ID NO: 592738 - RNA, 23 nt, Artificial Sequence
  Synthetic
ggaacuaugaauaaccuaauggg

SEQ ID NO: 592739 - RNA, 24 nt, Artificial Sequence
  Synthetic
aggaacuaugaauaaccuaauggg

SEQ ID NO: 592740 - RNA, 18 nt, Artificial Sequence
  Synthetic
cuauuggcaucuaauggg

SEQ ID NO: 592741 - RNA, 19 nt, Artificial Sequence
  Synthetic
acuauuggcaucuaauggg

SEQ ID NO: 592742 - RNA, 20 nt, Artificial Sequence
  Synthetic
uacuauuggcaucuaauggg

SEQ ID NO: 592743 - RNA, 21 nt, Artificial Sequence
  Synthetic
guacuauuggcaucuaauggg

SEQ ID NO: 592744 - RNA, 22 nt, Artificial Sequence
  Synthetic
aguacuauuggcaucuaauggg

SEQ ID NO: 592745 - RNA, 23 nt, Artificial Sequence
  Synthetic
gaguacuauuggcaucuaauggg

SEQ ID NO: 592746 - RNA, 24 nt, Artificial Sequence
  Synthetic
agaguacuauuggcaucuaauggg

SEQ ID NO: 592747 - RNA, 18 nt, Artificial Sequence
  Synthetic
cauuuaaagaguaauggg

SEQ ID NO: 592748 - RNA, 19 nt, Artificial Sequence
  Synthetic
ucauuuaaagaguaauggg

SEQ ID NO: 592749 - RNA, 20 nt, Artificial Sequence
  Synthetic
uucauuuaaagaguaauggg

SEQ ID NO: 592750 - RNA, 21 nt, Artificial Sequence
  Synthetic
uuucauuuaaagaguaauggg

SEQ ID NO: 592751 - RNA, 22 nt, Artificial Sequence
  Synthetic
auuucauuuaaagaguaauggg

SEQ ID NO: 592752 - RNA, 23 nt, Artificial Sequence
  Synthetic
gauuucauuuaaagaguaauggg

SEQ ID NO: 592753 - RNA, 24 nt, Artificial Sequence
  Synthetic
ggauuucauuuaaagaguaauggg

SEQ ID NO: 592754 - RNA, 18 nt, Artificial Sequence
  Synthetic
ucaauguagaguaauggg

SEQ ID NO: 592755 - RNA, 19 nt, Artificial Sequence
  Synthetic
gucaauguagaguaauggg

SEQ ID NO: 592756 - RNA, 20 nt, Artificial Sequence
  Synthetic
agucaauguagaguaauggg

SEQ ID NO: 592757 - RNA, 21 nt, Artificial Sequence
  Synthetic
gagucaauguagaguaauggg

SEQ ID NO: 592758 - RNA, 22 nt, Artificial Sequence
  Synthetic
ugagucaauguagaguaauggg

SEQ ID NO: 592759 - RNA, 23 nt, Artificial Sequence
  Synthetic
cugagucaauguagaguaauggg

SEQ ID NO: 592760 - RNA, 24 nt, Artificial Sequence
  Synthetic
gcugagucaauguagaguaauggg

SEQ ID NO: 592761 - RNA, 18 nt, Artificial Sequence
  Synthetic
aaaugacaaguuaauggg

SEQ ID NO: 592762 - RNA, 19 nt, Artificial Sequence
  Synthetic
uaaaugacaaguuaauggg

SEQ ID NO: 592763 - RNA, 20 nt, Artificial Sequence
  Synthetic
guaaaugacaaguuaauggg

SEQ ID NO: 592764 - RNA, 21 nt, Artificial Sequence
  Synthetic
uguaaaugacaaguuaauggg

SEQ ID NO: 592765 - RNA, 22 nt, Artificial Sequence
  Synthetic
auguaaaugacaaguuaauggg

SEQ ID NO: 592766 - RNA, 23 nt, Artificial Sequence
  Synthetic
aauguaaaugacaaguuaauggg

SEQ ID NO: 592767 - RNA, 24 nt, Artificial Sequence
  Synthetic
uaauguaaaugacaaguuaauggg

SEQ ID NO: 592768 - RNA, 18 nt, Artificial Sequence
  Synthetic
augaccuuucaacauggg

SEQ ID NO: 592769 - RNA, 19 nt, Artificial Sequence
  Synthetic
aaugaccuuucaacauggg

SEQ ID NO: 592770 - RNA, 20 nt, Artificial Sequence
  Synthetic
aaaugaccuuucaacauggg

SEQ ID NO: 592771 - RNA, 21 nt, Artificial Sequence
  Synthetic
gaaaugaccuuucaacauggg

SEQ ID NO: 592772 - RNA, 22 nt, Artificial Sequence
  Synthetic
ugaaaugaccuuucaacauggg

SEQ ID NO: 592773 - RNA, 23 nt, Artificial Sequence
  Synthetic
augaaaugaccuuucaacauggg

SEQ ID NO: 592774 - RNA, 24 nt, Artificial Sequence
  Synthetic
aaugaaaugaccuuucaacauggg

SEQ ID NO: 592775 - RNA, 18 nt, Artificial Sequence
  Synthetic
acagaaauggaacauggg

SEQ ID NO: 592776 - RNA, 19 nt, Artificial Sequence
  Synthetic
gacagaaauggaacauggg

SEQ ID NO: 592777 - RNA, 20 nt, Artificial Sequence
  Synthetic
ggacagaaauggaacauggg

SEQ ID NO: 592778 - RNA, 21 nt, Artificial Sequence
  Synthetic
aggacagaaauggaacauggg

SEQ ID NO: 592779 - RNA, 22 nt, Artificial Sequence
  Synthetic
uaggacagaaauggaacauggg

SEQ ID NO: 592780 - RNA, 23 nt, Artificial Sequence
  Synthetic
auaggacagaaauggaacauggg

SEQ ID NO: 592781 - RNA, 24 nt, Artificial Sequence
  Synthetic
gauaggacagaaauggaacauggg

SEQ ID NO: 592782 - RNA, 18 nt, Artificial Sequence
  Synthetic
auagaguaugaacauggg

SEQ ID NO: 592783 - RNA, 19 nt, Artificial Sequence
  Synthetic
aauagaguaugaacauggg

SEQ ID NO: 592784 - RNA, 20 nt, Artificial Sequence
  Synthetic
uaauagaguaugaacauggg

SEQ ID NO: 592785 - RNA, 21 nt, Artificial Sequence
  Synthetic
cuaauagaguaugaacauggg

SEQ ID NO: 592786 - RNA, 22 nt, Artificial Sequence
  Synthetic
ucuaauagaguaugaacauggg

SEQ ID NO: 592787 - RNA, 23 nt, Artificial Sequence
  Synthetic
uucuaauagaguaugaacauggg

SEQ ID NO: 592788 - RNA, 24 nt, Artificial Sequence
  Synthetic
auucuaauagaguaugaacauggg

SEQ ID NO: 592789 - RNA, 18 nt, Artificial Sequence
  Synthetic
accuuggcagcacauggg

SEQ ID NO: 592790 - RNA, 19 nt, Artificial Sequence
  Synthetic
aaccuuggcagcacauggg

SEQ ID NO: 592791 - RNA, 20 nt, Artificial Sequence
  Synthetic
aaaccuuggcagcacauggg

SEQ ID NO: 592792 - RNA, 21 nt, Artificial Sequence
  Synthetic
aaaaccuuggcagcacauggg

SEQ ID NO: 592793 - RNA, 22 nt, Artificial Sequence
  Synthetic
gaaaaccuuggcagcacauggg

SEQ ID NO: 592794 - RNA, 23 nt, Artificial Sequence
  Synthetic
ugaaaaccuuggcagcacauggg

SEQ ID NO: 592795 - RNA, 24 nt, Artificial Sequence
  Synthetic
cugaaaaccuuggcagcacauggg

SEQ ID NO: 592796 - RNA, 18 nt, Artificial Sequence
  Synthetic
gugucccugucacauggg

SEQ ID NO: 592797 - RNA, 19 nt, Artificial Sequence
  Synthetic
agugucccugucacauggg

SEQ ID NO: 592798 - RNA, 20 nt, Artificial Sequence
  Synthetic
cagugucccugucacauggg

SEQ ID NO: 592799 - RNA, 21 nt, Artificial Sequence
  Synthetic
ccagugucccugucacauggg

SEQ ID NO: 592800 - RNA, 22 nt, Artificial Sequence
  Synthetic
uccagugucccugucacauggg

SEQ ID NO: 592801 - RNA, 23 nt, Artificial Sequence
  Synthetic
cuccagugucccugucacauggg

SEQ ID NO: 592802 - RNA, 24 nt, Artificial Sequence
  Synthetic
gcuccagugucccugucacauggg

SEQ ID NO: 592803 - RNA, 18 nt, Artificial Sequence
  Synthetic
agaagucucauacauggg

SEQ ID NO: 592804 - RNA, 19 nt, Artificial Sequence
  Synthetic
aagaagucucauacauggg

SEQ ID NO: 592805 - RNA, 20 nt, Artificial Sequence
  Synthetic
caagaagucucauacauggg

SEQ ID NO: 592806 - RNA, 21 nt, Artificial Sequence
  Synthetic
ccaagaagucucauacauggg

SEQ ID NO: 592807 - RNA, 22 nt, Artificial Sequence
  Synthetic
cccaagaagucucauacauggg

SEQ ID NO: 592808 - RNA, 23 nt, Artificial Sequence
  Synthetic
ucccaagaagucucauacauggg

SEQ ID NO: 592809 - RNA, 24 nt, Artificial Sequence
  Synthetic
uucccaagaagucucauacauggg

SEQ ID NO: 592810 - RNA, 18 nt, Artificial Sequence
  Synthetic
agauucauaaaccauggg

SEQ ID NO: 592811 - RNA, 19 nt, Artificial Sequence
  Synthetic
cagauucauaaaccauggg

SEQ ID NO: 592812 - RNA, 20 nt, Artificial Sequence
  Synthetic
ucagauucauaaaccauggg

SEQ ID NO: 592813 - RNA, 21 nt, Artificial Sequence
  Synthetic
cucagauucauaaaccauggg

SEQ ID NO: 592814 - RNA, 22 nt, Artificial Sequence
  Synthetic
ucucagauucauaaaccauggg

SEQ ID NO: 592815 - RNA, 23 nt, Artificial Sequence
  Synthetic
cucucagauucauaaaccauggg

SEQ ID NO: 592816 - RNA, 24 nt, Artificial Sequence
  Synthetic
acucucagauucauaaaccauggg

SEQ ID NO: 592817 - RNA, 18 nt, Artificial Sequence
  Synthetic
agagaugacacccauggg

SEQ ID NO: 592818 - RNA, 19 nt, Artificial Sequence
  Synthetic
aagagaugacacccauggg

SEQ ID NO: 592819 - RNA, 20 nt, Artificial Sequence
  Synthetic
aaagagaugacacccauggg

SEQ ID NO: 592820 - RNA, 21 nt, Artificial Sequence
  Synthetic
gaaagagaugacacccauggg

SEQ ID NO: 592821 - RNA, 22 nt, Artificial Sequence
  Synthetic
agaaagagaugacacccauggg

SEQ ID NO: 592822 - RNA, 23 nt, Artificial Sequence
  Synthetic
cagaaagagaugacacccauggg

SEQ ID NO: 592823 - RNA, 24 nt, Artificial Sequence
  Synthetic
ucagaaagagaugacacccauggg

SEQ ID NO: 592824 - RNA, 18 nt, Artificial Sequence
  Synthetic
guguaauuggcccauggg

SEQ ID NO: 592825 - RNA, 19 nt, Artificial Sequence
  Synthetic
gguguaauuggcccauggg

SEQ ID NO: 592826 - RNA, 20 nt, Artificial Sequence
  Synthetic
ggguguaauuggcccauggg

SEQ ID NO: 592827 - RNA, 21 nt, Artificial Sequence
  Synthetic
uggguguaauuggcccauggg

SEQ ID NO: 592828 - RNA, 22 nt, Artificial Sequence
  Synthetic
guggguguaauuggcccauggg

SEQ ID NO: 592829 - RNA, 23 nt, Artificial Sequence
  Synthetic
gguggguguaauuggcccauggg

SEQ ID NO: 592830 - RNA, 24 nt, Artificial Sequence
  Synthetic
ugguggguguaauuggcccauggg

SEQ ID NO: 592831 - RNA, 18 nt, Artificial Sequence
  Synthetic
cuauguggaaagcauggg

SEQ ID NO: 592832 - RNA, 19 nt, Artificial Sequence
  Synthetic
ccuauguggaaagcauggg

SEQ ID NO: 592833 - RNA, 20 nt, Artificial Sequence
  Synthetic
accuauguggaaagcauggg

SEQ ID NO: 592834 - RNA, 21 nt, Artificial Sequence
  Synthetic
aaccuauguggaaagcauggg

SEQ ID NO: 592835 - RNA, 22 nt, Artificial Sequence
  Synthetic
gaaccuauguggaaagcauggg

SEQ ID NO: 592836 - RNA, 23 nt, Artificial Sequence
  Synthetic
ugaaccuauguggaaagcauggg

SEQ ID NO: 592837 - RNA, 24 nt, Artificial Sequence
  Synthetic
augaaccuauguggaaagcauggg

SEQ ID NO: 592838 - RNA, 18 nt, Artificial Sequence
  Synthetic
ucacgacaacagcauggg

SEQ ID NO: 592839 - RNA, 19 nt, Artificial Sequence
  Synthetic
aucacgacaacagcauggg

SEQ ID NO: 592840 - RNA, 20 nt, Artificial Sequence
  Synthetic
uaucacgacaacagcauggg

SEQ ID NO: 592841 - RNA, 21 nt, Artificial Sequence
  Synthetic
cuaucacgacaacagcauggg

SEQ ID NO: 592842 - RNA, 22 nt, Artificial Sequence
  Synthetic
acuaucacgacaacagcauggg

SEQ ID NO: 592843 - RNA, 23 nt, Artificial Sequence
  Synthetic
cacuaucacgacaacagcauggg

SEQ ID NO: 592844 - RNA, 24 nt, Artificial Sequence
  Synthetic
ucacuaucacgacaacagcauggg

SEQ ID NO: 592845 - RNA, 18 nt, Artificial Sequence
  Synthetic
cuaauuagcaaucauggg

SEQ ID NO: 592846 - RNA, 19 nt, Artificial Sequence
  Synthetic
ccuaauuagcaaucauggg

SEQ ID NO: 592847 - RNA, 20 nt, Artificial Sequence
  Synthetic
cccuaauuagcaaucauggg

SEQ ID NO: 592848 - RNA, 21 nt, Artificial Sequence
  Synthetic
ucccuaauuagcaaucauggg

SEQ ID NO: 592849 - RNA, 22 nt, Artificial Sequence
  Synthetic
uucccuaauuagcaaucauggg

SEQ ID NO: 592850 - RNA, 23 nt, Artificial Sequence
  Synthetic
cuucccuaauuagcaaucauggg

SEQ ID NO: 592851 - RNA, 24 nt, Artificial Sequence
  Synthetic
ccuucccuaauuagcaaucauggg

SEQ ID NO: 592852 - RNA, 21 nt, Artificial Sequence
  Synthetic
agaacauuccaugcucauggg

SEQ ID NO: 592853 - RNA, 22 nt, Artificial Sequence
  Synthetic
aagaacauuccaugcucauggg

SEQ ID NO: 592854 - RNA, 23 nt, Artificial Sequence
  Synthetic
gaagaacauuccaugcucauggg

SEQ ID NO: 592855 - RNA, 24 nt, Artificial Sequence
  Synthetic
ggaagaacauuccaugcucauggg

SEQ ID NO: 592856 - RNA, 18 nt, Artificial Sequence
  Synthetic
auauuccaugcucauggg

SEQ ID NO: 592857 - RNA, 19 nt, Artificial Sequence
  Synthetic
aauauuccaugcucauggg

SEQ ID NO: 592858 - RNA, 20 nt, Artificial Sequence
  Synthetic
gaauauuccaugcucauggg

SEQ ID NO: 592859 - RNA, 21 nt, Artificial Sequence
  Synthetic
agaauauuccaugcucauggg

SEQ ID NO: 592860 - RNA, 22 nt, Artificial Sequence
  Synthetic
aagaauauuccaugcucauggg

SEQ ID NO: 592861 - RNA, 23 nt, Artificial Sequence
  Synthetic
gaagaauauuccaugcucauggg

SEQ ID NO: 592862 - RNA, 24 nt, Artificial Sequence
  Synthetic
ggaagaauauuccaugcucauggg

SEQ ID NO: 592863 - RNA, 18 nt, Artificial Sequence
  Synthetic
acauuccgugcucauggg

SEQ ID NO: 592864 - RNA, 19 nt, Artificial Sequence
  Synthetic
aacauuccgugcucauggg

SEQ ID NO: 592865 - RNA, 20 nt, Artificial Sequence
  Synthetic
gaacauuccgugcucauggg

SEQ ID NO: 592866 - RNA, 21 nt, Artificial Sequence
  Synthetic
agaacauuccgugcucauggg

SEQ ID NO: 592867 - RNA, 22 nt, Artificial Sequence
  Synthetic
aagaacauuccgugcucauggg

SEQ ID NO: 592868 - RNA, 23 nt, Artificial Sequence
  Synthetic
gaagaacauuccgugcucauggg

SEQ ID NO: 592869 - RNA, 24 nt, Artificial Sequence
  Synthetic
ggaagaacauuccgugcucauggg

SEQ ID NO: 592870 - RNA, 18 nt, Artificial Sequence
  Synthetic
gaacaauagauucauggg

SEQ ID NO: 592871 - RNA, 19 nt, Artificial Sequence
  Synthetic
ugaacaauagauucauggg

SEQ ID NO: 592872 - RNA, 20 nt, Artificial Sequence
  Synthetic
cugaacaauagauucauggg

SEQ ID NO: 592873 - RNA, 21 nt, Artificial Sequence
  Synthetic
acugaacaauagauucauggg

SEQ ID NO: 592874 - RNA, 22 nt, Artificial Sequence
  Synthetic
cacugaacaauagauucauggg

SEQ ID NO: 592875 - RNA, 23 nt, Artificial Sequence
  Synthetic
ucacugaacaauagauucauggg

SEQ ID NO: 592876 - RNA, 24 nt, Artificial Sequence
  Synthetic
cucacugaacaauagauucauggg

SEQ ID NO: 592877 - RNA, 18 nt, Artificial Sequence
  Synthetic
ggacaauagauucauggg

SEQ ID NO: 592878 - RNA, 19 nt, Artificial Sequence
  Synthetic
uggacaauagauucauggg

SEQ ID NO: 592879 - RNA, 20 nt, Artificial Sequence
  Synthetic
cuggacaauagauucauggg

SEQ ID NO: 592880 - RNA, 21 nt, Artificial Sequence
  Synthetic
acuggacaauagauucauggg

SEQ ID NO: 592881 - RNA, 22 nt, Artificial Sequence
  Synthetic
cacuggacaauagauucauggg

SEQ ID NO: 592882 - RNA, 23 nt, Artificial Sequence
  Synthetic
ucacuggacaauagauucauggg

SEQ ID NO: 592883 - RNA, 24 nt, Artificial Sequence
  Synthetic
cucacuggacaauagauucauggg

SEQ ID NO: 592884 - RNA, 18 nt, Artificial Sequence
  Synthetic
acacagaaagaagauggg

SEQ ID NO: 592885 - RNA, 19 nt, Artificial Sequence
  Synthetic
uacacagaaagaagauggg

SEQ ID NO: 592886 - RNA, 20 nt, Artificial Sequence
  Synthetic
cuacacagaaagaagauggg

SEQ ID NO: 592887 - RNA, 21 nt, Artificial Sequence
  Synthetic
ccuacacagaaagaagauggg

SEQ ID NO: 592888 - RNA, 22 nt, Artificial Sequence
  Synthetic
gccuacacagaaagaagauggg

SEQ ID NO: 592889 - RNA, 23 nt, Artificial Sequence
  Synthetic
ugccuacacagaaagaagauggg

SEQ ID NO: 592890 - RNA, 24 nt, Artificial Sequence
  Synthetic
augccuacacagaaagaagauggg

SEQ ID NO: 592891 - RNA, 18 nt, Artificial Sequence
  Synthetic
ucuuuuauugaagauggg

SEQ ID NO: 592892 - RNA, 19 nt, Artificial Sequence
  Synthetic
uucuuuuauugaagauggg

SEQ ID NO: 592893 - RNA, 20 nt, Artificial Sequence
  Synthetic
cuucuuuuauugaagauggg

SEQ ID NO: 592894 - RNA, 21 nt, Artificial Sequence
  Synthetic
ucuucuuuuauugaagauggg

SEQ ID NO: 592895 - RNA, 22 nt, Artificial Sequence
  Synthetic
uucuucuuuuauugaagauggg

SEQ ID NO: 592896 - RNA, 23 nt, Artificial Sequence
  Synthetic
uuucuucuuuuauugaagauggg

SEQ ID NO: 592897 - RNA, 24 nt, Artificial Sequence
  Synthetic
cuuucuucuuuuauugaagauggg

SEQ ID NO: 592898 - RNA, 18 nt, Artificial Sequence
  Synthetic
caucagagaacagauggg

SEQ ID NO: 592899 - RNA, 19 nt, Artificial Sequence
  Synthetic
ucaucagagaacagauggg

SEQ ID NO: 592900 - RNA, 20 nt, Artificial Sequence
  Synthetic
gucaucagagaacagauggg

SEQ ID NO: 592901 - RNA, 21 nt, Artificial Sequence
  Synthetic
agucaucagagaacagauggg

SEQ ID NO: 592902 - RNA, 22 nt, Artificial Sequence
  Synthetic
gagucaucagagaacagauggg

SEQ ID NO: 592903 - RNA, 23 nt, Artificial Sequence
  Synthetic
agagucaucagagaacagauggg

SEQ ID NO: 592904 - RNA, 24 nt, Artificial Sequence
  Synthetic
aagagucaucagagaacagauggg

SEQ ID NO: 592905 - RNA, 18 nt, Artificial Sequence
  Synthetic
ugguaauggggagauggg

SEQ ID NO: 592906 - RNA, 19 nt, Artificial Sequence
  Synthetic
uugguaauggggagauggg

SEQ ID NO: 592907 - RNA, 20 nt, Artificial Sequence
  Synthetic
auugguaauggggagauggg

SEQ ID NO: 592908 - RNA, 21 nt, Artificial Sequence
  Synthetic
gauugguaauggggagauggg

SEQ ID NO: 592909 - RNA, 22 nt, Artificial Sequence
  Synthetic
agauugguaauggggagauggg

SEQ ID NO: 592910 - RNA, 23 nt, Artificial Sequence
  Synthetic
gagauugguaauggggagauggg

SEQ ID NO: 592911 - RNA, 24 nt, Artificial Sequence
  Synthetic
agagauugguaauggggagauggg

SEQ ID NO: 592912 - RNA, 18 nt, Artificial Sequence
  Synthetic
cuauucuggggagauggg

SEQ ID NO: 592913 - RNA, 19 nt, Artificial Sequence
  Synthetic
gcuauucuggggagauggg

SEQ ID NO: 592914 - RNA, 20 nt, Artificial Sequence
  Synthetic
agcuauucuggggagauggg

SEQ ID NO: 592915 - RNA, 21 nt, Artificial Sequence
  Synthetic
aagcuauucuggggagauggg

SEQ ID NO: 592916 - RNA, 22 nt, Artificial Sequence
  Synthetic
aaagcuauucuggggagauggg

SEQ ID NO: 592917 - RNA, 23 nt, Artificial Sequence
  Synthetic
uaaagcuauucuggggagauggg

SEQ ID NO: 592918 - RNA, 24 nt, Artificial Sequence
  Synthetic
guaaagcuauucuggggagauggg

SEQ ID NO: 592919 - RNA, 18 nt, Artificial Sequence
  Synthetic
uuauaggcacaggauggg

SEQ ID NO: 592920 - RNA, 19 nt, Artificial Sequence
  Synthetic
uuuauaggcacaggauggg

SEQ ID NO: 592921 - RNA, 20 nt, Artificial Sequence
  Synthetic
uuuuauaggcacaggauggg

SEQ ID NO: 592922 - RNA, 21 nt, Artificial Sequence
  Synthetic
uuuuuauaggcacaggauggg

SEQ ID NO: 592923 - RNA, 22 nt, Artificial Sequence
  Synthetic
guuuuuauaggcacaggauggg

SEQ ID NO: 592924 - RNA, 23 nt, Artificial Sequence
  Synthetic
gguuuuuauaggcacaggauggg

SEQ ID NO: 592925 - RNA, 24 nt, Artificial Sequence
  Synthetic
ggguuuuuauaggcacaggauggg

SEQ ID NO: 592926 - RNA, 18 nt, Artificial Sequence
  Synthetic
aggcuacuagcggauggg

SEQ ID NO: 592927 - RNA, 19 nt, Artificial Sequence
  Synthetic
gaggcuacuagcggauggg

SEQ ID NO: 592928 - RNA, 20 nt, Artificial Sequence
  Synthetic
agaggcuacuagcggauggg

SEQ ID NO: 592929 - RNA, 21 nt, Artificial Sequence
  Synthetic
cagaggcuacuagcggauggg

SEQ ID NO: 592930 - RNA, 22 nt, Artificial Sequence
  Synthetic
ccagaggcuacuagcggauggg

SEQ ID NO: 592931 - RNA, 23 nt, Artificial Sequence
  Synthetic
uccagaggcuacuagcggauggg

SEQ ID NO: 592932 - RNA, 24 nt, Artificial Sequence
  Synthetic
guccagaggcuacuagcggauggg

SEQ ID NO: 592933 - RNA, 18 nt, Artificial Sequence
  Synthetic
gguguagaaauggauggg

SEQ ID NO: 592934 - RNA, 19 nt, Artificial Sequence
  Synthetic
ggguguagaaauggauggg

SEQ ID NO: 592935 - RNA, 20 nt, Artificial Sequence
  Synthetic
aggguguagaaauggauggg

SEQ ID NO: 592936 - RNA, 21 nt, Artificial Sequence
  Synthetic
gaggguguagaaauggauggg

SEQ ID NO: 592937 - RNA, 22 nt, Artificial Sequence
  Synthetic
agaggguguagaaauggauggg

SEQ ID NO: 592938 - RNA, 23 nt, Artificial Sequence
  Synthetic
gagaggguguagaaauggauggg

SEQ ID NO: 592939 - RNA, 24 nt, Artificial Sequence
  Synthetic
ugagaggguguagaaauggauggg

SEQ ID NO: 592940 - RNA, 18 nt, Artificial Sequence
  Synthetic
aagaacucucuggauggg

SEQ ID NO: 592941 - RNA, 19 nt, Artificial Sequence
  Synthetic
uaagaacucucuggauggg

SEQ ID NO: 592942 - RNA, 20 nt, Artificial Sequence
  Synthetic
auaagaacucucuggauggg

SEQ ID NO: 592943 - RNA, 21 nt, Artificial Sequence
  Synthetic
cauaagaacucucuggauggg

SEQ ID NO: 592944 - RNA, 22 nt, Artificial Sequence
  Synthetic
acauaagaacucucuggauggg

SEQ ID NO: 592945 - RNA, 23 nt, Artificial Sequence
  Synthetic
gacauaagaacucucuggauggg

SEQ ID NO: 592946 - RNA, 24 nt, Artificial Sequence
  Synthetic
agacauaagaacucucuggauggg

SEQ ID NO: 592947 - RNA, 18 nt, Artificial Sequence
  Synthetic
agaagauaagcugauggg

SEQ ID NO: 592948 - RNA, 19 nt, Artificial Sequence
  Synthetic
cagaagauaagcugauggg

SEQ ID NO: 592949 - RNA, 20 nt, Artificial Sequence
  Synthetic
gcagaagauaagcugauggg

SEQ ID NO: 592950 - RNA, 21 nt, Artificial Sequence
  Synthetic
ugcagaagauaagcugauggg

SEQ ID NO: 592951 - RNA, 22 nt, Artificial Sequence
  Synthetic
augcagaagauaagcugauggg

SEQ ID NO: 592952 - RNA, 23 nt, Artificial Sequence
  Synthetic
uaugcagaagauaagcugauggg

SEQ ID NO: 592953 - RNA, 24 nt, Artificial Sequence
  Synthetic
auaugcagaagauaagcugauggg

SEQ ID NO: 592954 - RNA, 18 nt, Artificial Sequence
  Synthetic
agggugaacagugauggg

SEQ ID NO: 592955 - RNA, 19 nt, Artificial Sequence
  Synthetic
uagggugaacagugauggg

SEQ ID NO: 592956 - RNA, 20 nt, Artificial Sequence
  Synthetic
auagggugaacagugauggg

SEQ ID NO: 592957 - RNA, 21 nt, Artificial Sequence
  Synthetic
aauagggugaacagugauggg

SEQ ID NO: 592958 - RNA, 22 nt, Artificial Sequence
  Synthetic
caauagggugaacagugauggg

SEQ ID NO: 592959 - RNA, 23 nt, Artificial Sequence
  Synthetic
acaauagggugaacagugauggg

SEQ ID NO: 592960 - RNA, 24 nt, Artificial Sequence
  Synthetic
uacaauagggugaacagugauggg

SEQ ID NO: 592961 - RNA, 18 nt, Artificial Sequence
  Synthetic
cucugggcuugugauggg

SEQ ID NO: 592962 - RNA, 19 nt, Artificial Sequence
  Synthetic
ccucugggcuugugauggg

SEQ ID NO: 592963 - RNA, 20 nt, Artificial Sequence
  Synthetic
gccucugggcuugugauggg

SEQ ID NO: 592964 - RNA, 21 nt, Artificial Sequence
  Synthetic
ggccucugggcuugugauggg

SEQ ID NO: 592965 - RNA, 22 nt, Artificial Sequence
  Synthetic
aggccucugggcuugugauggg

SEQ ID NO: 592966 - RNA, 23 nt, Artificial Sequence
  Synthetic
uaggccucugggcuugugauggg

SEQ ID NO: 592967 - RNA, 24 nt, Artificial Sequence
  Synthetic
uuaggccucugggcuugugauggg

SEQ ID NO: 592968 - RNA, 18 nt, Artificial Sequence
  Synthetic
ugguuaaucguugauggg

SEQ ID NO: 592969 - RNA, 19 nt, Artificial Sequence
  Synthetic
cugguuaaucguugauggg

SEQ ID NO: 592970 - RNA, 20 nt, Artificial Sequence
  Synthetic
acugguuaaucguugauggg

SEQ ID NO: 592971 - RNA, 21 nt, Artificial Sequence
  Synthetic
cacugguuaaucguugauggg

SEQ ID NO: 592972 - RNA, 22 nt, Artificial Sequence
  Synthetic
gcacugguuaaucguugauggg

SEQ ID NO: 592973 - RNA, 23 nt, Artificial Sequence
  Synthetic
agcacugguuaaucguugauggg

SEQ ID NO: 592974 - RNA, 24 nt, Artificial Sequence
  Synthetic
aagcacugguuaaucguugauggg

SEQ ID NO: 592975 - RNA, 18 nt, Artificial Sequence
  Synthetic
aaucaagagaaauauggg

SEQ ID NO: 592976 - RNA, 19 nt, Artificial Sequence
  Synthetic
gaaucaagagaaauauggg

SEQ ID NO: 592977 - RNA, 20 nt, Artificial Sequence
  Synthetic
ggaaucaagagaaauauggg

SEQ ID NO: 592978 - RNA, 21 nt, Artificial Sequence
  Synthetic
uggaaucaagagaaauauggg

SEQ ID NO: 592979 - RNA, 22 nt, Artificial Sequence
  Synthetic
uuggaaucaagagaaauauggg

SEQ ID NO: 592980 - RNA, 23 nt, Artificial Sequence
  Synthetic
uuuggaaucaagagaaauauggg

SEQ ID NO: 592981 - RNA, 24 nt, Artificial Sequence
  Synthetic
guuuggaaucaagagaaauauggg

SEQ ID NO: 592982 - RNA, 18 nt, Artificial Sequence
  Synthetic
aauugaagggcauauggg

SEQ ID NO: 592983 - RNA, 19 nt, Artificial Sequence
  Synthetic
gaauugaagggcauauggg

SEQ ID NO: 592984 - RNA, 20 nt, Artificial Sequence
  Synthetic
ggaauugaagggcauauggg

SEQ ID NO: 592985 - RNA, 21 nt, Artificial Sequence
  Synthetic
uggaauugaagggcauauggg

SEQ ID NO: 592986 - RNA, 22 nt, Artificial Sequence
  Synthetic
guggaauugaagggcauauggg

SEQ ID NO: 592987 - RNA, 23 nt, Artificial Sequence
  Synthetic
aguggaauugaagggcauauggg

SEQ ID NO: 592988 - RNA, 24 nt, Artificial Sequence
  Synthetic
aaguggaauugaagggcauauggg

SEQ ID NO: 592989 - RNA, 18 nt, Artificial Sequence
  Synthetic
uaaaugaguucauauggg

SEQ ID NO: 592990 - RNA, 19 nt, Artificial Sequence
  Synthetic
uuaaaugaguucauauggg

SEQ ID NO: 592991 - RNA, 20 nt, Artificial Sequence
  Synthetic
guuaaaugaguucauauggg

SEQ ID NO: 592992 - RNA, 21 nt, Artificial Sequence
  Synthetic
gguuaaaugaguucauauggg

SEQ ID NO: 592993 - RNA, 22 nt, Artificial Sequence
  Synthetic
agguuaaaugaguucauauggg

SEQ ID NO: 592994 - RNA, 23 nt, Artificial Sequence
  Synthetic
aagguuaaaugaguucauauggg

SEQ ID NO: 592995 - RNA, 24 nt, Artificial Sequence
  Synthetic
uaagguuaaaugaguucauauggg

SEQ ID NO: 592996 - RNA, 18 nt, Artificial Sequence
  Synthetic
auuuauaggcuauauggg

SEQ ID NO: 592997 - RNA, 19 nt, Artificial Sequence
  Synthetic
gauuuauaggcuauauggg

SEQ ID NO: 592998 - RNA, 20 nt, Artificial Sequence
  Synthetic
agauuuauaggcuauauggg

SEQ ID NO: 592999 - RNA, 21 nt, Artificial Sequence
  Synthetic
gagauuuauaggcuauauggg

SEQ ID NO: 593000 - RNA, 22 nt, Artificial Sequence
  Synthetic
agagauuuauaggcuauauggg

SEQ ID NO: 593001 - RNA, 23 nt, Artificial Sequence
  Synthetic
cagagauuuauaggcuauauggg

SEQ ID NO: 593002 - RNA, 24 nt, Artificial Sequence
  Synthetic
ucagagauuuauaggcuauauggg

SEQ ID NO: 593003 - RNA, 18 nt, Artificial Sequence
  Synthetic
aaugaugucaucuauggg

SEQ ID NO: 593004 - RNA, 19 nt, Artificial Sequence
  Synthetic
caaugaugucaucuauggg

SEQ ID NO: 593005 - RNA, 20 nt, Artificial Sequence
  Synthetic
gcaaugaugucaucuauggg

SEQ ID NO: 593006 - RNA, 21 nt, Artificial Sequence
  Synthetic
ugcaaugaugucaucuauggg

SEQ ID NO: 593007 - RNA, 22 nt, Artificial Sequence
  Synthetic
augcaaugaugucaucuauggg

SEQ ID NO: 593008 - RNA, 23 nt, Artificial Sequence
  Synthetic
aaugcaaugaugucaucuauggg

SEQ ID NO: 593009 - RNA, 24 nt, Artificial Sequence
  Synthetic
caaugcaaugaugucaucuauggg

SEQ ID NO: 593010 - RNA, 18 nt, Artificial Sequence
  Synthetic
guugggaugugguauggg

SEQ ID NO: 593011 - RNA, 19 nt, Artificial Sequence
  Synthetic
aguugggaugugguauggg

SEQ ID NO: 593012 - RNA, 20 nt, Artificial Sequence
  Synthetic
aaguugggaugugguauggg

SEQ ID NO: 593013 - RNA, 21 nt, Artificial Sequence
  Synthetic
uaaguugggaugugguauggg

SEQ ID NO: 593014 - RNA, 22 nt, Artificial Sequence
  Synthetic
uuaaguugggaugugguauggg

SEQ ID NO: 593015 - RNA, 23 nt, Artificial Sequence
  Synthetic
guuaaguugggaugugguauggg

SEQ ID NO: 593016 - RNA, 24 nt, Artificial Sequence
  Synthetic
aguuaaguugggaugugguauggg

SEQ ID NO: 593017 - RNA, 18 nt, Artificial Sequence
  Synthetic
uucugugagccuuauggg

SEQ ID NO: 593018 - RNA, 19 nt, Artificial Sequence
  Synthetic
auucugugagccuuauggg

SEQ ID NO: 593019 - RNA, 20 nt, Artificial Sequence
  Synthetic
uauucugugagccuuauggg

SEQ ID NO: 593020 - RNA, 21 nt, Artificial Sequence
  Synthetic
uuauucugugagccuuauggg

SEQ ID NO: 593021 - RNA, 22 nt, Artificial Sequence
  Synthetic
auuauucugugagccuuauggg

SEQ ID NO: 593022 - RNA, 23 nt, Artificial Sequence
  Synthetic
cauuauucugugagccuuauggg

SEQ ID NO: 593023 - RNA, 24 nt, Artificial Sequence
  Synthetic
acauuauucugugagccuuauggg

SEQ ID NO: 593024 - RNA, 18 nt, Artificial Sequence
  Synthetic
auucccauguguuauggg

SEQ ID NO: 593025 - RNA, 19 nt, Artificial Sequence
  Synthetic
aauucccauguguuauggg

SEQ ID NO: 593026 - RNA, 20 nt, Artificial Sequence
  Synthetic
gaauucccauguguuauggg

SEQ ID NO: 593027 - RNA, 21 nt, Artificial Sequence
  Synthetic
ugaauucccauguguuauggg

SEQ ID NO: 593028 - RNA, 22 nt, Artificial Sequence
  Synthetic
uugaauucccauguguuauggg

SEQ ID NO: 593029 - RNA, 23 nt, Artificial Sequence
  Synthetic
guugaauucccauguguuauggg

SEQ ID NO: 593030 - RNA, 24 nt, Artificial Sequence
  Synthetic
uguugaauucccauguguuauggg

SEQ ID NO: 593031 - RNA, 18 nt, Artificial Sequence
  Synthetic
guacuuaaaaaaacuggg

SEQ ID NO: 593032 - RNA, 19 nt, Artificial Sequence
  Synthetic
aguacuuaaaaaaacuggg

SEQ ID NO: 593033 - RNA, 20 nt, Artificial Sequence
  Synthetic
caguacuuaaaaaaacuggg

SEQ ID NO: 593034 - RNA, 21 nt, Artificial Sequence
  Synthetic
gcaguacuuaaaaaaacuggg

SEQ ID NO: 593035 - RNA, 22 nt, Artificial Sequence
  Synthetic
ggcaguacuuaaaaaaacuggg

SEQ ID NO: 593036 - RNA, 23 nt, Artificial Sequence
  Synthetic
uggcaguacuuaaaaaaacuggg

SEQ ID NO: 593037 - RNA, 24 nt, Artificial Sequence
  Synthetic
uuggcaguacuuaaaaaaacuggg

SEQ ID NO: 593038 - RNA, 18 nt, Artificial Sequence
  Synthetic
uugaaucuacaaacuggg

SEQ ID NO: 593039 - RNA, 19 nt, Artificial Sequence
  Synthetic
auugaaucuacaaacuggg

SEQ ID NO: 593040 - RNA, 20 nt, Artificial Sequence
  Synthetic
aauugaaucuacaaacuggg

SEQ ID NO: 593041 - RNA, 21 nt, Artificial Sequence
  Synthetic
caauugaaucuacaaacuggg

SEQ ID NO: 593042 - RNA, 22 nt, Artificial Sequence
  Synthetic
acaauugaaucuacaaacuggg

SEQ ID NO: 593043 - RNA, 23 nt, Artificial Sequence
  Synthetic
gacaauugaaucuacaaacuggg

SEQ ID NO: 593044 - RNA, 24 nt, Artificial Sequence
  Synthetic
ugacaauugaaucuacaaacuggg

SEQ ID NO: 593045 - RNA, 18 nt, Artificial Sequence
  Synthetic
gagaggcucauaacuggg

SEQ ID NO: 593046 - RNA, 19 nt, Artificial Sequence
  Synthetic
ggagaggcucauaacuggg

SEQ ID NO: 593047 - RNA, 20 nt, Artificial Sequence
  Synthetic
gggagaggcucauaacuggg

SEQ ID NO: 593048 - RNA, 21 nt, Artificial Sequence
  Synthetic
ggggagaggcucauaacuggg

SEQ ID NO: 593049 - RNA, 22 nt, Artificial Sequence
  Synthetic
aggggagaggcucauaacuggg

SEQ ID NO: 593050 - RNA, 23 nt, Artificial Sequence
  Synthetic
caggggagaggcucauaacuggg

SEQ ID NO: 593051 - RNA, 24 nt, Artificial Sequence
  Synthetic
gcaggggagaggcucauaacuggg

SEQ ID NO: 593052 - RNA, 18 nt, Artificial Sequence
  Synthetic
uaacuucaugacacuggg

SEQ ID NO: 593053 - RNA, 19 nt, Artificial Sequence
  Synthetic
uuaacuucaugacacuggg

SEQ ID NO: 593054 - RNA, 20 nt, Artificial Sequence
  Synthetic
uuuaacuucaugacacuggg

SEQ ID NO: 593055 - RNA, 21 nt, Artificial Sequence
  Synthetic
auuuaacuucaugacacuggg

SEQ ID NO: 593056 - RNA, 22 nt, Artificial Sequence
  Synthetic
uauuuaacuucaugacacuggg

SEQ ID NO: 593057 - RNA, 23 nt, Artificial Sequence
  Synthetic
uuauuuaacuucaugacacuggg

SEQ ID NO: 593058 - RNA, 24 nt, Artificial Sequence
  Synthetic
guuauuuaacuucaugacacuggg

SEQ ID NO: 593059 - RNA, 18 nt, Artificial Sequence
  Synthetic
uggauaguccucacuggg

SEQ ID NO: 593060 - RNA, 19 nt, Artificial Sequence
  Synthetic
cuggauaguccucacuggg

SEQ ID NO: 593061 - RNA, 20 nt, Artificial Sequence
  Synthetic
ucuggauaguccucacuggg

SEQ ID NO: 593062 - RNA, 21 nt, Artificial Sequence
  Synthetic
uucuggauaguccucacuggg

SEQ ID NO: 593063 - RNA, 22 nt, Artificial Sequence
  Synthetic
cuucuggauaguccucacuggg

SEQ ID NO: 593064 - RNA, 23 nt, Artificial Sequence
  Synthetic
ucuucuggauaguccucacuggg

SEQ ID NO: 593065 - RNA, 24 nt, Artificial Sequence
  Synthetic
gucuucuggauaguccucacuggg

SEQ ID NO: 593066 - RNA, 18 nt, Artificial Sequence
  Synthetic
uuuagucaagucacuggg

SEQ ID NO: 593067 - RNA, 19 nt, Artificial Sequence
  Synthetic
uuuuagucaagucacuggg

SEQ ID NO: 593068 - RNA, 20 nt, Artificial Sequence
  Synthetic
guuuuagucaagucacuggg

SEQ ID NO: 593069 - RNA, 21 nt, Artificial Sequence
  Synthetic
uguuuuagucaagucacuggg

SEQ ID NO: 593070 - RNA, 22 nt, Artificial Sequence
  Synthetic
cuguuuuagucaagucacuggg

SEQ ID NO: 593071 - RNA, 23 nt, Artificial Sequence
  Synthetic
ucuguuuuagucaagucacuggg

SEQ ID NO: 593072 - RNA, 24 nt, Artificial Sequence
  Synthetic
gucuguuuuagucaagucacuggg

SEQ ID NO: 593073 - RNA, 18 nt, Artificial Sequence
  Synthetic
auagugucauucacuggg

SEQ ID NO: 593074 - RNA, 19 nt, Artificial Sequence
  Synthetic
gauagugucauucacuggg

SEQ ID NO: 593075 - RNA, 20 nt, Artificial Sequence
  Synthetic
ggauagugucauucacuggg

SEQ ID NO: 593076 - RNA, 21 nt, Artificial Sequence
  Synthetic
uggauagugucauucacuggg

SEQ ID NO: 593077 - RNA, 22 nt, Artificial Sequence
  Synthetic
cuggauagugucauucacuggg

SEQ ID NO: 593078 - RNA, 23 nt, Artificial Sequence
  Synthetic
acuggauagugucauucacuggg

SEQ ID NO: 593079 - RNA, 24 nt, Artificial Sequence
  Synthetic
aacuggauagugucauucacuggg

SEQ ID NO: 593080 - RNA, 18 nt, Artificial Sequence
  Synthetic
gacauacuugagacuggg

SEQ ID NO: 593081 - RNA, 19 nt, Artificial Sequence
  Synthetic
agacauacuugagacuggg

SEQ ID NO: 593082 - RNA, 20 nt, Artificial Sequence
  Synthetic
aagacauacuugagacuggg

SEQ ID NO: 593083 - RNA, 21 nt, Artificial Sequence
  Synthetic
aaagacauacuugagacuggg

SEQ ID NO: 593084 - RNA, 22 nt, Artificial Sequence
  Synthetic
uaaagacauacuugagacuggg

SEQ ID NO: 593085 - RNA, 23 nt, Artificial Sequence
  Synthetic
auaaagacauacuugagacuggg

SEQ ID NO: 593086 - RNA, 24 nt, Artificial Sequence
  Synthetic
gauaaagacauacuugagacuggg

SEQ ID NO: 593087 - RNA, 18 nt, Artificial Sequence
  Synthetic
uaagaauucuggacuggg

SEQ ID NO: 593088 - RNA, 19 nt, Artificial Sequence
  Synthetic
cuaagaauucuggacuggg

SEQ ID NO: 593089 - RNA, 20 nt, Artificial Sequence
  Synthetic
ucuaagaauucuggacuggg

SEQ ID NO: 593090 - RNA, 21 nt, Artificial Sequence
  Synthetic
cucuaagaauucuggacuggg

SEQ ID NO: 593091 - RNA, 22 nt, Artificial Sequence
  Synthetic
ucucuaagaauucuggacuggg

SEQ ID NO: 593092 - RNA, 23 nt, Artificial Sequence
  Synthetic
uucucuaagaauucuggacuggg

SEQ ID NO: 593093 - RNA, 24 nt, Artificial Sequence
  Synthetic
uuucucuaagaauucuggacuggg

SEQ ID NO: 593094 - RNA, 18 nt, Artificial Sequence
  Synthetic
gauuuaguagauacuggg

SEQ ID NO: 593095 - RNA, 19 nt, Artificial Sequence
  Synthetic
ggauuuaguagauacuggg

SEQ ID NO: 593096 - RNA, 20 nt, Artificial Sequence
  Synthetic
uggauuuaguagauacuggg

SEQ ID NO: 593097 - RNA, 21 nt, Artificial Sequence
  Synthetic
cuggauuuaguagauacuggg

SEQ ID NO: 593098 - RNA, 22 nt, Artificial Sequence
  Synthetic
ucuggauuuaguagauacuggg

SEQ ID NO: 593099 - RNA, 23 nt, Artificial Sequence
  Synthetic
uucuggauuuaguagauacuggg

SEQ ID NO: 593100 - RNA, 24 nt, Artificial Sequence
  Synthetic
guucuggauuuaguagauacuggg

SEQ ID NO: 593101 - RNA, 18 nt, Artificial Sequence
  Synthetic
cauuuuauuucuacuggg

SEQ ID NO: 593102 - RNA, 19 nt, Artificial Sequence
  Synthetic
acauuuuauuucuacuggg

SEQ ID NO: 593103 - RNA, 20 nt, Artificial Sequence
  Synthetic
cacauuuuauuucuacuggg

SEQ ID NO: 593104 - RNA, 21 nt, Artificial Sequence
  Synthetic
ucacauuuuauuucuacuggg

SEQ ID NO: 593105 - RNA, 22 nt, Artificial Sequence
  Synthetic
cucacauuuuauuucuacuggg

SEQ ID NO: 593106 - RNA, 23 nt, Artificial Sequence
  Synthetic
gcucacauuuuauuucuacuggg

SEQ ID NO: 593107 - RNA, 24 nt, Artificial Sequence
  Synthetic
ggcucacauuuuauuucuacuggg

SEQ ID NO: 593108 - RNA, 18 nt, Artificial Sequence
  Synthetic
cuaauauaauguacuggg

SEQ ID NO: 593109 - RNA, 19 nt, Artificial Sequence
  Synthetic
acuaauauaauguacuggg

SEQ ID NO: 593110 - RNA, 20 nt, Artificial Sequence
  Synthetic
aacuaauauaauguacuggg

SEQ ID NO: 593111 - RNA, 21 nt, Artificial Sequence
  Synthetic
gaacuaauauaauguacuggg

SEQ ID NO: 593112 - RNA, 22 nt, Artificial Sequence
  Synthetic
agaacuaauauaauguacuggg

SEQ ID NO: 593113 - RNA, 23 nt, Artificial Sequence
  Synthetic
uagaacuaauauaauguacuggg

SEQ ID NO: 593114 - RNA, 24 nt, Artificial Sequence
  Synthetic
auagaacuaauauaauguacuggg

SEQ ID NO: 593115 - RNA, 18 nt, Artificial Sequence
  Synthetic
gaugcugauguuacuggg

SEQ ID NO: 593116 - RNA, 19 nt, Artificial Sequence
  Synthetic
ugaugcugauguuacuggg

SEQ ID NO: 593117 - RNA, 20 nt, Artificial Sequence
  Synthetic
cugaugcugauguuacuggg

SEQ ID NO: 593118 - RNA, 21 nt, Artificial Sequence
  Synthetic
ucugaugcugauguuacuggg

SEQ ID NO: 593119 - RNA, 22 nt, Artificial Sequence
  Synthetic
gucugaugcugauguuacuggg

SEQ ID NO: 593120 - RNA, 23 nt, Artificial Sequence
  Synthetic
ggucugaugcugauguuacuggg

SEQ ID NO: 593121 - RNA, 24 nt, Artificial Sequence
  Synthetic
aggucugaugcugauguuacuggg

SEQ ID NO: 593122 - RNA, 18 nt, Artificial Sequence
  Synthetic
aauguccaugaaccuggg

SEQ ID NO: 593123 - RNA, 19 nt, Artificial Sequence
  Synthetic
aaauguccaugaaccuggg

SEQ ID NO: 593124 - RNA, 20 nt, Artificial Sequence
  Synthetic
caaauguccaugaaccuggg

SEQ ID NO: 593125 - RNA, 21 nt, Artificial Sequence
  Synthetic
ccaaauguccaugaaccuggg

SEQ ID NO: 593126 - RNA, 22 nt, Artificial Sequence
  Synthetic
accaaauguccaugaaccuggg

SEQ ID NO: 593127 - RNA, 23 nt, Artificial Sequence
  Synthetic
aaccaaauguccaugaaccuggg

SEQ ID NO: 593128 - RNA, 24 nt, Artificial Sequence
  Synthetic
gaaccaaauguccaugaaccuggg

SEQ ID NO: 593129 - RNA, 18 nt, Artificial Sequence
  Synthetic
aagcuacacagaccuggg

SEQ ID NO: 593130 - RNA, 19 nt, Artificial Sequence
  Synthetic
aaagcuacacagaccuggg

SEQ ID NO: 593131 - RNA, 20 nt, Artificial Sequence
  Synthetic
aaaagcuacacagaccuggg

SEQ ID NO: 593132 - RNA, 21 nt, Artificial Sequence
  Synthetic
caaaagcuacacagaccuggg

SEQ ID NO: 593133 - RNA, 22 nt, Artificial Sequence
  Synthetic
ccaaaagcuacacagaccuggg

SEQ ID NO: 593134 - RNA, 23 nt, Artificial Sequence
  Synthetic
uccaaaagcuacacagaccuggg

SEQ ID NO: 593135 - RNA, 24 nt, Artificial Sequence
  Synthetic
cuccaaaagcuacacagaccuggg

SEQ ID NO: 593136 - RNA, 18 nt, Artificial Sequence
  Synthetic
uugggcuucaagccuggg

SEQ ID NO: 593137 - RNA, 19 nt, Artificial Sequence
  Synthetic
cuugggcuucaagccuggg

SEQ ID NO: 593138 - RNA, 20 nt, Artificial Sequence
  Synthetic
ccuugggcuucaagccuggg

SEQ ID NO: 593139 - RNA, 21 nt, Artificial Sequence
  Synthetic
gccuugggcuucaagccuggg

SEQ ID NO: 593140 - RNA, 22 nt, Artificial Sequence
  Synthetic
agccuugggcuucaagccuggg

SEQ ID NO: 593141 - RNA, 23 nt, Artificial Sequence
  Synthetic
aagccuugggcuucaagccuggg

SEQ ID NO: 593142 - RNA, 24 nt, Artificial Sequence
  Synthetic
gaagccuugggcuucaagccuggg

SEQ ID NO: 593143 - RNA, 18 nt, Artificial Sequence
  Synthetic
uguauauuggggccuggg

SEQ ID NO: 593144 - RNA, 19 nt, Artificial Sequence
  Synthetic
guguauauuggggccuggg

SEQ ID NO: 593145 - RNA, 20 nt, Artificial Sequence
  Synthetic
gguguauauuggggccuggg

SEQ ID NO: 593146 - RNA, 21 nt, Artificial Sequence
  Synthetic
cgguguauauuggggccuggg

SEQ ID NO: 593147 - RNA, 22 nt, Artificial Sequence
  Synthetic
ucgguguauauuggggccuggg

SEQ ID NO: 593148 - RNA, 23 nt, Artificial Sequence
  Synthetic
cucgguguauauuggggccuggg

SEQ ID NO: 593149 - RNA, 24 nt, Artificial Sequence
  Synthetic
ccucgguguauauuggggccuggg

SEQ ID NO: 593150 - RNA, 18 nt, Artificial Sequence
  Synthetic
gggcuuuuggggccuggg

SEQ ID NO: 593151 - RNA, 19 nt, Artificial Sequence
  Synthetic
agggcuuuuggggccuggg

SEQ ID NO: 593152 - RNA, 20 nt, Artificial Sequence
  Synthetic
uagggcuuuuggggccuggg

SEQ ID NO: 593153 - RNA, 21 nt, Artificial Sequence
  Synthetic
auagggcuuuuggggccuggg

SEQ ID NO: 593154 - RNA, 22 nt, Artificial Sequence
  Synthetic
cauagggcuuuuggggccuggg

SEQ ID NO: 593155 - RNA, 23 nt, Artificial Sequence
  Synthetic
acauagggcuuuuggggccuggg

SEQ ID NO: 593156 - RNA, 24 nt, Artificial Sequence
  Synthetic
gacauagggcuuuuggggccuggg

SEQ ID NO: 593157 - RNA, 18 nt, Artificial Sequence
  Synthetic
gcugucuuugugccuggg

SEQ ID NO: 593158 - RNA, 19 nt, Artificial Sequence
  Synthetic
ugcugucuuugugccuggg

SEQ ID NO: 593159 - RNA, 20 nt, Artificial Sequence
  Synthetic
cugcugucuuugugccuggg

SEQ ID NO: 593160 - RNA, 21 nt, Artificial Sequence
  Synthetic
acugcugucuuugugccuggg

SEQ ID NO: 593161 - RNA, 22 nt, Artificial Sequence
  Synthetic
uacugcugucuuugugccuggg

SEQ ID NO: 593162 - RNA, 23 nt, Artificial Sequence
  Synthetic
uuacugcugucuuugugccuggg

SEQ ID NO: 593163 - RNA, 24 nt, Artificial Sequence
  Synthetic
cuuacugcugucuuugugccuggg

SEQ ID NO: 593164 - RNA, 18 nt, Artificial Sequence
  Synthetic
cucuaaagaaauccuggg

SEQ ID NO: 593165 - RNA, 19 nt, Artificial Sequence
  Synthetic
gcucuaaagaaauccuggg

SEQ ID NO: 593166 - RNA, 20 nt, Artificial Sequence
  Synthetic
ggcucuaaagaaauccuggg

SEQ ID NO: 593167 - RNA, 21 nt, Artificial Sequence
  Synthetic
aggcucuaaagaaauccuggg

SEQ ID NO: 593168 - RNA, 22 nt, Artificial Sequence
  Synthetic
aaggcucuaaagaaauccuggg

SEQ ID NO: 593169 - RNA, 23 nt, Artificial Sequence
  Synthetic
aaaggcucuaaagaaauccuggg

SEQ ID NO: 593170 - RNA, 24 nt, Artificial Sequence
  Synthetic
caaaggcucuaaagaaauccuggg

SEQ ID NO: 593171 - RNA, 18 nt, Artificial Sequence
  Synthetic
uuccgcuaggguccuggg

SEQ ID NO: 593172 - RNA, 19 nt, Artificial Sequence
  Synthetic
uuuccgcuaggguccuggg

SEQ ID NO: 593173 - RNA, 20 nt, Artificial Sequence
  Synthetic
cuuuccgcuaggguccuggg

SEQ ID NO: 593174 - RNA, 21 nt, Artificial Sequence
  Synthetic
ucuuuccgcuaggguccuggg

SEQ ID NO: 593175 - RNA, 22 nt, Artificial Sequence
  Synthetic
cucuuuccgcuaggguccuggg

SEQ ID NO: 593176 - RNA, 23 nt, Artificial Sequence
  Synthetic
gcucuuuccgcuaggguccuggg

SEQ ID NO: 593177 - RNA, 24 nt, Artificial Sequence
  Synthetic
ugcucuuuccgcuaggguccuggg

SEQ ID NO: 593178 - RNA, 18 nt, Artificial Sequence
  Synthetic
gccuacugauguccuggg

SEQ ID NO: 593179 - RNA, 19 nt, Artificial Sequence
  Synthetic
ugccuacugauguccuggg

SEQ ID NO: 593180 - RNA, 20 nt, Artificial Sequence
  Synthetic
cugccuacugauguccuggg

SEQ ID NO: 593181 - RNA, 21 nt, Artificial Sequence
  Synthetic
ucugccuacugauguccuggg

SEQ ID NO: 593182 - RNA, 22 nt, Artificial Sequence
  Synthetic
aucugccuacugauguccuggg

SEQ ID NO: 593183 - RNA, 23 nt, Artificial Sequence
  Synthetic
caucugccuacugauguccuggg

SEQ ID NO: 593184 - RNA, 24 nt, Artificial Sequence
  Synthetic
acaucugccuacugauguccuggg

SEQ ID NO: 593185 - RNA, 18 nt, Artificial Sequence
  Synthetic
gcaaaaugguuuccuggg

SEQ ID NO: 593186 - RNA, 19 nt, Artificial Sequence
  Synthetic
ggcaaaaugguuuccuggg

SEQ ID NO: 593187 - RNA, 20 nt, Artificial Sequence
  Synthetic
aggcaaaaugguuuccuggg

SEQ ID NO: 593188 - RNA, 21 nt, Artificial Sequence
  Synthetic
aaggcaaaaugguuuccuggg

SEQ ID NO: 593189 - RNA, 22 nt, Artificial Sequence
  Synthetic
gaaggcaaaaugguuuccuggg

SEQ ID NO: 593190 - RNA, 23 nt, Artificial Sequence
  Synthetic
ggaaggcaaaaugguuuccuggg

SEQ ID NO: 593191 - RNA, 24 nt, Artificial Sequence
  Synthetic
aggaaggcaaaaugguuuccuggg

SEQ ID NO: 593192 - RNA, 18 nt, Artificial Sequence
  Synthetic
gagaggagcggagcuggg

SEQ ID NO: 593193 - RNA, 19 nt, Artificial Sequence
  Synthetic
ggagaggagcggagcuggg

SEQ ID NO: 593194 - RNA, 20 nt, Artificial Sequence
  Synthetic
gggagaggagcggagcuggg

SEQ ID NO: 593195 - RNA, 21 nt, Artificial Sequence
  Synthetic
ugggagaggagcggagcuggg

SEQ ID NO: 593196 - RNA, 22 nt, Artificial Sequence
  Synthetic
uugggagaggagcggagcuggg

SEQ ID NO: 593197 - RNA, 23 nt, Artificial Sequence
  Synthetic
guugggagaggagcggagcuggg

SEQ ID NO: 593198 - RNA, 24 nt, Artificial Sequence
  Synthetic
gguugggagaggagcggagcuggg

SEQ ID NO: 593199 - RNA, 18 nt, Artificial Sequence
  Synthetic
agagaagaaugagcuggg

SEQ ID NO: 593200 - RNA, 19 nt, Artificial Sequence
  Synthetic
aagagaagaaugagcuggg

SEQ ID NO: 593201 - RNA, 20 nt, Artificial Sequence
  Synthetic
gaagagaagaaugagcuggg

SEQ ID NO: 593202 - RNA, 21 nt, Artificial Sequence
  Synthetic
agaagagaagaaugagcuggg

SEQ ID NO: 593203 - RNA, 22 nt, Artificial Sequence
  Synthetic
aagaagagaagaaugagcuggg

SEQ ID NO: 593204 - RNA, 23 nt, Artificial Sequence
  Synthetic
aaagaagagaagaaugagcuggg

SEQ ID NO: 593205 - RNA, 24 nt, Artificial Sequence
  Synthetic
gaaagaagagaagaaugagcuggg

SEQ ID NO: 593206 - RNA, 18 nt, Artificial Sequence
  Synthetic
caacacaguauagcuggg

SEQ ID NO: 593207 - RNA, 19 nt, Artificial Sequence
  Synthetic
gcaacacaguauagcuggg

SEQ ID NO: 593208 - RNA, 20 nt, Artificial Sequence
  Synthetic
agcaacacaguauagcuggg

SEQ ID NO: 593209 - RNA, 21 nt, Artificial Sequence
  Synthetic
uagcaacacaguauagcuggg

SEQ ID NO: 593210 - RNA, 22 nt, Artificial Sequence
  Synthetic
cuagcaacacaguauagcuggg

SEQ ID NO: 593211 - RNA, 23 nt, Artificial Sequence
  Synthetic
ucuagcaacacaguauagcuggg

SEQ ID NO: 593212 - RNA, 24 nt, Artificial Sequence
  Synthetic
cucuagcaacacaguauagcuggg

SEQ ID NO: 593213 - RNA, 18 nt, Artificial Sequence
  Synthetic
cagcauuuaguagcuggg

SEQ ID NO: 593214 - RNA, 19 nt, Artificial Sequence
  Synthetic
acagcauuuaguagcuggg

SEQ ID NO: 593215 - RNA, 20 nt, Artificial Sequence
  Synthetic
gacagcauuuaguagcuggg

SEQ ID NO: 593216 - RNA, 21 nt, Artificial Sequence
  Synthetic
ggacagcauuuaguagcuggg

SEQ ID NO: 593217 - RNA, 22 nt, Artificial Sequence
  Synthetic
uggacagcauuuaguagcuggg

SEQ ID NO: 593218 - RNA, 23 nt, Artificial Sequence
  Synthetic
guggacagcauuuaguagcuggg

SEQ ID NO: 593219 - RNA, 24 nt, Artificial Sequence
  Synthetic
aguggacagcauuuaguagcuggg

SEQ ID NO: 593220 - RNA, 18 nt, Artificial Sequence
  Synthetic
aagcgggggaaggcuggg

SEQ ID NO: 593221 - RNA, 19 nt, Artificial Sequence
  Synthetic
gaagcgggggaaggcuggg

SEQ ID NO: 593222 - RNA, 20 nt, Artificial Sequence
  Synthetic
agaagcgggggaaggcuggg

SEQ ID NO: 593223 - RNA, 21 nt, Artificial Sequence
  Synthetic
gagaagcgggggaaggcuggg

SEQ ID NO: 593224 - RNA, 22 nt, Artificial Sequence
  Synthetic
agagaagcgggggaaggcuggg

SEQ ID NO: 593225 - RNA, 23 nt, Artificial Sequence
  Synthetic
gagagaagcgggggaaggcuggg

SEQ ID NO: 593226 - RNA, 24 nt, Artificial Sequence
  Synthetic
agagagaagcgggggaaggcuggg

SEQ ID NO: 593227 - RNA, 18 nt, Artificial Sequence
  Synthetic
acaaccagagaggcuggg

SEQ ID NO: 593228 - RNA, 19 nt, Artificial Sequence
  Synthetic
gacaaccagagaggcuggg

SEQ ID NO: 593229 - RNA, 20 nt, Artificial Sequence
  Synthetic
ugacaaccagagaggcuggg

SEQ ID NO: 593230 - RNA, 21 nt, Artificial Sequence
  Synthetic
gugacaaccagagaggcuggg

SEQ ID NO: 593231 - RNA, 22 nt, Artificial Sequence
  Synthetic
ugugacaaccagagaggcuggg

SEQ ID NO: 593232 - RNA, 23 nt, Artificial Sequence
  Synthetic
augugacaaccagagaggcuggg

SEQ ID NO: 593233 - RNA, 24 nt, Artificial Sequence
  Synthetic
gaugugacaaccagagaggcuggg

SEQ ID NO: 593234 - RNA, 18 nt, Artificial Sequence
  Synthetic
ugguuuccaggggcuggg

SEQ ID NO: 593235 - RNA, 19 nt, Artificial Sequence
  Synthetic
gugguuuccaggggcuggg

SEQ ID NO: 593236 - RNA, 20 nt, Artificial Sequence
  Synthetic
agugguuuccaggggcuggg

SEQ ID NO: 593237 - RNA, 21 nt, Artificial Sequence
  Synthetic
cagugguuuccaggggcuggg

SEQ ID NO: 593238 - RNA, 22 nt, Artificial Sequence
  Synthetic
ucagugguuuccaggggcuggg

SEQ ID NO: 593239 - RNA, 23 nt, Artificial Sequence
  Synthetic
aucagugguuuccaggggcuggg

SEQ ID NO: 593240 - RNA, 24 nt, Artificial Sequence
  Synthetic
uaucagugguuuccaggggcuggg

SEQ ID NO: 593241 - RNA, 18 nt, Artificial Sequence
  Synthetic
gugggguggggggcuggg

SEQ ID NO: 593242 - RNA, 19 nt, Artificial Sequence
  Synthetic
cgugggguggggggcuggg

SEQ ID NO: 593243 - RNA, 20 nt, Artificial Sequence
  Synthetic
ucgugggguggggggcuggg

SEQ ID NO: 593244 - RNA, 21 nt, Artificial Sequence
  Synthetic
gucgugggguggggggcuggg

SEQ ID NO: 593245 - RNA, 22 nt, Artificial Sequence
  Synthetic
ugucgugggguggggggcuggg

SEQ ID NO: 593246 - RNA, 23 nt, Artificial Sequence
  Synthetic
cugucgugggguggggggcuggg

SEQ ID NO: 593247 - RNA, 24 nt, Artificial Sequence
  Synthetic
ccugucgugggguggggggcuggg

SEQ ID NO: 593248 - RNA, 18 nt, Artificial Sequence
  Synthetic
uucaccauguuggcuggg

SEQ ID NO: 593249 - RNA, 19 nt, Artificial Sequence
  Synthetic
uuucaccauguuggcuggg

SEQ ID NO: 593250 - RNA, 20 nt, Artificial Sequence
  Synthetic
guuucaccauguuggcuggg

SEQ ID NO: 593251 - RNA, 21 nt, Artificial Sequence
  Synthetic
gguuucaccauguuggcuggg

SEQ ID NO: 593252 - RNA, 22 nt, Artificial Sequence
  Synthetic
ggguuucaccauguuggcuggg

SEQ ID NO: 593253 - RNA, 23 nt, Artificial Sequence
  Synthetic
gggguuucaccauguuggcuggg

SEQ ID NO: 593254 - RNA, 24 nt, Artificial Sequence
  Synthetic
ugggguuucaccauguuggcuggg

SEQ ID NO: 593255 - RNA, 18 nt, Artificial Sequence
  Synthetic
uuguaccagcaugcuggg

SEQ ID NO: 593256 - RNA, 19 nt, Artificial Sequence
  Synthetic
auuguaccagcaugcuggg

SEQ ID NO: 593257 - RNA, 20 nt, Artificial Sequence
  Synthetic
aauuguaccagcaugcuggg

SEQ ID NO: 593258 - RNA, 21 nt, Artificial Sequence
  Synthetic
aaauuguaccagcaugcuggg

SEQ ID NO: 593259 - RNA, 22 nt, Artificial Sequence
  Synthetic
caaauuguaccagcaugcuggg

SEQ ID NO: 593260 - RNA, 23 nt, Artificial Sequence
  Synthetic
acaaauuguaccagcaugcuggg

SEQ ID NO: 593261 - RNA, 24 nt, Artificial Sequence
  Synthetic
uacaaauuguaccagcaugcuggg

SEQ ID NO: 593262 - RNA, 18 nt, Artificial Sequence
  Synthetic
ucacucacgucugcuggg

SEQ ID NO: 593263 - RNA, 19 nt, Artificial Sequence
  Synthetic
cucacucacgucugcuggg

SEQ ID NO: 593264 - RNA, 20 nt, Artificial Sequence
  Synthetic
acucacucacgucugcuggg

SEQ ID NO: 593265 - RNA, 21 nt, Artificial Sequence
  Synthetic
cacucacucacgucugcuggg

SEQ ID NO: 593266 - RNA, 22 nt, Artificial Sequence
  Synthetic
ccacucacucacgucugcuggg

SEQ ID NO: 593267 - RNA, 23 nt, Artificial Sequence
  Synthetic
accacucacucacgucugcuggg

SEQ ID NO: 593268 - RNA, 24 nt, Artificial Sequence
  Synthetic
aaccacucacucacgucugcuggg

SEQ ID NO: 593269 - RNA, 18 nt, Artificial Sequence
  Synthetic
ccugcccaccuugcuggg

SEQ ID NO: 593270 - RNA, 19 nt, Artificial Sequence
  Synthetic
gccugcccaccuugcuggg

SEQ ID NO: 593271 - RNA, 20 nt, Artificial Sequence
  Synthetic
ugccugcccaccuugcuggg

SEQ ID NO: 593272 - RNA, 21 nt, Artificial Sequence
  Synthetic
cugccugcccaccuugcuggg

SEQ ID NO: 593273 - RNA, 22 nt, Artificial Sequence
  Synthetic
acugccugcccaccuugcuggg

SEQ ID NO: 593274 - RNA, 23 nt, Artificial Sequence
  Synthetic
uacugccugcccaccuugcuggg

SEQ ID NO: 593275 - RNA, 24 nt, Artificial Sequence
  Synthetic
auacugccugcccaccuugcuggg

SEQ ID NO: 593276 - RNA, 18 nt, Artificial Sequence
  Synthetic
ucauuuuggguugcuggg

SEQ ID NO: 593277 - RNA, 19 nt, Artificial Sequence
  Synthetic
uucauuuuggguugcuggg

SEQ ID NO: 593278 - RNA, 20 nt, Artificial Sequence
  Synthetic
auucauuuuggguugcuggg

SEQ ID NO: 593279 - RNA, 21 nt, Artificial Sequence
  Synthetic
aauucauuuuggguugcuggg

SEQ ID NO: 593280 - RNA, 22 nt, Artificial Sequence
  Synthetic
caauucauuuuggguugcuggg

SEQ ID NO: 593281 - RNA, 23 nt, Artificial Sequence
  Synthetic
acaauucauuuuggguugcuggg

SEQ ID NO: 593282 - RNA, 24 nt, Artificial Sequence
  Synthetic
cacaauucauuuuggguugcuggg

SEQ ID NO: 593283 - RNA, 18 nt, Artificial Sequence
  Synthetic
guuuuaaaacaaucuggg

SEQ ID NO: 593284 - RNA, 19 nt, Artificial Sequence
  Synthetic
uguuuuaaaacaaucuggg

SEQ ID NO: 593285 - RNA, 20 nt, Artificial Sequence
  Synthetic
uuguuuuaaaacaaucuggg

SEQ ID NO: 593286 - RNA, 21 nt, Artificial Sequence
  Synthetic
uuuguuuuaaaacaaucuggg

SEQ ID NO: 593287 - RNA, 22 nt, Artificial Sequence
  Synthetic
auuuguuuuaaaacaaucuggg

SEQ ID NO: 593288 - RNA, 23 nt, Artificial Sequence
  Synthetic
uauuuguuuuaaaacaaucuggg

SEQ ID NO: 593289 - RNA, 24 nt, Artificial Sequence
  Synthetic
auauuuguuuuaaaacaaucuggg

SEQ ID NO: 593290 - RNA, 18 nt, Artificial Sequence
  Synthetic
auuuuauugccaucuggg

SEQ ID NO: 593291 - RNA, 19 nt, Artificial Sequence
  Synthetic
cauuuuauugccaucuggg

SEQ ID NO: 593292 - RNA, 20 nt, Artificial Sequence
  Synthetic
acauuuuauugccaucuggg

SEQ ID NO: 593293 - RNA, 21 nt, Artificial Sequence
  Synthetic
uacauuuuauugccaucuggg

SEQ ID NO: 593294 - RNA, 22 nt, Artificial Sequence
  Synthetic
cuacauuuuauugccaucuggg

SEQ ID NO: 593295 - RNA, 23 nt, Artificial Sequence
  Synthetic
ccuacauuuuauugccaucuggg

SEQ ID NO: 593296 - RNA, 24 nt, Artificial Sequence
  Synthetic
cccuacauuuuauugccaucuggg

SEQ ID NO: 593297 - RNA, 18 nt, Artificial Sequence
  Synthetic
gacuuaaguccaucuggg

SEQ ID NO: 593298 - RNA, 19 nt, Artificial Sequence
  Synthetic
ggacuuaaguccaucuggg

SEQ ID NO: 593299 - RNA, 20 nt, Artificial Sequence
  Synthetic
aggacuuaaguccaucuggg

SEQ ID NO: 593300 - RNA, 21 nt, Artificial Sequence
  Synthetic
aaggacuuaaguccaucuggg

SEQ ID NO: 593301 - RNA, 22 nt, Artificial Sequence
  Synthetic
aaaggacuuaaguccaucuggg

SEQ ID NO: 593302 - RNA, 23 nt, Artificial Sequence
  Synthetic
gaaaggacuuaaguccaucuggg

SEQ ID NO: 593303 - RNA, 24 nt, Artificial Sequence
  Synthetic
ugaaaggacuuaaguccaucuggg

SEQ ID NO: 593304 - RNA, 18 nt, Artificial Sequence
  Synthetic
aaauugacaucaucuggg

SEQ ID NO: 593305 - RNA, 19 nt, Artificial Sequence
  Synthetic
aaaauugacaucaucuggg

SEQ ID NO: 593306 - RNA, 20 nt, Artificial Sequence
  Synthetic
caaaauugacaucaucuggg

SEQ ID NO: 593307 - RNA, 21 nt, Artificial Sequence
  Synthetic
ucaaaauugacaucaucuggg

SEQ ID NO: 593308 - RNA, 22 nt, Artificial Sequence
  Synthetic
uucaaaauugacaucaucuggg

SEQ ID NO: 593309 - RNA, 23 nt, Artificial Sequence
  Synthetic
uuucaaaauugacaucaucuggg

SEQ ID NO: 593310 - RNA, 24 nt, Artificial Sequence
  Synthetic
cuuucaaaauugacaucaucuggg

SEQ ID NO: 593311 - RNA, 18 nt, Artificial Sequence
  Synthetic
caacuagaaaacucuggg

SEQ ID NO: 593312 - RNA, 19 nt, Artificial Sequence
  Synthetic
ucaacuagaaaacucuggg

SEQ ID NO: 593313 - RNA, 20 nt, Artificial Sequence
  Synthetic
aucaacuagaaaacucuggg

SEQ ID NO: 593314 - RNA, 21 nt, Artificial Sequence
  Synthetic
aaucaacuagaaaacucuggg

SEQ ID NO: 593315 - RNA, 22 nt, Artificial Sequence
  Synthetic
uaaucaacuagaaaacucuggg

SEQ ID NO: 593316 - RNA, 23 nt, Artificial Sequence
  Synthetic
uuaaucaacuagaaaacucuggg

SEQ ID NO: 593317 - RNA, 24 nt, Artificial Sequence
  Synthetic
uuuaaucaacuagaaaacucuggg

SEQ ID NO: 593318 - RNA, 18 nt, Artificial Sequence
  Synthetic
guuacuuuuggcucuggg

SEQ ID NO: 593319 - RNA, 19 nt, Artificial Sequence
  Synthetic
gguuacuuuuggcucuggg

SEQ ID NO: 593320 - RNA, 20 nt, Artificial Sequence
  Synthetic
ugguuacuuuuggcucuggg

SEQ ID NO: 593321 - RNA, 21 nt, Artificial Sequence
  Synthetic
augguuacuuuuggcucuggg

SEQ ID NO: 593322 - RNA, 22 nt, Artificial Sequence
  Synthetic
aaugguuacuuuuggcucuggg

SEQ ID NO: 593323 - RNA, 23 nt, Artificial Sequence
  Synthetic
uaaugguuacuuuuggcucuggg

SEQ ID NO: 593324 - RNA, 24 nt, Artificial Sequence
  Synthetic
auaaugguuacuuuuggcucuggg

SEQ ID NO: 593325 - RNA, 18 nt, Artificial Sequence
  Synthetic
augaagauugucucuggg

SEQ ID NO: 593326 - RNA, 19 nt, Artificial Sequence
  Synthetic
caugaagauugucucuggg

SEQ ID NO: 593327 - RNA, 20 nt, Artificial Sequence
  Synthetic
gcaugaagauugucucuggg

SEQ ID NO: 593328 - RNA, 21 nt, Artificial Sequence
  Synthetic
ugcaugaagauugucucuggg

SEQ ID NO: 593329 - RNA, 22 nt, Artificial Sequence
  Synthetic
augcaugaagauugucucuggg

SEQ ID NO: 593330 - RNA, 23 nt, Artificial Sequence
  Synthetic
gaugcaugaagauugucucuggg

SEQ ID NO: 593331 - RNA, 24 nt, Artificial Sequence
  Synthetic
ggaugcaugaagauugucucuggg

SEQ ID NO: 593332 - RNA, 18 nt, Artificial Sequence
  Synthetic
aaaagcauagugucuggg

SEQ ID NO: 593333 - RNA, 19 nt, Artificial Sequence
  Synthetic
gaaaagcauagugucuggg

SEQ ID NO: 593334 - RNA, 20 nt, Artificial Sequence
  Synthetic
ggaaaagcauagugucuggg

SEQ ID NO: 593335 - RNA, 21 nt, Artificial Sequence
  Synthetic
gggaaaagcauagugucuggg

SEQ ID NO: 593336 - RNA, 22 nt, Artificial Sequence
  Synthetic
ugggaaaagcauagugucuggg

SEQ ID NO: 593337 - RNA, 23 nt, Artificial Sequence
  Synthetic
gugggaaaagcauagugucuggg

SEQ ID NO: 593338 - RNA, 24 nt, Artificial Sequence
  Synthetic
ugugggaaaagcauagugucuggg

SEQ ID NO: 593339 - RNA, 18 nt, Artificial Sequence
  Synthetic
ugacaaagcccuucuggg

SEQ ID NO: 593340 - RNA, 19 nt, Artificial Sequence
  Synthetic
gugacaaagcccuucuggg

SEQ ID NO: 593341 - RNA, 20 nt, Artificial Sequence
  Synthetic
cgugacaaagcccuucuggg

SEQ ID NO: 593342 - RNA, 21 nt, Artificial Sequence
  Synthetic
acgugacaaagcccuucuggg

SEQ ID NO: 593343 - RNA, 22 nt, Artificial Sequence
  Synthetic
cacgugacaaagcccuucuggg

SEQ ID NO: 593344 - RNA, 23 nt, Artificial Sequence
  Synthetic
ccacgugacaaagcccuucuggg

SEQ ID NO: 593345 - RNA, 24 nt, Artificial Sequence
  Synthetic
accacgugacaaagcccuucuggg

SEQ ID NO: 593346 - RNA, 18 nt, Artificial Sequence
  Synthetic
auagaaaagaaaaguggg

SEQ ID NO: 593347 - RNA, 19 nt, Artificial Sequence
  Synthetic
gauagaaaagaaaaguggg

SEQ ID NO: 593348 - RNA, 20 nt, Artificial Sequence
  Synthetic
agauagaaaagaaaaguggg

SEQ ID NO: 593349 - RNA, 21 nt, Artificial Sequence
  Synthetic
aagauagaaaagaaaaguggg

SEQ ID NO: 593350 - RNA, 22 nt, Artificial Sequence
  Synthetic
uaagauagaaaagaaaaguggg

SEQ ID NO: 593351 - RNA, 23 nt, Artificial Sequence
  Synthetic
uuaagauagaaaagaaaaguggg

SEQ ID NO: 593352 - RNA, 24 nt, Artificial Sequence
  Synthetic
uuuaagauagaaaagaaaaguggg

SEQ ID NO: 593353 - RNA, 18 nt, Artificial Sequence
  Synthetic
uaguucauucaaaguggg

SEQ ID NO: 593354 - RNA, 19 nt, Artificial Sequence
  Synthetic
auaguucauucaaaguggg

SEQ ID NO: 593355 - RNA, 20 nt, Artificial Sequence
  Synthetic
aauaguucauucaaaguggg

SEQ ID NO: 593356 - RNA, 21 nt, Artificial Sequence
  Synthetic
aaauaguucauucaaaguggg

SEQ ID NO: 593357 - RNA, 22 nt, Artificial Sequence
  Synthetic
uaaauaguucauucaaaguggg

SEQ ID NO: 593358 - RNA, 23 nt, Artificial Sequence
  Synthetic
auaaauaguucauucaaaguggg

SEQ ID NO: 593359 - RNA, 24 nt, Artificial Sequence
  Synthetic
aauaaauaguucauucaaaguggg

SEQ ID NO: 593360 - RNA, 18 nt, Artificial Sequence
  Synthetic
cugaguaguagaaguggg

SEQ ID NO: 593361 - RNA, 19 nt, Artificial Sequence
  Synthetic
ucugaguaguagaaguggg

SEQ ID NO: 593362 - RNA, 20 nt, Artificial Sequence
  Synthetic
aucugaguaguagaaguggg

SEQ ID NO: 593363 - RNA, 21 nt, Artificial Sequence
  Synthetic
uaucugaguaguagaaguggg

SEQ ID NO: 593364 - RNA, 22 nt, Artificial Sequence
  Synthetic
auaucugaguaguagaaguggg

SEQ ID NO: 593365 - RNA, 23 nt, Artificial Sequence
  Synthetic
cauaucugaguaguagaaguggg

SEQ ID NO: 593366 - RNA, 24 nt, Artificial Sequence
  Synthetic
acauaucugaguaguagaaguggg

SEQ ID NO: 593367 - RNA, 18 nt, Artificial Sequence
  Synthetic
cauuugagcugaaguggg

SEQ ID NO: 593368 - RNA, 19 nt, Artificial Sequence
  Synthetic
acauuugagcugaaguggg

SEQ ID NO: 593369 - RNA, 20 nt, Artificial Sequence
  Synthetic
cacauuugagcugaaguggg

SEQ ID NO: 593370 - RNA, 21 nt, Artificial Sequence
  Synthetic
ucacauuugagcugaaguggg

SEQ ID NO: 593371 - RNA, 22 nt, Artificial Sequence
  Synthetic
uucacauuugagcugaaguggg

SEQ ID NO: 593372 - RNA, 23 nt, Artificial Sequence
  Synthetic
auucacauuugagcugaaguggg

SEQ ID NO: 593373 - RNA, 24 nt, Artificial Sequence
  Synthetic
uauucacauuugagcugaaguggg

SEQ ID NO: 593374 - RNA, 18 nt, Artificial Sequence
  Synthetic
uugggaggcugaaguggg

SEQ ID NO: 593375 - RNA, 19 nt, Artificial Sequence
  Synthetic
uuugggaggcugaaguggg

SEQ ID NO: 593376 - RNA, 20 nt, Artificial Sequence
  Synthetic
cuuugggaggcugaaguggg

SEQ ID NO: 593377 - RNA, 21 nt, Artificial Sequence
  Synthetic
acuuugggaggcugaaguggg

SEQ ID NO: 593378 - RNA, 22 nt, Artificial Sequence
  Synthetic
cacuuugggaggcugaaguggg

SEQ ID NO: 593379 - RNA, 23 nt, Artificial Sequence
  Synthetic
gcacuuugggaggcugaaguggg

SEQ ID NO: 593380 - RNA, 24 nt, Artificial Sequence
  Synthetic
agcacuuugggaggcugaaguggg

SEQ ID NO: 593381 - RNA, 18 nt, Artificial Sequence
  Synthetic
ccuuguccccacaguggg

SEQ ID NO: 593382 - RNA, 19 nt, Artificial Sequence
  Synthetic
uccuuguccccacaguggg

SEQ ID NO: 593383 - RNA, 20 nt, Artificial Sequence
  Synthetic
cuccuuguccccacaguggg

SEQ ID NO: 593384 - RNA, 21 nt, Artificial Sequence
  Synthetic
acuccuuguccccacaguggg

SEQ ID NO: 593385 - RNA, 22 nt, Artificial Sequence
  Synthetic
cacuccuuguccccacaguggg

SEQ ID NO: 593386 - RNA, 23 nt, Artificial Sequence
  Synthetic
ccacuccuuguccccacaguggg

SEQ ID NO: 593387 - RNA, 24 nt, Artificial Sequence
  Synthetic
accacuccuuguccccacaguggg

SEQ ID NO: 593388 - RNA, 18 nt, Artificial Sequence
  Synthetic
aaaguggcucucaguggg

SEQ ID NO: 593389 - RNA, 19 nt, Artificial Sequence
  Synthetic
gaaaguggcucucaguggg

SEQ ID NO: 593390 - RNA, 20 nt, Artificial Sequence
  Synthetic
ugaaaguggcucucaguggg

SEQ ID NO: 593391 - RNA, 21 nt, Artificial Sequence
  Synthetic
augaaaguggcucucaguggg

SEQ ID NO: 593392 - RNA, 22 nt, Artificial Sequence
  Synthetic
gaugaaaguggcucucaguggg

SEQ ID NO: 593393 - RNA, 23 nt, Artificial Sequence
  Synthetic
cgaugaaaguggcucucaguggg

SEQ ID NO: 593394 - RNA, 24 nt, Artificial Sequence
  Synthetic
ccgaugaaaguggcucucaguggg

SEQ ID NO: 593395 - RNA, 18 nt, Artificial Sequence
  Synthetic
uuccucuauuucaguggg

SEQ ID NO: 593396 - RNA, 19 nt, Artificial Sequence
  Synthetic
auuccucuauuucaguggg

SEQ ID NO: 593397 - RNA, 20 nt, Artificial Sequence
  Synthetic
gauuccucuauuucaguggg

SEQ ID NO: 593398 - RNA, 21 nt, Artificial Sequence
  Synthetic
ugauuccucuauuucaguggg

SEQ ID NO: 593399 - RNA, 22 nt, Artificial Sequence
  Synthetic
uugauuccucuauuucaguggg

SEQ ID NO: 593400 - RNA, 23 nt, Artificial Sequence
  Synthetic
uuugauuccucuauuucaguggg

SEQ ID NO: 593401 - RNA, 24 nt, Artificial Sequence
  Synthetic
cuuugauuccucuauuucaguggg

SEQ ID NO: 593402 - RNA, 18 nt, Artificial Sequence
  Synthetic
ugguugagaaagaguggg

SEQ ID NO: 593403 - RNA, 19 nt, Artificial Sequence
  Synthetic
gugguugagaaagaguggg

SEQ ID NO: 593404 - RNA, 20 nt, Artificial Sequence
  Synthetic
agugguugagaaagaguggg

SEQ ID NO: 593405 - RNA, 21 nt, Artificial Sequence
  Synthetic
gagugguugagaaagaguggg

SEQ ID NO: 593406 - RNA, 22 nt, Artificial Sequence
  Synthetic
agagugguugagaaagaguggg

SEQ ID NO: 593407 - RNA, 23 nt, Artificial Sequence
  Synthetic
cagagugguugagaaagaguggg

SEQ ID NO: 593408 - RNA, 24 nt, Artificial Sequence
  Synthetic
gcagagugguugagaaagaguggg

SEQ ID NO: 593409 - RNA, 18 nt, Artificial Sequence
  Synthetic
gaggacuacuagaguggg

SEQ ID NO: 593410 - RNA, 19 nt, Artificial Sequence
  Synthetic
ggaggacuacuagaguggg

SEQ ID NO: 593411 - RNA, 20 nt, Artificial Sequence
  Synthetic
cggaggacuacuagaguggg

SEQ ID NO: 593412 - RNA, 21 nt, Artificial Sequence
  Synthetic
acggaggacuacuagaguggg

SEQ ID NO: 593413 - RNA, 22 nt, Artificial Sequence
  Synthetic
aacggaggacuacuagaguggg

SEQ ID NO: 593414 - RNA, 23 nt, Artificial Sequence
  Synthetic
aaacggaggacuacuagaguggg

SEQ ID NO: 593415 - RNA, 24 nt, Artificial Sequence
  Synthetic
gaaacggaggacuacuagaguggg

SEQ ID NO: 593416 - RNA, 18 nt, Artificial Sequence
  Synthetic
agacaauucuagaguggg

SEQ ID NO: 593417 - RNA, 19 nt, Artificial Sequence
  Synthetic
aagacaauucuagaguggg

SEQ ID NO: 593418 - RNA, 20 nt, Artificial Sequence
  Synthetic
uaagacaauucuagaguggg

SEQ ID NO: 593419 - RNA, 21 nt, Artificial Sequence
  Synthetic
guaagacaauucuagaguggg

SEQ ID NO: 593420 - RNA, 22 nt, Artificial Sequence
  Synthetic
aguaagacaauucuagaguggg

SEQ ID NO: 593421 - RNA, 23 nt, Artificial Sequence
  Synthetic
aaguaagacaauucuagaguggg

SEQ ID NO: 593422 - RNA, 24 nt, Artificial Sequence
  Synthetic
aaaguaagacaauucuagaguggg

SEQ ID NO: 593423 - RNA, 18 nt, Artificial Sequence
  Synthetic
acucucccaaggaguggg

SEQ ID NO: 593424 - RNA, 19 nt, Artificial Sequence
  Synthetic
aacucucccaaggaguggg

SEQ ID NO: 593425 - RNA, 20 nt, Artificial Sequence
  Synthetic
uaacucucccaaggaguggg

SEQ ID NO: 593426 - RNA, 21 nt, Artificial Sequence
  Synthetic
uuaacucucccaaggaguggg

SEQ ID NO: 593427 - RNA, 22 nt, Artificial Sequence
  Synthetic
uuuaacucucccaaggaguggg

SEQ ID NO: 593428 - RNA, 23 nt, Artificial Sequence
  Synthetic
cuuuaacucucccaaggaguggg

SEQ ID NO: 593429 - RNA, 24 nt, Artificial Sequence
  Synthetic
ucuuuaacucucccaaggaguggg

SEQ ID NO: 593430 - RNA, 18 nt, Artificial Sequence
  Synthetic
ugggagugggggaguggg

SEQ ID NO: 593431 - RNA, 19 nt, Artificial Sequence
  Synthetic
uugggagugggggaguggg

SEQ ID NO: 593432 - RNA, 20 nt, Artificial Sequence
  Synthetic
cuugggagugggggaguggg

SEQ ID NO: 593433 - RNA, 21 nt, Artificial Sequence
  Synthetic
gcuugggagugggggaguggg

SEQ ID NO: 593434 - RNA, 22 nt, Artificial Sequence
  Synthetic
ggcuugggagugggggaguggg

SEQ ID NO: 593435 - RNA, 23 nt, Artificial Sequence
  Synthetic
gggcuugggagugggggaguggg

SEQ ID NO: 593436 - RNA, 24 nt, Artificial Sequence
  Synthetic
agggcuugggagugggggaguggg

SEQ ID NO: 593437 - RNA, 18 nt, Artificial Sequence
  Synthetic
gugaguguguggaguggg

SEQ ID NO: 593438 - RNA, 19 nt, Artificial Sequence
  Synthetic
cgugaguguguggaguggg

SEQ ID NO: 593439 - RNA, 20 nt, Artificial Sequence
  Synthetic
acgugaguguguggaguggg

SEQ ID NO: 593440 - RNA, 21 nt, Artificial Sequence
  Synthetic
aacgugaguguguggaguggg

SEQ ID NO: 593441 - RNA, 22 nt, Artificial Sequence
  Synthetic
aaacgugaguguguggaguggg

SEQ ID NO: 593442 - RNA, 23 nt, Artificial Sequence
  Synthetic
aaaacgugaguguguggaguggg

SEQ ID NO: 593443 - RNA, 24 nt, Artificial Sequence
  Synthetic
gaaaacgugaguguguggaguggg

SEQ ID NO: 593444 - RNA, 18 nt, Artificial Sequence
  Synthetic
accggggccugucguggg

SEQ ID NO: 593445 - RNA, 19 nt, Artificial Sequence
  Synthetic
caccggggccugucguggg

SEQ ID NO: 593446 - RNA, 20 nt, Artificial Sequence
  Synthetic
acaccggggccugucguggg

SEQ ID NO: 593447 - RNA, 21 nt, Artificial Sequence
  Synthetic
cacaccggggccugucguggg

SEQ ID NO: 593448 - RNA, 22 nt, Artificial Sequence
  Synthetic
acacaccggggccugucguggg

SEQ ID NO: 593449 - RNA, 23 nt, Artificial Sequence
  Synthetic
cacacaccggggccugucguggg

SEQ ID NO: 593450 - RNA, 24 nt, Artificial Sequence
  Synthetic
ucacacaccggggccugucguggg

SEQ ID NO: 593451 - RNA, 18 nt, Artificial Sequence
  Synthetic
acuggggccugucguggg

SEQ ID NO: 593452 - RNA, 19 nt, Artificial Sequence
  Synthetic
cacuggggccugucguggg

SEQ ID NO: 593453 - RNA, 20 nt, Artificial Sequence
  Synthetic
acacuggggccugucguggg

SEQ ID NO: 593454 - RNA, 21 nt, Artificial Sequence
  Synthetic
cacacuggggccugucguggg

SEQ ID NO: 593455 - RNA, 22 nt, Artificial Sequence
  Synthetic
acacacuggggccugucguggg

SEQ ID NO: 593456 - RNA, 23 nt, Artificial Sequence
  Synthetic
cacacacuggggccugucguggg

SEQ ID NO: 593457 - RNA, 24 nt, Artificial Sequence
  Synthetic
ucacacacuggggccugucguggg

SEQ ID NO: 593458 - RNA, 18 nt, Artificial Sequence
  Synthetic
uugggaggcugagguggg

SEQ ID NO: 593459 - RNA, 19 nt, Artificial Sequence
  Synthetic
cuugggaggcugagguggg

SEQ ID NO: 593460 - RNA, 20 nt, Artificial Sequence
  Synthetic
acuugggaggcugagguggg

SEQ ID NO: 593461 - RNA, 21 nt, Artificial Sequence
  Synthetic
cacuugggaggcugagguggg

SEQ ID NO: 593462 - RNA, 22 nt, Artificial Sequence
  Synthetic
ccacuugggaggcugagguggg

SEQ ID NO: 593463 - RNA, 23 nt, Artificial Sequence
  Synthetic
gccacuugggaggcugagguggg

SEQ ID NO: 593464 - RNA, 24 nt, Artificial Sequence
  Synthetic
agccacuugggaggcugagguggg

SEQ ID NO: 593465 - RNA, 18 nt, Artificial Sequence
  Synthetic
gaagggcgagaggguggg

SEQ ID NO: 593466 - RNA, 19 nt, Artificial Sequence
  Synthetic
agaagggcgagaggguggg

SEQ ID NO: 593467 - RNA, 20 nt, Artificial Sequence
  Synthetic
cagaagggcgagaggguggg

SEQ ID NO: 593468 - RNA, 21 nt, Artificial Sequence
  Synthetic
ucagaagggcgagaggguggg

SEQ ID NO: 593469 - RNA, 22 nt, Artificial Sequence
  Synthetic
cucagaagggcgagaggguggg

SEQ ID NO: 593470 - RNA, 23 nt, Artificial Sequence
  Synthetic
acucagaagggcgagaggguggg

SEQ ID NO: 593471 - RNA, 24 nt, Artificial Sequence
  Synthetic
gacucagaagggcgagaggguggg

SEQ ID NO: 593472 - RNA, 18 nt, Artificial Sequence
  Synthetic
uggaguggggaggguggg

SEQ ID NO: 593473 - RNA, 19 nt, Artificial Sequence
  Synthetic
cuggaguggggaggguggg

SEQ ID NO: 593474 - RNA, 20 nt, Artificial Sequence
  Synthetic
acuggaguggggaggguggg

SEQ ID NO: 593475 - RNA, 21 nt, Artificial Sequence
  Synthetic
uacuggaguggggaggguggg

SEQ ID NO: 593476 - RNA, 22 nt, Artificial Sequence
  Synthetic
cuacuggaguggggaggguggg

SEQ ID NO: 593477 - RNA, 23 nt, Artificial Sequence
  Synthetic
ccuacuggaguggggaggguggg

SEQ ID NO: 593478 - RNA, 24 nt, Artificial Sequence
  Synthetic
gccuacuggaguggggaggguggg

SEQ ID NO: 593479 - RNA, 18 nt, Artificial Sequence
  Synthetic
uagaguguggaggguggg

SEQ ID NO: 593480 - RNA, 19 nt, Artificial Sequence
  Synthetic
uuagaguguggaggguggg

SEQ ID NO: 593481 - RNA, 20 nt, Artificial Sequence
  Synthetic
auuagaguguggaggguggg

SEQ ID NO: 593482 - RNA, 21 nt, Artificial Sequence
  Synthetic
uauuagaguguggaggguggg

SEQ ID NO: 593483 - RNA, 22 nt, Artificial Sequence
  Synthetic
cuauuagaguguggaggguggg

SEQ ID NO: 593484 - RNA, 23 nt, Artificial Sequence
  Synthetic
acuauuagaguguggaggguggg

SEQ ID NO: 593485 - RNA, 24 nt, Artificial Sequence
  Synthetic
gacuauuagaguguggaggguggg

SEQ ID NO: 593486 - RNA, 18 nt, Artificial Sequence
  Synthetic
acaaaugccuaggguggg

SEQ ID NO: 593487 - RNA, 19 nt, Artificial Sequence
  Synthetic
aacaaaugccuaggguggg

SEQ ID NO: 593488 - RNA, 20 nt, Artificial Sequence
  Synthetic
uaacaaaugccuaggguggg

SEQ ID NO: 593489 - RNA, 21 nt, Artificial Sequence
  Synthetic
guaacaaaugccuaggguggg

SEQ ID NO: 593490 - RNA, 22 nt, Artificial Sequence
  Synthetic
uguaacaaaugccuaggguggg

SEQ ID NO: 593491 - RNA, 23 nt, Artificial Sequence
  Synthetic
auguaacaaaugccuaggguggg

SEQ ID NO: 593492 - RNA, 24 nt, Artificial Sequence
  Synthetic
uauguaacaaaugccuaggguggg

SEQ ID NO: 593493 - RNA, 18 nt, Artificial Sequence
  Synthetic
ggcacaggaugggguggg

SEQ ID NO: 593494 - RNA, 19 nt, Artificial Sequence
  Synthetic
aggcacaggaugggguggg

SEQ ID NO: 593495 - RNA, 20 nt, Artificial Sequence
  Synthetic
uaggcacaggaugggguggg

SEQ ID NO: 593496 - RNA, 21 nt, Artificial Sequence
  Synthetic
auaggcacaggaugggguggg

SEQ ID NO: 593497 - RNA, 22 nt, Artificial Sequence
  Synthetic
uauaggcacaggaugggguggg

SEQ ID NO: 593498 - RNA, 23 nt, Artificial Sequence
  Synthetic
uuauaggcacaggaugggguggg

SEQ ID NO: 593499 - RNA, 24 nt, Artificial Sequence
  Synthetic
uuuauaggcacaggaugggguggg

SEQ ID NO: 593500 - RNA, 18 nt, Artificial Sequence
  Synthetic
ggacugcugugggguggg

SEQ ID NO: 593501 - RNA, 19 nt, Artificial Sequence
  Synthetic
gggacugcugugggguggg

SEQ ID NO: 593502 - RNA, 20 nt, Artificial Sequence
  Synthetic
ggggacugcugugggguggg

SEQ ID NO: 593503 - RNA, 21 nt, Artificial Sequence
  Synthetic
uggggacugcugugggguggg

SEQ ID NO: 593504 - RNA, 22 nt, Artificial Sequence
  Synthetic
cuggggacugcugugggguggg

SEQ ID NO: 593505 - RNA, 23 nt, Artificial Sequence
  Synthetic
ucuggggacugcugugggguggg

SEQ ID NO: 593506 - RNA, 24 nt, Artificial Sequence
  Synthetic
cucuggggacugcugugggguggg

SEQ ID NO: 593507 - RNA, 18 nt, Artificial Sequence
  Synthetic
ggccugcugugggguggg

SEQ ID NO: 593508 - RNA, 19 nt, Artificial Sequence
  Synthetic
gggccugcugugggguggg

SEQ ID NO: 593509 - RNA, 20 nt, Artificial Sequence
  Synthetic
ggggccugcugugggguggg

SEQ ID NO: 593510 - RNA, 21 nt, Artificial Sequence
  Synthetic
uggggccugcugugggguggg

SEQ ID NO: 593511 - RNA, 22 nt, Artificial Sequence
  Synthetic
cuggggccugcugugggguggg

SEQ ID NO: 593512 - RNA, 23 nt, Artificial Sequence
  Synthetic
acuggggccugcugugggguggg

SEQ ID NO: 593513 - RNA, 24 nt, Artificial Sequence
  Synthetic
cacuggggccugcugugggguggg

SEQ ID NO: 593514 - RNA, 18 nt, Artificial Sequence
  Synthetic
gaacuguugugggguggg

SEQ ID NO: 593515 - RNA, 19 nt, Artificial Sequence
  Synthetic
ggaacuguugugggguggg

SEQ ID NO: 593516 - RNA, 20 nt, Artificial Sequence
  Synthetic
gggaacuguugugggguggg

SEQ ID NO: 593517 - RNA, 21 nt, Artificial Sequence
  Synthetic
ugggaacuguugugggguggg

SEQ ID NO: 593518 - RNA, 22 nt, Artificial Sequence
  Synthetic
cugggaacuguugugggguggg

SEQ ID NO: 593519 - RNA, 23 nt, Artificial Sequence
  Synthetic
ccugggaacuguugugggguggg

SEQ ID NO: 593520 - RNA, 24 nt, Artificial Sequence
  Synthetic
cccugggaacuguugugggguggg

SEQ ID NO: 593521 - RNA, 21 nt, Artificial Sequence
  Synthetic
cggggccuguugugggguggg

SEQ ID NO: 593522 - RNA, 22 nt, Artificial Sequence
  Synthetic
ccggggccuguugugggguggg

SEQ ID NO: 593523 - RNA, 23 nt, Artificial Sequence
  Synthetic
accggggccuguugugggguggg

SEQ ID NO: 593524 - RNA, 24 nt, Artificial Sequence
  Synthetic
caccggggccuguugugggguggg

SEQ ID NO: 593525 - RNA, 18 nt, Artificial Sequence
  Synthetic
ccuuuguuguuggguggg

SEQ ID NO: 593526 - RNA, 19 nt, Artificial Sequence
  Synthetic
uccuuuguuguuggguggg

SEQ ID NO: 593527 - RNA, 20 nt, Artificial Sequence
  Synthetic
auccuuuguuguuggguggg

SEQ ID NO: 593528 - RNA, 21 nt, Artificial Sequence
  Synthetic
cauccuuuguuguuggguggg

SEQ ID NO: 593529 - RNA, 22 nt, Artificial Sequence
  Synthetic
ucauccuuuguuguuggguggg

SEQ ID NO: 593530 - RNA, 23 nt, Artificial Sequence
  Synthetic
uucauccuuuguuguuggguggg

SEQ ID NO: 593531 - RNA, 24 nt, Artificial Sequence
  Synthetic
auucauccuuuguuguuggguggg

SEQ ID NO: 593532 - RNA, 18 nt, Artificial Sequence
  Synthetic
auuggagccacugguggg

SEQ ID NO: 593533 - RNA, 19 nt, Artificial Sequence
  Synthetic
gauuggagccacugguggg

SEQ ID NO: 593534 - RNA, 20 nt, Artificial Sequence
  Synthetic
ggauuggagccacugguggg

SEQ ID NO: 593535 - RNA, 21 nt, Artificial Sequence
  Synthetic
uggauuggagccacugguggg

SEQ ID NO: 593536 - RNA, 22 nt, Artificial Sequence
  Synthetic
uuggauuggagccacugguggg

SEQ ID NO: 593537 - RNA, 23 nt, Artificial Sequence
  Synthetic
guuggauuggagccacugguggg

SEQ ID NO: 593538 - RNA, 24 nt, Artificial Sequence
  Synthetic
aguuggauuggagccacugguggg

SEQ ID NO: 593539 - RNA, 18 nt, Artificial Sequence
  Synthetic
gcagaacagucugguggg

SEQ ID NO: 593540 - RNA, 19 nt, Artificial Sequence
  Synthetic
ggcagaacagucugguggg

SEQ ID NO: 593541 - RNA, 20 nt, Artificial Sequence
  Synthetic
aggcagaacagucugguggg

SEQ ID NO: 593542 - RNA, 21 nt, Artificial Sequence
  Synthetic
uaggcagaacagucugguggg

SEQ ID NO: 593543 - RNA, 22 nt, Artificial Sequence
  Synthetic
guaggcagaacagucugguggg

SEQ ID NO: 593544 - RNA, 23 nt, Artificial Sequence
  Synthetic
uguaggcagaacagucugguggg

SEQ ID NO: 593545 - RNA, 24 nt, Artificial Sequence
  Synthetic
cuguaggcagaacagucugguggg

SEQ ID NO: 593546 - RNA, 18 nt, Artificial Sequence
  Synthetic
uuggggggacgugguggg

SEQ ID NO: 593547 - RNA, 19 nt, Artificial Sequence
  Synthetic
uuuggggggacgugguggg

SEQ ID NO: 593548 - RNA, 20 nt, Artificial Sequence
  Synthetic
guuuggggggacgugguggg

SEQ ID NO: 593549 - RNA, 21 nt, Artificial Sequence
  Synthetic
gguuuggggggacgugguggg

SEQ ID NO: 593550 - RNA, 22 nt, Artificial Sequence
  Synthetic
agguuuggggggacgugguggg

SEQ ID NO: 593551 - RNA, 23 nt, Artificial Sequence
  Synthetic
cagguuuggggggacgugguggg

SEQ ID NO: 593552 - RNA, 24 nt, Artificial Sequence
  Synthetic
acagguuuggggggacgugguggg

SEQ ID NO: 593553 - RNA, 18 nt, Artificial Sequence
  Synthetic
auacugauuggugguggg

SEQ ID NO: 593554 - RNA, 19 nt, Artificial Sequence
  Synthetic
aauacugauuggugguggg

SEQ ID NO: 593555 - RNA, 20 nt, Artificial Sequence
  Synthetic
caauacugauuggugguggg

SEQ ID NO: 593556 - RNA, 21 nt, Artificial Sequence
  Synthetic
acaauacugauuggugguggg

SEQ ID NO: 593557 - RNA, 22 nt, Artificial Sequence
  Synthetic
gacaauacugauuggugguggg

SEQ ID NO: 593558 - RNA, 23 nt, Artificial Sequence
  Synthetic
ugacaauacugauuggugguggg

SEQ ID NO: 593559 - RNA, 24 nt, Artificial Sequence
  Synthetic
cugacaauacugauuggugguggg

SEQ ID NO: 593560 - RNA, 18 nt, Artificial Sequence
  Synthetic
agauuggggguugguggg

SEQ ID NO: 593561 - RNA, 19 nt, Artificial Sequence
  Synthetic
aagauuggggguugguggg

SEQ ID NO: 593562 - RNA, 20 nt, Artificial Sequence
  Synthetic
caagauuggggguugguggg

SEQ ID NO: 593563 - RNA, 21 nt, Artificial Sequence
  Synthetic
ucaagauuggggguugguggg

SEQ ID NO: 593564 - RNA, 22 nt, Artificial Sequence
  Synthetic
uucaagauuggggguugguggg

SEQ ID NO: 593565 - RNA, 23 nt, Artificial Sequence
  Synthetic
uuucaagauuggggguugguggg

SEQ ID NO: 593566 - RNA, 24 nt, Artificial Sequence
  Synthetic
cuuucaagauuggggguugguggg

SEQ ID NO: 593567 - RNA, 18 nt, Artificial Sequence
  Synthetic
agaaacauaaaauguggg

SEQ ID NO: 593568 - RNA, 19 nt, Artificial Sequence
  Synthetic
uagaaacauaaaauguggg

SEQ ID NO: 593569 - RNA, 20 nt, Artificial Sequence
  Synthetic
uuagaaacauaaaauguggg

SEQ ID NO: 593570 - RNA, 21 nt, Artificial Sequence
  Synthetic
guuagaaacauaaaauguggg

SEQ ID NO: 593571 - RNA, 22 nt, Artificial Sequence
  Synthetic
uguuagaaacauaaaauguggg

SEQ ID NO: 593572 - RNA, 23 nt, Artificial Sequence
  Synthetic
auguuagaaacauaaaauguggg

SEQ ID NO: 593573 - RNA, 24 nt, Artificial Sequence
  Synthetic
gauguuagaaacauaaaauguggg

SEQ ID NO: 593574 - RNA, 18 nt, Artificial Sequence
  Synthetic
aaaacuugaacauguggg

SEQ ID NO: 593575 - RNA, 19 nt, Artificial Sequence
  Synthetic
aaaaacuugaacauguggg

SEQ ID NO: 593576 - RNA, 20 nt, Artificial Sequence
  Synthetic
gaaaaacuugaacauguggg

SEQ ID NO: 593577 - RNA, 21 nt, Artificial Sequence
  Synthetic
ggaaaaacuugaacauguggg

SEQ ID NO: 593578 - RNA, 22 nt, Artificial Sequence
  Synthetic
gggaaaaacuugaacauguggg

SEQ ID NO: 593579 - RNA, 23 nt, Artificial Sequence
  Synthetic
ugggaaaaacuugaacauguggg

SEQ ID NO: 593580 - RNA, 24 nt, Artificial Sequence
  Synthetic
gugggaaaaacuugaacauguggg

SEQ ID NO: 593581 - RNA, 18 nt, Artificial Sequence
  Synthetic
cucacucugucauguggg

SEQ ID NO: 593582 - RNA, 19 nt, Artificial Sequence
  Synthetic
ucucacucugucauguggg

SEQ ID NO: 593583 - RNA, 20 nt, Artificial Sequence
  Synthetic
gucucacucugucauguggg

SEQ ID NO: 593584 - RNA, 21 nt, Artificial Sequence
  Synthetic
ggucucacucugucauguggg

SEQ ID NO: 593585 - RNA, 22 nt, Artificial Sequence
  Synthetic
gggucucacucugucauguggg

SEQ ID NO: 593586 - RNA, 23 nt, Artificial Sequence
  Synthetic
agggucucacucugucauguggg

SEQ ID NO: 593587 - RNA, 24 nt, Artificial Sequence
  Synthetic
cagggucucacucugucauguggg

SEQ ID NO: 593588 - RNA, 18 nt, Artificial Sequence
  Synthetic
cggacuaguagauguggg

SEQ ID NO: 593589 - RNA, 19 nt, Artificial Sequence
  Synthetic
gcggacuaguagauguggg

SEQ ID NO: 593590 - RNA, 20 nt, Artificial Sequence
  Synthetic
cgcggacuaguagauguggg

SEQ ID NO: 593591 - RNA, 21 nt, Artificial Sequence
  Synthetic
ccgcggacuaguagauguggg

SEQ ID NO: 593592 - RNA, 22 nt, Artificial Sequence
  Synthetic
accgcggacuaguagauguggg

SEQ ID NO: 593593 - RNA, 23 nt, Artificial Sequence
  Synthetic
uaccgcggacuaguagauguggg

SEQ ID NO: 593594 - RNA, 24 nt, Artificial Sequence
  Synthetic
auaccgcggacuaguagauguggg

SEQ ID NO: 593595 - RNA, 18 nt, Artificial Sequence
  Synthetic
caggcguguggauguggg

SEQ ID NO: 593596 - RNA, 19 nt, Artificial Sequence
  Synthetic
ccaggcguguggauguggg

SEQ ID NO: 593597 - RNA, 20 nt, Artificial Sequence
  Synthetic
gccaggcguguggauguggg

SEQ ID NO: 593598 - RNA, 21 nt, Artificial Sequence
  Synthetic
agccaggcguguggauguggg

SEQ ID NO: 593599 - RNA, 22 nt, Artificial Sequence
  Synthetic
uagccaggcguguggauguggg

SEQ ID NO: 593600 - RNA, 23 nt, Artificial Sequence
  Synthetic
guagccaggcguguggauguggg

SEQ ID NO: 593601 - RNA, 24 nt, Artificial Sequence
  Synthetic
aguagccaggcguguggauguggg

SEQ ID NO: 593602 - RNA, 18 nt, Artificial Sequence
  Synthetic
ucuggggacugcuguggg

SEQ ID NO: 593603 - RNA, 19 nt, Artificial Sequence
  Synthetic
cucuggggacugcuguggg

SEQ ID NO: 593604 - RNA, 20 nt, Artificial Sequence
  Synthetic
acucuggggacugcuguggg

SEQ ID NO: 593605 - RNA, 21 nt, Artificial Sequence
  Synthetic
cacucuggggacugcuguggg

SEQ ID NO: 593606 - RNA, 22 nt, Artificial Sequence
  Synthetic
acacucuggggacugcuguggg

SEQ ID NO: 593607 - RNA, 23 nt, Artificial Sequence
  Synthetic
cacacucuggggacugcuguggg

SEQ ID NO: 593608 - RNA, 24 nt, Artificial Sequence
  Synthetic
ucacacucuggggacugcuguggg

SEQ ID NO: 593609 - RNA, 18 nt, Artificial Sequence
  Synthetic
gugaaauacugcuguggg

SEQ ID NO: 593610 - RNA, 19 nt, Artificial Sequence
  Synthetic
agugaaauacugcuguggg

SEQ ID NO: 593611 - RNA, 20 nt, Artificial Sequence
  Synthetic
aagugaaauacugcuguggg

SEQ ID NO: 593612 - RNA, 21 nt, Artificial Sequence
  Synthetic
uaagugaaauacugcuguggg

SEQ ID NO: 593613 - RNA, 22 nt, Artificial Sequence
  Synthetic
guaagugaaauacugcuguggg

SEQ ID NO: 593614 - RNA, 23 nt, Artificial Sequence
  Synthetic
uguaagugaaauacugcuguggg

SEQ ID NO: 593615 - RNA, 24 nt, Artificial Sequence
  Synthetic
uuguaagugaaauacugcuguggg

SEQ ID NO: 593616 - RNA, 18 nt, Artificial Sequence
  Synthetic
acuggggccugcuguggg

SEQ ID NO: 593617 - RNA, 19 nt, Artificial Sequence
  Synthetic
cacuggggccugcuguggg

SEQ ID NO: 593618 - RNA, 20 nt, Artificial Sequence
  Synthetic
acacuggggccugcuguggg

SEQ ID NO: 593619 - RNA, 21 nt, Artificial Sequence
  Synthetic
cacacuggggccugcuguggg

SEQ ID NO: 593620 - RNA, 22 nt, Artificial Sequence
  Synthetic
acacacuggggccugcuguggg

SEQ ID NO: 593621 - RNA, 23 nt, Artificial Sequence
  Synthetic
cacacacuggggccugcuguggg

SEQ ID NO: 593622 - RNA, 24 nt, Artificial Sequence
  Synthetic
ucacacacuggggccugcuguggg

SEQ ID NO: 593623 - RNA, 18 nt, Artificial Sequence
  Synthetic
aguuuguauuucuguggg

SEQ ID NO: 593624 - RNA, 19 nt, Artificial Sequence
  Synthetic
uaguuuguauuucuguggg

SEQ ID NO: 593625 - RNA, 20 nt, Artificial Sequence
  Synthetic
guaguuuguauuucuguggg

SEQ ID NO: 593626 - RNA, 21 nt, Artificial Sequence
  Synthetic
gguaguuuguauuucuguggg

SEQ ID NO: 593627 - RNA, 22 nt, Artificial Sequence
  Synthetic
ugguaguuuguauuucuguggg

SEQ ID NO: 593628 - RNA, 23 nt, Artificial Sequence
  Synthetic
augguaguuuguauuucuguggg

SEQ ID NO: 593629 - RNA, 24 nt, Artificial Sequence
  Synthetic
gaugguaguuuguauuucuguggg

SEQ ID NO: 593630 - RNA, 18 nt, Artificial Sequence
  Synthetic
auggaaucuggguguggg

SEQ ID NO: 593631 - RNA, 19 nt, Artificial Sequence
  Synthetic
gauggaaucuggguguggg

SEQ ID NO: 593632 - RNA, 20 nt, Artificial Sequence
  Synthetic
ugauggaaucuggguguggg

SEQ ID NO: 593633 - RNA, 21 nt, Artificial Sequence
  Synthetic
augauggaaucuggguguggg

SEQ ID NO: 593634 - RNA, 22 nt, Artificial Sequence
  Synthetic
uaugauggaaucuggguguggg

SEQ ID NO: 593635 - RNA, 23 nt, Artificial Sequence
  Synthetic
guaugauggaaucuggguguggg

SEQ ID NO: 593636 - RNA, 24 nt, Artificial Sequence
  Synthetic
uguaugauggaaucuggguguggg

SEQ ID NO: 593637 - RNA, 18 nt, Artificial Sequence
  Synthetic
aguaguugaguguguggg

SEQ ID NO: 593638 - RNA, 19 nt, Artificial Sequence
  Synthetic
caguaguugaguguguggg

SEQ ID NO: 593639 - RNA, 20 nt, Artificial Sequence
  Synthetic
ccaguaguugaguguguggg

SEQ ID NO: 593640 - RNA, 21 nt, Artificial Sequence
  Synthetic
cccaguaguugaguguguggg

SEQ ID NO: 593641 - RNA, 22 nt, Artificial Sequence
  Synthetic
gcccaguaguugaguguguggg

SEQ ID NO: 593642 - RNA, 23 nt, Artificial Sequence
  Synthetic
ggcccaguaguugaguguguggg

SEQ ID NO: 593643 - RNA, 24 nt, Artificial Sequence
  Synthetic
uggcccaguaguugaguguguggg

SEQ ID NO: 593644 - RNA, 18 nt, Artificial Sequence
  Synthetic
uagaagauaguguguggg

SEQ ID NO: 593645 - RNA, 19 nt, Artificial Sequence
  Synthetic
auagaagauaguguguggg

SEQ ID NO: 593646 - RNA, 20 nt, Artificial Sequence
  Synthetic
aauagaagauaguguguggg

SEQ ID NO: 593647 - RNA, 21 nt, Artificial Sequence
  Synthetic
aaauagaagauaguguguggg

SEQ ID NO: 593648 - RNA, 22 nt, Artificial Sequence
  Synthetic
gaaauagaagauaguguguggg

SEQ ID NO: 593649 - RNA, 23 nt, Artificial Sequence
  Synthetic
ugaaauagaagauaguguguggg

SEQ ID NO: 593650 - RNA, 24 nt, Artificial Sequence
  Synthetic
gugaaauagaagauaguguguggg

SEQ ID NO: 593651 - RNA, 18 nt, Artificial Sequence
  Synthetic
guugguaucuauuguggg

SEQ ID NO: 593652 - RNA, 19 nt, Artificial Sequence
  Synthetic
aguugguaucuauuguggg

SEQ ID NO: 593653 - RNA, 20 nt, Artificial Sequence
  Synthetic
caguugguaucuauuguggg

SEQ ID NO: 593654 - RNA, 21 nt, Artificial Sequence
  Synthetic
ucaguugguaucuauuguggg

SEQ ID NO: 593655 - RNA, 22 nt, Artificial Sequence
  Synthetic
uucaguugguaucuauuguggg

SEQ ID NO: 593656 - RNA, 23 nt, Artificial Sequence
  Synthetic
auucaguugguaucuauuguggg

SEQ ID NO: 593657 - RNA, 24 nt, Artificial Sequence
  Synthetic
aauucaguugguaucuauuguggg

SEQ ID NO: 593658 - RNA, 18 nt, Artificial Sequence
  Synthetic
gauucuucggguuguggg

SEQ ID NO: 593659 - RNA, 19 nt, Artificial Sequence
  Synthetic
ggauucuucggguuguggg

SEQ ID NO: 593660 - RNA, 20 nt, Artificial Sequence
  Synthetic
aggauucuucggguuguggg

SEQ ID NO: 593661 - RNA, 21 nt, Artificial Sequence
  Synthetic
aaggauucuucggguuguggg

SEQ ID NO: 593662 - RNA, 22 nt, Artificial Sequence
  Synthetic
aaaggauucuucggguuguggg

SEQ ID NO: 593663 - RNA, 23 nt, Artificial Sequence
  Synthetic
caaaggauucuucggguuguggg

SEQ ID NO: 593664 - RNA, 24 nt, Artificial Sequence
  Synthetic
acaaaggauucuucggguuguggg

SEQ ID NO: 593665 - RNA, 18 nt, Artificial Sequence
  Synthetic
ggcgggugggguuguggg

SEQ ID NO: 593666 - RNA, 19 nt, Artificial Sequence
  Synthetic
gggcgggugggguuguggg

SEQ ID NO: 593667 - RNA, 20 nt, Artificial Sequence
  Synthetic
ggggcgggugggguuguggg

SEQ ID NO: 593668 - RNA, 21 nt, Artificial Sequence
  Synthetic
aggggcgggugggguuguggg

SEQ ID NO: 593669 - RNA, 22 nt, Artificial Sequence
  Synthetic
caggggcgggugggguuguggg

SEQ ID NO: 593670 - RNA, 23 nt, Artificial Sequence
  Synthetic
ucaggggcgggugggguuguggg

SEQ ID NO: 593671 - RNA, 24 nt, Artificial Sequence
  Synthetic
aucaggggcgggugggguuguggg

SEQ ID NO: 593672 - RNA, 18 nt, Artificial Sequence
  Synthetic
auuccuacauguuguggg

SEQ ID NO: 593673 - RNA, 19 nt, Artificial Sequence
  Synthetic
aauuccuacauguuguggg

SEQ ID NO: 593674 - RNA, 20 nt, Artificial Sequence
  Synthetic
gaauuccuacauguuguggg

SEQ ID NO: 593675 - RNA, 21 nt, Artificial Sequence
  Synthetic
ugaauuccuacauguuguggg

SEQ ID NO: 593676 - RNA, 22 nt, Artificial Sequence
  Synthetic
uugaauuccuacauguuguggg

SEQ ID NO: 593677 - RNA, 23 nt, Artificial Sequence
  Synthetic
cuugaauuccuacauguuguggg

SEQ ID NO: 593678 - RNA, 24 nt, Artificial Sequence
  Synthetic
ucuugaauuccuacauguuguggg

SEQ ID NO: 593679 - RNA, 18 nt, Artificial Sequence
  Synthetic
ccugggaacuguuguggg

SEQ ID NO: 593680 - RNA, 19 nt, Artificial Sequence
  Synthetic
cccugggaacuguuguggg

SEQ ID NO: 593681 - RNA, 20 nt, Artificial Sequence
  Synthetic
acccugggaacuguuguggg

SEQ ID NO: 593682 - RNA, 21 nt, Artificial Sequence
  Synthetic
cacccugggaacuguuguggg

SEQ ID NO: 593683 - RNA, 22 nt, Artificial Sequence
  Synthetic
acacccugggaacuguuguggg

SEQ ID NO: 593684 - RNA, 23 nt, Artificial Sequence
  Synthetic
cacacccugggaacuguuguggg

SEQ ID NO: 593685 - RNA, 24 nt, Artificial Sequence
  Synthetic
ucacacccugggaacuguuguggg

SEQ ID NO: 593686 - RNA, 21 nt, Artificial Sequence
  Synthetic
cacaccggggccuguuguggg

SEQ ID NO: 593687 - RNA, 22 nt, Artificial Sequence
  Synthetic
acacaccggggccuguuguggg

SEQ ID NO: 593688 - RNA, 23 nt, Artificial Sequence
  Synthetic
cacacaccggggccuguuguggg

SEQ ID NO: 593689 - RNA, 24 nt, Artificial Sequence
  Synthetic
ucacacaccggggccuguuguggg

SEQ ID NO: 593690 - RNA, 18 nt, Artificial Sequence
  Synthetic
auccccacguguuguggg

SEQ ID NO: 593691 - RNA, 19 nt, Artificial Sequence
  Synthetic
aauccccacguguuguggg

SEQ ID NO: 593692 - RNA, 20 nt, Artificial Sequence
  Synthetic
uaauccccacguguuguggg

SEQ ID NO: 593693 - RNA, 21 nt, Artificial Sequence
  Synthetic
auaauccccacguguuguggg

SEQ ID NO: 593694 - RNA, 22 nt, Artificial Sequence
  Synthetic
aauaauccccacguguuguggg

SEQ ID NO: 593695 - RNA, 23 nt, Artificial Sequence
  Synthetic
caauaauccccacguguuguggg

SEQ ID NO: 593696 - RNA, 24 nt, Artificial Sequence
  Synthetic
ccaauaauccccacguguuguggg

SEQ ID NO: 593697 - RNA, 18 nt, Artificial Sequence
  Synthetic
aaauguacauuuuguggg

SEQ ID NO: 593698 - RNA, 19 nt, Artificial Sequence
  Synthetic
uaaauguacauuuuguggg

SEQ ID NO: 593699 - RNA, 20 nt, Artificial Sequence
  Synthetic
auaaauguacauuuuguggg

SEQ ID NO: 593700 - RNA, 21 nt, Artificial Sequence
  Synthetic
aauaaauguacauuuuguggg

SEQ ID NO: 593701 - RNA, 22 nt, Artificial Sequence
  Synthetic
aaauaaauguacauuuuguggg

SEQ ID NO: 593702 - RNA, 23 nt, Artificial Sequence
  Synthetic
caaauaaauguacauuuuguggg

SEQ ID NO: 593703 - RNA, 24 nt, Artificial Sequence
  Synthetic
acaaauaaauguacauuuuguggg

SEQ ID NO: 593704 - RNA, 18 nt, Artificial Sequence
  Synthetic
aucugagggaaaauuggg

SEQ ID NO: 593705 - RNA, 19 nt, Artificial Sequence
  Synthetic
aaucugagggaaaauuggg

SEQ ID NO: 593706 - RNA, 20 nt, Artificial Sequence
  Synthetic
aaaucugagggaaaauuggg

SEQ ID NO: 593707 - RNA, 21 nt, Artificial Sequence
  Synthetic
aaaaucugagggaaaauuggg

SEQ ID NO: 593708 - RNA, 22 nt, Artificial Sequence
  Synthetic
gaaaaucugagggaaaauuggg

SEQ ID NO: 593709 - RNA, 23 nt, Artificial Sequence
  Synthetic
agaaaaucugagggaaaauuggg

SEQ ID NO: 593710 - RNA, 24 nt, Artificial Sequence
  Synthetic
gagaaaaucugagggaaaauuggg

SEQ ID NO: 593711 - RNA, 18 nt, Artificial Sequence
  Synthetic
acagcagaaucaauuggg

SEQ ID NO: 593712 - RNA, 19 nt, Artificial Sequence
  Synthetic
cacagcagaaucaauuggg

SEQ ID NO: 593713 - RNA, 20 nt, Artificial Sequence
  Synthetic
acacagcagaaucaauuggg

SEQ ID NO: 593714 - RNA, 21 nt, Artificial Sequence
  Synthetic
cacacagcagaaucaauuggg

SEQ ID NO: 593715 - RNA, 22 nt, Artificial Sequence
  Synthetic
gcacacagcagaaucaauuggg

SEQ ID NO: 593716 - RNA, 23 nt, Artificial Sequence
  Synthetic
agcacacagcagaaucaauuggg

SEQ ID NO: 593717 - RNA, 24 nt, Artificial Sequence
  Synthetic
gagcacacagcagaaucaauuggg

SEQ ID NO: 593718 - RNA, 18 nt, Artificial Sequence
  Synthetic
cccaagggaagaauuggg

SEQ ID NO: 593719 - RNA, 19 nt, Artificial Sequence
  Synthetic
ccccaagggaagaauuggg

SEQ ID NO: 593720 - RNA, 20 nt, Artificial Sequence
  Synthetic
accccaagggaagaauuggg

SEQ ID NO: 593721 - RNA, 21 nt, Artificial Sequence
  Synthetic
uaccccaagggaagaauuggg

SEQ ID NO: 593722 - RNA, 22 nt, Artificial Sequence
  Synthetic
cuaccccaagggaagaauuggg

SEQ ID NO: 593723 - RNA, 23 nt, Artificial Sequence
  Synthetic
ccuaccccaagggaagaauuggg

SEQ ID NO: 593724 - RNA, 24 nt, Artificial Sequence
  Synthetic
cccuaccccaagggaagaauuggg

SEQ ID NO: 593725 - RNA, 18 nt, Artificial Sequence
  Synthetic
cugcacuuuugaauuggg

SEQ ID NO: 593726 - RNA, 19 nt, Artificial Sequence
  Synthetic
ucugcacuuuugaauuggg

SEQ ID NO: 593727 - RNA, 20 nt, Artificial Sequence
  Synthetic
cucugcacuuuugaauuggg

SEQ ID NO: 593728 - RNA, 21 nt, Artificial Sequence
  Synthetic
acucugcacuuuugaauuggg

SEQ ID NO: 593729 - RNA, 22 nt, Artificial Sequence
  Synthetic
aacucugcacuuuugaauuggg

SEQ ID NO: 593730 - RNA, 23 nt, Artificial Sequence
  Synthetic
gaacucugcacuuuugaauuggg

SEQ ID NO: 593731 - RNA, 24 nt, Artificial Sequence
  Synthetic
ugaacucugcacuuuugaauuggg

SEQ ID NO: 593732 - RNA, 18 nt, Artificial Sequence
  Synthetic
uuuaauuucuucauuggg

SEQ ID NO: 593733 - RNA, 19 nt, Artificial Sequence
  Synthetic
uuuuaauuucuucauuggg

SEQ ID NO: 593734 - RNA, 20 nt, Artificial Sequence
  Synthetic
auuuuaauuucuucauuggg

SEQ ID NO: 593735 - RNA, 21 nt, Artificial Sequence
  Synthetic
cauuuuaauuucuucauuggg

SEQ ID NO: 593736 - RNA, 22 nt, Artificial Sequence
  Synthetic
acauuuuaauuucuucauuggg

SEQ ID NO: 593737 - RNA, 23 nt, Artificial Sequence
  Synthetic
gacauuuuaauuucuucauuggg

SEQ ID NO: 593738 - RNA, 24 nt, Artificial Sequence
  Synthetic
agacauuuuaauuucuucauuggg

SEQ ID NO: 593739 - RNA, 18 nt, Artificial Sequence
  Synthetic
aaaugaagugagauuggg

SEQ ID NO: 593740 - RNA, 19 nt, Artificial Sequence
  Synthetic
aaaaugaagugagauuggg

SEQ ID NO: 593741 - RNA, 20 nt, Artificial Sequence
  Synthetic
gaaaaugaagugagauuggg

SEQ ID NO: 593742 - RNA, 21 nt, Artificial Sequence
  Synthetic
ggaaaaugaagugagauuggg

SEQ ID NO: 593743 - RNA, 22 nt, Artificial Sequence
  Synthetic
gggaaaaugaagugagauuggg

SEQ ID NO: 593744 - RNA, 23 nt, Artificial Sequence
  Synthetic
agggaaaaugaagugagauuggg

SEQ ID NO: 593745 - RNA, 24 nt, Artificial Sequence
  Synthetic
aagggaaaaugaagugagauuggg

SEQ ID NO: 593746 - RNA, 18 nt, Artificial Sequence
  Synthetic
accuuacauccgauuggg

SEQ ID NO: 593747 - RNA, 19 nt, Artificial Sequence
  Synthetic
gaccuuacauccgauuggg

SEQ ID NO: 593748 - RNA, 20 nt, Artificial Sequence
  Synthetic
ggaccuuacauccgauuggg

SEQ ID NO: 593749 - RNA, 21 nt, Artificial Sequence
  Synthetic
uggaccuuacauccgauuggg

SEQ ID NO: 593750 - RNA, 22 nt, Artificial Sequence
  Synthetic
auggaccuuacauccgauuggg

SEQ ID NO: 593751 - RNA, 23 nt, Artificial Sequence
  Synthetic
cauggaccuuacauccgauuggg

SEQ ID NO: 593752 - RNA, 24 nt, Artificial Sequence
  Synthetic
ucauggaccuuacauccgauuggg

SEQ ID NO: 593753 - RNA, 18 nt, Artificial Sequence
  Synthetic
guuagccauaauauuggg

SEQ ID NO: 593754 - RNA, 19 nt, Artificial Sequence
  Synthetic
uguuagccauaauauuggg

SEQ ID NO: 593755 - RNA, 20 nt, Artificial Sequence
  Synthetic
uuguuagccauaauauuggg

SEQ ID NO: 593756 - RNA, 21 nt, Artificial Sequence
  Synthetic
auuguuagccauaauauuggg

SEQ ID NO: 593757 - RNA, 22 nt, Artificial Sequence
  Synthetic
uauuguuagccauaauauuggg

SEQ ID NO: 593758 - RNA, 23 nt, Artificial Sequence
  Synthetic
auauuguuagccauaauauuggg

SEQ ID NO: 593759 - RNA, 24 nt, Artificial Sequence
  Synthetic
uauauuguuagccauaauauuggg

SEQ ID NO: 593760 - RNA, 18 nt, Artificial Sequence
  Synthetic
aggaauuuucguauuggg

SEQ ID NO: 593761 - RNA, 19 nt, Artificial Sequence
  Synthetic
caggaauuuucguauuggg

SEQ ID NO: 593762 - RNA, 20 nt, Artificial Sequence
  Synthetic
ccaggaauuuucguauuggg

SEQ ID NO: 593763 - RNA, 21 nt, Artificial Sequence
  Synthetic
cccaggaauuuucguauuggg

SEQ ID NO: 593764 - RNA, 22 nt, Artificial Sequence
  Synthetic
ucccaggaauuuucguauuggg

SEQ ID NO: 593765 - RNA, 23 nt, Artificial Sequence
  Synthetic
uucccaggaauuuucguauuggg

SEQ ID NO: 593766 - RNA, 24 nt, Artificial Sequence
  Synthetic
guucccaggaauuuucguauuggg

SEQ ID NO: 593767 - RNA, 18 nt, Artificial Sequence
  Synthetic
ccagaguucuuuauuggg

SEQ ID NO: 593768 - RNA, 19 nt, Artificial Sequence
  Synthetic
uccagaguucuuuauuggg

SEQ ID NO: 593769 - RNA, 20 nt, Artificial Sequence
  Synthetic
auccagaguucuuuauuggg

SEQ ID NO: 593770 - RNA, 21 nt, Artificial Sequence
  Synthetic
aauccagaguucuuuauuggg

SEQ ID NO: 593771 - RNA, 22 nt, Artificial Sequence
  Synthetic
caauccagaguucuuuauuggg

SEQ ID NO: 593772 - RNA, 23 nt, Artificial Sequence
  Synthetic
acaauccagaguucuuuauuggg

SEQ ID NO: 593773 - RNA, 24 nt, Artificial Sequence
  Synthetic
aacaauccagaguucuuuauuggg

SEQ ID NO: 593774 - RNA, 18 nt, Artificial Sequence
  Synthetic
uucaacaggagacuuggg

SEQ ID NO: 593775 - RNA, 19 nt, Artificial Sequence
  Synthetic
uuucaacaggagacuuggg

SEQ ID NO: 593776 - RNA, 20 nt, Artificial Sequence
  Synthetic
auuucaacaggagacuuggg

SEQ ID NO: 593777 - RNA, 21 nt, Artificial Sequence
  Synthetic
cauuucaacaggagacuuggg

SEQ ID NO: 593778 - RNA, 22 nt, Artificial Sequence
  Synthetic
ccauuucaacaggagacuuggg

SEQ ID NO: 593779 - RNA, 23 nt, Artificial Sequence
  Synthetic
cccauuucaacaggagacuuggg

SEQ ID NO: 593780 - RNA, 24 nt, Artificial Sequence
  Synthetic
ccccauuucaacaggagacuuggg

SEQ ID NO: 593781 - RNA, 18 nt, Artificial Sequence
  Synthetic
auauuaaagauccuuggg

SEQ ID NO: 593782 - RNA, 19 nt, Artificial Sequence
  Synthetic
gauauuaaagauccuuggg

SEQ ID NO: 593783 - RNA, 20 nt, Artificial Sequence
  Synthetic
agauauuaaagauccuuggg

SEQ ID NO: 593784 - RNA, 21 nt, Artificial Sequence
  Synthetic
aagauauuaaagauccuuggg

SEQ ID NO: 593785 - RNA, 22 nt, Artificial Sequence
  Synthetic
uaagauauuaaagauccuuggg

SEQ ID NO: 593786 - RNA, 23 nt, Artificial Sequence
  Synthetic
guaagauauuaaagauccuuggg

SEQ ID NO: 593787 - RNA, 24 nt, Artificial Sequence
  Synthetic
gguaagauauuaaagauccuuggg

SEQ ID NO: 593788 - RNA, 18 nt, Artificial Sequence
  Synthetic
ugauuuaguaggcuuggg

SEQ ID NO: 593789 - RNA, 19 nt, Artificial Sequence
  Synthetic
cugauuuaguaggcuuggg

SEQ ID NO: 593790 - RNA, 20 nt, Artificial Sequence
  Synthetic
ucugauuuaguaggcuuggg

SEQ ID NO: 593791 - RNA, 21 nt, Artificial Sequence
  Synthetic
cucugauuuaguaggcuuggg

SEQ ID NO: 593792 - RNA, 22 nt, Artificial Sequence
  Synthetic
acucugauuuaguaggcuuggg

SEQ ID NO: 593793 - RNA, 23 nt, Artificial Sequence
  Synthetic
aacucugauuuaguaggcuuggg

SEQ ID NO: 593794 - RNA, 24 nt, Artificial Sequence
  Synthetic
aaacucugauuuaguaggcuuggg

SEQ ID NO: 593795 - RNA, 18 nt, Artificial Sequence
  Synthetic
caugcugauuggcuuggg

SEQ ID NO: 593796 - RNA, 19 nt, Artificial Sequence
  Synthetic
acaugcugauuggcuuggg

SEQ ID NO: 593797 - RNA, 20 nt, Artificial Sequence
  Synthetic
uacaugcugauuggcuuggg

SEQ ID NO: 593798 - RNA, 21 nt, Artificial Sequence
  Synthetic
cuacaugcugauuggcuuggg

SEQ ID NO: 593799 - RNA, 22 nt, Artificial Sequence
  Synthetic
acuacaugcugauuggcuuggg

SEQ ID NO: 593800 - RNA, 23 nt, Artificial Sequence
  Synthetic
gacuacaugcugauuggcuuggg

SEQ ID NO: 593801 - RNA, 24 nt, Artificial Sequence
  Synthetic
ugacuacaugcugauuggcuuggg

SEQ ID NO: 593802 - RNA, 18 nt, Artificial Sequence
  Synthetic
auaccaugcagucuuggg

SEQ ID NO: 593803 - RNA, 19 nt, Artificial Sequence
  Synthetic
uauaccaugcagucuuggg

SEQ ID NO: 593804 - RNA, 20 nt, Artificial Sequence
  Synthetic
auauaccaugcagucuuggg

SEQ ID NO: 593805 - RNA, 21 nt, Artificial Sequence
  Synthetic
uauauaccaugcagucuuggg

SEQ ID NO: 593806 - RNA, 22 nt, Artificial Sequence
  Synthetic
uuauauaccaugcagucuuggg

SEQ ID NO: 593807 - RNA, 23 nt, Artificial Sequence
  Synthetic
cuuauauaccaugcagucuuggg

SEQ ID NO: 593808 - RNA, 24 nt, Artificial Sequence
  Synthetic
acuuauauaccaugcagucuuggg

SEQ ID NO: 593809 - RNA, 18 nt, Artificial Sequence
  Synthetic
gucaaaaagaaaguuggg

SEQ ID NO: 593810 - RNA, 19 nt, Artificial Sequence
  Synthetic
agucaaaaagaaaguuggg

SEQ ID NO: 593811 - RNA, 20 nt, Artificial Sequence
  Synthetic
gagucaaaaagaaaguuggg

SEQ ID NO: 593812 - RNA, 21 nt, Artificial Sequence
  Synthetic
ggagucaaaaagaaaguuggg

SEQ ID NO: 593813 - RNA, 22 nt, Artificial Sequence
  Synthetic
gggagucaaaaagaaaguuggg

SEQ ID NO: 593814 - RNA, 23 nt, Artificial Sequence
  Synthetic
ggggagucaaaaagaaaguuggg

SEQ ID NO: 593815 - RNA, 24 nt, Artificial Sequence
  Synthetic
gggggagucaaaaagaaaguuggg

SEQ ID NO: 593816 - RNA, 18 nt, Artificial Sequence
  Synthetic
ugaggaugggaaguuggg

SEQ ID NO: 593817 - RNA, 19 nt, Artificial Sequence
  Synthetic
uugaggaugggaaguuggg

SEQ ID NO: 593818 - RNA, 20 nt, Artificial Sequence
  Synthetic
guugaggaugggaaguuggg

SEQ ID NO: 593819 - RNA, 21 nt, Artificial Sequence
  Synthetic
cguugaggaugggaaguuggg

SEQ ID NO: 593820 - RNA, 22 nt, Artificial Sequence
  Synthetic
ucguugaggaugggaaguuggg

SEQ ID NO: 593821 - RNA, 23 nt, Artificial Sequence
  Synthetic
uucguugaggaugggaaguuggg

SEQ ID NO: 593822 - RNA, 24 nt, Artificial Sequence
  Synthetic
auucguugaggaugggaaguuggg

SEQ ID NO: 593823 - RNA, 18 nt, Artificial Sequence
  Synthetic
ugguaauauuaaguuggg

SEQ ID NO: 593824 - RNA, 19 nt, Artificial Sequence
  Synthetic
cugguaauauuaaguuggg

SEQ ID NO: 593825 - RNA, 20 nt, Artificial Sequence
  Synthetic
ucugguaauauuaaguuggg

SEQ ID NO: 593826 - RNA, 21 nt, Artificial Sequence
  Synthetic
aucugguaauauuaaguuggg

SEQ ID NO: 593827 - RNA, 22 nt, Artificial Sequence
  Synthetic
caucugguaauauuaaguuggg

SEQ ID NO: 593828 - RNA, 23 nt, Artificial Sequence
  Synthetic
acaucugguaauauuaaguuggg

SEQ ID NO: 593829 - RNA, 24 nt, Artificial Sequence
  Synthetic
uacaucugguaauauuaaguuggg

SEQ ID NO: 593830 - RNA, 18 nt, Artificial Sequence
  Synthetic
aaaguccucagaguuggg

SEQ ID NO: 593831 - RNA, 19 nt, Artificial Sequence
  Synthetic
aaaaguccucagaguuggg

SEQ ID NO: 593832 - RNA, 20 nt, Artificial Sequence
  Synthetic
gaaaaguccucagaguuggg

SEQ ID NO: 593833 - RNA, 21 nt, Artificial Sequence
  Synthetic
agaaaaguccucagaguuggg

SEQ ID NO: 593834 - RNA, 22 nt, Artificial Sequence
  Synthetic
cagaaaaguccucagaguuggg

SEQ ID NO: 593835 - RNA, 23 nt, Artificial Sequence
  Synthetic
ccagaaaaguccucagaguuggg

SEQ ID NO: 593836 - RNA, 24 nt, Artificial Sequence
  Synthetic
accagaaaaguccucagaguuggg

SEQ ID NO: 593837 - RNA, 18 nt, Artificial Sequence
  Synthetic
uuuguguuaaagguuggg

SEQ ID NO: 593838 - RNA, 19 nt, Artificial Sequence
  Synthetic
uuuuguguuaaagguuggg

SEQ ID NO: 593839 - RNA, 20 nt, Artificial Sequence
  Synthetic
auuuuguguuaaagguuggg

SEQ ID NO: 593840 - RNA, 21 nt, Artificial Sequence
  Synthetic
uauuuuguguuaaagguuggg

SEQ ID NO: 593841 - RNA, 22 nt, Artificial Sequence
  Synthetic
uuauuuuguguuaaagguuggg

SEQ ID NO: 593842 - RNA, 23 nt, Artificial Sequence
  Synthetic
auuauuuuguguuaaagguuggg

SEQ ID NO: 593843 - RNA, 24 nt, Artificial Sequence
  Synthetic
aauuauuuuguguuaaagguuggg

SEQ ID NO: 593844 - RNA, 18 nt, Artificial Sequence
  Synthetic
gauggcucugagguuggg

SEQ ID NO: 593845 - RNA, 19 nt, Artificial Sequence
  Synthetic
ugauggcucugagguuggg

SEQ ID NO: 593846 - RNA, 20 nt, Artificial Sequence
  Synthetic
augauggcucugagguuggg

SEQ ID NO: 593847 - RNA, 21 nt, Artificial Sequence
  Synthetic
aaugauggcucugagguuggg

SEQ ID NO: 593848 - RNA, 22 nt, Artificial Sequence
  Synthetic
aaaugauggcucugagguuggg

SEQ ID NO: 593849 - RNA, 23 nt, Artificial Sequence
  Synthetic
caaaugauggcucugagguuggg

SEQ ID NO: 593850 - RNA, 24 nt, Artificial Sequence
  Synthetic
ucaaaugauggcucugagguuggg

SEQ ID NO: 593851 - RNA, 18 nt, Artificial Sequence
  Synthetic
acauauuaaaugguuggg

SEQ ID NO: 593852 - RNA, 19 nt, Artificial Sequence
  Synthetic
uacauauuaaaugguuggg

SEQ ID NO: 593853 - RNA, 20 nt, Artificial Sequence
  Synthetic
uuacauauuaaaugguuggg

SEQ ID NO: 593854 - RNA, 21 nt, Artificial Sequence
  Synthetic
uuuacauauuaaaugguuggg

SEQ ID NO: 593855 - RNA, 22 nt, Artificial Sequence
  Synthetic
auuuacauauuaaaugguuggg

SEQ ID NO: 593856 - RNA, 23 nt, Artificial Sequence
  Synthetic
gauuuacauauuaaaugguuggg

SEQ ID NO: 593857 - RNA, 24 nt, Artificial Sequence
  Synthetic
ggauuuacauauuaaaugguuggg

SEQ ID NO: 593858 - RNA, 18 nt, Artificial Sequence
  Synthetic
uaucacuuaaugguuggg

SEQ ID NO: 593859 - RNA, 19 nt, Artificial Sequence
  Synthetic
auaucacuuaaugguuggg

SEQ ID NO: 593860 - RNA, 20 nt, Artificial Sequence
  Synthetic
aauaucacuuaaugguuggg

SEQ ID NO: 593861 - RNA, 21 nt, Artificial Sequence
  Synthetic
caauaucacuuaaugguuggg

SEQ ID NO: 593862 - RNA, 22 nt, Artificial Sequence
  Synthetic
gcaauaucacuuaaugguuggg

SEQ ID NO: 593863 - RNA, 23 nt, Artificial Sequence
  Synthetic
ggcaauaucacuuaaugguuggg

SEQ ID NO: 593864 - RNA, 24 nt, Artificial Sequence
  Synthetic
uggcaauaucacuuaaugguuggg

SEQ ID NO: 593865 - RNA, 18 nt, Artificial Sequence
  Synthetic
aagcuauuucugguuggg

SEQ ID NO: 593866 - RNA, 19 nt, Artificial Sequence
  Synthetic
aaagcuauuucugguuggg

SEQ ID NO: 593867 - RNA, 20 nt, Artificial Sequence
  Synthetic
aaaagcuauuucugguuggg

SEQ ID NO: 593868 - RNA, 21 nt, Artificial Sequence
  Synthetic
aaaaagcuauuucugguuggg

SEQ ID NO: 593869 - RNA, 22 nt, Artificial Sequence
  Synthetic
caaaaagcuauuucugguuggg

SEQ ID NO: 593870 - RNA, 23 nt, Artificial Sequence
  Synthetic
acaaaaagcuauuucugguuggg

SEQ ID NO: 593871 - RNA, 24 nt, Artificial Sequence
  Synthetic
uacaaaaagcuauuucugguuggg

SEQ ID NO: 593872 - RNA, 18 nt, Artificial Sequence
  Synthetic
ugagacccucauguuggg

SEQ ID NO: 593873 - RNA, 19 nt, Artificial Sequence
  Synthetic
augagacccucauguuggg

SEQ ID NO: 593874 - RNA, 20 nt, Artificial Sequence
  Synthetic
gaugagacccucauguuggg

SEQ ID NO: 593875 - RNA, 21 nt, Artificial Sequence
  Synthetic
ugaugagacccucauguuggg

SEQ ID NO: 593876 - RNA, 22 nt, Artificial Sequence
  Synthetic
gugaugagacccucauguuggg

SEQ ID NO: 593877 - RNA, 23 nt, Artificial Sequence
  Synthetic
ggugaugagacccucauguuggg

SEQ ID NO: 593878 - RNA, 24 nt, Artificial Sequence
  Synthetic
gggugaugagacccucauguuggg

SEQ ID NO: 593879 - RNA, 18 nt, Artificial Sequence
  Synthetic
uuuuuuugcauuguuggg

SEQ ID NO: 593880 - RNA, 19 nt, Artificial Sequence
  Synthetic
uuuuuuuugcauuguuggg

SEQ ID NO: 593881 - RNA, 20 nt, Artificial Sequence
  Synthetic
uuuuuuuuugcauuguuggg

SEQ ID NO: 593882 - RNA, 21 nt, Artificial Sequence
  Synthetic
auuuuuuuuugcauuguuggg

SEQ ID NO: 593883 - RNA, 22 nt, Artificial Sequence
  Synthetic
aauuuuuuuuugcauuguuggg

SEQ ID NO: 593884 - RNA, 23 nt, Artificial Sequence
  Synthetic
caauuuuuuuuugcauuguuggg

SEQ ID NO: 593885 - RNA, 24 nt, Artificial Sequence
  Synthetic
acaauuuuuuuuugcauuguuggg

SEQ ID NO: 593886 - RNA, 18 nt, Artificial Sequence
  Synthetic
cacaaacauauuguuggg

SEQ ID NO: 593887 - RNA, 19 nt, Artificial Sequence
  Synthetic
ucacaaacauauuguuggg

SEQ ID NO: 593888 - RNA, 20 nt, Artificial Sequence
  Synthetic
cucacaaacauauuguuggg

SEQ ID NO: 593889 - RNA, 21 nt, Artificial Sequence
  Synthetic
ucucacaaacauauuguuggg

SEQ ID NO: 593890 - RNA, 22 nt, Artificial Sequence
  Synthetic
aucucacaaacauauuguuggg

SEQ ID NO: 593891 - RNA, 23 nt, Artificial Sequence
  Synthetic
aaucucacaaacauauuguuggg

SEQ ID NO: 593892 - RNA, 24 nt, Artificial Sequence
  Synthetic
gaaucucacaaacauauuguuggg

SEQ ID NO: 593893 - RNA, 18 nt, Artificial Sequence
  Synthetic
ucauccuuuguuguuggg

SEQ ID NO: 593894 - RNA, 19 nt, Artificial Sequence
  Synthetic
uucauccuuuguuguuggg

SEQ ID NO: 593895 - RNA, 20 nt, Artificial Sequence
  Synthetic
auucauccuuuguuguuggg

SEQ ID NO: 593896 - RNA, 21 nt, Artificial Sequence
  Synthetic
cauucauccuuuguuguuggg

SEQ ID NO: 593897 - RNA, 22 nt, Artificial Sequence
  Synthetic
gcauucauccuuuguuguuggg

SEQ ID NO: 593898 - RNA, 23 nt, Artificial Sequence
  Synthetic
ggcauucauccuuuguuguuggg

SEQ ID NO: 593899 - RNA, 24 nt, Artificial Sequence
  Synthetic
uggcauucauccuuuguuguuggg

SEQ ID NO: 593900 - RNA, 18 nt, Artificial Sequence
  Synthetic
gaagacgugccauuuggg

SEQ ID NO: 593901 - RNA, 19 nt, Artificial Sequence
  Synthetic
ugaagacgugccauuuggg

SEQ ID NO: 593902 - RNA, 20 nt, Artificial Sequence
  Synthetic
gugaagacgugccauuuggg

SEQ ID NO: 593903 - RNA, 21 nt, Artificial Sequence
  Synthetic
ugugaagacgugccauuuggg

SEQ ID NO: 593904 - RNA, 22 nt, Artificial Sequence
  Synthetic
augugaagacgugccauuuggg

SEQ ID NO: 593905 - RNA, 23 nt, Artificial Sequence
  Synthetic
aaugugaagacgugccauuuggg

SEQ ID NO: 593906 - RNA, 24 nt, Artificial Sequence
  Synthetic
aaaugugaagacgugccauuuggg

SEQ ID NO: 593907 - RNA, 18 nt, Artificial Sequence
  Synthetic
cagaguugcagauuuggg

SEQ ID NO: 593908 - RNA, 19 nt, Artificial Sequence
  Synthetic
ucagaguugcagauuuggg

SEQ ID NO: 593909 - RNA, 20 nt, Artificial Sequence
  Synthetic
cucagaguugcagauuuggg

SEQ ID NO: 593910 - RNA, 21 nt, Artificial Sequence
  Synthetic
ccucagaguugcagauuuggg

SEQ ID NO: 593911 - RNA, 22 nt, Artificial Sequence
  Synthetic
gccucagaguugcagauuuggg

SEQ ID NO: 593912 - RNA, 23 nt, Artificial Sequence
  Synthetic
ggccucagaguugcagauuuggg

SEQ ID NO: 593913 - RNA, 24 nt, Artificial Sequence
  Synthetic
aggccucagaguugcagauuuggg

SEQ ID NO: 593914 - RNA, 18 nt, Artificial Sequence
  Synthetic
uucaaaaugagauuuggg

SEQ ID NO: 593915 - RNA, 19 nt, Artificial Sequence
  Synthetic
auucaaaaugagauuuggg

SEQ ID NO: 593916 - RNA, 20 nt, Artificial Sequence
  Synthetic
aauucaaaaugagauuuggg

SEQ ID NO: 593917 - RNA, 21 nt, Artificial Sequence
  Synthetic
caauucaaaaugagauuuggg

SEQ ID NO: 593918 - RNA, 22 nt, Artificial Sequence
  Synthetic
acaauucaaaaugagauuuggg

SEQ ID NO: 593919 - RNA, 23 nt, Artificial Sequence
  Synthetic
uacaauucaaaaugagauuuggg

SEQ ID NO: 593920 - RNA, 24 nt, Artificial Sequence
  Synthetic
uuacaauucaaaaugagauuuggg

SEQ ID NO: 593921 - RNA, 18 nt, Artificial Sequence
  Synthetic
agggacaugagauuuggg

SEQ ID NO: 593922 - RNA, 19 nt, Artificial Sequence
  Synthetic
aagggacaugagauuuggg

SEQ ID NO: 593923 - RNA, 20 nt, Artificial Sequence
  Synthetic
aaagggacaugagauuuggg

SEQ ID NO: 593924 - RNA, 21 nt, Artificial Sequence
  Synthetic
gaaagggacaugagauuuggg

SEQ ID NO: 593925 - RNA, 22 nt, Artificial Sequence
  Synthetic
ugaaagggacaugagauuuggg

SEQ ID NO: 593926 - RNA, 23 nt, Artificial Sequence
  Synthetic
gugaaagggacaugagauuuggg

SEQ ID NO: 593927 - RNA, 24 nt, Artificial Sequence
  Synthetic
ugugaaagggacaugagauuuggg

SEQ ID NO: 593928 - RNA, 21 nt, Artificial Sequence
  Synthetic
gaauucaagaugagauuuggg

SEQ ID NO: 593929 - RNA, 22 nt, Artificial Sequence
  Synthetic
agaauucaagaugagauuuggg

SEQ ID NO: 593930 - RNA, 23 nt, Artificial Sequence
  Synthetic
uagaauucaagaugagauuuggg

SEQ ID NO: 593931 - RNA, 24 nt, Artificial Sequence
  Synthetic
guagaauucaagaugagauuuggg

SEQ ID NO: 593932 - RNA, 18 nt, Artificial Sequence
  Synthetic
uucaaggugagauuuggg

SEQ ID NO: 593933 - RNA, 19 nt, Artificial Sequence
  Synthetic
auucaaggugagauuuggg

SEQ ID NO: 593934 - RNA, 20 nt, Artificial Sequence
  Synthetic
aauucaaggugagauuuggg

SEQ ID NO: 593935 - RNA, 21 nt, Artificial Sequence
  Synthetic
caauucaaggugagauuuggg

SEQ ID NO: 593936 - RNA, 22 nt, Artificial Sequence
  Synthetic
acaauucaaggugagauuuggg

SEQ ID NO: 593937 - RNA, 23 nt, Artificial Sequence
  Synthetic
uacaauucaaggugagauuuggg

SEQ ID NO: 593938 - RNA, 24 nt, Artificial Sequence
  Synthetic
uuacaauucaaggugagauuuggg

SEQ ID NO: 593939 - RNA, 21 nt, Artificial Sequence
  Synthetic
uaauucaaggugagauuuggg

SEQ ID NO: 593940 - RNA, 22 nt, Artificial Sequence
  Synthetic
auaauucaaggugagauuuggg

SEQ ID NO: 593941 - RNA, 23 nt, Artificial Sequence
  Synthetic
cauaauucaaggugagauuuggg

SEQ ID NO: 593942 - RNA, 24 nt, Artificial Sequence
  Synthetic
ccauaauucaaggugagauuuggg

SEQ ID NO: 593943 - RNA, 18 nt, Artificial Sequence
  Synthetic
ucagaaaaaugauuuggg

SEQ ID NO: 593944 - RNA, 19 nt, Artificial Sequence
  Synthetic
cucagaaaaaugauuuggg

SEQ ID NO: 593945 - RNA, 20 nt, Artificial Sequence
  Synthetic
ccucagaaaaaugauuuggg

SEQ ID NO: 593946 - RNA, 21 nt, Artificial Sequence
  Synthetic
uccucagaaaaaugauuuggg

SEQ ID NO: 593947 - RNA, 22 nt, Artificial Sequence
  Synthetic
uuccucagaaaaaugauuuggg

SEQ ID NO: 593948 - RNA, 23 nt, Artificial Sequence
  Synthetic
cuuccucagaaaaaugauuuggg

SEQ ID NO: 593949 - RNA, 24 nt, Artificial Sequence
  Synthetic
gcuuccucagaaaaaugauuuggg

SEQ ID NO: 593950 - RNA, 18 nt, Artificial Sequence
  Synthetic
aagaaacagugauuuggg

SEQ ID NO: 593951 - RNA, 19 nt, Artificial Sequence
  Synthetic
aaagaaacagugauuuggg

SEQ ID NO: 593952 - RNA, 20 nt, Artificial Sequence
  Synthetic
aaaagaaacagugauuuggg

SEQ ID NO: 593953 - RNA, 21 nt, Artificial Sequence
  Synthetic
caaaagaaacagugauuuggg

SEQ ID NO: 593954 - RNA, 22 nt, Artificial Sequence
  Synthetic
ucaaaagaaacagugauuuggg

SEQ ID NO: 593955 - RNA, 23 nt, Artificial Sequence
  Synthetic
uucaaaagaaacagugauuuggg

SEQ ID NO: 593956 - RNA, 24 nt, Artificial Sequence
  Synthetic
uuucaaaagaaacagugauuuggg

SEQ ID NO: 593957 - RNA, 24 nt, Artificial Sequence
  Synthetic
uaauguauauucuguugauuuggg

SEQ ID NO: 593958 - RNA, 18 nt, Artificial Sequence
  Synthetic
uaauuuugagacuuuggg

SEQ ID NO: 593959 - RNA, 19 nt, Artificial Sequence
  Synthetic
cuaauuuugagacuuuggg

SEQ ID NO: 593960 - RNA, 20 nt, Artificial Sequence
  Synthetic
ccuaauuuugagacuuuggg

SEQ ID NO: 593961 - RNA, 21 nt, Artificial Sequence
  Synthetic
cccuaauuuugagacuuuggg

SEQ ID NO: 593962 - RNA, 22 nt, Artificial Sequence
  Synthetic
ucccuaauuuugagacuuuggg

SEQ ID NO: 593963 - RNA, 23 nt, Artificial Sequence
  Synthetic
uucccuaauuuugagacuuuggg

SEQ ID NO: 593964 - RNA, 24 nt, Artificial Sequence
  Synthetic
uuucccuaauuuugagacuuuggg

SEQ ID NO: 593965 - RNA, 18 nt, Artificial Sequence
  Synthetic
acuuccuuccccuuuggg

SEQ ID NO: 593966 - RNA, 19 nt, Artificial Sequence
  Synthetic
uacuuccuuccccuuuggg

SEQ ID NO: 593967 - RNA, 20 nt, Artificial Sequence
  Synthetic
auacuuccuuccccuuuggg

SEQ ID NO: 593968 - RNA, 21 nt, Artificial Sequence
  Synthetic
cauacuuccuuccccuuuggg

SEQ ID NO: 593969 - RNA, 22 nt, Artificial Sequence
  Synthetic
ucauacuuccuuccccuuuggg

SEQ ID NO: 593970 - RNA, 23 nt, Artificial Sequence
  Synthetic
aucauacuuccuuccccuuuggg

SEQ ID NO: 593971 - RNA, 24 nt, Artificial Sequence
  Synthetic
caucauacuuccuuccccuuuggg

SEQ ID NO: 593972 - RNA, 18 nt, Artificial Sequence
  Synthetic
ugauucaauagguuuggg

SEQ ID NO: 593973 - RNA, 19 nt, Artificial Sequence
  Synthetic
cugauucaauagguuuggg

SEQ ID NO: 593974 - RNA, 20 nt, Artificial Sequence
  Synthetic
acugauucaauagguuuggg

SEQ ID NO: 593975 - RNA, 21 nt, Artificial Sequence
  Synthetic
cacugauucaauagguuuggg

SEQ ID NO: 593976 - RNA, 22 nt, Artificial Sequence
  Synthetic
acacugauucaauagguuuggg

SEQ ID NO: 593977 - RNA, 23 nt, Artificial Sequence
  Synthetic
gacacugauucaauagguuuggg

SEQ ID NO: 593978 - RNA, 24 nt, Artificial Sequence
  Synthetic
agacacugauucaauagguuuggg

SEQ ID NO: 593979 - RNA, 18 nt, Artificial Sequence
  Synthetic
ugauucaguagguuuggg

SEQ ID NO: 593980 - RNA, 19 nt, Artificial Sequence
  Synthetic
cugauucaguagguuuggg

SEQ ID NO: 593981 - RNA, 20 nt, Artificial Sequence
  Synthetic
acugauucaguagguuuggg

SEQ ID NO: 593982 - RNA, 21 nt, Artificial Sequence
  Synthetic
cacugauucaguagguuuggg

SEQ ID NO: 593983 - RNA, 22 nt, Artificial Sequence
  Synthetic
acacugauucaguagguuuggg

SEQ ID NO: 593984 - RNA, 23 nt, Artificial Sequence
  Synthetic
gacacugauucaguagguuuggg

SEQ ID NO: 593985 - RNA, 24 nt, Artificial Sequence
  Synthetic
agacacugauucaguagguuuggg

SEQ ID NO: 593986 - RNA, 18 nt, Artificial Sequence
  Synthetic
ugauuuaacugguuuggg

SEQ ID NO: 593987 - RNA, 19 nt, Artificial Sequence
  Synthetic
cugauuuaacugguuuggg

SEQ ID NO: 593988 - RNA, 20 nt, Artificial Sequence
  Synthetic
ucugauuuaacugguuuggg

SEQ ID NO: 593989 - RNA, 21 nt, Artificial Sequence
  Synthetic
cucugauuuaacugguuuggg

SEQ ID NO: 593990 - RNA, 22 nt, Artificial Sequence
  Synthetic
gcucugauuuaacugguuuggg

SEQ ID NO: 593991 - RNA, 23 nt, Artificial Sequence
  Synthetic
ggcucugauuuaacugguuuggg

SEQ ID NO: 593992 - RNA, 24 nt, Artificial Sequence
  Synthetic
aggcucugauuuaacugguuuggg

SEQ ID NO: 593993 - RNA, 18 nt, Artificial Sequence
  Synthetic
gcuuaagaagauuuuggg

SEQ ID NO: 593994 - RNA, 19 nt, Artificial Sequence
  Synthetic
agcuuaagaagauuuuggg

SEQ ID NO: 593995 - RNA, 20 nt, Artificial Sequence
  Synthetic
cagcuuaagaagauuuuggg

SEQ ID NO: 593996 - RNA, 21 nt, Artificial Sequence
  Synthetic
ucagcuuaagaagauuuuggg

SEQ ID NO: 593997 - RNA, 22 nt, Artificial Sequence
  Synthetic
aucagcuuaagaagauuuuggg

SEQ ID NO: 593998 - RNA, 23 nt, Artificial Sequence
  Synthetic
uaucagcuuaagaagauuuuggg

SEQ ID NO: 593999 - RNA, 24 nt, Artificial Sequence
  Synthetic
uuaucagcuuaagaagauuuuggg

SEQ ID NO: 594000 - RNA, 18 nt, Artificial Sequence
  Synthetic
uuggauuuuaguuuuggg

SEQ ID NO: 594001 - RNA, 19 nt, Artificial Sequence
  Synthetic
uuuggauuuuaguuuuggg

SEQ ID NO: 594002 - RNA, 20 nt, Artificial Sequence
  Synthetic
cuuuggauuuuaguuuuggg

SEQ ID NO: 594003 - RNA, 21 nt, Artificial Sequence
  Synthetic
ccuuuggauuuuaguuuuggg

SEQ ID NO: 594004 - RNA, 22 nt, Artificial Sequence
  Synthetic
gccuuuggauuuuaguuuuggg

SEQ ID NO: 594005 - RNA, 23 nt, Artificial Sequence
  Synthetic
ugccuuuggauuuuaguuuuggg

SEQ ID NO: 594006 - RNA, 24 nt, Artificial Sequence
  Synthetic
gugccuuuggauuuuaguuuuggg

SEQ ID NO: 594007 - RNA, 18 nt, Artificial Sequence
  Synthetic
agauuucuguguuuuggg

SEQ ID NO: 594008 - RNA, 19 nt, Artificial Sequence
  Synthetic
uagauuucuguguuuuggg

SEQ ID NO: 594009 - RNA, 20 nt, Artificial Sequence
  Synthetic
cuagauuucuguguuuuggg

SEQ ID NO: 594010 - RNA, 21 nt, Artificial Sequence
  Synthetic
ucuagauuucuguguuuuggg

SEQ ID NO: 594011 - RNA, 22 nt, Artificial Sequence
  Synthetic
cucuagauuucuguguuuuggg

SEQ ID NO: 594012 - RNA, 23 nt, Artificial Sequence
  Synthetic
acucuagauuucuguguuuuggg

SEQ ID NO: 594013 - RNA, 24 nt, Artificial Sequence
  Synthetic
aacucuagauuucuguguuuuggg

SEQ ID NO: 594014 - RNA, 18 nt, Artificial Sequence
  Synthetic
agcacucaaaaaaaaugg

SEQ ID NO: 594015 - RNA, 19 nt, Artificial Sequence
  Synthetic
cagcacucaaaaaaaaugg

SEQ ID NO: 594016 - RNA, 20 nt, Artificial Sequence
  Synthetic
acagcacucaaaaaaaaugg

SEQ ID NO: 594017 - RNA, 21 nt, Artificial Sequence
  Synthetic
aacagcacucaaaaaaaaugg

SEQ ID NO: 594018 - RNA, 22 nt, Artificial Sequence
  Synthetic
uaacagcacucaaaaaaaaugg

SEQ ID NO: 594019 - RNA, 23 nt, Artificial Sequence
  Synthetic
cuaacagcacucaaaaaaaaugg

SEQ ID NO: 594020 - RNA, 24 nt, Artificial Sequence
  Synthetic
acuaacagcacucaaaaaaaaugg

SEQ ID NO: 594021 - RNA, 18 nt, Artificial Sequence
  Synthetic
uuuuuuuuaaaaaaaugg

SEQ ID NO: 594022 - RNA, 19 nt, Artificial Sequence
  Synthetic
auuuuuuuuaaaaaaaugg

SEQ ID NO: 594023 - RNA, 20 nt, Artificial Sequence
  Synthetic
cauuuuuuuuaaaaaaaugg

SEQ ID NO: 594024 - RNA, 21 nt, Artificial Sequence
  Synthetic
ccauuuuuuuuaaaaaaaugg

SEQ ID NO: 594025 - RNA, 22 nt, Artificial Sequence
  Synthetic
uccauuuuuuuuaaaaaaaugg

SEQ ID NO: 594026 - RNA, 23 nt, Artificial Sequence
  Synthetic
uuccauuuuuuuuaaaaaaaugg

SEQ ID NO: 594027 - RNA, 24 nt, Artificial Sequence
  Synthetic
guuccauuuuuuuuaaaaaaaugg

SEQ ID NO: 594028 - RNA, 18 nt, Artificial Sequence
  Synthetic
gaaaacagugaaaaaugg

SEQ ID NO: 594029 - RNA, 19 nt, Artificial Sequence
  Synthetic
agaaaacagugaaaaaugg

SEQ ID NO: 594030 - RNA, 20 nt, Artificial Sequence
  Synthetic
aagaaaacagugaaaaaugg

SEQ ID NO: 594031 - RNA, 21 nt, Artificial Sequence
  Synthetic
uaagaaaacagugaaaaaugg

SEQ ID NO: 594032 - RNA, 22 nt, Artificial Sequence
  Synthetic
auaagaaaacagugaaaaaugg

SEQ ID NO: 594033 - RNA, 23 nt, Artificial Sequence
  Synthetic
gauaagaaaacagugaaaaaugg

SEQ ID NO: 594034 - RNA, 24 nt, Artificial Sequence
  Synthetic
ggauaagaaaacagugaaaaaugg

SEQ ID NO: 594035 - RNA, 18 nt, Artificial Sequence
  Synthetic
guuuuaauauaaaaaugg

SEQ ID NO: 594036 - RNA, 19 nt, Artificial Sequence
  Synthetic
aguuuuaauauaaaaaugg

SEQ ID NO: 594037 - RNA, 20 nt, Artificial Sequence
  Synthetic
gaguuuuaauauaaaaaugg

SEQ ID NO: 594038 - RNA, 21 nt, Artificial Sequence
  Synthetic
ugaguuuuaauauaaaaaugg

SEQ ID NO: 594039 - RNA, 22 nt, Artificial Sequence
  Synthetic
cugaguuuuaauauaaaaaugg

SEQ ID NO: 594040 - RNA, 23 nt, Artificial Sequence
  Synthetic
ucugaguuuuaauauaaaaaugg

SEQ ID NO: 594041 - RNA, 24 nt, Artificial Sequence
  Synthetic
gucugaguuuuaauauaaaaaugg

SEQ ID NO: 594042 - RNA, 18 nt, Artificial Sequence
  Synthetic
uucuugaacuaaaaaugg

SEQ ID NO: 594043 - RNA, 19 nt, Artificial Sequence
  Synthetic
uuucuugaacuaaaaaugg

SEQ ID NO: 594044 - RNA, 20 nt, Artificial Sequence
  Synthetic
uuuucuugaacuaaaaaugg

SEQ ID NO: 594045 - RNA, 21 nt, Artificial Sequence
  Synthetic
uuuuucuugaacuaaaaaugg

SEQ ID NO: 594046 - RNA, 22 nt, Artificial Sequence
  Synthetic
cuuuuucuugaacuaaaaaugg

SEQ ID NO: 594047 - RNA, 23 nt, Artificial Sequence
  Synthetic
ucuuuuucuugaacuaaaaaugg

SEQ ID NO: 594048 - RNA, 24 nt, Artificial Sequence
  Synthetic
uucuuuuucuugaacuaaaaaugg

SEQ ID NO: 594049 - RNA, 18 nt, Artificial Sequence
  Synthetic
gagugugggagaaaaugg

SEQ ID NO: 594050 - RNA, 19 nt, Artificial Sequence
  Synthetic
agagugugggagaaaaugg

SEQ ID NO: 594051 - RNA, 20 nt, Artificial Sequence
  Synthetic
gagagugugggagaaaaugg

SEQ ID NO: 594052 - RNA, 21 nt, Artificial Sequence
  Synthetic
ugagagugugggagaaaaugg

SEQ ID NO: 594053 - RNA, 22 nt, Artificial Sequence
  Synthetic
uugagagugugggagaaaaugg

SEQ ID NO: 594054 - RNA, 23 nt, Artificial Sequence
  Synthetic
uuugagagugugggagaaaaugg

SEQ ID NO: 594055 - RNA, 24 nt, Artificial Sequence
  Synthetic
uuuugagagugugggagaaaaugg

SEQ ID NO: 594056 - RNA, 18 nt, Artificial Sequence
  Synthetic
aaaugcaacugaaaaugg

SEQ ID NO: 594057 - RNA, 19 nt, Artificial Sequence
  Synthetic
aaaaugcaacugaaaaugg

SEQ ID NO: 594058 - RNA, 20 nt, Artificial Sequence
  Synthetic
aaaaaugcaacugaaaaugg

SEQ ID NO: 594059 - RNA, 21 nt, Artificial Sequence
  Synthetic
uaaaaaugcaacugaaaaugg

SEQ ID NO: 594060 - RNA, 22 nt, Artificial Sequence
  Synthetic
guaaaaaugcaacugaaaaugg

SEQ ID NO: 594061 - RNA, 23 nt, Artificial Sequence
  Synthetic
aguaaaaaugcaacugaaaaugg

SEQ ID NO: 594062 - RNA, 24 nt, Artificial Sequence
  Synthetic
aaguaaaaaugcaacugaaaaugg

SEQ ID NO: 594063 - RNA, 18 nt, Artificial Sequence
  Synthetic
uugaacaagauaaaaugg

SEQ ID NO: 594064 - RNA, 19 nt, Artificial Sequence
  Synthetic
auugaacaagauaaaaugg

SEQ ID NO: 594065 - RNA, 20 nt, Artificial Sequence
  Synthetic
uauugaacaagauaaaaugg

SEQ ID NO: 594066 - RNA, 21 nt, Artificial Sequence
  Synthetic
guauugaacaagauaaaaugg

SEQ ID NO: 594067 - RNA, 22 nt, Artificial Sequence
  Synthetic
gguauugaacaagauaaaaugg

SEQ ID NO: 594068 - RNA, 23 nt, Artificial Sequence
  Synthetic
ugguauugaacaagauaaaaugg

SEQ ID NO: 594069 - RNA, 24 nt, Artificial Sequence
  Synthetic
gugguauugaacaagauaaaaugg

SEQ ID NO: 594070 - RNA, 18 nt, Artificial Sequence
  Synthetic
caauauggucuaaaaugg

SEQ ID NO: 594071 - RNA, 19 nt, Artificial Sequence
  Synthetic
ccaauauggucuaaaaugg

SEQ ID NO: 594072 - RNA, 20 nt, Artificial Sequence
  Synthetic
cccaauauggucuaaaaugg

SEQ ID NO: 594073 - RNA, 21 nt, Artificial Sequence
  Synthetic
acccaauauggucuaaaaugg

SEQ ID NO: 594074 - RNA, 22 nt, Artificial Sequence
  Synthetic
uacccaauauggucuaaaaugg

SEQ ID NO: 594075 - RNA, 23 nt, Artificial Sequence
  Synthetic
uuacccaauauggucuaaaaugg

SEQ ID NO: 594076 - RNA, 24 nt, Artificial Sequence
  Synthetic
guuacccaauauggucuaaaaugg

SEQ ID NO: 594077 - RNA, 21 nt, Artificial Sequence
  Synthetic
aaagaggacacaaacaaaugg

SEQ ID NO: 594078 - RNA, 22 nt, Artificial Sequence
  Synthetic
aaaagaggacacaaacaaaugg

SEQ ID NO: 594079 - RNA, 23 nt, Artificial Sequence
  Synthetic
uaaaagaggacacaaacaaaugg

SEQ ID NO: 594080 - RNA, 24 nt, Artificial Sequence
  Synthetic
auaaaagaggacacaaacaaaugg

SEQ ID NO: 594081 - RNA, 21 nt, Artificial Sequence
  Synthetic
aaagaggauacaaacaaaugg

SEQ ID NO: 594082 - RNA, 22 nt, Artificial Sequence
  Synthetic
aaaagaggauacaaacaaaugg

SEQ ID NO: 594083 - RNA, 23 nt, Artificial Sequence
  Synthetic
uaaaagaggauacaaacaaaugg

SEQ ID NO: 594084 - RNA, 24 nt, Artificial Sequence
  Synthetic
auaaaagaggauacaaacaaaugg

SEQ ID NO: 594085 - RNA, 18 nt, Artificial Sequence
  Synthetic
uggaaaagcagcaaaugg

SEQ ID NO: 594086 - RNA, 19 nt, Artificial Sequence
  Synthetic
auggaaaagcagcaaaugg

SEQ ID NO: 594087 - RNA, 20 nt, Artificial Sequence
  Synthetic
cauggaaaagcagcaaaugg

SEQ ID NO: 594088 - RNA, 21 nt, Artificial Sequence
  Synthetic
acauggaaaagcagcaaaugg

SEQ ID NO: 594089 - RNA, 22 nt, Artificial Sequence
  Synthetic
gacauggaaaagcagcaaaugg

SEQ ID NO: 594090 - RNA, 23 nt, Artificial Sequence
  Synthetic
agacauggaaaagcagcaaaugg

SEQ ID NO: 594091 - RNA, 24 nt, Artificial Sequence
  Synthetic
cagacauggaaaagcagcaaaugg

SEQ ID NO: 594092 - RNA, 18 nt, Artificial Sequence
  Synthetic
acagauuuaaucaaaugg

SEQ ID NO: 594093 - RNA, 19 nt, Artificial Sequence
  Synthetic
uacagauuuaaucaaaugg

SEQ ID NO: 594094 - RNA, 20 nt, Artificial Sequence
  Synthetic
guacagauuuaaucaaaugg

SEQ ID NO: 594095 - RNA, 21 nt, Artificial Sequence
  Synthetic
aguacagauuuaaucaaaugg

SEQ ID NO: 594096 - RNA, 22 nt, Artificial Sequence
  Synthetic
aaguacagauuuaaucaaaugg

SEQ ID NO: 594097 - RNA, 23 nt, Artificial Sequence
  Synthetic
aaaguacagauuuaaucaaaugg

SEQ ID NO: 594098 - RNA, 24 nt, Artificial Sequence
  Synthetic
uaaaguacagauuuaaucaaaugg

SEQ ID NO: 594099 - RNA, 18 nt, Artificial Sequence
  Synthetic
gaacauacucucaaaugg

SEQ ID NO: 594100 - RNA, 19 nt, Artificial Sequence
  Synthetic
agaacauacucucaaaugg

SEQ ID NO: 594101 - RNA, 20 nt, Artificial Sequence
  Synthetic
gagaacauacucucaaaugg

SEQ ID NO: 594102 - RNA, 21 nt, Artificial Sequence
  Synthetic
ggagaacauacucucaaaugg

SEQ ID NO: 594103 - RNA, 22 nt, Artificial Sequence
  Synthetic
uggagaacauacucucaaaugg

SEQ ID NO: 594104 - RNA, 23 nt, Artificial Sequence
  Synthetic
uuggagaacauacucucaaaugg

SEQ ID NO: 594105 - RNA, 24 nt, Artificial Sequence
  Synthetic
cuuggagaacauacucucaaaugg

SEQ ID NO: 594106 - RNA, 18 nt, Artificial Sequence
  Synthetic
acaucauucaagaaaugg

SEQ ID NO: 594107 - RNA, 19 nt, Artificial Sequence
  Synthetic
uacaucauucaagaaaugg

SEQ ID NO: 594108 - RNA, 20 nt, Artificial Sequence
  Synthetic
auacaucauucaagaaaugg

SEQ ID NO: 594109 - RNA, 21 nt, Artificial Sequence
  Synthetic
cauacaucauucaagaaaugg

SEQ ID NO: 594110 - RNA, 22 nt, Artificial Sequence
  Synthetic
gcauacaucauucaagaaaugg

SEQ ID NO: 594111 - RNA, 23 nt, Artificial Sequence
  Synthetic
agcauacaucauucaagaaaugg

SEQ ID NO: 594112 - RNA, 24 nt, Artificial Sequence
  Synthetic
uagcauacaucauucaagaaaugg

SEQ ID NO: 594113 - RNA, 18 nt, Artificial Sequence
  Synthetic
uaaacuaaguagaaaugg

SEQ ID NO: 594114 - RNA, 19 nt, Artificial Sequence
  Synthetic
guaaacuaaguagaaaugg

SEQ ID NO: 594115 - RNA, 20 nt, Artificial Sequence
  Synthetic
aguaaacuaaguagaaaugg

SEQ ID NO: 594116 - RNA, 21 nt, Artificial Sequence
  Synthetic
aaguaaacuaaguagaaaugg

SEQ ID NO: 594117 - RNA, 22 nt, Artificial Sequence
  Synthetic
aaaguaaacuaaguagaaaugg

SEQ ID NO: 594118 - RNA, 23 nt, Artificial Sequence
  Synthetic
aaaaguaaacuaaguagaaaugg

SEQ ID NO: 594119 - RNA, 24 nt, Artificial Sequence
  Synthetic
aaaaaguaaacuaaguagaaaugg

SEQ ID NO: 594120 - RNA, 18 nt, Artificial Sequence
  Synthetic
gagcugaacacgaaaugg

SEQ ID NO: 594121 - RNA, 19 nt, Artificial Sequence
  Synthetic
ugagcugaacacgaaaugg

SEQ ID NO: 594122 - RNA, 20 nt, Artificial Sequence
  Synthetic
augagcugaacacgaaaugg

SEQ ID NO: 594123 - RNA, 21 nt, Artificial Sequence
  Synthetic
caugagcugaacacgaaaugg

SEQ ID NO: 594124 - RNA, 22 nt, Artificial Sequence
  Synthetic
ucaugagcugaacacgaaaugg

SEQ ID NO: 594125 - RNA, 23 nt, Artificial Sequence
  Synthetic
aucaugagcugaacacgaaaugg

SEQ ID NO: 594126 - RNA, 24 nt, Artificial Sequence
  Synthetic
aaucaugagcugaacacgaaaugg

SEQ ID NO: 594127 - RNA, 18 nt, Artificial Sequence
  Synthetic
aaugaacauuggaaaugg

SEQ ID NO: 594128 - RNA, 19 nt, Artificial Sequence
  Synthetic
gaaugaacauuggaaaugg

SEQ ID NO: 594129 - RNA, 20 nt, Artificial Sequence
  Synthetic
ugaaugaacauuggaaaugg

SEQ ID NO: 594130 - RNA, 21 nt, Artificial Sequence
  Synthetic
cugaaugaacauuggaaaugg

SEQ ID NO: 594131 - RNA, 22 nt, Artificial Sequence
  Synthetic
ucugaaugaacauuggaaaugg

SEQ ID NO: 594132 - RNA, 23 nt, Artificial Sequence
  Synthetic
aucugaaugaacauuggaaaugg

SEQ ID NO: 594133 - RNA, 24 nt, Artificial Sequence
  Synthetic
aaucugaaugaacauuggaaaugg

SEQ ID NO: 594134 - RNA, 18 nt, Artificial Sequence
  Synthetic
cagaagaaaaauaaaugg

SEQ ID NO: 594135 - RNA, 19 nt, Artificial Sequence
  Synthetic
gcagaagaaaaauaaaugg

SEQ ID NO: 594136 - RNA, 20 nt, Artificial Sequence
  Synthetic
ggcagaagaaaaauaaaugg

SEQ ID NO: 594137 - RNA, 21 nt, Artificial Sequence
  Synthetic
uggcagaagaaaaauaaaugg

SEQ ID NO: 594138 - RNA, 22 nt, Artificial Sequence
  Synthetic
auggcagaagaaaaauaaaugg

SEQ ID NO: 594139 - RNA, 23 nt, Artificial Sequence
  Synthetic
uauggcagaagaaaaauaaaugg

SEQ ID NO: 594140 - RNA, 24 nt, Artificial Sequence
  Synthetic
guauggcagaagaaaaauaaaugg

SEQ ID NO: 594141 - RNA, 18 nt, Artificial Sequence
  Synthetic
aaaauaauuaauaaaugg

SEQ ID NO: 594142 - RNA, 19 nt, Artificial Sequence
  Synthetic
gaaaauaauuaauaaaugg

SEQ ID NO: 594143 - RNA, 20 nt, Artificial Sequence
  Synthetic
ugaaaauaauuaauaaaugg

SEQ ID NO: 594144 - RNA, 21 nt, Artificial Sequence
  Synthetic
cugaaaauaauuaauaaaugg

SEQ ID NO: 594145 - RNA, 22 nt, Artificial Sequence
  Synthetic
acugaaaauaauuaauaaaugg

SEQ ID NO: 594146 - RNA, 23 nt, Artificial Sequence
  Synthetic
aacugaaaauaauuaauaaaugg

SEQ ID NO: 594147 - RNA, 24 nt, Artificial Sequence
  Synthetic
aaacugaaaauaauuaauaaaugg

SEQ ID NO: 594148 - RNA, 18 nt, Artificial Sequence
  Synthetic
uagcagggaacuaaaugg

SEQ ID NO: 594149 - RNA, 19 nt, Artificial Sequence
  Synthetic
auagcagggaacuaaaugg

SEQ ID NO: 594150 - RNA, 20 nt, Artificial Sequence
  Synthetic
aauagcagggaacuaaaugg

SEQ ID NO: 594151 - RNA, 21 nt, Artificial Sequence
  Synthetic
caauagcagggaacuaaaugg

SEQ ID NO: 594152 - RNA, 22 nt, Artificial Sequence
  Synthetic
gcaauagcagggaacuaaaugg

SEQ ID NO: 594153 - RNA, 23 nt, Artificial Sequence
  Synthetic
ggcaauagcagggaacuaaaugg

SEQ ID NO: 594154 - RNA, 24 nt, Artificial Sequence
  Synthetic
uggcaauagcagggaacuaaaugg

SEQ ID NO: 594155 - RNA, 18 nt, Artificial Sequence
  Synthetic
uuuuugcccuguaaaugg

SEQ ID NO: 594156 - RNA, 19 nt, Artificial Sequence
  Synthetic
auuuuugcccuguaaaugg

SEQ ID NO: 594157 - RNA, 20 nt, Artificial Sequence
  Synthetic
cauuuuugcccuguaaaugg

SEQ ID NO: 594158 - RNA, 21 nt, Artificial Sequence
  Synthetic
ucauuuuugcccuguaaaugg

SEQ ID NO: 594159 - RNA, 22 nt, Artificial Sequence
  Synthetic
uucauuuuugcccuguaaaugg

SEQ ID NO: 594160 - RNA, 23 nt, Artificial Sequence
  Synthetic
cuucauuuuugcccuguaaaugg

SEQ ID NO: 594161 - RNA, 24 nt, Artificial Sequence
  Synthetic
ucuucauuuuugcccuguaaaugg

SEQ ID NO: 594162 - RNA, 18 nt, Artificial Sequence
  Synthetic
gauuuacauauuaaaugg

SEQ ID NO: 594163 - RNA, 19 nt, Artificial Sequence
  Synthetic
ggauuuacauauuaaaugg

SEQ ID NO: 594164 - RNA, 20 nt, Artificial Sequence
  Synthetic
gggauuuacauauuaaaugg

SEQ ID NO: 594165 - RNA, 21 nt, Artificial Sequence
  Synthetic
ugggauuuacauauuaaaugg

SEQ ID NO: 594166 - RNA, 22 nt, Artificial Sequence
  Synthetic
augggauuuacauauuaaaugg

SEQ ID NO: 594167 - RNA, 23 nt, Artificial Sequence
  Synthetic
aaugggauuuacauauuaaaugg

SEQ ID NO: 594168 - RNA, 24 nt, Artificial Sequence
  Synthetic
gaaugggauuuacauauuaaaugg

SEQ ID NO: 594169 - RNA, 18 nt, Artificial Sequence
  Synthetic
ggucaaaucacacaaugg

SEQ ID NO: 594170 - RNA, 19 nt, Artificial Sequence
  Synthetic
uggucaaaucacacaaugg

SEQ ID NO: 594171 - RNA, 20 nt, Artificial Sequence
  Synthetic
auggucaaaucacacaaugg

SEQ ID NO: 594172 - RNA, 21 nt, Artificial Sequence
  Synthetic
aauggucaaaucacacaaugg

SEQ ID NO: 594173 - RNA, 22 nt, Artificial Sequence
  Synthetic
aaauggucaaaucacacaaugg

SEQ ID NO: 594174 - RNA, 23 nt, Artificial Sequence
  Synthetic
aaaauggucaaaucacacaaugg

SEQ ID NO: 594175 - RNA, 24 nt, Artificial Sequence
  Synthetic
caaaauggucaaaucacacaaugg

SEQ ID NO: 594176 - RNA, 18 nt, Artificial Sequence
  Synthetic
caccagaccccacaaugg

SEQ ID NO: 594177 - RNA, 19 nt, Artificial Sequence
  Synthetic
ccaccagaccccacaaugg

SEQ ID NO: 594178 - RNA, 20 nt, Artificial Sequence
  Synthetic
uccaccagaccccacaaugg

SEQ ID NO: 594179 - RNA, 21 nt, Artificial Sequence
  Synthetic
guccaccagaccccacaaugg

SEQ ID NO: 594180 - RNA, 22 nt, Artificial Sequence
  Synthetic
uguccaccagaccccacaaugg

SEQ ID NO: 594181 - RNA, 23 nt, Artificial Sequence
  Synthetic
cuguccaccagaccccacaaugg

SEQ ID NO: 594182 - RNA, 24 nt, Artificial Sequence
  Synthetic
acuguccaccagaccccacaaugg

SEQ ID NO: 594183 - RNA, 18 nt, Artificial Sequence
  Synthetic
caccgacuuccacaaugg

SEQ ID NO: 594184 - RNA, 19 nt, Artificial Sequence
  Synthetic
acaccgacuuccacaaugg

SEQ ID NO: 594185 - RNA, 20 nt, Artificial Sequence
  Synthetic
cacaccgacuuccacaaugg

SEQ ID NO: 594186 - RNA, 21 nt, Artificial Sequence
  Synthetic
ccacaccgacuuccacaaugg

SEQ ID NO: 594187 - RNA, 22 nt, Artificial Sequence
  Synthetic
gccacaccgacuuccacaaugg

SEQ ID NO: 594188 - RNA, 23 nt, Artificial Sequence
  Synthetic
cgccacaccgacuuccacaaugg

SEQ ID NO: 594189 - RNA, 24 nt, Artificial Sequence
  Synthetic
ucgccacaccgacuuccacaaugg

SEQ ID NO: 594190 - RNA, 21 nt, Artificial Sequence
  Synthetic
ccacacugacuuccacaaugg

SEQ ID NO: 594191 - RNA, 22 nt, Artificial Sequence
  Synthetic
gccacacugacuuccacaaugg

SEQ ID NO: 594192 - RNA, 23 nt, Artificial Sequence
  Synthetic
cgccacacugacuuccacaaugg

SEQ ID NO: 594193 - RNA, 24 nt, Artificial Sequence
  Synthetic
ucgccacacugacuuccacaaugg

SEQ ID NO: 594194 - RNA, 18 nt, Artificial Sequence
  Synthetic
cacggucuuccacaaugg

SEQ ID NO: 594195 - RNA, 19 nt, Artificial Sequence
  Synthetic
acacggucuuccacaaugg

SEQ ID NO: 594196 - RNA, 20 nt, Artificial Sequence
  Synthetic
cacacggucuuccacaaugg

SEQ ID NO: 594197 - RNA, 21 nt, Artificial Sequence
  Synthetic
ccacacggucuuccacaaugg

SEQ ID NO: 594198 - RNA, 22 nt, Artificial Sequence
  Synthetic
gccacacggucuuccacaaugg

SEQ ID NO: 594199 - RNA, 23 nt, Artificial Sequence
  Synthetic
cgccacacggucuuccacaaugg

SEQ ID NO: 594200 - RNA, 24 nt, Artificial Sequence
  Synthetic
ucgccacacggucuuccacaaugg

SEQ ID NO: 594201 - RNA, 21 nt, Artificial Sequence
  Synthetic
ccacacugucuuccacaaugg

SEQ ID NO: 594202 - RNA, 22 nt, Artificial Sequence
  Synthetic
gccacacugucuuccacaaugg

SEQ ID NO: 594203 - RNA, 23 nt, Artificial Sequence
  Synthetic
ugccacacugucuuccacaaugg

SEQ ID NO: 594204 - RNA, 24 nt, Artificial Sequence
  Synthetic
uugccacacugucuuccacaaugg

SEQ ID NO: 594205 - RNA, 18 nt, Artificial Sequence
  Synthetic
cuaucugcaagccaaugg

SEQ ID NO: 594206 - RNA, 19 nt, Artificial Sequence
  Synthetic
gcuaucugcaagccaaugg

SEQ ID NO: 594207 - RNA, 20 nt, Artificial Sequence
  Synthetic
ggcuaucugcaagccaaugg

SEQ ID NO: 594208 - RNA, 21 nt, Artificial Sequence
  Synthetic
cggcuaucugcaagccaaugg

SEQ ID NO: 594209 - RNA, 22 nt, Artificial Sequence
  Synthetic
gcggcuaucugcaagccaaugg

SEQ ID NO: 594210 - RNA, 23 nt, Artificial Sequence
  Synthetic
ggcggcuaucugcaagccaaugg

SEQ ID NO: 594211 - RNA, 24 nt, Artificial Sequence
  Synthetic
aggcggcuaucugcaagccaaugg

SEQ ID NO: 594212 - RNA, 18 nt, Artificial Sequence
  Synthetic
cccaaccccagccaaugg

SEQ ID NO: 594213 - RNA, 19 nt, Artificial Sequence
  Synthetic
acccaaccccagccaaugg

SEQ ID NO: 594214 - RNA, 20 nt, Artificial Sequence
  Synthetic
gacccaaccccagccaaugg

SEQ ID NO: 594215 - RNA, 21 nt, Artificial Sequence
  Synthetic
cgacccaaccccagccaaugg

SEQ ID NO: 594216 - RNA, 22 nt, Artificial Sequence
  Synthetic
acgacccaaccccagccaaugg

SEQ ID NO: 594217 - RNA, 23 nt, Artificial Sequence
  Synthetic
uacgacccaaccccagccaaugg

SEQ ID NO: 594218 - RNA, 24 nt, Artificial Sequence
  Synthetic
guacgacccaaccccagccaaugg

SEQ ID NO: 594219 - RNA, 18 nt, Artificial Sequence
  Synthetic
auagaaacagagcaaugg

SEQ ID NO: 594220 - RNA, 19 nt, Artificial Sequence
  Synthetic
uauagaaacagagcaaugg

SEQ ID NO: 594221 - RNA, 20 nt, Artificial Sequence
  Synthetic
cuauagaaacagagcaaugg

SEQ ID NO: 594222 - RNA, 21 nt, Artificial Sequence
  Synthetic
ucuauagaaacagagcaaugg

SEQ ID NO: 594223 - RNA, 22 nt, Artificial Sequence
  Synthetic
uucuauagaaacagagcaaugg

SEQ ID NO: 594224 - RNA, 23 nt, Artificial Sequence
  Synthetic
guucuauagaaacagagcaaugg

SEQ ID NO: 594225 - RNA, 24 nt, Artificial Sequence
  Synthetic
aguucuauagaaacagagcaaugg

SEQ ID NO: 594226 - RNA, 18 nt, Artificial Sequence
  Synthetic
uuucuuaaaugucaaugg

SEQ ID NO: 594227 - RNA, 19 nt, Artificial Sequence
  Synthetic
auuucuuaaaugucaaugg

SEQ ID NO: 594228 - RNA, 20 nt, Artificial Sequence
  Synthetic
gauuucuuaaaugucaaugg

SEQ ID NO: 594229 - RNA, 21 nt, Artificial Sequence
  Synthetic
agauuucuuaaaugucaaugg

SEQ ID NO: 594230 - RNA, 22 nt, Artificial Sequence
  Synthetic
cagauuucuuaaaugucaaugg

SEQ ID NO: 594231 - RNA, 23 nt, Artificial Sequence
  Synthetic
acagauuucuuaaaugucaaugg

SEQ ID NO: 594232 - RNA, 24 nt, Artificial Sequence
  Synthetic
aacagauuucuuaaaugucaaugg

SEQ ID NO: 594233 - RNA, 18 nt, Artificial Sequence
  Synthetic
auaaugaaacuucaaugg

SEQ ID NO: 594234 - RNA, 19 nt, Artificial Sequence
  Synthetic
cauaaugaaacuucaaugg

SEQ ID NO: 594235 - RNA, 20 nt, Artificial Sequence
  Synthetic
ucauaaugaaacuucaaugg

SEQ ID NO: 594236 - RNA, 21 nt, Artificial Sequence
  Synthetic
cucauaaugaaacuucaaugg

SEQ ID NO: 594237 - RNA, 22 nt, Artificial Sequence
  Synthetic
ucucauaaugaaacuucaaugg

SEQ ID NO: 594238 - RNA, 23 nt, Artificial Sequence
  Synthetic
aucucauaaugaaacuucaaugg

SEQ ID NO: 594239 - RNA, 24 nt, Artificial Sequence
  Synthetic
caucucauaaugaaacuucaaugg

SEQ ID NO: 594240 - RNA, 18 nt, Artificial Sequence
  Synthetic
uucauucuuaaagaaugg

SEQ ID NO: 594241 - RNA, 19 nt, Artificial Sequence
  Synthetic
auucauucuuaaagaaugg

SEQ ID NO: 594242 - RNA, 20 nt, Artificial Sequence
  Synthetic
aauucauucuuaaagaaugg

SEQ ID NO: 594243 - RNA, 21 nt, Artificial Sequence
  Synthetic
gaauucauucuuaaagaaugg

SEQ ID NO: 594244 - RNA, 22 nt, Artificial Sequence
  Synthetic
ugaauucauucuuaaagaaugg

SEQ ID NO: 594245 - RNA, 23 nt, Artificial Sequence
  Synthetic
uugaauucauucuuaaagaaugg

SEQ ID NO: 594246 - RNA, 24 nt, Artificial Sequence
  Synthetic
uuugaauucauucuuaaagaaugg

SEQ ID NO: 594247 - RNA, 18 nt, Artificial Sequence
  Synthetic
cccuggcagcaagaaugg

SEQ ID NO: 594248 - RNA, 19 nt, Artificial Sequence
  Synthetic
acccuggcagcaagaaugg

SEQ ID NO: 594249 - RNA, 20 nt, Artificial Sequence
  Synthetic
gacccuggcagcaagaaugg

SEQ ID NO: 594250 - RNA, 21 nt, Artificial Sequence
  Synthetic
agacccuggcagcaagaaugg

SEQ ID NO: 594251 - RNA, 22 nt, Artificial Sequence
  Synthetic
cagacccuggcagcaagaaugg

SEQ ID NO: 594252 - RNA, 23 nt, Artificial Sequence
  Synthetic
ccagacccuggcagcaagaaugg

SEQ ID NO: 594253 - RNA, 24 nt, Artificial Sequence
  Synthetic
uccagacccuggcagcaagaaugg

SEQ ID NO: 594254 - RNA, 18 nt, Artificial Sequence
  Synthetic
aggcagccuacagaaugg

SEQ ID NO: 594255 - RNA, 19 nt, Artificial Sequence
  Synthetic
caggcagccuacagaaugg

SEQ ID NO: 594256 - RNA, 20 nt, Artificial Sequence
  Synthetic
acaggcagccuacagaaugg

SEQ ID NO: 594257 - RNA, 21 nt, Artificial Sequence
  Synthetic
aacaggcagccuacagaaugg

SEQ ID NO: 594258 - RNA, 22 nt, Artificial Sequence
  Synthetic
gaacaggcagccuacagaaugg

SEQ ID NO: 594259 - RNA, 23 nt, Artificial Sequence
  Synthetic
ugaacaggcagccuacagaaugg

SEQ ID NO: 594260 - RNA, 24 nt, Artificial Sequence
  Synthetic
gugaacaggcagccuacagaaugg

SEQ ID NO: 594261 - RNA, 18 nt, Artificial Sequence
  Synthetic
cacauaagaucagaaugg

SEQ ID NO: 594262 - RNA, 19 nt, Artificial Sequence
  Synthetic
acacauaagaucagaaugg

SEQ ID NO: 594263 - RNA, 20 nt, Artificial Sequence
  Synthetic
aacacauaagaucagaaugg

SEQ ID NO: 594264 - RNA, 21 nt, Artificial Sequence
  Synthetic
uaacacauaagaucagaaugg

SEQ ID NO: 594265 - RNA, 22 nt, Artificial Sequence
  Synthetic
uuaacacauaagaucagaaugg

SEQ ID NO: 594266 - RNA, 23 nt, Artificial Sequence
  Synthetic
uuuaacacauaagaucagaaugg

SEQ ID NO: 594267 - RNA, 24 nt, Artificial Sequence
  Synthetic
auuuaacacauaagaucagaaugg

SEQ ID NO: 594268 - RNA, 18 nt, Artificial Sequence
  Synthetic
cuggagguaagagaaugg

SEQ ID NO: 594269 - RNA, 19 nt, Artificial Sequence
  Synthetic
gcuggagguaagagaaugg

SEQ ID NO: 594270 - RNA, 20 nt, Artificial Sequence
  Synthetic
ggcuggagguaagagaaugg

SEQ ID NO: 594271 - RNA, 21 nt, Artificial Sequence
  Synthetic
gggcuggagguaagagaaugg

SEQ ID NO: 594272 - RNA, 22 nt, Artificial Sequence
  Synthetic
ugggcuggagguaagagaaugg

SEQ ID NO: 594273 - RNA, 23 nt, Artificial Sequence
  Synthetic
cugggcuggagguaagagaaugg

SEQ ID NO: 594274 - RNA, 24 nt, Artificial Sequence
  Synthetic
gcugggcuggagguaagagaaugg

SEQ ID NO: 594275 - RNA, 18 nt, Artificial Sequence
  Synthetic
gaaagaaaacgagaaugg

SEQ ID NO: 594276 - RNA, 19 nt, Artificial Sequence
  Synthetic
ugaaagaaaacgagaaugg

SEQ ID NO: 594277 - RNA, 20 nt, Artificial Sequence
  Synthetic
cugaaagaaaacgagaaugg

SEQ ID NO: 594278 - RNA, 21 nt, Artificial Sequence
  Synthetic
gcugaaagaaaacgagaaugg

SEQ ID NO: 594279 - RNA, 22 nt, Artificial Sequence
  Synthetic
agcugaaagaaaacgagaaugg

SEQ ID NO: 594280 - RNA, 23 nt, Artificial Sequence
  Synthetic
aagcugaaagaaaacgagaaugg

SEQ ID NO: 594281 - RNA, 24 nt, Artificial Sequence
  Synthetic
gaagcugaaagaaaacgagaaugg

SEQ ID NO: 594282 - RNA, 18 nt, Artificial Sequence
  Synthetic
gugcugcugggagaaugg

SEQ ID NO: 594283 - RNA, 19 nt, Artificial Sequence
  Synthetic
agugcugcugggagaaugg

SEQ ID NO: 594284 - RNA, 20 nt, Artificial Sequence
  Synthetic
cagugcugcugggagaaugg

SEQ ID NO: 594285 - RNA, 21 nt, Artificial Sequence
  Synthetic
acagugcugcugggagaaugg

SEQ ID NO: 594286 - RNA, 22 nt, Artificial Sequence
  Synthetic
aacagugcugcugggagaaugg

SEQ ID NO: 594287 - RNA, 23 nt, Artificial Sequence
  Synthetic
aaacagugcugcugggagaaugg

SEQ ID NO: 594288 - RNA, 24 nt, Artificial Sequence
  Synthetic
aaaacagugcugcugggagaaugg

SEQ ID NO: 594289 - RNA, 18 nt, Artificial Sequence
  Synthetic
uaaacacaauuagaaugg

SEQ ID NO: 594290 - RNA, 19 nt, Artificial Sequence
  Synthetic
uuaaacacaauuagaaugg

SEQ ID NO: 594291 - RNA, 20 nt, Artificial Sequence
  Synthetic
guuaaacacaauuagaaugg

SEQ ID NO: 594292 - RNA, 21 nt, Artificial Sequence
  Synthetic
uguuaaacacaauuagaaugg

SEQ ID NO: 594293 - RNA, 22 nt, Artificial Sequence
  Synthetic
auguuaaacacaauuagaaugg

SEQ ID NO: 594294 - RNA, 23 nt, Artificial Sequence
  Synthetic
aauguuaaacacaauuagaaugg

SEQ ID NO: 594295 - RNA, 24 nt, Artificial Sequence
  Synthetic
aaauguuaaacacaauuagaaugg

SEQ ID NO: 594296 - RNA, 18 nt, Artificial Sequence
  Synthetic
gaaaggacaaacgaaugg

SEQ ID NO: 594297 - RNA, 19 nt, Artificial Sequence
  Synthetic
ugaaaggacaaacgaaugg

SEQ ID NO: 594298 - RNA, 20 nt, Artificial Sequence
  Synthetic
cugaaaggacaaacgaaugg

SEQ ID NO: 594299 - RNA, 21 nt, Artificial Sequence
  Synthetic
ucugaaaggacaaacgaaugg

SEQ ID NO: 594300 - RNA, 22 nt, Artificial Sequence
  Synthetic
cucugaaaggacaaacgaaugg

SEQ ID NO: 594301 - RNA, 23 nt, Artificial Sequence
  Synthetic
acucugaaaggacaaacgaaugg

SEQ ID NO: 594302 - RNA, 24 nt, Artificial Sequence
  Synthetic
aacucugaaaggacaaacgaaugg

SEQ ID NO: 594303 - RNA, 18 nt, Artificial Sequence
  Synthetic
uacaccuguuccgaaugg

SEQ ID NO: 594304 - RNA, 19 nt, Artificial Sequence
  Synthetic
auacaccuguuccgaaugg

SEQ ID NO: 594305 - RNA, 20 nt, Artificial Sequence
  Synthetic
aauacaccuguuccgaaugg

SEQ ID NO: 594306 - RNA, 21 nt, Artificial Sequence
  Synthetic
aaauacaccuguuccgaaugg

SEQ ID NO: 594307 - RNA, 22 nt, Artificial Sequence
  Synthetic
uaaauacaccuguuccgaaugg

SEQ ID NO: 594308 - RNA, 23 nt, Artificial Sequence
  Synthetic
guaaauacaccuguuccgaaugg

SEQ ID NO: 594309 - RNA, 24 nt, Artificial Sequence
  Synthetic
gguaaauacaccuguuccgaaugg

SEQ ID NO: 594310 - RNA, 18 nt, Artificial Sequence
  Synthetic
uaaaugaagaaggaaugg

SEQ ID NO: 594311 - RNA, 19 nt, Artificial Sequence
  Synthetic
auaaaugaagaaggaaugg

SEQ ID NO: 594312 - RNA, 20 nt, Artificial Sequence
  Synthetic
aauaaaugaagaaggaaugg

SEQ ID NO: 594313 - RNA, 21 nt, Artificial Sequence
  Synthetic
gaauaaaugaagaaggaaugg

SEQ ID NO: 594314 - RNA, 22 nt, Artificial Sequence
  Synthetic
ugaauaaaugaagaaggaaugg

SEQ ID NO: 594315 - RNA, 23 nt, Artificial Sequence
  Synthetic
gugaauaaaugaagaaggaaugg

SEQ ID NO: 594316 - RNA, 24 nt, Artificial Sequence
  Synthetic
agugaauaaaugaagaaggaaugg

SEQ ID NO: 594317 - RNA, 18 nt, Artificial Sequence
  Synthetic
gaagagaggaaggaaugg

SEQ ID NO: 594318 - RNA, 19 nt, Artificial Sequence
  Synthetic
ggaagagaggaaggaaugg

SEQ ID NO: 594319 - RNA, 20 nt, Artificial Sequence
  Synthetic
aggaagagaggaaggaaugg

SEQ ID NO: 594320 - RNA, 21 nt, Artificial Sequence
  Synthetic
gaggaagagaggaaggaaugg

SEQ ID NO: 594321 - RNA, 22 nt, Artificial Sequence
  Synthetic
ggaggaagagaggaaggaaugg

SEQ ID NO: 594322 - RNA, 23 nt, Artificial Sequence
  Synthetic
gggaggaagagaggaaggaaugg

SEQ ID NO: 594323 - RNA, 24 nt, Artificial Sequence
  Synthetic
agggaggaagagaggaaggaaugg

SEQ ID NO: 594324 - RNA, 18 nt, Artificial Sequence
  Synthetic
cagauaaaguaggaaugg

SEQ ID NO: 594325 - RNA, 19 nt, Artificial Sequence
  Synthetic
ucagauaaaguaggaaugg

SEQ ID NO: 594326 - RNA, 20 nt, Artificial Sequence
  Synthetic
cucagauaaaguaggaaugg

SEQ ID NO: 594327 - RNA, 21 nt, Artificial Sequence
  Synthetic
gcucagauaaaguaggaaugg

SEQ ID NO: 594328 - RNA, 22 nt, Artificial Sequence
  Synthetic
agcucagauaaaguaggaaugg

SEQ ID NO: 594329 - RNA, 23 nt, Artificial Sequence
  Synthetic
aagcucagauaaaguaggaaugg

SEQ ID NO: 594330 - RNA, 24 nt, Artificial Sequence
  Synthetic
uaagcucagauaaaguaggaaugg

SEQ ID NO: 594331 - RNA, 18 nt, Artificial Sequence
  Synthetic
guuggaaucacggaaugg

SEQ ID NO: 594332 - RNA, 19 nt, Artificial Sequence
  Synthetic
aguuggaaucacggaaugg

SEQ ID NO: 594333 - RNA, 20 nt, Artificial Sequence
  Synthetic
uaguuggaaucacggaaugg

SEQ ID NO: 594334 - RNA, 21 nt, Artificial Sequence
  Synthetic
guaguuggaaucacggaaugg

SEQ ID NO: 594335 - RNA, 22 nt, Artificial Sequence
  Synthetic
uguaguuggaaucacggaaugg

SEQ ID NO: 594336 - RNA, 23 nt, Artificial Sequence
  Synthetic
auguaguuggaaucacggaaugg

SEQ ID NO: 594337 - RNA, 24 nt, Artificial Sequence
  Synthetic
aauguaguuggaaucacggaaugg

SEQ ID NO: 594338 - RNA, 18 nt, Artificial Sequence
  Synthetic
uguaggugggcggaaugg

SEQ ID NO: 594339 - RNA, 19 nt, Artificial Sequence
  Synthetic
guguaggugggcggaaugg

SEQ ID NO: 594340 - RNA, 20 nt, Artificial Sequence
  Synthetic
aguguaggugggcggaaugg

SEQ ID NO: 594341 - RNA, 21 nt, Artificial Sequence
  Synthetic
gaguguaggugggcggaaugg

SEQ ID NO: 594342 - RNA, 22 nt, Artificial Sequence
  Synthetic
agaguguaggugggcggaaugg

SEQ ID NO: 594343 - RNA, 23 nt, Artificial Sequence
  Synthetic
aagaguguaggugggcggaaugg

SEQ ID NO: 594344 - RNA, 24 nt, Artificial Sequence
  Synthetic
gaagaguguaggugggcggaaugg

SEQ ID NO: 594345 - RNA, 18 nt, Artificial Sequence
  Synthetic
gcuaagaaaagggaaugg

SEQ ID NO: 594346 - RNA, 19 nt, Artificial Sequence
  Synthetic
ugcuaagaaaagggaaugg

SEQ ID NO: 594347 - RNA, 20 nt, Artificial Sequence
  Synthetic
augcuaagaaaagggaaugg

SEQ ID NO: 594348 - RNA, 21 nt, Artificial Sequence
  Synthetic
uaugcuaagaaaagggaaugg

SEQ ID NO: 594349 - RNA, 22 nt, Artificial Sequence
  Synthetic
cuaugcuaagaaaagggaaugg

SEQ ID NO: 594350 - RNA, 23 nt, Artificial Sequence
  Synthetic
acuaugcuaagaaaagggaaugg

SEQ ID NO: 594351 - RNA, 24 nt, Artificial Sequence
  Synthetic
cacuaugcuaagaaaagggaaugg

SEQ ID NO: 594352 - RNA, 18 nt, Artificial Sequence
  Synthetic
gcccuucaccaugaaugg

SEQ ID NO: 594353 - RNA, 19 nt, Artificial Sequence
  Synthetic
ugcccuucaccaugaaugg

SEQ ID NO: 594354 - RNA, 20 nt, Artificial Sequence
  Synthetic
uugcccuucaccaugaaugg

SEQ ID NO: 594355 - RNA, 21 nt, Artificial Sequence
  Synthetic
uuugcccuucaccaugaaugg

SEQ ID NO: 594356 - RNA, 22 nt, Artificial Sequence
  Synthetic
cuuugcccuucaccaugaaugg

SEQ ID NO: 594357 - RNA, 23 nt, Artificial Sequence
  Synthetic
ccuuugcccuucaccaugaaugg

SEQ ID NO: 594358 - RNA, 24 nt, Artificial Sequence
  Synthetic
cccuuugcccuucaccaugaaugg

SEQ ID NO: 594359 - RNA, 18 nt, Artificial Sequence
  Synthetic
gauacagugucugaaugg

SEQ ID NO: 594360 - RNA, 19 nt, Artificial Sequence
  Synthetic
agauacagugucugaaugg

SEQ ID NO: 594361 - RNA, 20 nt, Artificial Sequence
  Synthetic
uagauacagugucugaaugg

SEQ ID NO: 594362 - RNA, 21 nt, Artificial Sequence
  Synthetic
auagauacagugucugaaugg

SEQ ID NO: 594363 - RNA, 22 nt, Artificial Sequence
  Synthetic
aauagauacagugucugaaugg

SEQ ID NO: 594364 - RNA, 23 nt, Artificial Sequence
  Synthetic
aaauagauacagugucugaaugg

SEQ ID NO: 594365 - RNA, 24 nt, Artificial Sequence
  Synthetic
aaaauagauacagugucugaaugg

SEQ ID NO: 594366 - RNA, 18 nt, Artificial Sequence
  Synthetic
ggcuugauaaaauaaugg

SEQ ID NO: 594367 - RNA, 19 nt, Artificial Sequence
  Synthetic
aggcuugauaaaauaaugg

SEQ ID NO: 594368 - RNA, 20 nt, Artificial Sequence
  Synthetic
uaggcuugauaaaauaaugg

SEQ ID NO: 594369 - RNA, 21 nt, Artificial Sequence
  Synthetic
cuaggcuugauaaaauaaugg

SEQ ID NO: 594370 - RNA, 22 nt, Artificial Sequence
  Synthetic
gcuaggcuugauaaaauaaugg

SEQ ID NO: 594371 - RNA, 23 nt, Artificial Sequence
  Synthetic
ugcuaggcuugauaaaauaaugg

SEQ ID NO: 594372 - RNA, 24 nt, Artificial Sequence
  Synthetic
cugcuaggcuugauaaaauaaugg

SEQ ID NO: 594373 - RNA, 18 nt, Artificial Sequence
  Synthetic
aagcaaccuacauaaugg

SEQ ID NO: 594374 - RNA, 19 nt, Artificial Sequence
  Synthetic
caagcaaccuacauaaugg

SEQ ID NO: 594375 - RNA, 20 nt, Artificial Sequence
  Synthetic
acaagcaaccuacauaaugg

SEQ ID NO: 594376 - RNA, 21 nt, Artificial Sequence
  Synthetic
aacaagcaaccuacauaaugg

SEQ ID NO: 594377 - RNA, 22 nt, Artificial Sequence
  Synthetic
gaacaagcaaccuacauaaugg

SEQ ID NO: 594378 - RNA, 23 nt, Artificial Sequence
  Synthetic
ugaacaagcaaccuacauaaugg

SEQ ID NO: 594379 - RNA, 24 nt, Artificial Sequence
  Synthetic
gugaacaagcaaccuacauaaugg

SEQ ID NO: 594380 - RNA, 18 nt, Artificial Sequence
  Synthetic
uucacgagaagauaaugg

SEQ ID NO: 594381 - RNA, 19 nt, Artificial Sequence
  Synthetic
uuucacgagaagauaaugg

SEQ ID NO: 594382 - RNA, 20 nt, Artificial Sequence
  Synthetic
uuuucacgagaagauaaugg

SEQ ID NO: 594383 - RNA, 21 nt, Artificial Sequence
  Synthetic
auuuucacgagaagauaaugg

SEQ ID NO: 594384 - RNA, 22 nt, Artificial Sequence
  Synthetic
uauuuucacgagaagauaaugg

SEQ ID NO: 594385 - RNA, 23 nt, Artificial Sequence
  Synthetic
cuauuuucacgagaagauaaugg

SEQ ID NO: 594386 - RNA, 24 nt, Artificial Sequence
  Synthetic
gcuauuuucacgagaagauaaugg

SEQ ID NO: 594387 - RNA, 18 nt, Artificial Sequence
  Synthetic
ucuccuucaggauaaugg

SEQ ID NO: 594388 - RNA, 19 nt, Artificial Sequence
  Synthetic
uucuccuucaggauaaugg

SEQ ID NO: 594389 - RNA, 20 nt, Artificial Sequence
  Synthetic
cuucuccuucaggauaaugg

SEQ ID NO: 594390 - RNA, 21 nt, Artificial Sequence
  Synthetic
ucuucuccuucaggauaaugg

SEQ ID NO: 594391 - RNA, 22 nt, Artificial Sequence
  Synthetic
aucuucuccuucaggauaaugg

SEQ ID NO: 594392 - RNA, 23 nt, Artificial Sequence
  Synthetic
caucuucuccuucaggauaaugg

SEQ ID NO: 594393 - RNA, 24 nt, Artificial Sequence
  Synthetic
ucaucuucuccuucaggauaaugg

SEQ ID NO: 594394 - RNA, 18 nt, Artificial Sequence
  Synthetic
uuaauaaugaccuaaugg

SEQ ID NO: 594395 - RNA, 19 nt, Artificial Sequence
  Synthetic
auuaauaaugaccuaaugg

SEQ ID NO: 594396 - RNA, 20 nt, Artificial Sequence
  Synthetic
aauuaauaaugaccuaaugg

SEQ ID NO: 594397 - RNA, 21 nt, Artificial Sequence
  Synthetic
caauuaauaaugaccuaaugg

SEQ ID NO: 594398 - RNA, 22 nt, Artificial Sequence
  Synthetic
ucaauuaauaaugaccuaaugg

SEQ ID NO: 594399 - RNA, 23 nt, Artificial Sequence
  Synthetic
cucaauuaauaaugaccuaaugg

SEQ ID NO: 594400 - RNA, 24 nt, Artificial Sequence
  Synthetic
acucaauuaauaaugaccuaaugg

SEQ ID NO: 594401 - RNA, 18 nt, Artificial Sequence
  Synthetic
gucgucaauacuuaaugg

SEQ ID NO: 594402 - RNA, 19 nt, Artificial Sequence
  Synthetic
ugucgucaauacuuaaugg

SEQ ID NO: 594403 - RNA, 20 nt, Artificial Sequence
  Synthetic
augucgucaauacuuaaugg

SEQ ID NO: 594404 - RNA, 21 nt, Artificial Sequence
  Synthetic
gaugucgucaauacuuaaugg

SEQ ID NO: 594405 - RNA, 22 nt, Artificial Sequence
  Synthetic
ggaugucgucaauacuuaaugg

SEQ ID NO: 594406 - RNA, 23 nt, Artificial Sequence
  Synthetic
aggaugucgucaauacuuaaugg

SEQ ID NO: 594407 - RNA, 24 nt, Artificial Sequence
  Synthetic
aaggaugucgucaauacuuaaugg

SEQ ID NO: 594408 - RNA, 18 nt, Artificial Sequence
  Synthetic
uaaaugacaaguuaaugg

SEQ ID NO: 594409 - RNA, 19 nt, Artificial Sequence
  Synthetic
guaaaugacaaguuaaugg

SEQ ID NO: 594410 - RNA, 20 nt, Artificial Sequence
  Synthetic
uguaaaugacaaguuaaugg

SEQ ID NO: 594411 - RNA, 21 nt, Artificial Sequence
  Synthetic
auguaaaugacaaguuaaugg

SEQ ID NO: 594412 - RNA, 22 nt, Artificial Sequence
  Synthetic
aauguaaaugacaaguuaaugg

SEQ ID NO: 594413 - RNA, 23 nt, Artificial Sequence
  Synthetic
uaauguaaaugacaaguuaaugg

SEQ ID NO: 594414 - RNA, 24 nt, Artificial Sequence
  Synthetic
cuaauguaaaugacaaguuaaugg

SEQ ID NO: 594415 - RNA, 18 nt, Artificial Sequence
  Synthetic
ucauuugcaacaacaugg

SEQ ID NO: 594416 - RNA, 19 nt, Artificial Sequence
  Synthetic
gucauuugcaacaacaugg

SEQ ID NO: 594417 - RNA, 20 nt, Artificial Sequence
  Synthetic
ugucauuugcaacaacaugg

SEQ ID NO: 594418 - RNA, 21 nt, Artificial Sequence
  Synthetic
cugucauuugcaacaacaugg

SEQ ID NO: 594419 - RNA, 22 nt, Artificial Sequence
  Synthetic
ccugucauuugcaacaacaugg

SEQ ID NO: 594420 - RNA, 23 nt, Artificial Sequence
  Synthetic
uccugucauuugcaacaacaugg

SEQ ID NO: 594421 - RNA, 24 nt, Artificial Sequence
  Synthetic
auccugucauuugcaacaacaugg

SEQ ID NO: 594422 - RNA, 18 nt, Artificial Sequence
  Synthetic
ucauuuaugacaacaugg

SEQ ID NO: 594423 - RNA, 19 nt, Artificial Sequence
  Synthetic
gucauuuaugacaacaugg

SEQ ID NO: 594424 - RNA, 20 nt, Artificial Sequence
  Synthetic
ugucauuuaugacaacaugg

SEQ ID NO: 594425 - RNA, 21 nt, Artificial Sequence
  Synthetic
cugucauuuaugacaacaugg

SEQ ID NO: 594426 - RNA, 22 nt, Artificial Sequence
  Synthetic
ccugucauuuaugacaacaugg

SEQ ID NO: 594427 - RNA, 23 nt, Artificial Sequence
  Synthetic
uccugucauuuaugacaacaugg

SEQ ID NO: 594428 - RNA, 24 nt, Artificial Sequence
  Synthetic
auccugucauuuaugacaacaugg

SEQ ID NO: 594429 - RNA, 18 nt, Artificial Sequence
  Synthetic
ugcuuccugacaacaugg

SEQ ID NO: 594430 - RNA, 19 nt, Artificial Sequence
  Synthetic
gugcuuccugacaacaugg

SEQ ID NO: 594431 - RNA, 20 nt, Artificial Sequence
  Synthetic
ugugcuuccugacaacaugg

SEQ ID NO: 594432 - RNA, 21 nt, Artificial Sequence
  Synthetic
gugugcuuccugacaacaugg

SEQ ID NO: 594433 - RNA, 22 nt, Artificial Sequence
  Synthetic
ugugugcuuccugacaacaugg

SEQ ID NO: 594434 - RNA, 23 nt, Artificial Sequence
  Synthetic
gugugugcuuccugacaacaugg

SEQ ID NO: 594435 - RNA, 24 nt, Artificial Sequence
  Synthetic
agugugugcuuccugacaacaugg

SEQ ID NO: 594436 - RNA, 18 nt, Artificial Sequence
  Synthetic
uucuuugcagcaacaugg

SEQ ID NO: 594437 - RNA, 19 nt, Artificial Sequence
  Synthetic
guucuuugcagcaacaugg

SEQ ID NO: 594438 - RNA, 20 nt, Artificial Sequence
  Synthetic
uguucuuugcagcaacaugg

SEQ ID NO: 594439 - RNA, 21 nt, Artificial Sequence
  Synthetic
auguucuuugcagcaacaugg

SEQ ID NO: 594440 - RNA, 22 nt, Artificial Sequence
  Synthetic
uauguucuuugcagcaacaugg

SEQ ID NO: 594441 - RNA, 23 nt, Artificial Sequence
  Synthetic
uuauguucuuugcagcaacaugg

SEQ ID NO: 594442 - RNA, 24 nt, Artificial Sequence
  Synthetic
auuauguucuuugcagcaacaugg

SEQ ID NO: 594443 - RNA, 18 nt, Artificial Sequence
  Synthetic
ucuuuugcagcaacaugg

SEQ ID NO: 594444 - RNA, 19 nt, Artificial Sequence
  Synthetic
gucuuuugcagcaacaugg

SEQ ID NO: 594445 - RNA, 20 nt, Artificial Sequence
  Synthetic
ugucuuuugcagcaacaugg

SEQ ID NO: 594446 - RNA, 21 nt, Artificial Sequence
  Synthetic
augucuuuugcagcaacaugg

SEQ ID NO: 594447 - RNA, 22 nt, Artificial Sequence
  Synthetic
caugucuuuugcagcaacaugg

SEQ ID NO: 594448 - RNA, 23 nt, Artificial Sequence
  Synthetic
ucaugucuuuugcagcaacaugg

SEQ ID NO: 594449 - RNA, 24 nt, Artificial Sequence
  Synthetic
aucaugucuuuugcagcaacaugg

SEQ ID NO: 594450 - RNA, 18 nt, Artificial Sequence
  Synthetic
auaggaagaagaacaugg

SEQ ID NO: 594451 - RNA, 19 nt, Artificial Sequence
  Synthetic
uauaggaagaagaacaugg

SEQ ID NO: 594452 - RNA, 20 nt, Artificial Sequence
  Synthetic
auauaggaagaagaacaugg

SEQ ID NO: 594453 - RNA, 21 nt, Artificial Sequence
  Synthetic
aauauaggaagaagaacaugg

SEQ ID NO: 594454 - RNA, 22 nt, Artificial Sequence
  Synthetic
aaauauaggaagaagaacaugg

SEQ ID NO: 594455 - RNA, 23 nt, Artificial Sequence
  Synthetic
aaaauauaggaagaagaacaugg

SEQ ID NO: 594456 - RNA, 24 nt, Artificial Sequence
  Synthetic
aaaaauauaggaagaagaacaugg

SEQ ID NO: 594457 - RNA, 18 nt, Artificial Sequence
  Synthetic
aguggccaaggaacaugg

SEQ ID NO: 594458 - RNA, 19 nt, Artificial Sequence
  Synthetic
gaguggccaaggaacaugg

SEQ ID NO: 594459 - RNA, 20 nt, Artificial Sequence
  Synthetic
ggaguggccaaggaacaugg

SEQ ID NO: 594460 - RNA, 21 nt, Artificial Sequence
  Synthetic
aggaguggccaaggaacaugg

SEQ ID NO: 594461 - RNA, 22 nt, Artificial Sequence
  Synthetic
gaggaguggccaaggaacaugg

SEQ ID NO: 594462 - RNA, 23 nt, Artificial Sequence
  Synthetic
ggaggaguggccaaggaacaugg

SEQ ID NO: 594463 - RNA, 24 nt, Artificial Sequence
  Synthetic
uggaggaguggccaaggaacaugg

SEQ ID NO: 594464 - RNA, 18 nt, Artificial Sequence
  Synthetic
uccuuugcaggaacaugg

SEQ ID NO: 594465 - RNA, 19 nt, Artificial Sequence
  Synthetic
guccuuugcaggaacaugg

SEQ ID NO: 594466 - RNA, 20 nt, Artificial Sequence
  Synthetic
uguccuuugcaggaacaugg

SEQ ID NO: 594467 - RNA, 21 nt, Artificial Sequence
  Synthetic
guguccuuugcaggaacaugg

SEQ ID NO: 594468 - RNA, 22 nt, Artificial Sequence
  Synthetic
cguguccuuugcaggaacaugg

SEQ ID NO: 594469 - RNA, 23 nt, Artificial Sequence
  Synthetic
ucguguccuuugcaggaacaugg

SEQ ID NO: 594470 - RNA, 24 nt, Artificial Sequence
  Synthetic
uucguguccuuugcaggaacaugg

SEQ ID NO: 594471 - RNA, 18 nt, Artificial Sequence
  Synthetic
gacagaaauggaacaugg

SEQ ID NO: 594472 - RNA, 19 nt, Artificial Sequence
  Synthetic
ggacagaaauggaacaugg

SEQ ID NO: 594473 - RNA, 20 nt, Artificial Sequence
  Synthetic
aggacagaaauggaacaugg

SEQ ID NO: 594474 - RNA, 21 nt, Artificial Sequence
  Synthetic
uaggacagaaauggaacaugg

SEQ ID NO: 594475 - RNA, 22 nt, Artificial Sequence
  Synthetic
auaggacagaaauggaacaugg

SEQ ID NO: 594476 - RNA, 23 nt, Artificial Sequence
  Synthetic
gauaggacagaaauggaacaugg

SEQ ID NO: 594477 - RNA, 24 nt, Artificial Sequence
  Synthetic
ugauaggacagaaauggaacaugg

SEQ ID NO: 594478 - RNA, 18 nt, Artificial Sequence
  Synthetic
augaaucuuaacacaugg

SEQ ID NO: 594479 - RNA, 19 nt, Artificial Sequence
  Synthetic
aaugaaucuuaacacaugg

SEQ ID NO: 594480 - RNA, 20 nt, Artificial Sequence
  Synthetic
aaaugaaucuuaacacaugg

SEQ ID NO: 594481 - RNA, 21 nt, Artificial Sequence
  Synthetic
caaaugaaucuuaacacaugg

SEQ ID NO: 594482 - RNA, 22 nt, Artificial Sequence
  Synthetic
ccaaaugaaucuuaacacaugg

SEQ ID NO: 594483 - RNA, 23 nt, Artificial Sequence
  Synthetic
cccaaaugaaucuuaacacaugg

SEQ ID NO: 594484 - RNA, 24 nt, Artificial Sequence
  Synthetic
ccccaaaugaaucuuaacacaugg

SEQ ID NO: 594485 - RNA, 18 nt, Artificial Sequence
  Synthetic
uguugaguagacacaugg

SEQ ID NO: 594486 - RNA, 19 nt, Artificial Sequence
  Synthetic
auguugaguagacacaugg

SEQ ID NO: 594487 - RNA, 20 nt, Artificial Sequence
  Synthetic
cauguugaguagacacaugg

SEQ ID NO: 594488 - RNA, 21 nt, Artificial Sequence
  Synthetic
acauguugaguagacacaugg

SEQ ID NO: 594489 - RNA, 22 nt, Artificial Sequence
  Synthetic
aacauguugaguagacacaugg

SEQ ID NO: 594490 - RNA, 23 nt, Artificial Sequence
  Synthetic
gaacauguugaguagacacaugg

SEQ ID NO: 594491 - RNA, 24 nt, Artificial Sequence
  Synthetic
ugaacauguugaguagacacaugg

SEQ ID NO: 594492 - RNA, 18 nt, Artificial Sequence
  Synthetic
aucauagugaccacaugg

SEQ ID NO: 594493 - RNA, 19 nt, Artificial Sequence
  Synthetic
gaucauagugaccacaugg

SEQ ID NO: 594494 - RNA, 20 nt, Artificial Sequence
  Synthetic
ugaucauagugaccacaugg

SEQ ID NO: 594495 - RNA, 21 nt, Artificial Sequence
  Synthetic
gugaucauagugaccacaugg

SEQ ID NO: 594496 - RNA, 22 nt, Artificial Sequence
  Synthetic
agugaucauagugaccacaugg

SEQ ID NO: 594497 - RNA, 23 nt, Artificial Sequence
  Synthetic
uagugaucauagugaccacaugg

SEQ ID NO: 594498 - RNA, 24 nt, Artificial Sequence
  Synthetic
auagugaucauagugaccacaugg

SEQ ID NO: 594499 - RNA, 18 nt, Artificial Sequence
  Synthetic
ggaaugacugucacaugg

SEQ ID NO: 594500 - RNA, 19 nt, Artificial Sequence
  Synthetic
uggaaugacugucacaugg

SEQ ID NO: 594501 - RNA, 20 nt, Artificial Sequence
  Synthetic
auggaaugacugucacaugg

SEQ ID NO: 594502 - RNA, 21 nt, Artificial Sequence
  Synthetic
gauggaaugacugucacaugg

SEQ ID NO: 594503 - RNA, 22 nt, Artificial Sequence
  Synthetic
agauggaaugacugucacaugg

SEQ ID NO: 594504 - RNA, 23 nt, Artificial Sequence
  Synthetic
cagauggaaugacugucacaugg

SEQ ID NO: 594505 - RNA, 24 nt, Artificial Sequence
  Synthetic
ucagauggaaugacugucacaugg

SEQ ID NO: 594506 - RNA, 18 nt, Artificial Sequence
  Synthetic
augacagugcagacaugg

SEQ ID NO: 594507 - RNA, 19 nt, Artificial Sequence
  Synthetic
gaugacagugcagacaugg

SEQ ID NO: 594508 - RNA, 20 nt, Artificial Sequence
  Synthetic
ggaugacagugcagacaugg

SEQ ID NO: 594509 - RNA, 21 nt, Artificial Sequence
  Synthetic
cggaugacagugcagacaugg

SEQ ID NO: 594510 - RNA, 22 nt, Artificial Sequence
  Synthetic
gcggaugacagugcagacaugg

SEQ ID NO: 594511 - RNA, 23 nt, Artificial Sequence
  Synthetic
agcggaugacagugcagacaugg

SEQ ID NO: 594512 - RNA, 24 nt, Artificial Sequence
  Synthetic
aagcggaugacagugcagacaugg

SEQ ID NO: 594513 - RNA, 18 nt, Artificial Sequence
  Synthetic
uucuuuguagagacaugg

SEQ ID NO: 594514 - RNA, 19 nt, Artificial Sequence
  Synthetic
guucuuuguagagacaugg

SEQ ID NO: 594515 - RNA, 20 nt, Artificial Sequence
  Synthetic
uguucuuuguagagacaugg

SEQ ID NO: 594516 - RNA, 21 nt, Artificial Sequence
  Synthetic
auguucuuuguagagacaugg

SEQ ID NO: 594517 - RNA, 22 nt, Artificial Sequence
  Synthetic
cauguucuuuguagagacaugg

SEQ ID NO: 594518 - RNA, 23 nt, Artificial Sequence
  Synthetic
ucauguucuuuguagagacaugg

SEQ ID NO: 594519 - RNA, 24 nt, Artificial Sequence
  Synthetic
uucauguucuuuguagagacaugg

SEQ ID NO: 594520 - RNA, 18 nt, Artificial Sequence
  Synthetic
uccuuugcacggacaugg

SEQ ID NO: 594521 - RNA, 19 nt, Artificial Sequence
  Synthetic
guccuuugcacggacaugg

SEQ ID NO: 594522 - RNA, 20 nt, Artificial Sequence
  Synthetic
uguccuuugcacggacaugg

SEQ ID NO: 594523 - RNA, 21 nt, Artificial Sequence
  Synthetic
auguccuuugcacggacaugg

SEQ ID NO: 594524 - RNA, 22 nt, Artificial Sequence
  Synthetic
cauguccuuugcacggacaugg

SEQ ID NO: 594525 - RNA, 23 nt, Artificial Sequence
  Synthetic
ucauguccuuugcacggacaugg

SEQ ID NO: 594526 - RNA, 24 nt, Artificial Sequence
  Synthetic
uucauguccuuugcacggacaugg

SEQ ID NO: 594527 - RNA, 18 nt, Artificial Sequence
  Synthetic
uccuuugaagggacaugg

SEQ ID NO: 594528 - RNA, 19 nt, Artificial Sequence
  Synthetic
guccuuugaagggacaugg

SEQ ID NO: 594529 - RNA, 20 nt, Artificial Sequence
  Synthetic
uguccuuugaagggacaugg

SEQ ID NO: 594530 - RNA, 21 nt, Artificial Sequence
  Synthetic
auguccuuugaagggacaugg

SEQ ID NO: 594531 - RNA, 22 nt, Artificial Sequence
  Synthetic
uauguccuuugaagggacaugg

SEQ ID NO: 594532 - RNA, 23 nt, Artificial Sequence
  Synthetic
uuauguccuuugaagggacaugg

SEQ ID NO: 594533 - RNA, 24 nt, Artificial Sequence
  Synthetic
uuuauguccuuugaagggacaugg

SEQ ID NO: 594534 - RNA, 18 nt, Artificial Sequence
  Synthetic
uccuuugcagggacaugg

SEQ ID NO: 594535 - RNA, 19 nt, Artificial Sequence
  Synthetic
guccuuugcagggacaugg

SEQ ID NO: 594536 - RNA, 20 nt, Artificial Sequence
  Synthetic
uguccuuugcagggacaugg

SEQ ID NO: 594537 - RNA, 21 nt, Artificial Sequence
  Synthetic
auguccuuugcagggacaugg

SEQ ID NO: 594538 - RNA, 22 nt, Artificial Sequence
  Synthetic
cauguccuuugcagggacaugg

SEQ ID NO: 594539 - RNA, 23 nt, Artificial Sequence
  Synthetic
ucauguccuuugcagggacaugg

SEQ ID NO: 594540 - RNA, 24 nt, Artificial Sequence
  Synthetic
aucauguccuuugcagggacaugg

SEQ ID NO: 594541 - RNA, 24 nt, Artificial Sequence
  Synthetic
uucauguccuuugcagggacaugg

SEQ ID NO: 594542 - RNA, 21 nt, Artificial Sequence
  Synthetic
acauccuuuguagggacaugg

SEQ ID NO: 594543 - RNA, 22 nt, Artificial Sequence
  Synthetic
cacauccuuuguagggacaugg

SEQ ID NO: 594544 - RNA, 23 nt, Artificial Sequence
  Synthetic
ucacauccuuuguagggacaugg

SEQ ID NO: 594545 - RNA, 24 nt, Artificial Sequence
  Synthetic
uucacauccuuuguagggacaugg

SEQ ID NO: 594546 - RNA, 21 nt, Artificial Sequence
  Synthetic
auguccuuuguagggacaugg

SEQ ID NO: 594547 - RNA, 22 nt, Artificial Sequence
  Synthetic
cauguccuuuguagggacaugg

SEQ ID NO: 594548 - RNA, 23 nt, Artificial Sequence
  Synthetic
ucauguccuuuguagggacaugg

SEQ ID NO: 594549 - RNA, 24 nt, Artificial Sequence
  Synthetic
uucauguccuuuguagggacaugg

SEQ ID NO: 594550 - RNA, 18 nt, Artificial Sequence
  Synthetic
agugccacacugacaugg

SEQ ID NO: 594551 - RNA, 19 nt, Artificial Sequence
  Synthetic
cagugccacacugacaugg

SEQ ID NO: 594552 - RNA, 20 nt, Artificial Sequence
  Synthetic
acagugccacacugacaugg

SEQ ID NO: 594553 - RNA, 21 nt, Artificial Sequence
  Synthetic
aacagugccacacugacaugg

SEQ ID NO: 594554 - RNA, 22 nt, Artificial Sequence
  Synthetic
aaacagugccacacugacaugg

SEQ ID NO: 594555 - RNA, 23 nt, Artificial Sequence
  Synthetic
gaaacagugccacacugacaugg

SEQ ID NO: 594556 - RNA, 24 nt, Artificial Sequence
  Synthetic
agaaacagugccacacugacaugg

SEQ ID NO: 594557 - RNA, 18 nt, Artificial Sequence
  Synthetic
guuucaauguugacaugg

SEQ ID NO: 594558 - RNA, 19 nt, Artificial Sequence
  Synthetic
aguuucaauguugacaugg

SEQ ID NO: 594559 - RNA, 20 nt, Artificial Sequence
  Synthetic
aaguuucaauguugacaugg

SEQ ID NO: 594560 - RNA, 21 nt, Artificial Sequence
  Synthetic
gaaguuucaauguugacaugg

SEQ ID NO: 594561 - RNA, 22 nt, Artificial Sequence
  Synthetic
ugaaguuucaauguugacaugg

SEQ ID NO: 594562 - RNA, 23 nt, Artificial Sequence
  Synthetic
cugaaguuucaauguugacaugg

SEQ ID NO: 594563 - RNA, 24 nt, Artificial Sequence
  Synthetic
ucugaaguuucaauguugacaugg

SEQ ID NO: 594564 - RNA, 18 nt, Artificial Sequence
  Synthetic
uuguuuagcaauacaugg

SEQ ID NO: 594565 - RNA, 19 nt, Artificial Sequence
  Synthetic
uuuguuuagcaauacaugg

SEQ ID NO: 594566 - RNA, 20 nt, Artificial Sequence
  Synthetic
cuuuguuuagcaauacaugg

SEQ ID NO: 594567 - RNA, 21 nt, Artificial Sequence
  Synthetic
acuuuguuuagcaauacaugg

SEQ ID NO: 594568 - RNA, 22 nt, Artificial Sequence
  Synthetic
uacuuuguuuagcaauacaugg

SEQ ID NO: 594569 - RNA, 23 nt, Artificial Sequence
  Synthetic
auacuuuguuuagcaauacaugg

SEQ ID NO: 594570 - RNA, 24 nt, Artificial Sequence
  Synthetic
gauacuuuguuuagcaauacaugg

SEQ ID NO: 594571 - RNA, 18 nt, Artificial Sequence
  Synthetic
aguggcuguacuacaugg

SEQ ID NO: 594572 - RNA, 19 nt, Artificial Sequence
  Synthetic
gaguggcuguacuacaugg

SEQ ID NO: 594573 - RNA, 20 nt, Artificial Sequence
  Synthetic
agaguggcuguacuacaugg

SEQ ID NO: 594574 - RNA, 21 nt, Artificial Sequence
  Synthetic
gagaguggcuguacuacaugg

SEQ ID NO: 594575 - RNA, 22 nt, Artificial Sequence
  Synthetic
ggagaguggcuguacuacaugg

SEQ ID NO: 594576 - RNA, 23 nt, Artificial Sequence
  Synthetic
uggagaguggcuguacuacaugg

SEQ ID NO: 594577 - RNA, 24 nt, Artificial Sequence
  Synthetic
cuggagaguggcuguacuacaugg

SEQ ID NO: 594578 - RNA, 18 nt, Artificial Sequence
  Synthetic
gauauugacccuacaugg

SEQ ID NO: 594579 - RNA, 19 nt, Artificial Sequence
  Synthetic
ugauauugacccuacaugg

SEQ ID NO: 594580 - RNA, 20 nt, Artificial Sequence
  Synthetic
gugauauugacccuacaugg

SEQ ID NO: 594581 - RNA, 21 nt, Artificial Sequence
  Synthetic
agugauauugacccuacaugg

SEQ ID NO: 594582 - RNA, 22 nt, Artificial Sequence
  Synthetic
uagugauauugacccuacaugg

SEQ ID NO: 594583 - RNA, 23 nt, Artificial Sequence
  Synthetic
uuagugauauugacccuacaugg

SEQ ID NO: 594584 - RNA, 24 nt, Artificial Sequence
  Synthetic
uuuagugauauugacccuacaugg

SEQ ID NO: 594585 - RNA, 18 nt, Artificial Sequence
  Synthetic
acucaccauucuacaugg

SEQ ID NO: 594586 - RNA, 19 nt, Artificial Sequence
  Synthetic
gacucaccauucuacaugg

SEQ ID NO: 594587 - RNA, 20 nt, Artificial Sequence
  Synthetic
ggacucaccauucuacaugg

SEQ ID NO: 594588 - RNA, 21 nt, Artificial Sequence
  Synthetic
uggacucaccauucuacaugg

SEQ ID NO: 594589 - RNA, 22 nt, Artificial Sequence
  Synthetic
auggacucaccauucuacaugg

SEQ ID NO: 594590 - RNA, 23 nt, Artificial Sequence
  Synthetic
aauggacucaccauucuacaugg

SEQ ID NO: 594591 - RNA, 24 nt, Artificial Sequence
  Synthetic
uaauggacucaccauucuacaugg

SEQ ID NO: 594592 - RNA, 18 nt, Artificial Sequence
  Synthetic
ugacaugaaauuacaugg

SEQ ID NO: 594593 - RNA, 19 nt, Artificial Sequence
  Synthetic
augacaugaaauuacaugg

SEQ ID NO: 594594 - RNA, 20 nt, Artificial Sequence
  Synthetic
uaugacaugaaauuacaugg

SEQ ID NO: 594595 - RNA, 21 nt, Artificial Sequence
  Synthetic
guaugacaugaaauuacaugg

SEQ ID NO: 594596 - RNA, 22 nt, Artificial Sequence
  Synthetic
gguaugacaugaaauuacaugg

SEQ ID NO: 594597 - RNA, 23 nt, Artificial Sequence
  Synthetic
agguaugacaugaaauuacaugg

SEQ ID NO: 594598 - RNA, 24 nt, Artificial Sequence
  Synthetic
cagguaugacaugaaauuacaugg

SEQ ID NO: 594599 - RNA, 18 nt, Artificial Sequence
  Synthetic
cgguguguccuuacaugg

SEQ ID NO: 594600 - RNA, 19 nt, Artificial Sequence
  Synthetic
ucgguguguccuuacaugg

SEQ ID NO: 594601 - RNA, 20 nt, Artificial Sequence
  Synthetic
uucgguguguccuuacaugg

SEQ ID NO: 594602 - RNA, 21 nt, Artificial Sequence
  Synthetic
cuucgguguguccuuacaugg

SEQ ID NO: 594603 - RNA, 22 nt, Artificial Sequence
  Synthetic
ucuucgguguguccuuacaugg

SEQ ID NO: 594604 - RNA, 23 nt, Artificial Sequence
  Synthetic
aucuucgguguguccuuacaugg

SEQ ID NO: 594605 - RNA, 24 nt, Artificial Sequence
  Synthetic
caucuucgguguguccuuacaugg

SEQ ID NO: 594606 - RNA, 18 nt, Artificial Sequence
  Synthetic
ucagcagcaaaaccaugg

SEQ ID NO: 594607 - RNA, 19 nt, Artificial Sequence
  Synthetic
gucagcagcaaaaccaugg

SEQ ID NO: 594608 - RNA, 20 nt, Artificial Sequence
  Synthetic
agucagcagcaaaaccaugg

SEQ ID NO: 594609 - RNA, 21 nt, Artificial Sequence
  Synthetic
cagucagcagcaaaaccaugg

SEQ ID NO: 594610 - RNA, 22 nt, Artificial Sequence
  Synthetic
ucagucagcagcaaaaccaugg

SEQ ID NO: 594611 - RNA, 23 nt, Artificial Sequence
  Synthetic
aucagucagcagcaaaaccaugg

SEQ ID NO: 594612 - RNA, 24 nt, Artificial Sequence
  Synthetic
aaucagucagcagcaaaaccaugg

SEQ ID NO: 594613 - RNA, 18 nt, Artificial Sequence
  Synthetic
cagauucauaaaccaugg

SEQ ID NO: 594614 - RNA, 19 nt, Artificial Sequence
  Synthetic
ucagauucauaaaccaugg

SEQ ID NO: 594615 - RNA, 20 nt, Artificial Sequence
  Synthetic
cucagauucauaaaccaugg

SEQ ID NO: 594616 - RNA, 21 nt, Artificial Sequence
  Synthetic
ucucagauucauaaaccaugg

SEQ ID NO: 594617 - RNA, 22 nt, Artificial Sequence
  Synthetic
cucucagauucauaaaccaugg

SEQ ID NO: 594618 - RNA, 23 nt, Artificial Sequence
  Synthetic
acucucagauucauaaaccaugg

SEQ ID NO: 594619 - RNA, 24 nt, Artificial Sequence
  Synthetic
cacucucagauucauaaaccaugg

SEQ ID NO: 594620 - RNA, 18 nt, Artificial Sequence
  Synthetic
guuuacaaccaaccaugg

SEQ ID NO: 594621 - RNA, 19 nt, Artificial Sequence
  Synthetic
aguuuacaaccaaccaugg

SEQ ID NO: 594622 - RNA, 20 nt, Artificial Sequence
  Synthetic
aaguuuacaaccaaccaugg

SEQ ID NO: 594623 - RNA, 21 nt, Artificial Sequence
  Synthetic
gaaguuuacaaccaaccaugg

SEQ ID NO: 594624 - RNA, 22 nt, Artificial Sequence
  Synthetic
ggaaguuuacaaccaaccaugg

SEQ ID NO: 594625 - RNA, 23 nt, Artificial Sequence
  Synthetic
aggaaguuuacaaccaaccaugg

SEQ ID NO: 594626 - RNA, 24 nt, Artificial Sequence
  Synthetic
caggaaguuuacaaccaaccaugg

SEQ ID NO: 594627 - RNA, 18 nt, Artificial Sequence
  Synthetic
agaggggaagacccaugg

SEQ ID NO: 594628 - RNA, 19 nt, Artificial Sequence
  Synthetic
aagaggggaagacccaugg

SEQ ID NO: 594629 - RNA, 20 nt, Artificial Sequence
  Synthetic
gaagaggggaagacccaugg

SEQ ID NO: 594630 - RNA, 21 nt, Artificial Sequence
  Synthetic
ggaagaggggaagacccaugg

SEQ ID NO: 594631 - RNA, 22 nt, Artificial Sequence
  Synthetic
gggaagaggggaagacccaugg

SEQ ID NO: 594632 - RNA, 23 nt, Artificial Sequence
  Synthetic
agggaagaggggaagacccaugg

SEQ ID NO: 594633 - RNA, 24 nt, Artificial Sequence
  Synthetic
gagggaagaggggaagacccaugg

SEQ ID NO: 594634 - RNA, 18 nt, Artificial Sequence
  Synthetic
uuaaaauaacccccaugg

SEQ ID NO: 594635 - RNA, 19 nt, Artificial Sequence
  Synthetic
uuuaaaauaacccccaugg

SEQ ID NO: 594636 - RNA, 20 nt, Artificial Sequence
  Synthetic
uuuuaaaauaacccccaugg

SEQ ID NO: 594637 - RNA, 21 nt, Artificial Sequence
  Synthetic
auuuuaaaauaacccccaugg

SEQ ID NO: 594638 - RNA, 22 nt, Artificial Sequence
  Synthetic
cauuuuaaaauaacccccaugg

SEQ ID NO: 594639 - RNA, 23 nt, Artificial Sequence
  Synthetic
ucauuuuaaaauaacccccaugg

SEQ ID NO: 594640 - RNA, 24 nt, Artificial Sequence
  Synthetic
uucauuuuaaaauaacccccaugg

SEQ ID NO: 594641 - RNA, 18 nt, Artificial Sequence
  Synthetic
acucaaguagucccaugg

SEQ ID NO: 594642 - RNA, 19 nt, Artificial Sequence
  Synthetic
cacucaaguagucccaugg

SEQ ID NO: 594643 - RNA, 20 nt, Artificial Sequence
  Synthetic
acacucaaguagucccaugg

SEQ ID NO: 594644 - RNA, 21 nt, Artificial Sequence
  Synthetic
aacacucaaguagucccaugg

SEQ ID NO: 594645 - RNA, 22 nt, Artificial Sequence
  Synthetic
gaacacucaaguagucccaugg

SEQ ID NO: 594646 - RNA, 23 nt, Artificial Sequence
  Synthetic
agaacacucaaguagucccaugg

SEQ ID NO: 594647 - RNA, 24 nt, Artificial Sequence
  Synthetic
aagaacacucaaguagucccaugg

SEQ ID NO: 594648 - RNA, 18 nt, Artificial Sequence
  Synthetic
gaucccagaaagccaugg

SEQ ID NO: 594649 - RNA, 19 nt, Artificial Sequence
  Synthetic
ugaucccagaaagccaugg

SEQ ID NO: 594650 - RNA, 20 nt, Artificial Sequence
  Synthetic
cugaucccagaaagccaugg

SEQ ID NO: 594651 - RNA, 21 nt, Artificial Sequence
  Synthetic
gcugaucccagaaagccaugg

SEQ ID NO: 594652 - RNA, 22 nt, Artificial Sequence
  Synthetic
agcugaucccagaaagccaugg

SEQ ID NO: 594653 - RNA, 23 nt, Artificial Sequence
  Synthetic
gagcugaucccagaaagccaugg

SEQ ID NO: 594654 - RNA, 24 nt, Artificial Sequence
  Synthetic
ggagcugaucccagaaagccaugg

SEQ ID NO: 594655 - RNA, 18 nt, Artificial Sequence
  Synthetic
aaauccuaauggccaugg

SEQ ID NO: 594656 - RNA, 19 nt, Artificial Sequence
  Synthetic
aaaauccuaauggccaugg

SEQ ID NO: 594657 - RNA, 20 nt, Artificial Sequence
  Synthetic
gaaaauccuaauggccaugg

SEQ ID NO: 594658 - RNA, 21 nt, Artificial Sequence
  Synthetic
ggaaaauccuaauggccaugg

SEQ ID NO: 594659 - RNA, 22 nt, Artificial Sequence
  Synthetic
uggaaaauccuaauggccaugg

SEQ ID NO: 594660 - RNA, 23 nt, Artificial Sequence
  Synthetic
guggaaaauccuaauggccaugg

SEQ ID NO: 594661 - RNA, 24 nt, Artificial Sequence
  Synthetic
aguggaaaauccuaauggccaugg

SEQ ID NO: 594662 - RNA, 18 nt, Artificial Sequence
  Synthetic
ucucuagaguugccaugg

SEQ ID NO: 594663 - RNA, 19 nt, Artificial Sequence
  Synthetic
uucucuagaguugccaugg

SEQ ID NO: 594664 - RNA, 20 nt, Artificial Sequence
  Synthetic
cuucucuagaguugccaugg

SEQ ID NO: 594665 - RNA, 21 nt, Artificial Sequence
  Synthetic
ccuucucuagaguugccaugg

SEQ ID NO: 594666 - RNA, 22 nt, Artificial Sequence
  Synthetic
cccuucucuagaguugccaugg

SEQ ID NO: 594667 - RNA, 23 nt, Artificial Sequence
  Synthetic
ccccuucucuagaguugccaugg

SEQ ID NO: 594668 - RNA, 24 nt, Artificial Sequence
  Synthetic
accccuucucuagaguugccaugg

SEQ ID NO: 594669 - RNA, 18 nt, Artificial Sequence
  Synthetic
cucacgcugccuccaugg

SEQ ID NO: 594670 - RNA, 19 nt, Artificial Sequence
  Synthetic
ccucacgcugccuccaugg

SEQ ID NO: 594671 - RNA, 20 nt, Artificial Sequence
  Synthetic
cccucacgcugccuccaugg

SEQ ID NO: 594672 - RNA, 21 nt, Artificial Sequence
  Synthetic
gcccucacgcugccuccaugg

SEQ ID NO: 594673 - RNA, 22 nt, Artificial Sequence
  Synthetic
agcccucacgcugccuccaugg

SEQ ID NO: 594674 - RNA, 23 nt, Artificial Sequence
  Synthetic
aagcccucacgcugccuccaugg

SEQ ID NO: 594675 - RNA, 24 nt, Artificial Sequence
  Synthetic
aaagcccucacgcugccuccaugg

SEQ ID NO: 594676 - RNA, 18 nt, Artificial Sequence
  Synthetic
aucacgacaacagcaugg

SEQ ID NO: 594677 - RNA, 19 nt, Artificial Sequence
  Synthetic
uaucacgacaacagcaugg

SEQ ID NO: 594678 - RNA, 20 nt, Artificial Sequence
  Synthetic
cuaucacgacaacagcaugg

SEQ ID NO: 594679 - RNA, 21 nt, Artificial Sequence
  Synthetic
acuaucacgacaacagcaugg

SEQ ID NO: 594680 - RNA, 22 nt, Artificial Sequence
  Synthetic
cacuaucacgacaacagcaugg

SEQ ID NO: 594681 - RNA, 23 nt, Artificial Sequence
  Synthetic
ucacuaucacgacaacagcaugg

SEQ ID NO: 594682 - RNA, 24 nt, Artificial Sequence
  Synthetic
uucacuaucacgacaacagcaugg

SEQ ID NO: 594683 - RNA, 18 nt, Artificial Sequence
  Synthetic
aucaggagaacagcaugg

SEQ ID NO: 594684 - RNA, 19 nt, Artificial Sequence
  Synthetic
uaucaggagaacagcaugg

SEQ ID NO: 594685 - RNA, 20 nt, Artificial Sequence
  Synthetic
cuaucaggagaacagcaugg

SEQ ID NO: 594686 - RNA, 21 nt, Artificial Sequence
  Synthetic
acuaucaggagaacagcaugg

SEQ ID NO: 594687 - RNA, 22 nt, Artificial Sequence
  Synthetic
cacuaucaggagaacagcaugg

SEQ ID NO: 594688 - RNA, 23 nt, Artificial Sequence
  Synthetic
ucacuaucaggagaacagcaugg

SEQ ID NO: 594689 - RNA, 24 nt, Artificial Sequence
  Synthetic
cucacuaucaggagaacagcaugg

SEQ ID NO: 594690 - RNA, 18 nt, Artificial Sequence
  Synthetic
cacucagggacagcaugg

SEQ ID NO: 594691 - RNA, 19 nt, Artificial Sequence
  Synthetic
ucacucagggacagcaugg

SEQ ID NO: 594692 - RNA, 20 nt, Artificial Sequence
  Synthetic
cucacucagggacagcaugg

SEQ ID NO: 594693 - RNA, 21 nt, Artificial Sequence
  Synthetic
gcucacucagggacagcaugg

SEQ ID NO: 594694 - RNA, 22 nt, Artificial Sequence
  Synthetic
agcucacucagggacagcaugg

SEQ ID NO: 594695 - RNA, 23 nt, Artificial Sequence
  Synthetic
aagcucacucagggacagcaugg

SEQ ID NO: 594696 - RNA, 24 nt, Artificial Sequence
  Synthetic
gaagcucacucagggacagcaugg

SEQ ID NO: 594697 - RNA, 18 nt, Artificial Sequence
  Synthetic
acacacaguucagcaugg

SEQ ID NO: 594698 - RNA, 19 nt, Artificial Sequence
  Synthetic
gacacacaguucagcaugg

SEQ ID NO: 594699 - RNA, 20 nt, Artificial Sequence
  Synthetic
ugacacacaguucagcaugg

SEQ ID NO: 594700 - RNA, 21 nt, Artificial Sequence
  Synthetic
uugacacacaguucagcaugg

SEQ ID NO: 594701 - RNA, 22 nt, Artificial Sequence
  Synthetic
auugacacacaguucagcaugg

SEQ ID NO: 594702 - RNA, 23 nt, Artificial Sequence
  Synthetic
aauugacacacaguucagcaugg

SEQ ID NO: 594703 - RNA, 24 nt, Artificial Sequence
  Synthetic
uaauugacacacaguucagcaugg

SEQ ID NO: 594704 - RNA, 18 nt, Artificial Sequence
  Synthetic
acucauaguucagcaugg

SEQ ID NO: 594705 - RNA, 19 nt, Artificial Sequence
  Synthetic
gacucauaguucagcaugg

SEQ ID NO: 594706 - RNA, 20 nt, Artificial Sequence
  Synthetic
ugacucauaguucagcaugg

SEQ ID NO: 594707 - RNA, 21 nt, Artificial Sequence
  Synthetic
uugacucauaguucagcaugg

SEQ ID NO: 594708 - RNA, 22 nt, Artificial Sequence
  Synthetic
auugacucauaguucagcaugg

SEQ ID NO: 594709 - RNA, 23 nt, Artificial Sequence
  Synthetic
aauugacucauaguucagcaugg

SEQ ID NO: 594710 - RNA, 24 nt, Artificial Sequence
  Synthetic
uaauugacucauaguucagcaugg

SEQ ID NO: 594711 - RNA, 18 nt, Artificial Sequence
  Synthetic
aucaugagaauagcaugg

SEQ ID NO: 594712 - RNA, 19 nt, Artificial Sequence
  Synthetic
uaucaugagaauagcaugg

SEQ ID NO: 594713 - RNA, 20 nt, Artificial Sequence
  Synthetic
cuaucaugagaauagcaugg

SEQ ID NO: 594714 - RNA, 21 nt, Artificial Sequence
  Synthetic
acuaucaugagaauagcaugg

SEQ ID NO: 594715 - RNA, 22 nt, Artificial Sequence
  Synthetic
cacuaucaugagaauagcaugg

SEQ ID NO: 594716 - RNA, 23 nt, Artificial Sequence
  Synthetic
ccacuaucaugagaauagcaugg

SEQ ID NO: 594717 - RNA, 24 nt, Artificial Sequence
  Synthetic
cccacuaucaugagaauagcaugg

SEQ ID NO: 594718 - RNA, 18 nt, Artificial Sequence
  Synthetic
aaaauuagccaggcaugg

SEQ ID NO: 594719 - RNA, 19 nt, Artificial Sequence
  Synthetic
aaaaauuagccaggcaugg

SEQ ID NO: 594720 - RNA, 20 nt, Artificial Sequence
  Synthetic
aaaaaauuagccaggcaugg

SEQ ID NO: 594721 - RNA, 21 nt, Artificial Sequence
  Synthetic
uaaaaaauuagccaggcaugg

SEQ ID NO: 594722 - RNA, 22 nt, Artificial Sequence
  Synthetic
auaaaaaauuagccaggcaugg

SEQ ID NO: 594723 - RNA, 23 nt, Artificial Sequence
  Synthetic
aauaaaaaauuagccaggcaugg

SEQ ID NO: 594724 - RNA, 24 nt, Artificial Sequence
  Synthetic
aaauaaaaaauuagccaggcaugg

SEQ ID NO: 594725 - RNA, 18 nt, Artificial Sequence
  Synthetic
uuucaaccaguggcaugg

SEQ ID NO: 594726 - RNA, 19 nt, Artificial Sequence
  Synthetic
uuuucaaccaguggcaugg

SEQ ID NO: 594727 - RNA, 20 nt, Artificial Sequence
  Synthetic
uuuuucaaccaguggcaugg

SEQ ID NO: 594728 - RNA, 21 nt, Artificial Sequence
  Synthetic
auuuuucaaccaguggcaugg

SEQ ID NO: 594729 - RNA, 22 nt, Artificial Sequence
  Synthetic
uauuuuucaaccaguggcaugg

SEQ ID NO: 594730 - RNA, 23 nt, Artificial Sequence
  Synthetic
auauuuuucaaccaguggcaugg

SEQ ID NO: 594731 - RNA, 24 nt, Artificial Sequence
  Synthetic
cauauuuuucaaccaguggcaugg

SEQ ID NO: 594732 - RNA, 18 nt, Artificial Sequence
  Synthetic
auucaccauucugcaugg

SEQ ID NO: 594733 - RNA, 19 nt, Artificial Sequence
  Synthetic
gauucaccauucugcaugg

SEQ ID NO: 594734 - RNA, 20 nt, Artificial Sequence
  Synthetic
ugauucaccauucugcaugg

SEQ ID NO: 594735 - RNA, 21 nt, Artificial Sequence
  Synthetic
uugauucaccauucugcaugg

SEQ ID NO: 594736 - RNA, 22 nt, Artificial Sequence
  Synthetic
auugauucaccauucugcaugg

SEQ ID NO: 594737 - RNA, 23 nt, Artificial Sequence
  Synthetic
aauugauucaccauucugcaugg

SEQ ID NO: 594738 - RNA, 24 nt, Artificial Sequence
  Synthetic
uaauugauucaccauucugcaugg

SEQ ID NO: 594739 - RNA, 18 nt, Artificial Sequence
  Synthetic
auggcuaaaaaaucaugg

SEQ ID NO: 594740 - RNA, 19 nt, Artificial Sequence
  Synthetic
uauggcuaaaaaaucaugg

SEQ ID NO: 594741 - RNA, 20 nt, Artificial Sequence
  Synthetic
uuauggcuaaaaaaucaugg

SEQ ID NO: 594742 - RNA, 21 nt, Artificial Sequence
  Synthetic
auuauggcuaaaaaaucaugg

SEQ ID NO: 594743 - RNA, 22 nt, Artificial Sequence
  Synthetic
cauuauggcuaaaaaaucaugg

SEQ ID NO: 594744 - RNA, 23 nt, Artificial Sequence
  Synthetic
acauuauggcuaaaaaaucaugg

SEQ ID NO: 594745 - RNA, 24 nt, Artificial Sequence
  Synthetic
aacauuauggcuaaaaaaucaugg

SEQ ID NO: 594746 - RNA, 18 nt, Artificial Sequence
  Synthetic
gcggcaucaaaaucaugg

SEQ ID NO: 594747 - RNA, 19 nt, Artificial Sequence
  Synthetic
agcggcaucaaaaucaugg

SEQ ID NO: 594748 - RNA, 20 nt, Artificial Sequence
  Synthetic
cagcggcaucaaaaucaugg

SEQ ID NO: 594749 - RNA, 21 nt, Artificial Sequence
  Synthetic
ccagcggcaucaaaaucaugg

SEQ ID NO: 594750 - RNA, 22 nt, Artificial Sequence
  Synthetic
accagcggcaucaaaaucaugg

SEQ ID NO: 594751 - RNA, 23 nt, Artificial Sequence
  Synthetic
caccagcggcaucaaaaucaugg

SEQ ID NO: 594752 - RNA, 24 nt, Artificial Sequence
  Synthetic
ucaccagcggcaucaaaaucaugg

SEQ ID NO: 594753 - RNA, 18 nt, Artificial Sequence
  Synthetic
ggggccucacaaucaugg

SEQ ID NO: 594754 - RNA, 19 nt, Artificial Sequence
  Synthetic
gggggccucacaaucaugg

SEQ ID NO: 594755 - RNA, 20 nt, Artificial Sequence
  Synthetic
ggggggccucacaaucaugg

SEQ ID NO: 594756 - RNA, 21 nt, Artificial Sequence
  Synthetic
gggggggccucacaaucaugg

SEQ ID NO: 594757 - RNA, 22 nt, Artificial Sequence
  Synthetic
ggggggggccucacaaucaugg

SEQ ID NO: 594758 - RNA, 23 nt, Artificial Sequence
  Synthetic
gggggggggccucacaaucaugg

SEQ ID NO: 594759 - RNA, 24 nt, Artificial Sequence
  Synthetic
cgggggggggccucacaaucaugg

SEQ ID NO: 594760 - RNA, 18 nt, Artificial Sequence
  Synthetic
ggaaacuuacaaucaugg

SEQ ID NO: 594761 - RNA, 19 nt, Artificial Sequence
  Synthetic
cggaaacuuacaaucaugg

SEQ ID NO: 594762 - RNA, 20 nt, Artificial Sequence
  Synthetic
ccggaaacuuacaaucaugg

SEQ ID NO: 594763 - RNA, 21 nt, Artificial Sequence
  Synthetic
uccggaaacuuacaaucaugg

SEQ ID NO: 594764 - RNA, 22 nt, Artificial Sequence
  Synthetic
cuccggaaacuuacaaucaugg

SEQ ID NO: 594765 - RNA, 23 nt, Artificial Sequence
  Synthetic
ccuccggaaacuuacaaucaugg

SEQ ID NO: 594766 - RNA, 24 nt, Artificial Sequence
  Synthetic
gccuccggaaacuuacaaucaugg

SEQ ID NO: 594767 - RNA, 18 nt, Artificial Sequence
  Synthetic
ccuaauuagcaaucaugg

SEQ ID NO: 594768 - RNA, 19 nt, Artificial Sequence
  Synthetic
cccuaauuagcaaucaugg

SEQ ID NO: 594769 - RNA, 20 nt, Artificial Sequence
  Synthetic
ucccuaauuagcaaucaugg

SEQ ID NO: 594770 - RNA, 21 nt, Artificial Sequence
  Synthetic
uucccuaauuagcaaucaugg

SEQ ID NO: 594771 - RNA, 22 nt, Artificial Sequence
  Synthetic
cuucccuaauuagcaaucaugg

SEQ ID NO: 594772 - RNA, 23 nt, Artificial Sequence
  Synthetic
ccuucccuaauuagcaaucaugg

SEQ ID NO: 594773 - RNA, 24 nt, Artificial Sequence
  Synthetic
uccuucccuaauuagcaaucaugg

SEQ ID NO: 594774 - RNA, 18 nt, Artificial Sequence
  Synthetic
gaggccucagaaucaugg

SEQ ID NO: 594775 - RNA, 19 nt, Artificial Sequence
  Synthetic
ggaggccucagaaucaugg

SEQ ID NO: 594776 - RNA, 20 nt, Artificial Sequence
  Synthetic
gggaggccucagaaucaugg

SEQ ID NO: 594777 - RNA, 21 nt, Artificial Sequence
  Synthetic
ggggaggccucagaaucaugg

SEQ ID NO: 594778 - RNA, 22 nt, Artificial Sequence
  Synthetic
uggggaggccucagaaucaugg

SEQ ID NO: 594779 - RNA, 23 nt, Artificial Sequence
  Synthetic
cuggggaggccucagaaucaugg

SEQ ID NO: 594780 - RNA, 24 nt, Artificial Sequence
  Synthetic
acuggggaggccucagaaucaugg

SEQ ID NO: 594781 - RNA, 18 nt, Artificial Sequence
  Synthetic
ucauuugcaacaucaugg

SEQ ID NO: 594782 - RNA, 19 nt, Artificial Sequence
  Synthetic
uucauuugcaacaucaugg

SEQ ID NO: 594783 - RNA, 20 nt, Artificial Sequence
  Synthetic
uuucauuugcaacaucaugg

SEQ ID NO: 594784 - RNA, 21 nt, Artificial Sequence
  Synthetic
cuuucauuugcaacaucaugg

SEQ ID NO: 594785 - RNA, 22 nt, Artificial Sequence
  Synthetic
ccuuucauuugcaacaucaugg

SEQ ID NO: 594786 - RNA, 23 nt, Artificial Sequence
  Synthetic
uccuuucauuugcaacaucaugg

SEQ ID NO: 594787 - RNA, 24 nt, Artificial Sequence
  Synthetic
auccuuucauuugcaacaucaugg

SEQ ID NO: 594788 - RNA, 18 nt, Artificial Sequence
  Synthetic
gcuguuuauucaucaugg

SEQ ID NO: 594789 - RNA, 19 nt, Artificial Sequence
  Synthetic
agcuguuuauucaucaugg

SEQ ID NO: 594790 - RNA, 20 nt, Artificial Sequence
  Synthetic
gagcuguuuauucaucaugg

SEQ ID NO: 594791 - RNA, 21 nt, Artificial Sequence
  Synthetic
agagcuguuuauucaucaugg

SEQ ID NO: 594792 - RNA, 22 nt, Artificial Sequence
  Synthetic
aagagcuguuuauucaucaugg

SEQ ID NO: 594793 - RNA, 23 nt, Artificial Sequence
  Synthetic
gaagagcuguuuauucaucaugg

SEQ ID NO: 594794 - RNA, 24 nt, Artificial Sequence
  Synthetic
ggaagagcuguuuauucaucaugg

SEQ ID NO: 594795 - RNA, 18 nt, Artificial Sequence
  Synthetic
auucuucagagaucaugg

SEQ ID NO: 594796 - RNA, 19 nt, Artificial Sequence
  Synthetic
gauucuucagagaucaugg

SEQ ID NO: 594797 - RNA, 20 nt, Artificial Sequence
  Synthetic
agauucuucagagaucaugg

SEQ ID NO: 594798 - RNA, 21 nt, Artificial Sequence
  Synthetic
gagauucuucagagaucaugg

SEQ ID NO: 594799 - RNA, 22 nt, Artificial Sequence
  Synthetic
ggagauucuucagagaucaugg

SEQ ID NO: 594800 - RNA, 23 nt, Artificial Sequence
  Synthetic
uggagauucuucagagaucaugg

SEQ ID NO: 594801 - RNA, 24 nt, Artificial Sequence
  Synthetic
guggagauucuucagagaucaugg

SEQ ID NO: 594802 - RNA, 18 nt, Artificial Sequence
  Synthetic
uggcaaaacuacucaugg

SEQ ID NO: 594803 - RNA, 19 nt, Artificial Sequence
  Synthetic
uuggcaaaacuacucaugg

SEQ ID NO: 594804 - RNA, 20 nt, Artificial Sequence
  Synthetic
cuuggcaaaacuacucaugg

SEQ ID NO: 594805 - RNA, 21 nt, Artificial Sequence
  Synthetic
acuuggcaaaacuacucaugg

SEQ ID NO: 594806 - RNA, 22 nt, Artificial Sequence
  Synthetic
aacuuggcaaaacuacucaugg

SEQ ID NO: 594807 - RNA, 23 nt, Artificial Sequence
  Synthetic
gaacuuggcaaaacuacucaugg

SEQ ID NO: 594808 - RNA, 24 nt, Artificial Sequence
  Synthetic
ggaacuuggcaaaacuacucaugg

SEQ ID NO: 594809 - RNA, 18 nt, Artificial Sequence
  Synthetic
aucgggaacagcucaugg

SEQ ID NO: 594810 - RNA, 19 nt, Artificial Sequence
  Synthetic
gaucgggaacagcucaugg

SEQ ID NO: 594811 - RNA, 20 nt, Artificial Sequence
  Synthetic
ggaucgggaacagcucaugg

SEQ ID NO: 594812 - RNA, 21 nt, Artificial Sequence
  Synthetic
aggaucgggaacagcucaugg

SEQ ID NO: 594813 - RNA, 22 nt, Artificial Sequence
  Synthetic
gaggaucgggaacagcucaugg

SEQ ID NO: 594814 - RNA, 23 nt, Artificial Sequence
  Synthetic
ggaggaucgggaacagcucaugg

SEQ ID NO: 594815 - RNA, 24 nt, Artificial Sequence
  Synthetic
gggaggaucgggaacagcucaugg

SEQ ID NO: 594816 - RNA, 18 nt, Artificial Sequence
  Synthetic
caauuuauaaagucaugg

SEQ ID NO: 594817 - RNA, 19 nt, Artificial Sequence
  Synthetic
ucaauuuauaaagucaugg

SEQ ID NO: 594818 - RNA, 20 nt, Artificial Sequence
  Synthetic
uucaauuuauaaagucaugg

SEQ ID NO: 594819 - RNA, 21 nt, Artificial Sequence
  Synthetic
uuucaauuuauaaagucaugg

SEQ ID NO: 594820 - RNA, 22 nt, Artificial Sequence
  Synthetic
uuuucaauuuauaaagucaugg

SEQ ID NO: 594821 - RNA, 23 nt, Artificial Sequence
  Synthetic
auuuucaauuuauaaagucaugg

SEQ ID NO: 594822 - RNA, 24 nt, Artificial Sequence
  Synthetic
gauuuucaauuuauaaagucaugg

SEQ ID NO: 594823 - RNA, 18 nt, Artificial Sequence
  Synthetic
auuucuuucaggucaugg

SEQ ID NO: 594824 - RNA, 19 nt, Artificial Sequence
  Synthetic
aauuucuuucaggucaugg

SEQ ID NO: 594825 - RNA, 20 nt, Artificial Sequence
  Synthetic
aaauuucuuucaggucaugg

SEQ ID NO: 594826 - RNA, 21 nt, Artificial Sequence
  Synthetic
aaaauuucuuucaggucaugg

SEQ ID NO: 594827 - RNA, 22 nt, Artificial Sequence
  Synthetic
caaaauuucuuucaggucaugg

SEQ ID NO: 594828 - RNA, 23 nt, Artificial Sequence
  Synthetic
ucaaaauuucuuucaggucaugg

SEQ ID NO: 594829 - RNA, 24 nt, Artificial Sequence
  Synthetic
uucaaaauuucuuucaggucaugg

SEQ ID NO: 594830 - RNA, 18 nt, Artificial Sequence
  Synthetic
aauccccagaugucaugg

SEQ ID NO: 594831 - RNA, 19 nt, Artificial Sequence
  Synthetic
uaauccccagaugucaugg

SEQ ID NO: 594832 - RNA, 20 nt, Artificial Sequence
  Synthetic
auaauccccagaugucaugg

SEQ ID NO: 594833 - RNA, 21 nt, Artificial Sequence
  Synthetic
cauaauccccagaugucaugg

SEQ ID NO: 594834 - RNA, 22 nt, Artificial Sequence
  Synthetic
ccauaauccccagaugucaugg

SEQ ID NO: 594835 - RNA, 23 nt, Artificial Sequence
  Synthetic
cccauaauccccagaugucaugg

SEQ ID NO: 594836 - RNA, 24 nt, Artificial Sequence
  Synthetic
ucccauaauccccagaugucaugg

SEQ ID NO: 594837 - RNA, 18 nt, Artificial Sequence
  Synthetic
ccugggagucugucaugg

SEQ ID NO: 594838 - RNA, 19 nt, Artificial Sequence
  Synthetic
uccugggagucugucaugg

SEQ ID NO: 594839 - RNA, 20 nt, Artificial Sequence
  Synthetic
uuccugggagucugucaugg

SEQ ID NO: 594840 - RNA, 21 nt, Artificial Sequence
  Synthetic
auuccugggagucugucaugg

SEQ ID NO: 594841 - RNA, 22 nt, Artificial Sequence
  Synthetic
cauuccugggagucugucaugg

SEQ ID NO: 594842 - RNA, 23 nt, Artificial Sequence
  Synthetic
acauuccugggagucugucaugg

SEQ ID NO: 594843 - RNA, 24 nt, Artificial Sequence
  Synthetic
cacauuccugggagucugucaugg

SEQ ID NO: 594844 - RNA, 18 nt, Artificial Sequence
  Synthetic
aaguuaccaaguucaugg

SEQ ID NO: 594845 - RNA, 19 nt, Artificial Sequence
  Synthetic
uaaguuaccaaguucaugg

SEQ ID NO: 594846 - RNA, 20 nt, Artificial Sequence
  Synthetic
guaaguuaccaaguucaugg

SEQ ID NO: 594847 - RNA, 21 nt, Artificial Sequence
  Synthetic
aguaaguuaccaaguucaugg

SEQ ID NO: 594848 - RNA, 22 nt, Artificial Sequence
  Synthetic
aaguaaguuaccaaguucaugg

SEQ ID NO: 594849 - RNA, 23 nt, Artificial Sequence
  Synthetic
gaaguaaguuaccaaguucaugg

SEQ ID NO: 594850 - RNA, 24 nt, Artificial Sequence
  Synthetic
ggaaguaaguuaccaaguucaugg

SEQ ID NO: 594851 - RNA, 18 nt, Artificial Sequence
  Synthetic
auucauagggguucaugg

SEQ ID NO: 594852 - RNA, 19 nt, Artificial Sequence
  Synthetic
aauucauagggguucaugg

SEQ ID NO: 594853 - RNA, 20 nt, Artificial Sequence
  Synthetic
aaauucauagggguucaugg

SEQ ID NO: 594854 - RNA, 21 nt, Artificial Sequence
  Synthetic
caaauucauagggguucaugg

SEQ ID NO: 594855 - RNA, 22 nt, Artificial Sequence
  Synthetic
gcaaauucauagggguucaugg

SEQ ID NO: 594856 - RNA, 23 nt, Artificial Sequence
  Synthetic
agcaaauucauagggguucaugg

SEQ ID NO: 594857 - RNA, 24 nt, Artificial Sequence
  Synthetic
aagcaaauucauagggguucaugg

SEQ ID NO: 594858 - RNA, 18 nt, Artificial Sequence
  Synthetic
agagaaaaaaaaagaugg

SEQ ID NO: 594859 - RNA, 19 nt, Artificial Sequence
  Synthetic
aagagaaaaaaaaagaugg

SEQ ID NO: 594860 - RNA, 20 nt, Artificial Sequence
  Synthetic
aaagagaaaaaaaaagaugg

SEQ ID NO: 594861 - RNA, 21 nt, Artificial Sequence
  Synthetic
caaagagaaaaaaaaagaugg

SEQ ID NO: 594862 - RNA, 22 nt, Artificial Sequence
  Synthetic
ucaaagagaaaaaaaaagaugg

SEQ ID NO: 594863 - RNA, 23 nt, Artificial Sequence
  Synthetic
uucaaagagaaaaaaaaagaugg

SEQ ID NO: 594864 - RNA, 24 nt, Artificial Sequence
  Synthetic
uuucaaagagaaaaaaaaagaugg

SEQ ID NO: 594865 - RNA, 18 nt, Artificial Sequence
  Synthetic
ucuggacacaaaagaugg

SEQ ID NO: 594866 - RNA, 19 nt, Artificial Sequence
  Synthetic
cucuggacacaaaagaugg

SEQ ID NO: 594867 - RNA, 20 nt, Artificial Sequence
  Synthetic
gcucuggacacaaaagaugg

SEQ ID NO: 594868 - RNA, 21 nt, Artificial Sequence
  Synthetic
ugcucuggacacaaaagaugg

SEQ ID NO: 594869 - RNA, 22 nt, Artificial Sequence
  Synthetic
augcucuggacacaaaagaugg

SEQ ID NO: 594870 - RNA, 23 nt, Artificial Sequence
  Synthetic
uaugcucuggacacaaaagaugg

SEQ ID NO: 594871 - RNA, 24 nt, Artificial Sequence
  Synthetic
uuaugcucuggacacaaaagaugg

SEQ ID NO: 594872 - RNA, 18 nt, Artificial Sequence
  Synthetic
gggcuguuacaaagaugg

SEQ ID NO: 594873 - RNA, 19 nt, Artificial Sequence
  Synthetic
agggcuguuacaaagaugg

SEQ ID NO: 594874 - RNA, 20 nt, Artificial Sequence
  Synthetic
uagggcuguuacaaagaugg

SEQ ID NO: 594875 - RNA, 21 nt, Artificial Sequence
  Synthetic
uuagggcuguuacaaagaugg

SEQ ID NO: 594876 - RNA, 22 nt, Artificial Sequence
  Synthetic
uuuagggcuguuacaaagaugg

SEQ ID NO: 594877 - RNA, 23 nt, Artificial Sequence
  Synthetic
cuuuagggcuguuacaaagaugg

SEQ ID NO: 594878 - RNA, 24 nt, Artificial Sequence
  Synthetic
acuuuagggcuguuacaaagaugg

SEQ ID NO: 594879 - RNA, 18 nt, Artificial Sequence
  Synthetic
cuagcugagcaaagaugg

SEQ ID NO: 594880 - RNA, 19 nt, Artificial Sequence
  Synthetic
acuagcugagcaaagaugg

SEQ ID NO: 594881 - RNA, 20 nt, Artificial Sequence
  Synthetic
cacuagcugagcaaagaugg

SEQ ID NO: 594882 - RNA, 21 nt, Artificial Sequence
  Synthetic
ccacuagcugagcaaagaugg

SEQ ID NO: 594883 - RNA, 22 nt, Artificial Sequence
  Synthetic
uccacuagcugagcaaagaugg

SEQ ID NO: 594884 - RNA, 23 nt, Artificial Sequence
  Synthetic
uuccacuagcugagcaaagaugg

SEQ ID NO: 594885 - RNA, 24 nt, Artificial Sequence
  Synthetic
auuccacuagcugagcaaagaugg

SEQ ID NO: 594886 - RNA, 18 nt, Artificial Sequence
  Synthetic
auaaaaagagaaagaugg

SEQ ID NO: 594887 - RNA, 19 nt, Artificial Sequence
  Synthetic
cauaaaaagagaaagaugg

SEQ ID NO: 594888 - RNA, 20 nt, Artificial Sequence
  Synthetic
ccauaaaaagagaaagaugg

SEQ ID NO: 594889 - RNA, 21 nt, Artificial Sequence
  Synthetic
uccauaaaaagagaaagaugg

SEQ ID NO: 594890 - RNA, 22 nt, Artificial Sequence
  Synthetic
cuccauaaaaagagaaagaugg

SEQ ID NO: 594891 - RNA, 23 nt, Artificial Sequence
  Synthetic
acuccauaaaaagagaaagaugg

SEQ ID NO: 594892 - RNA, 24 nt, Artificial Sequence
  Synthetic
aacuccauaaaaagagaaagaugg

SEQ ID NO: 594893 - RNA, 18 nt, Artificial Sequence
  Synthetic
ugaccuggccuaagaugg

SEQ ID NO: 594894 - RNA, 19 nt, Artificial Sequence
  Synthetic
gugaccuggccuaagaugg

SEQ ID NO: 594895 - RNA, 20 nt, Artificial Sequence
  Synthetic
ggugaccuggccuaagaugg

SEQ ID NO: 594896 - RNA, 21 nt, Artificial Sequence
  Synthetic
aggugaccuggccuaagaugg

SEQ ID NO: 594897 - RNA, 22 nt, Artificial Sequence
  Synthetic
gaggugaccuggccuaagaugg

SEQ ID NO: 594898 - RNA, 23 nt, Artificial Sequence
  Synthetic
agaggugaccuggccuaagaugg

SEQ ID NO: 594899 - RNA, 24 nt, Artificial Sequence
  Synthetic
cagaggugaccuggccuaagaugg

SEQ ID NO: 594900 - RNA, 18 nt, Artificial Sequence
  Synthetic
agaagaggaguaagaugg

SEQ ID NO: 594901 - RNA, 19 nt, Artificial Sequence
  Synthetic
gagaagaggaguaagaugg

SEQ ID NO: 594902 - RNA, 20 nt, Artificial Sequence
  Synthetic
ugagaagaggaguaagaugg

SEQ ID NO: 594903 - RNA, 21 nt, Artificial Sequence
  Synthetic
uugagaagaggaguaagaugg

SEQ ID NO: 594904 - RNA, 22 nt, Artificial Sequence
  Synthetic
uuugagaagaggaguaagaugg

SEQ ID NO: 594905 - RNA, 23 nt, Artificial Sequence
  Synthetic
uuuugagaagaggaguaagaugg

SEQ ID NO: 594906 - RNA, 24 nt, Artificial Sequence
  Synthetic
auuuugagaagaggaguaagaugg

SEQ ID NO: 594907 - RNA, 18 nt, Artificial Sequence
  Synthetic
gcuucuuguuuaagaugg

SEQ ID NO: 594908 - RNA, 19 nt, Artificial Sequence
  Synthetic
ugcuucuuguuuaagaugg

SEQ ID NO: 594909 - RNA, 20 nt, Artificial Sequence
  Synthetic
uugcuucuuguuuaagaugg

SEQ ID NO: 594910 - RNA, 21 nt, Artificial Sequence
  Synthetic
auugcuucuuguuuaagaugg

SEQ ID NO: 594911 - RNA, 22 nt, Artificial Sequence
  Synthetic
cauugcuucuuguuuaagaugg

SEQ ID NO: 594912 - RNA, 23 nt, Artificial Sequence
  Synthetic
ccauugcuucuuguuuaagaugg

SEQ ID NO: 594913 - RNA, 24 nt, Artificial Sequence
  Synthetic
cccauugcuucuuguuuaagaugg

SEQ ID NO: 594914 - RNA, 18 nt, Artificial Sequence
  Synthetic
gugaagggcaacagaugg

SEQ ID NO: 594915 - RNA, 19 nt, Artificial Sequence
  Synthetic
agugaagggcaacagaugg

SEQ ID NO: 594916 - RNA, 20 nt, Artificial Sequence
  Synthetic
cagugaagggcaacagaugg

SEQ ID NO: 594917 - RNA, 21 nt, Artificial Sequence
  Synthetic
ccagugaagggcaacagaugg

SEQ ID NO: 594918 - RNA, 22 nt, Artificial Sequence
  Synthetic
cccagugaagggcaacagaugg

SEQ ID NO: 594919 - RNA, 23 nt, Artificial Sequence
  Synthetic
ucccagugaagggcaacagaugg

SEQ ID NO: 594920 - RNA, 24 nt, Artificial Sequence
  Synthetic
gucccagugaagggcaacagaugg

SEQ ID NO: 594921 - RNA, 18 nt, Artificial Sequence
  Synthetic
aaaggagauaacagaugg

SEQ ID NO: 594922 - RNA, 19 nt, Artificial Sequence
  Synthetic
gaaaggagauaacagaugg

SEQ ID NO: 594923 - RNA, 20 nt, Artificial Sequence
  Synthetic
agaaaggagauaacagaugg

SEQ ID NO: 594924 - RNA, 21 nt, Artificial Sequence
  Synthetic
aagaaaggagauaacagaugg

SEQ ID NO: 594925 - RNA, 22 nt, Artificial Sequence
  Synthetic
gaagaaaggagauaacagaugg

SEQ ID NO: 594926 - RNA, 23 nt, Artificial Sequence
  Synthetic
ggaagaaaggagauaacagaugg

SEQ ID NO: 594927 - RNA, 24 nt, Artificial Sequence
  Synthetic
uggaagaaaggagauaacagaugg

SEQ ID NO: 594928 - RNA, 18 nt, Artificial Sequence
  Synthetic
aaagaugaugccagaugg

SEQ ID NO: 594929 - RNA, 19 nt, Artificial Sequence
  Synthetic
caaagaugaugccagaugg

SEQ ID NO: 594930 - RNA, 20 nt, Artificial Sequence
  Synthetic
acaaagaugaugccagaugg

SEQ ID NO: 594931 - RNA, 21 nt, Artificial Sequence
  Synthetic
gacaaagaugaugccagaugg

SEQ ID NO: 594932 - RNA, 22 nt, Artificial Sequence
  Synthetic
agacaaagaugaugccagaugg

SEQ ID NO: 594933 - RNA, 23 nt, Artificial Sequence
  Synthetic
aagacaaagaugaugccagaugg

SEQ ID NO: 594934 - RNA, 24 nt, Artificial Sequence
  Synthetic
aaagacaaagaugaugccagaugg

SEQ ID NO: 594935 - RNA, 18 nt, Artificial Sequence
  Synthetic
ucccagcuacucagaugg

SEQ ID NO: 594936 - RNA, 19 nt, Artificial Sequence
  Synthetic
aucccagcuacucagaugg

SEQ ID NO: 594937 - RNA, 20 nt, Artificial Sequence
  Synthetic
aaucccagcuacucagaugg

SEQ ID NO: 594938 - RNA, 21 nt, Artificial Sequence
  Synthetic
uaaucccagcuacucagaugg

SEQ ID NO: 594939 - RNA, 22 nt, Artificial Sequence
  Synthetic
guaaucccagcuacucagaugg

SEQ ID NO: 594940 - RNA, 23 nt, Artificial Sequence
  Synthetic
uguaaucccagcuacucagaugg

SEQ ID NO: 594941 - RNA, 24 nt, Artificial Sequence
  Synthetic
cuguaaucccagcuacucagaugg

SEQ ID NO: 594942 - RNA, 18 nt, Artificial Sequence
  Synthetic
ggagaacuacagagaugg

SEQ ID NO: 594943 - RNA, 19 nt, Artificial Sequence
  Synthetic
aggagaacuacagagaugg

SEQ ID NO: 594944 - RNA, 20 nt, Artificial Sequence
  Synthetic
gaggagaacuacagagaugg

SEQ ID NO: 594945 - RNA, 21 nt, Artificial Sequence
  Synthetic
agaggagaacuacagagaugg

SEQ ID NO: 594946 - RNA, 22 nt, Artificial Sequence
  Synthetic
cagaggagaacuacagagaugg

SEQ ID NO: 594947 - RNA, 23 nt, Artificial Sequence
  Synthetic
ccagaggagaacuacagagaugg

SEQ ID NO: 594948 - RNA, 24 nt, Artificial Sequence
  Synthetic
accagaggagaacuacagagaugg

SEQ ID NO: 594949 - RNA, 18 nt, Artificial Sequence
  Synthetic
uugcaggcucagagaugg

SEQ ID NO: 594950 - RNA, 19 nt, Artificial Sequence
  Synthetic
uuugcaggcucagagaugg

SEQ ID NO: 594951 - RNA, 20 nt, Artificial Sequence
  Synthetic
uuuugcaggcucagagaugg

SEQ ID NO: 594952 - RNA, 21 nt, Artificial Sequence
  Synthetic
auuuugcaggcucagagaugg

SEQ ID NO: 594953 - RNA, 22 nt, Artificial Sequence
  Synthetic
gauuuugcaggcucagagaugg

SEQ ID NO: 594954 - RNA, 23 nt, Artificial Sequence
  Synthetic
cgauuuugcaggcucagagaugg

SEQ ID NO: 594955 - RNA, 24 nt, Artificial Sequence
  Synthetic
ucgauuuugcaggcucagagaugg

SEQ ID NO: 594956 - RNA, 18 nt, Artificial Sequence
  Synthetic
aaaagcaauaggagaugg

SEQ ID NO: 594957 - RNA, 19 nt, Artificial Sequence
  Synthetic
gaaaagcaauaggagaugg

SEQ ID NO: 594958 - RNA, 20 nt, Artificial Sequence
  Synthetic
ugaaaagcaauaggagaugg

SEQ ID NO: 594959 - RNA, 21 nt, Artificial Sequence
  Synthetic
gugaaaagcaauaggagaugg

SEQ ID NO: 594960 - RNA, 22 nt, Artificial Sequence
  Synthetic
agugaaaagcaauaggagaugg

SEQ ID NO: 594961 - RNA, 23 nt, Artificial Sequence
  Synthetic
cagugaaaagcaauaggagaugg

SEQ ID NO: 594962 - RNA, 24 nt, Artificial Sequence
  Synthetic
acagugaaaagcaauaggagaugg

SEQ ID NO: 594963 - RNA, 18 nt, Artificial Sequence
  Synthetic
gcuauucuggggagaugg

SEQ ID NO: 594964 - RNA, 19 nt, Artificial Sequence
  Synthetic
agcuauucuggggagaugg

SEQ ID NO: 594965 - RNA, 20 nt, Artificial Sequence
  Synthetic
aagcuauucuggggagaugg

SEQ ID NO: 594966 - RNA, 21 nt, Artificial Sequence
  Synthetic
aaagcuauucuggggagaugg

SEQ ID NO: 594967 - RNA, 22 nt, Artificial Sequence
  Synthetic
uaaagcuauucuggggagaugg

SEQ ID NO: 594968 - RNA, 23 nt, Artificial Sequence
  Synthetic
guaaagcuauucuggggagaugg

SEQ ID NO: 594969 - RNA, 24 nt, Artificial Sequence
  Synthetic
uguaaagcuauucuggggagaugg

SEQ ID NO: 594970 - RNA, 18 nt, Artificial Sequence
  Synthetic
aaguauguguguagaugg

SEQ ID NO: 594971 - RNA, 19 nt, Artificial Sequence
  Synthetic
aaaguauguguguagaugg

SEQ ID NO: 594972 - RNA, 20 nt, Artificial Sequence
  Synthetic
aaaaguauguguguagaugg

SEQ ID NO: 594973 - RNA, 21 nt, Artificial Sequence
  Synthetic
uaaaaguauguguguagaugg

SEQ ID NO: 594974 - RNA, 22 nt, Artificial Sequence
  Synthetic
auaaaaguauguguguagaugg

SEQ ID NO: 594975 - RNA, 23 nt, Artificial Sequence
  Synthetic
aauaaaaguauguguguagaugg

SEQ ID NO: 594976 - RNA, 24 nt, Artificial Sequence
  Synthetic
aaauaaaaguauguguguagaugg

SEQ ID NO: 594977 - RNA, 18 nt, Artificial Sequence
  Synthetic
auucuaauccaccgaugg

SEQ ID NO: 594978 - RNA, 19 nt, Artificial Sequence
  Synthetic
aauucuaauccaccgaugg

SEQ ID NO: 594979 - RNA, 20 nt, Artificial Sequence
  Synthetic
aaauucuaauccaccgaugg

SEQ ID NO: 594980 - RNA, 21 nt, Artificial Sequence
  Synthetic
caaauucuaauccaccgaugg

SEQ ID NO: 594981 - RNA, 22 nt, Artificial Sequence
  Synthetic
acaaauucuaauccaccgaugg

SEQ ID NO: 594982 - RNA, 23 nt, Artificial Sequence
  Synthetic
uacaaauucuaauccaccgaugg

SEQ ID NO: 594983 - RNA, 24 nt, Artificial Sequence
  Synthetic
auacaaauucuaauccaccgaugg

SEQ ID NO: 594984 - RNA, 18 nt, Artificial Sequence
  Synthetic
ccaugaaccuagcgaugg

SEQ ID NO: 594985 - RNA, 19 nt, Artificial Sequence
  Synthetic
gccaugaaccuagcgaugg

SEQ ID NO: 594986 - RNA, 20 nt, Artificial Sequence
  Synthetic
agccaugaaccuagcgaugg

SEQ ID NO: 594987 - RNA, 21 nt, Artificial Sequence
  Synthetic
cagccaugaaccuagcgaugg

SEQ ID NO: 594988 - RNA, 22 nt, Artificial Sequence
  Synthetic
ucagccaugaaccuagcgaugg

SEQ ID NO: 594989 - RNA, 23 nt, Artificial Sequence
  Synthetic
cucagccaugaaccuagcgaugg

SEQ ID NO: 594990 - RNA, 24 nt, Artificial Sequence
  Synthetic
ccucagccaugaaccuagcgaugg

SEQ ID NO: 594991 - RNA, 18 nt, Artificial Sequence
  Synthetic
aagaaccccgcucgaugg

SEQ ID NO: 594992 - RNA, 19 nt, Artificial Sequence
  Synthetic
gaagaaccccgcucgaugg

SEQ ID NO: 594993 - RNA, 20 nt, Artificial Sequence
  Synthetic
agaagaaccccgcucgaugg

SEQ ID NO: 594994 - RNA, 21 nt, Artificial Sequence
  Synthetic
aagaagaaccccgcucgaugg

SEQ ID NO: 594995 - RNA, 22 nt, Artificial Sequence
  Synthetic
aaagaagaaccccgcucgaugg

SEQ ID NO: 594996 - RNA, 23 nt, Artificial Sequence
  Synthetic
aaaagaagaaccccgcucgaugg

SEQ ID NO: 594997 - RNA, 24 nt, Artificial Sequence
  Synthetic
caaaagaagaaccccgcucgaugg

SEQ ID NO: 594998 - RNA, 18 nt, Artificial Sequence
  Synthetic
cucaaaauaaaaggaugg

SEQ ID NO: 594999 - RNA, 19 nt, Artificial Sequence
  Synthetic
gcucaaaauaaaaggaugg

SEQ ID NO: 595000 - RNA, 20 nt, Artificial Sequence
  Synthetic
ggcucaaaauaaaaggaugg

SEQ ID NO: 595001 - RNA, 21 nt, Artificial Sequence
  Synthetic
aggcucaaaauaaaaggaugg

SEQ ID NO: 595002 - RNA, 22 nt, Artificial Sequence
  Synthetic
uaggcucaaaauaaaaggaugg

SEQ ID NO: 595003 - RNA, 23 nt, Artificial Sequence
  Synthetic
auaggcucaaaauaaaaggaugg

SEQ ID NO: 595004 - RNA, 24 nt, Artificial Sequence
  Synthetic
cauaggcucaaaauaaaaggaugg

SEQ ID NO: 595005 - RNA, 18 nt, Artificial Sequence
  Synthetic
aagaagaugccaggaugg

SEQ ID NO: 595006 - RNA, 19 nt, Artificial Sequence
  Synthetic
aaagaagaugccaggaugg

SEQ ID NO: 595007 - RNA, 20 nt, Artificial Sequence
  Synthetic
gaaagaagaugccaggaugg

SEQ ID NO: 595008 - RNA, 21 nt, Artificial Sequence
  Synthetic
agaaagaagaugccaggaugg

SEQ ID NO: 595009 - RNA, 22 nt, Artificial Sequence
  Synthetic
aagaaagaagaugccaggaugg

SEQ ID NO: 595010 - RNA, 23 nt, Artificial Sequence
  Synthetic
gaagaaagaagaugccaggaugg

SEQ ID NO: 595011 - RNA, 24 nt, Artificial Sequence
  Synthetic
ggaagaaagaagaugccaggaugg

SEQ ID NO: 595012 - RNA, 18 nt, Artificial Sequence
  Synthetic
ggaaagggaaagggaugg

SEQ ID NO: 595013 - RNA, 19 nt, Artificial Sequence
  Synthetic
gggaaagggaaagggaugg

SEQ ID NO: 595014 - RNA, 20 nt, Artificial Sequence
  Synthetic
agggaaagggaaagggaugg

SEQ ID NO: 595015 - RNA, 21 nt, Artificial Sequence
  Synthetic
gagggaaagggaaagggaugg

SEQ ID NO: 595016 - RNA, 22 nt, Artificial Sequence
  Synthetic
agagggaaagggaaagggaugg

SEQ ID NO: 595017 - RNA, 23 nt, Artificial Sequence
  Synthetic
gagagggaaagggaaagggaugg

SEQ ID NO: 595018 - RNA, 24 nt, Artificial Sequence
  Synthetic
ggagagggaaagggaaagggaugg

SEQ ID NO: 595019 - RNA, 18 nt, Artificial Sequence
  Synthetic
ucauagaguuggggaugg

SEQ ID NO: 595020 - RNA, 19 nt, Artificial Sequence
  Synthetic
gucauagaguuggggaugg

SEQ ID NO: 595021 - RNA, 20 nt, Artificial Sequence
  Synthetic
agucauagaguuggggaugg

SEQ ID NO: 595022 - RNA, 21 nt, Artificial Sequence
  Synthetic
uagucauagaguuggggaugg

SEQ ID NO: 595023 - RNA, 22 nt, Artificial Sequence
  Synthetic
auagucauagaguuggggaugg

SEQ ID NO: 595024 - RNA, 23 nt, Artificial Sequence
  Synthetic
gauagucauagaguuggggaugg

SEQ ID NO: 595025 - RNA, 24 nt, Artificial Sequence
  Synthetic
ugauagucauagaguuggggaugg

SEQ ID NO: 595026 - RNA, 18 nt, Artificial Sequence
  Synthetic
ugucauucacugggaugg

SEQ ID NO: 595027 - RNA, 19 nt, Artificial Sequence
  Synthetic
gugucauucacugggaugg

SEQ ID NO: 595028 - RNA, 20 nt, Artificial Sequence
  Synthetic
agugucauucacugggaugg

SEQ ID NO: 595029 - RNA, 21 nt, Artificial Sequence
  Synthetic
uagugucauucacugggaugg

SEQ ID NO: 595030 - RNA, 22 nt, Artificial Sequence
  Synthetic
auagugucauucacugggaugg

SEQ ID NO: 595031 - RNA, 23 nt, Artificial Sequence
  Synthetic
gauagugucauucacugggaugg

SEQ ID NO: 595032 - RNA, 24 nt, Artificial Sequence
  Synthetic
ggauagugucauucacugggaugg

SEQ ID NO: 595033 - RNA, 18 nt, Artificial Sequence
  Synthetic
ggguguagaaauggaugg

SEQ ID NO: 595034 - RNA, 19 nt, Artificial Sequence
  Synthetic
aggguguagaaauggaugg

SEQ ID NO: 595035 - RNA, 20 nt, Artificial Sequence
  Synthetic
gaggguguagaaauggaugg

SEQ ID NO: 595036 - RNA, 21 nt, Artificial Sequence
  Synthetic
agaggguguagaaauggaugg

SEQ ID NO: 595037 - RNA, 22 nt, Artificial Sequence
  Synthetic
gagaggguguagaaauggaugg

SEQ ID NO: 595038 - RNA, 23 nt, Artificial Sequence
  Synthetic
ugagaggguguagaaauggaugg

SEQ ID NO: 595039 - RNA, 24 nt, Artificial Sequence
  Synthetic
uugagaggguguagaaauggaugg

SEQ ID NO: 595040 - RNA, 18 nt, Artificial Sequence
  Synthetic
aaguggauggauggaugg

SEQ ID NO: 595041 - RNA, 19 nt, Artificial Sequence
  Synthetic
uaaguggauggauggaugg

SEQ ID NO: 595042 - RNA, 20 nt, Artificial Sequence
  Synthetic
auaaguggauggauggaugg

SEQ ID NO: 595043 - RNA, 21 nt, Artificial Sequence
  Synthetic
aauaaguggauggauggaugg

SEQ ID NO: 595044 - RNA, 22 nt, Artificial Sequence
  Synthetic
gaauaaguggauggauggaugg

SEQ ID NO: 595045 - RNA, 23 nt, Artificial Sequence
  Synthetic
ugaauaaguggauggauggaugg

SEQ ID NO: 595046 - RNA, 24 nt, Artificial Sequence
  Synthetic
augaauaaguggauggauggaugg

SEQ ID NO: 595047 - RNA, 18 nt, Artificial Sequence
  Synthetic
gaauaaguggauggaugg

SEQ ID NO: 595048 - RNA, 19 nt, Artificial Sequence
  Synthetic
ugaauaaguggauggaugg

SEQ ID NO: 595049 - RNA, 20 nt, Artificial Sequence
  Synthetic
augaauaaguggauggaugg

SEQ ID NO: 595050 - RNA, 21 nt, Artificial Sequence
  Synthetic
gaugaauaaguggauggaugg

SEQ ID NO: 595051 - RNA, 22 nt, Artificial Sequence
  Synthetic
agaugaauaaguggauggaugg

SEQ ID NO: 595052 - RNA, 23 nt, Artificial Sequence
  Synthetic
uagaugaauaaguggauggaugg

SEQ ID NO: 595053 - RNA, 24 nt, Artificial Sequence
  Synthetic
guagaugaauaaguggauggaugg

SEQ ID NO: 595054 - RNA, 18 nt, Artificial Sequence
  Synthetic
acaauugacuauggaugg

SEQ ID NO: 595055 - RNA, 19 nt, Artificial Sequence
  Synthetic
gacaauugacuauggaugg

SEQ ID NO: 595056 - RNA, 20 nt, Artificial Sequence
  Synthetic
ugacaauugacuauggaugg

SEQ ID NO: 595057 - RNA, 21 nt, Artificial Sequence
  Synthetic
uugacaauugacuauggaugg

SEQ ID NO: 595058 - RNA, 22 nt, Artificial Sequence
  Synthetic
uuugacaauugacuauggaugg

SEQ ID NO: 595059 - RNA, 23 nt, Artificial Sequence
  Synthetic
cuuugacaauugacuauggaugg

SEQ ID NO: 595060 - RNA, 24 nt, Artificial Sequence
  Synthetic
gcuuugacaauugacuauggaugg

SEQ ID NO: 595061 - RNA, 18 nt, Artificial Sequence
  Synthetic
ucaccugagccuggaugg

SEQ ID NO: 595062 - RNA, 19 nt, Artificial Sequence
  Synthetic
aucaccugagccuggaugg

SEQ ID NO: 595063 - RNA, 20 nt, Artificial Sequence
  Synthetic
gaucaccugagccuggaugg

SEQ ID NO: 595064 - RNA, 21 nt, Artificial Sequence
  Synthetic
ggaucaccugagccuggaugg

SEQ ID NO: 595065 - RNA, 22 nt, Artificial Sequence
  Synthetic
aggaucaccugagccuggaugg

SEQ ID NO: 595066 - RNA, 23 nt, Artificial Sequence
  Synthetic
gaggaucaccugagccuggaugg

SEQ ID NO: 595067 - RNA, 24 nt, Artificial Sequence
  Synthetic
ggaggaucaccugagccuggaugg

SEQ ID NO: 595068 - RNA, 18 nt, Artificial Sequence
  Synthetic
uaagaacucucuggaugg

SEQ ID NO: 595069 - RNA, 19 nt, Artificial Sequence
  Synthetic
auaagaacucucuggaugg

SEQ ID NO: 595070 - RNA, 20 nt, Artificial Sequence
  Synthetic
cauaagaacucucuggaugg

SEQ ID NO: 595071 - RNA, 21 nt, Artificial Sequence
  Synthetic
acauaagaacucucuggaugg

SEQ ID NO: 595072 - RNA, 22 nt, Artificial Sequence
  Synthetic
gacauaagaacucucuggaugg

SEQ ID NO: 595073 - RNA, 23 nt, Artificial Sequence
  Synthetic
agacauaagaacucucuggaugg

SEQ ID NO: 595074 - RNA, 24 nt, Artificial Sequence
  Synthetic
uagacauaagaacucucuggaugg

SEQ ID NO: 595075 - RNA, 18 nt, Artificial Sequence
  Synthetic
agaaaagaaaguggaugg

SEQ ID NO: 595076 - RNA, 19 nt, Artificial Sequence
  Synthetic
aagaaaagaaaguggaugg

SEQ ID NO: 595077 - RNA, 20 nt, Artificial Sequence
  Synthetic
uaagaaaagaaaguggaugg

SEQ ID NO: 595078 - RNA, 21 nt, Artificial Sequence
  Synthetic
uuaagaaaagaaaguggaugg

SEQ ID NO: 595079 - RNA, 22 nt, Artificial Sequence
  Synthetic
auuaagaaaagaaaguggaugg

SEQ ID NO: 595080 - RNA, 23 nt, Artificial Sequence
  Synthetic
aauuaagaaaagaaaguggaugg

SEQ ID NO: 595081 - RNA, 24 nt, Artificial Sequence
  Synthetic
aaauuaagaaaagaaaguggaugg

SEQ ID NO: 595082 - RNA, 18 nt, Artificial Sequence
  Synthetic
ugguuaguacuuggaugg

SEQ ID NO: 595083 - RNA, 19 nt, Artificial Sequence
  Synthetic
cugguuaguacuuggaugg

SEQ ID NO: 595084 - RNA, 20 nt, Artificial Sequence
  Synthetic
ccugguuaguacuuggaugg

SEQ ID NO: 595085 - RNA, 21 nt, Artificial Sequence
  Synthetic
accugguuaguacuuggaugg

SEQ ID NO: 595086 - RNA, 22 nt, Artificial Sequence
  Synthetic
gaccugguuaguacuuggaugg

SEQ ID NO: 595087 - RNA, 23 nt, Artificial Sequence
  Synthetic
cgaccugguuaguacuuggaugg

SEQ ID NO: 595088 - RNA, 24 nt, Artificial Sequence
  Synthetic
ucgaccugguuaguacuuggaugg

SEQ ID NO: 595089 - RNA, 18 nt, Artificial Sequence
  Synthetic
ucugcauuguuuggaugg

SEQ ID NO: 595090 - RNA, 19 nt, Artificial Sequence
  Synthetic
aucugcauuguuuggaugg

SEQ ID NO: 595091 - RNA, 20 nt, Artificial Sequence
  Synthetic
aaucugcauuguuuggaugg

SEQ ID NO: 595092 - RNA, 21 nt, Artificial Sequence
  Synthetic
caaucugcauuguuuggaugg

SEQ ID NO: 595093 - RNA, 22 nt, Artificial Sequence
  Synthetic
acaaucugcauuguuuggaugg

SEQ ID NO: 595094 - RNA, 23 nt, Artificial Sequence
  Synthetic
uacaaucugcauuguuuggaugg

SEQ ID NO: 595095 - RNA, 24 nt, Artificial Sequence
  Synthetic
guacaaucugcauuguuuggaugg

SEQ ID NO: 595096 - RNA, 18 nt, Artificial Sequence
  Synthetic
auguuuaaauaaugaugg

SEQ ID NO: 595097 - RNA, 19 nt, Artificial Sequence
  Synthetic
uauguuuaaauaaugaugg

SEQ ID NO: 595098 - RNA, 20 nt, Artificial Sequence
  Synthetic
guauguuuaaauaaugaugg

SEQ ID NO: 595099 - RNA, 21 nt, Artificial Sequence
  Synthetic
uguauguuuaaauaaugaugg

SEQ ID NO: 595100 - RNA, 22 nt, Artificial Sequence
  Synthetic
cuguauguuuaaauaaugaugg

SEQ ID NO: 595101 - RNA, 23 nt, Artificial Sequence
  Synthetic
acuguauguuuaaauaaugaugg

SEQ ID NO: 595102 - RNA, 24 nt, Artificial Sequence
  Synthetic
cacuguauguuuaaauaaugaugg

SEQ ID NO: 595103 - RNA, 18 nt, Artificial Sequence
  Synthetic
auuagcugggcaugaugg

SEQ ID NO: 595104 - RNA, 19 nt, Artificial Sequence
  Synthetic
aauuagcugggcaugaugg

SEQ ID NO: 595105 - RNA, 20 nt, Artificial Sequence
  Synthetic
aaauuagcugggcaugaugg

SEQ ID NO: 595106 - RNA, 21 nt, Artificial Sequence
  Synthetic
aaaauuagcugggcaugaugg

SEQ ID NO: 595107 - RNA, 22 nt, Artificial Sequence
  Synthetic
aaaaauuagcugggcaugaugg

SEQ ID NO: 595108 - RNA, 23 nt, Artificial Sequence
  Synthetic
aaaaaauuagcugggcaugaugg

SEQ ID NO: 595109 - RNA, 24 nt, Artificial Sequence
  Synthetic
aaaaaaauuagcugggcaugaugg

SEQ ID NO: 595110 - RNA, 18 nt, Artificial Sequence
  Synthetic
cuauuauguggaugaugg

SEQ ID NO: 595111 - RNA, 19 nt, Artificial Sequence
  Synthetic
ccuauuauguggaugaugg

SEQ ID NO: 595112 - RNA, 20 nt, Artificial Sequence
  Synthetic
accuauuauguggaugaugg

SEQ ID NO: 595113 - RNA, 21 nt, Artificial Sequence
  Synthetic
caccuauuauguggaugaugg

SEQ ID NO: 595114 - RNA, 22 nt, Artificial Sequence
  Synthetic
ccaccuauuauguggaugaugg

SEQ ID NO: 595115 - RNA, 23 nt, Artificial Sequence
  Synthetic
uccaccuauuauguggaugaugg

SEQ ID NO: 595116 - RNA, 24 nt, Artificial Sequence
  Synthetic
auccaccuauuauguggaugaugg

SEQ ID NO: 595117 - RNA, 18 nt, Artificial Sequence
  Synthetic
uucaccacaagcugaugg

SEQ ID NO: 595118 - RNA, 19 nt, Artificial Sequence
  Synthetic
auucaccacaagcugaugg

SEQ ID NO: 595119 - RNA, 20 nt, Artificial Sequence
  Synthetic
cauucaccacaagcugaugg

SEQ ID NO: 595120 - RNA, 21 nt, Artificial Sequence
  Synthetic
gcauucaccacaagcugaugg

SEQ ID NO: 595121 - RNA, 22 nt, Artificial Sequence
  Synthetic
agcauucaccacaagcugaugg

SEQ ID NO: 595122 - RNA, 23 nt, Artificial Sequence
  Synthetic
cagcauucaccacaagcugaugg

SEQ ID NO: 595123 - RNA, 24 nt, Artificial Sequence
  Synthetic
ucagcauucaccacaagcugaugg

SEQ ID NO: 595124 - RNA, 18 nt, Artificial Sequence
  Synthetic
acaaaugaaggcugaugg

SEQ ID NO: 595125 - RNA, 19 nt, Artificial Sequence
  Synthetic
gacaaaugaaggcugaugg

SEQ ID NO: 595126 - RNA, 20 nt, Artificial Sequence
  Synthetic
ugacaaaugaaggcugaugg

SEQ ID NO: 595127 - RNA, 21 nt, Artificial Sequence
  Synthetic
cugacaaaugaaggcugaugg

SEQ ID NO: 595128 - RNA, 22 nt, Artificial Sequence
  Synthetic
ucugacaaaugaaggcugaugg

SEQ ID NO: 595129 - RNA, 23 nt, Artificial Sequence
  Synthetic
cucugacaaaugaaggcugaugg

SEQ ID NO: 595130 - RNA, 24 nt, Artificial Sequence
  Synthetic
acucugacaaaugaaggcugaugg

SEQ ID NO: 595131 - RNA, 18 nt, Artificial Sequence
  Synthetic
agagaaagaugcugaugg

SEQ ID NO: 595132 - RNA, 19 nt, Artificial Sequence
  Synthetic
cagagaaagaugcugaugg

SEQ ID NO: 595133 - RNA, 20 nt, Artificial Sequence
  Synthetic
gcagagaaagaugcugaugg

SEQ ID NO: 595134 - RNA, 21 nt, Artificial Sequence
  Synthetic
ugcagagaaagaugcugaugg

SEQ ID NO: 595135 - RNA, 22 nt, Artificial Sequence
  Synthetic
gugcagagaaagaugcugaugg

SEQ ID NO: 595136 - RNA, 23 nt, Artificial Sequence
  Synthetic
ggugcagagaaagaugcugaugg

SEQ ID NO: 595137 - RNA, 24 nt, Artificial Sequence
  Synthetic
aggugcagagaaagaugcugaugg

SEQ ID NO: 595138 - RNA, 18 nt, Artificial Sequence
  Synthetic
acaaauggaaucugaugg

SEQ ID NO: 595139 - RNA, 19 nt, Artificial Sequence
  Synthetic
uacaaauggaaucugaugg

SEQ ID NO: 595140 - RNA, 20 nt, Artificial Sequence
  Synthetic
auacaaauggaaucugaugg

SEQ ID NO: 595141 - RNA, 21 nt, Artificial Sequence
  Synthetic
aauacaaauggaaucugaugg

SEQ ID NO: 595142 - RNA, 22 nt, Artificial Sequence
  Synthetic
aaauacaaauggaaucugaugg

SEQ ID NO: 595143 - RNA, 23 nt, Artificial Sequence
  Synthetic
caaauacaaauggaaucugaugg

SEQ ID NO: 595144 - RNA, 24 nt, Artificial Sequence
  Synthetic
ccaaauacaaauggaaucugaugg

SEQ ID NO: 595145 - RNA, 18 nt, Artificial Sequence
  Synthetic
ugaucaaaagggugaugg

SEQ ID NO: 595146 - RNA, 19 nt, Artificial Sequence
  Synthetic
cugaucaaaagggugaugg

SEQ ID NO: 595147 - RNA, 20 nt, Artificial Sequence
  Synthetic
acugaucaaaagggugaugg

SEQ ID NO: 595148 - RNA, 21 nt, Artificial Sequence
  Synthetic
cacugaucaaaagggugaugg

SEQ ID NO: 595149 - RNA, 22 nt, Artificial Sequence
  Synthetic
acacugaucaaaagggugaugg

SEQ ID NO: 595150 - RNA, 23 nt, Artificial Sequence
  Synthetic
aacacugaucaaaagggugaugg

SEQ ID NO: 595151 - RNA, 24 nt, Artificial Sequence
  Synthetic
uaacacugaucaaaagggugaugg

SEQ ID NO: 595152 - RNA, 18 nt, Artificial Sequence
  Synthetic
cuaccaaaagugugaugg

SEQ ID NO: 595153 - RNA, 19 nt, Artificial Sequence
  Synthetic
acuaccaaaagugugaugg

SEQ ID NO: 595154 - RNA, 20 nt, Artificial Sequence
  Synthetic
cacuaccaaaagugugaugg

SEQ ID NO: 595155 - RNA, 21 nt, Artificial Sequence
  Synthetic
ucacuaccaaaagugugaugg

SEQ ID NO: 595156 - RNA, 22 nt, Artificial Sequence
  Synthetic
cucacuaccaaaagugugaugg

SEQ ID NO: 595157 - RNA, 23 nt, Artificial Sequence
  Synthetic
ccucacuaccaaaagugugaugg

SEQ ID NO: 595158 - RNA, 24 nt, Artificial Sequence
  Synthetic
uccucacuaccaaaagugugaugg

SEQ ID NO: 595159 - RNA, 18 nt, Artificial Sequence
  Synthetic
ccucugggcuugugaugg

SEQ ID NO: 595160 - RNA, 19 nt, Artificial Sequence
  Synthetic
gccucugggcuugugaugg

SEQ ID NO: 595161 - RNA, 20 nt, Artificial Sequence
  Synthetic
ggccucugggcuugugaugg

SEQ ID NO: 595162 - RNA, 21 nt, Artificial Sequence
  Synthetic
aggccucugggcuugugaugg

SEQ ID NO: 595163 - RNA, 22 nt, Artificial Sequence
  Synthetic
uaggccucugggcuugugaugg

SEQ ID NO: 595164 - RNA, 23 nt, Artificial Sequence
  Synthetic
uuaggccucugggcuugugaugg

SEQ ID NO: 595165 - RNA, 24 nt, Artificial Sequence
  Synthetic
uuuaggccucugggcuugugaugg

SEQ ID NO: 595166 - RNA, 18 nt, Artificial Sequence
  Synthetic
agaggcuacgcuugaugg

SEQ ID NO: 595167 - RNA, 19 nt, Artificial Sequence
  Synthetic
uagaggcuacgcuugaugg

SEQ ID NO: 595168 - RNA, 20 nt, Artificial Sequence
  Synthetic
auagaggcuacgcuugaugg

SEQ ID NO: 595169 - RNA, 21 nt, Artificial Sequence
  Synthetic
uauagaggcuacgcuugaugg

SEQ ID NO: 595170 - RNA, 22 nt, Artificial Sequence
  Synthetic
auauagaggcuacgcuugaugg

SEQ ID NO: 595171 - RNA, 23 nt, Artificial Sequence
  Synthetic
uauauagaggcuacgcuugaugg

SEQ ID NO: 595172 - RNA, 24 nt, Artificial Sequence
  Synthetic
guauauagaggcuacgcuugaugg

SEQ ID NO: 595173 - RNA, 18 nt, Artificial Sequence
  Synthetic
uauaccugcucuugaugg

SEQ ID NO: 595174 - RNA, 19 nt, Artificial Sequence
  Synthetic
uuauaccugcucuugaugg

SEQ ID NO: 595175 - RNA, 20 nt, Artificial Sequence
  Synthetic
uuuauaccugcucuugaugg

SEQ ID NO: 595176 - RNA, 21 nt, Artificial Sequence
  Synthetic
auuuauaccugcucuugaugg

SEQ ID NO: 595177 - RNA, 22 nt, Artificial Sequence
  Synthetic
aauuuauaccugcucuugaugg

SEQ ID NO: 595178 - RNA, 23 nt, Artificial Sequence
  Synthetic
uaauuuauaccugcucuugaugg

SEQ ID NO: 595179 - RNA, 24 nt, Artificial Sequence
  Synthetic
uuaauuuauaccugcucuugaugg

SEQ ID NO: 595180 - RNA, 18 nt, Artificial Sequence
  Synthetic
uuuuucaacauuugaugg

SEQ ID NO: 595181 - RNA, 19 nt, Artificial Sequence
  Synthetic
guuuuucaacauuugaugg

SEQ ID NO: 595182 - RNA, 20 nt, Artificial Sequence
  Synthetic
aguuuuucaacauuugaugg

SEQ ID NO: 595183 - RNA, 21 nt, Artificial Sequence
  Synthetic
aaguuuuucaacauuugaugg

SEQ ID NO: 595184 - RNA, 22 nt, Artificial Sequence
  Synthetic
uaaguuuuucaacauuugaugg

SEQ ID NO: 595185 - RNA, 23 nt, Artificial Sequence
  Synthetic
auaaguuuuucaacauuugaugg

SEQ ID NO: 595186 - RNA, 24 nt, Artificial Sequence
  Synthetic
uauaaguuuuucaacauuugaugg

SEQ ID NO: 595187 - RNA, 18 nt, Artificial Sequence
  Synthetic
acauauugucaaauaugg

SEQ ID NO: 595188 - RNA, 19 nt, Artificial Sequence
  Synthetic
uacauauugucaaauaugg

SEQ ID NO: 595189 - RNA, 20 nt, Artificial Sequence
  Synthetic
auacauauugucaaauaugg

SEQ ID NO: 595190 - RNA, 21 nt, Artificial Sequence
  Synthetic
cauacauauugucaaauaugg

SEQ ID NO: 595191 - RNA, 22 nt, Artificial Sequence
  Synthetic
ucauacauauugucaaauaugg

SEQ ID NO: 595192 - RNA, 23 nt, Artificial Sequence
  Synthetic
uucauacauauugucaaauaugg

SEQ ID NO: 595193 - RNA, 24 nt, Artificial Sequence
  Synthetic
guucauacauauugucaaauaugg

SEQ ID NO: 595194 - RNA, 18 nt, Artificial Sequence
  Synthetic
aaaaaucuucaaauaugg

SEQ ID NO: 595195 - RNA, 19 nt, Artificial Sequence
  Synthetic
uaaaaaucuucaaauaugg

SEQ ID NO: 595196 - RNA, 20 nt, Artificial Sequence
  Synthetic
auaaaaaucuucaaauaugg

SEQ ID NO: 595197 - RNA, 21 nt, Artificial Sequence
  Synthetic
cauaaaaaucuucaaauaugg

SEQ ID NO: 595198 - RNA, 22 nt, Artificial Sequence
  Synthetic
gcauaaaaaucuucaaauaugg

SEQ ID NO: 595199 - RNA, 23 nt, Artificial Sequence
  Synthetic
ugcauaaaaaucuucaaauaugg

SEQ ID NO: 595200 - RNA, 24 nt, Artificial Sequence
  Synthetic
uugcauaaaaaucuucaaauaugg

SEQ ID NO: 595201 - RNA, 18 nt, Artificial Sequence
  Synthetic
caguaagaagaaauaugg

SEQ ID NO: 595202 - RNA, 19 nt, Artificial Sequence
  Synthetic
gcaguaagaagaaauaugg

SEQ ID NO: 595203 - RNA, 20 nt, Artificial Sequence
  Synthetic
ggcaguaagaagaaauaugg

SEQ ID NO: 595204 - RNA, 21 nt, Artificial Sequence
  Synthetic
uggcaguaagaagaaauaugg

SEQ ID NO: 595205 - RNA, 22 nt, Artificial Sequence
  Synthetic
uuggcaguaagaagaaauaugg

SEQ ID NO: 595206 - RNA, 23 nt, Artificial Sequence
  Synthetic
cuuggcaguaagaagaaauaugg

SEQ ID NO: 595207 - RNA, 24 nt, Artificial Sequence
  Synthetic
ucuuggcaguaagaagaaauaugg

SEQ ID NO: 595208 - RNA, 18 nt, Artificial Sequence
  Synthetic
ggaaggagguaaauaugg

SEQ ID NO: 595209 - RNA, 19 nt, Artificial Sequence
  Synthetic
uggaaggagguaaauaugg

SEQ ID NO: 595210 - RNA, 20 nt, Artificial Sequence
  Synthetic
uuggaaggagguaaauaugg

SEQ ID NO: 595211 - RNA, 21 nt, Artificial Sequence
  Synthetic
uuuggaaggagguaaauaugg

SEQ ID NO: 595212 - RNA, 22 nt, Artificial Sequence
  Synthetic
auuuggaaggagguaaauaugg

SEQ ID NO: 595213 - RNA, 23 nt, Artificial Sequence
  Synthetic
uauuuggaaggagguaaauaugg

SEQ ID NO: 595214 - RNA, 24 nt, Artificial Sequence
  Synthetic
guauuuggaaggagguaaauaugg

SEQ ID NO: 595215 - RNA, 18 nt, Artificial Sequence
  Synthetic
caauaugaaacaauaugg

SEQ ID NO: 595216 - RNA, 19 nt, Artificial Sequence
  Synthetic
gcaauaugaaacaauaugg

SEQ ID NO: 595217 - RNA, 20 nt, Artificial Sequence
  Synthetic
ugcaauaugaaacaauaugg

SEQ ID NO: 595218 - RNA, 21 nt, Artificial Sequence
  Synthetic
cugcaauaugaaacaauaugg

SEQ ID NO: 595219 - RNA, 22 nt, Artificial Sequence
  Synthetic
ucugcaauaugaaacaauaugg

SEQ ID NO: 595220 - RNA, 23 nt, Artificial Sequence
  Synthetic
uucugcaauaugaaacaauaugg

SEQ ID NO: 595221 - RNA, 24 nt, Artificial Sequence
  Synthetic
auucugcaauaugaaacaauaugg

SEQ ID NO: 595222 - RNA, 18 nt, Artificial Sequence
  Synthetic
acacgaagaucaauaugg

SEQ ID NO: 595223 - RNA, 19 nt, Artificial Sequence
  Synthetic
aacacgaagaucaauaugg

SEQ ID NO: 595224 - RNA, 20 nt, Artificial Sequence
  Synthetic
aaacacgaagaucaauaugg

SEQ ID NO: 595225 - RNA, 21 nt, Artificial Sequence
  Synthetic
aaaacacgaagaucaauaugg

SEQ ID NO: 595226 - RNA, 22 nt, Artificial Sequence
  Synthetic
gaaaacacgaagaucaauaugg

SEQ ID NO: 595227 - RNA, 23 nt, Artificial Sequence
  Synthetic
agaaaacacgaagaucaauaugg

SEQ ID NO: 595228 - RNA, 24 nt, Artificial Sequence
  Synthetic
aagaaaacacgaagaucaauaugg

SEQ ID NO: 595229 - RNA, 18 nt, Artificial Sequence
  Synthetic
uugacaaauagaauaugg

SEQ ID NO: 595230 - RNA, 19 nt, Artificial Sequence
  Synthetic
auugacaaauagaauaugg

SEQ ID NO: 595231 - RNA, 20 nt, Artificial Sequence
  Synthetic
gauugacaaauagaauaugg

SEQ ID NO: 595232 - RNA, 21 nt, Artificial Sequence
  Synthetic
ugauugacaaauagaauaugg

SEQ ID NO: 595233 - RNA, 22 nt, Artificial Sequence
  Synthetic
cugauugacaaauagaauaugg

SEQ ID NO: 595234 - RNA, 23 nt, Artificial Sequence
  Synthetic
acugauugacaaauagaauaugg

SEQ ID NO: 595235 - RNA, 24 nt, Artificial Sequence
  Synthetic
cacugauugacaaauagaauaugg

SEQ ID NO: 595236 - RNA, 18 nt, Artificial Sequence
  Synthetic
cugaaauuucccauaugg

SEQ ID NO: 595237 - RNA, 19 nt, Artificial Sequence
  Synthetic
gcugaaauuucccauaugg

SEQ ID NO: 595238 - RNA, 20 nt, Artificial Sequence
  Synthetic
agcugaaauuucccauaugg

SEQ ID NO: 595239 - RNA, 21 nt, Artificial Sequence
  Synthetic
gagcugaaauuucccauaugg

SEQ ID NO: 595240 - RNA, 22 nt, Artificial Sequence
  Synthetic
ggagcugaaauuucccauaugg

SEQ ID NO: 595241 - RNA, 23 nt, Artificial Sequence
  Synthetic
gggagcugaaauuucccauaugg

SEQ ID NO: 595242 - RNA, 24 nt, Artificial Sequence
  Synthetic
agggagcugaaauuucccauaugg

SEQ ID NO: 595243 - RNA, 18 nt, Artificial Sequence
  Synthetic
gcauugaauuccauaugg

SEQ ID NO: 595244 - RNA, 19 nt, Artificial Sequence
  Synthetic
ugcauugaauuccauaugg

SEQ ID NO: 595245 - RNA, 20 nt, Artificial Sequence
  Synthetic
augcauugaauuccauaugg

SEQ ID NO: 595246 - RNA, 21 nt, Artificial Sequence
  Synthetic
aaugcauugaauuccauaugg

SEQ ID NO: 595247 - RNA, 22 nt, Artificial Sequence
  Synthetic
uaaugcauugaauuccauaugg

SEQ ID NO: 595248 - RNA, 23 nt, Artificial Sequence
  Synthetic
uuaaugcauugaauuccauaugg

SEQ ID NO: 595249 - RNA, 24 nt, Artificial Sequence
  Synthetic
auuaaugcauugaauuccauaugg

SEQ ID NO: 595250 - RNA, 18 nt, Artificial Sequence
  Synthetic
ggauacagaggcauaugg

SEQ ID NO: 595251 - RNA, 19 nt, Artificial Sequence
  Synthetic
gggauacagaggcauaugg

SEQ ID NO: 595252 - RNA, 20 nt, Artificial Sequence
  Synthetic
agggauacagaggcauaugg

SEQ ID NO: 595253 - RNA, 21 nt, Artificial Sequence
  Synthetic
cagggauacagaggcauaugg

SEQ ID NO: 595254 - RNA, 22 nt, Artificial Sequence
  Synthetic
acagggauacagaggcauaugg

SEQ ID NO: 595255 - RNA, 23 nt, Artificial Sequence
  Synthetic
aacagggauacagaggcauaugg

SEQ ID NO: 595256 - RNA, 24 nt, Artificial Sequence
  Synthetic
uaacagggauacagaggcauaugg

SEQ ID NO: 595257 - RNA, 18 nt, Artificial Sequence
  Synthetic
gcuacauagggcauaugg

SEQ ID NO: 595258 - RNA, 19 nt, Artificial Sequence
  Synthetic
agcuacauagggcauaugg

SEQ ID NO: 595259 - RNA, 20 nt, Artificial Sequence
  Synthetic
aagcuacauagggcauaugg

SEQ ID NO: 595260 - RNA, 21 nt, Artificial Sequence
  Synthetic
aaagcuacauagggcauaugg

SEQ ID NO: 595261 - RNA, 22 nt, Artificial Sequence
  Synthetic
aaaagcuacauagggcauaugg

SEQ ID NO: 595262 - RNA, 23 nt, Artificial Sequence
  Synthetic
gaaaagcuacauagggcauaugg

SEQ ID NO: 595263 - RNA, 24 nt, Artificial Sequence
  Synthetic
ugaaaagcuacauagggcauaugg

SEQ ID NO: 595264 - RNA, 18 nt, Artificial Sequence
  Synthetic
guucaugaaugcauaugg

SEQ ID NO: 595265 - RNA, 19 nt, Artificial Sequence
  Synthetic
gguucaugaaugcauaugg

SEQ ID NO: 595266 - RNA, 20 nt, Artificial Sequence
  Synthetic
agguucaugaaugcauaugg

SEQ ID NO: 595267 - RNA, 21 nt, Artificial Sequence
  Synthetic
aagguucaugaaugcauaugg

SEQ ID NO: 595268 - RNA, 22 nt, Artificial Sequence
  Synthetic
gaagguucaugaaugcauaugg

SEQ ID NO: 595269 - RNA, 23 nt, Artificial Sequence
  Synthetic
agaagguucaugaaugcauaugg

SEQ ID NO: 595270 - RNA, 24 nt, Artificial Sequence
  Synthetic
cagaagguucaugaaugcauaugg

SEQ ID NO: 595271 - RNA, 18 nt, Artificial Sequence
  Synthetic
uccuuuguagggauaugg

SEQ ID NO: 595272 - RNA, 19 nt, Artificial Sequence
  Synthetic
guccuuuguagggauaugg

SEQ ID NO: 595273 - RNA, 20 nt, Artificial Sequence
  Synthetic
uguccuuuguagggauaugg

SEQ ID NO: 595274 - RNA, 21 nt, Artificial Sequence
  Synthetic
auguccuuuguagggauaugg

SEQ ID NO: 595275 - RNA, 22 nt, Artificial Sequence
  Synthetic
cauguccuuuguagggauaugg

SEQ ID NO: 595276 - RNA, 23 nt, Artificial Sequence
  Synthetic
ucauguccuuuguagggauaugg

SEQ ID NO: 595277 - RNA, 24 nt, Artificial Sequence
  Synthetic
uucauguccuuuguagggauaugg

SEQ ID NO: 595278 - RNA, 18 nt, Artificial Sequence
  Synthetic
auaagcaaauggauaugg

SEQ ID NO: 595279 - RNA, 19 nt, Artificial Sequence
  Synthetic
cauaagcaaauggauaugg

SEQ ID NO: 595280 - RNA, 20 nt, Artificial Sequence
  Synthetic
gcauaagcaaauggauaugg

SEQ ID NO: 595281 - RNA, 21 nt, Artificial Sequence
  Synthetic
agcauaagcaaauggauaugg

SEQ ID NO: 595282 - RNA, 22 nt, Artificial Sequence
  Synthetic
gagcauaagcaaauggauaugg

SEQ ID NO: 595283 - RNA, 23 nt, Artificial Sequence
  Synthetic
ggagcauaagcaaauggauaugg

SEQ ID NO: 595284 - RNA, 24 nt, Artificial Sequence
  Synthetic
uggagcauaagcaaauggauaugg

SEQ ID NO: 595285 - RNA, 18 nt, Artificial Sequence
  Synthetic
uagauuaacuugauaugg

SEQ ID NO: 595286 - RNA, 19 nt, Artificial Sequence
  Synthetic
auagauuaacuugauaugg

SEQ ID NO: 595287 - RNA, 20 nt, Artificial Sequence
  Synthetic
cauagauuaacuugauaugg

SEQ ID NO: 595288 - RNA, 21 nt, Artificial Sequence
  Synthetic
acauagauuaacuugauaugg

SEQ ID NO: 595289 - RNA, 22 nt, Artificial Sequence
  Synthetic
aacauagauuaacuugauaugg

SEQ ID NO: 595290 - RNA, 23 nt, Artificial Sequence
  Synthetic
gaacauagauuaacuugauaugg

SEQ ID NO: 595291 - RNA, 24 nt, Artificial Sequence
  Synthetic
ugaacauagauuaacuugauaugg

SEQ ID NO: 595292 - RNA, 18 nt, Artificial Sequence
  Synthetic
aauucuuucaauauaugg

SEQ ID NO: 595293 - RNA, 19 nt, Artificial Sequence
  Synthetic
gaauucuuucaauauaugg

SEQ ID NO: 595294 - RNA, 20 nt, Artificial Sequence
  Synthetic
agaauucuuucaauauaugg

SEQ ID NO: 595295 - RNA, 21 nt, Artificial Sequence
  Synthetic
cagaauucuuucaauauaugg

SEQ ID NO: 595296 - RNA, 22 nt, Artificial Sequence
  Synthetic
ucagaauucuuucaauauaugg

SEQ ID NO: 595297 - RNA, 23 nt, Artificial Sequence
  Synthetic
uucagaauucuuucaauauaugg

SEQ ID NO: 595298 - RNA, 24 nt, Artificial Sequence
  Synthetic
auucagaauucuuucaauauaugg

SEQ ID NO: 595299 - RNA, 18 nt, Artificial Sequence
  Synthetic
cuacuauuagauauaugg

SEQ ID NO: 595300 - RNA, 19 nt, Artificial Sequence
  Synthetic
ucuacuauuagauauaugg

SEQ ID NO: 595301 - RNA, 20 nt, Artificial Sequence
  Synthetic
uucuacuauuagauauaugg

SEQ ID NO: 595302 - RNA, 21 nt, Artificial Sequence
  Synthetic
auucuacuauuagauauaugg

SEQ ID NO: 595303 - RNA, 22 nt, Artificial Sequence
  Synthetic
cauucuacuauuagauauaugg

SEQ ID NO: 595304 - RNA, 23 nt, Artificial Sequence
  Synthetic
ccauucuacuauuagauauaugg

SEQ ID NO: 595305 - RNA, 24 nt, Artificial Sequence
  Synthetic
accauucuacuauuagauauaugg

SEQ ID NO: 595306 - RNA, 18 nt, Artificial Sequence
  Synthetic
gagccugucccuauaugg

SEQ ID NO: 595307 - RNA, 19 nt, Artificial Sequence
  Synthetic
ggagccugucccuauaugg

SEQ ID NO: 595308 - RNA, 20 nt, Artificial Sequence
  Synthetic
aggagccugucccuauaugg

SEQ ID NO: 595309 - RNA, 21 nt, Artificial Sequence
  Synthetic
gaggagccugucccuauaugg

SEQ ID NO: 595310 - RNA, 22 nt, Artificial Sequence
  Synthetic
agaggagccugucccuauaugg

SEQ ID NO: 595311 - RNA, 23 nt, Artificial Sequence
  Synthetic
cagaggagccugucccuauaugg

SEQ ID NO: 595312 - RNA, 24 nt, Artificial Sequence
  Synthetic
acagaggagccugucccuauaugg

SEQ ID NO: 595313 - RNA, 18 nt, Artificial Sequence
  Synthetic
ugaaaguaguuuauaugg

SEQ ID NO: 595314 - RNA, 19 nt, Artificial Sequence
  Synthetic
uugaaaguaguuuauaugg

SEQ ID NO: 595315 - RNA, 20 nt, Artificial Sequence
  Synthetic
uuugaaaguaguuuauaugg

SEQ ID NO: 595316 - RNA, 21 nt, Artificial Sequence
  Synthetic
uuuugaaaguaguuuauaugg

SEQ ID NO: 595317 - RNA, 22 nt, Artificial Sequence
  Synthetic
auuuugaaaguaguuuauaugg

SEQ ID NO: 595318 - RNA, 23 nt, Artificial Sequence
  Synthetic
gauuuugaaaguaguuuauaugg

SEQ ID NO: 595319 - RNA, 24 nt, Artificial Sequence
  Synthetic
ugauuuugaaaguaguuuauaugg

SEQ ID NO: 595320 - RNA, 18 nt, Artificial Sequence
  Synthetic
uaucuucauuuuauaugg

SEQ ID NO: 595321 - RNA, 19 nt, Artificial Sequence
  Synthetic
uuaucuucauuuuauaugg

SEQ ID NO: 595322 - RNA, 20 nt, Artificial Sequence
  Synthetic
auuaucuucauuuuauaugg

SEQ ID NO: 595323 - RNA, 21 nt, Artificial Sequence
  Synthetic
aauuaucuucauuuuauaugg

SEQ ID NO: 595324 - RNA, 22 nt, Artificial Sequence
  Synthetic
caauuaucuucauuuuauaugg

SEQ ID NO: 595325 - RNA, 23 nt, Artificial Sequence
  Synthetic
ccaauuaucuucauuuuauaugg

SEQ ID NO: 595326 - RNA, 24 nt, Artificial Sequence
  Synthetic
uccaauuaucuucauuuuauaugg

SEQ ID NO: 595327 - RNA, 18 nt, Artificial Sequence
  Synthetic
uuugacaauugacuaugg

SEQ ID NO: 595328 - RNA, 19 nt, Artificial Sequence
  Synthetic
cuuugacaauugacuaugg

SEQ ID NO: 595329 - RNA, 20 nt, Artificial Sequence
  Synthetic
gcuuugacaauugacuaugg

SEQ ID NO: 595330 - RNA, 21 nt, Artificial Sequence
  Synthetic
ugcuuugacaauugacuaugg

SEQ ID NO: 595331 - RNA, 22 nt, Artificial Sequence
  Synthetic
uugcuuugacaauugacuaugg

SEQ ID NO: 595332 - RNA, 23 nt, Artificial Sequence
  Synthetic
cuugcuuugacaauugacuaugg

SEQ ID NO: 595333 - RNA, 24 nt, Artificial Sequence
  Synthetic
acuugcuuugacaauugacuaugg

SEQ ID NO: 595334 - RNA, 18 nt, Artificial Sequence
  Synthetic
uaagaaggcaaccuaugg

SEQ ID NO: 595335 - RNA, 19 nt, Artificial Sequence
  Synthetic
uuaagaaggcaaccuaugg

SEQ ID NO: 595336 - RNA, 20 nt, Artificial Sequence
  Synthetic
auuaagaaggcaaccuaugg

SEQ ID NO: 595337 - RNA, 21 nt, Artificial Sequence
  Synthetic
cauuaagaaggcaaccuaugg

SEQ ID NO: 595338 - RNA, 22 nt, Artificial Sequence
  Synthetic
ccauuaagaaggcaaccuaugg

SEQ ID NO: 595339 - RNA, 23 nt, Artificial Sequence
  Synthetic
cccauuaagaaggcaaccuaugg

SEQ ID NO: 595340 - RNA, 24 nt, Artificial Sequence
  Synthetic
acccauuaagaaggcaaccuaugg

SEQ ID NO: 595341 - RNA, 18 nt, Artificial Sequence
  Synthetic
gcuccuucauuccuaugg

SEQ ID NO: 595342 - RNA, 19 nt, Artificial Sequence
  Synthetic
agcuccuucauuccuaugg

SEQ ID NO: 595343 - RNA, 20 nt, Artificial Sequence
  Synthetic
cagcuccuucauuccuaugg

SEQ ID NO: 595344 - RNA, 21 nt, Artificial Sequence
  Synthetic
ucagcuccuucauuccuaugg

SEQ ID NO: 595345 - RNA, 22 nt, Artificial Sequence
  Synthetic
gucagcuccuucauuccuaugg

SEQ ID NO: 595346 - RNA, 23 nt, Artificial Sequence
  Synthetic
ugucagcuccuucauuccuaugg

SEQ ID NO: 595347 - RNA, 24 nt, Artificial Sequence
  Synthetic
uugucagcuccuucauuccuaugg

SEQ ID NO: 595348 - RNA, 18 nt, Artificial Sequence
  Synthetic
ggagaauaggagcuaugg

SEQ ID NO: 595349 - RNA, 19 nt, Artificial Sequence
  Synthetic
uggagaauaggagcuaugg

SEQ ID NO: 595350 - RNA, 20 nt, Artificial Sequence
  Synthetic
cuggagaauaggagcuaugg

SEQ ID NO: 595351 - RNA, 21 nt, Artificial Sequence
  Synthetic
ucuggagaauaggagcuaugg

SEQ ID NO: 595352 - RNA, 22 nt, Artificial Sequence
  Synthetic
gucuggagaauaggagcuaugg

SEQ ID NO: 595353 - RNA, 23 nt, Artificial Sequence
  Synthetic
ggucuggagaauaggagcuaugg

SEQ ID NO: 595354 - RNA, 24 nt, Artificial Sequence
  Synthetic
uggucuggagaauaggagcuaugg

SEQ ID NO: 595355 - RNA, 18 nt, Artificial Sequence
  Synthetic
accaugagaacaguaugg

SEQ ID NO: 595356 - RNA, 19 nt, Artificial Sequence
  Synthetic
uaccaugagaacaguaugg

SEQ ID NO: 595357 - RNA, 20 nt, Artificial Sequence
  Synthetic
guaccaugagaacaguaugg

SEQ ID NO: 595358 - RNA, 21 nt, Artificial Sequence
  Synthetic
aguaccaugagaacaguaugg

SEQ ID NO: 595359 - RNA, 22 nt, Artificial Sequence
  Synthetic
caguaccaugagaacaguaugg

SEQ ID NO: 595360 - RNA, 23 nt, Artificial Sequence
  Synthetic
ucaguaccaugagaacaguaugg

SEQ ID NO: 595361 - RNA, 24 nt, Artificial Sequence
  Synthetic
uucaguaccaugagaacaguaugg

SEQ ID NO: 595362 - RNA, 18 nt, Artificial Sequence
  Synthetic
cucaagguuccaguaugg

SEQ ID NO: 595363 - RNA, 19 nt, Artificial Sequence
  Synthetic
ccucaagguuccaguaugg

SEQ ID NO: 595364 - RNA, 20 nt, Artificial Sequence
  Synthetic
cccucaagguuccaguaugg

SEQ ID NO: 595365 - RNA, 21 nt, Artificial Sequence
  Synthetic
acccucaagguuccaguaugg

SEQ ID NO: 595366 - RNA, 22 nt, Artificial Sequence
  Synthetic
aacccucaagguuccaguaugg

SEQ ID NO: 595367 - RNA, 23 nt, Artificial Sequence
  Synthetic
gaacccucaagguuccaguaugg

SEQ ID NO: 595368 - RNA, 24 nt, Artificial Sequence
  Synthetic
agaacccucaagguuccaguaugg

SEQ ID NO: 595369 - RNA, 18 nt, Artificial Sequence
  Synthetic
gcucagaaccacguaugg

SEQ ID NO: 595370 - RNA, 19 nt, Artificial Sequence
  Synthetic
agcucagaaccacguaugg

SEQ ID NO: 595371 - RNA, 20 nt, Artificial Sequence
  Synthetic
uagcucagaaccacguaugg

SEQ ID NO: 595372 - RNA, 21 nt, Artificial Sequence
  Synthetic
guagcucagaaccacguaugg

SEQ ID NO: 595373 - RNA, 22 nt, Artificial Sequence
  Synthetic
aguagcucagaaccacguaugg

SEQ ID NO: 595374 - RNA, 23 nt, Artificial Sequence
  Synthetic
aaguagcucagaaccacguaugg

SEQ ID NO: 595375 - RNA, 24 nt, Artificial Sequence
  Synthetic
gaaguagcucagaaccacguaugg

SEQ ID NO: 595376 - RNA, 18 nt, Artificial Sequence
  Synthetic
aagagaaaagauguaugg

SEQ ID NO: 595377 - RNA, 19 nt, Artificial Sequence
  Synthetic
gaagagaaaagauguaugg

SEQ ID NO: 595378 - RNA, 20 nt, Artificial Sequence
  Synthetic
ggaagagaaaagauguaugg

SEQ ID NO: 595379 - RNA, 21 nt, Artificial Sequence
  Synthetic
aggaagagaaaagauguaugg

SEQ ID NO: 595380 - RNA, 22 nt, Artificial Sequence
  Synthetic
caggaagagaaaagauguaugg

SEQ ID NO: 595381 - RNA, 23 nt, Artificial Sequence
  Synthetic
acaggaagagaaaagauguaugg

SEQ ID NO: 595382 - RNA, 24 nt, Artificial Sequence
  Synthetic
cacaggaagagaaaagauguaugg

SEQ ID NO: 595383 - RNA, 18 nt, Artificial Sequence
  Synthetic
uuaaaggcguuuguaugg

SEQ ID NO: 595384 - RNA, 19 nt, Artificial Sequence
  Synthetic
cuuaaaggcguuuguaugg

SEQ ID NO: 595385 - RNA, 20 nt, Artificial Sequence
  Synthetic
acuuaaaggcguuuguaugg

SEQ ID NO: 595386 - RNA, 21 nt, Artificial Sequence
  Synthetic
aacuuaaaggcguuuguaugg

SEQ ID NO: 595387 - RNA, 22 nt, Artificial Sequence
  Synthetic
uaacuuaaaggcguuuguaugg

SEQ ID NO: 595388 - RNA, 23 nt, Artificial Sequence
  Synthetic
uuaacuuaaaggcguuuguaugg

SEQ ID NO: 595389 - RNA, 24 nt, Artificial Sequence
  Synthetic
uuuaacuuaaaggcguuuguaugg

SEQ ID NO: 595390 - RNA, 18 nt, Artificial Sequence
  Synthetic
gauaguuauuaauuaugg

SEQ ID NO: 595391 - RNA, 19 nt, Artificial Sequence
  Synthetic
ggauaguuauuaauuaugg

SEQ ID NO: 595392 - RNA, 20 nt, Artificial Sequence
  Synthetic
aggauaguuauuaauuaugg

SEQ ID NO: 595393 - RNA, 21 nt, Artificial Sequence
  Synthetic
aaggauaguuauuaauuaugg

SEQ ID NO: 595394 - RNA, 22 nt, Artificial Sequence
  Synthetic
uaaggauaguuauuaauuaugg

SEQ ID NO: 595395 - RNA, 23 nt, Artificial Sequence
  Synthetic
uuaaggauaguuauuaauuaugg

SEQ ID NO: 595396 - RNA, 24 nt, Artificial Sequence
  Synthetic
uuuaaggauaguuauuaauuaugg

SEQ ID NO: 595397 - RNA, 18 nt, Artificial Sequence
  Synthetic
uggaggaagugauuaugg

SEQ ID NO: 595398 - RNA, 19 nt, Artificial Sequence
  Synthetic
auggaggaagugauuaugg

SEQ ID NO: 595399 - RNA, 20 nt, Artificial Sequence
  Synthetic
cauggaggaagugauuaugg

SEQ ID NO: 595400 - RNA, 21 nt, Artificial Sequence
  Synthetic
acauggaggaagugauuaugg

SEQ ID NO: 595401 - RNA, 22 nt, Artificial Sequence
  Synthetic
aacauggaggaagugauuaugg

SEQ ID NO: 595402 - RNA, 23 nt, Artificial Sequence
  Synthetic
gaacauggaggaagugauuaugg

SEQ ID NO: 595403 - RNA, 24 nt, Artificial Sequence
  Synthetic
ggaacauggaggaagugauuaugg

SEQ ID NO: 595404 - RNA, 18 nt, Artificial Sequence
  Synthetic
caaccugagguauuaugg

SEQ ID NO: 595405 - RNA, 19 nt, Artificial Sequence
  Synthetic
acaaccugagguauuaugg

SEQ ID NO: 595406 - RNA, 20 nt, Artificial Sequence
  Synthetic
aacaaccugagguauuaugg

SEQ ID NO: 595407 - RNA, 21 nt, Artificial Sequence
  Synthetic
caacaaccugagguauuaugg

SEQ ID NO: 595408 - RNA, 22 nt, Artificial Sequence
  Synthetic
gcaacaaccugagguauuaugg

SEQ ID NO: 595409 - RNA, 23 nt, Artificial Sequence
  Synthetic
ugcaacaaccugagguauuaugg

SEQ ID NO: 595410 - RNA, 24 nt, Artificial Sequence
  Synthetic
uugcaacaaccugagguauuaugg

SEQ ID NO: 595411 - RNA, 18 nt, Artificial Sequence
  Synthetic
cagccauacuuauuaugg

SEQ ID NO: 595412 - RNA, 19 nt, Artificial Sequence
  Synthetic
gcagccauacuuauuaugg

SEQ ID NO: 595413 - RNA, 20 nt, Artificial Sequence
  Synthetic
agcagccauacuuauuaugg

SEQ ID NO: 595414 - RNA, 21 nt, Artificial Sequence
  Synthetic
gagcagccauacuuauuaugg

SEQ ID NO: 595415 - RNA, 22 nt, Artificial Sequence
  Synthetic
ggagcagccauacuuauuaugg

SEQ ID NO: 595416 - RNA, 23 nt, Artificial Sequence
  Synthetic
gggagcagccauacuuauuaugg

SEQ ID NO: 595417 - RNA, 24 nt, Artificial Sequence
  Synthetic
ggggagcagccauacuuauuaugg

SEQ ID NO: 595418 - RNA, 18 nt, Artificial Sequence
  Synthetic
aagaaaaauugcuuaugg

SEQ ID NO: 595419 - RNA, 19 nt, Artificial Sequence
  Synthetic
aaagaaaaauugcuuaugg

SEQ ID NO: 595420 - RNA, 20 nt, Artificial Sequence
  Synthetic
gaaagaaaaauugcuuaugg

SEQ ID NO: 595421 - RNA, 21 nt, Artificial Sequence
  Synthetic
ggaaagaaaaauugcuuaugg

SEQ ID NO: 595422 - RNA, 22 nt, Artificial Sequence
  Synthetic
aggaaagaaaaauugcuuaugg

SEQ ID NO: 595423 - RNA, 23 nt, Artificial Sequence
  Synthetic
gaggaaagaaaaauugcuuaugg

SEQ ID NO: 595424 - RNA, 24 nt, Artificial Sequence
  Synthetic
ugaggaaagaaaaauugcuuaugg

SEQ ID NO: 595425 - RNA, 18 nt, Artificial Sequence
  Synthetic
auauuaaaauucuuaugg

SEQ ID NO: 595426 - RNA, 19 nt, Artificial Sequence
  Synthetic
aauauuaaaauucuuaugg

SEQ ID NO: 595427 - RNA, 20 nt, Artificial Sequence
  Synthetic
aaauauuaaaauucuuaugg

SEQ ID NO: 595428 - RNA, 21 nt, Artificial Sequence
  Synthetic
gaaauauuaaaauucuuaugg

SEQ ID NO: 595429 - RNA, 22 nt, Artificial Sequence
  Synthetic
agaaauauuaaaauucuuaugg

SEQ ID NO: 595430 - RNA, 23 nt, Artificial Sequence
  Synthetic
uagaaauauuaaaauucuuaugg

SEQ ID NO: 595431 - RNA, 24 nt, Artificial Sequence
  Synthetic
uuagaaauauuaaaauucuuaugg

SEQ ID NO: 595432 - RNA, 18 nt, Artificial Sequence
  Synthetic
uucuucuucuucuuaugg

SEQ ID NO: 595433 - RNA, 19 nt, Artificial Sequence
  Synthetic
cuucuucuucuucuuaugg

SEQ ID NO: 595434 - RNA, 20 nt, Artificial Sequence
  Synthetic
ucuucuucuucuucuuaugg

SEQ ID NO: 595435 - RNA, 21 nt, Artificial Sequence
  Synthetic
uucuucuucuucuucuuaugg

SEQ ID NO: 595436 - RNA, 22 nt, Artificial Sequence
  Synthetic
cuucuucuucuucuucuuaugg

SEQ ID NO: 595437 - RNA, 23 nt, Artificial Sequence
  Synthetic
ccuucuucuucuucuucuuaugg

SEQ ID NO: 595438 - RNA, 24 nt, Artificial Sequence
  Synthetic
uccuucuucuucuucuucuuaugg

SEQ ID NO: 595439 - RNA, 18 nt, Artificial Sequence
  Synthetic
aauacugagauguuaugg

SEQ ID NO: 595440 - RNA, 19 nt, Artificial Sequence
  Synthetic
gaauacugagauguuaugg

SEQ ID NO: 595441 - RNA, 20 nt, Artificial Sequence
  Synthetic
agaauacugagauguuaugg

SEQ ID NO: 595442 - RNA, 21 nt, Artificial Sequence
  Synthetic
gagaauacugagauguuaugg

SEQ ID NO: 595443 - RNA, 22 nt, Artificial Sequence
  Synthetic
agagaauacugagauguuaugg

SEQ ID NO: 595444 - RNA, 23 nt, Artificial Sequence
  Synthetic
cagagaauacugagauguuaugg

SEQ ID NO: 595445 - RNA, 24 nt, Artificial Sequence
  Synthetic
acagagaauacugagauguuaugg

SEQ ID NO: 595446 - RNA, 18 nt, Artificial Sequence
  Synthetic
aauucccauguguuaugg

SEQ ID NO: 595447 - RNA, 19 nt, Artificial Sequence
  Synthetic
gaauucccauguguuaugg

SEQ ID NO: 595448 - RNA, 20 nt, Artificial Sequence
  Synthetic
ugaauucccauguguuaugg

SEQ ID NO: 595449 - RNA, 21 nt, Artificial Sequence
  Synthetic
uugaauucccauguguuaugg

SEQ ID NO: 595450 - RNA, 22 nt, Artificial Sequence
  Synthetic
guugaauucccauguguuaugg

SEQ ID NO: 595451 - RNA, 23 nt, Artificial Sequence
  Synthetic
uguugaauucccauguguuaugg

SEQ ID NO: 595452 - RNA, 24 nt, Artificial Sequence
  Synthetic
auguugaauucccauguguuaugg

SEQ ID NO: 595453 - RNA, 18 nt, Artificial Sequence
  Synthetic
gccagguagguuuuaugg

SEQ ID NO: 595454 - RNA, 19 nt, Artificial Sequence
  Synthetic
ggccagguagguuuuaugg

SEQ ID NO: 595455 - RNA, 20 nt, Artificial Sequence
  Synthetic
gggccagguagguuuuaugg

SEQ ID NO: 595456 - RNA, 21 nt, Artificial Sequence
  Synthetic
agggccagguagguuuuaugg

SEQ ID NO: 595457 - RNA, 22 nt, Artificial Sequence
  Synthetic
gagggccagguagguuuuaugg

SEQ ID NO: 595458 - RNA, 23 nt, Artificial Sequence
  Synthetic
ggagggccagguagguuuuaugg

SEQ ID NO: 595459 - RNA, 24 nt, Artificial Sequence
  Synthetic
aggagggccagguagguuuuaugg

SEQ ID NO: 595460 - RNA, 18 nt, Artificial Sequence
  Synthetic
ucugcaaaaauaaacugg

SEQ ID NO: 595461 - RNA, 19 nt, Artificial Sequence
  Synthetic
aucugcaaaaauaaacugg

SEQ ID NO: 595462 - RNA, 20 nt, Artificial Sequence
  Synthetic
uaucugcaaaaauaaacugg

SEQ ID NO: 595463 - RNA, 21 nt, Artificial Sequence
  Synthetic
cuaucugcaaaaauaaacugg

SEQ ID NO: 595464 - RNA, 22 nt, Artificial Sequence
  Synthetic
gcuaucugcaaaaauaaacugg

SEQ ID NO: 595465 - RNA, 23 nt, Artificial Sequence
  Synthetic
agcuaucugcaaaaauaaacugg

SEQ ID NO: 595466 - RNA, 24 nt, Artificial Sequence
  Synthetic
uagcuaucugcaaaaauaaacugg

SEQ ID NO: 595467 - RNA, 18 nt, Artificial Sequence
  Synthetic
guaaacucuauaaacugg

SEQ ID NO: 595468 - RNA, 19 nt, Artificial Sequence
  Synthetic
uguaaacucuauaaacugg

SEQ ID NO: 595469 - RNA, 20 nt, Artificial Sequence
  Synthetic
cuguaaacucuauaaacugg

SEQ ID NO: 595470 - RNA, 21 nt, Artificial Sequence
  Synthetic
ucuguaaacucuauaaacugg

SEQ ID NO: 595471 - RNA, 22 nt, Artificial Sequence
  Synthetic
cucuguaaacucuauaaacugg

SEQ ID NO: 595472 - RNA, 23 nt, Artificial Sequence
  Synthetic
gcucuguaaacucuauaaacugg

SEQ ID NO: 595473 - RNA, 24 nt, Artificial Sequence
  Synthetic
ugcucuguaaacucuauaaacugg

SEQ ID NO: 595474 - RNA, 18 nt, Artificial Sequence
  Synthetic
agguagcagguaaacugg

SEQ ID NO: 595475 - RNA, 19 nt, Artificial Sequence
  Synthetic
aagguagcagguaaacugg

SEQ ID NO: 595476 - RNA, 20 nt, Artificial Sequence
  Synthetic
aaagguagcagguaaacugg

SEQ ID NO: 595477 - RNA, 21 nt, Artificial Sequence
  Synthetic
gaaagguagcagguaaacugg

SEQ ID NO: 595478 - RNA, 22 nt, Artificial Sequence
  Synthetic
agaaagguagcagguaaacugg

SEQ ID NO: 595479 - RNA, 23 nt, Artificial Sequence
  Synthetic
uagaaagguagcagguaaacugg

SEQ ID NO: 595480 - RNA, 24 nt, Artificial Sequence
  Synthetic
auagaaagguagcagguaaacugg

SEQ ID NO: 595481 - RNA, 18 nt, Artificial Sequence
  Synthetic
ucauugaaugccaacugg

SEQ ID NO: 595482 - RNA, 19 nt, Artificial Sequence
  Synthetic
aucauugaaugccaacugg

SEQ ID NO: 595483 - RNA, 20 nt, Artificial Sequence
  Synthetic
aaucauugaaugccaacugg

SEQ ID NO: 595484 - RNA, 21 nt, Artificial Sequence
  Synthetic
uaaucauugaaugccaacugg

SEQ ID NO: 595485 - RNA, 22 nt, Artificial Sequence
  Synthetic
uuaaucauugaaugccaacugg

SEQ ID NO: 595486 - RNA, 23 nt, Artificial Sequence
  Synthetic
cuuaaucauugaaugccaacugg

SEQ ID NO: 595487 - RNA, 24 nt, Artificial Sequence
  Synthetic
acuuaaucauugaaugccaacugg

SEQ ID NO: 595488 - RNA, 18 nt, Artificial Sequence
  Synthetic
gagauaaaaugcaacugg

SEQ ID NO: 595489 - RNA, 19 nt, Artificial Sequence
  Synthetic
agagauaaaaugcaacugg

SEQ ID NO: 595490 - RNA, 20 nt, Artificial Sequence
  Synthetic
aagagauaaaaugcaacugg

SEQ ID NO: 595491 - RNA, 21 nt, Artificial Sequence
  Synthetic
gaagagauaaaaugcaacugg

SEQ ID NO: 595492 - RNA, 22 nt, Artificial Sequence
  Synthetic
agaagagauaaaaugcaacugg

SEQ ID NO: 595493 - RNA, 23 nt, Artificial Sequence
  Synthetic
cagaagagauaaaaugcaacugg

SEQ ID NO: 595494 - RNA, 24 nt, Artificial Sequence
  Synthetic
acagaagagauaaaaugcaacugg

SEQ ID NO: 595495 - RNA, 18 nt, Artificial Sequence
  Synthetic
gccgaugcgaucaacugg

SEQ ID NO: 595496 - RNA, 19 nt, Artificial Sequence
  Synthetic
agccgaugcgaucaacugg

SEQ ID NO: 595497 - RNA, 20 nt, Artificial Sequence
  Synthetic
gagccgaugcgaucaacugg

SEQ ID NO: 595498 - RNA, 21 nt, Artificial Sequence
  Synthetic
ggagccgaugcgaucaacugg

SEQ ID NO: 595499 - RNA, 22 nt, Artificial Sequence
  Synthetic
aggagccgaugcgaucaacugg

SEQ ID NO: 595500 - RNA, 23 nt, Artificial Sequence
  Synthetic
caggagccgaugcgaucaacugg

SEQ ID NO: 595501 - RNA, 24 nt, Artificial Sequence
  Synthetic
ucaggagccgaugcgaucaacugg

SEQ ID NO: 595502 - RNA, 18 nt, Artificial Sequence
  Synthetic
caguugccuaagaacugg

SEQ ID NO: 595503 - RNA, 19 nt, Artificial Sequence
  Synthetic
acaguugccuaagaacugg

SEQ ID NO: 595504 - RNA, 20 nt, Artificial Sequence
  Synthetic
aacaguugccuaagaacugg

SEQ ID NO: 595505 - RNA, 21 nt, Artificial Sequence
  Synthetic
aaacaguugccuaagaacugg

SEQ ID NO: 595506 - RNA, 22 nt, Artificial Sequence
  Synthetic
gaaacaguugccuaagaacugg

SEQ ID NO: 595507 - RNA, 23 nt, Artificial Sequence
  Synthetic
agaaacaguugccuaagaacugg

SEQ ID NO: 595508 - RNA, 24 nt, Artificial Sequence
  Synthetic
gagaaacaguugccuaagaacugg

SEQ ID NO: 595509 - RNA, 18 nt, Artificial Sequence
  Synthetic
cgauugcaagagaacugg

SEQ ID NO: 595510 - RNA, 19 nt, Artificial Sequence
  Synthetic
acgauugcaagagaacugg

SEQ ID NO: 595511 - RNA, 20 nt, Artificial Sequence
  Synthetic
uacgauugcaagagaacugg

SEQ ID NO: 595512 - RNA, 21 nt, Artificial Sequence
  Synthetic
guacgauugcaagagaacugg

SEQ ID NO: 595513 - RNA, 22 nt, Artificial Sequence
  Synthetic
uguacgauugcaagagaacugg

SEQ ID NO: 595514 - RNA, 23 nt, Artificial Sequence
  Synthetic
uuguacgauugcaagagaacugg

SEQ ID NO: 595515 - RNA, 24 nt, Artificial Sequence
  Synthetic
auuguacgauugcaagagaacugg

SEQ ID NO: 595516 - RNA, 18 nt, Artificial Sequence
  Synthetic
aagaggugccugaacugg

SEQ ID NO: 595517 - RNA, 19 nt, Artificial Sequence
  Synthetic
aaagaggugccugaacugg

SEQ ID NO: 595518 - RNA, 20 nt, Artificial Sequence
  Synthetic
caaagaggugccugaacugg

SEQ ID NO: 595519 - RNA, 21 nt, Artificial Sequence
  Synthetic
gcaaagaggugccugaacugg

SEQ ID NO: 595520 - RNA, 22 nt, Artificial Sequence
  Synthetic
ugcaaagaggugccugaacugg

SEQ ID NO: 595521 - RNA, 23 nt, Artificial Sequence
  Synthetic
cugcaaagaggugccugaacugg

SEQ ID NO: 595522 - RNA, 24 nt, Artificial Sequence
  Synthetic
gcugcaaagaggugccugaacugg

SEQ ID NO: 595523 - RNA, 18 nt, Artificial Sequence
  Synthetic
ggagaggcucauaacugg

SEQ ID NO: 595524 - RNA, 19 nt, Artificial Sequence
  Synthetic
gggagaggcucauaacugg

SEQ ID NO: 595525 - RNA, 20 nt, Artificial Sequence
  Synthetic
ggggagaggcucauaacugg

SEQ ID NO: 595526 - RNA, 21 nt, Artificial Sequence
  Synthetic
aggggagaggcucauaacugg

SEQ ID NO: 595527 - RNA, 22 nt, Artificial Sequence
  Synthetic
caggggagaggcucauaacugg

SEQ ID NO: 595528 - RNA, 23 nt, Artificial Sequence
  Synthetic
gcaggggagaggcucauaacugg

SEQ ID NO: 595529 - RNA, 24 nt, Artificial Sequence
  Synthetic
ggcaggggagaggcucauaacugg

SEQ ID NO: 595530 - RNA, 18 nt, Artificial Sequence
  Synthetic
aaacgacauuauaacugg

SEQ ID NO: 595531 - RNA, 19 nt, Artificial Sequence
  Synthetic
aaaacgacauuauaacugg

SEQ ID NO: 595532 - RNA, 20 nt, Artificial Sequence
  Synthetic
aaaaacgacauuauaacugg

SEQ ID NO: 595533 - RNA, 21 nt, Artificial Sequence
  Synthetic
aaaaaacgacauuauaacugg

SEQ ID NO: 595534 - RNA, 22 nt, Artificial Sequence
  Synthetic
uaaaaaacgacauuauaacugg

SEQ ID NO: 595535 - RNA, 23 nt, Artificial Sequence
  Synthetic
auaaaaaacgacauuauaacugg

SEQ ID NO: 595536 - RNA, 24 nt, Artificial Sequence
  Synthetic
cauaaaaaacgacauuauaacugg

SEQ ID NO: 595537 - RNA, 18 nt, Artificial Sequence
  Synthetic
auacaaaaaauuaacugg

SEQ ID NO: 595538 - RNA, 19 nt, Artificial Sequence
  Synthetic
aauacaaaaaauuaacugg

SEQ ID NO: 595539 - RNA, 20 nt, Artificial Sequence
  Synthetic
aaauacaaaaaauuaacugg

SEQ ID NO: 595540 - RNA, 21 nt, Artificial Sequence
  Synthetic
aaaauacaaaaaauuaacugg

SEQ ID NO: 595541 - RNA, 22 nt, Artificial Sequence
  Synthetic
aaaaauacaaaaaauuaacugg

SEQ ID NO: 595542 - RNA, 23 nt, Artificial Sequence
  Synthetic
caaaaauacaaaaaauuaacugg

SEQ ID NO: 595543 - RNA, 24 nt, Artificial Sequence
  Synthetic
ccaaaaauacaaaaaauuaacugg

SEQ ID NO: 595544 - RNA, 18 nt, Artificial Sequence
  Synthetic
ucugucugcauuaacugg

SEQ ID NO: 595545 - RNA, 19 nt, Artificial Sequence
  Synthetic
uucugucugcauuaacugg

SEQ ID NO: 595546 - RNA, 20 nt, Artificial Sequence
  Synthetic
cuucugucugcauuaacugg

SEQ ID NO: 595547 - RNA, 21 nt, Artificial Sequence
  Synthetic
ucuucugucugcauuaacugg

SEQ ID NO: 595548 - RNA, 22 nt, Artificial Sequence
  Synthetic
aucuucugucugcauuaacugg

SEQ ID NO: 595549 - RNA, 23 nt, Artificial Sequence
  Synthetic
aaucuucugucugcauuaacugg

SEQ ID NO: 595550 - RNA, 24 nt, Artificial Sequence
  Synthetic
aaaucuucugucugcauuaacugg

SEQ ID NO: 595551 - RNA, 18 nt, Artificial Sequence
  Synthetic
agcgcagaauuuaacugg

SEQ ID NO: 595552 - RNA, 19 nt, Artificial Sequence
  Synthetic
gagcgcagaauuuaacugg

SEQ ID NO: 595553 - RNA, 20 nt, Artificial Sequence
  Synthetic
ggagcgcagaauuuaacugg

SEQ ID NO: 595554 - RNA, 21 nt, Artificial Sequence
  Synthetic
aggagcgcagaauuuaacugg

SEQ ID NO: 595555 - RNA, 22 nt, Artificial Sequence
  Synthetic
aaggagcgcagaauuuaacugg

SEQ ID NO: 595556 - RNA, 23 nt, Artificial Sequence
  Synthetic
caaggagcgcagaauuuaacugg

SEQ ID NO: 595557 - RNA, 24 nt, Artificial Sequence
  Synthetic
ccaaggagcgcagaauuuaacugg

SEQ ID NO: 595558 - RNA, 18 nt, Artificial Sequence
  Synthetic
gacaggagccaacacugg

SEQ ID NO: 595559 - RNA, 19 nt, Artificial Sequence
  Synthetic
agacaggagccaacacugg

SEQ ID NO: 595560 - RNA, 20 nt, Artificial Sequence
  Synthetic
cagacaggagccaacacugg

SEQ ID NO: 595561 - RNA, 21 nt, Artificial Sequence
  Synthetic
ccagacaggagccaacacugg

SEQ ID NO: 595562 - RNA, 22 nt, Artificial Sequence
  Synthetic
accagacaggagccaacacugg

SEQ ID NO: 595563 - RNA, 23 nt, Artificial Sequence
  Synthetic
caccagacaggagccaacacugg

SEQ ID NO: 595564 - RNA, 24 nt, Artificial Sequence
  Synthetic
gcaccagacaggagccaacacugg

SEQ ID NO: 595565 - RNA, 18 nt, Artificial Sequence
  Synthetic
uucccugggccacacugg

SEQ ID NO: 595566 - RNA, 19 nt, Artificial Sequence
  Synthetic
cuucccugggccacacugg

SEQ ID NO: 595567 - RNA, 20 nt, Artificial Sequence
  Synthetic
gcuucccugggccacacugg

SEQ ID NO: 595568 - RNA, 21 nt, Artificial Sequence
  Synthetic
ggcuucccugggccacacugg

SEQ ID NO: 595569 - RNA, 22 nt, Artificial Sequence
  Synthetic
uggcuucccugggccacacugg

SEQ ID NO: 595570 - RNA, 23 nt, Artificial Sequence
  Synthetic
uuggcuucccugggccacacugg

SEQ ID NO: 595571 - RNA, 24 nt, Artificial Sequence
  Synthetic
uuuggcuucccugggccacacugg

SEQ ID NO: 595572 - RNA, 18 nt, Artificial Sequence
  Synthetic
gcagagagaagacacugg

SEQ ID NO: 595573 - RNA, 19 nt, Artificial Sequence
  Synthetic
agcagagagaagacacugg

SEQ ID NO: 595574 - RNA, 20 nt, Artificial Sequence
  Synthetic
aagcagagagaagacacugg

SEQ ID NO: 595575 - RNA, 21 nt, Artificial Sequence
  Synthetic
aaagcagagagaagacacugg

SEQ ID NO: 595576 - RNA, 22 nt, Artificial Sequence
  Synthetic
aaaagcagagagaagacacugg

SEQ ID NO: 595577 - RNA, 23 nt, Artificial Sequence
  Synthetic
gaaaagcagagagaagacacugg

SEQ ID NO: 595578 - RNA, 24 nt, Artificial Sequence
  Synthetic
agaaaagcagagagaagacacugg

SEQ ID NO: 595579 - RNA, 18 nt, Artificial Sequence
  Synthetic
uuuaucaguugacacugg

SEQ ID NO: 595580 - RNA, 19 nt, Artificial Sequence
  Synthetic
uuuuaucaguugacacugg

SEQ ID NO: 595581 - RNA, 20 nt, Artificial Sequence
  Synthetic
uuuuuaucaguugacacugg

SEQ ID NO: 595582 - RNA, 21 nt, Artificial Sequence
  Synthetic
auuuuuaucaguugacacugg

SEQ ID NO: 595583 - RNA, 22 nt, Artificial Sequence
  Synthetic
uauuuuuaucaguugacacugg

SEQ ID NO: 595584 - RNA, 23 nt, Artificial Sequence
  Synthetic
cuauuuuuaucaguugacacugg

SEQ ID NO: 595585 - RNA, 24 nt, Artificial Sequence
  Synthetic
ucuauuuuuaucaguugacacugg

SEQ ID NO: 595586 - RNA, 18 nt, Artificial Sequence
  Synthetic
caaguauaauuacacugg

SEQ ID NO: 595587 - RNA, 19 nt, Artificial Sequence
  Synthetic
acaaguauaauuacacugg

SEQ ID NO: 595588 - RNA, 20 nt, Artificial Sequence
  Synthetic
aacaaguauaauuacacugg

SEQ ID NO: 595589 - RNA, 21 nt, Artificial Sequence
  Synthetic
uaacaaguauaauuacacugg

SEQ ID NO: 595590 - RNA, 22 nt, Artificial Sequence
  Synthetic
cuaacaaguauaauuacacugg

SEQ ID NO: 595591 - RNA, 23 nt, Artificial Sequence
  Synthetic
ucuaacaaguauaauuacacugg

SEQ ID NO: 595592 - RNA, 24 nt, Artificial Sequence
  Synthetic
uucuaacaaguauaauuacacugg

SEQ ID NO: 595593 - RNA, 18 nt, Artificial Sequence
  Synthetic
acuaacuuagaccacugg

SEQ ID NO: 595594 - RNA, 19 nt, Artificial Sequence
  Synthetic
gacuaacuuagaccacugg

SEQ ID NO: 595595 - RNA, 20 nt, Artificial Sequence
  Synthetic
cgacuaacuuagaccacugg

SEQ ID NO: 595596 - RNA, 21 nt, Artificial Sequence
  Synthetic
acgacuaacuuagaccacugg

SEQ ID NO: 595597 - RNA, 22 nt, Artificial Sequence
  Synthetic
aacgacuaacuuagaccacugg

SEQ ID NO: 595598 - RNA, 23 nt, Artificial Sequence
  Synthetic
aaacgacuaacuuagaccacugg

SEQ ID NO: 595599 - RNA, 24 nt, Artificial Sequence
  Synthetic
uaaacgacuaacuuagaccacugg

SEQ ID NO: 595600 - RNA, 18 nt, Artificial Sequence
  Synthetic
uuggguuuuuaccacugg

SEQ ID NO: 595601 - RNA, 19 nt, Artificial Sequence
  Synthetic
auuggguuuuuaccacugg

SEQ ID NO: 595602 - RNA, 20 nt, Artificial Sequence
  Synthetic
gauuggguuuuuaccacugg

SEQ ID NO: 595603 - RNA, 21 nt, Artificial Sequence
  Synthetic
ggauuggguuuuuaccacugg

SEQ ID NO: 595604 - RNA, 22 nt, Artificial Sequence
  Synthetic
aggauuggguuuuuaccacugg

SEQ ID NO: 595605 - RNA, 23 nt, Artificial Sequence
  Synthetic
gaggauuggguuuuuaccacugg

SEQ ID NO: 595606 - RNA, 24 nt, Artificial Sequence
  Synthetic
ggaggauuggguuuuuaccacugg

SEQ ID NO: 595607 - RNA, 18 nt, Artificial Sequence
  Synthetic
acauuugucugccacugg

SEQ ID NO: 595608 - RNA, 19 nt, Artificial Sequence
  Synthetic
uacauuugucugccacugg

SEQ ID NO: 595609 - RNA, 20 nt, Artificial Sequence
  Synthetic
cuacauuugucugccacugg

SEQ ID NO: 595610 - RNA, 21 nt, Artificial Sequence
  Synthetic
ucuacauuugucugccacugg

SEQ ID NO: 595611 - RNA, 22 nt, Artificial Sequence
  Synthetic
aucuacauuugucugccacugg

SEQ ID NO: 595612 - RNA, 23 nt, Artificial Sequence
  Synthetic
caucuacauuugucugccacugg

SEQ ID NO: 595613 - RNA, 24 nt, Artificial Sequence
  Synthetic
acaucuacauuugucugccacugg

SEQ ID NO: 595614 - RNA, 18 nt, Artificial Sequence
  Synthetic
ccaagacugugccacugg

SEQ ID NO: 595615 - RNA, 19 nt, Artificial Sequence
  Synthetic
cccaagacugugccacugg

SEQ ID NO: 595616 - RNA, 20 nt, Artificial Sequence
  Synthetic
acccaagacugugccacugg

SEQ ID NO: 595617 - RNA, 21 nt, Artificial Sequence
  Synthetic
aacccaagacugugccacugg

SEQ ID NO: 595618 - RNA, 22 nt, Artificial Sequence
  Synthetic
gaacccaagacugugccacugg

SEQ ID NO: 595619 - RNA, 23 nt, Artificial Sequence
  Synthetic
ugaacccaagacugugccacugg

SEQ ID NO: 595620 - RNA, 24 nt, Artificial Sequence
  Synthetic
cugaacccaagacugugccacugg

SEQ ID NO: 595621 - RNA, 18 nt, Artificial Sequence
  Synthetic
gacccuugucaucacugg

SEQ ID NO: 595622 - RNA, 19 nt, Artificial Sequence
  Synthetic
ugacccuugucaucacugg

SEQ ID NO: 595623 - RNA, 20 nt, Artificial Sequence
  Synthetic
uugacccuugucaucacugg

SEQ ID NO: 595624 - RNA, 21 nt, Artificial Sequence
  Synthetic
uuugacccuugucaucacugg

SEQ ID NO: 595625 - RNA, 22 nt, Artificial Sequence
  Synthetic
uuuugacccuugucaucacugg

SEQ ID NO: 595626 - RNA, 23 nt, Artificial Sequence
  Synthetic
auuuugacccuugucaucacugg

SEQ ID NO: 595627 - RNA, 24 nt, Artificial Sequence
  Synthetic
cauuuugacccuugucaucacugg

SEQ ID NO: 595628 - RNA, 18 nt, Artificial Sequence
  Synthetic
cucucaacuccucacugg

SEQ ID NO: 595629 - RNA, 19 nt, Artificial Sequence
  Synthetic
gcucucaacuccucacugg

SEQ ID NO: 595630 - RNA, 20 nt, Artificial Sequence
  Synthetic
ugcucucaacuccucacugg

SEQ ID NO: 595631 - RNA, 21 nt, Artificial Sequence
  Synthetic
cugcucucaacuccucacugg

SEQ ID NO: 595632 - RNA, 22 nt, Artificial Sequence
  Synthetic
acugcucucaacuccucacugg

SEQ ID NO: 595633 - RNA, 23 nt, Artificial Sequence
  Synthetic
cacugcucucaacuccucacugg

SEQ ID NO: 595634 - RNA, 24 nt, Artificial Sequence
  Synthetic
ccacugcucucaacuccucacugg

SEQ ID NO: 595635 - RNA, 18 nt, Artificial Sequence
  Synthetic
uaaguggggaaagacugg

SEQ ID NO: 595636 - RNA, 19 nt, Artificial Sequence
  Synthetic
guaaguggggaaagacugg

SEQ ID NO: 595637 - RNA, 20 nt, Artificial Sequence
  Synthetic
uguaaguggggaaagacugg

SEQ ID NO: 595638 - RNA, 21 nt, Artificial Sequence
  Synthetic
guguaaguggggaaagacugg

SEQ ID NO: 595639 - RNA, 22 nt, Artificial Sequence
  Synthetic
gguguaaguggggaaagacugg

SEQ ID NO: 595640 - RNA, 23 nt, Artificial Sequence
  Synthetic
ugguguaaguggggaaagacugg

SEQ ID NO: 595641 - RNA, 24 nt, Artificial Sequence
  Synthetic
augguguaaguggggaaagacugg

SEQ ID NO: 595642 - RNA, 18 nt, Artificial Sequence
  Synthetic
agugagagagaagacugg

SEQ ID NO: 595643 - RNA, 19 nt, Artificial Sequence
  Synthetic
aagugagagagaagacugg

SEQ ID NO: 595644 - RNA, 20 nt, Artificial Sequence
  Synthetic
aaagugagagagaagacugg

SEQ ID NO: 595645 - RNA, 21 nt, Artificial Sequence
  Synthetic
caaagugagagagaagacugg

SEQ ID NO: 595646 - RNA, 22 nt, Artificial Sequence
  Synthetic
acaaagugagagagaagacugg

SEQ ID NO: 595647 - RNA, 23 nt, Artificial Sequence
  Synthetic
gacaaagugagagagaagacugg

SEQ ID NO: 595648 - RNA, 24 nt, Artificial Sequence
  Synthetic
ugacaaagugagagagaagacugg

SEQ ID NO: 595649 - RNA, 18 nt, Artificial Sequence
  Synthetic
gcgagagcaacagacugg

SEQ ID NO: 595650 - RNA, 19 nt, Artificial Sequence
  Synthetic
ggcgagagcaacagacugg

SEQ ID NO: 595651 - RNA, 20 nt, Artificial Sequence
  Synthetic
gggcgagagcaacagacugg

SEQ ID NO: 595652 - RNA, 21 nt, Artificial Sequence
  Synthetic
agggcgagagcaacagacugg

SEQ ID NO: 595653 - RNA, 22 nt, Artificial Sequence
  Synthetic
aagggcgagagcaacagacugg

SEQ ID NO: 595654 - RNA, 23 nt, Artificial Sequence
  Synthetic
aaagggcgagagcaacagacugg

SEQ ID NO: 595655 - RNA, 24 nt, Artificial Sequence
  Synthetic
aaaagggcgagagcaacagacugg

SEQ ID NO: 595656 - RNA, 18 nt, Artificial Sequence
  Synthetic
ugcaauacuccagacugg

SEQ ID NO: 595657 - RNA, 19 nt, Artificial Sequence
  Synthetic
uugcaauacuccagacugg

SEQ ID NO: 595658 - RNA, 20 nt, Artificial Sequence
  Synthetic
guugcaauacuccagacugg

SEQ ID NO: 595659 - RNA, 21 nt, Artificial Sequence
  Synthetic
uguugcaauacuccagacugg

SEQ ID NO: 595660 - RNA, 22 nt, Artificial Sequence
  Synthetic
cuguugcaauacuccagacugg

SEQ ID NO: 595661 - RNA, 23 nt, Artificial Sequence
  Synthetic
ucuguugcaauacuccagacugg

SEQ ID NO: 595662 - RNA, 24 nt, Artificial Sequence
  Synthetic
cucuguugcaauacuccagacugg

SEQ ID NO: 595663 - RNA, 18 nt, Artificial Sequence
  Synthetic
agagauguaagagacugg

SEQ ID NO: 595664 - RNA, 19 nt, Artificial Sequence
  Synthetic
aagagauguaagagacugg

SEQ ID NO: 595665 - RNA, 20 nt, Artificial Sequence
  Synthetic
aaagagauguaagagacugg

SEQ ID NO: 595666 - RNA, 21 nt, Artificial Sequence
  Synthetic
aaaagagauguaagagacugg

SEQ ID NO: 595667 - RNA, 22 nt, Artificial Sequence
  Synthetic
gaaaagagauguaagagacugg

SEQ ID NO: 595668 - RNA, 23 nt, Artificial Sequence
  Synthetic
ggaaaagagauguaagagacugg

SEQ ID NO: 595669 - RNA, 24 nt, Artificial Sequence
  Synthetic
aggaaaagagauguaagagacugg

SEQ ID NO: 595670 - RNA, 18 nt, Artificial Sequence
  Synthetic
gauauguucagagacugg

SEQ ID NO: 595671 - RNA, 19 nt, Artificial Sequence
  Synthetic
agauauguucagagacugg

SEQ ID NO: 595672 - RNA, 20 nt, Artificial Sequence
  Synthetic
aagauauguucagagacugg

SEQ ID NO: 595673 - RNA, 21 nt, Artificial Sequence
  Synthetic
uaagauauguucagagacugg

SEQ ID NO: 595674 - RNA, 22 nt, Artificial Sequence
  Synthetic
uuaagauauguucagagacugg

SEQ ID NO: 595675 - RNA, 23 nt, Artificial Sequence
  Synthetic
uuuaagauauguucagagacugg

SEQ ID NO: 595676 - RNA, 24 nt, Artificial Sequence
  Synthetic
cuuuaagauauguucagagacugg

SEQ ID NO: 595677 - RNA, 18 nt, Artificial Sequence
  Synthetic
uuguggauaaaggacugg

SEQ ID NO: 595678 - RNA, 19 nt, Artificial Sequence
  Synthetic
guuguggauaaaggacugg

SEQ ID NO: 595679 - RNA, 20 nt, Artificial Sequence
  Synthetic
uguuguggauaaaggacugg

SEQ ID NO: 595680 - RNA, 21 nt, Artificial Sequence
  Synthetic
auguuguggauaaaggacugg

SEQ ID NO: 595681 - RNA, 22 nt, Artificial Sequence
  Synthetic
uauguuguggauaaaggacugg

SEQ ID NO: 595682 - RNA, 23 nt, Artificial Sequence
  Synthetic
cuauguuguggauaaaggacugg

SEQ ID NO: 595683 - RNA, 24 nt, Artificial Sequence
  Synthetic
ccuauguuguggauaaaggacugg

SEQ ID NO: 595684 - RNA, 18 nt, Artificial Sequence
  Synthetic
uuaaauuggggugacugg

SEQ ID NO: 595685 - RNA, 19 nt, Artificial Sequence
  Synthetic
auuaaauuggggugacugg

SEQ ID NO: 595686 - RNA, 20 nt, Artificial Sequence
  Synthetic
cauuaaauuggggugacugg

SEQ ID NO: 595687 - RNA, 21 nt, Artificial Sequence
  Synthetic
gcauuaaauuggggugacugg

SEQ ID NO: 595688 - RNA, 22 nt, Artificial Sequence
  Synthetic
ugcauuaaauuggggugacugg

SEQ ID NO: 595689 - RNA, 23 nt, Artificial Sequence
  Synthetic
uugcauuaaauuggggugacugg

SEQ ID NO: 595690 - RNA, 24 nt, Artificial Sequence
  Synthetic
auugcauuaaauuggggugacugg

SEQ ID NO: 595691 - RNA, 18 nt, Artificial Sequence
  Synthetic
uuuauaacaaaauacugg

SEQ ID NO: 595692 - RNA, 19 nt, Artificial Sequence
  Synthetic
auuuauaacaaaauacugg

SEQ ID NO: 595693 - RNA, 20 nt, Artificial Sequence
  Synthetic
uauuuauaacaaaauacugg

SEQ ID NO: 595694 - RNA, 21 nt, Artificial Sequence
  Synthetic
guauuuauaacaaaauacugg

SEQ ID NO: 595695 - RNA, 22 nt, Artificial Sequence
  Synthetic
aguauuuauaacaaaauacugg

SEQ ID NO: 595696 - RNA, 23 nt, Artificial Sequence
  Synthetic
caguauuuauaacaaaauacugg

SEQ ID NO: 595697 - RNA, 24 nt, Artificial Sequence
  Synthetic
gcaguauuuauaacaaaauacugg

SEQ ID NO: 595698 - RNA, 18 nt, Artificial Sequence
  Synthetic
auaacuacuaaauacugg

SEQ ID NO: 595699 - RNA, 19 nt, Artificial Sequence
  Synthetic
cauaacuacuaaauacugg

SEQ ID NO: 595700 - RNA, 20 nt, Artificial Sequence
  Synthetic
acauaacuacuaaauacugg

SEQ ID NO: 595701 - RNA, 21 nt, Artificial Sequence
  Synthetic
aacauaacuacuaaauacugg

SEQ ID NO: 595702 - RNA, 22 nt, Artificial Sequence
  Synthetic
aaacauaacuacuaaauacugg

SEQ ID NO: 595703 - RNA, 23 nt, Artificial Sequence
  Synthetic
gaaacauaacuacuaaauacugg

SEQ ID NO: 595704 - RNA, 24 nt, Artificial Sequence
  Synthetic
agaaacauaacuacuaaauacugg

SEQ ID NO: 595705 - RNA, 18 nt, Artificial Sequence
  Synthetic
aaaguguuuacauacugg

SEQ ID NO: 595706 - RNA, 19 nt, Artificial Sequence
  Synthetic
aaaaguguuuacauacugg

SEQ ID NO: 595707 - RNA, 20 nt, Artificial Sequence
  Synthetic
caaaaguguuuacauacugg

SEQ ID NO: 595708 - RNA, 21 nt, Artificial Sequence
  Synthetic
ucaaaaguguuuacauacugg

SEQ ID NO: 595709 - RNA, 22 nt, Artificial Sequence
  Synthetic
cucaaaaguguuuacauacugg

SEQ ID NO: 595710 - RNA, 23 nt, Artificial Sequence
  Synthetic
ucucaaaaguguuuacauacugg

SEQ ID NO: 595711 - RNA, 24 nt, Artificial Sequence
  Synthetic
gucucaaaaguguuuacauacugg

SEQ ID NO: 595712 - RNA, 18 nt, Artificial Sequence
  Synthetic
ucaaaaaggucauacugg

SEQ ID NO: 595713 - RNA, 19 nt, Artificial Sequence
  Synthetic
gucaaaaaggucauacugg

SEQ ID NO: 595714 - RNA, 20 nt, Artificial Sequence
  Synthetic
ugucaaaaaggucauacugg

SEQ ID NO: 595715 - RNA, 21 nt, Artificial Sequence
  Synthetic
uugucaaaaaggucauacugg

SEQ ID NO: 595716 - RNA, 22 nt, Artificial Sequence
  Synthetic
auugucaaaaaggucauacugg

SEQ ID NO: 595717 - RNA, 23 nt, Artificial Sequence
  Synthetic
cauugucaaaaaggucauacugg

SEQ ID NO: 595718 - RNA, 24 nt, Artificial Sequence
  Synthetic
acauugucaaaaaggucauacugg

SEQ ID NO: 595719 - RNA, 18 nt, Artificial Sequence
  Synthetic
ggauuuaguagauacugg

SEQ ID NO: 595720 - RNA, 19 nt, Artificial Sequence
  Synthetic
uggauuuaguagauacugg

SEQ ID NO: 595721 - RNA, 20 nt, Artificial Sequence
  Synthetic
cuggauuuaguagauacugg

SEQ ID NO: 595722 - RNA, 21 nt, Artificial Sequence
  Synthetic
ucuggauuuaguagauacugg

SEQ ID NO: 595723 - RNA, 22 nt, Artificial Sequence
  Synthetic
uucuggauuuaguagauacugg

SEQ ID NO: 595724 - RNA, 23 nt, Artificial Sequence
  Synthetic
guucuggauuuaguagauacugg

SEQ ID NO: 595725 - RNA, 24 nt, Artificial Sequence
  Synthetic
aguucuggauuuaguagauacugg

SEQ ID NO: 595726 - RNA, 18 nt, Artificial Sequence
  Synthetic
gugcccuuacuauacugg

SEQ ID NO: 595727 - RNA, 19 nt, Artificial Sequence
  Synthetic
ggugcccuuacuauacugg

SEQ ID NO: 595728 - RNA, 20 nt, Artificial Sequence
  Synthetic
aggugcccuuacuauacugg

SEQ ID NO: 595729 - RNA, 21 nt, Artificial Sequence
  Synthetic
gaggugcccuuacuauacugg

SEQ ID NO: 595730 - RNA, 22 nt, Artificial Sequence
  Synthetic
agaggugcccuuacuauacugg

SEQ ID NO: 595731 - RNA, 23 nt, Artificial Sequence
  Synthetic
cagaggugcccuuacuauacugg

SEQ ID NO: 595732 - RNA, 24 nt, Artificial Sequence
  Synthetic
ccagaggugcccuuacuauacugg

SEQ ID NO: 595733 - RNA, 18 nt, Artificial Sequence
  Synthetic
uuuugaauuuuguacugg

SEQ ID NO: 595734 - RNA, 19 nt, Artificial Sequence
  Synthetic
cuuuugaauuuuguacugg

SEQ ID NO: 595735 - RNA, 20 nt, Artificial Sequence
  Synthetic
gcuuuugaauuuuguacugg

SEQ ID NO: 595736 - RNA, 21 nt, Artificial Sequence
  Synthetic
ugcuuuugaauuuuguacugg

SEQ ID NO: 595737 - RNA, 22 nt, Artificial Sequence
  Synthetic
augcuuuugaauuuuguacugg

SEQ ID NO: 595738 - RNA, 23 nt, Artificial Sequence
  Synthetic
aaugcuuuugaauuuuguacugg

SEQ ID NO: 595739 - RNA, 24 nt, Artificial Sequence
  Synthetic
caaugcuuuugaauuuuguacugg

SEQ ID NO: 595740 - RNA, 18 nt, Artificial Sequence
  Synthetic
ucacugcugaguuacugg

SEQ ID NO: 595741 - RNA, 19 nt, Artificial Sequence
  Synthetic
gucacugcugaguuacugg

SEQ ID NO: 595742 - RNA, 20 nt, Artificial Sequence
  Synthetic
ugucacugcugaguuacugg

SEQ ID NO: 595743 - RNA, 21 nt, Artificial Sequence
  Synthetic
gugucacugcugaguuacugg

SEQ ID NO: 595744 - RNA, 22 nt, Artificial Sequence
  Synthetic
agugucacugcugaguuacugg

SEQ ID NO: 595745 - RNA, 23 nt, Artificial Sequence
  Synthetic
gagugucacugcugaguuacugg

SEQ ID NO: 595746 - RNA, 24 nt, Artificial Sequence
  Synthetic
ugagugucacugcugaguuacugg

SEQ ID NO: 595747 - RNA, 18 nt, Artificial Sequence
  Synthetic
uuaugaaccauuuacugg

SEQ ID NO: 595748 - RNA, 19 nt, Artificial Sequence
  Synthetic
uuuaugaaccauuuacugg

SEQ ID NO: 595749 - RNA, 20 nt, Artificial Sequence
  Synthetic
cuuuaugaaccauuuacugg

SEQ ID NO: 595750 - RNA, 21 nt, Artificial Sequence
  Synthetic
ccuuuaugaaccauuuacugg

SEQ ID NO: 595751 - RNA, 22 nt, Artificial Sequence
  Synthetic
uccuuuaugaaccauuuacugg

SEQ ID NO: 595752 - RNA, 23 nt, Artificial Sequence
  Synthetic
uuccuuuaugaaccauuuacugg

SEQ ID NO: 595753 - RNA, 24 nt, Artificial Sequence
  Synthetic
cuuccuuuaugaaccauuuacugg

SEQ ID NO: 595754 - RNA, 18 nt, Artificial Sequence
  Synthetic
gguccuaaggaaaccugg

SEQ ID NO: 595755 - RNA, 19 nt, Artificial Sequence
  Synthetic
agguccuaaggaaaccugg

SEQ ID NO: 595756 - RNA, 20 nt, Artificial Sequence
  Synthetic
gagguccuaaggaaaccugg

SEQ ID NO: 595757 - RNA, 21 nt, Artificial Sequence
  Synthetic
agagguccuaaggaaaccugg

SEQ ID NO: 595758 - RNA, 22 nt, Artificial Sequence
  Synthetic
gagagguccuaaggaaaccugg

SEQ ID NO: 595759 - RNA, 23 nt, Artificial Sequence
  Synthetic
ggagagguccuaaggaaaccugg

SEQ ID NO: 595760 - RNA, 24 nt, Artificial Sequence
  Synthetic
uggagagguccuaaggaaaccugg

SEQ ID NO: 595761 - RNA, 18 nt, Artificial Sequence
  Synthetic
ggaaucacucgaaccugg

SEQ ID NO: 595762 - RNA, 19 nt, Artificial Sequence
  Synthetic
gggaaucacucgaaccugg

SEQ ID NO: 595763 - RNA, 20 nt, Artificial Sequence
  Synthetic
ggggaaucacucgaaccugg

SEQ ID NO: 595764 - RNA, 21 nt, Artificial Sequence
  Synthetic
aggggaaucacucgaaccugg

SEQ ID NO: 595765 - RNA, 22 nt, Artificial Sequence
  Synthetic
caggggaaucacucgaaccugg

SEQ ID NO: 595766 - RNA, 23 nt, Artificial Sequence
  Synthetic
gcaggggaaucacucgaaccugg

SEQ ID NO: 595767 - RNA, 24 nt, Artificial Sequence
  Synthetic
ggcaggggaaucacucgaaccugg

SEQ ID NO: 595768 - RNA, 18 nt, Artificial Sequence
  Synthetic
uaauccgggggaaccugg

SEQ ID NO: 595769 - RNA, 19 nt, Artificial Sequence
  Synthetic
guaauccgggggaaccugg

SEQ ID NO: 595770 - RNA, 20 nt, Artificial Sequence
  Synthetic
uguaauccgggggaaccugg

SEQ ID NO: 595771 - RNA, 21 nt, Artificial Sequence
  Synthetic
cuguaauccgggggaaccugg

SEQ ID NO: 595772 - RNA, 22 nt, Artificial Sequence
  Synthetic
acuguaauccgggggaaccugg

SEQ ID NO: 595773 - RNA, 23 nt, Artificial Sequence
  Synthetic
aacuguaauccgggggaaccugg

SEQ ID NO: 595774 - RNA, 24 nt, Artificial Sequence
  Synthetic
gaacuguaauccgggggaaccugg

SEQ ID NO: 595775 - RNA, 21 nt, Artificial Sequence
  Synthetic
ggcgugagccaccgcaccugg

SEQ ID NO: 595776 - RNA, 22 nt, Artificial Sequence
  Synthetic
aggcgugagccaccgcaccugg

SEQ ID NO: 595777 - RNA, 23 nt, Artificial Sequence
  Synthetic
caggcgugagccaccgcaccugg

SEQ ID NO: 595778 - RNA, 24 nt, Artificial Sequence
  Synthetic
acaggcgugagccaccgcaccugg

SEQ ID NO: 595779 - RNA, 18 nt, Artificial Sequence
  Synthetic
gucaugggagugaccugg

SEQ ID NO: 595780 - RNA, 19 nt, Artificial Sequence
  Synthetic
ugucaugggagugaccugg

SEQ ID NO: 595781 - RNA, 20 nt, Artificial Sequence
  Synthetic
gugucaugggagugaccugg

SEQ ID NO: 595782 - RNA, 21 nt, Artificial Sequence
  Synthetic
ugugucaugggagugaccugg

SEQ ID NO: 595783 - RNA, 22 nt, Artificial Sequence
  Synthetic
augugucaugggagugaccugg

SEQ ID NO: 595784 - RNA, 23 nt, Artificial Sequence
  Synthetic
caugugucaugggagugaccugg

SEQ ID NO: 595785 - RNA, 24 nt, Artificial Sequence
  Synthetic
ccaugugucaugggagugaccugg

SEQ ID NO: 595786 - RNA, 18 nt, Artificial Sequence
  Synthetic
aaucucucaaauaccugg

SEQ ID NO: 595787 - RNA, 19 nt, Artificial Sequence
  Synthetic
gaaucucucaaauaccugg

SEQ ID NO: 595788 - RNA, 20 nt, Artificial Sequence
  Synthetic
ggaaucucucaaauaccugg

SEQ ID NO: 595789 - RNA, 21 nt, Artificial Sequence
  Synthetic
uggaaucucucaaauaccugg

SEQ ID NO: 595790 - RNA, 22 nt, Artificial Sequence
  Synthetic
cuggaaucucucaaauaccugg

SEQ ID NO: 595791 - RNA, 23 nt, Artificial Sequence
  Synthetic
acuggaaucucucaaauaccugg

SEQ ID NO: 595792 - RNA, 24 nt, Artificial Sequence
  Synthetic
uacuggaaucucucaaauaccugg

SEQ ID NO: 595793 - RNA, 18 nt, Artificial Sequence
  Synthetic
uccuagcuaacacccugg

SEQ ID NO: 595794 - RNA, 19 nt, Artificial Sequence
  Synthetic
guccuagcuaacacccugg

SEQ ID NO: 595795 - RNA, 20 nt, Artificial Sequence
  Synthetic
uguccuagcuaacacccugg

SEQ ID NO: 595796 - RNA, 21 nt, Artificial Sequence
  Synthetic
uuguccuagcuaacacccugg

SEQ ID NO: 595797 - RNA, 22 nt, Artificial Sequence
  Synthetic
auuguccuagcuaacacccugg

SEQ ID NO: 595798 - RNA, 23 nt, Artificial Sequence
  Synthetic
uauuguccuagcuaacacccugg

SEQ ID NO: 595799 - RNA, 24 nt, Artificial Sequence
  Synthetic
uuauuguccuagcuaacacccugg

SEQ ID NO: 595800 - RNA, 18 nt, Artificial Sequence
  Synthetic
cagcagaaucaccccugg

SEQ ID NO: 595801 - RNA, 19 nt, Artificial Sequence
  Synthetic
gcagcagaaucaccccugg

SEQ ID NO: 595802 - RNA, 20 nt, Artificial Sequence
  Synthetic
ugcagcagaaucaccccugg

SEQ ID NO: 595803 - RNA, 21 nt, Artificial Sequence
  Synthetic
gugcagcagaaucaccccugg

SEQ ID NO: 595804 - RNA, 22 nt, Artificial Sequence
  Synthetic
cgugcagcagaaucaccccugg

SEQ ID NO: 595805 - RNA, 23 nt, Artificial Sequence
  Synthetic
gcgugcagcagaaucaccccugg

SEQ ID NO: 595806 - RNA, 24 nt, Artificial Sequence
  Synthetic
agcgugcagcagaaucaccccugg

SEQ ID NO: 595807 - RNA, 18 nt, Artificial Sequence
  Synthetic
gccauacuguuccccugg

SEQ ID NO: 595808 - RNA, 19 nt, Artificial Sequence
  Synthetic
agccauacuguuccccugg

SEQ ID NO: 595809 - RNA, 20 nt, Artificial Sequence
  Synthetic
uagccauacuguuccccugg

SEQ ID NO: 595810 - RNA, 21 nt, Artificial Sequence
  Synthetic
auagccauacuguuccccugg

SEQ ID NO: 595811 - RNA, 22 nt, Artificial Sequence
  Synthetic
aauagccauacuguuccccugg

SEQ ID NO: 595812 - RNA, 23 nt, Artificial Sequence
  Synthetic
caauagccauacuguuccccugg

SEQ ID NO: 595813 - RNA, 24 nt, Artificial Sequence
  Synthetic
ucaauagccauacuguuccccugg

SEQ ID NO: 595814 - RNA, 18 nt, Artificial Sequence
  Synthetic
aaauauuuuuuccccugg

SEQ ID NO: 595815 - RNA, 19 nt, Artificial Sequence
  Synthetic
gaaauauuuuuuccccugg

SEQ ID NO: 595816 - RNA, 20 nt, Artificial Sequence
  Synthetic
agaaauauuuuuuccccugg

SEQ ID NO: 595817 - RNA, 21 nt, Artificial Sequence
  Synthetic
aagaaauauuuuuuccccugg

SEQ ID NO: 595818 - RNA, 22 nt, Artificial Sequence
  Synthetic
uaagaaauauuuuuuccccugg

SEQ ID NO: 595819 - RNA, 23 nt, Artificial Sequence
  Synthetic
auaagaaauauuuuuuccccugg

SEQ ID NO: 595820 - RNA, 24 nt, Artificial Sequence
  Synthetic
gauaagaaauauuuuuuccccugg

SEQ ID NO: 595821 - RNA, 18 nt, Artificial Sequence
  Synthetic
ucacuguuguugcccugg

SEQ ID NO: 595822 - RNA, 19 nt, Artificial Sequence
  Synthetic
uucacuguuguugcccugg

SEQ ID NO: 595823 - RNA, 20 nt, Artificial Sequence
  Synthetic
uuucacuguuguugcccugg

SEQ ID NO: 595824 - RNA, 21 nt, Artificial Sequence
  Synthetic
guuucacuguuguugcccugg

SEQ ID NO: 595825 - RNA, 22 nt, Artificial Sequence
  Synthetic
aguuucacuguuguugcccugg

SEQ ID NO: 595826 - RNA, 23 nt, Artificial Sequence
  Synthetic
gaguuucacuguuguugcccugg

SEQ ID NO: 595827 - RNA, 24 nt, Artificial Sequence
  Synthetic
ggaguuucacuguuguugcccugg

SEQ ID NO: 595828 - RNA, 18 nt, Artificial Sequence
  Synthetic
uuguuacucuaucccugg

SEQ ID NO: 595829 - RNA, 19 nt, Artificial Sequence
  Synthetic
guuguuacucuaucccugg

SEQ ID NO: 595830 - RNA, 20 nt, Artificial Sequence
  Synthetic
aguuguuacucuaucccugg

SEQ ID NO: 595831 - RNA, 21 nt, Artificial Sequence
  Synthetic
aaguuguuacucuaucccugg

SEQ ID NO: 595832 - RNA, 22 nt, Artificial Sequence
  Synthetic
aaaguuguuacucuaucccugg

SEQ ID NO: 595833 - RNA, 23 nt, Artificial Sequence
  Synthetic
gaaaguuguuacucuaucccugg

SEQ ID NO: 595834 - RNA, 24 nt, Artificial Sequence
  Synthetic
ugaaaguuguuacucuaucccugg

SEQ ID NO: 595835 - RNA, 18 nt, Artificial Sequence
  Synthetic
caccucuuaggucccugg

SEQ ID NO: 595836 - RNA, 19 nt, Artificial Sequence
  Synthetic
ucaccucuuaggucccugg

SEQ ID NO: 595837 - RNA, 20 nt, Artificial Sequence
  Synthetic
uucaccucuuaggucccugg

SEQ ID NO: 595838 - RNA, 21 nt, Artificial Sequence
  Synthetic
auucaccucuuaggucccugg

SEQ ID NO: 595839 - RNA, 22 nt, Artificial Sequence
  Synthetic
cauucaccucuuaggucccugg

SEQ ID NO: 595840 - RNA, 23 nt, Artificial Sequence
  Synthetic
ucauucaccucuuaggucccugg

SEQ ID NO: 595841 - RNA, 24 nt, Artificial Sequence
  Synthetic
cucauucaccucuuaggucccugg

SEQ ID NO: 595842 - RNA, 18 nt, Artificial Sequence
  Synthetic
accagugugugucccugg

SEQ ID NO: 595843 - RNA, 19 nt, Artificial Sequence
  Synthetic
uaccagugugugucccugg

SEQ ID NO: 595844 - RNA, 20 nt, Artificial Sequence
  Synthetic
auaccagugugugucccugg

SEQ ID NO: 595845 - RNA, 21 nt, Artificial Sequence
  Synthetic
aauaccagugugugucccugg

SEQ ID NO: 595846 - RNA, 22 nt, Artificial Sequence
  Synthetic
caauaccagugugugucccugg

SEQ ID NO: 595847 - RNA, 23 nt, Artificial Sequence
  Synthetic
ucaauaccagugugugucccugg

SEQ ID NO: 595848 - RNA, 24 nt, Artificial Sequence
  Synthetic
uucaauaccagugugugucccugg

SEQ ID NO: 595849 - RNA, 18 nt, Artificial Sequence
  Synthetic
ggacaaaauugucccugg

SEQ ID NO: 595850 - RNA, 19 nt, Artificial Sequence
  Synthetic
gggacaaaauugucccugg

SEQ ID NO: 595851 - RNA, 20 nt, Artificial Sequence
  Synthetic
ggggacaaaauugucccugg

SEQ ID NO: 595852 - RNA, 21 nt, Artificial Sequence
  Synthetic
uggggacaaaauugucccugg

SEQ ID NO: 595853 - RNA, 22 nt, Artificial Sequence
  Synthetic
guggggacaaaauugucccugg

SEQ ID NO: 595854 - RNA, 23 nt, Artificial Sequence
  Synthetic
gguggggacaaaauugucccugg

SEQ ID NO: 595855 - RNA, 24 nt, Artificial Sequence
  Synthetic
ggguggggacaaaauugucccugg

SEQ ID NO: 595856 - RNA, 18 nt, Artificial Sequence
  Synthetic
ccugauaccaaagccugg

SEQ ID NO: 595857 - RNA, 19 nt, Artificial Sequence
  Synthetic
uccugauaccaaagccugg

SEQ ID NO: 595858 - RNA, 20 nt, Artificial Sequence
  Synthetic
auccugauaccaaagccugg

SEQ ID NO: 595859 - RNA, 21 nt, Artificial Sequence
  Synthetic
cauccugauaccaaagccugg

SEQ ID NO: 595860 - RNA, 22 nt, Artificial Sequence
  Synthetic
ucauccugauaccaaagccugg

SEQ ID NO: 595861 - RNA, 23 nt, Artificial Sequence
  Synthetic
aucauccugauaccaaagccugg

SEQ ID NO: 595862 - RNA, 24 nt, Artificial Sequence
  Synthetic
caucauccugauaccaaagccugg

SEQ ID NO: 595863 - RNA, 18 nt, Artificial Sequence
  Synthetic
caccucacuccagccugg

SEQ ID NO: 595864 - RNA, 19 nt, Artificial Sequence
  Synthetic
ccaccucacuccagccugg

SEQ ID NO: 595865 - RNA, 20 nt, Artificial Sequence
  Synthetic
gccaccucacuccagccugg

SEQ ID NO: 595866 - RNA, 21 nt, Artificial Sequence
  Synthetic
cgccaccucacuccagccugg

SEQ ID NO: 595867 - RNA, 22 nt, Artificial Sequence
  Synthetic
gcgccaccucacuccagccugg

SEQ ID NO: 595868 - RNA, 23 nt, Artificial Sequence
  Synthetic
ugcgccaccucacuccagccugg

SEQ ID NO: 595869 - RNA, 24 nt, Artificial Sequence
  Synthetic
uugcgccaccucacuccagccugg

SEQ ID NO: 595870 - RNA, 18 nt, Artificial Sequence
  Synthetic
gaagaaacaccggccugg

SEQ ID NO: 595871 - RNA, 19 nt, Artificial Sequence
  Synthetic
agaagaaacaccggccugg

SEQ ID NO: 595872 - RNA, 20 nt, Artificial Sequence
  Synthetic
uagaagaaacaccggccugg

SEQ ID NO: 595873 - RNA, 21 nt, Artificial Sequence
  Synthetic
guagaagaaacaccggccugg

SEQ ID NO: 595874 - RNA, 22 nt, Artificial Sequence
  Synthetic
aguagaagaaacaccggccugg

SEQ ID NO: 595875 - RNA, 23 nt, Artificial Sequence
  Synthetic
gaguagaagaaacaccggccugg

SEQ ID NO: 595876 - RNA, 24 nt, Artificial Sequence
  Synthetic
agaguagaagaaacaccggccugg

SEQ ID NO: 595877 - RNA, 18 nt, Artificial Sequence
  Synthetic
ccugaaaacagggccugg

SEQ ID NO: 595878 - RNA, 19 nt, Artificial Sequence
  Synthetic
cccugaaaacagggccugg

SEQ ID NO: 595879 - RNA, 20 nt, Artificial Sequence
  Synthetic
ccccugaaaacagggccugg

SEQ ID NO: 595880 - RNA, 21 nt, Artificial Sequence
  Synthetic
uccccugaaaacagggccugg

SEQ ID NO: 595881 - RNA, 22 nt, Artificial Sequence
  Synthetic
guccccugaaaacagggccugg

SEQ ID NO: 595882 - RNA, 23 nt, Artificial Sequence
  Synthetic
gguccccugaaaacagggccugg

SEQ ID NO: 595883 - RNA, 24 nt, Artificial Sequence
  Synthetic
ggguccccugaaaacagggccugg

SEQ ID NO: 595884 - RNA, 18 nt, Artificial Sequence
  Synthetic
guuggagguggggccugg

SEQ ID NO: 595885 - RNA, 19 nt, Artificial Sequence
  Synthetic
uguuggagguggggccugg

SEQ ID NO: 595886 - RNA, 20 nt, Artificial Sequence
  Synthetic
guguuggagguggggccugg

SEQ ID NO: 595887 - RNA, 21 nt, Artificial Sequence
  Synthetic
aguguuggagguggggccugg

SEQ ID NO: 595888 - RNA, 22 nt, Artificial Sequence
  Synthetic
caguguuggagguggggccugg

SEQ ID NO: 595889 - RNA, 23 nt, Artificial Sequence
  Synthetic
ccaguguuggagguggggccugg

SEQ ID NO: 595890 - RNA, 24 nt, Artificial Sequence
  Synthetic
cccaguguuggagguggggccugg

SEQ ID NO: 595891 - RNA, 18 nt, Artificial Sequence
  Synthetic
guuggugguggggccugg

SEQ ID NO: 595892 - RNA, 19 nt, Artificial Sequence
  Synthetic
uguuggugguggggccugg

SEQ ID NO: 595893 - RNA, 20 nt, Artificial Sequence
  Synthetic
auguuggugguggggccugg

SEQ ID NO: 595894 - RNA, 21 nt, Artificial Sequence
  Synthetic
aauguuggugguggggccugg

SEQ ID NO: 595895 - RNA, 22 nt, Artificial Sequence
  Synthetic
caauguuggugguggggccugg

SEQ ID NO: 595896 - RNA, 23 nt, Artificial Sequence
  Synthetic
ccaauguuggugguggggccugg

SEQ ID NO: 595897 - RNA, 24 nt, Artificial Sequence
  Synthetic
cccaauguuggugguggggccugg

SEQ ID NO: 595898 - RNA, 18 nt, Artificial Sequence
  Synthetic
gugagccaccaugccugg

SEQ ID NO: 595899 - RNA, 19 nt, Artificial Sequence
  Synthetic
ugugagccaccaugccugg

SEQ ID NO: 595900 - RNA, 20 nt, Artificial Sequence
  Synthetic
gugugagccaccaugccugg

SEQ ID NO: 595901 - RNA, 21 nt, Artificial Sequence
  Synthetic
ggugugagccaccaugccugg

SEQ ID NO: 595902 - RNA, 22 nt, Artificial Sequence
  Synthetic
aggugugagccaccaugccugg

SEQ ID NO: 595903 - RNA, 23 nt, Artificial Sequence
  Synthetic
caggugugagccaccaugccugg

SEQ ID NO: 595904 - RNA, 24 nt, Artificial Sequence
  Synthetic
acaggugugagccaccaugccugg

SEQ ID NO: 595905 - RNA, 18 nt, Artificial Sequence
  Synthetic
gugagcuaccaugccugg

SEQ ID NO: 595906 - RNA, 19 nt, Artificial Sequence
  Synthetic
cgugagcuaccaugccugg

SEQ ID NO: 595907 - RNA, 20 nt, Artificial Sequence
  Synthetic
acgugagcuaccaugccugg

SEQ ID NO: 595908 - RNA, 21 nt, Artificial Sequence
  Synthetic
gacgugagcuaccaugccugg

SEQ ID NO: 595909 - RNA, 22 nt, Artificial Sequence
  Synthetic
agacgugagcuaccaugccugg

SEQ ID NO: 595910 - RNA, 23 nt, Artificial Sequence
  Synthetic
cagacgugagcuaccaugccugg

SEQ ID NO: 595911 - RNA, 24 nt, Artificial Sequence
  Synthetic
acagacgugagcuaccaugccugg

SEQ ID NO: 595912 - RNA, 18 nt, Artificial Sequence
  Synthetic
uggccucugucugccugg

SEQ ID NO: 595913 - RNA, 19 nt, Artificial Sequence
  Synthetic
uuggccucugucugccugg

SEQ ID NO: 595914 - RNA, 20 nt, Artificial Sequence
  Synthetic
uuuggccucugucugccugg

SEQ ID NO: 595915 - RNA, 21 nt, Artificial Sequence
  Synthetic
guuuggccucugucugccugg

SEQ ID NO: 595916 - RNA, 22 nt, Artificial Sequence
  Synthetic
uguuuggccucugucugccugg

SEQ ID NO: 595917 - RNA, 23 nt, Artificial Sequence
  Synthetic
auguuuggccucugucugccugg

SEQ ID NO: 595918 - RNA, 24 nt, Artificial Sequence
  Synthetic
aauguuuggccucugucugccugg

SEQ ID NO: 595919 - RNA, 18 nt, Artificial Sequence
  Synthetic
uugucuuucugugccugg

SEQ ID NO: 595920 - RNA, 19 nt, Artificial Sequence
  Synthetic
uuugucuuucugugccugg

SEQ ID NO: 595921 - RNA, 20 nt, Artificial Sequence
  Synthetic
auuugucuuucugugccugg

SEQ ID NO: 595922 - RNA, 21 nt, Artificial Sequence
  Synthetic
uauuugucuuucugugccugg

SEQ ID NO: 595923 - RNA, 22 nt, Artificial Sequence
  Synthetic
guauuugucuuucugugccugg

SEQ ID NO: 595924 - RNA, 23 nt, Artificial Sequence
  Synthetic
gguauuugucuuucugugccugg

SEQ ID NO: 595925 - RNA, 24 nt, Artificial Sequence
  Synthetic
ugguauuugucuuucugugccugg

SEQ ID NO: 595926 - RNA, 18 nt, Artificial Sequence
  Synthetic
uaaggcaaaugauccugg

SEQ ID NO: 595927 - RNA, 19 nt, Artificial Sequence
  Synthetic
auaaggcaaaugauccugg

SEQ ID NO: 595928 - RNA, 20 nt, Artificial Sequence
  Synthetic
uauaaggcaaaugauccugg

SEQ ID NO: 595929 - RNA, 21 nt, Artificial Sequence
  Synthetic
auauaaggcaaaugauccugg

SEQ ID NO: 595930 - RNA, 22 nt, Artificial Sequence
  Synthetic
gauauaaggcaaaugauccugg

SEQ ID NO: 595931 - RNA, 23 nt, Artificial Sequence
  Synthetic
agauauaaggcaaaugauccugg

SEQ ID NO: 595932 - RNA, 24 nt, Artificial Sequence
  Synthetic
aagauauaaggcaaaugauccugg

SEQ ID NO: 595933 - RNA, 18 nt, Artificial Sequence
  Synthetic
agacaaaguaaguccugg

SEQ ID NO: 595934 - RNA, 19 nt, Artificial Sequence
  Synthetic
aagacaaaguaaguccugg

SEQ ID NO: 595935 - RNA, 20 nt, Artificial Sequence
  Synthetic
gaagacaaaguaaguccugg

SEQ ID NO: 595936 - RNA, 21 nt, Artificial Sequence
  Synthetic
agaagacaaaguaaguccugg

SEQ ID NO: 595937 - RNA, 22 nt, Artificial Sequence
  Synthetic
uagaagacaaaguaaguccugg

SEQ ID NO: 595938 - RNA, 23 nt, Artificial Sequence
  Synthetic
guagaagacaaaguaaguccugg

SEQ ID NO: 595939 - RNA, 24 nt, Artificial Sequence
  Synthetic
uguagaagacaaaguaaguccugg

SEQ ID NO: 595940 - RNA, 18 nt, Artificial Sequence
  Synthetic
aacccccacacguccugg

SEQ ID NO: 595941 - RNA, 19 nt, Artificial Sequence
  Synthetic
uaacccccacacguccugg

SEQ ID NO: 595942 - RNA, 20 nt, Artificial Sequence
  Synthetic
auaacccccacacguccugg

SEQ ID NO: 595943 - RNA, 21 nt, Artificial Sequence
  Synthetic
cauaacccccacacguccugg

SEQ ID NO: 595944 - RNA, 22 nt, Artificial Sequence
  Synthetic
ccauaacccccacacguccugg

SEQ ID NO: 595945 - RNA, 23 nt, Artificial Sequence
  Synthetic
cccauaacccccacacguccugg

SEQ ID NO: 595946 - RNA, 24 nt, Artificial Sequence
  Synthetic
ucccauaacccccacacguccugg

SEQ ID NO: 595947 - RNA, 18 nt, Artificial Sequence
  Synthetic
gugugaugucuguccugg

SEQ ID NO: 595948 - RNA, 19 nt, Artificial Sequence
  Synthetic
agugugaugucuguccugg

SEQ ID NO: 595949 - RNA, 20 nt, Artificial Sequence
  Synthetic
cagugugaugucuguccugg

SEQ ID NO: 595950 - RNA, 21 nt, Artificial Sequence
  Synthetic
acagugugaugucuguccugg

SEQ ID NO: 595951 - RNA, 22 nt, Artificial Sequence
  Synthetic
aacagugugaugucuguccugg

SEQ ID NO: 595952 - RNA, 23 nt, Artificial Sequence
  Synthetic
caacagugugaugucuguccugg

SEQ ID NO: 595953 - RNA, 24 nt, Artificial Sequence
  Synthetic
gcaacagugugaugucuguccugg

SEQ ID NO: 595954 - RNA, 18 nt, Artificial Sequence
  Synthetic
cuuucuccagcuuccugg

SEQ ID NO: 595955 - RNA, 19 nt, Artificial Sequence
  Synthetic
ucuuucuccagcuuccugg

SEQ ID NO: 595956 - RNA, 20 nt, Artificial Sequence
  Synthetic
uucuuucuccagcuuccugg

SEQ ID NO: 595957 - RNA, 21 nt, Artificial Sequence
  Synthetic
guucuuucuccagcuuccugg

SEQ ID NO: 595958 - RNA, 22 nt, Artificial Sequence
  Synthetic
aguucuuucuccagcuuccugg

SEQ ID NO: 595959 - RNA, 23 nt, Artificial Sequence
  Synthetic
aaguucuuucuccagcuuccugg

SEQ ID NO: 595960 - RNA, 24 nt, Artificial Sequence
  Synthetic
aaaguucuuucuccagcuuccugg

SEQ ID NO: 595961 - RNA, 18 nt, Artificial Sequence
  Synthetic
cuaguaaugauuuccugg

SEQ ID NO: 595962 - RNA, 19 nt, Artificial Sequence
  Synthetic
gcuaguaaugauuuccugg

SEQ ID NO: 595963 - RNA, 20 nt, Artificial Sequence
  Synthetic
ggcuaguaaugauuuccugg

SEQ ID NO: 595964 - RNA, 21 nt, Artificial Sequence
  Synthetic
aggcuaguaaugauuuccugg

SEQ ID NO: 595965 - RNA, 22 nt, Artificial Sequence
  Synthetic
aaggcuaguaaugauuuccugg

SEQ ID NO: 595966 - RNA, 23 nt, Artificial Sequence
  Synthetic
uaaggcuaguaaugauuuccugg

SEQ ID NO: 595967 - RNA, 24 nt, Artificial Sequence
  Synthetic
auaaggcuaguaaugauuuccugg

SEQ ID NO: 595968 - RNA, 18 nt, Artificial Sequence
  Synthetic
caagacaagguuuccugg

SEQ ID NO: 595969 - RNA, 19 nt, Artificial Sequence
  Synthetic
gcaagacaagguuuccugg

SEQ ID NO: 595970 - RNA, 20 nt, Artificial Sequence
  Synthetic
agcaagacaagguuuccugg

SEQ ID NO: 595971 - RNA, 21 nt, Artificial Sequence
  Synthetic
aagcaagacaagguuuccugg

SEQ ID NO: 595972 - RNA, 22 nt, Artificial Sequence
  Synthetic
caagcaagacaagguuuccugg

SEQ ID NO: 595973 - RNA, 23 nt, Artificial Sequence
  Synthetic
gcaagcaagacaagguuuccugg

SEQ ID NO: 595974 - RNA, 24 nt, Artificial Sequence
  Synthetic
ggcaagcaagacaagguuuccugg

SEQ ID NO: 595975 - RNA, 18 nt, Artificial Sequence
  Synthetic
auuuuuuuuuuuuccugg

SEQ ID NO: 595976 - RNA, 19 nt, Artificial Sequence
  Synthetic
uauuuuuuuuuuuuccugg

SEQ ID NO: 595977 - RNA, 20 nt, Artificial Sequence
  Synthetic
auauuuuuuuuuuuuccugg

SEQ ID NO: 595978 - RNA, 21 nt, Artificial Sequence
  Synthetic
gauauuuuuuuuuuuuccugg

SEQ ID NO: 595979 - RNA, 22 nt, Artificial Sequence
  Synthetic
agauauuuuuuuuuuuuccugg

SEQ ID NO: 595980 - RNA, 23 nt, Artificial Sequence
  Synthetic
uagauauuuuuuuuuuuuccugg

SEQ ID NO: 595981 - RNA, 24 nt, Artificial Sequence
  Synthetic
auagauauuuuuuuuuuuuccugg

SEQ ID NO: 595982 - RNA, 18 nt, Artificial Sequence
  Synthetic
gaagacuucaaaagcugg

SEQ ID NO: 595983 - RNA, 19 nt, Artificial Sequence
  Synthetic
ggaagacuucaaaagcugg

SEQ ID NO: 595984 - RNA, 20 nt, Artificial Sequence
  Synthetic
aggaagacuucaaaagcugg

SEQ ID NO: 595985 - RNA, 21 nt, Artificial Sequence
  Synthetic
uaggaagacuucaaaagcugg

SEQ ID NO: 595986 - RNA, 22 nt, Artificial Sequence
  Synthetic
guaggaagacuucaaaagcugg

SEQ ID NO: 595987 - RNA, 23 nt, Artificial Sequence
  Synthetic
uguaggaagacuucaaaagcugg

SEQ ID NO: 595988 - RNA, 24 nt, Artificial Sequence
  Synthetic
cuguaggaagacuucaaaagcugg

SEQ ID NO: 595989 - RNA, 18 nt, Artificial Sequence
  Synthetic
ggggcuaccagaagcugg

SEQ ID NO: 595990 - RNA, 19 nt, Artificial Sequence
  Synthetic
uggggcuaccagaagcugg

SEQ ID NO: 595991 - RNA, 20 nt, Artificial Sequence
  Synthetic
cuggggcuaccagaagcugg

SEQ ID NO: 595992 - RNA, 21 nt, Artificial Sequence
  Synthetic
ccuggggcuaccagaagcugg

SEQ ID NO: 595993 - RNA, 22 nt, Artificial Sequence
  Synthetic
accuggggcuaccagaagcugg

SEQ ID NO: 595994 - RNA, 23 nt, Artificial Sequence
  Synthetic
caccuggggcuaccagaagcugg

SEQ ID NO: 595995 - RNA, 24 nt, Artificial Sequence
  Synthetic
acaccuggggcuaccagaagcugg

SEQ ID NO: 595996 - RNA, 18 nt, Artificial Sequence
  Synthetic
ggcuuccccuccagcugg

SEQ ID NO: 595997 - RNA, 19 nt, Artificial Sequence
  Synthetic
uggcuuccccuccagcugg

SEQ ID NO: 595998 - RNA, 20 nt, Artificial Sequence
  Synthetic
auggcuuccccuccagcugg

SEQ ID NO: 595999 - RNA, 21 nt, Artificial Sequence
  Synthetic
aauggcuuccccuccagcugg

SEQ ID NO: 596000 - RNA, 22 nt, Artificial Sequence
  Synthetic
aaauggcuuccccuccagcugg

SEQ ID NO: 596001 - RNA, 23 nt, Artificial Sequence
  Synthetic
gaaauggcuuccccuccagcugg

SEQ ID NO: 596002 - RNA, 24 nt, Artificial Sequence
  Synthetic
ggaaauggcuuccccuccagcugg

SEQ ID NO: 596003 - RNA, 18 nt, Artificial Sequence
  Synthetic
agccucccaugcagcugg

SEQ ID NO: 596004 - RNA, 19 nt, Artificial Sequence
  Synthetic
cagccucccaugcagcugg

SEQ ID NO: 596005 - RNA, 20 nt, Artificial Sequence
  Synthetic
ucagccucccaugcagcugg

SEQ ID NO: 596006 - RNA, 21 nt, Artificial Sequence
  Synthetic
gucagccucccaugcagcugg

SEQ ID NO: 596007 - RNA, 22 nt, Artificial Sequence
  Synthetic
ugucagccucccaugcagcugg

SEQ ID NO: 596008 - RNA, 23 nt, Artificial Sequence
  Synthetic
gugucagccucccaugcagcugg

SEQ ID NO: 596009 - RNA, 24 nt, Artificial Sequence
  Synthetic
ugugucagccucccaugcagcugg

SEQ ID NO: 596010 - RNA, 18 nt, Artificial Sequence
  Synthetic
uucuugucuuucagcugg

SEQ ID NO: 596011 - RNA, 19 nt, Artificial Sequence
  Synthetic
uuucuugucuuucagcugg

SEQ ID NO: 596012 - RNA, 20 nt, Artificial Sequence
  Synthetic
uuuucuugucuuucagcugg

SEQ ID NO: 596013 - RNA, 21 nt, Artificial Sequence
  Synthetic
uuuuucuugucuuucagcugg

SEQ ID NO: 596014 - RNA, 22 nt, Artificial Sequence
  Synthetic
guuuuucuugucuuucagcugg

SEQ ID NO: 596015 - RNA, 23 nt, Artificial Sequence
  Synthetic
aguuuuucuugucuuucagcugg

SEQ ID NO: 596016 - RNA, 24 nt, Artificial Sequence
  Synthetic
aaguuuuucuugucuuucagcugg

SEQ ID NO: 596017 - RNA, 18 nt, Artificial Sequence
  Synthetic
cuuaagauuaagagcugg

SEQ ID NO: 596018 - RNA, 19 nt, Artificial Sequence
  Synthetic
ucuuaagauuaagagcugg

SEQ ID NO: 596019 - RNA, 20 nt, Artificial Sequence
  Synthetic
uucuuaagauuaagagcugg

SEQ ID NO: 596020 - RNA, 21 nt, Artificial Sequence
  Synthetic
cuucuuaagauuaagagcugg

SEQ ID NO: 596021 - RNA, 22 nt, Artificial Sequence
  Synthetic
acuucuuaagauuaagagcugg

SEQ ID NO: 596022 - RNA, 23 nt, Artificial Sequence
  Synthetic
aacuucuuaagauuaagagcugg

SEQ ID NO: 596023 - RNA, 24 nt, Artificial Sequence
  Synthetic
gaacuucuuaagauuaagagcugg

SEQ ID NO: 596024 - RNA, 18 nt, Artificial Sequence
  Synthetic
aaguaaguuaagagcugg

SEQ ID NO: 596025 - RNA, 19 nt, Artificial Sequence
  Synthetic
caaguaaguuaagagcugg

SEQ ID NO: 596026 - RNA, 20 nt, Artificial Sequence
  Synthetic
acaaguaaguuaagagcugg

SEQ ID NO: 596027 - RNA, 21 nt, Artificial Sequence
  Synthetic
aacaaguaaguuaagagcugg

SEQ ID NO: 596028 - RNA, 22 nt, Artificial Sequence
  Synthetic
aaacaaguaaguuaagagcugg

SEQ ID NO: 596029 - RNA, 23 nt, Artificial Sequence
  Synthetic
aaaacaaguaaguuaagagcugg

SEQ ID NO: 596030 - RNA, 24 nt, Artificial Sequence
  Synthetic
uaaaacaaguaaguuaagagcugg

SEQ ID NO: 596031 - RNA, 18 nt, Artificial Sequence
  Synthetic
accucaacuaggagcugg

SEQ ID NO: 596032 - RNA, 19 nt, Artificial Sequence
  Synthetic
caccucaacuaggagcugg

SEQ ID NO: 596033 - RNA, 20 nt, Artificial Sequence
  Synthetic
ccaccucaacuaggagcugg

SEQ ID NO: 596034 - RNA, 21 nt, Artificial Sequence
  Synthetic
gccaccucaacuaggagcugg

SEQ ID NO: 596035 - RNA, 22 nt, Artificial Sequence
  Synthetic
ugccaccucaacuaggagcugg

SEQ ID NO: 596036 - RNA, 23 nt, Artificial Sequence
  Synthetic
uugccaccucaacuaggagcugg

SEQ ID NO: 596037 - RNA, 24 nt, Artificial Sequence
  Synthetic
cuugccaccucaacuaggagcugg

SEQ ID NO: 596038 - RNA, 18 nt, Artificial Sequence
  Synthetic
aggcuacuguggagcugg

SEQ ID NO: 596039 - RNA, 19 nt, Artificial Sequence
  Synthetic
aaggcuacuguggagcugg

SEQ ID NO: 596040 - RNA, 20 nt, Artificial Sequence
  Synthetic
caaggcuacuguggagcugg

SEQ ID NO: 596041 - RNA, 21 nt, Artificial Sequence
  Synthetic
ucaaggcuacuguggagcugg

SEQ ID NO: 596042 - RNA, 22 nt, Artificial Sequence
  Synthetic
uucaaggcuacuguggagcugg

SEQ ID NO: 596043 - RNA, 23 nt, Artificial Sequence
  Synthetic
uuucaaggcuacuguggagcugg

SEQ ID NO: 596044 - RNA, 24 nt, Artificial Sequence
  Synthetic
uuuucaaggcuacuguggagcugg

SEQ ID NO: 596045 - RNA, 18 nt, Artificial Sequence
  Synthetic
uacggaaagaugagcugg

SEQ ID NO: 596046 - RNA, 19 nt, Artificial Sequence
  Synthetic
auacggaaagaugagcugg

SEQ ID NO: 596047 - RNA, 20 nt, Artificial Sequence
  Synthetic
cauacggaaagaugagcugg

SEQ ID NO: 596048 - RNA, 21 nt, Artificial Sequence
  Synthetic
ccauacggaaagaugagcugg

SEQ ID NO: 596049 - RNA, 22 nt, Artificial Sequence
  Synthetic
cccauacggaaagaugagcugg

SEQ ID NO: 596050 - RNA, 23 nt, Artificial Sequence
  Synthetic
ucccauacggaaagaugagcugg

SEQ ID NO: 596051 - RNA, 24 nt, Artificial Sequence
  Synthetic
uucccauacggaaagaugagcugg

SEQ ID NO: 596052 - RNA, 18 nt, Artificial Sequence
  Synthetic
accucaugcccuagcugg

SEQ ID NO: 596053 - RNA, 19 nt, Artificial Sequence
  Synthetic
gaccucaugcccuagcugg

SEQ ID NO: 596054 - RNA, 20 nt, Artificial Sequence
  Synthetic
agaccucaugcccuagcugg

SEQ ID NO: 596055 - RNA, 21 nt, Artificial Sequence
  Synthetic
aagaccucaugcccuagcugg

SEQ ID NO: 596056 - RNA, 22 nt, Artificial Sequence
  Synthetic
caagaccucaugcccuagcugg

SEQ ID NO: 596057 - RNA, 23 nt, Artificial Sequence
  Synthetic
ccaagaccucaugcccuagcugg

SEQ ID NO: 596058 - RNA, 24 nt, Artificial Sequence
  Synthetic
gccaagaccucaugcccuagcugg

SEQ ID NO: 596059 - RNA, 18 nt, Artificial Sequence
  Synthetic
uauagaagccuuagcugg

SEQ ID NO: 596060 - RNA, 19 nt, Artificial Sequence
  Synthetic
guauagaagccuuagcugg

SEQ ID NO: 596061 - RNA, 20 nt, Artificial Sequence
  Synthetic
aguauagaagccuuagcugg

SEQ ID NO: 596062 - RNA, 21 nt, Artificial Sequence
  Synthetic
aaguauagaagccuuagcugg

SEQ ID NO: 596063 - RNA, 22 nt, Artificial Sequence
  Synthetic
caaguauagaagccuuagcugg

SEQ ID NO: 596064 - RNA, 23 nt, Artificial Sequence
  Synthetic
ccaaguauagaagccuuagcugg

SEQ ID NO: 596065 - RNA, 24 nt, Artificial Sequence
  Synthetic
uccaaguauagaagccuuagcugg

SEQ ID NO: 596066 - RNA, 18 nt, Artificial Sequence
  Synthetic
ccaguggaucuuagcugg

SEQ ID NO: 596067 - RNA, 19 nt, Artificial Sequence
  Synthetic
gccaguggaucuuagcugg

SEQ ID NO: 596068 - RNA, 20 nt, Artificial Sequence
  Synthetic
agccaguggaucuuagcugg

SEQ ID NO: 596069 - RNA, 21 nt, Artificial Sequence
  Synthetic
aagccaguggaucuuagcugg

SEQ ID NO: 596070 - RNA, 22 nt, Artificial Sequence
  Synthetic
caagccaguggaucuuagcugg

SEQ ID NO: 596071 - RNA, 23 nt, Artificial Sequence
  Synthetic
ucaagccaguggaucuuagcugg

SEQ ID NO: 596072 - RNA, 24 nt, Artificial Sequence
  Synthetic
uucaagccaguggaucuuagcugg

SEQ ID NO: 596073 - RNA, 18 nt, Artificial Sequence
  Synthetic
aggcaacaaacacgcugg

SEQ ID NO: 596074 - RNA, 19 nt, Artificial Sequence
  Synthetic
aaggcaacaaacacgcugg

SEQ ID NO: 596075 - RNA, 20 nt, Artificial Sequence
  Synthetic
aaaggcaacaaacacgcugg

SEQ ID NO: 596076 - RNA, 21 nt, Artificial Sequence
  Synthetic
aaaaggcaacaaacacgcugg

SEQ ID NO: 596077 - RNA, 22 nt, Artificial Sequence
  Synthetic
aaaaaggcaacaaacacgcugg

SEQ ID NO: 596078 - RNA, 23 nt, Artificial Sequence
  Synthetic
caaaaaggcaacaaacacgcugg

SEQ ID NO: 596079 - RNA, 24 nt, Artificial Sequence
  Synthetic
gcaaaaaggcaacaaacacgcugg

SEQ ID NO: 596080 - RNA, 18 nt, Artificial Sequence
  Synthetic
uuugggauggcaggcugg

SEQ ID NO: 596081 - RNA, 19 nt, Artificial Sequence
  Synthetic
cuuugggauggcaggcugg

SEQ ID NO: 596082 - RNA, 20 nt, Artificial Sequence
  Synthetic
ccuuugggauggcaggcugg

SEQ ID NO: 596083 - RNA, 21 nt, Artificial Sequence
  Synthetic
uccuuugggauggcaggcugg

SEQ ID NO: 596084 - RNA, 22 nt, Artificial Sequence
  Synthetic
uuccuuugggauggcaggcugg

SEQ ID NO: 596085 - RNA, 23 nt, Artificial Sequence
  Synthetic
guuccuuugggauggcaggcugg

SEQ ID NO: 596086 - RNA, 24 nt, Artificial Sequence
  Synthetic
uguuccuuugggauggcaggcugg

SEQ ID NO: 596087 - RNA, 18 nt, Artificial Sequence
  Synthetic
aucaagucacgaggcugg

SEQ ID NO: 596088 - RNA, 19 nt, Artificial Sequence
  Synthetic
aaucaagucacgaggcugg

SEQ ID NO: 596089 - RNA, 20 nt, Artificial Sequence
  Synthetic
uaaucaagucacgaggcugg

SEQ ID NO: 596090 - RNA, 21 nt, Artificial Sequence
  Synthetic
uuaaucaagucacgaggcugg

SEQ ID NO: 596091 - RNA, 22 nt, Artificial Sequence
  Synthetic
uuuaaucaagucacgaggcugg

SEQ ID NO: 596092 - RNA, 23 nt, Artificial Sequence
  Synthetic
uuuuaaucaagucacgaggcugg

SEQ ID NO: 596093 - RNA, 24 nt, Artificial Sequence
  Synthetic
guuuuaaucaagucacgaggcugg

SEQ ID NO: 596094 - RNA, 18 nt, Artificial Sequence
  Synthetic
gugguugcuaagggcugg

SEQ ID NO: 596095 - RNA, 19 nt, Artificial Sequence
  Synthetic
ggugguugcuaagggcugg

SEQ ID NO: 596096 - RNA, 20 nt, Artificial Sequence
  Synthetic
uggugguugcuaagggcugg

SEQ ID NO: 596097 - RNA, 21 nt, Artificial Sequence
  Synthetic
auggugguugcuaagggcugg

SEQ ID NO: 596098 - RNA, 22 nt, Artificial Sequence
  Synthetic
aauggugguugcuaagggcugg

SEQ ID NO: 596099 - RNA, 23 nt, Artificial Sequence
  Synthetic
caauggugguugcuaagggcugg

SEQ ID NO: 596100 - RNA, 24 nt, Artificial Sequence
  Synthetic
acaauggugguugcuaagggcugg

SEQ ID NO: 596101 - RNA, 18 nt, Artificial Sequence
  Synthetic
uuaaggauaaggggcugg

SEQ ID NO: 596102 - RNA, 19 nt, Artificial Sequence
  Synthetic
uuuaaggauaaggggcugg

SEQ ID NO: 596103 - RNA, 20 nt, Artificial Sequence
  Synthetic
uuuuaaggauaaggggcugg

SEQ ID NO: 596104 - RNA, 21 nt, Artificial Sequence
  Synthetic
auuuuaaggauaaggggcugg

SEQ ID NO: 596105 - RNA, 22 nt, Artificial Sequence
  Synthetic
gauuuuaaggauaaggggcugg

SEQ ID NO: 596106 - RNA, 23 nt, Artificial Sequence
  Synthetic
agauuuuaaggauaaggggcugg

SEQ ID NO: 596107 - RNA, 24 nt, Artificial Sequence
  Synthetic
aagauuuuaaggauaaggggcugg

SEQ ID NO: 596108 - RNA, 18 nt, Artificial Sequence
  Synthetic
uuccaaacucugggcugg

SEQ ID NO: 596109 - RNA, 19 nt, Artificial Sequence
  Synthetic
uuuccaaacucugggcugg

SEQ ID NO: 596110 - RNA, 20 nt, Artificial Sequence
  Synthetic
guuuccaaacucugggcugg

SEQ ID NO: 596111 - RNA, 21 nt, Artificial Sequence
  Synthetic
aguuuccaaacucugggcugg

SEQ ID NO: 596112 - RNA, 22 nt, Artificial Sequence
  Synthetic
caguuuccaaacucugggcugg

SEQ ID NO: 596113 - RNA, 23 nt, Artificial Sequence
  Synthetic
ucaguuuccaaacucugggcugg

SEQ ID NO: 596114 - RNA, 24 nt, Artificial Sequence
  Synthetic
cucaguuuccaaacucugggcugg

SEQ ID NO: 596115 - RNA, 18 nt, Artificial Sequence
  Synthetic
uuuccuuuugugggcugg

SEQ ID NO: 596116 - RNA, 19 nt, Artificial Sequence
  Synthetic
uuuuccuuuugugggcugg

SEQ ID NO: 596117 - RNA, 20 nt, Artificial Sequence
  Synthetic
guuuuccuuuugugggcugg

SEQ ID NO: 596118 - RNA, 21 nt, Artificial Sequence
  Synthetic
uguuuuccuuuugugggcugg

SEQ ID NO: 596119 - RNA, 22 nt, Artificial Sequence
  Synthetic
auguuuuccuuuugugggcugg

SEQ ID NO: 596120 - RNA, 23 nt, Artificial Sequence
  Synthetic
gauguuuuccuuuugugggcugg

SEQ ID NO: 596121 - RNA, 24 nt, Artificial Sequence
  Synthetic
ugauguuuuccuuuugugggcugg

SEQ ID NO: 596122 - RNA, 18 nt, Artificial Sequence
  Synthetic
uaacaaaauacuggcugg

SEQ ID NO: 596123 - RNA, 19 nt, Artificial Sequence
  Synthetic
auaacaaaauacuggcugg

SEQ ID NO: 596124 - RNA, 20 nt, Artificial Sequence
  Synthetic
uauaacaaaauacuggcugg

SEQ ID NO: 596125 - RNA, 21 nt, Artificial Sequence
  Synthetic
uuauaacaaaauacuggcugg

SEQ ID NO: 596126 - RNA, 22 nt, Artificial Sequence
  Synthetic
uuuauaacaaaauacuggcugg

SEQ ID NO: 596127 - RNA, 23 nt, Artificial Sequence
  Synthetic
auuuauaacaaaauacuggcugg

SEQ ID NO: 596128 - RNA, 24 nt, Artificial Sequence
  Synthetic
uauuuauaacaaaauacuggcugg

SEQ ID NO: 596129 - RNA, 18 nt, Artificial Sequence
  Synthetic
acucuucuacguggcugg

SEQ ID NO: 596130 - RNA, 19 nt, Artificial Sequence
  Synthetic
gacucuucuacguggcugg

SEQ ID NO: 596131 - RNA, 20 nt, Artificial Sequence
  Synthetic
agacucuucuacguggcugg

SEQ ID NO: 596132 - RNA, 21 nt, Artificial Sequence
  Synthetic
cagacucuucuacguggcugg

SEQ ID NO: 596133 - RNA, 22 nt, Artificial Sequence
  Synthetic
gcagacucuucuacguggcugg

SEQ ID NO: 596134 - RNA, 23 nt, Artificial Sequence
  Synthetic
ugcagacucuucuacguggcugg

SEQ ID NO: 596135 - RNA, 24 nt, Artificial Sequence
  Synthetic
augcagacucuucuacguggcugg

SEQ ID NO: 596136 - RNA, 18 nt, Artificial Sequence
  Synthetic
uuuagacuaaaaugcugg

SEQ ID NO: 596137 - RNA, 19 nt, Artificial Sequence
  Synthetic
uuuuagacuaaaaugcugg

SEQ ID NO: 596138 - RNA, 20 nt, Artificial Sequence
  Synthetic
auuuuagacuaaaaugcugg

SEQ ID NO: 596139 - RNA, 21 nt, Artificial Sequence
  Synthetic
uauuuuagacuaaaaugcugg

SEQ ID NO: 596140 - RNA, 22 nt, Artificial Sequence
  Synthetic
auauuuuagacuaaaaugcugg

SEQ ID NO: 596141 - RNA, 23 nt, Artificial Sequence
  Synthetic
uauauuuuagacuaaaaugcugg

SEQ ID NO: 596142 - RNA, 24 nt, Artificial Sequence
  Synthetic
auauauuuuagacuaaaaugcugg

SEQ ID NO: 596143 - RNA, 18 nt, Artificial Sequence
  Synthetic
cucaaugugaaaugcugg

SEQ ID NO: 596144 - RNA, 19 nt, Artificial Sequence
  Synthetic
ucucaaugugaaaugcugg

SEQ ID NO: 596145 - RNA, 20 nt, Artificial Sequence
  Synthetic
gucucaaugugaaaugcugg

SEQ ID NO: 596146 - RNA, 21 nt, Artificial Sequence
  Synthetic
ugucucaaugugaaaugcugg

SEQ ID NO: 596147 - RNA, 22 nt, Artificial Sequence
  Synthetic
augucucaaugugaaaugcugg

SEQ ID NO: 596148 - RNA, 23 nt, Artificial Sequence
  Synthetic
aaugucucaaugugaaaugcugg

SEQ ID NO: 596149 - RNA, 24 nt, Artificial Sequence
  Synthetic
uaaugucucaaugugaaaugcugg

SEQ ID NO: 596150 - RNA, 18 nt, Artificial Sequence
  Synthetic
uuuaaucaacaaugcugg

SEQ ID NO: 596151 - RNA, 19 nt, Artificial Sequence
  Synthetic
uuuuaaucaacaaugcugg

SEQ ID NO: 596152 - RNA, 20 nt, Artificial Sequence
  Synthetic
auuuuaaucaacaaugcugg

SEQ ID NO: 596153 - RNA, 21 nt, Artificial Sequence
  Synthetic
aauuuuaaucaacaaugcugg

SEQ ID NO: 596154 - RNA, 22 nt, Artificial Sequence
  Synthetic
aaauuuuaaucaacaaugcugg

SEQ ID NO: 596155 - RNA, 23 nt, Artificial Sequence
  Synthetic
caaauuuuaaucaacaaugcugg

SEQ ID NO: 596156 - RNA, 24 nt, Artificial Sequence
  Synthetic
ucaaauuuuaaucaacaaugcugg

SEQ ID NO: 596157 - RNA, 18 nt, Artificial Sequence
  Synthetic
acaaaagauuaaugcugg

SEQ ID NO: 596158 - RNA, 19 nt, Artificial Sequence
  Synthetic
cacaaaagauuaaugcugg

SEQ ID NO: 596159 - RNA, 20 nt, Artificial Sequence
  Synthetic
acacaaaagauuaaugcugg

SEQ ID NO: 596160 - RNA, 21 nt, Artificial Sequence
  Synthetic
aacacaaaagauuaaugcugg

SEQ ID NO: 596161 - RNA, 22 nt, Artificial Sequence
  Synthetic
uaacacaaaagauuaaugcugg

SEQ ID NO: 596162 - RNA, 23 nt, Artificial Sequence
  Synthetic
guaacacaaaagauuaaugcugg

SEQ ID NO: 596163 - RNA, 24 nt, Artificial Sequence
  Synthetic
uguaacacaaaagauuaaugcugg

SEQ ID NO: 596164 - RNA, 18 nt, Artificial Sequence
  Synthetic
ggagauguagacugcugg

SEQ ID NO: 596165 - RNA, 19 nt, Artificial Sequence
  Synthetic
uggagauguagacugcugg

SEQ ID NO: 596166 - RNA, 20 nt, Artificial Sequence
  Synthetic
uuggagauguagacugcugg

SEQ ID NO: 596167 - RNA, 21 nt, Artificial Sequence
  Synthetic
auuggagauguagacugcugg

SEQ ID NO: 596168 - RNA, 22 nt, Artificial Sequence
  Synthetic
aauuggagauguagacugcugg

SEQ ID NO: 596169 - RNA, 23 nt, Artificial Sequence
  Synthetic
aaauuggagauguagacugcugg

SEQ ID NO: 596170 - RNA, 24 nt, Artificial Sequence
  Synthetic
aaaauuggagauguagacugcugg

SEQ ID NO: 596171 - RNA, 18 nt, Artificial Sequence
  Synthetic
gccacuucuugcugcugg

SEQ ID NO: 596172 - RNA, 19 nt, Artificial Sequence
  Synthetic
ugccacuucuugcugcugg

SEQ ID NO: 596173 - RNA, 20 nt, Artificial Sequence
  Synthetic
cugccacuucuugcugcugg

SEQ ID NO: 596174 - RNA, 21 nt, Artificial Sequence
  Synthetic
ccugccacuucuugcugcugg

SEQ ID NO: 596175 - RNA, 22 nt, Artificial Sequence
  Synthetic
uccugccacuucuugcugcugg

SEQ ID NO: 596176 - RNA, 23 nt, Artificial Sequence
  Synthetic
uuccugccacuucuugcugcugg

SEQ ID NO: 596177 - RNA, 24 nt, Artificial Sequence
  Synthetic
auuccugccacuucuugcugcugg

SEQ ID NO: 596178 - RNA, 18 nt, Artificial Sequence
  Synthetic
gccugcccaccuugcugg

SEQ ID NO: 596179 - RNA, 19 nt, Artificial Sequence
  Synthetic
ugccugcccaccuugcugg

SEQ ID NO: 596180 - RNA, 20 nt, Artificial Sequence
  Synthetic
cugccugcccaccuugcugg

SEQ ID NO: 596181 - RNA, 21 nt, Artificial Sequence
  Synthetic
acugccugcccaccuugcugg

SEQ ID NO: 596182 - RNA, 22 nt, Artificial Sequence
  Synthetic
uacugccugcccaccuugcugg

SEQ ID NO: 596183 - RNA, 23 nt, Artificial Sequence
  Synthetic
auacugccugcccaccuugcugg

SEQ ID NO: 596184 - RNA, 24 nt, Artificial Sequence
  Synthetic
aauacugccugcccaccuugcugg

SEQ ID NO: 596185 - RNA, 18 nt, Artificial Sequence
  Synthetic
augucacuaccuugcugg

SEQ ID NO: 596186 - RNA, 19 nt, Artificial Sequence
  Synthetic
uaugucacuaccuugcugg

SEQ ID NO: 596187 - RNA, 20 nt, Artificial Sequence
  Synthetic
uuaugucacuaccuugcugg

SEQ ID NO: 596188 - RNA, 21 nt, Artificial Sequence
  Synthetic
auuaugucacuaccuugcugg

SEQ ID NO: 596189 - RNA, 22 nt, Artificial Sequence
  Synthetic
gauuaugucacuaccuugcugg

SEQ ID NO: 596190 - RNA, 23 nt, Artificial Sequence
  Synthetic
ugauuaugucacuaccuugcugg

SEQ ID NO: 596191 - RNA, 24 nt, Artificial Sequence
  Synthetic
augauuaugucacuaccuugcugg

SEQ ID NO: 596192 - RNA, 18 nt, Artificial Sequence
  Synthetic
agcuuuuaaucuugcugg

SEQ ID NO: 596193 - RNA, 19 nt, Artificial Sequence
  Synthetic
aagcuuuuaaucuugcugg

SEQ ID NO: 596194 - RNA, 20 nt, Artificial Sequence
  Synthetic
gaagcuuuuaaucuugcugg

SEQ ID NO: 596195 - RNA, 21 nt, Artificial Sequence
  Synthetic
ugaagcuuuuaaucuugcugg

SEQ ID NO: 596196 - RNA, 22 nt, Artificial Sequence
  Synthetic
augaagcuuuuaaucuugcugg

SEQ ID NO: 596197 - RNA, 23 nt, Artificial Sequence
  Synthetic
caugaagcuuuuaaucuugcugg

SEQ ID NO: 596198 - RNA, 24 nt, Artificial Sequence
  Synthetic
ucaugaagcuuuuaaucuugcugg

SEQ ID NO: 596199 - RNA, 18 nt, Artificial Sequence
  Synthetic
uucauuuuggguugcugg

SEQ ID NO: 596200 - RNA, 19 nt, Artificial Sequence
  Synthetic
auucauuuuggguugcugg

SEQ ID NO: 596201 - RNA, 20 nt, Artificial Sequence
  Synthetic
aauucauuuuggguugcugg

SEQ ID NO: 596202 - RNA, 21 nt, Artificial Sequence
  Synthetic
caauucauuuuggguugcugg

SEQ ID NO: 596203 - RNA, 22 nt, Artificial Sequence
  Synthetic
acaauucauuuuggguugcugg

SEQ ID NO: 596204 - RNA, 23 nt, Artificial Sequence
  Synthetic
cacaauucauuuuggguugcugg

SEQ ID NO: 596205 - RNA, 24 nt, Artificial Sequence
  Synthetic
acacaauucauuuuggguugcugg

SEQ ID NO: 596206 - RNA, 18 nt, Artificial Sequence
  Synthetic
auuauuuucauuugcugg

SEQ ID NO: 596207 - RNA, 19 nt, Artificial Sequence
  Synthetic
uauuauuuucauuugcugg

SEQ ID NO: 596208 - RNA, 20 nt, Artificial Sequence
  Synthetic
guauuauuuucauuugcugg

SEQ ID NO: 596209 - RNA, 21 nt, Artificial Sequence
  Synthetic
uguauuauuuucauuugcugg

SEQ ID NO: 596210 - RNA, 22 nt, Artificial Sequence
  Synthetic
auguauuauuuucauuugcugg

SEQ ID NO: 596211 - RNA, 23 nt, Artificial Sequence
  Synthetic
uauguauuauuuucauuugcugg

SEQ ID NO: 596212 - RNA, 24 nt, Artificial Sequence
  Synthetic
auauguauuauuuucauuugcugg

SEQ ID NO: 596213 - RNA, 18 nt, Artificial Sequence
  Synthetic
uaaaaaacagcaaucugg

SEQ ID NO: 596214 - RNA, 19 nt, Artificial Sequence
  Synthetic
uuaaaaaacagcaaucugg

SEQ ID NO: 596215 - RNA, 20 nt, Artificial Sequence
  Synthetic
auuaaaaaacagcaaucugg

SEQ ID NO: 596216 - RNA, 21 nt, Artificial Sequence
  Synthetic
cauuaaaaaacagcaaucugg

SEQ ID NO: 596217 - RNA, 22 nt, Artificial Sequence
  Synthetic
acauuaaaaaacagcaaucugg

SEQ ID NO: 596218 - RNA, 23 nt, Artificial Sequence
  Synthetic
aacauuaaaaaacagcaaucugg

SEQ ID NO: 596219 - RNA, 24 nt, Artificial Sequence
  Synthetic
aaacauuaaaaaacagcaaucugg

SEQ ID NO: 596220 - RNA, 18 nt, Artificial Sequence
  Synthetic
uucacaugcugaaucugg

SEQ ID NO: 596221 - RNA, 19 nt, Artificial Sequence
  Synthetic
cuucacaugcugaaucugg

SEQ ID NO: 596222 - RNA, 20 nt, Artificial Sequence
  Synthetic
acuucacaugcugaaucugg

SEQ ID NO: 596223 - RNA, 21 nt, Artificial Sequence
  Synthetic
uacuucacaugcugaaucugg

SEQ ID NO: 596224 - RNA, 22 nt, Artificial Sequence
  Synthetic
auacuucacaugcugaaucugg

SEQ ID NO: 596225 - RNA, 23 nt, Artificial Sequence
  Synthetic
cauacuucacaugcugaaucugg

SEQ ID NO: 596226 - RNA, 24 nt, Artificial Sequence
  Synthetic
gcauacuucacaugcugaaucugg

SEQ ID NO: 596227 - RNA, 18 nt, Artificial Sequence
  Synthetic
augagccaccgcaucugg

SEQ ID NO: 596228 - RNA, 19 nt, Artificial Sequence
  Synthetic
caugagccaccgcaucugg

SEQ ID NO: 596229 - RNA, 20 nt, Artificial Sequence
  Synthetic
gcaugagccaccgcaucugg

SEQ ID NO: 596230 - RNA, 21 nt, Artificial Sequence
  Synthetic
ggcaugagccaccgcaucugg

SEQ ID NO: 596231 - RNA, 22 nt, Artificial Sequence
  Synthetic
aggcaugagccaccgcaucugg

SEQ ID NO: 596232 - RNA, 23 nt, Artificial Sequence
  Synthetic
caggcaugagccaccgcaucugg

SEQ ID NO: 596233 - RNA, 24 nt, Artificial Sequence
  Synthetic
acaggcaugagccaccgcaucugg

SEQ ID NO: 596234 - RNA, 18 nt, Artificial Sequence
  Synthetic
augauuuagggcaucugg

SEQ ID NO: 596235 - RNA, 19 nt, Artificial Sequence
  Synthetic
gaugauuuagggcaucugg

SEQ ID NO: 596236 - RNA, 20 nt, Artificial Sequence
  Synthetic
agaugauuuagggcaucugg

SEQ ID NO: 596237 - RNA, 21 nt, Artificial Sequence
  Synthetic
gagaugauuuagggcaucugg

SEQ ID NO: 596238 - RNA, 22 nt, Artificial Sequence
  Synthetic
agagaugauuuagggcaucugg

SEQ ID NO: 596239 - RNA, 23 nt, Artificial Sequence
  Synthetic
gagagaugauuuagggcaucugg

SEQ ID NO: 596240 - RNA, 24 nt, Artificial Sequence
  Synthetic
agagagaugauuuagggcaucugg

SEQ ID NO: 596241 - RNA, 18 nt, Artificial Sequence
  Synthetic
ugaugucuauagaucugg

SEQ ID NO: 596242 - RNA, 19 nt, Artificial Sequence
  Synthetic
cugaugucuauagaucugg

SEQ ID NO: 596243 - RNA, 20 nt, Artificial Sequence
  Synthetic
acugaugucuauagaucugg

SEQ ID NO: 596244 - RNA, 21 nt, Artificial Sequence
  Synthetic
uacugaugucuauagaucugg

SEQ ID NO: 596245 - RNA, 22 nt, Artificial Sequence
  Synthetic
cuacugaugucuauagaucugg

SEQ ID NO: 596246 - RNA, 23 nt, Artificial Sequence
  Synthetic
ucuacugaugucuauagaucugg

SEQ ID NO: 596247 - RNA, 24 nt, Artificial Sequence
  Synthetic
uucuacugaugucuauagaucugg

SEQ ID NO: 596248 - RNA, 18 nt, Artificial Sequence
  Synthetic
guacuagcugguaucugg

SEQ ID NO: 596249 - RNA, 19 nt, Artificial Sequence
  Synthetic
uguacuagcugguaucugg

SEQ ID NO: 596250 - RNA, 20 nt, Artificial Sequence
  Synthetic
cuguacuagcugguaucugg

SEQ ID NO: 596251 - RNA, 21 nt, Artificial Sequence
  Synthetic
ucuguacuagcugguaucugg

SEQ ID NO: 596252 - RNA, 22 nt, Artificial Sequence
  Synthetic
aucuguacuagcugguaucugg

SEQ ID NO: 596253 - RNA, 23 nt, Artificial Sequence
  Synthetic
gaucuguacuagcugguaucugg

SEQ ID NO: 596254 - RNA, 24 nt, Artificial Sequence
  Synthetic
ugaucuguacuagcugguaucugg

SEQ ID NO: 596255 - RNA, 18 nt, Artificial Sequence
  Synthetic
gucagaagauaacucugg

SEQ ID NO: 596256 - RNA, 19 nt, Artificial Sequence
  Synthetic
ugucagaagauaacucugg

SEQ ID NO: 596257 - RNA, 20 nt, Artificial Sequence
  Synthetic
augucagaagauaacucugg

SEQ ID NO: 596258 - RNA, 21 nt, Artificial Sequence
  Synthetic
caugucagaagauaacucugg

SEQ ID NO: 596259 - RNA, 22 nt, Artificial Sequence
  Synthetic
ucaugucagaagauaacucugg

SEQ ID NO: 596260 - RNA, 23 nt, Artificial Sequence
  Synthetic
uucaugucagaagauaacucugg

SEQ ID NO: 596261 - RNA, 24 nt, Artificial Sequence
  Synthetic
cuucaugucagaagauaacucugg

SEQ ID NO: 596262 - RNA, 18 nt, Artificial Sequence
  Synthetic
uagaaugaaucacucugg

SEQ ID NO: 596263 - RNA, 19 nt, Artificial Sequence
  Synthetic
uuagaaugaaucacucugg

SEQ ID NO: 596264 - RNA, 20 nt, Artificial Sequence
  Synthetic
guuagaaugaaucacucugg

SEQ ID NO: 596265 - RNA, 21 nt, Artificial Sequence
  Synthetic
uguuagaaugaaucacucugg

SEQ ID NO: 596266 - RNA, 22 nt, Artificial Sequence
  Synthetic
auguuagaaugaaucacucugg

SEQ ID NO: 596267 - RNA, 23 nt, Artificial Sequence
  Synthetic
aauguuagaaugaaucacucugg

SEQ ID NO: 596268 - RNA, 24 nt, Artificial Sequence
  Synthetic
gaauguuagaaugaaucacucugg

SEQ ID NO: 596269 - RNA, 18 nt, Artificial Sequence
  Synthetic
uaggguagagcccucugg

SEQ ID NO: 596270 - RNA, 19 nt, Artificial Sequence
  Synthetic
auaggguagagcccucugg

SEQ ID NO: 596271 - RNA, 20 nt, Artificial Sequence
  Synthetic
gauaggguagagcccucugg

SEQ ID NO: 596272 - RNA, 21 nt, Artificial Sequence
  Synthetic
agauaggguagagcccucugg

SEQ ID NO: 596273 - RNA, 22 nt, Artificial Sequence
  Synthetic
gagauaggguagagcccucugg

SEQ ID NO: 596274 - RNA, 23 nt, Artificial Sequence
  Synthetic
ggagauaggguagagcccucugg

SEQ ID NO: 596275 - RNA, 24 nt, Artificial Sequence
  Synthetic
uggagauaggguagagcccucugg

SEQ ID NO: 596276 - RNA, 18 nt, Artificial Sequence
  Synthetic
auugcuuaaucccucugg

SEQ ID NO: 596277 - RNA, 19 nt, Artificial Sequence
  Synthetic
gauugcuuaaucccucugg

SEQ ID NO: 596278 - RNA, 20 nt, Artificial Sequence
  Synthetic
agauugcuuaaucccucugg

SEQ ID NO: 596279 - RNA, 21 nt, Artificial Sequence
  Synthetic
aagauugcuuaaucccucugg

SEQ ID NO: 596280 - RNA, 22 nt, Artificial Sequence
  Synthetic
gaagauugcuuaaucccucugg

SEQ ID NO: 596281 - RNA, 23 nt, Artificial Sequence
  Synthetic
agaagauugcuuaaucccucugg

SEQ ID NO: 596282 - RNA, 24 nt, Artificial Sequence
  Synthetic
gagaagauugcuuaaucccucugg

SEQ ID NO: 596283 - RNA, 18 nt, Artificial Sequence
  Synthetic
gguuacuuuuggcucugg

SEQ ID NO: 596284 - RNA, 19 nt, Artificial Sequence
  Synthetic
ugguuacuuuuggcucugg

SEQ ID NO: 596285 - RNA, 20 nt, Artificial Sequence
  Synthetic
augguuacuuuuggcucugg

SEQ ID NO: 596286 - RNA, 21 nt, Artificial Sequence
  Synthetic
aaugguuacuuuuggcucugg

SEQ ID NO: 596287 - RNA, 22 nt, Artificial Sequence
  Synthetic
uaaugguuacuuuuggcucugg

SEQ ID NO: 596288 - RNA, 23 nt, Artificial Sequence
  Synthetic
auaaugguuacuuuuggcucugg

SEQ ID NO: 596289 - RNA, 24 nt, Artificial Sequence
  Synthetic
gauaaugguuacuuuuggcucugg

SEQ ID NO: 596290 - RNA, 18 nt, Artificial Sequence
  Synthetic
auuuggugugugcucugg

SEQ ID NO: 596291 - RNA, 19 nt, Artificial Sequence
  Synthetic
gauuuggugugugcucugg

SEQ ID NO: 596292 - RNA, 20 nt, Artificial Sequence
  Synthetic
agauuuggugugugcucugg

SEQ ID NO: 596293 - RNA, 21 nt, Artificial Sequence
  Synthetic
aagauuuggugugugcucugg

SEQ ID NO: 596294 - RNA, 22 nt, Artificial Sequence
  Synthetic
uaagauuuggugugugcucugg

SEQ ID NO: 596295 - RNA, 23 nt, Artificial Sequence
  Synthetic
auaagauuuggugugugcucugg

SEQ ID NO: 596296 - RNA, 24 nt, Artificial Sequence
  Synthetic
uauaagauuuggugugugcucugg

SEQ ID NO: 596297 - RNA, 18 nt, Artificial Sequence
  Synthetic
ugguauauaaaucucugg

SEQ ID NO: 596298 - RNA, 19 nt, Artificial Sequence
  Synthetic
cugguauauaaaucucugg

SEQ ID NO: 596299 - RNA, 20 nt, Artificial Sequence
  Synthetic
ucugguauauaaaucucugg

SEQ ID NO: 596300 - RNA, 21 nt, Artificial Sequence
  Synthetic
cucugguauauaaaucucugg

SEQ ID NO: 596301 - RNA, 22 nt, Artificial Sequence
  Synthetic
acucugguauauaaaucucugg

SEQ ID NO: 596302 - RNA, 23 nt, Artificial Sequence
  Synthetic
aacucugguauauaaaucucugg

SEQ ID NO: 596303 - RNA, 24 nt, Artificial Sequence
  Synthetic
gaacucugguauauaaaucucugg

SEQ ID NO: 596304 - RNA, 18 nt, Artificial Sequence
  Synthetic
ggugaagaguaucucugg

SEQ ID NO: 596305 - RNA, 19 nt, Artificial Sequence
  Synthetic
gggugaagaguaucucugg

SEQ ID NO: 596306 - RNA, 20 nt, Artificial Sequence
  Synthetic
ggggugaagaguaucucugg

SEQ ID NO: 596307 - RNA, 21 nt, Artificial Sequence
  Synthetic
uggggugaagaguaucucugg

SEQ ID NO: 596308 - RNA, 22 nt, Artificial Sequence
  Synthetic
cuggggugaagaguaucucugg

SEQ ID NO: 596309 - RNA, 23 nt, Artificial Sequence
  Synthetic
gcuggggugaagaguaucucugg

SEQ ID NO: 596310 - RNA, 24 nt, Artificial Sequence
  Synthetic
agcuggggugaagaguaucucugg

SEQ ID NO: 596311 - RNA, 18 nt, Artificial Sequence
  Synthetic
gacauaagaacucucugg

SEQ ID NO: 596312 - RNA, 19 nt, Artificial Sequence
  Synthetic
agacauaagaacucucugg

SEQ ID NO: 596313 - RNA, 20 nt, Artificial Sequence
  Synthetic
uagacauaagaacucucugg

SEQ ID NO: 596314 - RNA, 21 nt, Artificial Sequence
  Synthetic
guagacauaagaacucucugg

SEQ ID NO: 596315 - RNA, 22 nt, Artificial Sequence
  Synthetic
aguagacauaagaacucucugg

SEQ ID NO: 596316 - RNA, 23 nt, Artificial Sequence
  Synthetic
caguagacauaagaacucucugg

SEQ ID NO: 596317 - RNA, 24 nt, Artificial Sequence
  Synthetic
acaguagacauaagaacucucugg

SEQ ID NO: 596318 - RNA, 18 nt, Artificial Sequence
  Synthetic
augcuagugucucucugg

SEQ ID NO: 596319 - RNA, 19 nt, Artificial Sequence
  Synthetic
caugcuagugucucucugg

SEQ ID NO: 596320 - RNA, 20 nt, Artificial Sequence
  Synthetic
ccaugcuagugucucucugg

SEQ ID NO: 596321 - RNA, 21 nt, Artificial Sequence
  Synthetic
gccaugcuagugucucucugg

SEQ ID NO: 596322 - RNA, 22 nt, Artificial Sequence
  Synthetic
agccaugcuagugucucucugg

SEQ ID NO: 596323 - RNA, 23 nt, Artificial Sequence
  Synthetic
gagccaugcuagugucucucugg

SEQ ID NO: 596324 - RNA, 24 nt, Artificial Sequence
  Synthetic
ugagccaugcuagugucucucugg

SEQ ID NO: 596325 - RNA, 18 nt, Artificial Sequence
  Synthetic
caaacauuuugucucugg

SEQ ID NO: 596326 - RNA, 19 nt, Artificial Sequence
  Synthetic
acaaacauuuugucucugg

SEQ ID NO: 596327 - RNA, 20 nt, Artificial Sequence
  Synthetic
cacaaacauuuugucucugg

SEQ ID NO: 596328 - RNA, 21 nt, Artificial Sequence
  Synthetic
ccacaaacauuuugucucugg

SEQ ID NO: 596329 - RNA, 22 nt, Artificial Sequence
  Synthetic
uccacaaacauuuugucucugg

SEQ ID NO: 596330 - RNA, 23 nt, Artificial Sequence
  Synthetic
uuccacaaacauuuugucucugg

SEQ ID NO: 596331 - RNA, 24 nt, Artificial Sequence
  Synthetic
guuccacaaacauuuugucucugg

SEQ ID NO: 596332 - RNA, 18 nt, Artificial Sequence
  Synthetic
gccaauggacuucucugg

SEQ ID NO: 596333 - RNA, 19 nt, Artificial Sequence
  Synthetic
ugccaauggacuucucugg

SEQ ID NO: 596334 - RNA, 20 nt, Artificial Sequence
  Synthetic
augccaauggacuucucugg

SEQ ID NO: 596335 - RNA, 21 nt, Artificial Sequence
  Synthetic
uaugccaauggacuucucugg

SEQ ID NO: 596336 - RNA, 22 nt, Artificial Sequence
  Synthetic
auaugccaauggacuucucugg

SEQ ID NO: 596337 - RNA, 23 nt, Artificial Sequence
  Synthetic
cauaugccaauggacuucucugg

SEQ ID NO: 596338 - RNA, 24 nt, Artificial Sequence
  Synthetic
ucauaugccaauggacuucucugg

SEQ ID NO: 596339 - RNA, 18 nt, Artificial Sequence
  Synthetic
caacuucacuuucucugg

SEQ ID NO: 596340 - RNA, 19 nt, Artificial Sequence
  Synthetic
gcaacuucacuuucucugg

SEQ ID NO: 596341 - RNA, 20 nt, Artificial Sequence
  Synthetic
agcaacuucacuuucucugg

SEQ ID NO: 596342 - RNA, 21 nt, Artificial Sequence
  Synthetic
uagcaacuucacuuucucugg

SEQ ID NO: 596343 - RNA, 22 nt, Artificial Sequence
  Synthetic
uuagcaacuucacuuucucugg

SEQ ID NO: 596344 - RNA, 23 nt, Artificial Sequence
  Synthetic
cuuagcaacuucacuuucucugg

SEQ ID NO: 596345 - RNA, 24 nt, Artificial Sequence
  Synthetic
ucuuagcaacuucacuuucucugg

SEQ ID NO: 596346 - RNA, 18 nt, Artificial Sequence
  Synthetic
uugcauauacaagucugg

SEQ ID NO: 596347 - RNA, 19 nt, Artificial Sequence
  Synthetic
guugcauauacaagucugg

SEQ ID NO: 596348 - RNA, 20 nt, Artificial Sequence
  Synthetic
aguugcauauacaagucugg

SEQ ID NO: 596349 - RNA, 21 nt, Artificial Sequence
  Synthetic
caguugcauauacaagucugg

SEQ ID NO: 596350 - RNA, 22 nt, Artificial Sequence
  Synthetic
gcaguugcauauacaagucugg

SEQ ID NO: 596351 - RNA, 23 nt, Artificial Sequence
  Synthetic
agcaguugcauauacaagucugg

SEQ ID NO: 596352 - RNA, 24 nt, Artificial Sequence
  Synthetic
aagcaguugcauauacaagucugg

SEQ ID NO: 596353 - RNA, 18 nt, Artificial Sequence
  Synthetic
cuuuauuuuagagucugg

SEQ ID NO: 596354 - RNA, 19 nt, Artificial Sequence
  Synthetic
acuuuauuuuagagucugg

SEQ ID NO: 596355 - RNA, 20 nt, Artificial Sequence
  Synthetic
aacuuuauuuuagagucugg

SEQ ID NO: 596356 - RNA, 21 nt, Artificial Sequence
  Synthetic
aaacuuuauuuuagagucugg

SEQ ID NO: 596357 - RNA, 22 nt, Artificial Sequence
  Synthetic
uaaacuuuauuuuagagucugg

SEQ ID NO: 596358 - RNA, 23 nt, Artificial Sequence
  Synthetic
uuaaacuuuauuuuagagucugg

SEQ ID NO: 596359 - RNA, 24 nt, Artificial Sequence
  Synthetic
auuaaacuuuauuuuagagucugg

SEQ ID NO: 596360 - RNA, 18 nt, Artificial Sequence
  Synthetic
ugagagacuugagucugg

SEQ ID NO: 596361 - RNA, 19 nt, Artificial Sequence
  Synthetic
gugagagacuugagucugg

SEQ ID NO: 596362 - RNA, 20 nt, Artificial Sequence
  Synthetic
agugagagacuugagucugg

SEQ ID NO: 596363 - RNA, 21 nt, Artificial Sequence
  Synthetic
aagugagagacuugagucugg

SEQ ID NO: 596364 - RNA, 22 nt, Artificial Sequence
  Synthetic
caagugagagacuugagucugg

SEQ ID NO: 596365 - RNA, 23 nt, Artificial Sequence
  Synthetic
ucaagugagagacuugagucugg

SEQ ID NO: 596366 - RNA, 24 nt, Artificial Sequence
  Synthetic
aucaagugagagacuugagucugg

SEQ ID NO: 596367 - RNA, 18 nt, Artificial Sequence
  Synthetic
uaguaaaugcuagucugg

SEQ ID NO: 596368 - RNA, 19 nt, Artificial Sequence
  Synthetic
guaguaaaugcuagucugg

SEQ ID NO: 596369 - RNA, 20 nt, Artificial Sequence
  Synthetic
aguaguaaaugcuagucugg

SEQ ID NO: 596370 - RNA, 21 nt, Artificial Sequence
  Synthetic
uaguaguaaaugcuagucugg

SEQ ID NO: 596371 - RNA, 22 nt, Artificial Sequence
  Synthetic
auaguaguaaaugcuagucugg

SEQ ID NO: 596372 - RNA, 23 nt, Artificial Sequence
  Synthetic
uauaguaguaaaugcuagucugg

SEQ ID NO: 596373 - RNA, 24 nt, Artificial Sequence
  Synthetic
auauaguaguaaaugcuagucugg

SEQ ID NO: 596374 - RNA, 18 nt, Artificial Sequence
  Synthetic
ugguuacagacugucugg

SEQ ID NO: 596375 - RNA, 19 nt, Artificial Sequence
  Synthetic
augguuacagacugucugg

SEQ ID NO: 596376 - RNA, 20 nt, Artificial Sequence
  Synthetic
aaugguuacagacugucugg

SEQ ID NO: 596377 - RNA, 21 nt, Artificial Sequence
  Synthetic
uaaugguuacagacugucugg

SEQ ID NO: 596378 - RNA, 22 nt, Artificial Sequence
  Synthetic
uuaaugguuacagacugucugg

SEQ ID NO: 596379 - RNA, 23 nt, Artificial Sequence
  Synthetic
cuuaaugguuacagacugucugg

SEQ ID NO: 596380 - RNA, 24 nt, Artificial Sequence
  Synthetic
gcuuaaugguuacagacugucugg

SEQ ID NO: 596381 - RNA, 18 nt, Artificial Sequence
  Synthetic
cuugcucugucauucugg

SEQ ID NO: 596382 - RNA, 19 nt, Artificial Sequence
  Synthetic
ucuugcucugucauucugg

SEQ ID NO: 596383 - RNA, 20 nt, Artificial Sequence
  Synthetic
gucuugcucugucauucugg

SEQ ID NO: 596384 - RNA, 21 nt, Artificial Sequence
  Synthetic
ggucuugcucugucauucugg

SEQ ID NO: 596385 - RNA, 22 nt, Artificial Sequence
  Synthetic
gggucuugcucugucauucugg

SEQ ID NO: 596386 - RNA, 23 nt, Artificial Sequence
  Synthetic
agggucuugcucugucauucugg

SEQ ID NO: 596387 - RNA, 24 nt, Artificial Sequence
  Synthetic
cagggucuugcucugucauucugg

SEQ ID NO: 596388 - RNA, 18 nt, Artificial Sequence
  Synthetic
uaugaacacuuauucugg

SEQ ID NO: 596389 - RNA, 19 nt, Artificial Sequence
  Synthetic
cuaugaacacuuauucugg

SEQ ID NO: 596390 - RNA, 20 nt, Artificial Sequence
  Synthetic
ucuaugaacacuuauucugg

SEQ ID NO: 596391 - RNA, 21 nt, Artificial Sequence
  Synthetic
uucuaugaacacuuauucugg

SEQ ID NO: 596392 - RNA, 22 nt, Artificial Sequence
  Synthetic
cuucuaugaacacuuauucugg

SEQ ID NO: 596393 - RNA, 23 nt, Artificial Sequence
  Synthetic
ccuucuaugaacacuuauucugg

SEQ ID NO: 596394 - RNA, 24 nt, Artificial Sequence
  Synthetic
cccuucuaugaacacuuauucugg

SEQ ID NO: 596395 - RNA, 18 nt, Artificial Sequence
  Synthetic
auguaaauaugcuucugg

SEQ ID NO: 596396 - RNA, 19 nt, Artificial Sequence
  Synthetic
aauguaaauaugcuucugg

SEQ ID NO: 596397 - RNA, 20 nt, Artificial Sequence
  Synthetic
aaauguaaauaugcuucugg

SEQ ID NO: 596398 - RNA, 21 nt, Artificial Sequence
  Synthetic
gaaauguaaauaugcuucugg

SEQ ID NO: 596399 - RNA, 22 nt, Artificial Sequence
  Synthetic
agaaauguaaauaugcuucugg

SEQ ID NO: 596400 - RNA, 23 nt, Artificial Sequence
  Synthetic
aagaaauguaaauaugcuucugg

SEQ ID NO: 596401 - RNA, 24 nt, Artificial Sequence
  Synthetic
aaagaaauguaaauaugcuucugg

SEQ ID NO: 596402 - RNA, 18 nt, Artificial Sequence
  Synthetic
uaucacuuaugcuucugg

SEQ ID NO: 596403 - RNA, 19 nt, Artificial Sequence
  Synthetic
guaucacuuaugcuucugg

SEQ ID NO: 596404 - RNA, 20 nt, Artificial Sequence
  Synthetic
aguaucacuuaugcuucugg

SEQ ID NO: 596405 - RNA, 21 nt, Artificial Sequence
  Synthetic
uaguaucacuuaugcuucugg

SEQ ID NO: 596406 - RNA, 22 nt, Artificial Sequence
  Synthetic
uuaguaucacuuaugcuucugg

SEQ ID NO: 596407 - RNA, 23 nt, Artificial Sequence
  Synthetic
uuuaguaucacuuaugcuucugg

SEQ ID NO: 596408 - RNA, 24 nt, Artificial Sequence
  Synthetic
cuuuaguaucacuuaugcuucugg

SEQ ID NO: 596409 - RNA, 18 nt, Artificial Sequence
  Synthetic
ccuguuaauacguucugg

SEQ ID NO: 596410 - RNA, 19 nt, Artificial Sequence
  Synthetic
gccuguuaauacguucugg

SEQ ID NO: 596411 - RNA, 20 nt, Artificial Sequence
  Synthetic
ugccuguuaauacguucugg

SEQ ID NO: 596412 - RNA, 21 nt, Artificial Sequence
  Synthetic
augccuguuaauacguucugg

SEQ ID NO: 596413 - RNA, 22 nt, Artificial Sequence
  Synthetic
caugccuguuaauacguucugg

SEQ ID NO: 596414 - RNA, 23 nt, Artificial Sequence
  Synthetic
gcaugccuguuaauacguucugg

SEQ ID NO: 596415 - RNA, 24 nt, Artificial Sequence
  Synthetic
ugcaugccuguuaauacguucugg

SEQ ID NO: 596416 - RNA, 18 nt, Artificial Sequence
  Synthetic
gguaguguaggguucugg

SEQ ID NO: 596417 - RNA, 19 nt, Artificial Sequence
  Synthetic
agguaguguaggguucugg

SEQ ID NO: 596418 - RNA, 20 nt, Artificial Sequence
  Synthetic
aagguaguguaggguucugg

SEQ ID NO: 596419 - RNA, 21 nt, Artificial Sequence
  Synthetic
aaagguaguguaggguucugg

SEQ ID NO: 596420 - RNA, 22 nt, Artificial Sequence
  Synthetic
gaaagguaguguaggguucugg

SEQ ID NO: 596421 - RNA, 23 nt, Artificial Sequence
  Synthetic
ugaaagguaguguaggguucugg

SEQ ID NO: 596422 - RNA, 24 nt, Artificial Sequence
  Synthetic
cugaaagguaguguaggguucugg

SEQ ID NO: 596423 - RNA, 18 nt, Artificial Sequence
  Synthetic
ugcguuucaaauuucugg

SEQ ID NO: 596424 - RNA, 19 nt, Artificial Sequence
  Synthetic
augcguuucaaauuucugg

SEQ ID NO: 596425 - RNA, 20 nt, Artificial Sequence
  Synthetic
aaugcguuucaaauuucugg

SEQ ID NO: 596426 - RNA, 21 nt, Artificial Sequence
  Synthetic
gaaugcguuucaaauuucugg

SEQ ID NO: 596427 - RNA, 22 nt, Artificial Sequence
  Synthetic
agaaugcguuucaaauuucugg

SEQ ID NO: 596428 - RNA, 23 nt, Artificial Sequence
  Synthetic
gagaaugcguuucaaauuucugg

SEQ ID NO: 596429 - RNA, 24 nt, Artificial Sequence
  Synthetic
ugagaaugcguuucaaauuucugg

SEQ ID NO: 596430 - RNA, 18 nt, Artificial Sequence
  Synthetic
aauucuuaauauuucugg

SEQ ID NO: 596431 - RNA, 19 nt, Artificial Sequence
  Synthetic
caauucuuaauauuucugg

SEQ ID NO: 596432 - RNA, 20 nt, Artificial Sequence
  Synthetic
acaauucuuaauauuucugg

SEQ ID NO: 596433 - RNA, 21 nt, Artificial Sequence
  Synthetic
aacaauucuuaauauuucugg

SEQ ID NO: 596434 - RNA, 22 nt, Artificial Sequence
  Synthetic
caacaauucuuaauauuucugg

SEQ ID NO: 596435 - RNA, 23 nt, Artificial Sequence
  Synthetic
ucaacaauucuuaauauuucugg

SEQ ID NO: 596436 - RNA, 24 nt, Artificial Sequence
  Synthetic
gucaacaauucuuaauauuucugg

SEQ ID NO: 596437 - RNA, 18 nt, Artificial Sequence
  Synthetic
acaaaaagcuauuucugg

SEQ ID NO: 596438 - RNA, 19 nt, Artificial Sequence
  Synthetic
uacaaaaagcuauuucugg

SEQ ID NO: 596439 - RNA, 20 nt, Artificial Sequence
  Synthetic
cuacaaaaagcuauuucugg

SEQ ID NO: 596440 - RNA, 21 nt, Artificial Sequence
  Synthetic
gcuacaaaaagcuauuucugg

SEQ ID NO: 596441 - RNA, 22 nt, Artificial Sequence
  Synthetic
agcuacaaaaagcuauuucugg

SEQ ID NO: 596442 - RNA, 23 nt, Artificial Sequence
  Synthetic
gagcuacaaaaagcuauuucugg

SEQ ID NO: 596443 - RNA, 24 nt, Artificial Sequence
  Synthetic
ugagcuacaaaaagcuauuucugg

SEQ ID NO: 596444 - RNA, 18 nt, Artificial Sequence
  Synthetic
ucagaaucugcuuucugg

SEQ ID NO: 596445 - RNA, 19 nt, Artificial Sequence
  Synthetic
cucagaaucugcuuucugg

SEQ ID NO: 596446 - RNA, 20 nt, Artificial Sequence
  Synthetic
ucucagaaucugcuuucugg

SEQ ID NO: 596447 - RNA, 21 nt, Artificial Sequence
  Synthetic
uucucagaaucugcuuucugg

SEQ ID NO: 596448 - RNA, 22 nt, Artificial Sequence
  Synthetic
uuucucagaaucugcuuucugg

SEQ ID NO: 596449 - RNA, 23 nt, Artificial Sequence
  Synthetic
cuuucucagaaucugcuuucugg

SEQ ID NO: 596450 - RNA, 24 nt, Artificial Sequence
  Synthetic
acuuucucagaaucugcuuucugg

SEQ ID NO: 596451 - RNA, 18 nt, Artificial Sequence
  Synthetic
agauuuuguucuuucugg

SEQ ID NO: 596452 - RNA, 19 nt, Artificial Sequence
  Synthetic
uagauuuuguucuuucugg

SEQ ID NO: 596453 - RNA, 20 nt, Artificial Sequence
  Synthetic
auagauuuuguucuuucugg

SEQ ID NO: 596454 - RNA, 21 nt, Artificial Sequence
  Synthetic
cauagauuuuguucuuucugg

SEQ ID NO: 596455 - RNA, 22 nt, Artificial Sequence
  Synthetic
ccauagauuuuguucuuucugg

SEQ ID NO: 596456 - RNA, 23 nt, Artificial Sequence
  Synthetic
uccauagauuuuguucuuucugg

SEQ ID NO: 596457 - RNA, 24 nt, Artificial Sequence
  Synthetic
cuccauagauuuuguucuuucugg

SEQ ID NO: 596458 - RNA, 18 nt, Artificial Sequence
  Synthetic
guaagggagaaaaagugg

SEQ ID NO: 596459 - RNA, 19 nt, Artificial Sequence
  Synthetic
aguaagggagaaaaagugg

SEQ ID NO: 596460 - RNA, 20 nt, Artificial Sequence
  Synthetic
aaguaagggagaaaaagugg

SEQ ID NO: 596461 - RNA, 21 nt, Artificial Sequence
  Synthetic
aaaguaagggagaaaaagugg

SEQ ID NO: 596462 - RNA, 22 nt, Artificial Sequence
  Synthetic
uaaaguaagggagaaaaagugg

SEQ ID NO: 596463 - RNA, 23 nt, Artificial Sequence
  Synthetic
cuaaaguaagggagaaaaagugg

SEQ ID NO: 596464 - RNA, 24 nt, Artificial Sequence
  Synthetic
gcuaaaguaagggagaaaaagugg

SEQ ID NO: 596465 - RNA, 18 nt, Artificial Sequence
  Synthetic
auuaagaaaagaaagugg

SEQ ID NO: 596466 - RNA, 19 nt, Artificial Sequence
  Synthetic
aauuaagaaaagaaagugg

SEQ ID NO: 596467 - RNA, 20 nt, Artificial Sequence
  Synthetic
aaauuaagaaaagaaagugg

SEQ ID NO: 596468 - RNA, 21 nt, Artificial Sequence
  Synthetic
gaaauuaagaaaagaaagugg

SEQ ID NO: 596469 - RNA, 22 nt, Artificial Sequence
  Synthetic
ugaaauuaagaaaagaaagugg

SEQ ID NO: 596470 - RNA, 23 nt, Artificial Sequence
  Synthetic
cugaaauuaagaaaagaaagugg

SEQ ID NO: 596471 - RNA, 24 nt, Artificial Sequence
  Synthetic
ccugaaauuaagaaaagaaagugg

SEQ ID NO: 596472 - RNA, 18 nt, Artificial Sequence
  Synthetic
cccacagauagaaagugg

SEQ ID NO: 596473 - RNA, 19 nt, Artificial Sequence
  Synthetic
ccccacagauagaaagugg

SEQ ID NO: 596474 - RNA, 20 nt, Artificial Sequence
  Synthetic
gccccacagauagaaagugg

SEQ ID NO: 596475 - RNA, 21 nt, Artificial Sequence
  Synthetic
ugccccacagauagaaagugg

SEQ ID NO: 596476 - RNA, 22 nt, Artificial Sequence
  Synthetic
augccccacagauagaaagugg

SEQ ID NO: 596477 - RNA, 23 nt, Artificial Sequence
  Synthetic
aaugccccacagauagaaagugg

SEQ ID NO: 596478 - RNA, 24 nt, Artificial Sequence
  Synthetic
caaugccccacagauagaaagugg

SEQ ID NO: 596479 - RNA, 18 nt, Artificial Sequence
  Synthetic
caucagccucccaagugg

SEQ ID NO: 596480 - RNA, 19 nt, Artificial Sequence
  Synthetic
gcaucagccucccaagugg

SEQ ID NO: 596481 - RNA, 20 nt, Artificial Sequence
  Synthetic
ugcaucagccucccaagugg

SEQ ID NO: 596482 - RNA, 21 nt, Artificial Sequence
  Synthetic
cugcaucagccucccaagugg

SEQ ID NO: 596483 - RNA, 22 nt, Artificial Sequence
  Synthetic
ccugcaucagccucccaagugg

SEQ ID NO: 596484 - RNA, 23 nt, Artificial Sequence
  Synthetic
uccugcaucagccucccaagugg

SEQ ID NO: 596485 - RNA, 24 nt, Artificial Sequence
  Synthetic
cuccugcaucagccucccaagugg

SEQ ID NO: 596486 - RNA, 18 nt, Artificial Sequence
  Synthetic
ugugcuuaugccaagugg

SEQ ID NO: 596487 - RNA, 19 nt, Artificial Sequence
  Synthetic
uugugcuuaugccaagugg

SEQ ID NO: 596488 - RNA, 20 nt, Artificial Sequence
  Synthetic
guugugcuuaugccaagugg

SEQ ID NO: 596489 - RNA, 21 nt, Artificial Sequence
  Synthetic
uguugugcuuaugccaagugg

SEQ ID NO: 596490 - RNA, 22 nt, Artificial Sequence
  Synthetic
guguugugcuuaugccaagugg

SEQ ID NO: 596491 - RNA, 23 nt, Artificial Sequence
  Synthetic
aguguugugcuuaugccaagugg

SEQ ID NO: 596492 - RNA, 24 nt, Artificial Sequence
  Synthetic
aaguguugugcuuaugccaagugg

SEQ ID NO: 596493 - RNA, 18 nt, Artificial Sequence
  Synthetic
agccugcucugcaagugg

SEQ ID NO: 596494 - RNA, 19 nt, Artificial Sequence
  Synthetic
cagccugcucugcaagugg

SEQ ID NO: 596495 - RNA, 20 nt, Artificial Sequence
  Synthetic
ccagccugcucugcaagugg

SEQ ID NO: 596496 - RNA, 21 nt, Artificial Sequence
  Synthetic
uccagccugcucugcaagugg

SEQ ID NO: 596497 - RNA, 22 nt, Artificial Sequence
  Synthetic
uuccagccugcucugcaagugg

SEQ ID NO: 596498 - RNA, 23 nt, Artificial Sequence
  Synthetic
cuuccagccugcucugcaagugg

SEQ ID NO: 596499 - RNA, 24 nt, Artificial Sequence
  Synthetic
gcuuccagccugcucugcaagugg

SEQ ID NO: 596500 - RNA, 21 nt, Artificial Sequence
  Synthetic
cacuuugggaggccgaagugg

SEQ ID NO: 596501 - RNA, 22 nt, Artificial Sequence
  Synthetic
gcacuuugggaggccgaagugg

SEQ ID NO: 596502 - RNA, 23 nt, Artificial Sequence
  Synthetic
agcacuuugggaggccgaagugg

SEQ ID NO: 596503 - RNA, 24 nt, Artificial Sequence
  Synthetic
cagcacuuugggaggccgaagugg

SEQ ID NO: 596504 - RNA, 18 nt, Artificial Sequence
  Synthetic
gcucaguuacggaagugg

SEQ ID NO: 596505 - RNA, 19 nt, Artificial Sequence
  Synthetic
agcucaguuacggaagugg

SEQ ID NO: 596506 - RNA, 20 nt, Artificial Sequence
  Synthetic
gagcucaguuacggaagugg

SEQ ID NO: 596507 - RNA, 21 nt, Artificial Sequence
  Synthetic
agagcucaguuacggaagugg

SEQ ID NO: 596508 - RNA, 22 nt, Artificial Sequence
  Synthetic
aagagcucaguuacggaagugg

SEQ ID NO: 596509 - RNA, 23 nt, Artificial Sequence
  Synthetic
uaagagcucaguuacggaagugg

SEQ ID NO: 596510 - RNA, 24 nt, Artificial Sequence
  Synthetic
cuaagagcucaguuacggaagugg

SEQ ID NO: 596511 - RNA, 18 nt, Artificial Sequence
  Synthetic
auacaaguuaugaagugg

SEQ ID NO: 596512 - RNA, 19 nt, Artificial Sequence
  Synthetic
uauacaaguuaugaagugg

SEQ ID NO: 596513 - RNA, 20 nt, Artificial Sequence
  Synthetic
cuauacaaguuaugaagugg

SEQ ID NO: 596514 - RNA, 21 nt, Artificial Sequence
  Synthetic
ucuauacaaguuaugaagugg

SEQ ID NO: 596515 - RNA, 22 nt, Artificial Sequence
  Synthetic
cucuauacaaguuaugaagugg

SEQ ID NO: 596516 - RNA, 23 nt, Artificial Sequence
  Synthetic
ucucuauacaaguuaugaagugg

SEQ ID NO: 596517 - RNA, 24 nt, Artificial Sequence
  Synthetic
uucucuauacaaguuaugaagugg

SEQ ID NO: 596518 - RNA, 18 nt, Artificial Sequence
  Synthetic
uuugggaggcugaagugg

SEQ ID NO: 596519 - RNA, 19 nt, Artificial Sequence
  Synthetic
cuuugggaggcugaagugg

SEQ ID NO: 596520 - RNA, 20 nt, Artificial Sequence
  Synthetic
acuuugggaggcugaagugg

SEQ ID NO: 596521 - RNA, 21 nt, Artificial Sequence
  Synthetic
cacuuugggaggcugaagugg

SEQ ID NO: 596522 - RNA, 22 nt, Artificial Sequence
  Synthetic
gcacuuugggaggcugaagugg

SEQ ID NO: 596523 - RNA, 23 nt, Artificial Sequence
  Synthetic
agcacuuugggaggcugaagugg

SEQ ID NO: 596524 - RNA, 24 nt, Artificial Sequence
  Synthetic
cagcacuuugggaggcugaagugg

SEQ ID NO: 596525 - RNA, 18 nt, Artificial Sequence
  Synthetic
ucacaugguaauaagugg

SEQ ID NO: 596526 - RNA, 19 nt, Artificial Sequence
  Synthetic
aucacaugguaauaagugg

SEQ ID NO: 596527 - RNA, 20 nt, Artificial Sequence
  Synthetic
gaucacaugguaauaagugg

SEQ ID NO: 596528 - RNA, 21 nt, Artificial Sequence
  Synthetic
ggaucacaugguaauaagugg

SEQ ID NO: 596529 - RNA, 22 nt, Artificial Sequence
  Synthetic
aggaucacaugguaauaagugg

SEQ ID NO: 596530 - RNA, 23 nt, Artificial Sequence
  Synthetic
uaggaucacaugguaauaagugg

SEQ ID NO: 596531 - RNA, 24 nt, Artificial Sequence
  Synthetic
cuaggaucacaugguaauaagugg

SEQ ID NO: 596532 - RNA, 18 nt, Artificial Sequence
  Synthetic
uguauacaaguuaagugg

SEQ ID NO: 596533 - RNA, 19 nt, Artificial Sequence
  Synthetic
uuguauacaaguuaagugg

SEQ ID NO: 596534 - RNA, 20 nt, Artificial Sequence
  Synthetic
guuguauacaaguuaagugg

SEQ ID NO: 596535 - RNA, 21 nt, Artificial Sequence
  Synthetic
gguuguauacaaguuaagugg

SEQ ID NO: 596536 - RNA, 22 nt, Artificial Sequence
  Synthetic
agguuguauacaaguuaagugg

SEQ ID NO: 596537 - RNA, 23 nt, Artificial Sequence
  Synthetic
aagguuguauacaaguuaagugg

SEQ ID NO: 596538 - RNA, 24 nt, Artificial Sequence
  Synthetic
caagguuguauacaaguuaagugg

SEQ ID NO: 596539 - RNA, 18 nt, Artificial Sequence
  Synthetic
augaaucuaaaacagugg

SEQ ID NO: 596540 - RNA, 19 nt, Artificial Sequence
  Synthetic
uaugaaucuaaaacagugg

SEQ ID NO: 596541 - RNA, 20 nt, Artificial Sequence
  Synthetic
auaugaaucuaaaacagugg

SEQ ID NO: 596542 - RNA, 21 nt, Artificial Sequence
  Synthetic
uauaugaaucuaaaacagugg

SEQ ID NO: 596543 - RNA, 22 nt, Artificial Sequence
  Synthetic
uuauaugaaucuaaaacagugg

SEQ ID NO: 596544 - RNA, 23 nt, Artificial Sequence
  Synthetic
auuauaugaaucuaaaacagugg

SEQ ID NO: 596545 - RNA, 24 nt, Artificial Sequence
  Synthetic
uauuauaugaaucuaaaacagugg

SEQ ID NO: 596546 - RNA, 18 nt, Artificial Sequence
  Synthetic
uccuuguccccacagugg

SEQ ID NO: 596547 - RNA, 19 nt, Artificial Sequence
  Synthetic
cuccuuguccccacagugg

SEQ ID NO: 596548 - RNA, 20 nt, Artificial Sequence
  Synthetic
acuccuuguccccacagugg

SEQ ID NO: 596549 - RNA, 21 nt, Artificial Sequence
  Synthetic
cacuccuuguccccacagugg

SEQ ID NO: 596550 - RNA, 22 nt, Artificial Sequence
  Synthetic
ccacuccuuguccccacagugg

SEQ ID NO: 596551 - RNA, 23 nt, Artificial Sequence
  Synthetic
accacuccuuguccccacagugg

SEQ ID NO: 596552 - RNA, 24 nt, Artificial Sequence
  Synthetic
caccacuccuuguccccacagugg

SEQ ID NO: 596553 - RNA, 22 nt, Artificial Sequence
  Synthetic
cccaaacugcuuuccacagugg

SEQ ID NO: 596554 - RNA, 23 nt, Artificial Sequence
  Synthetic
ccccaaacugcuuuccacagugg

SEQ ID NO: 596555 - RNA, 24 nt, Artificial Sequence
  Synthetic
uccccaaacugcuuuccacagugg

SEQ ID NO: 596556 - RNA, 18 nt, Artificial Sequence
  Synthetic
cacaggaugggacagugg

SEQ ID NO: 596557 - RNA, 19 nt, Artificial Sequence
  Synthetic
acacaggaugggacagugg

SEQ ID NO: 596558 - RNA, 20 nt, Artificial Sequence
  Synthetic
gacacaggaugggacagugg

SEQ ID NO: 596559 - RNA, 21 nt, Artificial Sequence
  Synthetic
agacacaggaugggacagugg

SEQ ID NO: 596560 - RNA, 22 nt, Artificial Sequence
  Synthetic
aagacacaggaugggacagugg

SEQ ID NO: 596561 - RNA, 23 nt, Artificial Sequence
  Synthetic
gaagacacaggaugggacagugg

SEQ ID NO: 596562 - RNA, 24 nt, Artificial Sequence
  Synthetic
agaagacacaggaugggacagugg

SEQ ID NO: 596563 - RNA, 18 nt, Artificial Sequence
  Synthetic
gaguucuagauacagugg

SEQ ID NO: 596564 - RNA, 19 nt, Artificial Sequence
  Synthetic
ggaguucuagauacagugg

SEQ ID NO: 596565 - RNA, 20 nt, Artificial Sequence
  Synthetic
aggaguucuagauacagugg

SEQ ID NO: 596566 - RNA, 21 nt, Artificial Sequence
  Synthetic
uaggaguucuagauacagugg

SEQ ID NO: 596567 - RNA, 22 nt, Artificial Sequence
  Synthetic
cuaggaguucuagauacagugg

SEQ ID NO: 596568 - RNA, 23 nt, Artificial Sequence
  Synthetic
ucuaggaguucuagauacagugg

SEQ ID NO: 596569 - RNA, 24 nt, Artificial Sequence
  Synthetic
uucuaggaguucuagauacagugg

SEQ ID NO: 596570 - RNA, 18 nt, Artificial Sequence
  Synthetic
aacugcuuucuacagugg

SEQ ID NO: 596571 - RNA, 19 nt, Artificial Sequence
  Synthetic
aaacugcuuucuacagugg

SEQ ID NO: 596572 - RNA, 20 nt, Artificial Sequence
  Synthetic
caaacugcuuucuacagugg

SEQ ID NO: 596573 - RNA, 21 nt, Artificial Sequence
  Synthetic
ccaaacugcuuucuacagugg

SEQ ID NO: 596574 - RNA, 22 nt, Artificial Sequence
  Synthetic
uccaaacugcuuucuacagugg

SEQ ID NO: 596575 - RNA, 23 nt, Artificial Sequence
  Synthetic
guccaaacugcuuucuacagugg

SEQ ID NO: 596576 - RNA, 24 nt, Artificial Sequence
  Synthetic
uguccaaacugcuuucuacagugg

SEQ ID NO: 596577 - RNA, 18 nt, Artificial Sequence
  Synthetic
agugaaaaugaccagugg

SEQ ID NO: 596578 - RNA, 19 nt, Artificial Sequence
  Synthetic
gagugaaaaugaccagugg

SEQ ID NO: 596579 - RNA, 20 nt, Artificial Sequence
  Synthetic
ugagugaaaaugaccagugg

SEQ ID NO: 596580 - RNA, 21 nt, Artificial Sequence
  Synthetic
cugagugaaaaugaccagugg

SEQ ID NO: 596581 - RNA, 22 nt, Artificial Sequence
  Synthetic
ccugagugaaaaugaccagugg

SEQ ID NO: 596582 - RNA, 23 nt, Artificial Sequence
  Synthetic
gccugagugaaaaugaccagugg

SEQ ID NO: 596583 - RNA, 24 nt, Artificial Sequence
  Synthetic
agccugagugaaaaugaccagugg

SEQ ID NO: 596584 - RNA, 18 nt, Artificial Sequence
  Synthetic
ggaauaggagagcagugg

SEQ ID NO: 596585 - RNA, 19 nt, Artificial Sequence
  Synthetic
cggaauaggagagcagugg

SEQ ID NO: 596586 - RNA, 20 nt, Artificial Sequence
  Synthetic
gcggaauaggagagcagugg

SEQ ID NO: 596587 - RNA, 21 nt, Artificial Sequence
  Synthetic
agcggaauaggagagcagugg

SEQ ID NO: 596588 - RNA, 22 nt, Artificial Sequence
  Synthetic
cagcggaauaggagagcagugg

SEQ ID NO: 596589 - RNA, 23 nt, Artificial Sequence
  Synthetic
ucagcggaauaggagagcagugg

SEQ ID NO: 596590 - RNA, 24 nt, Artificial Sequence
  Synthetic
aucagcggaauaggagagcagugg

SEQ ID NO: 596591 - RNA, 18 nt, Artificial Sequence
  Synthetic
caagaucucuggcagugg

SEQ ID NO: 596592 - RNA, 19 nt, Artificial Sequence
  Synthetic
ucaagaucucuggcagugg

SEQ ID NO: 596593 - RNA, 20 nt, Artificial Sequence
  Synthetic
uucaagaucucuggcagugg

SEQ ID NO: 596594 - RNA, 21 nt, Artificial Sequence
  Synthetic
auucaagaucucuggcagugg

SEQ ID NO: 596595 - RNA, 22 nt, Artificial Sequence
  Synthetic
uauucaagaucucuggcagugg

SEQ ID NO: 596596 - RNA, 23 nt, Artificial Sequence
  Synthetic
cuauucaagaucucuggcagugg

SEQ ID NO: 596597 - RNA, 24 nt, Artificial Sequence
  Synthetic
gcuauucaagaucucuggcagugg

SEQ ID NO: 596598 - RNA, 18 nt, Artificial Sequence
  Synthetic
uagugaacguggcagugg

SEQ ID NO: 596599 - RNA, 19 nt, Artificial Sequence
  Synthetic
guagugaacguggcagugg

SEQ ID NO: 596600 - RNA, 20 nt, Artificial Sequence
  Synthetic
gguagugaacguggcagugg

SEQ ID NO: 596601 - RNA, 21 nt, Artificial Sequence
  Synthetic
ugguagugaacguggcagugg

SEQ ID NO: 596602 - RNA, 22 nt, Artificial Sequence
  Synthetic
gugguagugaacguggcagugg

SEQ ID NO: 596603 - RNA, 23 nt, Artificial Sequence
  Synthetic
ugugguagugaacguggcagugg

SEQ ID NO: 596604 - RNA, 24 nt, Artificial Sequence
  Synthetic
cugugguagugaacguggcagugg

SEQ ID NO: 596605 - RNA, 18 nt, Artificial Sequence
  Synthetic
ucaauacaagugcagugg

SEQ ID NO: 596606 - RNA, 19 nt, Artificial Sequence
  Synthetic
uucaauacaagugcagugg

SEQ ID NO: 596607 - RNA, 20 nt, Artificial Sequence
  Synthetic
auucaauacaagugcagugg

SEQ ID NO: 596608 - RNA, 21 nt, Artificial Sequence
  Synthetic
uauucaauacaagugcagugg

SEQ ID NO: 596609 - RNA, 22 nt, Artificial Sequence
  Synthetic
uuauucaauacaagugcagugg

SEQ ID NO: 596610 - RNA, 23 nt, Artificial Sequence
  Synthetic
uuuauucaauacaagugcagugg

SEQ ID NO: 596611 - RNA, 24 nt, Artificial Sequence
  Synthetic
cuuuauucaauacaagugcagugg

SEQ ID NO: 596612 - RNA, 18 nt, Artificial Sequence
  Synthetic
augauuucagugcagugg

SEQ ID NO: 596613 - RNA, 19 nt, Artificial Sequence
  Synthetic
aaugauuucagugcagugg

SEQ ID NO: 596614 - RNA, 20 nt, Artificial Sequence
  Synthetic
aaaugauuucagugcagugg

SEQ ID NO: 596615 - RNA, 21 nt, Artificial Sequence
  Synthetic
aaaaugauuucagugcagugg

SEQ ID NO: 596616 - RNA, 22 nt, Artificial Sequence
  Synthetic
caaaaugauuucagugcagugg

SEQ ID NO: 596617 - RNA, 23 nt, Artificial Sequence
  Synthetic
acaaaaugauuucagugcagugg

SEQ ID NO: 596618 - RNA, 24 nt, Artificial Sequence
  Synthetic
cacaaaaugauuucagugcagugg

SEQ ID NO: 596619 - RNA, 21 nt, Artificial Sequence
  Synthetic
acccaggcuggagugcagugg

SEQ ID NO: 596620 - RNA, 22 nt, Artificial Sequence
  Synthetic
cacccaggcuggagugcagugg

SEQ ID NO: 596621 - RNA, 23 nt, Artificial Sequence
  Synthetic
ucacccaggcuggagugcagugg

SEQ ID NO: 596622 - RNA, 24 nt, Artificial Sequence
  Synthetic
gucacccaggcuggagugcagugg

SEQ ID NO: 596623 - RNA, 18 nt, Artificial Sequence
  Synthetic
guagcuggagaucagugg

SEQ ID NO: 596624 - RNA, 19 nt, Artificial Sequence
  Synthetic
gguagcuggagaucagugg

SEQ ID NO: 596625 - RNA, 20 nt, Artificial Sequence
  Synthetic
cgguagcuggagaucagugg

SEQ ID NO: 596626 - RNA, 21 nt, Artificial Sequence
  Synthetic
ucgguagcuggagaucagugg

SEQ ID NO: 596627 - RNA, 22 nt, Artificial Sequence
  Synthetic
gucgguagcuggagaucagugg

SEQ ID NO: 596628 - RNA, 23 nt, Artificial Sequence
  Synthetic
ugucgguagcuggagaucagugg

SEQ ID NO: 596629 - RNA, 24 nt, Artificial Sequence
  Synthetic
augucgguagcuggagaucagugg

SEQ ID NO: 596630 - RNA, 18 nt, Artificial Sequence
  Synthetic
uugaggaggagucagugg

SEQ ID NO: 596631 - RNA, 19 nt, Artificial Sequence
  Synthetic
auugaggaggagucagugg

SEQ ID NO: 596632 - RNA, 20 nt, Artificial Sequence
  Synthetic
gauugaggaggagucagugg

SEQ ID NO: 596633 - RNA, 21 nt, Artificial Sequence
  Synthetic
ggauugaggaggagucagugg

SEQ ID NO: 596634 - RNA, 22 nt, Artificial Sequence
  Synthetic
uggauugaggaggagucagugg

SEQ ID NO: 596635 - RNA, 23 nt, Artificial Sequence
  Synthetic
uuggauugaggaggagucagugg

SEQ ID NO: 596636 - RNA, 24 nt, Artificial Sequence
  Synthetic
cuuggauugaggaggagucagugg

SEQ ID NO: 596637 - RNA, 18 nt, Artificial Sequence
  Synthetic
cgaugcccaguucagugg

SEQ ID NO: 596638 - RNA, 19 nt, Artificial Sequence
  Synthetic
gcgaugcccaguucagugg

SEQ ID NO: 596639 - RNA, 20 nt, Artificial Sequence
  Synthetic
ggcgaugcccaguucagugg

SEQ ID NO: 596640 - RNA, 21 nt, Artificial Sequence
  Synthetic
uggcgaugcccaguucagugg

SEQ ID NO: 596641 - RNA, 22 nt, Artificial Sequence
  Synthetic
cuggcgaugcccaguucagugg

SEQ ID NO: 596642 - RNA, 23 nt, Artificial Sequence
  Synthetic
acuggcgaugcccaguucagugg

SEQ ID NO: 596643 - RNA, 24 nt, Artificial Sequence
  Synthetic
aacuggcgaugcccaguucagugg

SEQ ID NO: 596644 - RNA, 18 nt, Artificial Sequence
  Synthetic
aggagaagacaagagugg

SEQ ID NO: 596645 - RNA, 19 nt, Artificial Sequence
  Synthetic
uaggagaagacaagagugg

SEQ ID NO: 596646 - RNA, 20 nt, Artificial Sequence
  Synthetic
auaggagaagacaagagugg

SEQ ID NO: 596647 - RNA, 21 nt, Artificial Sequence
  Synthetic
cauaggagaagacaagagugg

SEQ ID NO: 596648 - RNA, 22 nt, Artificial Sequence
  Synthetic
acauaggagaagacaagagugg

SEQ ID NO: 596649 - RNA, 23 nt, Artificial Sequence
  Synthetic
gacauaggagaagacaagagugg

SEQ ID NO: 596650 - RNA, 24 nt, Artificial Sequence
  Synthetic
ggacauaggagaagacaagagugg

SEQ ID NO: 596651 - RNA, 18 nt, Artificial Sequence
  Synthetic
cagaauacagcagagugg

SEQ ID NO: 596652 - RNA, 19 nt, Artificial Sequence
  Synthetic
ucagaauacagcagagugg

SEQ ID NO: 596653 - RNA, 20 nt, Artificial Sequence
  Synthetic
gucagaauacagcagagugg

SEQ ID NO: 596654 - RNA, 21 nt, Artificial Sequence
  Synthetic
agucagaauacagcagagugg

SEQ ID NO: 596655 - RNA, 22 nt, Artificial Sequence
  Synthetic
aagucagaauacagcagagugg

SEQ ID NO: 596656 - RNA, 23 nt, Artificial Sequence
  Synthetic
gaagucagaauacagcagagugg

SEQ ID NO: 596657 - RNA, 24 nt, Artificial Sequence
  Synthetic
agaagucagaauacagcagagugg

SEQ ID NO: 596658 - RNA, 18 nt, Artificial Sequence
  Synthetic
aucacucaaggagagugg

SEQ ID NO: 596659 - RNA, 19 nt, Artificial Sequence
  Synthetic
uaucacucaaggagagugg

SEQ ID NO: 596660 - RNA, 20 nt, Artificial Sequence
  Synthetic
auaucacucaaggagagugg

SEQ ID NO: 596661 - RNA, 21 nt, Artificial Sequence
  Synthetic
uauaucacucaaggagagugg

SEQ ID NO: 596662 - RNA, 22 nt, Artificial Sequence
  Synthetic
auauaucacucaaggagagugg

SEQ ID NO: 596663 - RNA, 23 nt, Artificial Sequence
  Synthetic
cauauaucacucaaggagagugg

SEQ ID NO: 596664 - RNA, 24 nt, Artificial Sequence
  Synthetic
acauauaucacucaaggagagugg

SEQ ID NO: 596665 - RNA, 18 nt, Artificial Sequence
  Synthetic
uauguugaauacgagugg

SEQ ID NO: 596666 - RNA, 19 nt, Artificial Sequence
  Synthetic
uuauguugaauacgagugg

SEQ ID NO: 596667 - RNA, 20 nt, Artificial Sequence
  Synthetic
auuauguugaauacgagugg

SEQ ID NO: 596668 - RNA, 21 nt, Artificial Sequence
  Synthetic
uauuauguugaauacgagugg

SEQ ID NO: 596669 - RNA, 22 nt, Artificial Sequence
  Synthetic
auauuauguugaauacgagugg

SEQ ID NO: 596670 - RNA, 23 nt, Artificial Sequence
  Synthetic
aauauuauguugaauacgagugg

SEQ ID NO: 596671 - RNA, 24 nt, Artificial Sequence
  Synthetic
caauauuauguugaauacgagugg

SEQ ID NO: 596672 - RNA, 18 nt, Artificial Sequence
  Synthetic
gaauauagacaggagugg

SEQ ID NO: 596673 - RNA, 19 nt, Artificial Sequence
  Synthetic
ugaauauagacaggagugg

SEQ ID NO: 596674 - RNA, 20 nt, Artificial Sequence
  Synthetic
augaauauagacaggagugg

SEQ ID NO: 596675 - RNA, 21 nt, Artificial Sequence
  Synthetic
aaugaauauagacaggagugg

SEQ ID NO: 596676 - RNA, 22 nt, Artificial Sequence
  Synthetic
aaaugaauauagacaggagugg

SEQ ID NO: 596677 - RNA, 23 nt, Artificial Sequence
  Synthetic
uaaaugaauauagacaggagugg

SEQ ID NO: 596678 - RNA, 24 nt, Artificial Sequence
  Synthetic
uuaaaugaauauagacaggagugg

SEQ ID NO: 596679 - RNA, 18 nt, Artificial Sequence
  Synthetic
aaggguuaaugggagugg

SEQ ID NO: 596680 - RNA, 19 nt, Artificial Sequence
  Synthetic
caaggguuaaugggagugg

SEQ ID NO: 596681 - RNA, 20 nt, Artificial Sequence
  Synthetic
acaaggguuaaugggagugg

SEQ ID NO: 596682 - RNA, 21 nt, Artificial Sequence
  Synthetic
aacaaggguuaaugggagugg

SEQ ID NO: 596683 - RNA, 22 nt, Artificial Sequence
  Synthetic
uaacaaggguuaaugggagugg

SEQ ID NO: 596684 - RNA, 23 nt, Artificial Sequence
  Synthetic
cuaacaaggguuaaugggagugg

SEQ ID NO: 596685 - RNA, 24 nt, Artificial Sequence
  Synthetic
ccuaacaaggguuaaugggagugg

SEQ ID NO: 596686 - RNA, 18 nt, Artificial Sequence
  Synthetic
cgugaguguguggagugg

SEQ ID NO: 596687 - RNA, 19 nt, Artificial Sequence
  Synthetic
acgugaguguguggagugg

SEQ ID NO: 596688 - RNA, 20 nt, Artificial Sequence
  Synthetic
aacgugaguguguggagugg

SEQ ID NO: 596689 - RNA, 21 nt, Artificial Sequence
  Synthetic
aaacgugaguguguggagugg

SEQ ID NO: 596690 - RNA, 22 nt, Artificial Sequence
  Synthetic
aaaacgugaguguguggagugg

SEQ ID NO: 596691 - RNA, 23 nt, Artificial Sequence
  Synthetic
gaaaacgugaguguguggagugg

SEQ ID NO: 596692 - RNA, 24 nt, Artificial Sequence
  Synthetic
ggaaaacgugaguguguggagugg

SEQ ID NO: 596693 - RNA, 18 nt, Artificial Sequence
  Synthetic
gugggcaggaaugagugg

SEQ ID NO: 596694 - RNA, 19 nt, Artificial Sequence
  Synthetic
ggugggcaggaaugagugg

SEQ ID NO: 596695 - RNA, 20 nt, Artificial Sequence
  Synthetic
uggugggcaggaaugagugg

SEQ ID NO: 596696 - RNA, 21 nt, Artificial Sequence
  Synthetic
cuggugggcaggaaugagugg

SEQ ID NO: 596697 - RNA, 22 nt, Artificial Sequence
  Synthetic
acuggugggcaggaaugagugg

SEQ ID NO: 596698 - RNA, 23 nt, Artificial Sequence
  Synthetic
cacuggugggcaggaaugagugg

SEQ ID NO: 596699 - RNA, 24 nt, Artificial Sequence
  Synthetic
ccacuggugggcaggaaugagugg

SEQ ID NO: 596700 - RNA, 18 nt, Artificial Sequence
  Synthetic
gagcacuguucugagugg

SEQ ID NO: 596701 - RNA, 19 nt, Artificial Sequence
  Synthetic
agagcacuguucugagugg

SEQ ID NO: 596702 - RNA, 20 nt, Artificial Sequence
  Synthetic
aagagcacuguucugagugg

SEQ ID NO: 596703 - RNA, 21 nt, Artificial Sequence
  Synthetic
aaagagcacuguucugagugg

SEQ ID NO: 596704 - RNA, 22 nt, Artificial Sequence
  Synthetic
aaaagagcacuguucugagugg

SEQ ID NO: 596705 - RNA, 23 nt, Artificial Sequence
  Synthetic
gaaaagagcacuguucugagugg

SEQ ID NO: 596706 - RNA, 24 nt, Artificial Sequence
  Synthetic
ugaaaagagcacuguucugagugg

SEQ ID NO: 596707 - RNA, 18 nt, Artificial Sequence
  Synthetic
uagcugaggagugagugg

SEQ ID NO: 596708 - RNA, 19 nt, Artificial Sequence
  Synthetic
auagcugaggagugagugg

SEQ ID NO: 596709 - RNA, 20 nt, Artificial Sequence
  Synthetic
cauagcugaggagugagugg

SEQ ID NO: 596710 - RNA, 21 nt, Artificial Sequence
  Synthetic
gcauagcugaggagugagugg

SEQ ID NO: 596711 - RNA, 22 nt, Artificial Sequence
  Synthetic
ggcauagcugaggagugagugg

SEQ ID NO: 596712 - RNA, 23 nt, Artificial Sequence
  Synthetic
aggcauagcugaggagugagugg

SEQ ID NO: 596713 - RNA, 24 nt, Artificial Sequence
  Synthetic
uaggcauagcugaggagugagugg

SEQ ID NO: 596714 - RNA, 18 nt, Artificial Sequence
  Synthetic
aaucucuauagauagugg

SEQ ID NO: 596715 - RNA, 19 nt, Artificial Sequence
  Synthetic
caaucucuauagauagugg

SEQ ID NO: 596716 - RNA, 20 nt, Artificial Sequence
  Synthetic
ucaaucucuauagauagugg

SEQ ID NO: 596717 - RNA, 21 nt, Artificial Sequence
  Synthetic
gucaaucucuauagauagugg

SEQ ID NO: 596718 - RNA, 22 nt, Artificial Sequence
  Synthetic
ugucaaucucuauagauagugg

SEQ ID NO: 596719 - RNA, 23 nt, Artificial Sequence
  Synthetic
augucaaucucuauagauagugg

SEQ ID NO: 596720 - RNA, 24 nt, Artificial Sequence
  Synthetic
aaugucaaucucuauagauagugg

SEQ ID NO: 596721 - RNA, 18 nt, Artificial Sequence
  Synthetic
ucacaaguuagcuagugg

SEQ ID NO: 596722 - RNA, 19 nt, Artificial Sequence
  Synthetic
gucacaaguuagcuagugg

SEQ ID NO: 596723 - RNA, 20 nt, Artificial Sequence
  Synthetic
agucacaaguuagcuagugg

SEQ ID NO: 596724 - RNA, 21 nt, Artificial Sequence
  Synthetic
uagucacaaguuagcuagugg

SEQ ID NO: 596725 - RNA, 22 nt, Artificial Sequence
  Synthetic
auagucacaaguuagcuagugg

SEQ ID NO: 596726 - RNA, 23 nt, Artificial Sequence
  Synthetic
gauagucacaaguuagcuagugg

SEQ ID NO: 596727 - RNA, 24 nt, Artificial Sequence
  Synthetic
agauagucacaaguuagcuagugg

SEQ ID NO: 596728 - RNA, 18 nt, Artificial Sequence
  Synthetic
uuugcugaacaguagugg

SEQ ID NO: 596729 - RNA, 19 nt, Artificial Sequence
  Synthetic
guuugcugaacaguagugg

SEQ ID NO: 596730 - RNA, 20 nt, Artificial Sequence
  Synthetic
gguuugcugaacaguagugg

SEQ ID NO: 596731 - RNA, 21 nt, Artificial Sequence
  Synthetic
ugguuugcugaacaguagugg

SEQ ID NO: 596732 - RNA, 22 nt, Artificial Sequence
  Synthetic
gugguuugcugaacaguagugg

SEQ ID NO: 596733 - RNA, 23 nt, Artificial Sequence
  Synthetic
ugugguuugcugaacaguagugg

SEQ ID NO: 596734 - RNA, 24 nt, Artificial Sequence
  Synthetic
augugguuugcugaacaguagugg

SEQ ID NO: 596735 - RNA, 18 nt, Artificial Sequence
  Synthetic
gacugggaaggguagugg

SEQ ID NO: 596736 - RNA, 19 nt, Artificial Sequence
  Synthetic
agacugggaaggguagugg

SEQ ID NO: 596737 - RNA, 20 nt, Artificial Sequence
  Synthetic
gagacugggaaggguagugg

SEQ ID NO: 596738 - RNA, 21 nt, Artificial Sequence
  Synthetic
ggagacugggaaggguagugg

SEQ ID NO: 596739 - RNA, 22 nt, Artificial Sequence
  Synthetic
aggagacugggaaggguagugg

SEQ ID NO: 596740 - RNA, 23 nt, Artificial Sequence
  Synthetic
caggagacugggaaggguagugg

SEQ ID NO: 596741 - RNA, 24 nt, Artificial Sequence
  Synthetic
ccaggagacugggaaggguagugg

SEQ ID NO: 596742 - RNA, 18 nt, Artificial Sequence
  Synthetic
gccccgaaaugguagugg

SEQ ID NO: 596743 - RNA, 19 nt, Artificial Sequence
  Synthetic
agccccgaaaugguagugg

SEQ ID NO: 596744 - RNA, 20 nt, Artificial Sequence
  Synthetic
uagccccgaaaugguagugg

SEQ ID NO: 596745 - RNA, 21 nt, Artificial Sequence
  Synthetic
auagccccgaaaugguagugg

SEQ ID NO: 596746 - RNA, 22 nt, Artificial Sequence
  Synthetic
uauagccccgaaaugguagugg

SEQ ID NO: 596747 - RNA, 23 nt, Artificial Sequence
  Synthetic
guauagccccgaaaugguagugg

SEQ ID NO: 596748 - RNA, 24 nt, Artificial Sequence
  Synthetic
uguauagccccgaaaugguagugg

SEQ ID NO: 596749 - RNA, 18 nt, Artificial Sequence
  Synthetic
cgaacccaaaauuagugg

SEQ ID NO: 596750 - RNA, 19 nt, Artificial Sequence
  Synthetic
ucgaacccaaaauuagugg

SEQ ID NO: 596751 - RNA, 20 nt, Artificial Sequence
  Synthetic
aucgaacccaaaauuagugg

SEQ ID NO: 596752 - RNA, 21 nt, Artificial Sequence
  Synthetic
aaucgaacccaaaauuagugg

SEQ ID NO: 596753 - RNA, 22 nt, Artificial Sequence
  Synthetic
aaaucgaacccaaaauuagugg

SEQ ID NO: 596754 - RNA, 23 nt, Artificial Sequence
  Synthetic
caaaucgaacccaaaauuagugg

SEQ ID NO: 596755 - RNA, 24 nt, Artificial Sequence
  Synthetic
gcaaaucgaacccaaaauuagugg

SEQ ID NO: 596756 - RNA, 18 nt, Artificial Sequence
  Synthetic
gcaguagauacuuagugg

SEQ ID NO: 596757 - RNA, 19 nt, Artificial Sequence
  Synthetic
ugcaguagauacuuagugg

SEQ ID NO: 596758 - RNA, 20 nt, Artificial Sequence
  Synthetic
cugcaguagauacuuagugg

SEQ ID NO: 596759 - RNA, 21 nt, Artificial Sequence
  Synthetic
ucugcaguagauacuuagugg

SEQ ID NO: 596760 - RNA, 22 nt, Artificial Sequence
  Synthetic
aucugcaguagauacuuagugg

SEQ ID NO: 596761 - RNA, 23 nt, Artificial Sequence
  Synthetic
aaucugcaguagauacuuagugg

SEQ ID NO: 596762 - RNA, 24 nt, Artificial Sequence
  Synthetic
uaaucugcaguagauacuuagugg

SEQ ID NO: 596763 - RNA, 18 nt, Artificial Sequence
  Synthetic
gaaguggguucuuagugg

SEQ ID NO: 596764 - RNA, 19 nt, Artificial Sequence
  Synthetic
ugaaguggguucuuagugg

SEQ ID NO: 596765 - RNA, 20 nt, Artificial Sequence
  Synthetic
uugaaguggguucuuagugg

SEQ ID NO: 596766 - RNA, 21 nt, Artificial Sequence
  Synthetic
guugaaguggguucuuagugg

SEQ ID NO: 596767 - RNA, 22 nt, Artificial Sequence
  Synthetic
gguugaaguggguucuuagugg

SEQ ID NO: 596768 - RNA, 23 nt, Artificial Sequence
  Synthetic
ugguugaaguggguucuuagugg

SEQ ID NO: 596769 - RNA, 24 nt, Artificial Sequence
  Synthetic
gugguugaaguggguucuuagugg

SEQ ID NO: 596770 - RNA, 18 nt, Artificial Sequence
  Synthetic
uaggcauuguguuagugg

SEQ ID NO: 596771 - RNA, 19 nt, Artificial Sequence
  Synthetic
uuaggcauuguguuagugg

SEQ ID NO: 596772 - RNA, 20 nt, Artificial Sequence
  Synthetic
guuaggcauuguguuagugg

SEQ ID NO: 596773 - RNA, 21 nt, Artificial Sequence
  Synthetic
uguuaggcauuguguuagugg

SEQ ID NO: 596774 - RNA, 22 nt, Artificial Sequence
  Synthetic
uuguuaggcauuguguuagugg

SEQ ID NO: 596775 - RNA, 23 nt, Artificial Sequence
  Synthetic
uuuguuaggcauuguguuagugg

SEQ ID NO: 596776 - RNA, 24 nt, Artificial Sequence
  Synthetic
auuuguuaggcauuguguuagugg

SEQ ID NO: 596777 - RNA, 18 nt, Artificial Sequence
  Synthetic
agguuuggggggacgugg

SEQ ID NO: 596778 - RNA, 19 nt, Artificial Sequence
  Synthetic
cagguuuggggggacgugg

SEQ ID NO: 596779 - RNA, 20 nt, Artificial Sequence
  Synthetic
acagguuuggggggacgugg

SEQ ID NO: 596780 - RNA, 21 nt, Artificial Sequence
  Synthetic
cacagguuuggggggacgugg

SEQ ID NO: 596781 - RNA, 22 nt, Artificial Sequence
  Synthetic
gcacagguuuggggggacgugg

SEQ ID NO: 596782 - RNA, 23 nt, Artificial Sequence
  Synthetic
agcacagguuuggggggacgugg

SEQ ID NO: 596783 - RNA, 24 nt, Artificial Sequence
  Synthetic
cagcacagguuuggggggacgugg

SEQ ID NO: 596784 - RNA, 18 nt, Artificial Sequence
  Synthetic
uacuaauuagagccgugg

SEQ ID NO: 596785 - RNA, 19 nt, Artificial Sequence
  Synthetic
auacuaauuagagccgugg

SEQ ID NO: 596786 - RNA, 20 nt, Artificial Sequence
  Synthetic
gauacuaauuagagccgugg

SEQ ID NO: 596787 - RNA, 21 nt, Artificial Sequence
  Synthetic
agauacuaauuagagccgugg

SEQ ID NO: 596788 - RNA, 22 nt, Artificial Sequence
  Synthetic
uagauacuaauuagagccgugg

SEQ ID NO: 596789 - RNA, 23 nt, Artificial Sequence
  Synthetic
auagauacuaauuagagccgugg

SEQ ID NO: 596790 - RNA, 24 nt, Artificial Sequence
  Synthetic
uauagauacuaauuagagccgugg

SEQ ID NO: 596791 - RNA, 18 nt, Artificial Sequence
  Synthetic
aagggaaauaauccgugg

SEQ ID NO: 596792 - RNA, 19 nt, Artificial Sequence
  Synthetic
gaagggaaauaauccgugg

SEQ ID NO: 596793 - RNA, 20 nt, Artificial Sequence
  Synthetic
ugaagggaaauaauccgugg

SEQ ID NO: 596794 - RNA, 21 nt, Artificial Sequence
  Synthetic
gugaagggaaauaauccgugg

SEQ ID NO: 596795 - RNA, 22 nt, Artificial Sequence
  Synthetic
ggugaagggaaauaauccgugg

SEQ ID NO: 596796 - RNA, 23 nt, Artificial Sequence
  Synthetic
aggugaagggaaauaauccgugg

SEQ ID NO: 596797 - RNA, 24 nt, Artificial Sequence
  Synthetic
caggugaagggaaauaauccgugg

SEQ ID NO: 596798 - RNA, 18 nt, Artificial Sequence
  Synthetic
agagagagauaggcgugg

SEQ ID NO: 596799 - RNA, 19 nt, Artificial Sequence
  Synthetic
cagagagagauaggcgugg

SEQ ID NO: 596800 - RNA, 20 nt, Artificial Sequence
  Synthetic
acagagagagauaggcgugg

SEQ ID NO: 596801 - RNA, 21 nt, Artificial Sequence
  Synthetic
cacagagagagauaggcgugg

SEQ ID NO: 596802 - RNA, 22 nt, Artificial Sequence
  Synthetic
acacagagagagauaggcgugg

SEQ ID NO: 596803 - RNA, 23 nt, Artificial Sequence
  Synthetic
gacacagagagagauaggcgugg

SEQ ID NO: 596804 - RNA, 24 nt, Artificial Sequence
  Synthetic
agacacagagagagauaggcgugg

SEQ ID NO: 596805 - RNA, 18 nt, Artificial Sequence
  Synthetic
cagagagccaaaucgugg

SEQ ID NO: 596806 - RNA, 19 nt, Artificial Sequence
  Synthetic
acagagagccaaaucgugg

SEQ ID NO: 596807 - RNA, 20 nt, Artificial Sequence
  Synthetic
aacagagagccaaaucgugg

SEQ ID NO: 596808 - RNA, 21 nt, Artificial Sequence
  Synthetic
aaacagagagccaaaucgugg

SEQ ID NO: 596809 - RNA, 22 nt, Artificial Sequence
  Synthetic
caaacagagagccaaaucgugg

SEQ ID NO: 596810 - RNA, 23 nt, Artificial Sequence
  Synthetic
acaaacagagagccaaaucgugg

SEQ ID NO: 596811 - RNA, 24 nt, Artificial Sequence
  Synthetic
gacaaacagagagccaaaucgugg

SEQ ID NO: 596812 - RNA, 18 nt, Artificial Sequence
  Synthetic
ccaaauacaugaucgugg

SEQ ID NO: 596813 - RNA, 19 nt, Artificial Sequence
  Synthetic
gccaaauacaugaucgugg

SEQ ID NO: 596814 - RNA, 20 nt, Artificial Sequence
  Synthetic
ugccaaauacaugaucgugg

SEQ ID NO: 596815 - RNA, 21 nt, Artificial Sequence
  Synthetic
augccaaauacaugaucgugg

SEQ ID NO: 596816 - RNA, 22 nt, Artificial Sequence
  Synthetic
aaugccaaauacaugaucgugg

SEQ ID NO: 596817 - RNA, 23 nt, Artificial Sequence
  Synthetic
caaugccaaauacaugaucgugg

SEQ ID NO: 596818 - RNA, 24 nt, Artificial Sequence
  Synthetic
acaaugccaaauacaugaucgugg

SEQ ID NO: 596819 - RNA, 18 nt, Artificial Sequence
  Synthetic
cuucacaaucacucgugg

SEQ ID NO: 596820 - RNA, 19 nt, Artificial Sequence
  Synthetic
gcuucacaaucacucgugg

SEQ ID NO: 596821 - RNA, 20 nt, Artificial Sequence
  Synthetic
agcuucacaaucacucgugg

SEQ ID NO: 596822 - RNA, 21 nt, Artificial Sequence
  Synthetic
uagcuucacaaucacucgugg

SEQ ID NO: 596823 - RNA, 22 nt, Artificial Sequence
  Synthetic
auagcuucacaaucacucgugg

SEQ ID NO: 596824 - RNA, 23 nt, Artificial Sequence
  Synthetic
uauagcuucacaaucacucgugg

SEQ ID NO: 596825 - RNA, 24 nt, Artificial Sequence
  Synthetic
guauagcuucacaaucacucgugg

SEQ ID NO: 596826 - RNA, 18 nt, Artificial Sequence
  Synthetic
ugagcaaaguccucgugg

SEQ ID NO: 596827 - RNA, 19 nt, Artificial Sequence
  Synthetic
uugagcaaaguccucgugg

SEQ ID NO: 596828 - RNA, 20 nt, Artificial Sequence
  Synthetic
uuugagcaaaguccucgugg

SEQ ID NO: 596829 - RNA, 21 nt, Artificial Sequence
  Synthetic
auuugagcaaaguccucgugg

SEQ ID NO: 596830 - RNA, 22 nt, Artificial Sequence
  Synthetic
cauuugagcaaaguccucgugg

SEQ ID NO: 596831 - RNA, 23 nt, Artificial Sequence
  Synthetic
acauuugagcaaaguccucgugg

SEQ ID NO: 596832 - RNA, 24 nt, Artificial Sequence
  Synthetic
gacauuugagcaaaguccucgugg

SEQ ID NO: 596833 - RNA, 18 nt, Artificial Sequence
  Synthetic
gguguuaaguagucgugg

SEQ ID NO: 596834 - RNA, 19 nt, Artificial Sequence
  Synthetic
cgguguuaaguagucgugg

SEQ ID NO: 596835 - RNA, 20 nt, Artificial Sequence
  Synthetic
gcgguguuaaguagucgugg

SEQ ID NO: 596836 - RNA, 21 nt, Artificial Sequence
  Synthetic
agcgguguuaaguagucgugg

SEQ ID NO: 596837 - RNA, 22 nt, Artificial Sequence
  Synthetic
uagcgguguuaaguagucgugg

SEQ ID NO: 596838 - RNA, 23 nt, Artificial Sequence
  Synthetic
auagcgguguuaaguagucgugg

SEQ ID NO: 596839 - RNA, 24 nt, Artificial Sequence
  Synthetic
aauagcgguguuaaguagucgugg

SEQ ID NO: 596840 - RNA, 18 nt, Artificial Sequence
  Synthetic
gauuucuagaguucgugg

SEQ ID NO: 596841 - RNA, 19 nt, Artificial Sequence
  Synthetic
agauuucuagaguucgugg

SEQ ID NO: 596842 - RNA, 20 nt, Artificial Sequence
  Synthetic
uagauuucuagaguucgugg

SEQ ID NO: 596843 - RNA, 21 nt, Artificial Sequence
  Synthetic
uuagauuucuagaguucgugg

SEQ ID NO: 596844 - RNA, 22 nt, Artificial Sequence
  Synthetic
guuagauuucuagaguucgugg

SEQ ID NO: 596845 - RNA, 23 nt, Artificial Sequence
  Synthetic
gguuagauuucuagaguucgugg

SEQ ID NO: 596846 - RNA, 24 nt, Artificial Sequence
  Synthetic
ugguuagauuucuagaguucgugg

SEQ ID NO: 596847 - RNA, 18 nt, Artificial Sequence
  Synthetic
uagcagaaacaaaggugg

SEQ ID NO: 596848 - RNA, 19 nt, Artificial Sequence
  Synthetic
auagcagaaacaaaggugg

SEQ ID NO: 596849 - RNA, 20 nt, Artificial Sequence
  Synthetic
uauagcagaaacaaaggugg

SEQ ID NO: 596850 - RNA, 21 nt, Artificial Sequence
  Synthetic
auauagcagaaacaaaggugg

SEQ ID NO: 596851 - RNA, 22 nt, Artificial Sequence
  Synthetic
aauauagcagaaacaaaggugg

SEQ ID NO: 596852 - RNA, 23 nt, Artificial Sequence
  Synthetic
caauauagcagaaacaaaggugg

SEQ ID NO: 596853 - RNA, 24 nt, Artificial Sequence
  Synthetic
gcaauauagcagaaacaaaggugg

SEQ ID NO: 596854 - RNA, 18 nt, Artificial Sequence
  Synthetic
cucaacgcaugaaggugg

SEQ ID NO: 596855 - RNA, 19 nt, Artificial Sequence
  Synthetic
acucaacgcaugaaggugg

SEQ ID NO: 596856 - RNA, 20 nt, Artificial Sequence
  Synthetic
cacucaacgcaugaaggugg

SEQ ID NO: 596857 - RNA, 21 nt, Artificial Sequence
  Synthetic
gcacucaacgcaugaaggugg

SEQ ID NO: 596858 - RNA, 22 nt, Artificial Sequence
  Synthetic
ggcacucaacgcaugaaggugg

SEQ ID NO: 596859 - RNA, 23 nt, Artificial Sequence
  Synthetic
gggcacucaacgcaugaaggugg

SEQ ID NO: 596860 - RNA, 24 nt, Artificial Sequence
  Synthetic
agggcacucaacgcaugaaggugg

SEQ ID NO: 596861 - RNA, 18 nt, Artificial Sequence
  Synthetic
caccuucuucacaggugg

SEQ ID NO: 596862 - RNA, 19 nt, Artificial Sequence
  Synthetic
ccaccuucuucacaggugg

SEQ ID NO: 596863 - RNA, 20 nt, Artificial Sequence
  Synthetic
gccaccuucuucacaggugg

SEQ ID NO: 596864 - RNA, 21 nt, Artificial Sequence
  Synthetic
agccaccuucuucacaggugg

SEQ ID NO: 596865 - RNA, 22 nt, Artificial Sequence
  Synthetic
aagccaccuucuucacaggugg

SEQ ID NO: 596866 - RNA, 23 nt, Artificial Sequence
  Synthetic
caagccaccuucuucacaggugg

SEQ ID NO: 596867 - RNA, 24 nt, Artificial Sequence
  Synthetic
gcaagccaccuucuucacaggugg

SEQ ID NO: 596868 - RNA, 18 nt, Artificial Sequence
  Synthetic
guaaacagaagcaggugg

SEQ ID NO: 596869 - RNA, 19 nt, Artificial Sequence
  Synthetic
aguaaacagaagcaggugg

SEQ ID NO: 596870 - RNA, 20 nt, Artificial Sequence
  Synthetic
uaguaaacagaagcaggugg

SEQ ID NO: 596871 - RNA, 21 nt, Artificial Sequence
  Synthetic
cuaguaaacagaagcaggugg

SEQ ID NO: 596872 - RNA, 22 nt, Artificial Sequence
  Synthetic
ccuaguaaacagaagcaggugg

SEQ ID NO: 596873 - RNA, 23 nt, Artificial Sequence
  Synthetic
uccuaguaaacagaagcaggugg

SEQ ID NO: 596874 - RNA, 24 nt, Artificial Sequence
  Synthetic
guccuaguaaacagaagcaggugg

SEQ ID NO: 596875 - RNA, 18 nt, Artificial Sequence
  Synthetic
acuugucccagcaggugg

SEQ ID NO: 596876 - RNA, 19 nt, Artificial Sequence
  Synthetic
aacuugucccagcaggugg

SEQ ID NO: 596877 - RNA, 20 nt, Artificial Sequence
  Synthetic
gaacuugucccagcaggugg

SEQ ID NO: 596878 - RNA, 21 nt, Artificial Sequence
  Synthetic
agaacuugucccagcaggugg

SEQ ID NO: 596879 - RNA, 22 nt, Artificial Sequence
  Synthetic
aagaacuugucccagcaggugg

SEQ ID NO: 596880 - RNA, 23 nt, Artificial Sequence
  Synthetic
aaagaacuugucccagcaggugg

SEQ ID NO: 596881 - RNA, 24 nt, Artificial Sequence
  Synthetic
uaaagaacuugucccagcaggugg

SEQ ID NO: 596882 - RNA, 18 nt, Artificial Sequence
  Synthetic
cauucaaagaucaggugg

SEQ ID NO: 596883 - RNA, 19 nt, Artificial Sequence
  Synthetic
ucauucaaagaucaggugg

SEQ ID NO: 596884 - RNA, 20 nt, Artificial Sequence
  Synthetic
cucauucaaagaucaggugg

SEQ ID NO: 596885 - RNA, 21 nt, Artificial Sequence
  Synthetic
acucauucaaagaucaggugg

SEQ ID NO: 596886 - RNA, 22 nt, Artificial Sequence
  Synthetic
aacucauucaaagaucaggugg

SEQ ID NO: 596887 - RNA, 23 nt, Artificial Sequence
  Synthetic
uaacucauucaaagaucaggugg

SEQ ID NO: 596888 - RNA, 24 nt, Artificial Sequence
  Synthetic
cuaacucauucaaagaucaggugg

SEQ ID NO: 596889 - RNA, 18 nt, Artificial Sequence
  Synthetic
cauauuccaacgaggugg

SEQ ID NO: 596890 - RNA, 19 nt, Artificial Sequence
  Synthetic
acauauuccaacgaggugg

SEQ ID NO: 596891 - RNA, 20 nt, Artificial Sequence
  Synthetic
gacauauuccaacgaggugg

SEQ ID NO: 596892 - RNA, 21 nt, Artificial Sequence
  Synthetic
agacauauuccaacgaggugg

SEQ ID NO: 596893 - RNA, 22 nt, Artificial Sequence
  Synthetic
gagacauauuccaacgaggugg

SEQ ID NO: 596894 - RNA, 23 nt, Artificial Sequence
  Synthetic
agagacauauuccaacgaggugg

SEQ ID NO: 596895 - RNA, 24 nt, Artificial Sequence
  Synthetic
aagagacauauuccaacgaggugg

SEQ ID NO: 596896 - RNA, 18 nt, Artificial Sequence
  Synthetic
cuugggaggcugaggugg

SEQ ID NO: 596897 - RNA, 19 nt, Artificial Sequence
  Synthetic
acuugggaggcugaggugg

SEQ ID NO: 596898 - RNA, 20 nt, Artificial Sequence
  Synthetic
cacuugggaggcugaggugg

SEQ ID NO: 596899 - RNA, 21 nt, Artificial Sequence
  Synthetic
ccacuugggaggcugaggugg

SEQ ID NO: 596900 - RNA, 22 nt, Artificial Sequence
  Synthetic
gccacuugggaggcugaggugg

SEQ ID NO: 596901 - RNA, 23 nt, Artificial Sequence
  Synthetic
agccacuugggaggcugaggugg

SEQ ID NO: 596902 - RNA, 24 nt, Artificial Sequence
  Synthetic
cagccacuugggaggcugaggugg

SEQ ID NO: 596903 - RNA, 18 nt, Artificial Sequence
  Synthetic
uauuggccugugaggugg

SEQ ID NO: 596904 - RNA, 19 nt, Artificial Sequence
  Synthetic
uuauuggccugugaggugg

SEQ ID NO: 596905 - RNA, 20 nt, Artificial Sequence
  Synthetic
uuuauuggccugugaggugg

SEQ ID NO: 596906 - RNA, 21 nt, Artificial Sequence
  Synthetic
uuuuauuggccugugaggugg

SEQ ID NO: 596907 - RNA, 22 nt, Artificial Sequence
  Synthetic
auuuuauuggccugugaggugg

SEQ ID NO: 596908 - RNA, 23 nt, Artificial Sequence
  Synthetic
uauuuuauuggccugugaggugg

SEQ ID NO: 596909 - RNA, 24 nt, Artificial Sequence
  Synthetic
uuauuuuauuggccugugaggugg

SEQ ID NO: 596910 - RNA, 18 nt, Artificial Sequence
  Synthetic
ucgcuugaaccuaggugg

SEQ ID NO: 596911 - RNA, 19 nt, Artificial Sequence
  Synthetic
aucgcuugaaccuaggugg

SEQ ID NO: 596912 - RNA, 20 nt, Artificial Sequence
  Synthetic
aaucgcuugaaccuaggugg

SEQ ID NO: 596913 - RNA, 21 nt, Artificial Sequence
  Synthetic
gaaucgcuugaaccuaggugg

SEQ ID NO: 596914 - RNA, 22 nt, Artificial Sequence
  Synthetic
agaaucgcuugaaccuaggugg

SEQ ID NO: 596915 - RNA, 23 nt, Artificial Sequence
  Synthetic
gagaaucgcuugaaccuaggugg

SEQ ID NO: 596916 - RNA, 24 nt, Artificial Sequence
  Synthetic
ggagaaucgcuugaaccuaggugg

SEQ ID NO: 596917 - RNA, 18 nt, Artificial Sequence
  Synthetic
ugggaagaguguaggugg

SEQ ID NO: 596918 - RNA, 19 nt, Artificial Sequence
  Synthetic
cugggaagaguguaggugg

SEQ ID NO: 596919 - RNA, 20 nt, Artificial Sequence
  Synthetic
gcugggaagaguguaggugg

SEQ ID NO: 596920 - RNA, 21 nt, Artificial Sequence
  Synthetic
ggcugggaagaguguaggugg

SEQ ID NO: 596921 - RNA, 22 nt, Artificial Sequence
  Synthetic
aggcugggaagaguguaggugg

SEQ ID NO: 596922 - RNA, 23 nt, Artificial Sequence
  Synthetic
gaggcugggaagaguguaggugg

SEQ ID NO: 596923 - RNA, 24 nt, Artificial Sequence
  Synthetic
agaggcugggaagaguguaggugg

SEQ ID NO: 596924 - RNA, 18 nt, Artificial Sequence
  Synthetic
guaauguagguuaggugg

SEQ ID NO: 596925 - RNA, 19 nt, Artificial Sequence
  Synthetic
gguaauguagguuaggugg

SEQ ID NO: 596926 - RNA, 20 nt, Artificial Sequence
  Synthetic
ugguaauguagguuaggugg

SEQ ID NO: 596927 - RNA, 21 nt, Artificial Sequence
  Synthetic
gugguaauguagguuaggugg

SEQ ID NO: 596928 - RNA, 22 nt, Artificial Sequence
  Synthetic
ggugguaauguagguuaggugg

SEQ ID NO: 596929 - RNA, 23 nt, Artificial Sequence
  Synthetic
aggugguaauguagguuaggugg

SEQ ID NO: 596930 - RNA, 24 nt, Artificial Sequence
  Synthetic
caggugguaauguagguuaggugg

SEQ ID NO: 596931 - RNA, 18 nt, Artificial Sequence
  Synthetic
uuuagcuuuagacggugg

SEQ ID NO: 596932 - RNA, 19 nt, Artificial Sequence
  Synthetic
cuuuagcuuuagacggugg

SEQ ID NO: 596933 - RNA, 20 nt, Artificial Sequence
  Synthetic
acuuuagcuuuagacggugg

SEQ ID NO: 596934 - RNA, 21 nt, Artificial Sequence
  Synthetic
aacuuuagcuuuagacggugg

SEQ ID NO: 596935 - RNA, 22 nt, Artificial Sequence
  Synthetic
aaacuuuagcuuuagacggugg

SEQ ID NO: 596936 - RNA, 23 nt, Artificial Sequence
  Synthetic
uaaacuuuagcuuuagacggugg

SEQ ID NO: 596937 - RNA, 24 nt, Artificial Sequence
  Synthetic
auaaacuuuagcuuuagacggugg

SEQ ID NO: 596938 - RNA, 18 nt, Artificial Sequence
  Synthetic
aaaaugaagcaagggugg

SEQ ID NO: 596939 - RNA, 19 nt, Artificial Sequence
  Synthetic
gaaaaugaagcaagggugg

SEQ ID NO: 596940 - RNA, 20 nt, Artificial Sequence
  Synthetic
agaaaaugaagcaagggugg

SEQ ID NO: 596941 - RNA, 21 nt, Artificial Sequence
  Synthetic
aagaaaaugaagcaagggugg

SEQ ID NO: 596942 - RNA, 22 nt, Artificial Sequence
  Synthetic
uaagaaaaugaagcaagggugg

SEQ ID NO: 596943 - RNA, 23 nt, Artificial Sequence
  Synthetic
auaagaaaaugaagcaagggugg

SEQ ID NO: 596944 - RNA, 24 nt, Artificial Sequence
  Synthetic
gauaagaaaaugaagcaagggugg

SEQ ID NO: 596945 - RNA, 18 nt, Artificial Sequence
  Synthetic
caccucuucacagggugg

SEQ ID NO: 596946 - RNA, 19 nt, Artificial Sequence
  Synthetic
gcaccucuucacagggugg

SEQ ID NO: 596947 - RNA, 20 nt, Artificial Sequence
  Synthetic
ggcaccucuucacagggugg

SEQ ID NO: 596948 - RNA, 21 nt, Artificial Sequence
  Synthetic
aggcaccucuucacagggugg

SEQ ID NO: 596949 - RNA, 22 nt, Artificial Sequence
  Synthetic
aaggcaccucuucacagggugg

SEQ ID NO: 596950 - RNA, 23 nt, Artificial Sequence
  Synthetic
gaaggcaccucuucacagggugg

SEQ ID NO: 596951 - RNA, 24 nt, Artificial Sequence
  Synthetic
agaaggcaccucuucacagggugg

SEQ ID NO: 596952 - RNA, 18 nt, Artificial Sequence
  Synthetic
ccuaugccuccagggugg

SEQ ID NO: 596953 - RNA, 19 nt, Artificial Sequence
  Synthetic
accuaugccuccagggugg

SEQ ID NO: 596954 - RNA, 20 nt, Artificial Sequence
  Synthetic
aaccuaugccuccagggugg

SEQ ID NO: 596955 - RNA, 21 nt, Artificial Sequence
  Synthetic
caaccuaugccuccagggugg

SEQ ID NO: 596956 - RNA, 22 nt, Artificial Sequence
  Synthetic
acaaccuaugccuccagggugg

SEQ ID NO: 596957 - RNA, 23 nt, Artificial Sequence
  Synthetic
cacaaccuaugccuccagggugg

SEQ ID NO: 596958 - RNA, 24 nt, Artificial Sequence
  Synthetic
ccacaaccuaugccuccagggugg

SEQ ID NO: 596959 - RNA, 18 nt, Artificial Sequence
  Synthetic
cuggaguggggagggugg

SEQ ID NO: 596960 - RNA, 19 nt, Artificial Sequence
  Synthetic
acuggaguggggagggugg

SEQ ID NO: 596961 - RNA, 20 nt, Artificial Sequence
  Synthetic
uacuggaguggggagggugg

SEQ ID NO: 596962 - RNA, 21 nt, Artificial Sequence
  Synthetic
cuacuggaguggggagggugg

SEQ ID NO: 596963 - RNA, 22 nt, Artificial Sequence
  Synthetic
ccuacuggaguggggagggugg

SEQ ID NO: 596964 - RNA, 23 nt, Artificial Sequence
  Synthetic
gccuacuggaguggggagggugg

SEQ ID NO: 596965 - RNA, 24 nt, Artificial Sequence
  Synthetic
agccuacuggaguggggagggugg

SEQ ID NO: 596966 - RNA, 18 nt, Artificial Sequence
  Synthetic
uuagaguguggagggugg

SEQ ID NO: 596967 - RNA, 19 nt, Artificial Sequence
  Synthetic
auuagaguguggagggugg

SEQ ID NO: 596968 - RNA, 20 nt, Artificial Sequence
  Synthetic
uauuagaguguggagggugg

SEQ ID NO: 596969 - RNA, 21 nt, Artificial Sequence
  Synthetic
cuauuagaguguggagggugg

SEQ ID NO: 596970 - RNA, 22 nt, Artificial Sequence
  Synthetic
acuauuagaguguggagggugg

SEQ ID NO: 596971 - RNA, 23 nt, Artificial Sequence
  Synthetic
gacuauuagaguguggagggugg

SEQ ID NO: 596972 - RNA, 24 nt, Artificial Sequence
  Synthetic
ggacuauuagaguguggagggugg

SEQ ID NO: 596973 - RNA, 18 nt, Artificial Sequence
  Synthetic
ggaacuucuuaggggugg

SEQ ID NO: 596974 - RNA, 19 nt, Artificial Sequence
  Synthetic
aggaacuucuuaggggugg

SEQ ID NO: 596975 - RNA, 20 nt, Artificial Sequence
  Synthetic
aaggaacuucuuaggggugg

SEQ ID NO: 596976 - RNA, 21 nt, Artificial Sequence
  Synthetic
caaggaacuucuuaggggugg

SEQ ID NO: 596977 - RNA, 22 nt, Artificial Sequence
  Synthetic
acaaggaacuucuuaggggugg

SEQ ID NO: 596978 - RNA, 23 nt, Artificial Sequence
  Synthetic
uacaaggaacuucuuaggggugg

SEQ ID NO: 596979 - RNA, 24 nt, Artificial Sequence
  Synthetic
guacaaggaacuucuuaggggugg

SEQ ID NO: 596980 - RNA, 18 nt, Artificial Sequence
  Synthetic
agaaguugaggggggugg

SEQ ID NO: 596981 - RNA, 19 nt, Artificial Sequence
  Synthetic
aagaaguugaggggggugg

SEQ ID NO: 596982 - RNA, 20 nt, Artificial Sequence
  Synthetic
uaagaaguugaggggggugg

SEQ ID NO: 596983 - RNA, 21 nt, Artificial Sequence
  Synthetic
guaagaaguugaggggggugg

SEQ ID NO: 596984 - RNA, 22 nt, Artificial Sequence
  Synthetic
uguaagaaguugaggggggugg

SEQ ID NO: 596985 - RNA, 23 nt, Artificial Sequence
  Synthetic
guguaagaaguugaggggggugg

SEQ ID NO: 596986 - RNA, 24 nt, Artificial Sequence
  Synthetic
uguguaagaaguugaggggggugg

SEQ ID NO: 596987 - RNA, 18 nt, Artificial Sequence
  Synthetic
gggacugcuguggggugg

SEQ ID NO: 596988 - RNA, 19 nt, Artificial Sequence
  Synthetic
ggggacugcuguggggugg

SEQ ID NO: 596989 - RNA, 20 nt, Artificial Sequence
  Synthetic
uggggacugcuguggggugg

SEQ ID NO: 596990 - RNA, 21 nt, Artificial Sequence
  Synthetic
cuggggacugcuguggggugg

SEQ ID NO: 596991 - RNA, 22 nt, Artificial Sequence
  Synthetic
ucuggggacugcuguggggugg

SEQ ID NO: 596992 - RNA, 23 nt, Artificial Sequence
  Synthetic
cucuggggacugcuguggggugg

SEQ ID NO: 596993 - RNA, 24 nt, Artificial Sequence
  Synthetic
acucuggggacugcuguggggugg

SEQ ID NO: 596994 - RNA, 18 nt, Artificial Sequence
  Synthetic
gggccugcuguggggugg

SEQ ID NO: 596995 - RNA, 19 nt, Artificial Sequence
  Synthetic
ggggccugcuguggggugg

SEQ ID NO: 596996 - RNA, 20 nt, Artificial Sequence
  Synthetic
uggggccugcuguggggugg

SEQ ID NO: 596997 - RNA, 21 nt, Artificial Sequence
  Synthetic
cuggggccugcuguggggugg

SEQ ID NO: 596998 - RNA, 22 nt, Artificial Sequence
  Synthetic
acuggggccugcuguggggugg

SEQ ID NO: 596999 - RNA, 23 nt, Artificial Sequence
  Synthetic
cacuggggccugcuguggggugg

SEQ ID NO: 597000 - RNA, 24 nt, Artificial Sequence
  Synthetic
acacuggggccugcuguggggugg

SEQ ID NO: 597001 - RNA, 18 nt, Artificial Sequence
  Synthetic
ggaacuguuguggggugg

SEQ ID NO: 597002 - RNA, 19 nt, Artificial Sequence
  Synthetic
gggaacuguuguggggugg

SEQ ID NO: 597003 - RNA, 20 nt, Artificial Sequence
  Synthetic
ugggaacuguuguggggugg

SEQ ID NO: 597004 - RNA, 21 nt, Artificial Sequence
  Synthetic
cugggaacuguuguggggugg

SEQ ID NO: 597005 - RNA, 22 nt, Artificial Sequence
  Synthetic
ccugggaacuguuguggggugg

SEQ ID NO: 597006 - RNA, 23 nt, Artificial Sequence
  Synthetic
cccugggaacuguuguggggugg

SEQ ID NO: 597007 - RNA, 24 nt, Artificial Sequence
  Synthetic
acccugggaacuguuguggggugg

SEQ ID NO: 597008 - RNA, 21 nt, Artificial Sequence
  Synthetic
cuggggacuguuguggggugg

SEQ ID NO: 597009 - RNA, 22 nt, Artificial Sequence
  Synthetic
ucuggggacuguuguggggugg

SEQ ID NO: 597010 - RNA, 23 nt, Artificial Sequence
  Synthetic
cucuggggacuguuguggggugg

SEQ ID NO: 597011 - RNA, 24 nt, Artificial Sequence
  Synthetic
acucuggggacuguuguggggugg

SEQ ID NO: 597012 - RNA, 21 nt, Artificial Sequence
  Synthetic
ccggggccuguuguggggugg

SEQ ID NO: 597013 - RNA, 22 nt, Artificial Sequence
  Synthetic
accggggccuguuguggggugg

SEQ ID NO: 597014 - RNA, 23 nt, Artificial Sequence
  Synthetic
caccggggccuguuguggggugg

SEQ ID NO: 597015 - RNA, 24 nt, Artificial Sequence
  Synthetic
acaccggggccuguuguggggugg

SEQ ID NO: 597016 - RNA, 18 nt, Artificial Sequence
  Synthetic
ucgcuugaaccugggugg

SEQ ID NO: 597017 - RNA, 19 nt, Artificial Sequence
  Synthetic
aucgcuugaaccugggugg

SEQ ID NO: 597018 - RNA, 20 nt, Artificial Sequence
  Synthetic
aaucgcuugaaccugggugg

SEQ ID NO: 597019 - RNA, 21 nt, Artificial Sequence
  Synthetic
gaaucgcuugaaccugggugg

SEQ ID NO: 597020 - RNA, 22 nt, Artificial Sequence
  Synthetic
agaaucgcuugaaccugggugg

SEQ ID NO: 597021 - RNA, 23 nt, Artificial Sequence
  Synthetic
gagaaucgcuugaaccugggugg

SEQ ID NO: 597022 - RNA, 24 nt, Artificial Sequence
  Synthetic
ggagaaucgcuugaaccugggugg

SEQ ID NO: 597023 - RNA, 18 nt, Artificial Sequence
  Synthetic
agcugcaguggugggugg

SEQ ID NO: 597024 - RNA, 19 nt, Artificial Sequence
  Synthetic
aagcugcaguggugggugg

SEQ ID NO: 597025 - RNA, 20 nt, Artificial Sequence
  Synthetic
aaagcugcaguggugggugg

SEQ ID NO: 597026 - RNA, 21 nt, Artificial Sequence
  Synthetic
aaaagcugcaguggugggugg

SEQ ID NO: 597027 - RNA, 22 nt, Artificial Sequence
  Synthetic
caaaagcugcaguggugggugg

SEQ ID NO: 597028 - RNA, 23 nt, Artificial Sequence
  Synthetic
ucaaaagcugcaguggugggugg

SEQ ID NO: 597029 - RNA, 24 nt, Artificial Sequence
  Synthetic
aucaaaagcugcaguggugggugg

SEQ ID NO: 597030 - RNA, 18 nt, Artificial Sequence
  Synthetic
uccuuuguuguugggugg

SEQ ID NO: 597031 - RNA, 19 nt, Artificial Sequence
  Synthetic
auccuuuguuguugggugg

SEQ ID NO: 597032 - RNA, 20 nt, Artificial Sequence
  Synthetic
cauccuuuguuguugggugg

SEQ ID NO: 597033 - RNA, 21 nt, Artificial Sequence
  Synthetic
ucauccuuuguuguugggugg

SEQ ID NO: 597034 - RNA, 22 nt, Artificial Sequence
  Synthetic
uucauccuuuguuguugggugg

SEQ ID NO: 597035 - RNA, 23 nt, Artificial Sequence
  Synthetic
auucauccuuuguuguugggugg

SEQ ID NO: 597036 - RNA, 24 nt, Artificial Sequence
  Synthetic
cauucauccuuuguuguugggugg

SEQ ID NO: 597037 - RNA, 18 nt, Artificial Sequence
  Synthetic
uguguccuuacauggugg

SEQ ID NO: 597038 - RNA, 19 nt, Artificial Sequence
  Synthetic
guguguccuuacauggugg

SEQ ID NO: 597039 - RNA, 20 nt, Artificial Sequence
  Synthetic
gguguguccuuacauggugg

SEQ ID NO: 597040 - RNA, 21 nt, Artificial Sequence
  Synthetic
cgguguguccuuacauggugg

SEQ ID NO: 597041 - RNA, 22 nt, Artificial Sequence
  Synthetic
ucgguguguccuuacauggugg

SEQ ID NO: 597042 - RNA, 23 nt, Artificial Sequence
  Synthetic
uucgguguguccuuacauggugg

SEQ ID NO: 597043 - RNA, 24 nt, Artificial Sequence
  Synthetic
cuucgguguguccuuacauggugg

SEQ ID NO: 597044 - RNA, 18 nt, Artificial Sequence
  Synthetic
aagggaaagggauggugg

SEQ ID NO: 597045 - RNA, 19 nt, Artificial Sequence
  Synthetic
aaagggaaagggauggugg

SEQ ID NO: 597046 - RNA, 20 nt, Artificial Sequence
  Synthetic
gaaagggaaagggauggugg

SEQ ID NO: 597047 - RNA, 21 nt, Artificial Sequence
  Synthetic
ggaaagggaaagggauggugg

SEQ ID NO: 597048 - RNA, 22 nt, Artificial Sequence
  Synthetic
gggaaagggaaagggauggugg

SEQ ID NO: 597049 - RNA, 23 nt, Artificial Sequence
  Synthetic
agggaaagggaaagggauggugg

SEQ ID NO: 597050 - RNA, 24 nt, Artificial Sequence
  Synthetic
gagggaaagggaaagggauggugg

SEQ ID NO: 597051 - RNA, 18 nt, Artificial Sequence
  Synthetic
ucuuucaauauauggugg

SEQ ID NO: 597052 - RNA, 19 nt, Artificial Sequence
  Synthetic
uucuuucaauauauggugg

SEQ ID NO: 597053 - RNA, 20 nt, Artificial Sequence
  Synthetic
auucuuucaauauauggugg

SEQ ID NO: 597054 - RNA, 21 nt, Artificial Sequence
  Synthetic
aauucuuucaauauauggugg

SEQ ID NO: 597055 - RNA, 22 nt, Artificial Sequence
  Synthetic
gaauucuuucaauauauggugg

SEQ ID NO: 597056 - RNA, 23 nt, Artificial Sequence
  Synthetic
agaauucuuucaauauauggugg

SEQ ID NO: 597057 - RNA, 24 nt, Artificial Sequence
  Synthetic
cagaauucuuucaauauauggugg

SEQ ID NO: 597058 - RNA, 18 nt, Artificial Sequence
  Synthetic
uacauauuuuuauggugg

SEQ ID NO: 597059 - RNA, 19 nt, Artificial Sequence
  Synthetic
guacauauuuuuauggugg

SEQ ID NO: 597060 - RNA, 20 nt, Artificial Sequence
  Synthetic
cguacauauuuuuauggugg

SEQ ID NO: 597061 - RNA, 21 nt, Artificial Sequence
  Synthetic
ccguacauauuuuuauggugg

SEQ ID NO: 597062 - RNA, 22 nt, Artificial Sequence
  Synthetic
accguacauauuuuuauggugg

SEQ ID NO: 597063 - RNA, 23 nt, Artificial Sequence
  Synthetic
uaccguacauauuuuuauggugg

SEQ ID NO: 597064 - RNA, 24 nt, Artificial Sequence
  Synthetic
cuaccguacauauuuuuauggugg

SEQ ID NO: 597065 - RNA, 18 nt, Artificial Sequence
  Synthetic
aggauaaggggcuggugg

SEQ ID NO: 597066 - RNA, 19 nt, Artificial Sequence
  Synthetic
aaggauaaggggcuggugg

SEQ ID NO: 597067 - RNA, 20 nt, Artificial Sequence
  Synthetic
uaaggauaaggggcuggugg

SEQ ID NO: 597068 - RNA, 21 nt, Artificial Sequence
  Synthetic
uuaaggauaaggggcuggugg

SEQ ID NO: 597069 - RNA, 22 nt, Artificial Sequence
  Synthetic
uuuaaggauaaggggcuggugg

SEQ ID NO: 597070 - RNA, 23 nt, Artificial Sequence
  Synthetic
uuuuaaggauaaggggcuggugg

SEQ ID NO: 597071 - RNA, 24 nt, Artificial Sequence
  Synthetic
auuuuaaggauaaggggcuggugg

SEQ ID NO: 597072 - RNA, 18 nt, Artificial Sequence
  Synthetic
cuuggguaaaucuggugg

SEQ ID NO: 597073 - RNA, 19 nt, Artificial Sequence
  Synthetic
ucuuggguaaaucuggugg

SEQ ID NO: 597074 - RNA, 20 nt, Artificial Sequence
  Synthetic
uucuuggguaaaucuggugg

SEQ ID NO: 597075 - RNA, 21 nt, Artificial Sequence
  Synthetic
guucuuggguaaaucuggugg

SEQ ID NO: 597076 - RNA, 22 nt, Artificial Sequence
  Synthetic
gguucuuggguaaaucuggugg

SEQ ID NO: 597077 - RNA, 23 nt, Artificial Sequence
  Synthetic
agguucuuggguaaaucuggugg

SEQ ID NO: 597078 - RNA, 24 nt, Artificial Sequence
  Synthetic
cagguucuuggguaaaucuggugg

SEQ ID NO: 597079 - RNA, 18 nt, Artificial Sequence
  Synthetic
auuuagggcaucuggugg

SEQ ID NO: 597080 - RNA, 19 nt, Artificial Sequence
  Synthetic
gauuuagggcaucuggugg

SEQ ID NO: 597081 - RNA, 20 nt, Artificial Sequence
  Synthetic
ugauuuagggcaucuggugg

SEQ ID NO: 597082 - RNA, 21 nt, Artificial Sequence
  Synthetic
augauuuagggcaucuggugg

SEQ ID NO: 597083 - RNA, 22 nt, Artificial Sequence
  Synthetic
gaugauuuagggcaucuggugg

SEQ ID NO: 597084 - RNA, 23 nt, Artificial Sequence
  Synthetic
agaugauuuagggcaucuggugg

SEQ ID NO: 597085 - RNA, 24 nt, Artificial Sequence
  Synthetic
gagaugauuuagggcaucuggugg

SEQ ID NO: 597086 - RNA, 18 nt, Artificial Sequence
  Synthetic
uucuagauacaguggugg

SEQ ID NO: 597087 - RNA, 19 nt, Artificial Sequence
  Synthetic
guucuagauacaguggugg

SEQ ID NO: 597088 - RNA, 20 nt, Artificial Sequence
  Synthetic
aguucuagauacaguggugg

SEQ ID NO: 597089 - RNA, 21 nt, Artificial Sequence
  Synthetic
gaguucuagauacaguggugg

SEQ ID NO: 597090 - RNA, 22 nt, Artificial Sequence
  Synthetic
ggaguucuagauacaguggugg

SEQ ID NO: 597091 - RNA, 23 nt, Artificial Sequence
  Synthetic
aggaguucuagauacaguggugg

SEQ ID NO: 597092 - RNA, 24 nt, Artificial Sequence
  Synthetic
uaggaguucuagauacaguggugg

SEQ ID NO: 597093 - RNA, 18 nt, Artificial Sequence
  Synthetic
guugaauacgaguggugg

SEQ ID NO: 597094 - RNA, 19 nt, Artificial Sequence
  Synthetic
uguugaauacgaguggugg

SEQ ID NO: 597095 - RNA, 20 nt, Artificial Sequence
  Synthetic
auguugaauacgaguggugg

SEQ ID NO: 597096 - RNA, 21 nt, Artificial Sequence
  Synthetic
uauguugaauacgaguggugg

SEQ ID NO: 597097 - RNA, 22 nt, Artificial Sequence
  Synthetic
uuauguugaauacgaguggugg

SEQ ID NO: 597098 - RNA, 23 nt, Artificial Sequence
  Synthetic
auuauguugaauacgaguggugg

SEQ ID NO: 597099 - RNA, 24 nt, Artificial Sequence
  Synthetic
uauuauguugaauacgaguggugg

SEQ ID NO: 597100 - RNA, 18 nt, Artificial Sequence
  Synthetic
uuugggagaggguggugg

SEQ ID NO: 597101 - RNA, 19 nt, Artificial Sequence
  Synthetic
cuuugggagaggguggugg

SEQ ID NO: 597102 - RNA, 20 nt, Artificial Sequence
  Synthetic
ucuuugggagaggguggugg

SEQ ID NO: 597103 - RNA, 21 nt, Artificial Sequence
  Synthetic
aucuuugggagaggguggugg

SEQ ID NO: 597104 - RNA, 22 nt, Artificial Sequence
  Synthetic
uaucuuugggagaggguggugg

SEQ ID NO: 597105 - RNA, 23 nt, Artificial Sequence
  Synthetic
uuaucuuugggagaggguggugg

SEQ ID NO: 597106 - RNA, 24 nt, Artificial Sequence
  Synthetic
cuuaucuuugggagaggguggugg

SEQ ID NO: 597107 - RNA, 18 nt, Artificial Sequence
  Synthetic
cuccuuuugggguggugg

SEQ ID NO: 597108 - RNA, 19 nt, Artificial Sequence
  Synthetic
ucuccuuuugggguggugg

SEQ ID NO: 597109 - RNA, 20 nt, Artificial Sequence
  Synthetic
cucuccuuuugggguggugg

SEQ ID NO: 597110 - RNA, 21 nt, Artificial Sequence
  Synthetic
ucucuccuuuugggguggugg

SEQ ID NO: 597111 - RNA, 22 nt, Artificial Sequence
  Synthetic
aucucuccuuuugggguggugg

SEQ ID NO: 597112 - RNA, 23 nt, Artificial Sequence
  Synthetic
aaucucuccuuuugggguggugg

SEQ ID NO: 597113 - RNA, 24 nt, Artificial Sequence
  Synthetic
aaaucucuccuuuugggguggugg

SEQ ID NO: 597114 - RNA, 18 nt, Artificial Sequence
  Synthetic
aucuguauaugguggugg

SEQ ID NO: 597115 - RNA, 19 nt, Artificial Sequence
  Synthetic
uaucuguauaugguggugg

SEQ ID NO: 597116 - RNA, 20 nt, Artificial Sequence
  Synthetic
auaucuguauaugguggugg

SEQ ID NO: 597117 - RNA, 21 nt, Artificial Sequence
  Synthetic
uauaucuguauaugguggugg

SEQ ID NO: 597118 - RNA, 22 nt, Artificial Sequence
  Synthetic
guauaucuguauaugguggugg

SEQ ID NO: 597119 - RNA, 23 nt, Artificial Sequence
  Synthetic
uguauaucuguauaugguggugg

SEQ ID NO: 597120 - RNA, 24 nt, Artificial Sequence
  Synthetic
cuguauaucuguauaugguggugg

SEQ ID NO: 597121 - RNA, 18 nt, Artificial Sequence
  Synthetic
aagauuggggguuggugg

SEQ ID NO: 597122 - RNA, 19 nt, Artificial Sequence
  Synthetic
caagauuggggguuggugg

SEQ ID NO: 597123 - RNA, 20 nt, Artificial Sequence
  Synthetic
ucaagauuggggguuggugg

SEQ ID NO: 597124 - RNA, 21 nt, Artificial Sequence
  Synthetic
uucaagauuggggguuggugg

SEQ ID NO: 597125 - RNA, 22 nt, Artificial Sequence
  Synthetic
uuucaagauuggggguuggugg

SEQ ID NO: 597126 - RNA, 23 nt, Artificial Sequence
  Synthetic
cuuucaagauuggggguuggugg

SEQ ID NO: 597127 - RNA, 24 nt, Artificial Sequence
  Synthetic
gcuuucaagauuggggguuggugg

SEQ ID NO: 597128 - RNA, 18 nt, Artificial Sequence
  Synthetic
aauucccaauguuggugg

SEQ ID NO: 597129 - RNA, 19 nt, Artificial Sequence
  Synthetic
uaauucccaauguuggugg

SEQ ID NO: 597130 - RNA, 20 nt, Artificial Sequence
  Synthetic
auaauucccaauguuggugg

SEQ ID NO: 597131 - RNA, 21 nt, Artificial Sequence
  Synthetic
uauaauucccaauguuggugg

SEQ ID NO: 597132 - RNA, 22 nt, Artificial Sequence
  Synthetic
auauaauucccaauguuggugg

SEQ ID NO: 597133 - RNA, 23 nt, Artificial Sequence
  Synthetic
aauauaauucccaauguuggugg

SEQ ID NO: 597134 - RNA, 24 nt, Artificial Sequence
  Synthetic
aaauauaauucccaauguuggugg

SEQ ID NO: 597135 - RNA, 18 nt, Artificial Sequence
  Synthetic
uggcaaaaaaaaaugugg

SEQ ID NO: 597136 - RNA, 19 nt, Artificial Sequence
  Synthetic
auggcaaaaaaaaaugugg

SEQ ID NO: 597137 - RNA, 20 nt, Artificial Sequence
  Synthetic
cauggcaaaaaaaaaugugg

SEQ ID NO: 597138 - RNA, 21 nt, Artificial Sequence
  Synthetic
ccauggcaaaaaaaaaugugg

SEQ ID NO: 597139 - RNA, 22 nt, Artificial Sequence
  Synthetic
cccauggcaaaaaaaaaugugg

SEQ ID NO: 597140 - RNA, 23 nt, Artificial Sequence
  Synthetic
ccccauggcaaaaaaaaaugugg

SEQ ID NO: 597141 - RNA, 24 nt, Artificial Sequence
  Synthetic
uccccauggcaaaaaaaaaugugg

SEQ ID NO: 597142 - RNA, 18 nt, Artificial Sequence
  Synthetic
ucggugaaaaaaaugugg

SEQ ID NO: 597143 - RNA, 19 nt, Artificial Sequence
  Synthetic
aucggugaaaaaaaugugg

SEQ ID NO: 597144 - RNA, 20 nt, Artificial Sequence
  Synthetic
uaucggugaaaaaaaugugg

SEQ ID NO: 597145 - RNA, 21 nt, Artificial Sequence
  Synthetic
auaucggugaaaaaaaugugg

SEQ ID NO: 597146 - RNA, 22 nt, Artificial Sequence
  Synthetic
aauaucggugaaaaaaaugugg

SEQ ID NO: 597147 - RNA, 23 nt, Artificial Sequence
  Synthetic
caauaucggugaaaaaaaugugg

SEQ ID NO: 597148 - RNA, 24 nt, Artificial Sequence
  Synthetic
ucaauaucggugaaaaaaaugugg

SEQ ID NO: 597149 - RNA, 18 nt, Artificial Sequence
  Synthetic
uagaaacauaaaaugugg

SEQ ID NO: 597150 - RNA, 19 nt, Artificial Sequence
  Synthetic
uuagaaacauaaaaugugg

SEQ ID NO: 597151 - RNA, 20 nt, Artificial Sequence
  Synthetic
guuagaaacauaaaaugugg

SEQ ID NO: 597152 - RNA, 21 nt, Artificial Sequence
  Synthetic
uguuagaaacauaaaaugugg

SEQ ID NO: 597153 - RNA, 22 nt, Artificial Sequence
  Synthetic
auguuagaaacauaaaaugugg

SEQ ID NO: 597154 - RNA, 23 nt, Artificial Sequence
  Synthetic
gauguuagaaacauaaaaugugg

SEQ ID NO: 597155 - RNA, 24 nt, Artificial Sequence
  Synthetic
ugauguuagaaacauaaaaugugg

SEQ ID NO: 597156 - RNA, 18 nt, Artificial Sequence
  Synthetic
gcugacuggcaaaugugg

SEQ ID NO: 597157 - RNA, 19 nt, Artificial Sequence
  Synthetic
ggcugacuggcaaaugugg

SEQ ID NO: 597158 - RNA, 20 nt, Artificial Sequence
  Synthetic
aggcugacuggcaaaugugg

SEQ ID NO: 597159 - RNA, 21 nt, Artificial Sequence
  Synthetic
caggcugacuggcaaaugugg

SEQ ID NO: 597160 - RNA, 22 nt, Artificial Sequence
  Synthetic
ccaggcugacuggcaaaugugg

SEQ ID NO: 597161 - RNA, 23 nt, Artificial Sequence
  Synthetic
accaggcugacuggcaaaugugg

SEQ ID NO: 597162 - RNA, 24 nt, Artificial Sequence
  Synthetic
caccaggcugacuggcaaaugugg

SEQ ID NO: 597163 - RNA, 18 nt, Artificial Sequence
  Synthetic
uuacccuccacaaugugg

SEQ ID NO: 597164 - RNA, 19 nt, Artificial Sequence
  Synthetic
auuacccuccacaaugugg

SEQ ID NO: 597165 - RNA, 20 nt, Artificial Sequence
  Synthetic
gauuacccuccacaaugugg

SEQ ID NO: 597166 - RNA, 21 nt, Artificial Sequence
  Synthetic
agauuacccuccacaaugugg

SEQ ID NO: 597167 - RNA, 22 nt, Artificial Sequence
  Synthetic
cagauuacccuccacaaugugg

SEQ ID NO: 597168 - RNA, 23 nt, Artificial Sequence
  Synthetic
gcagauuacccuccacaaugugg

SEQ ID NO: 597169 - RNA, 24 nt, Artificial Sequence
  Synthetic
agcagauuacccuccacaaugugg

SEQ ID NO: 597170 - RNA, 18 nt, Artificial Sequence
  Synthetic
guuaugacuggaaugugg

SEQ ID NO: 597171 - RNA, 19 nt, Artificial Sequence
  Synthetic
aguuaugacuggaaugugg

SEQ ID NO: 597172 - RNA, 20 nt, Artificial Sequence
  Synthetic
uaguuaugacuggaaugugg

SEQ ID NO: 597173 - RNA, 21 nt, Artificial Sequence
  Synthetic
cuaguuaugacuggaaugugg

SEQ ID NO: 597174 - RNA, 22 nt, Artificial Sequence
  Synthetic
ccuaguuaugacuggaaugugg

SEQ ID NO: 597175 - RNA, 23 nt, Artificial Sequence
  Synthetic
uccuaguuaugacuggaaugugg

SEQ ID NO: 597176 - RNA, 24 nt, Artificial Sequence
  Synthetic
auccuaguuaugacuggaaugugg

SEQ ID NO: 597177 - RNA, 18 nt, Artificial Sequence
  Synthetic
ccaucuugcaacaugugg

SEQ ID NO: 597178 - RNA, 19 nt, Artificial Sequence
  Synthetic
uccaucuugcaacaugugg

SEQ ID NO: 597179 - RNA, 20 nt, Artificial Sequence
  Synthetic
cuccaucuugcaacaugugg

SEQ ID NO: 597180 - RNA, 21 nt, Artificial Sequence
  Synthetic
gcuccaucuugcaacaugugg

SEQ ID NO: 597181 - RNA, 22 nt, Artificial Sequence
  Synthetic
agcuccaucuugcaacaugugg

SEQ ID NO: 597182 - RNA, 23 nt, Artificial Sequence
  Synthetic
gagcuccaucuugcaacaugugg

SEQ ID NO: 597183 - RNA, 24 nt, Artificial Sequence
  Synthetic
agagcuccaucuugcaacaugugg

SEQ ID NO: 597184 - RNA, 18 nt, Artificial Sequence
  Synthetic
aaaaacuugaacaugugg

SEQ ID NO: 597185 - RNA, 19 nt, Artificial Sequence
  Synthetic
gaaaaacuugaacaugugg

SEQ ID NO: 597186 - RNA, 20 nt, Artificial Sequence
  Synthetic
ggaaaaacuugaacaugugg

SEQ ID NO: 597187 - RNA, 21 nt, Artificial Sequence
  Synthetic
gggaaaaacuugaacaugugg

SEQ ID NO: 597188 - RNA, 22 nt, Artificial Sequence
  Synthetic
ugggaaaaacuugaacaugugg

SEQ ID NO: 597189 - RNA, 23 nt, Artificial Sequence
  Synthetic
gugggaaaaacuugaacaugugg

SEQ ID NO: 597190 - RNA, 24 nt, Artificial Sequence
  Synthetic
agugggaaaaacuugaacaugugg

SEQ ID NO: 597191 - RNA, 18 nt, Artificial Sequence
  Synthetic
cuuaggagguagaugugg

SEQ ID NO: 597192 - RNA, 19 nt, Artificial Sequence
  Synthetic
ccuuaggagguagaugugg

SEQ ID NO: 597193 - RNA, 20 nt, Artificial Sequence
  Synthetic
accuuaggagguagaugugg

SEQ ID NO: 597194 - RNA, 21 nt, Artificial Sequence
  Synthetic
caccuuaggagguagaugugg

SEQ ID NO: 597195 - RNA, 22 nt, Artificial Sequence
  Synthetic
gcaccuuaggagguagaugugg

SEQ ID NO: 597196 - RNA, 23 nt, Artificial Sequence
  Synthetic
agcaccuuaggagguagaugugg

SEQ ID NO: 597197 - RNA, 24 nt, Artificial Sequence
  Synthetic
cagcaccuuaggagguagaugugg

SEQ ID NO: 597198 - RNA, 18 nt, Artificial Sequence
  Synthetic
cugugugaugggaugugg

SEQ ID NO: 597199 - RNA, 19 nt, Artificial Sequence
  Synthetic
ucugugugaugggaugugg

SEQ ID NO: 597200 - RNA, 20 nt, Artificial Sequence
  Synthetic
uucugugugaugggaugugg

SEQ ID NO: 597201 - RNA, 21 nt, Artificial Sequence
  Synthetic
guucugugugaugggaugugg

SEQ ID NO: 597202 - RNA, 22 nt, Artificial Sequence
  Synthetic
aguucugugugaugggaugugg

SEQ ID NO: 597203 - RNA, 23 nt, Artificial Sequence
  Synthetic
aaguucugugugaugggaugugg

SEQ ID NO: 597204 - RNA, 24 nt, Artificial Sequence
  Synthetic
caaguucugugugaugggaugugg

SEQ ID NO: 597205 - RNA, 18 nt, Artificial Sequence
  Synthetic
ccaggcguguggaugugg

SEQ ID NO: 597206 - RNA, 19 nt, Artificial Sequence
  Synthetic
gccaggcguguggaugugg

SEQ ID NO: 597207 - RNA, 20 nt, Artificial Sequence
  Synthetic
agccaggcguguggaugugg

SEQ ID NO: 597208 - RNA, 21 nt, Artificial Sequence
  Synthetic
uagccaggcguguggaugugg

SEQ ID NO: 597209 - RNA, 22 nt, Artificial Sequence
  Synthetic
guagccaggcguguggaugugg

SEQ ID NO: 597210 - RNA, 23 nt, Artificial Sequence
  Synthetic
aguagccaggcguguggaugugg

SEQ ID NO: 597211 - RNA, 24 nt, Artificial Sequence
  Synthetic
caguagccaggcguguggaugugg

SEQ ID NO: 597212 - RNA, 18 nt, Artificial Sequence
  Synthetic
cccuuuaauucuaugugg

SEQ ID NO: 597213 - RNA, 19 nt, Artificial Sequence
  Synthetic
ucccuuuaauucuaugugg

SEQ ID NO: 597214 - RNA, 20 nt, Artificial Sequence
  Synthetic
cucccuuuaauucuaugugg

SEQ ID NO: 597215 - RNA, 21 nt, Artificial Sequence
  Synthetic
ucucccuuuaauucuaugugg

SEQ ID NO: 597216 - RNA, 22 nt, Artificial Sequence
  Synthetic
aucucccuuuaauucuaugugg

SEQ ID NO: 597217 - RNA, 23 nt, Artificial Sequence
  Synthetic
aaucucccuuuaauucuaugugg

SEQ ID NO: 597218 - RNA, 24 nt, Artificial Sequence
  Synthetic
gaaucucccuuuaauucuaugugg

SEQ ID NO: 597219 - RNA, 18 nt, Artificial Sequence
  Synthetic
gaaaggauucuuaugugg

SEQ ID NO: 597220 - RNA, 19 nt, Artificial Sequence
  Synthetic
agaaaggauucuuaugugg

SEQ ID NO: 597221 - RNA, 20 nt, Artificial Sequence
  Synthetic
gagaaaggauucuuaugugg

SEQ ID NO: 597222 - RNA, 21 nt, Artificial Sequence
  Synthetic
agagaaaggauucuuaugugg

SEQ ID NO: 597223 - RNA, 22 nt, Artificial Sequence
  Synthetic
aagagaaaggauucuuaugugg

SEQ ID NO: 597224 - RNA, 23 nt, Artificial Sequence
  Synthetic
aaagagaaaggauucuuaugugg

SEQ ID NO: 597225 - RNA, 24 nt, Artificial Sequence
  Synthetic
caaagagaaaggauucuuaugugg

SEQ ID NO: 597226 - RNA, 18 nt, Artificial Sequence
  Synthetic
agaguuguuguuaugugg

SEQ ID NO: 597227 - RNA, 19 nt, Artificial Sequence
  Synthetic
uagaguuguuguuaugugg

SEQ ID NO: 597228 - RNA, 20 nt, Artificial Sequence
  Synthetic
auagaguuguuguuaugugg

SEQ ID NO: 597229 - RNA, 21 nt, Artificial Sequence
  Synthetic
cauagaguuguuguuaugugg

SEQ ID NO: 597230 - RNA, 22 nt, Artificial Sequence
  Synthetic
ucauagaguuguuguuaugugg

SEQ ID NO: 597231 - RNA, 23 nt, Artificial Sequence
  Synthetic
aucauagaguuguuguuaugugg

SEQ ID NO: 597232 - RNA, 24 nt, Artificial Sequence
  Synthetic
aaucauagaguuguuguuaugugg

SEQ ID NO: 597233 - RNA, 18 nt, Artificial Sequence
  Synthetic
augaauaagagacugugg

SEQ ID NO: 597234 - RNA, 19 nt, Artificial Sequence
  Synthetic
uaugaauaagagacugugg

SEQ ID NO: 597235 - RNA, 20 nt, Artificial Sequence
  Synthetic
guaugaauaagagacugugg

SEQ ID NO: 597236 - RNA, 21 nt, Artificial Sequence
  Synthetic
aguaugaauaagagacugugg

SEQ ID NO: 597237 - RNA, 22 nt, Artificial Sequence
  Synthetic
uaguaugaauaagagacugugg

SEQ ID NO: 597238 - RNA, 23 nt, Artificial Sequence
  Synthetic
uuaguaugaauaagagacugugg

SEQ ID NO: 597239 - RNA, 24 nt, Artificial Sequence
  Synthetic
uuuaguaugaauaagagacugugg

SEQ ID NO: 597240 - RNA, 18 nt, Artificial Sequence
  Synthetic
gaacugaccggacugugg

SEQ ID NO: 597241 - RNA, 19 nt, Artificial Sequence
  Synthetic
agaacugaccggacugugg

SEQ ID NO: 597242 - RNA, 20 nt, Artificial Sequence
  Synthetic
uagaacugaccggacugugg

SEQ ID NO: 597243 - RNA, 21 nt, Artificial Sequence
  Synthetic
guagaacugaccggacugugg

SEQ ID NO: 597244 - RNA, 22 nt, Artificial Sequence
  Synthetic
aguagaacugaccggacugugg

SEQ ID NO: 597245 - RNA, 23 nt, Artificial Sequence
  Synthetic
aaguagaacugaccggacugugg

SEQ ID NO: 597246 - RNA, 24 nt, Artificial Sequence
  Synthetic
aaaguagaacugaccggacugugg

SEQ ID NO: 597247 - RNA, 18 nt, Artificial Sequence
  Synthetic
aaacagaaaauacugugg

SEQ ID NO: 597248 - RNA, 19 nt, Artificial Sequence
  Synthetic
gaaacagaaaauacugugg

SEQ ID NO: 597249 - RNA, 20 nt, Artificial Sequence
  Synthetic
agaaacagaaaauacugugg

SEQ ID NO: 597250 - RNA, 21 nt, Artificial Sequence
  Synthetic
cagaaacagaaaauacugugg

SEQ ID NO: 597251 - RNA, 22 nt, Artificial Sequence
  Synthetic
acagaaacagaaaauacugugg

SEQ ID NO: 597252 - RNA, 23 nt, Artificial Sequence
  Synthetic
cacagaaacagaaaauacugugg

SEQ ID NO: 597253 - RNA, 24 nt, Artificial Sequence
  Synthetic
acacagaaacagaaaauacugugg

SEQ ID NO: 597254 - RNA, 18 nt, Artificial Sequence
  Synthetic
caguuuauuucccugugg

SEQ ID NO: 597255 - RNA, 19 nt, Artificial Sequence
  Synthetic
ucaguuuauuucccugugg

SEQ ID NO: 597256 - RNA, 20 nt, Artificial Sequence
  Synthetic
cucaguuuauuucccugugg

SEQ ID NO: 597257 - RNA, 21 nt, Artificial Sequence
  Synthetic
acucaguuuauuucccugugg

SEQ ID NO: 597258 - RNA, 22 nt, Artificial Sequence
  Synthetic
cacucaguuuauuucccugugg

SEQ ID NO: 597259 - RNA, 23 nt, Artificial Sequence
  Synthetic
acacucaguuuauuucccugugg

SEQ ID NO: 597260 - RNA, 24 nt, Artificial Sequence
  Synthetic
uacacucaguuuauuucccugugg

SEQ ID NO: 597261 - RNA, 18 nt, Artificial Sequence
  Synthetic
ccaggggccugccugugg

SEQ ID NO: 597262 - RNA, 19 nt, Artificial Sequence
  Synthetic
gccaggggccugccugugg

SEQ ID NO: 597263 - RNA, 20 nt, Artificial Sequence
  Synthetic
agccaggggccugccugugg

SEQ ID NO: 597264 - RNA, 21 nt, Artificial Sequence
  Synthetic
cagccaggggccugccugugg

SEQ ID NO: 597265 - RNA, 22 nt, Artificial Sequence
  Synthetic
ucagccaggggccugccugugg

SEQ ID NO: 597266 - RNA, 23 nt, Artificial Sequence
  Synthetic
uucagccaggggccugccugugg

SEQ ID NO: 597267 - RNA, 24 nt, Artificial Sequence
  Synthetic
auucagccaggggccugccugugg

SEQ ID NO: 597268 - RNA, 18 nt, Artificial Sequence
  Synthetic
uuaaccuggcaucugugg

SEQ ID NO: 597269 - RNA, 19 nt, Artificial Sequence
  Synthetic
uuuaaccuggcaucugugg

SEQ ID NO: 597270 - RNA, 20 nt, Artificial Sequence
  Synthetic
cuuuaaccuggcaucugugg

SEQ ID NO: 597271 - RNA, 21 nt, Artificial Sequence
  Synthetic
ucuuuaaccuggcaucugugg

SEQ ID NO: 597272 - RNA, 22 nt, Artificial Sequence
  Synthetic
gucuuuaaccuggcaucugugg

SEQ ID NO: 597273 - RNA, 23 nt, Artificial Sequence
  Synthetic
ggucuuuaaccuggcaucugugg

SEQ ID NO: 597274 - RNA, 24 nt, Artificial Sequence
  Synthetic
gggucuuuaaccuggcaucugugg

SEQ ID NO: 597275 - RNA, 18 nt, Artificial Sequence
  Synthetic
cccuggaaucaucugugg

SEQ ID NO: 597276 - RNA, 19 nt, Artificial Sequence
  Synthetic
ccccuggaaucaucugugg

SEQ ID NO: 597277 - RNA, 20 nt, Artificial Sequence
  Synthetic
uccccuggaaucaucugugg

SEQ ID NO: 597278 - RNA, 21 nt, Artificial Sequence
  Synthetic
uuccccuggaaucaucugugg

SEQ ID NO: 597279 - RNA, 22 nt, Artificial Sequence
  Synthetic
auuccccuggaaucaucugugg

SEQ ID NO: 597280 - RNA, 23 nt, Artificial Sequence
  Synthetic
aauuccccuggaaucaucugugg

SEQ ID NO: 597281 - RNA, 24 nt, Artificial Sequence
  Synthetic
aaauuccccuggaaucaucugugg

SEQ ID NO: 597282 - RNA, 18 nt, Artificial Sequence
  Synthetic
agacaggcagaucugugg

SEQ ID NO: 597283 - RNA, 19 nt, Artificial Sequence
  Synthetic
uagacaggcagaucugugg

SEQ ID NO: 597284 - RNA, 20 nt, Artificial Sequence
  Synthetic
cuagacaggcagaucugugg

SEQ ID NO: 597285 - RNA, 21 nt, Artificial Sequence
  Synthetic
ucuagacaggcagaucugugg

SEQ ID NO: 597286 - RNA, 22 nt, Artificial Sequence
  Synthetic
cucuagacaggcagaucugugg

SEQ ID NO: 597287 - RNA, 23 nt, Artificial Sequence
  Synthetic
ucucuagacaggcagaucugugg

SEQ ID NO: 597288 - RNA, 24 nt, Artificial Sequence
  Synthetic
aucucuagacaggcagaucugugg

SEQ ID NO: 597289 - RNA, 18 nt, Artificial Sequence
  Synthetic
gcaguuuccacucugugg

SEQ ID NO: 597290 - RNA, 19 nt, Artificial Sequence
  Synthetic
agcaguuuccacucugugg

SEQ ID NO: 597291 - RNA, 20 nt, Artificial Sequence
  Synthetic
aagcaguuuccacucugugg

SEQ ID NO: 597292 - RNA, 21 nt, Artificial Sequence
  Synthetic
aaagcaguuuccacucugugg

SEQ ID NO: 597293 - RNA, 22 nt, Artificial Sequence
  Synthetic
caaagcaguuuccacucugugg

SEQ ID NO: 597294 - RNA, 23 nt, Artificial Sequence
  Synthetic
ccaaagcaguuuccacucugugg

SEQ ID NO: 597295 - RNA, 24 nt, Artificial Sequence
  Synthetic
cccaaagcaguuuccacucugugg

SEQ ID NO: 597296 - RNA, 18 nt, Artificial Sequence
  Synthetic
augcagaauguucugugg

SEQ ID NO: 597297 - RNA, 19 nt, Artificial Sequence
  Synthetic
aaugcagaauguucugugg

SEQ ID NO: 597298 - RNA, 20 nt, Artificial Sequence
  Synthetic
uaaugcagaauguucugugg

SEQ ID NO: 597299 - RNA, 21 nt, Artificial Sequence
  Synthetic
uuaaugcagaauguucugugg

SEQ ID NO: 597300 - RNA, 22 nt, Artificial Sequence
  Synthetic
auuaaugcagaauguucugugg

SEQ ID NO: 597301 - RNA, 23 nt, Artificial Sequence
  Synthetic
aauuaaugcagaauguucugugg

SEQ ID NO: 597302 - RNA, 24 nt, Artificial Sequence
  Synthetic
aaauuaaugcagaauguucugugg

SEQ ID NO: 597303 - RNA, 18 nt, Artificial Sequence
  Synthetic
ccugagucagaagugugg

SEQ ID NO: 597304 - RNA, 19 nt, Artificial Sequence
  Synthetic
accugagucagaagugugg

SEQ ID NO: 597305 - RNA, 20 nt, Artificial Sequence
  Synthetic
caccugagucagaagugugg

SEQ ID NO: 597306 - RNA, 21 nt, Artificial Sequence
  Synthetic
acaccugagucagaagugugg

SEQ ID NO: 597307 - RNA, 22 nt, Artificial Sequence
  Synthetic
aacaccugagucagaagugugg

SEQ ID NO: 597308 - RNA, 23 nt, Artificial Sequence
  Synthetic
aaacaccugagucagaagugugg

SEQ ID NO: 597309 - RNA, 24 nt, Artificial Sequence
  Synthetic
aaaacaccugagucagaagugugg

SEQ ID NO: 597310 - RNA, 18 nt, Artificial Sequence
  Synthetic
ucggcuaggacagugugg

SEQ ID NO: 597311 - RNA, 19 nt, Artificial Sequence
  Synthetic
cucggcuaggacagugugg

SEQ ID NO: 597312 - RNA, 20 nt, Artificial Sequence
  Synthetic
ccucggcuaggacagugugg

SEQ ID NO: 597313 - RNA, 21 nt, Artificial Sequence
  Synthetic
accucggcuaggacagugugg

SEQ ID NO: 597314 - RNA, 22 nt, Artificial Sequence
  Synthetic
aaccucggcuaggacagugugg

SEQ ID NO: 597315 - RNA, 23 nt, Artificial Sequence
  Synthetic
gaaccucggcuaggacagugugg

SEQ ID NO: 597316 - RNA, 24 nt, Artificial Sequence
  Synthetic
agaaccucggcuaggacagugugg

SEQ ID NO: 597317 - RNA, 18 nt, Artificial Sequence
  Synthetic
guagcaacugcagugugg

SEQ ID NO: 597318 - RNA, 19 nt, Artificial Sequence
  Synthetic
aguagcaacugcagugugg

SEQ ID NO: 597319 - RNA, 20 nt, Artificial Sequence
  Synthetic
caguagcaacugcagugugg

SEQ ID NO: 597320 - RNA, 21 nt, Artificial Sequence
  Synthetic
ucaguagcaacugcagugugg

SEQ ID NO: 597321 - RNA, 22 nt, Artificial Sequence
  Synthetic
cucaguagcaacugcagugugg

SEQ ID NO: 597322 - RNA, 23 nt, Artificial Sequence
  Synthetic
ccucaguagcaacugcagugugg

SEQ ID NO: 597323 - RNA, 24 nt, Artificial Sequence
  Synthetic
gccucaguagcaacugcagugugg

SEQ ID NO: 597324 - RNA, 18 nt, Artificial Sequence
  Synthetic
gcccuuuugagagugugg

SEQ ID NO: 597325 - RNA, 19 nt, Artificial Sequence
  Synthetic
ggcccuuuugagagugugg

SEQ ID NO: 597326 - RNA, 20 nt, Artificial Sequence
  Synthetic
uggcccuuuugagagugugg

SEQ ID NO: 597327 - RNA, 21 nt, Artificial Sequence
  Synthetic
uuggcccuuuugagagugugg

SEQ ID NO: 597328 - RNA, 22 nt, Artificial Sequence
  Synthetic
cuuggcccuuuugagagugugg

SEQ ID NO: 597329 - RNA, 23 nt, Artificial Sequence
  Synthetic
acuuggcccuuuugagagugugg

SEQ ID NO: 597330 - RNA, 24 nt, Artificial Sequence
  Synthetic
aacuuggcccuuuugagagugugg

SEQ ID NO: 597331 - RNA, 18 nt, Artificial Sequence
  Synthetic
uuaagagagaaggugugg

SEQ ID NO: 597332 - RNA, 19 nt, Artificial Sequence
  Synthetic
uuuaagagagaaggugugg

SEQ ID NO: 597333 - RNA, 20 nt, Artificial Sequence
  Synthetic
uuuuaagagagaaggugugg

SEQ ID NO: 597334 - RNA, 21 nt, Artificial Sequence
  Synthetic
guuuuaagagagaaggugugg

SEQ ID NO: 597335 - RNA, 22 nt, Artificial Sequence
  Synthetic
gguuuuaagagagaaggugugg

SEQ ID NO: 597336 - RNA, 23 nt, Artificial Sequence
  Synthetic
ugguuuuaagagagaaggugugg

SEQ ID NO: 597337 - RNA, 24 nt, Artificial Sequence
  Synthetic
gugguuuuaagagagaaggugugg

SEQ ID NO: 597338 - RNA, 18 nt, Artificial Sequence
  Synthetic
cuuagugauagggugugg

SEQ ID NO: 597339 - RNA, 19 nt, Artificial Sequence
  Synthetic
acuuagugauagggugugg

SEQ ID NO: 597340 - RNA, 20 nt, Artificial Sequence
  Synthetic
cacuuagugauagggugugg

SEQ ID NO: 597341 - RNA, 21 nt, Artificial Sequence
  Synthetic
ucacuuagugauagggugugg

SEQ ID NO: 597342 - RNA, 22 nt, Artificial Sequence
  Synthetic
gucacuuagugauagggugugg

SEQ ID NO: 597343 - RNA, 23 nt, Artificial Sequence
  Synthetic
ugucacuuagugauagggugugg

SEQ ID NO: 597344 - RNA, 24 nt, Artificial Sequence
  Synthetic
cugucacuuagugauagggugugg

SEQ ID NO: 597345 - RNA, 18 nt, Artificial Sequence
  Synthetic
gauggaaucugggugugg

SEQ ID NO: 597346 - RNA, 19 nt, Artificial Sequence
  Synthetic
ugauggaaucugggugugg

SEQ ID NO: 597347 - RNA, 20 nt, Artificial Sequence
  Synthetic
augauggaaucugggugugg

SEQ ID NO: 597348 - RNA, 21 nt, Artificial Sequence
  Synthetic
uaugauggaaucugggugugg

SEQ ID NO: 597349 - RNA, 22 nt, Artificial Sequence
  Synthetic
guaugauggaaucugggugugg

SEQ ID NO: 597350 - RNA, 23 nt, Artificial Sequence
  Synthetic
uguaugauggaaucugggugugg

SEQ ID NO: 597351 - RNA, 24 nt, Artificial Sequence
  Synthetic
uuguaugauggaaucugggugugg

SEQ ID NO: 597352 - RNA, 18 nt, Artificial Sequence
  Synthetic
cccaaugauugggugugg

SEQ ID NO: 597353 - RNA, 19 nt, Artificial Sequence
  Synthetic
acccaaugauugggugugg

SEQ ID NO: 597354 - RNA, 20 nt, Artificial Sequence
  Synthetic
cacccaaugauugggugugg

SEQ ID NO: 597355 - RNA, 21 nt, Artificial Sequence
  Synthetic
ucacccaaugauugggugugg

SEQ ID NO: 597356 - RNA, 22 nt, Artificial Sequence
  Synthetic
cucacccaaugauugggugugg

SEQ ID NO: 597357 - RNA, 23 nt, Artificial Sequence
  Synthetic
ccucacccaaugauugggugugg

SEQ ID NO: 597358 - RNA, 24 nt, Artificial Sequence
  Synthetic
uccucacccaaugauugggugugg

SEQ ID NO: 597359 - RNA, 18 nt, Artificial Sequence
  Synthetic
uaaugugugguggugugg

SEQ ID NO: 597360 - RNA, 19 nt, Artificial Sequence
  Synthetic
auaaugugugguggugugg

SEQ ID NO: 597361 - RNA, 20 nt, Artificial Sequence
  Synthetic
aauaaugugugguggugugg

SEQ ID NO: 597362 - RNA, 21 nt, Artificial Sequence
  Synthetic
uaauaaugugugguggugugg

SEQ ID NO: 597363 - RNA, 22 nt, Artificial Sequence
  Synthetic
auaauaaugugugguggugugg

SEQ ID NO: 597364 - RNA, 23 nt, Artificial Sequence
  Synthetic
uauaauaaugugugguggugugg

SEQ ID NO: 597365 - RNA, 24 nt, Artificial Sequence
  Synthetic
auauaauaaugugugguggugugg

SEQ ID NO: 597366 - RNA, 18 nt, Artificial Sequence
  Synthetic
gggagagaaacugugugg

SEQ ID NO: 597367 - RNA, 19 nt, Artificial Sequence
  Synthetic
ggggagagaaacugugugg

SEQ ID NO: 597368 - RNA, 20 nt, Artificial Sequence
  Synthetic
uggggagagaaacugugugg

SEQ ID NO: 597369 - RNA, 21 nt, Artificial Sequence
  Synthetic
auggggagagaaacugugugg

SEQ ID NO: 597370 - RNA, 22 nt, Artificial Sequence
  Synthetic
cauggggagagaaacugugugg

SEQ ID NO: 597371 - RNA, 23 nt, Artificial Sequence
  Synthetic
acauggggagagaaacugugugg

SEQ ID NO: 597372 - RNA, 24 nt, Artificial Sequence
  Synthetic
cacauggggagagaaacugugugg

SEQ ID NO: 597373 - RNA, 18 nt, Artificial Sequence
  Synthetic
cagccuuucccugugugg

SEQ ID NO: 597374 - RNA, 19 nt, Artificial Sequence
  Synthetic
gcagccuuucccugugugg

SEQ ID NO: 597375 - RNA, 20 nt, Artificial Sequence
  Synthetic
ggcagccuuucccugugugg

SEQ ID NO: 597376 - RNA, 21 nt, Artificial Sequence
  Synthetic
uggcagccuuucccugugugg

SEQ ID NO: 597377 - RNA, 22 nt, Artificial Sequence
  Synthetic
cuggcagccuuucccugugugg

SEQ ID NO: 597378 - RNA, 23 nt, Artificial Sequence
  Synthetic
ccuggcagccuuucccugugugg

SEQ ID NO: 597379 - RNA, 24 nt, Artificial Sequence
  Synthetic
uccuggcagccuuucccugugugg

SEQ ID NO: 597380 - RNA, 18 nt, Artificial Sequence
  Synthetic
gucugcauuccugugugg

SEQ ID NO: 597381 - RNA, 19 nt, Artificial Sequence
  Synthetic
ggucugcauuccugugugg

SEQ ID NO: 597382 - RNA, 20 nt, Artificial Sequence
  Synthetic
uggucugcauuccugugugg

SEQ ID NO: 597383 - RNA, 21 nt, Artificial Sequence
  Synthetic
uuggucugcauuccugugugg

SEQ ID NO: 597384 - RNA, 22 nt, Artificial Sequence
  Synthetic
uuuggucugcauuccugugugg

SEQ ID NO: 597385 - RNA, 23 nt, Artificial Sequence
  Synthetic
cuuuggucugcauuccugugugg

SEQ ID NO: 597386 - RNA, 24 nt, Artificial Sequence
  Synthetic
gcuuuggucugcauuccugugugg

SEQ ID NO: 597387 - RNA, 18 nt, Artificial Sequence
  Synthetic
caguaguugagugugugg

SEQ ID NO: 597388 - RNA, 19 nt, Artificial Sequence
  Synthetic
ccaguaguugagugugugg

SEQ ID NO: 597389 - RNA, 20 nt, Artificial Sequence
  Synthetic
cccaguaguugagugugugg

SEQ ID NO: 597390 - RNA, 21 nt, Artificial Sequence
  Synthetic
gcccaguaguugagugugugg

SEQ ID NO: 597391 - RNA, 22 nt, Artificial Sequence
  Synthetic
ggcccaguaguugagugugugg

SEQ ID NO: 597392 - RNA, 23 nt, Artificial Sequence
  Synthetic
uggcccaguaguugagugugugg

SEQ ID NO: 597393 - RNA, 24 nt, Artificial Sequence
  Synthetic
guggcccaguaguugagugugugg

SEQ ID NO: 597394 - RNA, 18 nt, Artificial Sequence
  Synthetic
auagaagauagugugugg

SEQ ID NO: 597395 - RNA, 19 nt, Artificial Sequence
  Synthetic
aauagaagauagugugugg

SEQ ID NO: 597396 - RNA, 20 nt, Artificial Sequence
  Synthetic
aaauagaagauagugugugg

SEQ ID NO: 597397 - RNA, 21 nt, Artificial Sequence
  Synthetic
gaaauagaagauagugugugg

SEQ ID NO: 597398 - RNA, 22 nt, Artificial Sequence
  Synthetic
ugaaauagaagauagugugugg

SEQ ID NO: 597399 - RNA, 23 nt, Artificial Sequence
  Synthetic
gugaaauagaagauagugugugg

SEQ ID NO: 597400 - RNA, 24 nt, Artificial Sequence
  Synthetic
ugugaaauagaagauagugugugg

SEQ ID NO: 597401 - RNA, 18 nt, Artificial Sequence
  Synthetic
gugugugugugugugugg

SEQ ID NO: 597402 - RNA, 19 nt, Artificial Sequence
  Synthetic
ugugugugugugugugugg

SEQ ID NO: 597403 - RNA, 20 nt, Artificial Sequence
  Synthetic
gugugugugugugugugugg

SEQ ID NO: 597404 - RNA, 21 nt, Artificial Sequence
  Synthetic
ggugugugugugugugugugg

SEQ ID NO: 597405 - RNA, 22 nt, Artificial Sequence
  Synthetic
uggugugugugugugugugugg

SEQ ID NO: 597406 - RNA, 23 nt, Artificial Sequence
  Synthetic
auggugugugugugugugugugg

SEQ ID NO: 597407 - RNA, 24 nt, Artificial Sequence
  Synthetic
gauggugugugugugugugugugg

SEQ ID NO: 597408 - RNA, 18 nt, Artificial Sequence
  Synthetic
accauucuuuuugugugg

SEQ ID NO: 597409 - RNA, 19 nt, Artificial Sequence
  Synthetic
caccauucuuuuugugugg

SEQ ID NO: 597410 - RNA, 20 nt, Artificial Sequence
  Synthetic
gcaccauucuuuuugugugg

SEQ ID NO: 597411 - RNA, 21 nt, Artificial Sequence
  Synthetic
agcaccauucuuuuugugugg

SEQ ID NO: 597412 - RNA, 22 nt, Artificial Sequence
  Synthetic
aagcaccauucuuuuugugugg

SEQ ID NO: 597413 - RNA, 23 nt, Artificial Sequence
  Synthetic
uaagcaccauucuuuuugugugg

SEQ ID NO: 597414 - RNA, 24 nt, Artificial Sequence
  Synthetic
uuaagcaccauucuuuuugugugg

SEQ ID NO: 597415 - RNA, 18 nt, Artificial Sequence
  Synthetic
ccuuagaaucaauugugg

SEQ ID NO: 597416 - RNA, 19 nt, Artificial Sequence
  Synthetic
accuuagaaucaauugugg

SEQ ID NO: 597417 - RNA, 20 nt, Artificial Sequence
  Synthetic
gaccuuagaaucaauugugg

SEQ ID NO: 597418 - RNA, 21 nt, Artificial Sequence
  Synthetic
ugaccuuagaaucaauugugg

SEQ ID NO: 597419 - RNA, 22 nt, Artificial Sequence
  Synthetic
cugaccuuagaaucaauugugg

SEQ ID NO: 597420 - RNA, 23 nt, Artificial Sequence
  Synthetic
ucugaccuuagaaucaauugugg

SEQ ID NO: 597421 - RNA, 24 nt, Artificial Sequence
  Synthetic
uucugaccuuagaaucaauugugg

SEQ ID NO: 597422 - RNA, 18 nt, Artificial Sequence
  Synthetic
aacaaaauauccuugugg

SEQ ID NO: 597423 - RNA, 19 nt, Artificial Sequence
  Synthetic
aaacaaaauauccuugugg

SEQ ID NO: 597424 - RNA, 20 nt, Artificial Sequence
  Synthetic
gaaacaaaauauccuugugg

SEQ ID NO: 597425 - RNA, 21 nt, Artificial Sequence
  Synthetic
ggaaacaaaauauccuugugg

SEQ ID NO: 597426 - RNA, 22 nt, Artificial Sequence
  Synthetic
aggaaacaaaauauccuugugg

SEQ ID NO: 597427 - RNA, 23 nt, Artificial Sequence
  Synthetic
gaggaaacaaaauauccuugugg

SEQ ID NO: 597428 - RNA, 24 nt, Artificial Sequence
  Synthetic
agaggaaacaaaauauccuugugg

SEQ ID NO: 597429 - RNA, 18 nt, Artificial Sequence
  Synthetic
agagagaauugguugugg

SEQ ID NO: 597430 - RNA, 19 nt, Artificial Sequence
  Synthetic
aagagagaauugguugugg

SEQ ID NO: 597431 - RNA, 20 nt, Artificial Sequence
  Synthetic
aaagagagaauugguugugg

SEQ ID NO: 597432 - RNA, 21 nt, Artificial Sequence
  Synthetic
aaaagagagaauugguugugg

SEQ ID NO: 597433 - RNA, 22 nt, Artificial Sequence
  Synthetic
aaaaagagagaauugguugugg

SEQ ID NO: 597434 - RNA, 23 nt, Artificial Sequence
  Synthetic
uaaaaagagagaauugguugugg

SEQ ID NO: 597435 - RNA, 24 nt, Artificial Sequence
  Synthetic
uuaaaaagagagaauugguugugg

SEQ ID NO: 597436 - RNA, 18 nt, Artificial Sequence
  Synthetic
aauccccacguguugugg

SEQ ID NO: 597437 - RNA, 19 nt, Artificial Sequence
  Synthetic
uaauccccacguguugugg

SEQ ID NO: 597438 - RNA, 20 nt, Artificial Sequence
  Synthetic
auaauccccacguguugugg

SEQ ID NO: 597439 - RNA, 21 nt, Artificial Sequence
  Synthetic
aauaauccccacguguugugg

SEQ ID NO: 597440 - RNA, 22 nt, Artificial Sequence
  Synthetic
caauaauccccacguguugugg

SEQ ID NO: 597441 - RNA, 23 nt, Artificial Sequence
  Synthetic
ccaauaauccccacguguugugg

SEQ ID NO: 597442 - RNA, 24 nt, Artificial Sequence
  Synthetic
uccaauaauccccacguguugugg

SEQ ID NO: 597443 - RNA, 18 nt, Artificial Sequence
  Synthetic
acuuaauucaauuugugg

SEQ ID NO: 597444 - RNA, 19 nt, Artificial Sequence
  Synthetic
gacuuaauucaauuugugg

SEQ ID NO: 597445 - RNA, 20 nt, Artificial Sequence
  Synthetic
ggacuuaauucaauuugugg

SEQ ID NO: 597446 - RNA, 21 nt, Artificial Sequence
  Synthetic
aggacuuaauucaauuugugg

SEQ ID NO: 597447 - RNA, 22 nt, Artificial Sequence
  Synthetic
gaggacuuaauucaauuugugg

SEQ ID NO: 597448 - RNA, 23 nt, Artificial Sequence
  Synthetic
agaggacuuaauucaauuugugg

SEQ ID NO: 597449 - RNA, 24 nt, Artificial Sequence
  Synthetic
aagaggacuuaauucaauuugugg

SEQ ID NO: 597450 - RNA, 18 nt, Artificial Sequence
  Synthetic
auggcagaagauuugugg

SEQ ID NO: 597451 - RNA, 19 nt, Artificial Sequence
  Synthetic
aauggcagaagauuugugg

SEQ ID NO: 597452 - RNA, 20 nt, Artificial Sequence
  Synthetic
aaauggcagaagauuugugg

SEQ ID NO: 597453 - RNA, 21 nt, Artificial Sequence
  Synthetic
gaaauggcagaagauuugugg

SEQ ID NO: 597454 - RNA, 22 nt, Artificial Sequence
  Synthetic
ggaaauggcagaagauuugugg

SEQ ID NO: 597455 - RNA, 23 nt, Artificial Sequence
  Synthetic
uggaaauggcagaagauuugugg

SEQ ID NO: 597456 - RNA, 24 nt, Artificial Sequence
  Synthetic
uuggaaauggcagaagauuugugg

SEQ ID NO: 597457 - RNA, 18 nt, Artificial Sequence
  Synthetic
uuuaucucauauuugugg

SEQ ID NO: 597458 - RNA, 19 nt, Artificial Sequence
  Synthetic
auuuaucucauauuugugg

SEQ ID NO: 597459 - RNA, 20 nt, Artificial Sequence
  Synthetic
aauuuaucucauauuugugg

SEQ ID NO: 597460 - RNA, 21 nt, Artificial Sequence
  Synthetic
aaauuuaucucauauuugugg

SEQ ID NO: 597461 - RNA, 22 nt, Artificial Sequence
  Synthetic
uaaauuuaucucauauuugugg

SEQ ID NO: 597462 - RNA, 23 nt, Artificial Sequence
  Synthetic
uuaaauuuaucucauauuugugg

SEQ ID NO: 597463 - RNA, 24 nt, Artificial Sequence
  Synthetic
cuuaaauuuaucucauauuugugg

SEQ ID NO: 597464 - RNA, 18 nt, Artificial Sequence
  Synthetic
ucuguauugaaaaauugg

SEQ ID NO: 597465 - RNA, 19 nt, Artificial Sequence
  Synthetic
cucuguauugaaaaauugg

SEQ ID NO: 597466 - RNA, 20 nt, Artificial Sequence
  Synthetic
ucucuguauugaaaaauugg

SEQ ID NO: 597467 - RNA, 21 nt, Artificial Sequence
  Synthetic
cucucuguauugaaaaauugg

SEQ ID NO: 597468 - RNA, 22 nt, Artificial Sequence
  Synthetic
ccucucuguauugaaaaauugg

SEQ ID NO: 597469 - RNA, 23 nt, Artificial Sequence
  Synthetic
uccucucuguauugaaaaauugg

SEQ ID NO: 597470 - RNA, 24 nt, Artificial Sequence
  Synthetic
cuccucucuguauugaaaaauugg

SEQ ID NO: 597471 - RNA, 18 nt, Artificial Sequence
  Synthetic
gaaugcugucaaaauugg

SEQ ID NO: 597472 - RNA, 19 nt, Artificial Sequence
  Synthetic
agaaugcugucaaaauugg

SEQ ID NO: 597473 - RNA, 20 nt, Artificial Sequence
  Synthetic
gagaaugcugucaaaauugg

SEQ ID NO: 597474 - RNA, 21 nt, Artificial Sequence
  Synthetic
agagaaugcugucaaaauugg

SEQ ID NO: 597475 - RNA, 22 nt, Artificial Sequence
  Synthetic
cagagaaugcugucaaaauugg

SEQ ID NO: 597476 - RNA, 23 nt, Artificial Sequence
  Synthetic
ucagagaaugcugucaaaauugg

SEQ ID NO: 597477 - RNA, 24 nt, Artificial Sequence
  Synthetic
cucagagaaugcugucaaaauugg

SEQ ID NO: 597478 - RNA, 18 nt, Artificial Sequence
  Synthetic
caagucuggucaaauugg

SEQ ID NO: 597479 - RNA, 19 nt, Artificial Sequence
  Synthetic
ucaagucuggucaaauugg

SEQ ID NO: 597480 - RNA, 20 nt, Artificial Sequence
  Synthetic
uucaagucuggucaaauugg

SEQ ID NO: 597481 - RNA, 21 nt, Artificial Sequence
  Synthetic
cuucaagucuggucaaauugg

SEQ ID NO: 597482 - RNA, 22 nt, Artificial Sequence
  Synthetic
ccuucaagucuggucaaauugg

SEQ ID NO: 597483 - RNA, 23 nt, Artificial Sequence
  Synthetic
uccuucaagucuggucaaauugg

SEQ ID NO: 597484 - RNA, 24 nt, Artificial Sequence
  Synthetic
guccuucaagucuggucaaauugg

SEQ ID NO: 597485 - RNA, 18 nt, Artificial Sequence
  Synthetic
aaugcauuucuaaauugg

SEQ ID NO: 597486 - RNA, 19 nt, Artificial Sequence
  Synthetic
aaaugcauuucuaaauugg

SEQ ID NO: 597487 - RNA, 20 nt, Artificial Sequence
  Synthetic
aaaaugcauuucuaaauugg

SEQ ID NO: 597488 - RNA, 21 nt, Artificial Sequence
  Synthetic
gaaaaugcauuucuaaauugg

SEQ ID NO: 597489 - RNA, 22 nt, Artificial Sequence
  Synthetic
agaaaaugcauuucuaaauugg

SEQ ID NO: 597490 - RNA, 23 nt, Artificial Sequence
  Synthetic
aagaaaaugcauuucuaaauugg

SEQ ID NO: 597491 - RNA, 24 nt, Artificial Sequence
  Synthetic
uaagaaaaugcauuucuaaauugg

SEQ ID NO: 597492 - RNA, 18 nt, Artificial Sequence
  Synthetic
cuuuuuuucuuaaauugg

SEQ ID NO: 597493 - RNA, 19 nt, Artificial Sequence
  Synthetic
gcuuuuuuucuuaaauugg

SEQ ID NO: 597494 - RNA, 20 nt, Artificial Sequence
  Synthetic
ggcuuuuuuucuuaaauugg

SEQ ID NO: 597495 - RNA, 21 nt, Artificial Sequence
  Synthetic
aggcuuuuuuucuuaaauugg

SEQ ID NO: 597496 - RNA, 22 nt, Artificial Sequence
  Synthetic
aaggcuuuuuuucuuaaauugg

SEQ ID NO: 597497 - RNA, 23 nt, Artificial Sequence
  Synthetic
uaaggcuuuuuuucuuaaauugg

SEQ ID NO: 597498 - RNA, 24 nt, Artificial Sequence
  Synthetic
auaaggcuuuuuuucuuaaauugg

SEQ ID NO: 597499 - RNA, 18 nt, Artificial Sequence
  Synthetic
agccacguagacaauugg

SEQ ID NO: 597500 - RNA, 19 nt, Artificial Sequence
  Synthetic
uagccacguagacaauugg

SEQ ID NO: 597501 - RNA, 20 nt, Artificial Sequence
  Synthetic
uuagccacguagacaauugg

SEQ ID NO: 597502 - RNA, 21 nt, Artificial Sequence
  Synthetic
uuuagccacguagacaauugg

SEQ ID NO: 597503 - RNA, 22 nt, Artificial Sequence
  Synthetic
uuuuagccacguagacaauugg

SEQ ID NO: 597504 - RNA, 23 nt, Artificial Sequence
  Synthetic
guuuuagccacguagacaauugg

SEQ ID NO: 597505 - RNA, 24 nt, Artificial Sequence
  Synthetic
uguuuuagccacguagacaauugg

SEQ ID NO: 597506 - RNA, 18 nt, Artificial Sequence
  Synthetic
guaaaauucuacaauugg

SEQ ID NO: 597507 - RNA, 19 nt, Artificial Sequence
  Synthetic
uguaaaauucuacaauugg

SEQ ID NO: 597508 - RNA, 20 nt, Artificial Sequence
  Synthetic
uuguaaaauucuacaauugg

SEQ ID NO: 597509 - RNA, 21 nt, Artificial Sequence
  Synthetic
auuguaaaauucuacaauugg

SEQ ID NO: 597510 - RNA, 22 nt, Artificial Sequence
  Synthetic
aauuguaaaauucuacaauugg

SEQ ID NO: 597511 - RNA, 23 nt, Artificial Sequence
  Synthetic
caauuguaaaauucuacaauugg

SEQ ID NO: 597512 - RNA, 24 nt, Artificial Sequence
  Synthetic
ucaauuguaaaauucuacaauugg

SEQ ID NO: 597513 - RNA, 18 nt, Artificial Sequence
  Synthetic
aguuuggauuggaauugg

SEQ ID NO: 597514 - RNA, 19 nt, Artificial Sequence
  Synthetic
gaguuuggauuggaauugg

SEQ ID NO: 597515 - RNA, 20 nt, Artificial Sequence
  Synthetic
ggaguuuggauuggaauugg

SEQ ID NO: 597516 - RNA, 21 nt, Artificial Sequence
  Synthetic
aggaguuuggauuggaauugg

SEQ ID NO: 597517 - RNA, 22 nt, Artificial Sequence
  Synthetic
aaggaguuuggauuggaauugg

SEQ ID NO: 597518 - RNA, 23 nt, Artificial Sequence
  Synthetic
caaggaguuuggauuggaauugg

SEQ ID NO: 597519 - RNA, 24 nt, Artificial Sequence
  Synthetic
gcaaggaguuuggauuggaauugg

SEQ ID NO: 597520 - RNA, 18 nt, Artificial Sequence
  Synthetic
aaaaauaauaauaauugg

SEQ ID NO: 597521 - RNA, 19 nt, Artificial Sequence
  Synthetic
aaaaaauaauaauaauugg

SEQ ID NO: 597522 - RNA, 20 nt, Artificial Sequence
  Synthetic
aaaaaaauaauaauaauugg

SEQ ID NO: 597523 - RNA, 21 nt, Artificial Sequence
  Synthetic
aaaaaaaauaauaauaauugg

SEQ ID NO: 597524 - RNA, 22 nt, Artificial Sequence
  Synthetic
uaaaaaaaauaauaauaauugg

SEQ ID NO: 597525 - RNA, 23 nt, Artificial Sequence
  Synthetic
uuaaaaaaaauaauaauaauugg

SEQ ID NO: 597526 - RNA, 24 nt, Artificial Sequence
  Synthetic
uuuaaaaaaaauaauaauaauugg

SEQ ID NO: 597527 - RNA, 18 nt, Artificial Sequence
  Synthetic
ucgcuagaacauaauugg

SEQ ID NO: 597528 - RNA, 19 nt, Artificial Sequence
  Synthetic
aucgcuagaacauaauugg

SEQ ID NO: 597529 - RNA, 20 nt, Artificial Sequence
  Synthetic
uaucgcuagaacauaauugg

SEQ ID NO: 597530 - RNA, 21 nt, Artificial Sequence
  Synthetic
auaucgcuagaacauaauugg

SEQ ID NO: 597531 - RNA, 22 nt, Artificial Sequence
  Synthetic
aauaucgcuagaacauaauugg

SEQ ID NO: 597532 - RNA, 23 nt, Artificial Sequence
  Synthetic
uaauaucgcuagaacauaauugg

SEQ ID NO: 597533 - RNA, 24 nt, Artificial Sequence
  Synthetic
uuaauaucgcuagaacauaauugg

SEQ ID NO: 597534 - RNA, 18 nt, Artificial Sequence
  Synthetic
cucagugcucauaauugg

SEQ ID NO: 597535 - RNA, 19 nt, Artificial Sequence
  Synthetic
ccucagugcucauaauugg

SEQ ID NO: 597536 - RNA, 20 nt, Artificial Sequence
  Synthetic
gccucagugcucauaauugg

SEQ ID NO: 597537 - RNA, 21 nt, Artificial Sequence
  Synthetic
agccucagugcucauaauugg

SEQ ID NO: 597538 - RNA, 22 nt, Artificial Sequence
  Synthetic
cagccucagugcucauaauugg

SEQ ID NO: 597539 - RNA, 23 nt, Artificial Sequence
  Synthetic
acagccucagugcucauaauugg

SEQ ID NO: 597540 - RNA, 24 nt, Artificial Sequence
  Synthetic
uacagccucagugcucauaauugg

SEQ ID NO: 597541 - RNA, 18 nt, Artificial Sequence
  Synthetic
ccugaauaaaguaauugg

SEQ ID NO: 597542 - RNA, 19 nt, Artificial Sequence
  Synthetic
cccugaauaaaguaauugg

SEQ ID NO: 597543 - RNA, 20 nt, Artificial Sequence
  Synthetic
ccccugaauaaaguaauugg

SEQ ID NO: 597544 - RNA, 21 nt, Artificial Sequence
  Synthetic
uccccugaauaaaguaauugg

SEQ ID NO: 597545 - RNA, 22 nt, Artificial Sequence
  Synthetic
cuccccugaauaaaguaauugg

SEQ ID NO: 597546 - RNA, 23 nt, Artificial Sequence
  Synthetic
acuccccugaauaaaguaauugg

SEQ ID NO: 597547 - RNA, 24 nt, Artificial Sequence
  Synthetic
gacuccccugaauaaaguaauugg

SEQ ID NO: 597548 - RNA, 18 nt, Artificial Sequence
  Synthetic
cacagcauaaaacauugg

SEQ ID NO: 597549 - RNA, 19 nt, Artificial Sequence
  Synthetic
ccacagcauaaaacauugg

SEQ ID NO: 597550 - RNA, 20 nt, Artificial Sequence
  Synthetic
accacagcauaaaacauugg

SEQ ID NO: 597551 - RNA, 21 nt, Artificial Sequence
  Synthetic
gaccacagcauaaaacauugg

SEQ ID NO: 597552 - RNA, 22 nt, Artificial Sequence
  Synthetic
ugaccacagcauaaaacauugg

SEQ ID NO: 597553 - RNA, 23 nt, Artificial Sequence
  Synthetic
augaccacagcauaaaacauugg

SEQ ID NO: 597554 - RNA, 24 nt, Artificial Sequence
  Synthetic
aaugaccacagcauaaaacauugg

SEQ ID NO: 597555 - RNA, 18 nt, Artificial Sequence
  Synthetic
cauguacgauaacauugg

SEQ ID NO: 597556 - RNA, 19 nt, Artificial Sequence
  Synthetic
gcauguacgauaacauugg

SEQ ID NO: 597557 - RNA, 20 nt, Artificial Sequence
  Synthetic
ggcauguacgauaacauugg

SEQ ID NO: 597558 - RNA, 21 nt, Artificial Sequence
  Synthetic
uggcauguacgauaacauugg

SEQ ID NO: 597559 - RNA, 22 nt, Artificial Sequence
  Synthetic
auggcauguacgauaacauugg

SEQ ID NO: 597560 - RNA, 23 nt, Artificial Sequence
  Synthetic
aauggcauguacgauaacauugg

SEQ ID NO: 597561 - RNA, 24 nt, Artificial Sequence
  Synthetic
gaauggcauguacgauaacauugg

SEQ ID NO: 597562 - RNA, 18 nt, Artificial Sequence
  Synthetic
gaaaacucuuaccauugg

SEQ ID NO: 597563 - RNA, 19 nt, Artificial Sequence
  Synthetic
agaaaacucuuaccauugg

SEQ ID NO: 597564 - RNA, 20 nt, Artificial Sequence
  Synthetic
aagaaaacucuuaccauugg

SEQ ID NO: 597565 - RNA, 21 nt, Artificial Sequence
  Synthetic
aaagaaaacucuuaccauugg

SEQ ID NO: 597566 - RNA, 22 nt, Artificial Sequence
  Synthetic
aaaagaaaacucuuaccauugg

SEQ ID NO: 597567 - RNA, 23 nt, Artificial Sequence
  Synthetic
gaaaagaaaacucuuaccauugg

SEQ ID NO: 597568 - RNA, 24 nt, Artificial Sequence
  Synthetic
agaaaagaaaacucuuaccauugg

SEQ ID NO: 597569 - RNA, 18 nt, Artificial Sequence
  Synthetic
aaaacuuauacccauugg

SEQ ID NO: 597570 - RNA, 19 nt, Artificial Sequence
  Synthetic
uaaaacuuauacccauugg

SEQ ID NO: 597571 - RNA, 20 nt, Artificial Sequence
  Synthetic
uuaaaacuuauacccauugg

SEQ ID NO: 597572 - RNA, 21 nt, Artificial Sequence
  Synthetic
cuuaaaacuuauacccauugg

SEQ ID NO: 597573 - RNA, 22 nt, Artificial Sequence
  Synthetic
acuuaaaacuuauacccauugg

SEQ ID NO: 597574 - RNA, 23 nt, Artificial Sequence
  Synthetic
cacuuaaaacuuauacccauugg

SEQ ID NO: 597575 - RNA, 24 nt, Artificial Sequence
  Synthetic
acacuuaaaacuuauacccauugg

SEQ ID NO: 597576 - RNA, 18 nt, Artificial Sequence
  Synthetic
ggcucccaucuccauugg

SEQ ID NO: 597577 - RNA, 19 nt, Artificial Sequence
  Synthetic
gggcucccaucuccauugg

SEQ ID NO: 597578 - RNA, 20 nt, Artificial Sequence
  Synthetic
ugggcucccaucuccauugg

SEQ ID NO: 597579 - RNA, 21 nt, Artificial Sequence
  Synthetic
augggcucccaucuccauugg

SEQ ID NO: 597580 - RNA, 22 nt, Artificial Sequence
  Synthetic
caugggcucccaucuccauugg

SEQ ID NO: 597581 - RNA, 23 nt, Artificial Sequence
  Synthetic
ccaugggcucccaucuccauugg

SEQ ID NO: 597582 - RNA, 24 nt, Artificial Sequence
  Synthetic
uccaugggcucccaucuccauugg

SEQ ID NO: 597583 - RNA, 18 nt, Artificial Sequence
  Synthetic
agggagggugcgcauugg

SEQ ID NO: 597584 - RNA, 19 nt, Artificial Sequence
  Synthetic
gagggagggugcgcauugg

SEQ ID NO: 597585 - RNA, 20 nt, Artificial Sequence
  Synthetic
ggagggagggugcgcauugg

SEQ ID NO: 597586 - RNA, 21 nt, Artificial Sequence
  Synthetic
aggagggagggugcgcauugg

SEQ ID NO: 597587 - RNA, 22 nt, Artificial Sequence
  Synthetic
aaggagggagggugcgcauugg

SEQ ID NO: 597588 - RNA, 23 nt, Artificial Sequence
  Synthetic
gaaggagggagggugcgcauugg

SEQ ID NO: 597589 - RNA, 24 nt, Artificial Sequence
  Synthetic
ggaaggagggagggugcgcauugg

SEQ ID NO: 597590 - RNA, 18 nt, Artificial Sequence
  Synthetic
agagcagaagggcauugg

SEQ ID NO: 597591 - RNA, 19 nt, Artificial Sequence
  Synthetic
gagagcagaagggcauugg

SEQ ID NO: 597592 - RNA, 20 nt, Artificial Sequence
  Synthetic
ggagagcagaagggcauugg

SEQ ID NO: 597593 - RNA, 21 nt, Artificial Sequence
  Synthetic
cggagagcagaagggcauugg

SEQ ID NO: 597594 - RNA, 22 nt, Artificial Sequence
  Synthetic
gcggagagcagaagggcauugg

SEQ ID NO: 597595 - RNA, 23 nt, Artificial Sequence
  Synthetic
ugcggagagcagaagggcauugg

SEQ ID NO: 597596 - RNA, 24 nt, Artificial Sequence
  Synthetic
cugcggagagcagaagggcauugg

SEQ ID NO: 597597 - RNA, 18 nt, Artificial Sequence
  Synthetic
guagaacaaacucauugg

SEQ ID NO: 597598 - RNA, 19 nt, Artificial Sequence
  Synthetic
aguagaacaaacucauugg

SEQ ID NO: 597599 - RNA, 20 nt, Artificial Sequence
  Synthetic
caguagaacaaacucauugg

SEQ ID NO: 597600 - RNA, 21 nt, Artificial Sequence
  Synthetic
gcaguagaacaaacucauugg

SEQ ID NO: 597601 - RNA, 22 nt, Artificial Sequence
  Synthetic
ggcaguagaacaaacucauugg

SEQ ID NO: 597602 - RNA, 23 nt, Artificial Sequence
  Synthetic
uggcaguagaacaaacucauugg

SEQ ID NO: 597603 - RNA, 24 nt, Artificial Sequence
  Synthetic
uuggcaguagaacaaacucauugg

SEQ ID NO: 597604 - RNA, 18 nt, Artificial Sequence
  Synthetic
gccugagccuuucauugg

SEQ ID NO: 597605 - RNA, 19 nt, Artificial Sequence
  Synthetic
ggccugagccuuucauugg

SEQ ID NO: 597606 - RNA, 20 nt, Artificial Sequence
  Synthetic
gggccugagccuuucauugg

SEQ ID NO: 597607 - RNA, 21 nt, Artificial Sequence
  Synthetic
ugggccugagccuuucauugg

SEQ ID NO: 597608 - RNA, 22 nt, Artificial Sequence
  Synthetic
cugggccugagccuuucauugg

SEQ ID NO: 597609 - RNA, 23 nt, Artificial Sequence
  Synthetic
ucugggccugagccuuucauugg

SEQ ID NO: 597610 - RNA, 24 nt, Artificial Sequence
  Synthetic
uucugggccugagccuuucauugg

SEQ ID NO: 597611 - RNA, 18 nt, Artificial Sequence
  Synthetic
agacaacccacagauugg

SEQ ID NO: 597612 - RNA, 19 nt, Artificial Sequence
  Synthetic
gagacaacccacagauugg

SEQ ID NO: 597613 - RNA, 20 nt, Artificial Sequence
  Synthetic
agagacaacccacagauugg

SEQ ID NO: 597614 - RNA, 21 nt, Artificial Sequence
  Synthetic
aagagacaacccacagauugg

SEQ ID NO: 597615 - RNA, 22 nt, Artificial Sequence
  Synthetic
aaagagacaacccacagauugg

SEQ ID NO: 597616 - RNA, 23 nt, Artificial Sequence
  Synthetic
uaaagagacaacccacagauugg

SEQ ID NO: 597617 - RNA, 24 nt, Artificial Sequence
  Synthetic
auaaagagacaacccacagauugg

SEQ ID NO: 597618 - RNA, 18 nt, Artificial Sequence
  Synthetic
aggcaaacuacagauugg

SEQ ID NO: 597619 - RNA, 19 nt, Artificial Sequence
  Synthetic
caggcaaacuacagauugg

SEQ ID NO: 597620 - RNA, 20 nt, Artificial Sequence
  Synthetic
acaggcaaacuacagauugg

SEQ ID NO: 597621 - RNA, 21 nt, Artificial Sequence
  Synthetic
aacaggcaaacuacagauugg

SEQ ID NO: 597622 - RNA, 22 nt, Artificial Sequence
  Synthetic
gaacaggcaaacuacagauugg

SEQ ID NO: 597623 - RNA, 23 nt, Artificial Sequence
  Synthetic
ugaacaggcaaacuacagauugg

SEQ ID NO: 597624 - RNA, 24 nt, Artificial Sequence
  Synthetic
gugaacaggcaaacuacagauugg

SEQ ID NO: 597625 - RNA, 18 nt, Artificial Sequence
  Synthetic
ucaaguauagcagauugg

SEQ ID NO: 597626 - RNA, 19 nt, Artificial Sequence
  Synthetic
gucaaguauagcagauugg

SEQ ID NO: 597627 - RNA, 20 nt, Artificial Sequence
  Synthetic
ugucaaguauagcagauugg

SEQ ID NO: 597628 - RNA, 21 nt, Artificial Sequence
  Synthetic
cugucaaguauagcagauugg

SEQ ID NO: 597629 - RNA, 22 nt, Artificial Sequence
  Synthetic
acugucaaguauagcagauugg

SEQ ID NO: 597630 - RNA, 23 nt, Artificial Sequence
  Synthetic
aacugucaaguauagcagauugg

SEQ ID NO: 597631 - RNA, 24 nt, Artificial Sequence
  Synthetic
aaacugucaaguauagcagauugg

SEQ ID NO: 597632 - RNA, 18 nt, Artificial Sequence
  Synthetic
uuuggagaaagagauugg

SEQ ID NO: 597633 - RNA, 19 nt, Artificial Sequence
  Synthetic
auuuggagaaagagauugg

SEQ ID NO: 597634 - RNA, 20 nt, Artificial Sequence
  Synthetic
cauuuggagaaagagauugg

SEQ ID NO: 597635 - RNA, 21 nt, Artificial Sequence
  Synthetic
gcauuuggagaaagagauugg

SEQ ID NO: 597636 - RNA, 22 nt, Artificial Sequence
  Synthetic
ugcauuuggagaaagagauugg

SEQ ID NO: 597637 - RNA, 23 nt, Artificial Sequence
  Synthetic
uugcauuuggagaaagagauugg

SEQ ID NO: 597638 - RNA, 24 nt, Artificial Sequence
  Synthetic
guugcauuuggagaaagagauugg

SEQ ID NO: 597639 - RNA, 18 nt, Artificial Sequence
  Synthetic
aauuggagaguagauugg

SEQ ID NO: 597640 - RNA, 19 nt, Artificial Sequence
  Synthetic
uaauuggagaguagauugg

SEQ ID NO: 597641 - RNA, 20 nt, Artificial Sequence
  Synthetic
cuaauuggagaguagauugg

SEQ ID NO: 597642 - RNA, 21 nt, Artificial Sequence
  Synthetic
gcuaauuggagaguagauugg

SEQ ID NO: 597643 - RNA, 22 nt, Artificial Sequence
  Synthetic
ugcuaauuggagaguagauugg

SEQ ID NO: 597644 - RNA, 23 nt, Artificial Sequence
  Synthetic
uugcuaauuggagaguagauugg

SEQ ID NO: 597645 - RNA, 24 nt, Artificial Sequence
  Synthetic
guugcuaauuggagaguagauugg

SEQ ID NO: 597646 - RNA, 18 nt, Artificial Sequence
  Synthetic
gaccuuacauccgauugg

SEQ ID NO: 597647 - RNA, 19 nt, Artificial Sequence
  Synthetic
ggaccuuacauccgauugg

SEQ ID NO: 597648 - RNA, 20 nt, Artificial Sequence
  Synthetic
uggaccuuacauccgauugg

SEQ ID NO: 597649 - RNA, 21 nt, Artificial Sequence
  Synthetic
auggaccuuacauccgauugg

SEQ ID NO: 597650 - RNA, 22 nt, Artificial Sequence
  Synthetic
cauggaccuuacauccgauugg

SEQ ID NO: 597651 - RNA, 23 nt, Artificial Sequence
  Synthetic
ucauggaccuuacauccgauugg

SEQ ID NO: 597652 - RNA, 24 nt, Artificial Sequence
  Synthetic
cucauggaccuuacauccgauugg

SEQ ID NO: 597653 - RNA, 18 nt, Artificial Sequence
  Synthetic
cacuuuauucucgauugg

SEQ ID NO: 597654 - RNA, 19 nt, Artificial Sequence
  Synthetic
acacuuuauucucgauugg

SEQ ID NO: 597655 - RNA, 20 nt, Artificial Sequence
  Synthetic
uacacuuuauucucgauugg

SEQ ID NO: 597656 - RNA, 21 nt, Artificial Sequence
  Synthetic
guacacuuuauucucgauugg

SEQ ID NO: 597657 - RNA, 22 nt, Artificial Sequence
  Synthetic
uguacacuuuauucucgauugg

SEQ ID NO: 597658 - RNA, 23 nt, Artificial Sequence
  Synthetic
cuguacacuuuauucucgauugg

SEQ ID NO: 597659 - RNA, 24 nt, Artificial Sequence
  Synthetic
acuguacacuuuauucucgauugg

SEQ ID NO: 597660 - RNA, 18 nt, Artificial Sequence
  Synthetic
aucuagauaugggauugg

SEQ ID NO: 597661 - RNA, 19 nt, Artificial Sequence
  Synthetic
aaucuagauaugggauugg

SEQ ID NO: 597662 - RNA, 20 nt, Artificial Sequence
  Synthetic
aaaucuagauaugggauugg

SEQ ID NO: 597663 - RNA, 21 nt, Artificial Sequence
  Synthetic
gaaaucuagauaugggauugg

SEQ ID NO: 597664 - RNA, 22 nt, Artificial Sequence
  Synthetic
ggaaaucuagauaugggauugg

SEQ ID NO: 597665 - RNA, 23 nt, Artificial Sequence
  Synthetic
uggaaaucuagauaugggauugg

SEQ ID NO: 597666 - RNA, 24 nt, Artificial Sequence
  Synthetic
cuggaaaucuagauaugggauugg

SEQ ID NO: 597667 - RNA, 18 nt, Artificial Sequence
  Synthetic
ggaggaugaauggauugg

SEQ ID NO: 597668 - RNA, 19 nt, Artificial Sequence
  Synthetic
uggaggaugaauggauugg

SEQ ID NO: 597669 - RNA, 20 nt, Artificial Sequence
  Synthetic
cuggaggaugaauggauugg

SEQ ID NO: 597670 - RNA, 21 nt, Artificial Sequence
  Synthetic
gcuggaggaugaauggauugg

SEQ ID NO: 597671 - RNA, 22 nt, Artificial Sequence
  Synthetic
ugcuggaggaugaauggauugg

SEQ ID NO: 597672 - RNA, 23 nt, Artificial Sequence
  Synthetic
cugcuggaggaugaauggauugg

SEQ ID NO: 597673 - RNA, 24 nt, Artificial Sequence
  Synthetic
ucugcuggaggaugaauggauugg

SEQ ID NO: 597674 - RNA, 18 nt, Artificial Sequence
  Synthetic
ggagaguaaagugauugg

SEQ ID NO: 597675 - RNA, 19 nt, Artificial Sequence
  Synthetic
aggagaguaaagugauugg

SEQ ID NO: 597676 - RNA, 20 nt, Artificial Sequence
  Synthetic
uaggagaguaaagugauugg

SEQ ID NO: 597677 - RNA, 21 nt, Artificial Sequence
  Synthetic
cuaggagaguaaagugauugg

SEQ ID NO: 597678 - RNA, 22 nt, Artificial Sequence
  Synthetic
ucuaggagaguaaagugauugg

SEQ ID NO: 597679 - RNA, 23 nt, Artificial Sequence
  Synthetic
gucuaggagaguaaagugauugg

SEQ ID NO: 597680 - RNA, 24 nt, Artificial Sequence
  Synthetic
ggucuaggagaguaaagugauugg

SEQ ID NO: 597681 - RNA, 18 nt, Artificial Sequence
  Synthetic
caaaucacugaauauugg

SEQ ID NO: 597682 - RNA, 19 nt, Artificial Sequence
  Synthetic
ucaaaucacugaauauugg

SEQ ID NO: 597683 - RNA, 20 nt, Artificial Sequence
  Synthetic
uucaaaucacugaauauugg

SEQ ID NO: 597684 - RNA, 21 nt, Artificial Sequence
  Synthetic
auucaaaucacugaauauugg

SEQ ID NO: 597685 - RNA, 22 nt, Artificial Sequence
  Synthetic
uauucaaaucacugaauauugg

SEQ ID NO: 597686 - RNA, 23 nt, Artificial Sequence
  Synthetic
cuauucaaaucacugaauauugg

SEQ ID NO: 597687 - RNA, 24 nt, Artificial Sequence
  Synthetic
acuauucaaaucacugaauauugg

SEQ ID NO: 597688 - RNA, 18 nt, Artificial Sequence
  Synthetic
uagcuaugaguauauugg

SEQ ID NO: 597689 - RNA, 19 nt, Artificial Sequence
  Synthetic
auagcuaugaguauauugg

SEQ ID NO: 597690 - RNA, 20 nt, Artificial Sequence
  Synthetic
aauagcuaugaguauauugg

SEQ ID NO: 597691 - RNA, 21 nt, Artificial Sequence
  Synthetic
aaauagcuaugaguauauugg

SEQ ID NO: 597692 - RNA, 22 nt, Artificial Sequence
  Synthetic
gaaauagcuaugaguauauugg

SEQ ID NO: 597693 - RNA, 23 nt, Artificial Sequence
  Synthetic
agaaauagcuaugaguauauugg

SEQ ID NO: 597694 - RNA, 24 nt, Artificial Sequence
  Synthetic
uagaaauagcuaugaguauauugg

SEQ ID NO: 597695 - RNA, 18 nt, Artificial Sequence
  Synthetic
cagugauuacucuauugg

SEQ ID NO: 597696 - RNA, 19 nt, Artificial Sequence
  Synthetic
ccagugauuacucuauugg

SEQ ID NO: 597697 - RNA, 20 nt, Artificial Sequence
  Synthetic
accagugauuacucuauugg

SEQ ID NO: 597698 - RNA, 21 nt, Artificial Sequence
  Synthetic
caccagugauuacucuauugg

SEQ ID NO: 597699 - RNA, 22 nt, Artificial Sequence
  Synthetic
ucaccagugauuacucuauugg

SEQ ID NO: 597700 - RNA, 23 nt, Artificial Sequence
  Synthetic
gucaccagugauuacucuauugg

SEQ ID NO: 597701 - RNA, 24 nt, Artificial Sequence
  Synthetic
agucaccagugauuacucuauugg

SEQ ID NO: 597702 - RNA, 18 nt, Artificial Sequence
  Synthetic
aacugagagcauuauugg

SEQ ID NO: 597703 - RNA, 19 nt, Artificial Sequence
  Synthetic
uaacugagagcauuauugg

SEQ ID NO: 597704 - RNA, 20 nt, Artificial Sequence
  Synthetic
auaacugagagcauuauugg

SEQ ID NO: 597705 - RNA, 21 nt, Artificial Sequence
  Synthetic
uauaacugagagcauuauugg

SEQ ID NO: 597706 - RNA, 22 nt, Artificial Sequence
  Synthetic
auauaacugagagcauuauugg

SEQ ID NO: 597707 - RNA, 23 nt, Artificial Sequence
  Synthetic
aauauaacugagagcauuauugg

SEQ ID NO: 597708 - RNA, 24 nt, Artificial Sequence
  Synthetic
aaauauaacugagagcauuauugg

SEQ ID NO: 597709 - RNA, 18 nt, Artificial Sequence
  Synthetic
guauucugcuauuauugg

SEQ ID NO: 597710 - RNA, 19 nt, Artificial Sequence
  Synthetic
aguauucugcuauuauugg

SEQ ID NO: 597711 - RNA, 20 nt, Artificial Sequence
  Synthetic
gaguauucugcuauuauugg

SEQ ID NO: 597712 - RNA, 21 nt, Artificial Sequence
  Synthetic
ugaguauucugcuauuauugg

SEQ ID NO: 597713 - RNA, 22 nt, Artificial Sequence
  Synthetic
augaguauucugcuauuauugg

SEQ ID NO: 597714 - RNA, 23 nt, Artificial Sequence
  Synthetic
aaugaguauucugcuauuauugg

SEQ ID NO: 597715 - RNA, 24 nt, Artificial Sequence
  Synthetic
gaaugaguauucugcuauuauugg

SEQ ID NO: 597716 - RNA, 18 nt, Artificial Sequence
  Synthetic
aaaguuauuuguuauugg

SEQ ID NO: 597717 - RNA, 19 nt, Artificial Sequence
  Synthetic
aaaaguuauuuguuauugg

SEQ ID NO: 597718 - RNA, 20 nt, Artificial Sequence
  Synthetic
caaaaguuauuuguuauugg

SEQ ID NO: 597719 - RNA, 21 nt, Artificial Sequence
  Synthetic
ccaaaaguuauuuguuauugg

SEQ ID NO: 597720 - RNA, 22 nt, Artificial Sequence
  Synthetic
accaaaaguuauuuguuauugg

SEQ ID NO: 597721 - RNA, 23 nt, Artificial Sequence
  Synthetic
caccaaaaguuauuuguuauugg

SEQ ID NO: 597722 - RNA, 24 nt, Artificial Sequence
  Synthetic
ccaccaaaaguuauuuguuauugg

SEQ ID NO: 597723 - RNA, 18 nt, Artificial Sequence
  Synthetic
caagauuuuauaacuugg

SEQ ID NO: 597724 - RNA, 19 nt, Artificial Sequence
  Synthetic
ccaagauuuuauaacuugg

SEQ ID NO: 597725 - RNA, 20 nt, Artificial Sequence
  Synthetic
accaagauuuuauaacuugg

SEQ ID NO: 597726 - RNA, 21 nt, Artificial Sequence
  Synthetic
caccaagauuuuauaacuugg

SEQ ID NO: 597727 - RNA, 22 nt, Artificial Sequence
  Synthetic
ucaccaagauuuuauaacuugg

SEQ ID NO: 597728 - RNA, 23 nt, Artificial Sequence
  Synthetic
aucaccaagauuuuauaacuugg

SEQ ID NO: 597729 - RNA, 24 nt, Artificial Sequence
  Synthetic
aaucaccaagauuuuauaacuugg

SEQ ID NO: 597730 - RNA, 18 nt, Artificial Sequence
  Synthetic
uuuuauguguuaacuugg

SEQ ID NO: 597731 - RNA, 19 nt, Artificial Sequence
  Synthetic
auuuuauguguuaacuugg

SEQ ID NO: 597732 - RNA, 20 nt, Artificial Sequence
  Synthetic
aauuuuauguguuaacuugg

SEQ ID NO: 597733 - RNA, 21 nt, Artificial Sequence
  Synthetic
aaauuuuauguguuaacuugg

SEQ ID NO: 597734 - RNA, 22 nt, Artificial Sequence
  Synthetic
uaaauuuuauguguuaacuugg

SEQ ID NO: 597735 - RNA, 23 nt, Artificial Sequence
  Synthetic
guaaauuuuauguguuaacuugg

SEQ ID NO: 597736 - RNA, 24 nt, Artificial Sequence
  Synthetic
gguaaauuuuauguguuaacuugg

SEQ ID NO: 597737 - RNA, 18 nt, Artificial Sequence
  Synthetic
ugcuaaauguccacuugg

SEQ ID NO: 597738 - RNA, 19 nt, Artificial Sequence
  Synthetic
uugcuaaauguccacuugg

SEQ ID NO: 597739 - RNA, 20 nt, Artificial Sequence
  Synthetic
auugcuaaauguccacuugg

SEQ ID NO: 597740 - RNA, 21 nt, Artificial Sequence
  Synthetic
uauugcuaaauguccacuugg

SEQ ID NO: 597741 - RNA, 22 nt, Artificial Sequence
  Synthetic
auauugcuaaauguccacuugg

SEQ ID NO: 597742 - RNA, 23 nt, Artificial Sequence
  Synthetic
gauauugcuaaauguccacuugg

SEQ ID NO: 597743 - RNA, 24 nt, Artificial Sequence
  Synthetic
agauauugcuaaauguccacuugg

SEQ ID NO: 597744 - RNA, 18 nt, Artificial Sequence
  Synthetic
uagcugguaaagacuugg

SEQ ID NO: 597745 - RNA, 19 nt, Artificial Sequence
  Synthetic
guagcugguaaagacuugg

SEQ ID NO: 597746 - RNA, 20 nt, Artificial Sequence
  Synthetic
gguagcugguaaagacuugg

SEQ ID NO: 597747 - RNA, 21 nt, Artificial Sequence
  Synthetic
agguagcugguaaagacuugg

SEQ ID NO: 597748 - RNA, 22 nt, Artificial Sequence
  Synthetic
aagguagcugguaaagacuugg

SEQ ID NO: 597749 - RNA, 23 nt, Artificial Sequence
  Synthetic
aaagguagcugguaaagacuugg

SEQ ID NO: 597750 - RNA, 24 nt, Artificial Sequence
  Synthetic
uaaagguagcugguaaagacuugg

SEQ ID NO: 597751 - RNA, 18 nt, Artificial Sequence
  Synthetic
gaccugguuaguacuugg

SEQ ID NO: 597752 - RNA, 19 nt, Artificial Sequence
  Synthetic
cgaccugguuaguacuugg

SEQ ID NO: 597753 - RNA, 20 nt, Artificial Sequence
  Synthetic
ucgaccugguuaguacuugg

SEQ ID NO: 597754 - RNA, 21 nt, Artificial Sequence
  Synthetic
uucgaccugguuaguacuugg

SEQ ID NO: 597755 - RNA, 22 nt, Artificial Sequence
  Synthetic
guucgaccugguuaguacuugg

SEQ ID NO: 597756 - RNA, 23 nt, Artificial Sequence
  Synthetic
gguucgaccugguuaguacuugg

SEQ ID NO: 597757 - RNA, 24 nt, Artificial Sequence
  Synthetic
agguucgaccugguuaguacuugg

SEQ ID NO: 597758 - RNA, 18 nt, Artificial Sequence
  Synthetic
uuuauaauugacccuugg

SEQ ID NO: 597759 - RNA, 19 nt, Artificial Sequence
  Synthetic
auuuauaauugacccuugg

SEQ ID NO: 597760 - RNA, 20 nt, Artificial Sequence
  Synthetic
uauuuauaauugacccuugg

SEQ ID NO: 597761 - RNA, 21 nt, Artificial Sequence
  Synthetic
uuauuuauaauugacccuugg

SEQ ID NO: 597762 - RNA, 22 nt, Artificial Sequence
  Synthetic
auuauuuauaauugacccuugg

SEQ ID NO: 597763 - RNA, 23 nt, Artificial Sequence
  Synthetic
gauuauuuauaauugacccuugg

SEQ ID NO: 597764 - RNA, 24 nt, Artificial Sequence
  Synthetic
agauuauuuauaauugacccuugg

SEQ ID NO: 597765 - RNA, 18 nt, Artificial Sequence
  Synthetic
uacccugcuuuuccuugg

SEQ ID NO: 597766 - RNA, 19 nt, Artificial Sequence
  Synthetic
guacccugcuuuuccuugg

SEQ ID NO: 597767 - RNA, 20 nt, Artificial Sequence
  Synthetic
gguacccugcuuuuccuugg

SEQ ID NO: 597768 - RNA, 21 nt, Artificial Sequence
  Synthetic
ugguacccugcuuuuccuugg

SEQ ID NO: 597769 - RNA, 22 nt, Artificial Sequence
  Synthetic
augguacccugcuuuuccuugg

SEQ ID NO: 597770 - RNA, 23 nt, Artificial Sequence
  Synthetic
aaugguacccugcuuuuccuugg

SEQ ID NO: 597771 - RNA, 24 nt, Artificial Sequence
  Synthetic
gaaugguacccugcuuuuccuugg

SEQ ID NO: 597772 - RNA, 18 nt, Artificial Sequence
  Synthetic
acaugcugauuggcuugg

SEQ ID NO: 597773 - RNA, 19 nt, Artificial Sequence
  Synthetic
uacaugcugauuggcuugg

SEQ ID NO: 597774 - RNA, 20 nt, Artificial Sequence
  Synthetic
cuacaugcugauuggcuugg

SEQ ID NO: 597775 - RNA, 21 nt, Artificial Sequence
  Synthetic
acuacaugcugauuggcuugg

SEQ ID NO: 597776 - RNA, 22 nt, Artificial Sequence
  Synthetic
gacuacaugcugauuggcuugg

SEQ ID NO: 597777 - RNA, 23 nt, Artificial Sequence
  Synthetic
ugacuacaugcugauuggcuugg

SEQ ID NO: 597778 - RNA, 24 nt, Artificial Sequence
  Synthetic
cugacuacaugcugauuggcuugg

SEQ ID NO: 597779 - RNA, 18 nt, Artificial Sequence
  Synthetic
aauuauuucucugcuugg

SEQ ID NO: 597780 - RNA, 19 nt, Artificial Sequence
  Synthetic
aaauuauuucucugcuugg

SEQ ID NO: 597781 - RNA, 20 nt, Artificial Sequence
  Synthetic
aaaauuauuucucugcuugg

SEQ ID NO: 597782 - RNA, 21 nt, Artificial Sequence
  Synthetic
caaaauuauuucucugcuugg

SEQ ID NO: 597783 - RNA, 22 nt, Artificial Sequence
  Synthetic
ucaaaauuauuucucugcuugg

SEQ ID NO: 597784 - RNA, 23 nt, Artificial Sequence
  Synthetic
uucaaaauuauuucucugcuugg

SEQ ID NO: 597785 - RNA, 24 nt, Artificial Sequence
  Synthetic
uuucaaaauuauuucucugcuugg

SEQ ID NO: 597786 - RNA, 18 nt, Artificial Sequence
  Synthetic
gcaguuucuucugcuugg

SEQ ID NO: 597787 - RNA, 19 nt, Artificial Sequence
  Synthetic
agcaguuucuucugcuugg

SEQ ID NO: 597788 - RNA, 20 nt, Artificial Sequence
  Synthetic
aagcaguuucuucugcuugg

SEQ ID NO: 597789 - RNA, 21 nt, Artificial Sequence
  Synthetic
uaagcaguuucuucugcuugg

SEQ ID NO: 597790 - RNA, 22 nt, Artificial Sequence
  Synthetic
guaagcaguuucuucugcuugg

SEQ ID NO: 597791 - RNA, 23 nt, Artificial Sequence
  Synthetic
uguaagcaguuucuucugcuugg

SEQ ID NO: 597792 - RNA, 24 nt, Artificial Sequence
  Synthetic
cuguaagcaguuucuucugcuugg

SEQ ID NO: 597793 - RNA, 18 nt, Artificial Sequence
  Synthetic
cacacaccaagugcuugg

SEQ ID NO: 597794 - RNA, 19 nt, Artificial Sequence
  Synthetic
acacacaccaagugcuugg

SEQ ID NO: 597795 - RNA, 20 nt, Artificial Sequence
  Synthetic
cacacacaccaagugcuugg

SEQ ID NO: 597796 - RNA, 21 nt, Artificial Sequence
  Synthetic
ucacacacaccaagugcuugg

SEQ ID NO: 597797 - RNA, 22 nt, Artificial Sequence
  Synthetic
cucacacacaccaagugcuugg

SEQ ID NO: 597798 - RNA, 23 nt, Artificial Sequence
  Synthetic
acucacacacaccaagugcuugg

SEQ ID NO: 597799 - RNA, 24 nt, Artificial Sequence
  Synthetic
uacucacacacaccaagugcuugg

SEQ ID NO: 597800 - RNA, 18 nt, Artificial Sequence
  Synthetic
ucauuugcaacaucuugg

SEQ ID NO: 597801 - RNA, 19 nt, Artificial Sequence
  Synthetic
gucauuugcaacaucuugg

SEQ ID NO: 597802 - RNA, 20 nt, Artificial Sequence
  Synthetic
ugucauuugcaacaucuugg

SEQ ID NO: 597803 - RNA, 21 nt, Artificial Sequence
  Synthetic
cugucauuugcaacaucuugg

SEQ ID NO: 597804 - RNA, 22 nt, Artificial Sequence
  Synthetic
ccugucauuugcaacaucuugg

SEQ ID NO: 597805 - RNA, 23 nt, Artificial Sequence
  Synthetic
uccugucauuugcaacaucuugg

SEQ ID NO: 597806 - RNA, 24 nt, Artificial Sequence
  Synthetic
auccugucauuugcaacaucuugg

SEQ ID NO: 597807 - RNA, 18 nt, Artificial Sequence
  Synthetic
aaaaguuauguaucuugg

SEQ ID NO: 597808 - RNA, 19 nt, Artificial Sequence
  Synthetic
uaaaaguuauguaucuugg

SEQ ID NO: 597809 - RNA, 20 nt, Artificial Sequence
  Synthetic
auaaaaguuauguaucuugg

SEQ ID NO: 597810 - RNA, 21 nt, Artificial Sequence
  Synthetic
aauaaaaguuauguaucuugg

SEQ ID NO: 597811 - RNA, 22 nt, Artificial Sequence
  Synthetic
gaauaaaaguuauguaucuugg

SEQ ID NO: 597812 - RNA, 23 nt, Artificial Sequence
  Synthetic
agaauaaaaguuauguaucuugg

SEQ ID NO: 597813 - RNA, 24 nt, Artificial Sequence
  Synthetic
gagaauaaaaguuauguaucuugg

SEQ ID NO: 597814 - RNA, 18 nt, Artificial Sequence
  Synthetic
gcuacuccucacucuugg

SEQ ID NO: 597815 - RNA, 19 nt, Artificial Sequence
  Synthetic
ugcuacuccucacucuugg

SEQ ID NO: 597816 - RNA, 20 nt, Artificial Sequence
  Synthetic
cugcuacuccucacucuugg

SEQ ID NO: 597817 - RNA, 21 nt, Artificial Sequence
  Synthetic
gcugcuacuccucacucuugg

SEQ ID NO: 597818 - RNA, 22 nt, Artificial Sequence
  Synthetic
ugcugcuacuccucacucuugg

SEQ ID NO: 597819 - RNA, 23 nt, Artificial Sequence
  Synthetic
gugcugcuacuccucacucuugg

SEQ ID NO: 597820 - RNA, 24 nt, Artificial Sequence
  Synthetic
cgugcugcuacuccucacucuugg

SEQ ID NO: 597821 - RNA, 18 nt, Artificial Sequence
  Synthetic
cagagaugcaagucuugg

SEQ ID NO: 597822 - RNA, 19 nt, Artificial Sequence
  Synthetic
ucagagaugcaagucuugg

SEQ ID NO: 597823 - RNA, 20 nt, Artificial Sequence
  Synthetic
uucagagaugcaagucuugg

SEQ ID NO: 597824 - RNA, 21 nt, Artificial Sequence
  Synthetic
uuucagagaugcaagucuugg

SEQ ID NO: 597825 - RNA, 22 nt, Artificial Sequence
  Synthetic
uuuucagagaugcaagucuugg

SEQ ID NO: 597826 - RNA, 23 nt, Artificial Sequence
  Synthetic
cuuuucagagaugcaagucuugg

SEQ ID NO: 597827 - RNA, 24 nt, Artificial Sequence
  Synthetic
acuuuucagagaugcaagucuugg

SEQ ID NO: 597828 - RNA, 18 nt, Artificial Sequence
  Synthetic
ccaagccuggagucuugg

SEQ ID NO: 597829 - RNA, 19 nt, Artificial Sequence
  Synthetic
uccaagccuggagucuugg

SEQ ID NO: 597830 - RNA, 20 nt, Artificial Sequence
  Synthetic
cuccaagccuggagucuugg

SEQ ID NO: 597831 - RNA, 21 nt, Artificial Sequence
  Synthetic
gcuccaagccuggagucuugg

SEQ ID NO: 597832 - RNA, 22 nt, Artificial Sequence
  Synthetic
ggcuccaagccuggagucuugg

SEQ ID NO: 597833 - RNA, 23 nt, Artificial Sequence
  Synthetic
uggcuccaagccuggagucuugg

SEQ ID NO: 597834 - RNA, 24 nt, Artificial Sequence
  Synthetic
auggcuccaagccuggagucuugg

SEQ ID NO: 597835 - RNA, 18 nt, Artificial Sequence
  Synthetic
ugagggauuccgucuugg

SEQ ID NO: 597836 - RNA, 19 nt, Artificial Sequence
  Synthetic
cugagggauuccgucuugg

SEQ ID NO: 597837 - RNA, 20 nt, Artificial Sequence
  Synthetic
acugagggauuccgucuugg

SEQ ID NO: 597838 - RNA, 21 nt, Artificial Sequence
  Synthetic
gacugagggauuccgucuugg

SEQ ID NO: 597839 - RNA, 22 nt, Artificial Sequence
  Synthetic
agacugagggauuccgucuugg

SEQ ID NO: 597840 - RNA, 23 nt, Artificial Sequence
  Synthetic
uagacugagggauuccgucuugg

SEQ ID NO: 597841 - RNA, 24 nt, Artificial Sequence
  Synthetic
auagacugagggauuccgucuugg

SEQ ID NO: 597842 - RNA, 18 nt, Artificial Sequence
  Synthetic
auuaaaaaaacuucuugg

SEQ ID NO: 597843 - RNA, 19 nt, Artificial Sequence
  Synthetic
aauuaaaaaaacuucuugg

SEQ ID NO: 597844 - RNA, 20 nt, Artificial Sequence
  Synthetic
aaauuaaaaaaacuucuugg

SEQ ID NO: 597845 - RNA, 21 nt, Artificial Sequence
  Synthetic
uaaauuaaaaaaacuucuugg

SEQ ID NO: 597846 - RNA, 22 nt, Artificial Sequence
  Synthetic
auaaauuaaaaaaacuucuugg

SEQ ID NO: 597847 - RNA, 23 nt, Artificial Sequence
  Synthetic
aauaaauuaaaaaaacuucuugg

SEQ ID NO: 597848 - RNA, 24 nt, Artificial Sequence
  Synthetic
caauaaauuaaaaaaacuucuugg

SEQ ID NO: 597849 - RNA, 18 nt, Artificial Sequence
  Synthetic
guucuguucuguucuugg

SEQ ID NO: 597850 - RNA, 19 nt, Artificial Sequence
  Synthetic
uguucuguucuguucuugg

SEQ ID NO: 597851 - RNA, 20 nt, Artificial Sequence
  Synthetic
uuguucuguucuguucuugg

SEQ ID NO: 597852 - RNA, 21 nt, Artificial Sequence
  Synthetic
guuguucuguucuguucuugg

SEQ ID NO: 597853 - RNA, 22 nt, Artificial Sequence
  Synthetic
gguuguucuguucuguucuugg

SEQ ID NO: 597854 - RNA, 23 nt, Artificial Sequence
  Synthetic
agguuguucuguucuguucuugg

SEQ ID NO: 597855 - RNA, 24 nt, Artificial Sequence
  Synthetic
uagguuguucuguucuguucuugg

SEQ ID NO: 597856 - RNA, 18 nt, Artificial Sequence
  Synthetic
gaaauaaacauaaguugg

SEQ ID NO: 597857 - RNA, 19 nt, Artificial Sequence
  Synthetic
ugaaauaaacauaaguugg

SEQ ID NO: 597858 - RNA, 20 nt, Artificial Sequence
  Synthetic
augaaauaaacauaaguugg

SEQ ID NO: 597859 - RNA, 21 nt, Artificial Sequence
  Synthetic
aaugaaauaaacauaaguugg

SEQ ID NO: 597860 - RNA, 22 nt, Artificial Sequence
  Synthetic
caaugaaauaaacauaaguugg

SEQ ID NO: 597861 - RNA, 23 nt, Artificial Sequence
  Synthetic
ccaaugaaauaaacauaaguugg

SEQ ID NO: 597862 - RNA, 24 nt, Artificial Sequence
  Synthetic
accaaugaaauaaacauaaguugg

SEQ ID NO: 597863 - RNA, 18 nt, Artificial Sequence
  Synthetic
agagguugaaacaguugg

SEQ ID NO: 597864 - RNA, 19 nt, Artificial Sequence
  Synthetic
cagagguugaaacaguugg

SEQ ID NO: 597865 - RNA, 20 nt, Artificial Sequence
  Synthetic
gcagagguugaaacaguugg

SEQ ID NO: 597866 - RNA, 21 nt, Artificial Sequence
  Synthetic
ggcagagguugaaacaguugg

SEQ ID NO: 597867 - RNA, 22 nt, Artificial Sequence
  Synthetic
aggcagagguugaaacaguugg

SEQ ID NO: 597868 - RNA, 23 nt, Artificial Sequence
  Synthetic
caggcagagguugaaacaguugg

SEQ ID NO: 597869 - RNA, 24 nt, Artificial Sequence
  Synthetic
acaggcagagguugaaacaguugg

SEQ ID NO: 597870 - RNA, 18 nt, Artificial Sequence
  Synthetic
cuuauuaggcacaguugg

SEQ ID NO: 597871 - RNA, 19 nt, Artificial Sequence
  Synthetic
acuuauuaggcacaguugg

SEQ ID NO: 597872 - RNA, 20 nt, Artificial Sequence
  Synthetic
gacuuauuaggcacaguugg

SEQ ID NO: 597873 - RNA, 21 nt, Artificial Sequence
  Synthetic
ggacuuauuaggcacaguugg

SEQ ID NO: 597874 - RNA, 22 nt, Artificial Sequence
  Synthetic
aggacuuauuaggcacaguugg

SEQ ID NO: 597875 - RNA, 23 nt, Artificial Sequence
  Synthetic
aaggacuuauuaggcacaguugg

SEQ ID NO: 597876 - RNA, 24 nt, Artificial Sequence
  Synthetic
caaggacuuauuaggcacaguugg

SEQ ID NO: 597877 - RNA, 18 nt, Artificial Sequence
  Synthetic
ucauuagcaaucaguugg

SEQ ID NO: 597878 - RNA, 19 nt, Artificial Sequence
  Synthetic
gucauuagcaaucaguugg

SEQ ID NO: 597879 - RNA, 20 nt, Artificial Sequence
  Synthetic
agucauuagcaaucaguugg

SEQ ID NO: 597880 - RNA, 21 nt, Artificial Sequence
  Synthetic
uagucauuagcaaucaguugg

SEQ ID NO: 597881 - RNA, 22 nt, Artificial Sequence
  Synthetic
uuagucauuagcaaucaguugg

SEQ ID NO: 597882 - RNA, 23 nt, Artificial Sequence
  Synthetic
uuuagucauuagcaaucaguugg

SEQ ID NO: 597883 - RNA, 24 nt, Artificial Sequence
  Synthetic
cuuuagucauuagcaaucaguugg

SEQ ID NO: 597884 - RNA, 18 nt, Artificial Sequence
  Synthetic
uaguaagaucagaguugg

SEQ ID NO: 597885 - RNA, 19 nt, Artificial Sequence
  Synthetic
uuaguaagaucagaguugg

SEQ ID NO: 597886 - RNA, 20 nt, Artificial Sequence
  Synthetic
cuuaguaagaucagaguugg

SEQ ID NO: 597887 - RNA, 21 nt, Artificial Sequence
  Synthetic
ccuuaguaagaucagaguugg

SEQ ID NO: 597888 - RNA, 22 nt, Artificial Sequence
  Synthetic
gccuuaguaagaucagaguugg

SEQ ID NO: 597889 - RNA, 23 nt, Artificial Sequence
  Synthetic
agccuuaguaagaucagaguugg

SEQ ID NO: 597890 - RNA, 24 nt, Artificial Sequence
  Synthetic
aagccuuaguaagaucagaguugg

SEQ ID NO: 597891 - RNA, 18 nt, Artificial Sequence
  Synthetic
aaguuuauucagaguugg

SEQ ID NO: 597892 - RNA, 19 nt, Artificial Sequence
  Synthetic
caaguuuauucagaguugg

SEQ ID NO: 597893 - RNA, 20 nt, Artificial Sequence
  Synthetic
acaaguuuauucagaguugg

SEQ ID NO: 597894 - RNA, 21 nt, Artificial Sequence
  Synthetic
cacaaguuuauucagaguugg

SEQ ID NO: 597895 - RNA, 22 nt, Artificial Sequence
  Synthetic
ucacaaguuuauucagaguugg

SEQ ID NO: 597896 - RNA, 23 nt, Artificial Sequence
  Synthetic
aucacaaguuuauucagaguugg

SEQ ID NO: 597897 - RNA, 24 nt, Artificial Sequence
  Synthetic
uaucacaaguuuauucagaguugg

SEQ ID NO: 597898 - RNA, 18 nt, Artificial Sequence
  Synthetic
guaggacaguagaguugg

SEQ ID NO: 597899 - RNA, 19 nt, Artificial Sequence
  Synthetic
gguaggacaguagaguugg

SEQ ID NO: 597900 - RNA, 20 nt, Artificial Sequence
  Synthetic
ggguaggacaguagaguugg

SEQ ID NO: 597901 - RNA, 21 nt, Artificial Sequence
  Synthetic
uggguaggacaguagaguugg

SEQ ID NO: 597902 - RNA, 22 nt, Artificial Sequence
  Synthetic
auggguaggacaguagaguugg

SEQ ID NO: 597903 - RNA, 23 nt, Artificial Sequence
  Synthetic
aauggguaggacaguagaguugg

SEQ ID NO: 597904 - RNA, 24 nt, Artificial Sequence
  Synthetic
uaauggguaggacaguagaguugg

SEQ ID NO: 597905 - RNA, 18 nt, Artificial Sequence
  Synthetic
uaccuaacaauuaguugg

SEQ ID NO: 597906 - RNA, 19 nt, Artificial Sequence
  Synthetic
auaccuaacaauuaguugg

SEQ ID NO: 597907 - RNA, 20 nt, Artificial Sequence
  Synthetic
gauaccuaacaauuaguugg

SEQ ID NO: 597908 - RNA, 21 nt, Artificial Sequence
  Synthetic
ugauaccuaacaauuaguugg

SEQ ID NO: 597909 - RNA, 22 nt, Artificial Sequence
  Synthetic
gugauaccuaacaauuaguugg

SEQ ID NO: 597910 - RNA, 23 nt, Artificial Sequence
  Synthetic
agugauaccuaacaauuaguugg

SEQ ID NO: 597911 - RNA, 24 nt, Artificial Sequence
  Synthetic
uagugauaccuaacaauuaguugg

SEQ ID NO: 597912 - RNA, 18 nt, Artificial Sequence
  Synthetic
agauucugauuuaguugg

SEQ ID NO: 597913 - RNA, 19 nt, Artificial Sequence
  Synthetic
gagauucugauuuaguugg

SEQ ID NO: 597914 - RNA, 20 nt, Artificial Sequence
  Synthetic
agagauucugauuuaguugg

SEQ ID NO: 597915 - RNA, 21 nt, Artificial Sequence
  Synthetic
cagagauucugauuuaguugg

SEQ ID NO: 597916 - RNA, 22 nt, Artificial Sequence
  Synthetic
ccagagauucugauuuaguugg

SEQ ID NO: 597917 - RNA, 23 nt, Artificial Sequence
  Synthetic
cccagagauucugauuuaguugg

SEQ ID NO: 597918 - RNA, 24 nt, Artificial Sequence
  Synthetic
ccccagagauucugauuuaguugg

SEQ ID NO: 597919 - RNA, 18 nt, Artificial Sequence
  Synthetic
acacuuucacaccguugg

SEQ ID NO: 597920 - RNA, 19 nt, Artificial Sequence
  Synthetic
aacacuuucacaccguugg

SEQ ID NO: 597921 - RNA, 20 nt, Artificial Sequence
  Synthetic
gaacacuuucacaccguugg

SEQ ID NO: 597922 - RNA, 21 nt, Artificial Sequence
  Synthetic
ggaacacuuucacaccguugg

SEQ ID NO: 597923 - RNA, 22 nt, Artificial Sequence
  Synthetic
aggaacacuuucacaccguugg

SEQ ID NO: 597924 - RNA, 23 nt, Artificial Sequence
  Synthetic
caggaacacuuucacaccguugg

SEQ ID NO: 597925 - RNA, 24 nt, Artificial Sequence
  Synthetic
acaggaacacuuucacaccguugg

SEQ ID NO: 597926 - RNA, 18 nt, Artificial Sequence
  Synthetic
ggaaagaaaaaagguugg

SEQ ID NO: 597927 - RNA, 19 nt, Artificial Sequence
  Synthetic
uggaaagaaaaaagguugg

SEQ ID NO: 597928 - RNA, 20 nt, Artificial Sequence
  Synthetic
auggaaagaaaaaagguugg

SEQ ID NO: 597929 - RNA, 21 nt, Artificial Sequence
  Synthetic
aauggaaagaaaaaagguugg

SEQ ID NO: 597930 - RNA, 22 nt, Artificial Sequence
  Synthetic
gaauggaaagaaaaaagguugg

SEQ ID NO: 597931 - RNA, 23 nt, Artificial Sequence
  Synthetic
agaauggaaagaaaaaagguugg

SEQ ID NO: 597932 - RNA, 24 nt, Artificial Sequence
  Synthetic
gagaauggaaagaaaaaagguugg

SEQ ID NO: 597933 - RNA, 18 nt, Artificial Sequence
  Synthetic
agguaaggagaagguugg

SEQ ID NO: 597934 - RNA, 19 nt, Artificial Sequence
  Synthetic
aagguaaggagaagguugg

SEQ ID NO: 597935 - RNA, 20 nt, Artificial Sequence
  Synthetic
aaagguaaggagaagguugg

SEQ ID NO: 597936 - RNA, 21 nt, Artificial Sequence
  Synthetic
caaagguaaggagaagguugg

SEQ ID NO: 597937 - RNA, 22 nt, Artificial Sequence
  Synthetic
ucaaagguaaggagaagguugg

SEQ ID NO: 597938 - RNA, 23 nt, Artificial Sequence
  Synthetic
aucaaagguaaggagaagguugg

SEQ ID NO: 597939 - RNA, 24 nt, Artificial Sequence
  Synthetic
caucaaagguaaggagaagguugg

SEQ ID NO: 597940 - RNA, 18 nt, Artificial Sequence
  Synthetic
cacauucaaagagguugg

SEQ ID NO: 597941 - RNA, 19 nt, Artificial Sequence
  Synthetic
ucacauucaaagagguugg

SEQ ID NO: 597942 - RNA, 20 nt, Artificial Sequence
  Synthetic
uucacauucaaagagguugg

SEQ ID NO: 597943 - RNA, 21 nt, Artificial Sequence
  Synthetic
auucacauucaaagagguugg

SEQ ID NO: 597944 - RNA, 22 nt, Artificial Sequence
  Synthetic
uauucacauucaaagagguugg

SEQ ID NO: 597945 - RNA, 23 nt, Artificial Sequence
  Synthetic
auauucacauucaaagagguugg

SEQ ID NO: 597946 - RNA, 24 nt, Artificial Sequence
  Synthetic
uauauucacauucaaagagguugg

SEQ ID NO: 597947 - RNA, 18 nt, Artificial Sequence
  Synthetic
ugaaccuuaauagguugg

SEQ ID NO: 597948 - RNA, 19 nt, Artificial Sequence
  Synthetic
uugaaccuuaauagguugg

SEQ ID NO: 597949 - RNA, 20 nt, Artificial Sequence
  Synthetic
uuugaaccuuaauagguugg

SEQ ID NO: 597950 - RNA, 21 nt, Artificial Sequence
  Synthetic
guuugaaccuuaauagguugg

SEQ ID NO: 597951 - RNA, 22 nt, Artificial Sequence
  Synthetic
gguuugaaccuuaauagguugg

SEQ ID NO: 597952 - RNA, 23 nt, Artificial Sequence
  Synthetic
ggguuugaaccuuaauagguugg

SEQ ID NO: 597953 - RNA, 24 nt, Artificial Sequence
  Synthetic
uggguuugaaccuuaauagguugg

SEQ ID NO: 597954 - RNA, 18 nt, Artificial Sequence
  Synthetic
uaccgcaaauaggguugg

SEQ ID NO: 597955 - RNA, 19 nt, Artificial Sequence
  Synthetic
auaccgcaaauaggguugg

SEQ ID NO: 597956 - RNA, 20 nt, Artificial Sequence
  Synthetic
aauaccgcaaauaggguugg

SEQ ID NO: 597957 - RNA, 21 nt, Artificial Sequence
  Synthetic
gaauaccgcaaauaggguugg

SEQ ID NO: 597958 - RNA, 22 nt, Artificial Sequence
  Synthetic
ggaauaccgcaaauaggguugg

SEQ ID NO: 597959 - RNA, 23 nt, Artificial Sequence
  Synthetic
aggaauaccgcaaauaggguugg

SEQ ID NO: 597960 - RNA, 24 nt, Artificial Sequence
  Synthetic
aaggaauaccgcaaauaggguugg

SEQ ID NO: 597961 - RNA, 18 nt, Artificial Sequence
  Synthetic
uucaagauuggggguugg

SEQ ID NO: 597962 - RNA, 19 nt, Artificial Sequence
  Synthetic
uuucaagauuggggguugg

SEQ ID NO: 597963 - RNA, 20 nt, Artificial Sequence
  Synthetic
cuuucaagauuggggguugg

SEQ ID NO: 597964 - RNA, 21 nt, Artificial Sequence
  Synthetic
gcuuucaagauuggggguugg

SEQ ID NO: 597965 - RNA, 22 nt, Artificial Sequence
  Synthetic
ugcuuucaagauuggggguugg

SEQ ID NO: 597966 - RNA, 23 nt, Artificial Sequence
  Synthetic
cugcuuucaagauuggggguugg

SEQ ID NO: 597967 - RNA, 24 nt, Artificial Sequence
  Synthetic
ccugcuuucaagauuggggguugg

SEQ ID NO: 597968 - RNA, 18 nt, Artificial Sequence
  Synthetic
ggagaugacugggguugg

SEQ ID NO: 597969 - RNA, 19 nt, Artificial Sequence
  Synthetic
uggagaugacugggguugg

SEQ ID NO: 597970 - RNA, 20 nt, Artificial Sequence
  Synthetic
uuggagaugacugggguugg

SEQ ID NO: 597971 - RNA, 21 nt, Artificial Sequence
  Synthetic
guuggagaugacugggguugg

SEQ ID NO: 597972 - RNA, 22 nt, Artificial Sequence
  Synthetic
uguuggagaugacugggguugg

SEQ ID NO: 597973 - RNA, 23 nt, Artificial Sequence
  Synthetic
auguuggagaugacugggguugg

SEQ ID NO: 597974 - RNA, 24 nt, Artificial Sequence
  Synthetic
cauguuggagaugacugggguugg

SEQ ID NO: 597975 - RNA, 18 nt, Artificial Sequence
  Synthetic
auaggcuguugggguugg

SEQ ID NO: 597976 - RNA, 19 nt, Artificial Sequence
  Synthetic
cauaggcuguugggguugg

SEQ ID NO: 597977 - RNA, 20 nt, Artificial Sequence
  Synthetic
acauaggcuguugggguugg

SEQ ID NO: 597978 - RNA, 21 nt, Artificial Sequence
  Synthetic
uacauaggcuguugggguugg

SEQ ID NO: 597979 - RNA, 22 nt, Artificial Sequence
  Synthetic
auacauaggcuguugggguugg

SEQ ID NO: 597980 - RNA, 23 nt, Artificial Sequence
  Synthetic
cauacauaggcuguugggguugg

SEQ ID NO: 597981 - RNA, 24 nt, Artificial Sequence
  Synthetic
ucauacauaggcuguugggguugg

SEQ ID NO: 597982 - RNA, 18 nt, Artificial Sequence
  Synthetic
auaucacuuaaugguugg

SEQ ID NO: 597983 - RNA, 19 nt, Artificial Sequence
  Synthetic
aauaucacuuaaugguugg

SEQ ID NO: 597984 - RNA, 20 nt, Artificial Sequence
  Synthetic
caauaucacuuaaugguugg

SEQ ID NO: 597985 - RNA, 21 nt, Artificial Sequence
  Synthetic
gcaauaucacuuaaugguugg

SEQ ID NO: 597986 - RNA, 22 nt, Artificial Sequence
  Synthetic
ggcaauaucacuuaaugguugg

SEQ ID NO: 597987 - RNA, 23 nt, Artificial Sequence
  Synthetic
uggcaauaucacuuaaugguugg

SEQ ID NO: 597988 - RNA, 24 nt, Artificial Sequence
  Synthetic
uuggcaauaucacuuaaugguugg

SEQ ID NO: 597989 - RNA, 18 nt, Artificial Sequence
  Synthetic
aaagcuauuucugguugg

SEQ ID NO: 597990 - RNA, 19 nt, Artificial Sequence
  Synthetic
aaaagcuauuucugguugg

SEQ ID NO: 597991 - RNA, 20 nt, Artificial Sequence
  Synthetic
aaaaagcuauuucugguugg

SEQ ID NO: 597992 - RNA, 21 nt, Artificial Sequence
  Synthetic
caaaaagcuauuucugguugg

SEQ ID NO: 597993 - RNA, 22 nt, Artificial Sequence
  Synthetic
acaaaaagcuauuucugguugg

SEQ ID NO: 597994 - RNA, 23 nt, Artificial Sequence
  Synthetic
uacaaaaagcuauuucugguugg

SEQ ID NO: 597995 - RNA, 24 nt, Artificial Sequence
  Synthetic
cuacaaaaagcuauuucugguugg

SEQ ID NO: 597996 - RNA, 18 nt, Artificial Sequence
  Synthetic
guauaugguggugguugg

SEQ ID NO: 597997 - RNA, 19 nt, Artificial Sequence
  Synthetic
uguauaugguggugguugg

SEQ ID NO: 597998 - RNA, 20 nt, Artificial Sequence
  Synthetic
cuguauaugguggugguugg

SEQ ID NO: 597999 - RNA, 21 nt, Artificial Sequence
  Synthetic
ucuguauaugguggugguugg

SEQ ID NO: 598000 - RNA, 22 nt, Artificial Sequence
  Synthetic
aucuguauaugguggugguugg

SEQ ID NO: 598001 - RNA, 23 nt, Artificial Sequence
  Synthetic
uaucuguauaugguggugguugg

SEQ ID NO: 598002 - RNA, 24 nt, Artificial Sequence
  Synthetic
auaucuguauaugguggugguugg

SEQ ID NO: 598003 - RNA, 18 nt, Artificial Sequence
  Synthetic
aagagaaaucaauguugg

SEQ ID NO: 598004 - RNA, 19 nt, Artificial Sequence
  Synthetic
aaagagaaaucaauguugg

SEQ ID NO: 598005 - RNA, 20 nt, Artificial Sequence
  Synthetic
aaaagagaaaucaauguugg

SEQ ID NO: 598006 - RNA, 21 nt, Artificial Sequence
  Synthetic
aaaaagagaaaucaauguugg

SEQ ID NO: 598007 - RNA, 22 nt, Artificial Sequence
  Synthetic
uaaaaagagaaaucaauguugg

SEQ ID NO: 598008 - RNA, 23 nt, Artificial Sequence
  Synthetic
uuaaaaagagaaaucaauguugg

SEQ ID NO: 598009 - RNA, 24 nt, Artificial Sequence
  Synthetic
uuuaaaaagagaaaucaauguugg

SEQ ID NO: 598010 - RNA, 18 nt, Artificial Sequence
  Synthetic
aggguuucaccauguugg

SEQ ID NO: 598011 - RNA, 19 nt, Artificial Sequence
  Synthetic
caggguuucaccauguugg

SEQ ID NO: 598012 - RNA, 20 nt, Artificial Sequence
  Synthetic
acaggguuucaccauguugg

SEQ ID NO: 598013 - RNA, 21 nt, Artificial Sequence
  Synthetic
gacaggguuucaccauguugg

SEQ ID NO: 598014 - RNA, 22 nt, Artificial Sequence
  Synthetic
agacaggguuucaccauguugg

SEQ ID NO: 598015 - RNA, 23 nt, Artificial Sequence
  Synthetic
gagacaggguuucaccauguugg

SEQ ID NO: 598016 - RNA, 24 nt, Artificial Sequence
  Synthetic
agagacaggguuucaccauguugg

SEQ ID NO: 598017 - RNA, 18 nt, Artificial Sequence
  Synthetic
gggguuucaccauguugg

SEQ ID NO: 598018 - RNA, 19 nt, Artificial Sequence
  Synthetic
ugggguuucaccauguugg

SEQ ID NO: 598019 - RNA, 20 nt, Artificial Sequence
  Synthetic
augggguuucaccauguugg

SEQ ID NO: 598020 - RNA, 21 nt, Artificial Sequence
  Synthetic
gaugggguuucaccauguugg

SEQ ID NO: 598021 - RNA, 22 nt, Artificial Sequence
  Synthetic
agaugggguuucaccauguugg

SEQ ID NO: 598022 - RNA, 23 nt, Artificial Sequence
  Synthetic
gagaugggguuucaccauguugg

SEQ ID NO: 598023 - RNA, 24 nt, Artificial Sequence
  Synthetic
agagaugggguuucaccauguugg

SEQ ID NO: 598024 - RNA, 18 nt, Artificial Sequence
  Synthetic
ggaguuuugccauguugg

SEQ ID NO: 598025 - RNA, 19 nt, Artificial Sequence
  Synthetic
cggaguuuugccauguugg

SEQ ID NO: 598026 - RNA, 20 nt, Artificial Sequence
  Synthetic
acggaguuuugccauguugg

SEQ ID NO: 598027 - RNA, 21 nt, Artificial Sequence
  Synthetic
gacggaguuuugccauguugg

SEQ ID NO: 598028 - RNA, 22 nt, Artificial Sequence
  Synthetic
agacggaguuuugccauguugg

SEQ ID NO: 598029 - RNA, 23 nt, Artificial Sequence
  Synthetic
gagacggaguuuugccauguugg

SEQ ID NO: 598030 - RNA, 24 nt, Artificial Sequence
  Synthetic
agagacggaguuuugccauguugg

SEQ ID NO: 598031 - RNA, 18 nt, Artificial Sequence
  Synthetic
aguaugaacauauguugg

SEQ ID NO: 598032 - RNA, 19 nt, Artificial Sequence
  Synthetic
aaguaugaacauauguugg

SEQ ID NO: 598033 - RNA, 20 nt, Artificial Sequence
  Synthetic
gaaguaugaacauauguugg

SEQ ID NO: 598034 - RNA, 21 nt, Artificial Sequence
  Synthetic
ggaaguaugaacauauguugg

SEQ ID NO: 598035 - RNA, 22 nt, Artificial Sequence
  Synthetic
gggaaguaugaacauauguugg

SEQ ID NO: 598036 - RNA, 23 nt, Artificial Sequence
  Synthetic
agggaaguaugaacauauguugg

SEQ ID NO: 598037 - RNA, 24 nt, Artificial Sequence
  Synthetic
aagggaaguaugaacauauguugg

SEQ ID NO: 598038 - RNA, 18 nt, Artificial Sequence
  Synthetic
aaccuugcacacuguugg

SEQ ID NO: 598039 - RNA, 19 nt, Artificial Sequence
  Synthetic
aaaccuugcacacuguugg

SEQ ID NO: 598040 - RNA, 20 nt, Artificial Sequence
  Synthetic
aaaaccuugcacacuguugg

SEQ ID NO: 598041 - RNA, 21 nt, Artificial Sequence
  Synthetic
gaaaaccuugcacacuguugg

SEQ ID NO: 598042 - RNA, 22 nt, Artificial Sequence
  Synthetic
ggaaaaccuugcacacuguugg

SEQ ID NO: 598043 - RNA, 23 nt, Artificial Sequence
  Synthetic
aggaaaaccuugcacacuguugg

SEQ ID NO: 598044 - RNA, 24 nt, Artificial Sequence
  Synthetic
aaggaaaaccuugcacacuguugg

SEQ ID NO: 598045 - RNA, 18 nt, Artificial Sequence
  Synthetic
acuccuguacacuguugg

SEQ ID NO: 598046 - RNA, 19 nt, Artificial Sequence
  Synthetic
gacuccuguacacuguugg

SEQ ID NO: 598047 - RNA, 20 nt, Artificial Sequence
  Synthetic
ggacuccuguacacuguugg

SEQ ID NO: 598048 - RNA, 21 nt, Artificial Sequence
  Synthetic
gggacuccuguacacuguugg

SEQ ID NO: 598049 - RNA, 22 nt, Artificial Sequence
  Synthetic
ggggacuccuguacacuguugg

SEQ ID NO: 598050 - RNA, 23 nt, Artificial Sequence
  Synthetic
aggggacuccuguacacuguugg

SEQ ID NO: 598051 - RNA, 24 nt, Artificial Sequence
  Synthetic
aaggggacuccuguacacuguugg

SEQ ID NO: 598052 - RNA, 21 nt, Artificial Sequence
  Synthetic
ggaacgcuuuuacacuguugg

SEQ ID NO: 598053 - RNA, 22 nt, Artificial Sequence
  Synthetic
aggaacgcuuuuacacuguugg

SEQ ID NO: 598054 - RNA, 23 nt, Artificial Sequence
  Synthetic
aaggaacgcuuuuacacuguugg

SEQ ID NO: 598055 - RNA, 24 nt, Artificial Sequence
  Synthetic
aaaggaacgcuuuuacacuguugg

SEQ ID NO: 598056 - RNA, 18 nt, Artificial Sequence
  Synthetic
acucuuuuacacuguugg

SEQ ID NO: 598057 - RNA, 19 nt, Artificial Sequence
  Synthetic
aacucuuuuacacuguugg

SEQ ID NO: 598058 - RNA, 20 nt, Artificial Sequence
  Synthetic
gaacucuuuuacacuguugg

SEQ ID NO: 598059 - RNA, 21 nt, Artificial Sequence
  Synthetic
ggaacucuuuuacacuguugg

SEQ ID NO: 598060 - RNA, 22 nt, Artificial Sequence
  Synthetic
aggaacucuuuuacacuguugg

SEQ ID NO: 598061 - RNA, 23 nt, Artificial Sequence
  Synthetic
uaggaacucuuuuacacuguugg

SEQ ID NO: 598062 - RNA, 24 nt, Artificial Sequence
  Synthetic
auaggaacucuuuuacacuguugg

SEQ ID NO: 598063 - RNA, 18 nt, Artificial Sequence
  Synthetic
acccuuaugcacuguugg

SEQ ID NO: 598064 - RNA, 19 nt, Artificial Sequence
  Synthetic
aacccuuaugcacuguugg

SEQ ID NO: 598065 - RNA, 20 nt, Artificial Sequence
  Synthetic
gaacccuuaugcacuguugg

SEQ ID NO: 598066 - RNA, 21 nt, Artificial Sequence
  Synthetic
ggaacccuuaugcacuguugg

SEQ ID NO: 598067 - RNA, 22 nt, Artificial Sequence
  Synthetic
gggaacccuuaugcacuguugg

SEQ ID NO: 598068 - RNA, 23 nt, Artificial Sequence
  Synthetic
agggaacccuuaugcacuguugg

SEQ ID NO: 598069 - RNA, 24 nt, Artificial Sequence
  Synthetic
aagggaacccuuaugcacuguugg

SEQ ID NO: 598070 - RNA, 18 nt, Artificial Sequence
  Synthetic
acccuuguauacuguugg

SEQ ID NO: 598071 - RNA, 19 nt, Artificial Sequence
  Synthetic
aacccuuguauacuguugg

SEQ ID NO: 598072 - RNA, 20 nt, Artificial Sequence
  Synthetic
gaacccuuguauacuguugg

SEQ ID NO: 598073 - RNA, 21 nt, Artificial Sequence
  Synthetic
ggaacccuuguauacuguugg

SEQ ID NO: 598074 - RNA, 22 nt, Artificial Sequence
  Synthetic
aggaacccuuguauacuguugg

SEQ ID NO: 598075 - RNA, 23 nt, Artificial Sequence
  Synthetic
aaggaacccuuguauacuguugg

SEQ ID NO: 598076 - RNA, 24 nt, Artificial Sequence
  Synthetic
aaaggaacccuuguauacuguugg

SEQ ID NO: 598077 - RNA, 18 nt, Artificial Sequence
  Synthetic
guauucugcuacuguugg

SEQ ID NO: 598078 - RNA, 19 nt, Artificial Sequence
  Synthetic
uguauucugcuacuguugg

SEQ ID NO: 598079 - RNA, 20 nt, Artificial Sequence
  Synthetic
guguauucugcuacuguugg

SEQ ID NO: 598080 - RNA, 21 nt, Artificial Sequence
  Synthetic
uguguauucugcuacuguugg

SEQ ID NO: 598081 - RNA, 22 nt, Artificial Sequence
  Synthetic
auguguauucugcuacuguugg

SEQ ID NO: 598082 - RNA, 23 nt, Artificial Sequence
  Synthetic
aauguguauucugcuacuguugg

SEQ ID NO: 598083 - RNA, 24 nt, Artificial Sequence
  Synthetic
uaauguguauucugcuacuguugg

SEQ ID NO: 598084 - RNA, 18 nt, Artificial Sequence
  Synthetic
augcuuauacccuguugg

SEQ ID NO: 598085 - RNA, 19 nt, Artificial Sequence
  Synthetic
aaugcuuauacccuguugg

SEQ ID NO: 598086 - RNA, 20 nt, Artificial Sequence
  Synthetic
gaaugcuuauacccuguugg

SEQ ID NO: 598087 - RNA, 21 nt, Artificial Sequence
  Synthetic
ggaaugcuuauacccuguugg

SEQ ID NO: 598088 - RNA, 22 nt, Artificial Sequence
  Synthetic
gggaaugcuuauacccuguugg

SEQ ID NO: 598089 - RNA, 23 nt, Artificial Sequence
  Synthetic
ggggaaugcuuauacccuguugg

SEQ ID NO: 598090 - RNA, 24 nt, Artificial Sequence
  Synthetic
aggggaaugcuuauacccuguugg

SEQ ID NO: 598091 - RNA, 18 nt, Artificial Sequence
  Synthetic
uauaucaaaaucuguugg

SEQ ID NO: 598092 - RNA, 19 nt, Artificial Sequence
  Synthetic
auauaucaaaaucuguugg

SEQ ID NO: 598093 - RNA, 20 nt, Artificial Sequence
  Synthetic
gauauaucaaaaucuguugg

SEQ ID NO: 598094 - RNA, 21 nt, Artificial Sequence
  Synthetic
agauauaucaaaaucuguugg

SEQ ID NO: 598095 - RNA, 22 nt, Artificial Sequence
  Synthetic
cagauauaucaaaaucuguugg

SEQ ID NO: 598096 - RNA, 23 nt, Artificial Sequence
  Synthetic
acagauauaucaaaaucuguugg

SEQ ID NO: 598097 - RNA, 24 nt, Artificial Sequence
  Synthetic
gacagauauaucaaaaucuguugg

SEQ ID NO: 598098 - RNA, 18 nt, Artificial Sequence
  Synthetic
uuaaaaugaaaguguugg

SEQ ID NO: 598099 - RNA, 19 nt, Artificial Sequence
  Synthetic
auuaaaaugaaaguguugg

SEQ ID NO: 598100 - RNA, 20 nt, Artificial Sequence
  Synthetic
gauuaaaaugaaaguguugg

SEQ ID NO: 598101 - RNA, 21 nt, Artificial Sequence
  Synthetic
ggauuaaaaugaaaguguugg

SEQ ID NO: 598102 - RNA, 22 nt, Artificial Sequence
  Synthetic
uggauuaaaaugaaaguguugg

SEQ ID NO: 598103 - RNA, 23 nt, Artificial Sequence
  Synthetic
auggauuaaaaugaaaguguugg

SEQ ID NO: 598104 - RNA, 24 nt, Artificial Sequence
  Synthetic
cauggauuaaaaugaaaguguugg

SEQ ID NO: 598105 - RNA, 18 nt, Artificial Sequence
  Synthetic
gaucuccacaaguguugg

SEQ ID NO: 598106 - RNA, 19 nt, Artificial Sequence
  Synthetic
ugaucuccacaaguguugg

SEQ ID NO: 598107 - RNA, 20 nt, Artificial Sequence
  Synthetic
gugaucuccacaaguguugg

SEQ ID NO: 598108 - RNA, 21 nt, Artificial Sequence
  Synthetic
ggugaucuccacaaguguugg

SEQ ID NO: 598109 - RNA, 22 nt, Artificial Sequence
  Synthetic
uggugaucuccacaaguguugg

SEQ ID NO: 598110 - RNA, 23 nt, Artificial Sequence
  Synthetic
cuggugaucuccacaaguguugg

SEQ ID NO: 598111 - RNA, 24 nt, Artificial Sequence
  Synthetic
ccuggugaucuccacaaguguugg

SEQ ID NO: 598112 - RNA, 18 nt, Artificial Sequence
  Synthetic
cuagaaacaauguguugg

SEQ ID NO: 598113 - RNA, 19 nt, Artificial Sequence
  Synthetic
gcuagaaacaauguguugg

SEQ ID NO: 598114 - RNA, 20 nt, Artificial Sequence
  Synthetic
agcuagaaacaauguguugg

SEQ ID NO: 598115 - RNA, 21 nt, Artificial Sequence
  Synthetic
aagcuagaaacaauguguugg

SEQ ID NO: 598116 - RNA, 22 nt, Artificial Sequence
  Synthetic
caagcuagaaacaauguguugg

SEQ ID NO: 598117 - RNA, 23 nt, Artificial Sequence
  Synthetic
acaagcuagaaacaauguguugg

SEQ ID NO: 598118 - RNA, 24 nt, Artificial Sequence
  Synthetic
cacaagcuagaaacaauguguugg

SEQ ID NO: 598119 - RNA, 18 nt, Artificial Sequence
  Synthetic
caauuacauguguguugg

SEQ ID NO: 598120 - RNA, 19 nt, Artificial Sequence
  Synthetic
ccaauuacauguguguugg

SEQ ID NO: 598121 - RNA, 20 nt, Artificial Sequence
  Synthetic
gccaauuacauguguguugg

SEQ ID NO: 598122 - RNA, 21 nt, Artificial Sequence
  Synthetic
ggccaauuacauguguguugg

SEQ ID NO: 598123 - RNA, 22 nt, Artificial Sequence
  Synthetic
uggccaauuacauguguguugg

SEQ ID NO: 598124 - RNA, 23 nt, Artificial Sequence
  Synthetic
guggccaauuacauguguguugg

SEQ ID NO: 598125 - RNA, 24 nt, Artificial Sequence
  Synthetic
gguggccaauuacauguguguugg

SEQ ID NO: 598126 - RNA, 18 nt, Artificial Sequence
  Synthetic
ucagugacuguguguugg

SEQ ID NO: 598127 - RNA, 19 nt, Artificial Sequence
  Synthetic
uucagugacuguguguugg

SEQ ID NO: 598128 - RNA, 20 nt, Artificial Sequence
  Synthetic
auucagugacuguguguugg

SEQ ID NO: 598129 - RNA, 21 nt, Artificial Sequence
  Synthetic
aauucagugacuguguguugg

SEQ ID NO: 598130 - RNA, 22 nt, Artificial Sequence
  Synthetic
gaauucagugacuguguguugg

SEQ ID NO: 598131 - RNA, 23 nt, Artificial Sequence
  Synthetic
agaauucagugacuguguguugg

SEQ ID NO: 598132 - RNA, 24 nt, Artificial Sequence
  Synthetic
cagaauucagugacuguguguugg

SEQ ID NO: 598133 - RNA, 18 nt, Artificial Sequence
  Synthetic
acacuucugcauuguugg

SEQ ID NO: 598134 - RNA, 19 nt, Artificial Sequence
  Synthetic
aacacuucugcauuguugg

SEQ ID NO: 598135 - RNA, 20 nt, Artificial Sequence
  Synthetic
aaacacuucugcauuguugg

SEQ ID NO: 598136 - RNA, 21 nt, Artificial Sequence
  Synthetic
gaaacacuucugcauuguugg

SEQ ID NO: 598137 - RNA, 22 nt, Artificial Sequence
  Synthetic
ugaaacacuucugcauuguugg

SEQ ID NO: 598138 - RNA, 23 nt, Artificial Sequence
  Synthetic
cugaaacacuucugcauuguugg

SEQ ID NO: 598139 - RNA, 24 nt, Artificial Sequence
  Synthetic
acugaaacacuucugcauuguugg

SEQ ID NO: 598140 - RNA, 18 nt, Artificial Sequence
  Synthetic
ucacaaacauauuguugg

SEQ ID NO: 598141 - RNA, 19 nt, Artificial Sequence
  Synthetic
cucacaaacauauuguugg

SEQ ID NO: 598142 - RNA, 20 nt, Artificial Sequence
  Synthetic
ucucacaaacauauuguugg

SEQ ID NO: 598143 - RNA, 21 nt, Artificial Sequence
  Synthetic
aucucacaaacauauuguugg

SEQ ID NO: 598144 - RNA, 22 nt, Artificial Sequence
  Synthetic
aaucucacaaacauauuguugg

SEQ ID NO: 598145 - RNA, 23 nt, Artificial Sequence
  Synthetic
gaaucucacaaacauauuguugg

SEQ ID NO: 598146 - RNA, 24 nt, Artificial Sequence
  Synthetic
ugaaucucacaaacauauuguugg

SEQ ID NO: 598147 - RNA, 18 nt, Artificial Sequence
  Synthetic
uucauccuuuguuguugg

SEQ ID NO: 598148 - RNA, 19 nt, Artificial Sequence
  Synthetic
auucauccuuuguuguugg

SEQ ID NO: 598149 - RNA, 20 nt, Artificial Sequence
  Synthetic
cauucauccuuuguuguugg

SEQ ID NO: 598150 - RNA, 21 nt, Artificial Sequence
  Synthetic
gcauucauccuuuguuguugg

SEQ ID NO: 598151 - RNA, 22 nt, Artificial Sequence
  Synthetic
ggcauucauccuuuguuguugg

SEQ ID NO: 598152 - RNA, 23 nt, Artificial Sequence
  Synthetic
uggcauucauccuuuguuguugg

SEQ ID NO: 598153 - RNA, 24 nt, Artificial Sequence
  Synthetic
uuggcauucauccuuuguuguugg

SEQ ID NO: 598154 - RNA, 18 nt, Artificial Sequence
  Synthetic
aaucuuugaacaauuugg

SEQ ID NO: 598155 - RNA, 19 nt, Artificial Sequence
  Synthetic
uaaucuuugaacaauuugg

SEQ ID NO: 598156 - RNA, 20 nt, Artificial Sequence
  Synthetic
guaaucuuugaacaauuugg

SEQ ID NO: 598157 - RNA, 21 nt, Artificial Sequence
  Synthetic
cguaaucuuugaacaauuugg

SEQ ID NO: 598158 - RNA, 22 nt, Artificial Sequence
  Synthetic
gcguaaucuuugaacaauuugg

SEQ ID NO: 598159 - RNA, 23 nt, Artificial Sequence
  Synthetic
agcguaaucuuugaacaauuugg

SEQ ID NO: 598160 - RNA, 24 nt, Artificial Sequence
  Synthetic
uagcguaaucuuugaacaauuugg

SEQ ID NO: 598161 - RNA, 18 nt, Artificial Sequence
  Synthetic
cugagucaggcaauuugg

SEQ ID NO: 598162 - RNA, 19 nt, Artificial Sequence
  Synthetic
gcugagucaggcaauuugg

SEQ ID NO: 598163 - RNA, 20 nt, Artificial Sequence
  Synthetic
agcugagucaggcaauuugg

SEQ ID NO: 598164 - RNA, 21 nt, Artificial Sequence
  Synthetic
aagcugagucaggcaauuugg

SEQ ID NO: 598165 - RNA, 22 nt, Artificial Sequence
  Synthetic
gaagcugagucaggcaauuugg

SEQ ID NO: 598166 - RNA, 23 nt, Artificial Sequence
  Synthetic
agaagcugagucaggcaauuugg

SEQ ID NO: 598167 - RNA, 24 nt, Artificial Sequence
  Synthetic
gagaagcugagucaggcaauuugg

SEQ ID NO: 598168 - RNA, 18 nt, Artificial Sequence
  Synthetic
ccauuugccucaauuugg

SEQ ID NO: 598169 - RNA, 19 nt, Artificial Sequence
  Synthetic
cccauuugccucaauuugg

SEQ ID NO: 598170 - RNA, 20 nt, Artificial Sequence
  Synthetic
gcccauuugccucaauuugg

SEQ ID NO: 598171 - RNA, 21 nt, Artificial Sequence
  Synthetic
cgcccauuugccucaauuugg

SEQ ID NO: 598172 - RNA, 22 nt, Artificial Sequence
  Synthetic
ucgcccauuugccucaauuugg

SEQ ID NO: 598173 - RNA, 23 nt, Artificial Sequence
  Synthetic
cucgcccauuugccucaauuugg

SEQ ID NO: 598174 - RNA, 24 nt, Artificial Sequence
  Synthetic
ucucgcccauuugccucaauuugg

SEQ ID NO: 598175 - RNA, 18 nt, Artificial Sequence
  Synthetic
uguuuuguuauaauuugg

SEQ ID NO: 598176 - RNA, 19 nt, Artificial Sequence
  Synthetic
uuguuuuguuauaauuugg

SEQ ID NO: 598177 - RNA, 20 nt, Artificial Sequence
  Synthetic
uuuguuuuguuauaauuugg

SEQ ID NO: 598178 - RNA, 21 nt, Artificial Sequence
  Synthetic
cuuuguuuuguuauaauuugg

SEQ ID NO: 598179 - RNA, 22 nt, Artificial Sequence
  Synthetic
gcuuuguuuuguuauaauuugg

SEQ ID NO: 598180 - RNA, 23 nt, Artificial Sequence
  Synthetic
ugcuuuguuuuguuauaauuugg

SEQ ID NO: 598181 - RNA, 24 nt, Artificial Sequence
  Synthetic
uugcuuuguuuuguuauaauuugg

SEQ ID NO: 598182 - RNA, 18 nt, Artificial Sequence
  Synthetic
guauuauauuuaauuugg

SEQ ID NO: 598183 - RNA, 19 nt, Artificial Sequence
  Synthetic
aguauuauauuuaauuugg

SEQ ID NO: 598184 - RNA, 20 nt, Artificial Sequence
  Synthetic
caguauuauauuuaauuugg

SEQ ID NO: 598185 - RNA, 21 nt, Artificial Sequence
  Synthetic
gcaguauuauauuuaauuugg

SEQ ID NO: 598186 - RNA, 22 nt, Artificial Sequence
  Synthetic
ugcaguauuauauuuaauuugg

SEQ ID NO: 598187 - RNA, 23 nt, Artificial Sequence
  Synthetic
augcaguauuauauuuaauuugg

SEQ ID NO: 598188 - RNA, 24 nt, Artificial Sequence
  Synthetic
aaugcaguauuauauuuaauuugg

SEQ ID NO: 598189 - RNA, 18 nt, Artificial Sequence
  Synthetic
auauccauuuuaauuugg

SEQ ID NO: 598190 - RNA, 19 nt, Artificial Sequence
  Synthetic
aauauccauuuuaauuugg

SEQ ID NO: 598191 - RNA, 20 nt, Artificial Sequence
  Synthetic
uaauauccauuuuaauuugg

SEQ ID NO: 598192 - RNA, 21 nt, Artificial Sequence
  Synthetic
cuaauauccauuuuaauuugg

SEQ ID NO: 598193 - RNA, 22 nt, Artificial Sequence
  Synthetic
ucuaauauccauuuuaauuugg

SEQ ID NO: 598194 - RNA, 23 nt, Artificial Sequence
  Synthetic
aucuaauauccauuuuaauuugg

SEQ ID NO: 598195 - RNA, 24 nt, Artificial Sequence
  Synthetic
uaucuaauauccauuuuaauuugg

SEQ ID NO: 598196 - RNA, 18 nt, Artificial Sequence
  Synthetic
aucugaagacacauuugg

SEQ ID NO: 598197 - RNA, 19 nt, Artificial Sequence
  Synthetic
caucugaagacacauuugg

SEQ ID NO: 598198 - RNA, 20 nt, Artificial Sequence
  Synthetic
ucaucugaagacacauuugg

SEQ ID NO: 598199 - RNA, 21 nt, Artificial Sequence
  Synthetic
uucaucugaagacacauuugg

SEQ ID NO: 598200 - RNA, 22 nt, Artificial Sequence
  Synthetic
uuucaucugaagacacauuugg

SEQ ID NO: 598201 - RNA, 23 nt, Artificial Sequence
  Synthetic
cuuucaucugaagacacauuugg

SEQ ID NO: 598202 - RNA, 24 nt, Artificial Sequence
  Synthetic
ccuuucaucugaagacacauuugg

SEQ ID NO: 598203 - RNA, 18 nt, Artificial Sequence
  Synthetic
cccugauccaccauuugg

SEQ ID NO: 598204 - RNA, 19 nt, Artificial Sequence
  Synthetic
ccccugauccaccauuugg

SEQ ID NO: 598205 - RNA, 20 nt, Artificial Sequence
  Synthetic
cccccugauccaccauuugg

SEQ ID NO: 598206 - RNA, 21 nt, Artificial Sequence
  Synthetic
ccccccugauccaccauuugg

SEQ ID NO: 598207 - RNA, 22 nt, Artificial Sequence
  Synthetic
gccccccugauccaccauuugg

SEQ ID NO: 598208 - RNA, 23 nt, Artificial Sequence
  Synthetic
ggccccccugauccaccauuugg

SEQ ID NO: 598209 - RNA, 24 nt, Artificial Sequence
  Synthetic
gggccccccugauccaccauuugg

SEQ ID NO: 598210 - RNA, 18 nt, Artificial Sequence
  Synthetic
cugcagggacccauuugg

SEQ ID NO: 598211 - RNA, 19 nt, Artificial Sequence
  Synthetic
acugcagggacccauuugg

SEQ ID NO: 598212 - RNA, 20 nt, Artificial Sequence
  Synthetic
aacugcagggacccauuugg

SEQ ID NO: 598213 - RNA, 21 nt, Artificial Sequence
  Synthetic
aaacugcagggacccauuugg

SEQ ID NO: 598214 - RNA, 22 nt, Artificial Sequence
  Synthetic
caaacugcagggacccauuugg

SEQ ID NO: 598215 - RNA, 23 nt, Artificial Sequence
  Synthetic
ucaaacugcagggacccauuugg

SEQ ID NO: 598216 - RNA, 24 nt, Artificial Sequence
  Synthetic
uucaaacugcagggacccauuugg

SEQ ID NO: 598217 - RNA, 18 nt, Artificial Sequence
  Synthetic
ugaagacgugccauuugg

SEQ ID NO: 598218 - RNA, 19 nt, Artificial Sequence
  Synthetic
gugaagacgugccauuugg

SEQ ID NO: 598219 - RNA, 20 nt, Artificial Sequence
  Synthetic
ugugaagacgugccauuugg

SEQ ID NO: 598220 - RNA, 21 nt, Artificial Sequence
  Synthetic
augugaagacgugccauuugg

SEQ ID NO: 598221 - RNA, 22 nt, Artificial Sequence
  Synthetic
aaugugaagacgugccauuugg

SEQ ID NO: 598222 - RNA, 23 nt, Artificial Sequence
  Synthetic
aaaugugaagacgugccauuugg

SEQ ID NO: 598223 - RNA, 24 nt, Artificial Sequence
  Synthetic
gaaaugugaagacgugccauuugg

SEQ ID NO: 598224 - RNA, 18 nt, Artificial Sequence
  Synthetic
cuuuuuacuuccauuugg

SEQ ID NO: 598225 - RNA, 19 nt, Artificial Sequence
  Synthetic
ccuuuuuacuuccauuugg

SEQ ID NO: 598226 - RNA, 20 nt, Artificial Sequence
  Synthetic
gccuuuuuacuuccauuugg

SEQ ID NO: 598227 - RNA, 21 nt, Artificial Sequence
  Synthetic
ggccuuuuuacuuccauuugg

SEQ ID NO: 598228 - RNA, 22 nt, Artificial Sequence
  Synthetic
gggccuuuuuacuuccauuugg

SEQ ID NO: 598229 - RNA, 23 nt, Artificial Sequence
  Synthetic
agggccuuuuuacuuccauuugg

SEQ ID NO: 598230 - RNA, 24 nt, Artificial Sequence
  Synthetic
cagggccuuuuuacuuccauuugg

SEQ ID NO: 598231 - RNA, 18 nt, Artificial Sequence
  Synthetic
ggaguugugaucauuugg

SEQ ID NO: 598232 - RNA, 19 nt, Artificial Sequence
  Synthetic
aggaguugugaucauuugg

SEQ ID NO: 598233 - RNA, 20 nt, Artificial Sequence
  Synthetic
gaggaguugugaucauuugg

SEQ ID NO: 598234 - RNA, 21 nt, Artificial Sequence
  Synthetic
agaggaguugugaucauuugg

SEQ ID NO: 598235 - RNA, 22 nt, Artificial Sequence
  Synthetic
gagaggaguugugaucauuugg

SEQ ID NO: 598236 - RNA, 23 nt, Artificial Sequence
  Synthetic
ggagaggaguugugaucauuugg

SEQ ID NO: 598237 - RNA, 24 nt, Artificial Sequence
  Synthetic
uggagaggaguugugaucauuugg

SEQ ID NO: 598238 - RNA, 18 nt, Artificial Sequence
  Synthetic
uaaaaugaggucauuugg

SEQ ID NO: 598239 - RNA, 19 nt, Artificial Sequence
  Synthetic
uuaaaaugaggucauuugg

SEQ ID NO: 598240 - RNA, 20 nt, Artificial Sequence
  Synthetic
cuuaaaaugaggucauuugg

SEQ ID NO: 598241 - RNA, 21 nt, Artificial Sequence
  Synthetic
acuuaaaaugaggucauuugg

SEQ ID NO: 598242 - RNA, 22 nt, Artificial Sequence
  Synthetic
aacuuaaaaugaggucauuugg

SEQ ID NO: 598243 - RNA, 23 nt, Artificial Sequence
  Synthetic
caacuuaaaaugaggucauuugg

SEQ ID NO: 598244 - RNA, 24 nt, Artificial Sequence
  Synthetic
ucaacuuaaaaugaggucauuugg

SEQ ID NO: 598245 - RNA, 18 nt, Artificial Sequence
  Synthetic
auucaaaaugagauuugg

SEQ ID NO: 598246 - RNA, 19 nt, Artificial Sequence
  Synthetic
aauucaaaaugagauuugg

SEQ ID NO: 598247 - RNA, 20 nt, Artificial Sequence
  Synthetic
caauucaaaaugagauuugg

SEQ ID NO: 598248 - RNA, 21 nt, Artificial Sequence
  Synthetic
acaauucaaaaugagauuugg

SEQ ID NO: 598249 - RNA, 22 nt, Artificial Sequence
  Synthetic
uacaauucaaaaugagauuugg

SEQ ID NO: 598250 - RNA, 23 nt, Artificial Sequence
  Synthetic
uuacaauucaaaaugagauuugg

SEQ ID NO: 598251 - RNA, 24 nt, Artificial Sequence
  Synthetic
auuacaauucaaaaugagauuugg

SEQ ID NO: 598252 - RNA, 18 nt, Artificial Sequence
  Synthetic
aagggacaugagauuugg

SEQ ID NO: 598253 - RNA, 19 nt, Artificial Sequence
  Synthetic
aaagggacaugagauuugg

SEQ ID NO: 598254 - RNA, 20 nt, Artificial Sequence
  Synthetic
gaaagggacaugagauuugg

SEQ ID NO: 598255 - RNA, 21 nt, Artificial Sequence
  Synthetic
ugaaagggacaugagauuugg

SEQ ID NO: 598256 - RNA, 22 nt, Artificial Sequence
  Synthetic
gugaaagggacaugagauuugg

SEQ ID NO: 598257 - RNA, 23 nt, Artificial Sequence
  Synthetic
ugugaaagggacaugagauuugg

SEQ ID NO: 598258 - RNA, 24 nt, Artificial Sequence
  Synthetic
augugaaagggacaugagauuugg

SEQ ID NO: 598259 - RNA, 21 nt, Artificial Sequence
  Synthetic
agaauucaagaugagauuugg

SEQ ID NO: 598260 - RNA, 22 nt, Artificial Sequence
  Synthetic
uagaauucaagaugagauuugg

SEQ ID NO: 598261 - RNA, 23 nt, Artificial Sequence
  Synthetic
guagaauucaagaugagauuugg

SEQ ID NO: 598262 - RNA, 24 nt, Artificial Sequence
  Synthetic
aguagaauucaagaugagauuugg

SEQ ID NO: 598263 - RNA, 18 nt, Artificial Sequence
  Synthetic
auucaaggugagauuugg

SEQ ID NO: 598264 - RNA, 19 nt, Artificial Sequence
  Synthetic
aauucaaggugagauuugg

SEQ ID NO: 598265 - RNA, 20 nt, Artificial Sequence
  Synthetic
caauucaaggugagauuugg

SEQ ID NO: 598266 - RNA, 21 nt, Artificial Sequence
  Synthetic
acaauucaaggugagauuugg

SEQ ID NO: 598267 - RNA, 22 nt, Artificial Sequence
  Synthetic
uacaauucaaggugagauuugg

SEQ ID NO: 598268 - RNA, 23 nt, Artificial Sequence
  Synthetic
uuacaauucaaggugagauuugg

SEQ ID NO: 598269 - RNA, 24 nt, Artificial Sequence
  Synthetic
auuacaauucaaggugagauuugg

SEQ ID NO: 598270 - RNA, 20 nt, Artificial Sequence
  Synthetic
uaauucaaggugagauuugg

SEQ ID NO: 598271 - RNA, 21 nt, Artificial Sequence
  Synthetic
auaauucaaggugagauuugg

SEQ ID NO: 598272 - RNA, 22 nt, Artificial Sequence
  Synthetic
cauaauucaaggugagauuugg

SEQ ID NO: 598273 - RNA, 23 nt, Artificial Sequence
  Synthetic
ccauaauucaaggugagauuugg

SEQ ID NO: 598274 - RNA, 24 nt, Artificial Sequence
  Synthetic
accauaauucaaggugagauuugg

SEQ ID NO: 598275 - RNA, 18 nt, Artificial Sequence
  Synthetic
aguuuauuguagauuugg

SEQ ID NO: 598276 - RNA, 19 nt, Artificial Sequence
  Synthetic
gaguuuauuguagauuugg

SEQ ID NO: 598277 - RNA, 20 nt, Artificial Sequence
  Synthetic
agaguuuauuguagauuugg

SEQ ID NO: 598278 - RNA, 21 nt, Artificial Sequence
  Synthetic
gagaguuuauuguagauuugg

SEQ ID NO: 598279 - RNA, 22 nt, Artificial Sequence
  Synthetic
agagaguuuauuguagauuugg

SEQ ID NO: 598280 - RNA, 23 nt, Artificial Sequence
  Synthetic
aagagaguuuauuguagauuugg

SEQ ID NO: 598281 - RNA, 24 nt, Artificial Sequence
  Synthetic
caagagaguuuauuguagauuugg

SEQ ID NO: 598282 - RNA, 18 nt, Artificial Sequence
  Synthetic
aaagaaacagugauuugg

SEQ ID NO: 598283 - RNA, 19 nt, Artificial Sequence
  Synthetic
aaaagaaacagugauuugg

SEQ ID NO: 598284 - RNA, 20 nt, Artificial Sequence
  Synthetic
caaaagaaacagugauuugg

SEQ ID NO: 598285 - RNA, 21 nt, Artificial Sequence
  Synthetic
ucaaaagaaacagugauuugg

SEQ ID NO: 598286 - RNA, 22 nt, Artificial Sequence
  Synthetic
uucaaaagaaacagugauuugg

SEQ ID NO: 598287 - RNA, 23 nt, Artificial Sequence
  Synthetic
uuucaaaagaaacagugauuugg

SEQ ID NO: 598288 - RNA, 24 nt, Artificial Sequence
  Synthetic
cuuucaaaagaaacagugauuugg

SEQ ID NO: 598289 - RNA, 18 nt, Artificial Sequence
  Synthetic
ugcugaaaagcuauuugg

SEQ ID NO: 598290 - RNA, 19 nt, Artificial Sequence
  Synthetic
augcugaaaagcuauuugg

SEQ ID NO: 598291 - RNA, 20 nt, Artificial Sequence
  Synthetic
gaugcugaaaagcuauuugg

SEQ ID NO: 598292 - RNA, 21 nt, Artificial Sequence
  Synthetic
agaugcugaaaagcuauuugg

SEQ ID NO: 598293 - RNA, 22 nt, Artificial Sequence
  Synthetic
aagaugcugaaaagcuauuugg

SEQ ID NO: 598294 - RNA, 23 nt, Artificial Sequence
  Synthetic
uaagaugcugaaaagcuauuugg

SEQ ID NO: 598295 - RNA, 24 nt, Artificial Sequence
  Synthetic
auaagaugcugaaaagcuauuugg

SEQ ID NO: 598296 - RNA, 18 nt, Artificial Sequence
  Synthetic
ugguugaaagcuauuugg

SEQ ID NO: 598297 - RNA, 19 nt, Artificial Sequence
  Synthetic
uugguugaaagcuauuugg

SEQ ID NO: 598298 - RNA, 20 nt, Artificial Sequence
  Synthetic
uuugguugaaagcuauuugg

SEQ ID NO: 598299 - RNA, 21 nt, Artificial Sequence
  Synthetic
auuugguugaaagcuauuugg

SEQ ID NO: 598300 - RNA, 22 nt, Artificial Sequence
  Synthetic
uauuugguugaaagcuauuugg

SEQ ID NO: 598301 - RNA, 23 nt, Artificial Sequence
  Synthetic
cuauuugguugaaagcuauuugg

SEQ ID NO: 598302 - RNA, 24 nt, Artificial Sequence
  Synthetic
gcuauuugguugaaagcuauuugg

SEQ ID NO: 598303 - RNA, 18 nt, Artificial Sequence
  Synthetic
uacgucauuucuauuugg

SEQ ID NO: 598304 - RNA, 19 nt, Artificial Sequence
  Synthetic
uuacgucauuucuauuugg

SEQ ID NO: 598305 - RNA, 20 nt, Artificial Sequence
  Synthetic
guuacgucauuucuauuugg

SEQ ID NO: 598306 - RNA, 21 nt, Artificial Sequence
  Synthetic
aguuacgucauuucuauuugg

SEQ ID NO: 598307 - RNA, 22 nt, Artificial Sequence
  Synthetic
caguuacgucauuucuauuugg

SEQ ID NO: 598308 - RNA, 23 nt, Artificial Sequence
  Synthetic
ucaguuacgucauuucuauuugg

SEQ ID NO: 598309 - RNA, 24 nt, Artificial Sequence
  Synthetic
uucaguuacgucauuucuauuugg

SEQ ID NO: 598310 - RNA, 18 nt, Artificial Sequence
  Synthetic
aaucuaaguuguauuugg

SEQ ID NO: 598311 - RNA, 19 nt, Artificial Sequence
  Synthetic
gaaucuaaguuguauuugg

SEQ ID NO: 598312 - RNA, 20 nt, Artificial Sequence
  Synthetic
ugaaucuaaguuguauuugg

SEQ ID NO: 598313 - RNA, 21 nt, Artificial Sequence
  Synthetic
uugaaucuaaguuguauuugg

SEQ ID NO: 598314 - RNA, 22 nt, Artificial Sequence
  Synthetic
auugaaucuaaguuguauuugg

SEQ ID NO: 598315 - RNA, 23 nt, Artificial Sequence
  Synthetic
gauugaaucuaaguuguauuugg

SEQ ID NO: 598316 - RNA, 24 nt, Artificial Sequence
  Synthetic
ugauugaaucuaaguuguauuugg

SEQ ID NO: 598317 - RNA, 18 nt, Artificial Sequence
  Synthetic
gaagauucuauuauuugg

SEQ ID NO: 598318 - RNA, 19 nt, Artificial Sequence
  Synthetic
ugaagauucuauuauuugg

SEQ ID NO: 598319 - RNA, 20 nt, Artificial Sequence
  Synthetic
gugaagauucuauuauuugg

SEQ ID NO: 598320 - RNA, 21 nt, Artificial Sequence
  Synthetic
agugaagauucuauuauuugg

SEQ ID NO: 598321 - RNA, 22 nt, Artificial Sequence
  Synthetic
cagugaagauucuauuauuugg

SEQ ID NO: 598322 - RNA, 23 nt, Artificial Sequence
  Synthetic
ccagugaagauucuauuauuugg

SEQ ID NO: 598323 - RNA, 24 nt, Artificial Sequence
  Synthetic
gccagugaagauucuauuauuugg

SEQ ID NO: 598324 - RNA, 18 nt, Artificial Sequence
  Synthetic
guuaagaacgaacuuugg

SEQ ID NO: 598325 - RNA, 19 nt, Artificial Sequence
  Synthetic
cguuaagaacgaacuuugg

SEQ ID NO: 598326 - RNA, 20 nt, Artificial Sequence
  Synthetic
acguuaagaacgaacuuugg

SEQ ID NO: 598327 - RNA, 21 nt, Artificial Sequence
  Synthetic
aacguuaagaacgaacuuugg

SEQ ID NO: 598328 - RNA, 22 nt, Artificial Sequence
  Synthetic
aaacguuaagaacgaacuuugg

SEQ ID NO: 598329 - RNA, 23 nt, Artificial Sequence
  Synthetic
aaaacguuaagaacgaacuuugg

SEQ ID NO: 598330 - RNA, 24 nt, Artificial Sequence
  Synthetic
aaaaacguuaagaacgaacuuugg

SEQ ID NO: 598331 - RNA, 18 nt, Artificial Sequence
  Synthetic
gguuaacauuaacuuugg

SEQ ID NO: 598332 - RNA, 19 nt, Artificial Sequence
  Synthetic
ugguuaacauuaacuuugg

SEQ ID NO: 598333 - RNA, 20 nt, Artificial Sequence
  Synthetic
gugguuaacauuaacuuugg

SEQ ID NO: 598334 - RNA, 21 nt, Artificial Sequence
  Synthetic
agugguuaacauuaacuuugg

SEQ ID NO: 598335 - RNA, 22 nt, Artificial Sequence
  Synthetic
aagugguuaacauuaacuuugg

SEQ ID NO: 598336 - RNA, 23 nt, Artificial Sequence
  Synthetic
caagugguuaacauuaacuuugg

SEQ ID NO: 598337 - RNA, 24 nt, Artificial Sequence
  Synthetic
ccaagugguuaacauuaacuuugg

SEQ ID NO: 598338 - RNA, 18 nt, Artificial Sequence
  Synthetic
cuaauuuugagacuuugg

SEQ ID NO: 598339 - RNA, 19 nt, Artificial Sequence
  Synthetic
ccuaauuuugagacuuugg

SEQ ID NO: 598340 - RNA, 20 nt, Artificial Sequence
  Synthetic
cccuaauuuugagacuuugg

SEQ ID NO: 598341 - RNA, 21 nt, Artificial Sequence
  Synthetic
ucccuaauuuugagacuuugg

SEQ ID NO: 598342 - RNA, 22 nt, Artificial Sequence
  Synthetic
uucccuaauuuugagacuuugg

SEQ ID NO: 598343 - RNA, 23 nt, Artificial Sequence
  Synthetic
uuucccuaauuuugagacuuugg

SEQ ID NO: 598344 - RNA, 24 nt, Artificial Sequence
  Synthetic
cuuucccuaauuuugagacuuugg

SEQ ID NO: 598345 - RNA, 18 nt, Artificial Sequence
  Synthetic
uuguggggaugacuuugg

SEQ ID NO: 598346 - RNA, 19 nt, Artificial Sequence
  Synthetic
auuguggggaugacuuugg

SEQ ID NO: 598347 - RNA, 20 nt, Artificial Sequence
  Synthetic
aauuguggggaugacuuugg

SEQ ID NO: 598348 - RNA, 21 nt, Artificial Sequence
  Synthetic
caauuguggggaugacuuugg

SEQ ID NO: 598349 - RNA, 22 nt, Artificial Sequence
  Synthetic
ucaauuguggggaugacuuugg

SEQ ID NO: 598350 - RNA, 23 nt, Artificial Sequence
  Synthetic
gucaauuguggggaugacuuugg

SEQ ID NO: 598351 - RNA, 24 nt, Artificial Sequence
  Synthetic
agucaauuguggggaugacuuugg

SEQ ID NO: 598352 - RNA, 18 nt, Artificial Sequence
  Synthetic
ugaaaucggugacuuugg

SEQ ID NO: 598353 - RNA, 19 nt, Artificial Sequence
  Synthetic
augaaaucggugacuuugg

SEQ ID NO: 598354 - RNA, 20 nt, Artificial Sequence
  Synthetic
aaugaaaucggugacuuugg

SEQ ID NO: 598355 - RNA, 21 nt, Artificial Sequence
  Synthetic
aaaugaaaucggugacuuugg

SEQ ID NO: 598356 - RNA, 22 nt, Artificial Sequence
  Synthetic
aaaaugaaaucggugacuuugg

SEQ ID NO: 598357 - RNA, 23 nt, Artificial Sequence
  Synthetic
uaaaaugaaaucggugacuuugg

SEQ ID NO: 598358 - RNA, 24 nt, Artificial Sequence
  Synthetic
auaaaaugaaaucggugacuuugg

SEQ ID NO: 598359 - RNA, 18 nt, Artificial Sequence
  Synthetic
acccacucuaaccuuugg

SEQ ID NO: 598360 - RNA, 19 nt, Artificial Sequence
  Synthetic
cacccacucuaaccuuugg

SEQ ID NO: 598361 - RNA, 20 nt, Artificial Sequence
  Synthetic
ucacccacucuaaccuuugg

SEQ ID NO: 598362 - RNA, 21 nt, Artificial Sequence
  Synthetic
aucacccacucuaaccuuugg

SEQ ID NO: 598363 - RNA, 22 nt, Artificial Sequence
  Synthetic
uaucacccacucuaaccuuugg

SEQ ID NO: 598364 - RNA, 23 nt, Artificial Sequence
  Synthetic
auaucacccacucuaaccuuugg

SEQ ID NO: 598365 - RNA, 24 nt, Artificial Sequence
  Synthetic
uauaucacccacucuaaccuuugg

SEQ ID NO: 598366 - RNA, 18 nt, Artificial Sequence
  Synthetic
caagacagcauccuuugg

SEQ ID NO: 598367 - RNA, 19 nt, Artificial Sequence
  Synthetic
acaagacagcauccuuugg

SEQ ID NO: 598368 - RNA, 20 nt, Artificial Sequence
  Synthetic
gacaagacagcauccuuugg

SEQ ID NO: 598369 - RNA, 21 nt, Artificial Sequence
  Synthetic
ggacaagacagcauccuuugg

SEQ ID NO: 598370 - RNA, 22 nt, Artificial Sequence
  Synthetic
uggacaagacagcauccuuugg

SEQ ID NO: 598371 - RNA, 23 nt, Artificial Sequence
  Synthetic
auggacaagacagcauccuuugg

SEQ ID NO: 598372 - RNA, 24 nt, Artificial Sequence
  Synthetic
aauggacaagacagcauccuuugg

SEQ ID NO: 598373 - RNA, 18 nt, Artificial Sequence
  Synthetic
aaacccugaacgcuuugg

SEQ ID NO: 598374 - RNA, 19 nt, Artificial Sequence
  Synthetic
gaaacccugaacgcuuugg

SEQ ID NO: 598375 - RNA, 20 nt, Artificial Sequence
  Synthetic
agaaacccugaacgcuuugg

SEQ ID NO: 598376 - RNA, 21 nt, Artificial Sequence
  Synthetic
uagaaacccugaacgcuuugg

SEQ ID NO: 598377 - RNA, 22 nt, Artificial Sequence
  Synthetic
auagaaacccugaacgcuuugg

SEQ ID NO: 598378 - RNA, 23 nt, Artificial Sequence
  Synthetic
aauagaaacccugaacgcuuugg

SEQ ID NO: 598379 - RNA, 24 nt, Artificial Sequence
  Synthetic
aaauagaaacccugaacgcuuugg

SEQ ID NO: 598380 - RNA, 18 nt, Artificial Sequence
  Synthetic
ggauauggacaucuuugg

SEQ ID NO: 598381 - RNA, 19 nt, Artificial Sequence
  Synthetic
aggauauggacaucuuugg

SEQ ID NO: 598382 - RNA, 20 nt, Artificial Sequence
  Synthetic
uaggauauggacaucuuugg

SEQ ID NO: 598383 - RNA, 21 nt, Artificial Sequence
  Synthetic
uuaggauauggacaucuuugg

SEQ ID NO: 598384 - RNA, 22 nt, Artificial Sequence
  Synthetic
auuaggauauggacaucuuugg

SEQ ID NO: 598385 - RNA, 23 nt, Artificial Sequence
  Synthetic
gauuaggauauggacaucuuugg

SEQ ID NO: 598386 - RNA, 24 nt, Artificial Sequence
  Synthetic
ggauuaggauauggacaucuuugg

SEQ ID NO: 598387 - RNA, 18 nt, Artificial Sequence
  Synthetic
aagagugcuuaucuuugg

SEQ ID NO: 598388 - RNA, 19 nt, Artificial Sequence
  Synthetic
aaagagugcuuaucuuugg

SEQ ID NO: 598389 - RNA, 20 nt, Artificial Sequence
  Synthetic
aaaagagugcuuaucuuugg

SEQ ID NO: 598390 - RNA, 21 nt, Artificial Sequence
  Synthetic
caaaagagugcuuaucuuugg

SEQ ID NO: 598391 - RNA, 22 nt, Artificial Sequence
  Synthetic
ucaaaagagugcuuaucuuugg

SEQ ID NO: 598392 - RNA, 23 nt, Artificial Sequence
  Synthetic
gucaaaagagugcuuaucuuugg

SEQ ID NO: 598393 - RNA, 24 nt, Artificial Sequence
  Synthetic
agucaaaagagugcuuaucuuugg

SEQ ID NO: 598394 - RNA, 18 nt, Artificial Sequence
  Synthetic
guaaucccagcucuuugg

SEQ ID NO: 598395 - RNA, 19 nt, Artificial Sequence
  Synthetic
uguaaucccagcucuuugg

SEQ ID NO: 598396 - RNA, 20 nt, Artificial Sequence
  Synthetic
cuguaaucccagcucuuugg

SEQ ID NO: 598397 - RNA, 21 nt, Artificial Sequence
  Synthetic
ccuguaaucccagcucuuugg

SEQ ID NO: 598398 - RNA, 22 nt, Artificial Sequence
  Synthetic
accuguaaucccagcucuuugg

SEQ ID NO: 598399 - RNA, 23 nt, Artificial Sequence
  Synthetic
caccuguaaucccagcucuuugg

SEQ ID NO: 598400 - RNA, 24 nt, Artificial Sequence
  Synthetic
acaccuguaaucccagcucuuugg

SEQ ID NO: 598401 - RNA, 18 nt, Artificial Sequence
  Synthetic
guacaugugucucuuugg

SEQ ID NO: 598402 - RNA, 19 nt, Artificial Sequence
  Synthetic
aguacaugugucucuuugg

SEQ ID NO: 598403 - RNA, 20 nt, Artificial Sequence
  Synthetic
gaguacaugugucucuuugg

SEQ ID NO: 598404 - RNA, 21 nt, Artificial Sequence
  Synthetic
ugaguacaugugucucuuugg

SEQ ID NO: 598405 - RNA, 22 nt, Artificial Sequence
  Synthetic
gugaguacaugugucucuuugg

SEQ ID NO: 598406 - RNA, 23 nt, Artificial Sequence
  Synthetic
ugugaguacaugugucucuuugg

SEQ ID NO: 598407 - RNA, 24 nt, Artificial Sequence
  Synthetic
augugaguacaugugucucuuugg

SEQ ID NO: 598408 - RNA, 18 nt, Artificial Sequence
  Synthetic
uacuugccacaaguuugg

SEQ ID NO: 598409 - RNA, 19 nt, Artificial Sequence
  Synthetic
auacuugccacaaguuugg

SEQ ID NO: 598410 - RNA, 20 nt, Artificial Sequence
  Synthetic
gauacuugccacaaguuugg

SEQ ID NO: 598411 - RNA, 21 nt, Artificial Sequence
  Synthetic
agauacuugccacaaguuugg

SEQ ID NO: 598412 - RNA, 22 nt, Artificial Sequence
  Synthetic
gagauacuugccacaaguuugg

SEQ ID NO: 598413 - RNA, 23 nt, Artificial Sequence
  Synthetic
ugagauacuugccacaaguuugg

SEQ ID NO: 598414 - RNA, 24 nt, Artificial Sequence
  Synthetic
gugagauacuugccacaaguuugg

SEQ ID NO: 598415 - RNA, 18 nt, Artificial Sequence
  Synthetic
ugcagcuguagaguuugg

SEQ ID NO: 598416 - RNA, 19 nt, Artificial Sequence
  Synthetic
gugcagcuguagaguuugg

SEQ ID NO: 598417 - RNA, 20 nt, Artificial Sequence
  Synthetic
ggugcagcuguagaguuugg

SEQ ID NO: 598418 - RNA, 21 nt, Artificial Sequence
  Synthetic
uggugcagcuguagaguuugg

SEQ ID NO: 598419 - RNA, 22 nt, Artificial Sequence
  Synthetic
guggugcagcuguagaguuugg

SEQ ID NO: 598420 - RNA, 23 nt, Artificial Sequence
  Synthetic
uguggugcagcuguagaguuugg

SEQ ID NO: 598421 - RNA, 24 nt, Artificial Sequence
  Synthetic
uuguggugcagcuguagaguuugg

SEQ ID NO: 598422 - RNA, 18 nt, Artificial Sequence
  Synthetic
cucauuaugaagguuugg

SEQ ID NO: 598423 - RNA, 19 nt, Artificial Sequence
  Synthetic
gcucauuaugaagguuugg

SEQ ID NO: 598424 - RNA, 20 nt, Artificial Sequence
  Synthetic
agcucauuaugaagguuugg

SEQ ID NO: 598425 - RNA, 21 nt, Artificial Sequence
  Synthetic
uagcucauuaugaagguuugg

SEQ ID NO: 598426 - RNA, 22 nt, Artificial Sequence
  Synthetic
uuagcucauuaugaagguuugg

SEQ ID NO: 598427 - RNA, 23 nt, Artificial Sequence
  Synthetic
cuuagcucauuaugaagguuugg

SEQ ID NO: 598428 - RNA, 24 nt, Artificial Sequence
  Synthetic
ccuuagcucauuaugaagguuugg

SEQ ID NO: 598429 - RNA, 18 nt, Artificial Sequence
  Synthetic
acagcagcacagguuugg

SEQ ID NO: 598430 - RNA, 19 nt, Artificial Sequence
  Synthetic
cacagcagcacagguuugg

SEQ ID NO: 598431 - RNA, 20 nt, Artificial Sequence
  Synthetic
acacagcagcacagguuugg

SEQ ID NO: 598432 - RNA, 21 nt, Artificial Sequence
  Synthetic
uacacagcagcacagguuugg

SEQ ID NO: 598433 - RNA, 22 nt, Artificial Sequence
  Synthetic
auacacagcagcacagguuugg

SEQ ID NO: 598434 - RNA, 23 nt, Artificial Sequence
  Synthetic
aauacacagcagcacagguuugg

SEQ ID NO: 598435 - RNA, 24 nt, Artificial Sequence
  Synthetic
aaauacacagcagcacagguuugg

SEQ ID NO: 598436 - RNA, 18 nt, Artificial Sequence
  Synthetic
uaucaucaguauguuugg

SEQ ID NO: 598437 - RNA, 19 nt, Artificial Sequence
  Synthetic
uuaucaucaguauguuugg

SEQ ID NO: 598438 - RNA, 20 nt, Artificial Sequence
  Synthetic
uuuaucaucaguauguuugg

SEQ ID NO: 598439 - RNA, 21 nt, Artificial Sequence
  Synthetic
uuuuaucaucaguauguuugg

SEQ ID NO: 598440 - RNA, 22 nt, Artificial Sequence
  Synthetic
auuuuaucaucaguauguuugg

SEQ ID NO: 598441 - RNA, 23 nt, Artificial Sequence
  Synthetic
uauuuuaucaucaguauguuugg

SEQ ID NO: 598442 - RNA, 24 nt, Artificial Sequence
  Synthetic
cuauuuuaucaucaguauguuugg

SEQ ID NO: 598443 - RNA, 18 nt, Artificial Sequence
  Synthetic
aacuggaaugcuguuugg

SEQ ID NO: 598444 - RNA, 19 nt, Artificial Sequence
  Synthetic
uaacuggaaugcuguuugg

SEQ ID NO: 598445 - RNA, 20 nt, Artificial Sequence
  Synthetic
uuaacuggaaugcuguuugg

SEQ ID NO: 598446 - RNA, 21 nt, Artificial Sequence
  Synthetic
auuaacuggaaugcuguuugg

SEQ ID NO: 598447 - RNA, 22 nt, Artificial Sequence
  Synthetic
gauuaacuggaaugcuguuugg

SEQ ID NO: 598448 - RNA, 23 nt, Artificial Sequence
  Synthetic
ugauuaacuggaaugcuguuugg

SEQ ID NO: 598449 - RNA, 24 nt, Artificial Sequence
  Synthetic
gugauuaacuggaaugcuguuugg

SEQ ID NO: 598450 - RNA, 18 nt, Artificial Sequence
  Synthetic
acauuacaagguguuugg

SEQ ID NO: 598451 - RNA, 19 nt, Artificial Sequence
  Synthetic
aacauuacaagguguuugg

SEQ ID NO: 598452 - RNA, 20 nt, Artificial Sequence
  Synthetic
caacauuacaagguguuugg

SEQ ID NO: 598453 - RNA, 21 nt, Artificial Sequence
  Synthetic
ucaacauuacaagguguuugg

SEQ ID NO: 598454 - RNA, 22 nt, Artificial Sequence
  Synthetic
aucaacauuacaagguguuugg

SEQ ID NO: 598455 - RNA, 23 nt, Artificial Sequence
  Synthetic
uaucaacauuacaagguguuugg

SEQ ID NO: 598456 - RNA, 24 nt, Artificial Sequence
  Synthetic
auaucaacauuacaagguguuugg

SEQ ID NO: 598457 - RNA, 18 nt, Artificial Sequence
  Synthetic
acaaucugcauuguuugg

SEQ ID NO: 598458 - RNA, 19 nt, Artificial Sequence
  Synthetic
uacaaucugcauuguuugg

SEQ ID NO: 598459 - RNA, 20 nt, Artificial Sequence
  Synthetic
guacaaucugcauuguuugg

SEQ ID NO: 598460 - RNA, 21 nt, Artificial Sequence
  Synthetic
gguacaaucugcauuguuugg

SEQ ID NO: 598461 - RNA, 22 nt, Artificial Sequence
  Synthetic
ggguacaaucugcauuguuugg

SEQ ID NO: 598462 - RNA, 23 nt, Artificial Sequence
  Synthetic
gggguacaaucugcauuguuugg

SEQ ID NO: 598463 - RNA, 24 nt, Artificial Sequence
  Synthetic
ggggguacaaucugcauuguuugg

SEQ ID NO: 598464 - RNA, 18 nt, Artificial Sequence
  Synthetic
cuccaaauaguuguuugg

SEQ ID NO: 598465 - RNA, 19 nt, Artificial Sequence
  Synthetic
gcuccaaauaguuguuugg

SEQ ID NO: 598466 - RNA, 20 nt, Artificial Sequence
  Synthetic
agcuccaaauaguuguuugg

SEQ ID NO: 598467 - RNA, 21 nt, Artificial Sequence
  Synthetic
aagcuccaaauaguuguuugg

SEQ ID NO: 598468 - RNA, 22 nt, Artificial Sequence
  Synthetic
aaagcuccaaauaguuguuugg

SEQ ID NO: 598469 - RNA, 23 nt, Artificial Sequence
  Synthetic
caaagcuccaaauaguuguuugg

SEQ ID NO: 598470 - RNA, 24 nt, Artificial Sequence
  Synthetic
ucaaagcuccaaauaguuguuugg

SEQ ID NO: 598471 - RNA, 18 nt, Artificial Sequence
  Synthetic
aaucucuuauuuguuugg

SEQ ID NO: 598472 - RNA, 19 nt, Artificial Sequence
  Synthetic
aaaucucuuauuuguuugg

SEQ ID NO: 598473 - RNA, 20 nt, Artificial Sequence
  Synthetic
uaaaucucuuauuuguuugg

SEQ ID NO: 598474 - RNA, 21 nt, Artificial Sequence
  Synthetic
cuaaaucucuuauuuguuugg

SEQ ID NO: 598475 - RNA, 22 nt, Artificial Sequence
  Synthetic
ucuaaaucucuuauuuguuugg

SEQ ID NO: 598476 - RNA, 23 nt, Artificial Sequence
  Synthetic
gucuaaaucucuuauuuguuugg

SEQ ID NO: 598477 - RNA, 24 nt, Artificial Sequence
  Synthetic
agucuaaaucucuuauuuguuugg

SEQ ID NO: 598478 - RNA, 18 nt, Artificial Sequence
  Synthetic
cuaacaaagcaauuuugg

SEQ ID NO: 598479 - RNA, 19 nt, Artificial Sequence
  Synthetic
ccuaacaaagcaauuuugg

SEQ ID NO: 598480 - RNA, 20 nt, Artificial Sequence
  Synthetic
accuaacaaagcaauuuugg

SEQ ID NO: 598481 - RNA, 21 nt, Artificial Sequence
  Synthetic
aaccuaacaaagcaauuuugg

SEQ ID NO: 598482 - RNA, 22 nt, Artificial Sequence
  Synthetic
gaaccuaacaaagcaauuuugg

SEQ ID NO: 598483 - RNA, 23 nt, Artificial Sequence
  Synthetic
agaaccuaacaaagcaauuuugg

SEQ ID NO: 598484 - RNA, 24 nt, Artificial Sequence
  Synthetic
uagaaccuaacaaagcaauuuugg

SEQ ID NO: 598485 - RNA, 18 nt, Artificial Sequence
  Synthetic
ucaacauacacauuuugg

SEQ ID NO: 598486 - RNA, 19 nt, Artificial Sequence
  Synthetic
uucaacauacacauuuugg

SEQ ID NO: 598487 - RNA, 20 nt, Artificial Sequence
  Synthetic
uuucaacauacacauuuugg

SEQ ID NO: 598488 - RNA, 21 nt, Artificial Sequence
  Synthetic
guuucaacauacacauuuugg

SEQ ID NO: 598489 - RNA, 22 nt, Artificial Sequence
  Synthetic
gguuucaacauacacauuuugg

SEQ ID NO: 598490 - RNA, 23 nt, Artificial Sequence
  Synthetic
agguuucaacauacacauuuugg

SEQ ID NO: 598491 - RNA, 24 nt, Artificial Sequence
  Synthetic
uagguuucaacauacacauuuugg

SEQ ID NO: 598492 - RNA, 18 nt, Artificial Sequence
  Synthetic
acucaacacgcauuuugg

SEQ ID NO: 598493 - RNA, 19 nt, Artificial Sequence
  Synthetic
aacucaacacgcauuuugg

SEQ ID NO: 598494 - RNA, 20 nt, Artificial Sequence
  Synthetic
uaacucaacacgcauuuugg

SEQ ID NO: 598495 - RNA, 21 nt, Artificial Sequence
  Synthetic
cuaacucaacacgcauuuugg

SEQ ID NO: 598496 - RNA, 22 nt, Artificial Sequence
  Synthetic
acuaacucaacacgcauuuugg

SEQ ID NO: 598497 - RNA, 23 nt, Artificial Sequence
  Synthetic
aacuaacucaacacgcauuuugg

SEQ ID NO: 598498 - RNA, 24 nt, Artificial Sequence
  Synthetic
aaacuaacucaacacgcauuuugg

SEQ ID NO: 598499 - RNA, 18 nt, Artificial Sequence
  Synthetic
aucccuuagucauuuugg

SEQ ID NO: 598500 - RNA, 19 nt, Artificial Sequence
  Synthetic
gaucccuuagucauuuugg

SEQ ID NO: 598501 - RNA, 20 nt, Artificial Sequence
  Synthetic
agaucccuuagucauuuugg

SEQ ID NO: 598502 - RNA, 21 nt, Artificial Sequence
  Synthetic
uagaucccuuagucauuuugg

SEQ ID NO: 598503 - RNA, 22 nt, Artificial Sequence
  Synthetic
uuagaucccuuagucauuuugg

SEQ ID NO: 598504 - RNA, 23 nt, Artificial Sequence
  Synthetic
cuuagaucccuuagucauuuugg

SEQ ID NO: 598505 - RNA, 24 nt, Artificial Sequence
  Synthetic
gcuuagaucccuuagucauuuugg

SEQ ID NO: 598506 - RNA, 18 nt, Artificial Sequence
  Synthetic
acccacaguagauuuugg

SEQ ID NO: 598507 - RNA, 19 nt, Artificial Sequence
  Synthetic
cacccacaguagauuuugg

SEQ ID NO: 598508 - RNA, 20 nt, Artificial Sequence
  Synthetic
ucacccacaguagauuuugg

SEQ ID NO: 598509 - RNA, 21 nt, Artificial Sequence
  Synthetic
aucacccacaguagauuuugg

SEQ ID NO: 598510 - RNA, 22 nt, Artificial Sequence
  Synthetic
uaucacccacaguagauuuugg

SEQ ID NO: 598511 - RNA, 23 nt, Artificial Sequence
  Synthetic
auaucacccacaguagauuuugg

SEQ ID NO: 598512 - RNA, 24 nt, Artificial Sequence
  Synthetic
gauaucacccacaguagauuuugg

SEQ ID NO: 598513 - RNA, 18 nt, Artificial Sequence
  Synthetic
gugcugacaggauuuugg

SEQ ID NO: 598514 - RNA, 19 nt, Artificial Sequence
  Synthetic
ugugcugacaggauuuugg

SEQ ID NO: 598515 - RNA, 20 nt, Artificial Sequence
  Synthetic
cugugcugacaggauuuugg

SEQ ID NO: 598516 - RNA, 21 nt, Artificial Sequence
  Synthetic
gcugugcugacaggauuuugg

SEQ ID NO: 598517 - RNA, 22 nt, Artificial Sequence
  Synthetic
ggcugugcugacaggauuuugg

SEQ ID NO: 598518 - RNA, 23 nt, Artificial Sequence
  Synthetic
aggcugugcugacaggauuuugg

SEQ ID NO: 598519 - RNA, 24 nt, Artificial Sequence
  Synthetic
gaggcugugcugacaggauuuugg

SEQ ID NO: 598520 - RNA, 18 nt, Artificial Sequence
  Synthetic
cuaaaaaauguauuuugg

SEQ ID NO: 598521 - RNA, 19 nt, Artificial Sequence
  Synthetic
gcuaaaaaauguauuuugg

SEQ ID NO: 598522 - RNA, 20 nt, Artificial Sequence
  Synthetic
agcuaaaaaauguauuuugg

SEQ ID NO: 598523 - RNA, 21 nt, Artificial Sequence
  Synthetic
aagcuaaaaaauguauuuugg

SEQ ID NO: 598524 - RNA, 22 nt, Artificial Sequence
  Synthetic
gaagcuaaaaaauguauuuugg

SEQ ID NO: 598525 - RNA, 23 nt, Artificial Sequence
  Synthetic
ugaagcuaaaaaauguauuuugg

SEQ ID NO: 598526 - RNA, 24 nt, Artificial Sequence
  Synthetic
augaagcuaaaaaauguauuuugg

SEQ ID NO: 598527 - RNA, 18 nt, Artificial Sequence
  Synthetic
cauagcuguguauuuugg

SEQ ID NO: 598528 - RNA, 19 nt, Artificial Sequence
  Synthetic
gcauagcuguguauuuugg

SEQ ID NO: 598529 - RNA, 20 nt, Artificial Sequence
  Synthetic
agcauagcuguguauuuugg

SEQ ID NO: 598530 - RNA, 21 nt, Artificial Sequence
  Synthetic
uagcauagcuguguauuuugg

SEQ ID NO: 598531 - RNA, 22 nt, Artificial Sequence
  Synthetic
auagcauagcuguguauuuugg

SEQ ID NO: 598532 - RNA, 23 nt, Artificial Sequence
  Synthetic
uauagcauagcuguguauuuugg

SEQ ID NO: 598533 - RNA, 24 nt, Artificial Sequence
  Synthetic
cuauagcauagcuguguauuuugg

SEQ ID NO: 598534 - RNA, 18 nt, Artificial Sequence
  Synthetic
uccuucgcccacuuuugg

SEQ ID NO: 598535 - RNA, 19 nt, Artificial Sequence
  Synthetic
guccuucgcccacuuuugg

SEQ ID NO: 598536 - RNA, 20 nt, Artificial Sequence
  Synthetic
uguccuucgcccacuuuugg

SEQ ID NO: 598537 - RNA, 21 nt, Artificial Sequence
  Synthetic
auguccuucgcccacuuuugg

SEQ ID NO: 598538 - RNA, 22 nt, Artificial Sequence
  Synthetic
cauguccuucgcccacuuuugg

SEQ ID NO: 598539 - RNA, 23 nt, Artificial Sequence
  Synthetic
ucauguccuucgcccacuuuugg

SEQ ID NO: 598540 - RNA, 24 nt, Artificial Sequence
  Synthetic
uucauguccuucgcccacuuuugg

SEQ ID NO: 598541 - RNA, 18 nt, Artificial Sequence
  Synthetic
gaaucuuugcacuuuugg

SEQ ID NO: 598542 - RNA, 19 nt, Artificial Sequence
  Synthetic
ggaaucuuugcacuuuugg

SEQ ID NO: 598543 - RNA, 20 nt, Artificial Sequence
  Synthetic
gggaaucuuugcacuuuugg

SEQ ID NO: 598544 - RNA, 21 nt, Artificial Sequence
  Synthetic
agggaaucuuugcacuuuugg

SEQ ID NO: 598545 - RNA, 22 nt, Artificial Sequence
  Synthetic
gagggaaucuuugcacuuuugg

SEQ ID NO: 598546 - RNA, 23 nt, Artificial Sequence
  Synthetic
agagggaaucuuugcacuuuugg

SEQ ID NO: 598547 - RNA, 24 nt, Artificial Sequence
  Synthetic
gagagggaaucuuugcacuuuugg

SEQ ID NO: 598548 - RNA, 18 nt, Artificial Sequence
  Synthetic
acacuucaguccuuuugg

SEQ ID NO: 598549 - RNA, 19 nt, Artificial Sequence
  Synthetic
aacacuucaguccuuuugg

SEQ ID NO: 598550 - RNA, 20 nt, Artificial Sequence
  Synthetic
aaacacuucaguccuuuugg

SEQ ID NO: 598551 - RNA, 21 nt, Artificial Sequence
  Synthetic
uaaacacuucaguccuuuugg

SEQ ID NO: 598552 - RNA, 22 nt, Artificial Sequence
  Synthetic
cuaaacacuucaguccuuuugg

SEQ ID NO: 598553 - RNA, 23 nt, Artificial Sequence
  Synthetic
acuaaacacuucaguccuuuugg

SEQ ID NO: 598554 - RNA, 24 nt, Artificial Sequence
  Synthetic
aacuaaacacuucaguccuuuugg

SEQ ID NO: 598555 - RNA, 18 nt, Artificial Sequence
  Synthetic
aagguggcuuccuuuugg

SEQ ID NO: 598556 - RNA, 19 nt, Artificial Sequence
  Synthetic
caagguggcuuccuuuugg

SEQ ID NO: 598557 - RNA, 20 nt, Artificial Sequence
  Synthetic
ucaagguggcuuccuuuugg

SEQ ID NO: 598558 - RNA, 21 nt, Artificial Sequence
  Synthetic
gucaagguggcuuccuuuugg

SEQ ID NO: 598559 - RNA, 22 nt, Artificial Sequence
  Synthetic
agucaagguggcuuccuuuugg

SEQ ID NO: 598560 - RNA, 23 nt, Artificial Sequence
  Synthetic
cagucaagguggcuuccuuuugg

SEQ ID NO: 598561 - RNA, 24 nt, Artificial Sequence
  Synthetic
ccagucaagguggcuuccuuuugg

SEQ ID NO: 598562 - RNA, 18 nt, Artificial Sequence
  Synthetic
uuuggauuuuaguuuugg

SEQ ID NO: 598563 - RNA, 19 nt, Artificial Sequence
  Synthetic
cuuuggauuuuaguuuugg

SEQ ID NO: 598564 - RNA, 20 nt, Artificial Sequence
  Synthetic
ccuuuggauuuuaguuuugg

SEQ ID NO: 598565 - RNA, 21 nt, Artificial Sequence
  Synthetic
gccuuuggauuuuaguuuugg

SEQ ID NO: 598566 - RNA, 22 nt, Artificial Sequence
  Synthetic
ugccuuuggauuuuaguuuugg

SEQ ID NO: 598567 - RNA, 23 nt, Artificial Sequence
  Synthetic
gugccuuuggauuuuaguuuugg

SEQ ID NO: 598568 - RNA, 24 nt, Artificial Sequence
  Synthetic
ugugccuuuggauuuuaguuuugg

SEQ ID NO: 598569 - RNA, 18 nt, Artificial Sequence
  Synthetic
ggguuugagaauuuuugg

SEQ ID NO: 598570 - RNA, 19 nt, Artificial Sequence
  Synthetic
gggguuugagaauuuuugg

SEQ ID NO: 598571 - RNA, 20 nt, Artificial Sequence
  Synthetic
ggggguuugagaauuuuugg

SEQ ID NO: 598572 - RNA, 21 nt, Artificial Sequence
  Synthetic
uggggguuugagaauuuuugg

SEQ ID NO: 598573 - RNA, 22 nt, Artificial Sequence
  Synthetic
cuggggguuugagaauuuuugg

SEQ ID NO: 598574 - RNA, 23 nt, Artificial Sequence
  Synthetic
gcuggggguuugagaauuuuugg

SEQ ID NO: 598575 - RNA, 24 nt, Artificial Sequence
  Synthetic
agcuggggguuugagaauuuuugg

SEQ ID NO: 598576 - RNA, 18 nt, Artificial Sequence
  Synthetic
gugccuauugauuuuugg

SEQ ID NO: 598577 - RNA, 19 nt, Artificial Sequence
  Synthetic
ggugccuauugauuuuugg

SEQ ID NO: 598578 - RNA, 20 nt, Artificial Sequence
  Synthetic
aggugccuauugauuuuugg

SEQ ID NO: 598579 - RNA, 21 nt, Artificial Sequence
  Synthetic
caggugccuauugauuuuugg

SEQ ID NO: 598580 - RNA, 22 nt, Artificial Sequence
  Synthetic
gcaggugccuauugauuuuugg

SEQ ID NO: 598581 - RNA, 23 nt, Artificial Sequence
  Synthetic
agcaggugccuauugauuuuugg

SEQ ID NO: 598582 - RNA, 24 nt, Artificial Sequence
  Synthetic
cagcaggugccuauugauuuuugg

SEQ ID NO: 598583 - RNA, 18 nt, Artificial Sequence
  Synthetic
ugagcuacauauuuuugg

SEQ ID NO: 598584 - RNA, 19 nt, Artificial Sequence
  Synthetic
augagcuacauauuuuugg

SEQ ID NO: 598585 - RNA, 20 nt, Artificial Sequence
  Synthetic
uaugagcuacauauuuuugg

SEQ ID NO: 598586 - RNA, 21 nt, Artificial Sequence
  Synthetic
uuaugagcuacauauuuuugg

SEQ ID NO: 598587 - RNA, 22 nt, Artificial Sequence
  Synthetic
cuuaugagcuacauauuuuugg

SEQ ID NO: 598588 - RNA, 23 nt, Artificial Sequence
  Synthetic
ucuuaugagcuacauauuuuugg

SEQ ID NO: 598589 - RNA, 24 nt, Artificial Sequence
  Synthetic
cucuuaugagcuacauauuuuugg

SEQ ID NO: 598590 - RNA, 18 nt, Artificial Sequence
  Synthetic
uaauuuuuguauuuuugg

SEQ ID NO: 598591 - RNA, 19 nt, Artificial Sequence
  Synthetic
cuaauuuuuguauuuuugg

SEQ ID NO: 598592 - RNA, 20 nt, Artificial Sequence
  Synthetic
gcuaauuuuuguauuuuugg

SEQ ID NO: 598593 - RNA, 21 nt, Artificial Sequence
  Synthetic
agcuaauuuuuguauuuuugg

SEQ ID NO: 598594 - RNA, 22 nt, Artificial Sequence
  Synthetic
cagcuaauuuuuguauuuuugg

SEQ ID NO: 598595 - RNA, 23 nt, Artificial Sequence
  Synthetic
ccagcuaauuuuuguauuuuugg

SEQ ID NO: 598596 - RNA, 24 nt, Artificial Sequence
  Synthetic
cccagcuaauuuuuguauuuuugg

SEQ ID NO: 598597 - RNA, 18 nt, Artificial Sequence
  Synthetic
uuacagaagacuuuuugg

SEQ ID NO: 598598 - RNA, 19 nt, Artificial Sequence
  Synthetic
auuacagaagacuuuuugg

SEQ ID NO: 598599 - RNA, 20 nt, Artificial Sequence
  Synthetic
uauuacagaagacuuuuugg

SEQ ID NO: 598600 - RNA, 21 nt, Artificial Sequence
  Synthetic
auauuacagaagacuuuuugg

SEQ ID NO: 598601 - RNA, 22 nt, Artificial Sequence
  Synthetic
aauauuacagaagacuuuuugg

SEQ ID NO: 598602 - RNA, 23 nt, Artificial Sequence
  Synthetic
aaauauuacagaagacuuuuugg

SEQ ID NO: 598603 - RNA, 24 nt, Artificial Sequence
  Synthetic
uaaauauuacagaagacuuuuugg

SEQ ID NO: 598604 - RNA, 18 nt, Artificial Sequence
  Synthetic
gugcaugugucuuuuugg

SEQ ID NO: 598605 - RNA, 19 nt, Artificial Sequence
  Synthetic
agugcaugugucuuuuugg

SEQ ID NO: 598606 - RNA, 20 nt, Artificial Sequence
  Synthetic
gagugcaugugucuuuuugg

SEQ ID NO: 598607 - RNA, 21 nt, Artificial Sequence
  Synthetic
ugagugcaugugucuuuuugg

SEQ ID NO: 598608 - RNA, 22 nt, Artificial Sequence
  Synthetic
gugagugcaugugucuuuuugg

SEQ ID NO: 598609 - RNA, 23 nt, Artificial Sequence
  Synthetic
ugugagugcaugugucuuuuugg

SEQ ID NO: 598610 - RNA, 24 nt, Artificial Sequence
  Synthetic
augugagugcaugugucuuuuugg

SEQ ID NO: 598611 - RNA, 18 nt, Artificial Sequence
  Synthetic
cacacaccuaguuuuugg

SEQ ID NO: 598612 - RNA, 19 nt, Artificial Sequence
  Synthetic
ucacacaccuaguuuuugg

SEQ ID NO: 598613 - RNA, 20 nt, Artificial Sequence
  Synthetic
gucacacaccuaguuuuugg

SEQ ID NO: 598614 - RNA, 21 nt, Artificial Sequence
  Synthetic
ggucacacaccuaguuuuugg

SEQ ID NO: 598615 - RNA, 22 nt, Artificial Sequence
  Synthetic
aggucacacaccuaguuuuugg

SEQ ID NO: 598616 - RNA, 23 nt, Artificial Sequence
  Synthetic
aaggucacacaccuaguuuuugg

SEQ ID NO: 598617 - RNA, 24 nt, Artificial Sequence
  Synthetic
uaaggucacacaccuaguuuuugg

SEQ ID NO: 598618 - RNA, 18 nt, Artificial Sequence
  Synthetic
cgcccagcuaguuuuugg

SEQ ID NO: 598619 - RNA, 19 nt, Artificial Sequence
  Synthetic
acgcccagcuaguuuuugg

SEQ ID NO: 598620 - RNA, 20 nt, Artificial Sequence
  Synthetic
cacgcccagcuaguuuuugg

SEQ ID NO: 598621 - RNA, 21 nt, Artificial Sequence
  Synthetic
ccacgcccagcuaguuuuugg

SEQ ID NO: 598622 - RNA, 22 nt, Artificial Sequence
  Synthetic
accacgcccagcuaguuuuugg

SEQ ID NO: 598623 - RNA, 23 nt, Artificial Sequence
  Synthetic
caccacgcccagcuaguuuuugg

SEQ ID NO: 598624 - RNA, 24 nt, Artificial Sequence
  Synthetic
ucaccacgcccagcuaguuuuugg

SEQ ID NO: 598625 - RNA, 18 nt, Artificial Sequence
  Synthetic
aauuauagauguuuuugg

SEQ ID NO: 598626 - RNA, 19 nt, Artificial Sequence
  Synthetic
uaauuauagauguuuuugg

SEQ ID NO: 598627 - RNA, 20 nt, Artificial Sequence
  Synthetic
auaauuauagauguuuuugg

SEQ ID NO: 598628 - RNA, 21 nt, Artificial Sequence
  Synthetic
cauaauuauagauguuuuugg

SEQ ID NO: 598629 - RNA, 22 nt, Artificial Sequence
  Synthetic
ucauaauuauagauguuuuugg

SEQ ID NO: 598630 - RNA, 23 nt, Artificial Sequence
  Synthetic
uucauaauuauagauguuuuugg

SEQ ID NO: 598631 - RNA, 24 nt, Artificial Sequence
  Synthetic
cuucauaauuauagauguuuuugg

SEQ ID NO: 598632 - RNA, 18 nt, Artificial Sequence
  Synthetic
uuauguagcauuuuuugg

SEQ ID NO: 598633 - RNA, 19 nt, Artificial Sequence
  Synthetic
cuuauguagcauuuuuugg

SEQ ID NO: 598634 - RNA, 20 nt, Artificial Sequence
  Synthetic
acuuauguagcauuuuuugg

SEQ ID NO: 598635 - RNA, 21 nt, Artificial Sequence
  Synthetic
cacuuauguagcauuuuuugg

SEQ ID NO: 598636 - RNA, 22 nt, Artificial Sequence
  Synthetic
ccacuuauguagcauuuuuugg

SEQ ID NO: 598637 - RNA, 23 nt, Artificial Sequence
  Synthetic
accacuuauguagcauuuuuugg

SEQ ID NO: 598638 - RNA, 24 nt, Artificial Sequence
  Synthetic
uaccacuuauguagcauuuuuugg

SEQ ID NO: 598639 - RNA, 18 nt, Artificial Sequence
  Synthetic
uuuaaaaaauuuuuuugg

SEQ ID NO: 598640 - RNA, 19 nt, Artificial Sequence
  Synthetic
uuuuaaaaaauuuuuuugg

SEQ ID NO: 598641 - RNA, 20 nt, Artificial Sequence
  Synthetic
uuuuuaaaaaauuuuuuugg

SEQ ID NO: 598642 - RNA, 21 nt, Artificial Sequence
  Synthetic
uuuuuuaaaaaauuuuuuugg

SEQ ID NO: 598643 - RNA, 22 nt, Artificial Sequence
  Synthetic
auuuuuuaaaaaauuuuuuugg

SEQ ID NO: 598644 - RNA, 23 nt, Artificial Sequence
  Synthetic
uauuuuuuaaaaaauuuuuuugg

SEQ ID NO: 598645 - RNA, 24 nt, Artificial Sequence
  Synthetic
cuauuuuuuaaaaaauuuuuuugg

SEQ ID NO: 598646 - RNA, 18 nt, Artificial Sequence
  Synthetic
agauuaaaaaaaaaaaug

SEQ ID NO: 598647 - RNA, 19 nt, Artificial Sequence
  Synthetic
cagauuaaaaaaaaaaaug

SEQ ID NO: 598648 - RNA, 20 nt, Artificial Sequence
  Synthetic
ucagauuaaaaaaaaaaaug

SEQ ID NO: 598649 - RNA, 21 nt, Artificial Sequence
  Synthetic
uucagauuaaaaaaaaaaaug

SEQ ID NO: 598650 - RNA, 22 nt, Artificial Sequence
  Synthetic
cuucagauuaaaaaaaaaaaug

SEQ ID NO: 598651 - RNA, 23 nt, Artificial Sequence
  Synthetic
gcuucagauuaaaaaaaaaaaug

SEQ ID NO: 598652 - RNA, 24 nt, Artificial Sequence
  Synthetic
ugcuucagauuaaaaaaaaaaaug

SEQ ID NO: 598653 - RNA, 18 nt, Artificial Sequence
  Synthetic
ccauggcaaaaaaaaaug

SEQ ID NO: 598654 - RNA, 19 nt, Artificial Sequence
  Synthetic
cccauggcaaaaaaaaaug

SEQ ID NO: 598655 - RNA, 20 nt, Artificial Sequence
  Synthetic
ccccauggcaaaaaaaaaug

SEQ ID NO: 598656 - RNA, 21 nt, Artificial Sequence
  Synthetic
uccccauggcaaaaaaaaaug

SEQ ID NO: 598657 - RNA, 22 nt, Artificial Sequence
  Synthetic
uuccccauggcaaaaaaaaaug

SEQ ID NO: 598658 - RNA, 23 nt, Artificial Sequence
  Synthetic
auuccccauggcaaaaaaaaaug

SEQ ID NO: 598659 - RNA, 24 nt, Artificial Sequence
  Synthetic
aauuccccauggcaaaaaaaaaug

SEQ ID NO: 598660 - RNA, 18 nt, Artificial Sequence
  Synthetic
caauaugaaaaaaaaaug

SEQ ID NO: 598661 - RNA, 19 nt, Artificial Sequence
  Synthetic
gcaauaugaaaaaaaaaug

SEQ ID NO: 598662 - RNA, 20 nt, Artificial Sequence
  Synthetic
ugcaauaugaaaaaaaaaug

SEQ ID NO: 598663 - RNA, 21 nt, Artificial Sequence
  Synthetic
augcaauaugaaaaaaaaaug

SEQ ID NO: 598664 - RNA, 22 nt, Artificial Sequence
  Synthetic
aaugcaauaugaaaaaaaaaug

SEQ ID NO: 598665 - RNA, 23 nt, Artificial Sequence
  Synthetic
caaugcaauaugaaaaaaaaaug

SEQ ID NO: 598666 - RNA, 24 nt, Artificial Sequence
  Synthetic
ucaaugcaauaugaaaaaaaaaug

SEQ ID NO: 598667 - RNA, 18 nt, Artificial Sequence
  Synthetic
auaucggugaaaaaaaug

SEQ ID NO: 598668 - RNA, 19 nt, Artificial Sequence
  Synthetic
aauaucggugaaaaaaaug

SEQ ID NO: 598669 - RNA, 20 nt, Artificial Sequence
  Synthetic
caauaucggugaaaaaaaug

SEQ ID NO: 598670 - RNA, 21 nt, Artificial Sequence
  Synthetic
ucaauaucggugaaaaaaaug

SEQ ID NO: 598671 - RNA, 22 nt, Artificial Sequence
  Synthetic
uucaauaucggugaaaaaaaug

SEQ ID NO: 598672 - RNA, 23 nt, Artificial Sequence
  Synthetic
uuucaauaucggugaaaaaaaug

SEQ ID NO: 598673 - RNA, 24 nt, Artificial Sequence
  Synthetic
auuucaauaucggugaaaaaaaug

SEQ ID NO: 598674 - RNA, 18 nt, Artificial Sequence
  Synthetic
caaacuuauacaaaaaug

SEQ ID NO: 598675 - RNA, 19 nt, Artificial Sequence
  Synthetic
ucaaacuuauacaaaaaug

SEQ ID NO: 598676 - RNA, 20 nt, Artificial Sequence
  Synthetic
aucaaacuuauacaaaaaug

SEQ ID NO: 598677 - RNA, 21 nt, Artificial Sequence
  Synthetic
uaucaaacuuauacaaaaaug

SEQ ID NO: 598678 - RNA, 22 nt, Artificial Sequence
  Synthetic
auaucaaacuuauacaaaaaug

SEQ ID NO: 598679 - RNA, 23 nt, Artificial Sequence
  Synthetic
gauaucaaacuuauacaaaaaug

SEQ ID NO: 598680 - RNA, 24 nt, Artificial Sequence
  Synthetic
ggauaucaaacuuauacaaaaaug

SEQ ID NO: 598681 - RNA, 18 nt, Artificial Sequence
  Synthetic
uaaagaaacccaaaaaug

SEQ ID NO: 598682 - RNA, 19 nt, Artificial Sequence
  Synthetic
auaaagaaacccaaaaaug

SEQ ID NO: 598683 - RNA, 20 nt, Artificial Sequence
  Synthetic
uauaaagaaacccaaaaaug

SEQ ID NO: 598684 - RNA, 21 nt, Artificial Sequence
  Synthetic
cuauaaagaaacccaaaaaug

SEQ ID NO: 598685 - RNA, 22 nt, Artificial Sequence
  Synthetic
gcuauaaagaaacccaaaaaug

SEQ ID NO: 598686 - RNA, 23 nt, Artificial Sequence
  Synthetic
ugcuauaaagaaacccaaaaaug

SEQ ID NO: 598687 - RNA, 24 nt, Artificial Sequence
  Synthetic
cugcuauaaagaaacccaaaaaug

SEQ ID NO: 598688 - RNA, 18 nt, Artificial Sequence
  Synthetic
ccuuggccuccaaaaaug

SEQ ID NO: 598689 - RNA, 19 nt, Artificial Sequence
  Synthetic
accuuggccuccaaaaaug

SEQ ID NO: 598690 - RNA, 20 nt, Artificial Sequence
  Synthetic
caccuuggccuccaaaaaug

SEQ ID NO: 598691 - RNA, 21 nt, Artificial Sequence
  Synthetic
ccaccuuggccuccaaaaaug

SEQ ID NO: 598692 - RNA, 22 nt, Artificial Sequence
  Synthetic
cccaccuuggccuccaaaaaug

SEQ ID NO: 598693 - RNA, 23 nt, Artificial Sequence
  Synthetic
ucccaccuuggccuccaaaaaug

SEQ ID NO: 598694 - RNA, 24 nt, Artificial Sequence
  Synthetic
aucccaccuuggccuccaaaaaug

SEQ ID NO: 598695 - RNA, 18 nt, Artificial Sequence
  Synthetic
ucaauauccagaaaaaug

SEQ ID NO: 598696 - RNA, 19 nt, Artificial Sequence
  Synthetic
aucaauauccagaaaaaug

SEQ ID NO: 598697 - RNA, 20 nt, Artificial Sequence
  Synthetic
uaucaauauccagaaaaaug

SEQ ID NO: 598698 - RNA, 21 nt, Artificial Sequence
  Synthetic
guaucaauauccagaaaaaug

SEQ ID NO: 598699 - RNA, 22 nt, Artificial Sequence
  Synthetic
uguaucaauauccagaaaaaug

SEQ ID NO: 598700 - RNA, 23 nt, Artificial Sequence
  Synthetic
cuguaucaauauccagaaaaaug

SEQ ID NO: 598701 - RNA, 24 nt, Artificial Sequence
  Synthetic
acuguaucaauauccagaaaaaug

SEQ ID NO: 598702 - RNA, 18 nt, Artificial Sequence
  Synthetic
auacuugugggaaaaaug

SEQ ID NO: 598703 - RNA, 19 nt, Artificial Sequence
  Synthetic
cauacuugugggaaaaaug

SEQ ID NO: 598704 - RNA, 20 nt, Artificial Sequence
  Synthetic
ccauacuugugggaaaaaug

SEQ ID NO: 598705 - RNA, 21 nt, Artificial Sequence
  Synthetic
accauacuugugggaaaaaug

SEQ ID NO: 598706 - RNA, 22 nt, Artificial Sequence
  Synthetic
gaccauacuugugggaaaaaug

SEQ ID NO: 598707 - RNA, 23 nt, Artificial Sequence
  Synthetic
agaccauacuugugggaaaaaug

SEQ ID NO: 598708 - RNA, 24 nt, Artificial Sequence
  Synthetic
cagaccauacuugugggaaaaaug

SEQ ID NO: 598709 - RNA, 18 nt, Artificial Sequence
  Synthetic
uaaaugauuugaaaaaug

SEQ ID NO: 598710 - RNA, 19 nt, Artificial Sequence
  Synthetic
guaaaugauuugaaaaaug

SEQ ID NO: 598711 - RNA, 20 nt, Artificial Sequence
  Synthetic
aguaaaugauuugaaaaaug

SEQ ID NO: 598712 - RNA, 21 nt, Artificial Sequence
  Synthetic
uaguaaaugauuugaaaaaug

SEQ ID NO: 598713 - RNA, 22 nt, Artificial Sequence
  Synthetic
auaguaaaugauuugaaaaaug

SEQ ID NO: 598714 - RNA, 23 nt, Artificial Sequence
  Synthetic
uauaguaaaugauuugaaaaaug

SEQ ID NO: 598715 - RNA, 24 nt, Artificial Sequence
  Synthetic
uuauaguaaaugauuugaaaaaug

SEQ ID NO: 598716 - RNA, 18 nt, Artificial Sequence
  Synthetic
aaauuagaaauaaaaaug

SEQ ID NO: 598717 - RNA, 19 nt, Artificial Sequence
  Synthetic
aaaauuagaaauaaaaaug

SEQ ID NO: 598718 - RNA, 20 nt, Artificial Sequence
  Synthetic
aaaaauuagaaauaaaaaug

SEQ ID NO: 598719 - RNA, 21 nt, Artificial Sequence
  Synthetic
gaaaaauuagaaauaaaaaug

SEQ ID NO: 598720 - RNA, 22 nt, Artificial Sequence
  Synthetic
agaaaaauuagaaauaaaaaug

SEQ ID NO: 598721 - RNA, 23 nt, Artificial Sequence
  Synthetic
aagaaaaauuagaaauaaaaaug

SEQ ID NO: 598722 - RNA, 24 nt, Artificial Sequence
  Synthetic
uaagaaaaauuagaaauaaaaaug

SEQ ID NO: 598723 - RNA, 18 nt, Artificial Sequence
  Synthetic
ugaaggcccauaaaaaug

SEQ ID NO: 598724 - RNA, 19 nt, Artificial Sequence
  Synthetic
augaaggcccauaaaaaug

SEQ ID NO: 598725 - RNA, 20 nt, Artificial Sequence
  Synthetic
caugaaggcccauaaaaaug

SEQ ID NO: 598726 - RNA, 21 nt, Artificial Sequence
  Synthetic
ucaugaaggcccauaaaaaug

SEQ ID NO: 598727 - RNA, 22 nt, Artificial Sequence
  Synthetic
aucaugaaggcccauaaaaaug

SEQ ID NO: 598728 - RNA, 23 nt, Artificial Sequence
  Synthetic
uaucaugaaggcccauaaaaaug

SEQ ID NO: 598729 - RNA, 24 nt, Artificial Sequence
  Synthetic
guaucaugaaggcccauaaaaaug

SEQ ID NO: 598730 - RNA, 18 nt, Artificial Sequence
  Synthetic
gugccuauuuuaaaaaug

SEQ ID NO: 598731 - RNA, 19 nt, Artificial Sequence
  Synthetic
ugugccuauuuuaaaaaug

SEQ ID NO: 598732 - RNA, 20 nt, Artificial Sequence
  Synthetic
uugugccuauuuuaaaaaug

SEQ ID NO: 598733 - RNA, 21 nt, Artificial Sequence
  Synthetic
cuugugccuauuuuaaaaaug

SEQ ID NO: 598734 - RNA, 22 nt, Artificial Sequence
  Synthetic
ccuugugccuauuuuaaaaaug

SEQ ID NO: 598735 - RNA, 23 nt, Artificial Sequence
  Synthetic
uccuugugccuauuuuaaaaaug

SEQ ID NO: 598736 - RNA, 24 nt, Artificial Sequence
  Synthetic
guccuugugccuauuuuaaaaaug

SEQ ID NO: 598737 - RNA, 18 nt, Artificial Sequence
  Synthetic
acugcagugaccaaaaug

SEQ ID NO: 598738 - RNA, 19 nt, Artificial Sequence
  Synthetic
cacugcagugaccaaaaug

SEQ ID NO: 598739 - RNA, 20 nt, Artificial Sequence
  Synthetic
ucacugcagugaccaaaaug

SEQ ID NO: 598740 - RNA, 21 nt, Artificial Sequence
  Synthetic
uucacugcagugaccaaaaug

SEQ ID NO: 598741 - RNA, 22 nt, Artificial Sequence
  Synthetic
guucacugcagugaccaaaaug

SEQ ID NO: 598742 - RNA, 23 nt, Artificial Sequence
  Synthetic
uguucacugcagugaccaaaaug

SEQ ID NO: 598743 - RNA, 24 nt, Artificial Sequence
  Synthetic
auguucacugcagugaccaaaaug

SEQ ID NO: 598744 - RNA, 18 nt, Artificial Sequence
  Synthetic
uuugauuaggccaaaaug

SEQ ID NO: 598745 - RNA, 19 nt, Artificial Sequence
  Synthetic
auuugauuaggccaaaaug

SEQ ID NO: 598746 - RNA, 20 nt, Artificial Sequence
  Synthetic
aauuugauuaggccaaaaug

SEQ ID NO: 598747 - RNA, 21 nt, Artificial Sequence
  Synthetic
aaauuugauuaggccaaaaug

SEQ ID NO: 598748 - RNA, 22 nt, Artificial Sequence
  Synthetic
caaauuugauuaggccaaaaug

SEQ ID NO: 598749 - RNA, 23 nt, Artificial Sequence
  Synthetic
ucaaauuugauuaggccaaaaug

SEQ ID NO: 598750 - RNA, 24 nt, Artificial Sequence
  Synthetic
cucaaauuugauuaggccaaaaug

SEQ ID NO: 598751 - RNA, 18 nt, Artificial Sequence
  Synthetic
cuuuacuuugccaaaaug

SEQ ID NO: 598752 - RNA, 19 nt, Artificial Sequence
  Synthetic
ccuuuacuuugccaaaaug

SEQ ID NO: 598753 - RNA, 20 nt, Artificial Sequence
  Synthetic
uccuuuacuuugccaaaaug

SEQ ID NO: 598754 - RNA, 21 nt, Artificial Sequence
  Synthetic
uuccuuuacuuugccaaaaug

SEQ ID NO: 598755 - RNA, 22 nt, Artificial Sequence
  Synthetic
uuuccuuuacuuugccaaaaug

SEQ ID NO: 598756 - RNA, 23 nt, Artificial Sequence
  Synthetic
uuuuccuuuacuuugccaaaaug

SEQ ID NO: 598757 - RNA, 24 nt, Artificial Sequence
  Synthetic
cuuuuccuuuacuuugccaaaaug

SEQ ID NO: 598758 - RNA, 18 nt, Artificial Sequence
  Synthetic
aauuuugauaucaaaaug

SEQ ID NO: 598759 - RNA, 19 nt, Artificial Sequence
  Synthetic
gaauuuugauaucaaaaug

SEQ ID NO: 598760 - RNA, 20 nt, Artificial Sequence
  Synthetic
ugaauuuugauaucaaaaug

SEQ ID NO: 598761 - RNA, 21 nt, Artificial Sequence
  Synthetic
uugaauuuugauaucaaaaug

SEQ ID NO: 598762 - RNA, 22 nt, Artificial Sequence
  Synthetic
cuugaauuuugauaucaaaaug

SEQ ID NO: 598763 - RNA, 23 nt, Artificial Sequence
  Synthetic
ucuugaauuuugauaucaaaaug

SEQ ID NO: 598764 - RNA, 24 nt, Artificial Sequence
  Synthetic
uucuugaauuuugauaucaaaaug

SEQ ID NO: 598765 - RNA, 18 nt, Artificial Sequence
  Synthetic
gagcaaaagcucaaaaug

SEQ ID NO: 598766 - RNA, 19 nt, Artificial Sequence
  Synthetic
ggagcaaaagcucaaaaug

SEQ ID NO: 598767 - RNA, 20 nt, Artificial Sequence
  Synthetic
cggagcaaaagcucaaaaug

SEQ ID NO: 598768 - RNA, 21 nt, Artificial Sequence
  Synthetic
ccggagcaaaagcucaaaaug

SEQ ID NO: 598769 - RNA, 22 nt, Artificial Sequence
  Synthetic
accggagcaaaagcucaaaaug

SEQ ID NO: 598770 - RNA, 23 nt, Artificial Sequence
  Synthetic
aaccggagcaaaagcucaaaaug

SEQ ID NO: 598771 - RNA, 24 nt, Artificial Sequence
  Synthetic
gaaccggagcaaaagcucaaaaug

SEQ ID NO: 598772 - RNA, 18 nt, Artificial Sequence
  Synthetic
uuuuugaccaagaaaaug

SEQ ID NO: 598773 - RNA, 19 nt, Artificial Sequence
  Synthetic
auuuuugaccaagaaaaug

SEQ ID NO: 598774 - RNA, 20 nt, Artificial Sequence
  Synthetic
aauuuuugaccaagaaaaug

SEQ ID NO: 598775 - RNA, 21 nt, Artificial Sequence
  Synthetic
caauuuuugaccaagaaaaug

SEQ ID NO: 598776 - RNA, 22 nt, Artificial Sequence
  Synthetic
acaauuuuugaccaagaaaaug

SEQ ID NO: 598777 - RNA, 23 nt, Artificial Sequence
  Synthetic
uacaauuuuugaccaagaaaaug

SEQ ID NO: 598778 - RNA, 24 nt, Artificial Sequence
  Synthetic
auacaauuuuugaccaagaaaaug

SEQ ID NO: 598779 - RNA, 18 nt, Artificial Sequence
  Synthetic
gaagcagaagagaaaaug

SEQ ID NO: 598780 - RNA, 19 nt, Artificial Sequence
  Synthetic
ggaagcagaagagaaaaug

SEQ ID NO: 598781 - RNA, 20 nt, Artificial Sequence
  Synthetic
uggaagcagaagagaaaaug

SEQ ID NO: 598782 - RNA, 21 nt, Artificial Sequence
  Synthetic
auggaagcagaagagaaaaug

SEQ ID NO: 598783 - RNA, 22 nt, Artificial Sequence
  Synthetic
cauggaagcagaagagaaaaug

SEQ ID NO: 598784 - RNA, 23 nt, Artificial Sequence
  Synthetic
acauggaagcagaagagaaaaug

SEQ ID NO: 598785 - RNA, 24 nt, Artificial Sequence
  Synthetic
uacauggaagcagaagagaaaaug

SEQ ID NO: 598786 - RNA, 18 nt, Artificial Sequence
  Synthetic
aaaagacacccgaaaaug

SEQ ID NO: 598787 - RNA, 19 nt, Artificial Sequence
  Synthetic
gaaaagacacccgaaaaug

SEQ ID NO: 598788 - RNA, 20 nt, Artificial Sequence
  Synthetic
ugaaaagacacccgaaaaug

SEQ ID NO: 598789 - RNA, 21 nt, Artificial Sequence
  Synthetic
cugaaaagacacccgaaaaug

SEQ ID NO: 598790 - RNA, 22 nt, Artificial Sequence
  Synthetic
gcugaaaagacacccgaaaaug

SEQ ID NO: 598791 - RNA, 23 nt, Artificial Sequence
  Synthetic
ugcugaaaagacacccgaaaaug

SEQ ID NO: 598792 - RNA, 24 nt, Artificial Sequence
  Synthetic
cugcugaaaagacacccgaaaaug

SEQ ID NO: 598793 - RNA, 18 nt, Artificial Sequence
  Synthetic
ucagaagaaaggaaaaug

SEQ ID NO: 598794 - RNA, 19 nt, Artificial Sequence
  Synthetic
cucagaagaaaggaaaaug

SEQ ID NO: 598795 - RNA, 20 nt, Artificial Sequence
  Synthetic
gcucagaagaaaggaaaaug

SEQ ID NO: 598796 - RNA, 21 nt, Artificial Sequence
  Synthetic
ggcucagaagaaaggaaaaug

SEQ ID NO: 598797 - RNA, 22 nt, Artificial Sequence
  Synthetic
gggcucagaagaaaggaaaaug

SEQ ID NO: 598798 - RNA, 23 nt, Artificial Sequence
  Synthetic
agggcucagaagaaaggaaaaug

SEQ ID NO: 598799 - RNA, 24 nt, Artificial Sequence
  Synthetic
gagggcucagaagaaaggaaaaug

SEQ ID NO: 598800 - RNA, 18 nt, Artificial Sequence
  Synthetic
guugugggaaggaaaaug

SEQ ID NO: 598801 - RNA, 19 nt, Artificial Sequence
  Synthetic
gguugugggaaggaaaaug

SEQ ID NO: 598802 - RNA, 20 nt, Artificial Sequence
  Synthetic
ggguugugggaaggaaaaug

SEQ ID NO: 598803 - RNA, 21 nt, Artificial Sequence
  Synthetic
cggguugugggaaggaaaaug

SEQ ID NO: 598804 - RNA, 22 nt, Artificial Sequence
  Synthetic
ucggguugugggaaggaaaaug

SEQ ID NO: 598805 - RNA, 23 nt, Artificial Sequence
  Synthetic
uucggguugugggaaggaaaaug

SEQ ID NO: 598806 - RNA, 24 nt, Artificial Sequence
  Synthetic
cuucggguugugggaaggaaaaug

SEQ ID NO: 598807 - RNA, 18 nt, Artificial Sequence
  Synthetic
gaagaagacaggaaaaug

SEQ ID NO: 598808 - RNA, 19 nt, Artificial Sequence
  Synthetic
agaagaagacaggaaaaug

SEQ ID NO: 598809 - RNA, 20 nt, Artificial Sequence
  Synthetic
cagaagaagacaggaaaaug

SEQ ID NO: 598810 - RNA, 21 nt, Artificial Sequence
  Synthetic
ucagaagaagacaggaaaaug

SEQ ID NO: 598811 - RNA, 22 nt, Artificial Sequence
  Synthetic
cucagaagaagacaggaaaaug

SEQ ID NO: 598812 - RNA, 23 nt, Artificial Sequence
  Synthetic
gcucagaagaagacaggaaaaug

SEQ ID NO: 598813 - RNA, 24 nt, Artificial Sequence
  Synthetic
ggcucagaagaagacaggaaaaug

SEQ ID NO: 598814 - RNA, 18 nt, Artificial Sequence
  Synthetic
aaacaaguuaggaaaaug

SEQ ID NO: 598815 - RNA, 19 nt, Artificial Sequence
  Synthetic
gaaacaaguuaggaaaaug

SEQ ID NO: 598816 - RNA, 20 nt, Artificial Sequence
  Synthetic
agaaacaaguuaggaaaaug

SEQ ID NO: 598817 - RNA, 21 nt, Artificial Sequence
  Synthetic
gagaaacaaguuaggaaaaug

SEQ ID NO: 598818 - RNA, 22 nt, Artificial Sequence
  Synthetic
ugagaaacaaguuaggaaaaug

SEQ ID NO: 598819 - RNA, 23 nt, Artificial Sequence
  Synthetic
uugagaaacaaguuaggaaaaug

SEQ ID NO: 598820 - RNA, 24 nt, Artificial Sequence
  Synthetic
uuugagaaacaaguuaggaaaaug

SEQ ID NO: 598821 - RNA, 18 nt, Artificial Sequence
  Synthetic
cuagcaguuaggaaaaug

SEQ ID NO: 598822 - RNA, 19 nt, Artificial Sequence
  Synthetic
ucuagcaguuaggaaaaug

SEQ ID NO: 598823 - RNA, 20 nt, Artificial Sequence
  Synthetic
aucuagcaguuaggaaaaug

SEQ ID NO: 598824 - RNA, 21 nt, Artificial Sequence
  Synthetic
aaucuagcaguuaggaaaaug

SEQ ID NO: 598825 - RNA, 22 nt, Artificial Sequence
  Synthetic
aaaucuagcaguuaggaaaaug

SEQ ID NO: 598826 - RNA, 23 nt, Artificial Sequence
  Synthetic
gaaaucuagcaguuaggaaaaug

SEQ ID NO: 598827 - RNA, 24 nt, Artificial Sequence
  Synthetic
ggaaaucuagcaguuaggaaaaug

SEQ ID NO: 598828 - RNA, 18 nt, Artificial Sequence
  Synthetic
gauugucuagggaaaaug

SEQ ID NO: 598829 - RNA, 19 nt, Artificial Sequence
  Synthetic
agauugucuagggaaaaug

SEQ ID NO: 598830 - RNA, 20 nt, Artificial Sequence
  Synthetic
aagauugucuagggaaaaug

SEQ ID NO: 598831 - RNA, 21 nt, Artificial Sequence
  Synthetic
aaagauugucuagggaaaaug

SEQ ID NO: 598832 - RNA, 22 nt, Artificial Sequence
  Synthetic
caaagauugucuagggaaaaug

SEQ ID NO: 598833 - RNA, 23 nt, Artificial Sequence
  Synthetic
ccaaagauugucuagggaaaaug

SEQ ID NO: 598834 - RNA, 24 nt, Artificial Sequence
  Synthetic
gccaaagauugucuagggaaaaug

SEQ ID NO: 598835 - RNA, 18 nt, Artificial Sequence
  Synthetic
aagaguccugggaaaaug

SEQ ID NO: 598836 - RNA, 19 nt, Artificial Sequence
  Synthetic
gaagaguccugggaaaaug

SEQ ID NO: 598837 - RNA, 20 nt, Artificial Sequence
  Synthetic
agaagaguccugggaaaaug

SEQ ID NO: 598838 - RNA, 21 nt, Artificial Sequence
  Synthetic
aagaagaguccugggaaaaug

SEQ ID NO: 598839 - RNA, 22 nt, Artificial Sequence
  Synthetic
aaagaagaguccugggaaaaug

SEQ ID NO: 598840 - RNA, 23 nt, Artificial Sequence
  Synthetic
uaaagaagaguccugggaaaaug

SEQ ID NO: 598841 - RNA, 24 nt, Artificial Sequence
  Synthetic
auaaagaagaguccugggaaaaug

SEQ ID NO: 598842 - RNA, 18 nt, Artificial Sequence
  Synthetic
aaauggaugaugaaaaug

SEQ ID NO: 598843 - RNA, 19 nt, Artificial Sequence
  Synthetic
uaaauggaugaugaaaaug

SEQ ID NO: 598844 - RNA, 20 nt, Artificial Sequence
  Synthetic
cuaaauggaugaugaaaaug

SEQ ID NO: 598845 - RNA, 21 nt, Artificial Sequence
  Synthetic
ucuaaauggaugaugaaaaug

SEQ ID NO: 598846 - RNA, 22 nt, Artificial Sequence
  Synthetic
aucuaaauggaugaugaaaaug

SEQ ID NO: 598847 - RNA, 23 nt, Artificial Sequence
  Synthetic
aaucuaaauggaugaugaaaaug

SEQ ID NO: 598848 - RNA, 24 nt, Artificial Sequence
  Synthetic
uaaucuaaauggaugaugaaaaug

SEQ ID NO: 598849 - RNA, 18 nt, Artificial Sequence
  Synthetic
uauaagaaucugaaaaug

SEQ ID NO: 598850 - RNA, 19 nt, Artificial Sequence
  Synthetic
uuauaagaaucugaaaaug

SEQ ID NO: 598851 - RNA, 20 nt, Artificial Sequence
  Synthetic
uuuauaagaaucugaaaaug

SEQ ID NO: 598852 - RNA, 21 nt, Artificial Sequence
  Synthetic
auuuauaagaaucugaaaaug

SEQ ID NO: 598853 - RNA, 22 nt, Artificial Sequence
  Synthetic
gauuuauaagaaucugaaaaug

SEQ ID NO: 598854 - RNA, 23 nt, Artificial Sequence
  Synthetic
agauuuauaagaaucugaaaaug

SEQ ID NO: 598855 - RNA, 24 nt, Artificial Sequence
  Synthetic
aagauuuauaagaaucugaaaaug

SEQ ID NO: 598856 - RNA, 18 nt, Artificial Sequence
  Synthetic
gugccaucagugaaaaug

SEQ ID NO: 598857 - RNA, 19 nt, Artificial Sequence
  Synthetic
ugugccaucagugaaaaug

SEQ ID NO: 598858 - RNA, 20 nt, Artificial Sequence
  Synthetic
augugccaucagugaaaaug

SEQ ID NO: 598859 - RNA, 21 nt, Artificial Sequence
  Synthetic
caugugccaucagugaaaaug

SEQ ID NO: 598860 - RNA, 22 nt, Artificial Sequence
  Synthetic
ucaugugccaucagugaaaaug

SEQ ID NO: 598861 - RNA, 23 nt, Artificial Sequence
  Synthetic
aucaugugccaucagugaaaaug

SEQ ID NO: 598862 - RNA, 24 nt, Artificial Sequence
  Synthetic
caucaugugccaucagugaaaaug

SEQ ID NO: 598863 - RNA, 18 nt, Artificial Sequence
  Synthetic
aaaaugacugugaaaaug

SEQ ID NO: 598864 - RNA, 19 nt, Artificial Sequence
  Synthetic
uaaaaugacugugaaaaug

SEQ ID NO: 598865 - RNA, 20 nt, Artificial Sequence
  Synthetic
uuaaaaugacugugaaaaug

SEQ ID NO: 598866 - RNA, 21 nt, Artificial Sequence
  Synthetic
auuaaaaugacugugaaaaug

SEQ ID NO: 598867 - RNA, 22 nt, Artificial Sequence
  Synthetic
aauuaaaaugacugugaaaaug

SEQ ID NO: 598868 - RNA, 23 nt, Artificial Sequence
  Synthetic
aaauuaaaaugacugugaaaaug

SEQ ID NO: 598869 - RNA, 24 nt, Artificial Sequence
  Synthetic
uaaauuaaaaugacugugaaaaug

SEQ ID NO: 598870 - RNA, 18 nt, Artificial Sequence
  Synthetic
uaaagauacuugaaaaug

SEQ ID NO: 598871 - RNA, 19 nt, Artificial Sequence
  Synthetic
auaaagauacuugaaaaug

SEQ ID NO: 598872 - RNA, 20 nt, Artificial Sequence
  Synthetic
uauaaagauacuugaaaaug

SEQ ID NO: 598873 - RNA, 21 nt, Artificial Sequence
  Synthetic
cuauaaagauacuugaaaaug

SEQ ID NO: 598874 - RNA, 22 nt, Artificial Sequence
  Synthetic
gcuauaaagauacuugaaaaug

SEQ ID NO: 598875 - RNA, 23 nt, Artificial Sequence
  Synthetic
ugcuauaaagauacuugaaaaug

SEQ ID NO: 598876 - RNA, 24 nt, Artificial Sequence
  Synthetic
cugcuauaaagauacuugaaaaug

SEQ ID NO: 598877 - RNA, 18 nt, Artificial Sequence
  Synthetic
uuuaggacuuugaaaaug

SEQ ID NO: 598878 - RNA, 19 nt, Artificial Sequence
  Synthetic
uuuuaggacuuugaaaaug

SEQ ID NO: 598879 - RNA, 20 nt, Artificial Sequence
  Synthetic
cuuuuaggacuuugaaaaug

SEQ ID NO: 598880 - RNA, 21 nt, Artificial Sequence
  Synthetic
ucuuuuaggacuuugaaaaug

SEQ ID NO: 598881 - RNA, 22 nt, Artificial Sequence
  Synthetic
gucuuuuaggacuuugaaaaug

SEQ ID NO: 598882 - RNA, 23 nt, Artificial Sequence
  Synthetic
ggucuuuuaggacuuugaaaaug

SEQ ID NO: 598883 - RNA, 24 nt, Artificial Sequence
  Synthetic
uggucuuuuaggacuuugaaaaug

SEQ ID NO: 598884 - RNA, 18 nt, Artificial Sequence
  Synthetic
auuaaaaaacauaaaaug

SEQ ID NO: 598885 - RNA, 19 nt, Artificial Sequence
  Synthetic
aauuaaaaaacauaaaaug

SEQ ID NO: 598886 - RNA, 20 nt, Artificial Sequence
  Synthetic
aaauuaaaaaacauaaaaug

SEQ ID NO: 598887 - RNA, 21 nt, Artificial Sequence
  Synthetic
aaaauuaaaaaacauaaaaug

SEQ ID NO: 598888 - RNA, 22 nt, Artificial Sequence
  Synthetic
uaaaauuaaaaaacauaaaaug

SEQ ID NO: 598889 - RNA, 23 nt, Artificial Sequence
  Synthetic
uuaaaauuaaaaaacauaaaaug

SEQ ID NO: 598890 - RNA, 24 nt, Artificial Sequence
  Synthetic
guuaaaauuaaaaaacauaaaaug

SEQ ID NO: 598891 - RNA, 18 nt, Artificial Sequence
  Synthetic
uguuagaaacauaaaaug

SEQ ID NO: 598892 - RNA, 19 nt, Artificial Sequence
  Synthetic
auguuagaaacauaaaaug

SEQ ID NO: 598893 - RNA, 20 nt, Artificial Sequence
  Synthetic
gauguuagaaacauaaaaug

SEQ ID NO: 598894 - RNA, 21 nt, Artificial Sequence
  Synthetic
ugauguuagaaacauaaaaug

SEQ ID NO: 598895 - RNA, 22 nt, Artificial Sequence
  Synthetic
gugauguuagaaacauaaaaug

SEQ ID NO: 598896 - RNA, 23 nt, Artificial Sequence
  Synthetic
ugugauguuagaaacauaaaaug

SEQ ID NO: 598897 - RNA, 24 nt, Artificial Sequence
  Synthetic
uugugauguuagaaacauaaaaug

SEQ ID NO: 598898 - RNA, 18 nt, Artificial Sequence
  Synthetic
agucaaagauauaaaaug

SEQ ID NO: 598899 - RNA, 19 nt, Artificial Sequence
  Synthetic
aagucaaagauauaaaaug

SEQ ID NO: 598900 - RNA, 20 nt, Artificial Sequence
  Synthetic
aaagucaaagauauaaaaug

SEQ ID NO: 598901 - RNA, 21 nt, Artificial Sequence
  Synthetic
caaagucaaagauauaaaaug

SEQ ID NO: 598902 - RNA, 22 nt, Artificial Sequence
  Synthetic
ucaaagucaaagauauaaaaug

SEQ ID NO: 598903 - RNA, 23 nt, Artificial Sequence
  Synthetic
aucaaagucaaagauauaaaaug

SEQ ID NO: 598904 - RNA, 24 nt, Artificial Sequence
  Synthetic
aaucaaagucaaagauauaaaaug

SEQ ID NO: 598905 - RNA, 18 nt, Artificial Sequence
  Synthetic
uaauaauuaacuaaaaug

SEQ ID NO: 598906 - RNA, 19 nt, Artificial Sequence
  Synthetic
auaauaauuaacuaaaaug

SEQ ID NO: 598907 - RNA, 20 nt, Artificial Sequence
  Synthetic
aauaauaauuaacuaaaaug

SEQ ID NO: 598908 - RNA, 21 nt, Artificial Sequence
  Synthetic
aaauaauaauuaacuaaaaug

SEQ ID NO: 598909 - RNA, 22 nt, Artificial Sequence
  Synthetic
uaaauaauaauuaacuaaaaug

SEQ ID NO: 598910 - RNA, 23 nt, Artificial Sequence
  Synthetic
uuaaauaauaauuaacuaaaaug

SEQ ID NO: 598911 - RNA, 24 nt, Artificial Sequence
  Synthetic
cuuaaauaauaauuaacuaaaaug

SEQ ID NO: 598912 - RNA, 18 nt, Artificial Sequence
  Synthetic
uguuuugucacuaaaaug

SEQ ID NO: 598913 - RNA, 19 nt, Artificial Sequence
  Synthetic
uuguuuugucacuaaaaug

SEQ ID NO: 598914 - RNA, 20 nt, Artificial Sequence
  Synthetic
auuguuuugucacuaaaaug

SEQ ID NO: 598915 - RNA, 21 nt, Artificial Sequence
  Synthetic
gauuguuuugucacuaaaaug

SEQ ID NO: 598916 - RNA, 22 nt, Artificial Sequence
  Synthetic
agauuguuuugucacuaaaaug

SEQ ID NO: 598917 - RNA, 23 nt, Artificial Sequence
  Synthetic
aagauuguuuugucacuaaaaug

SEQ ID NO: 598918 - RNA, 24 nt, Artificial Sequence
  Synthetic
aaagauuguuuugucacuaaaaug

SEQ ID NO: 598919 - RNA, 18 nt, Artificial Sequence
  Synthetic
ugacauaggccuaaaaug

SEQ ID NO: 598920 - RNA, 19 nt, Artificial Sequence
  Synthetic
gugacauaggccuaaaaug

SEQ ID NO: 598921 - RNA, 20 nt, Artificial Sequence
  Synthetic
ugugacauaggccuaaaaug

SEQ ID NO: 598922 - RNA, 21 nt, Artificial Sequence
  Synthetic
uugugacauaggccuaaaaug

SEQ ID NO: 598923 - RNA, 22 nt, Artificial Sequence
  Synthetic
cuugugacauaggccuaaaaug

SEQ ID NO: 598924 - RNA, 23 nt, Artificial Sequence
  Synthetic
gcuugugacauaggccuaaaaug

SEQ ID NO: 598925 - RNA, 24 nt, Artificial Sequence
  Synthetic
agcuugugacauaggccuaaaaug

SEQ ID NO: 598926 - RNA, 18 nt, Artificial Sequence
  Synthetic
agcugcuguaguaaaaug

SEQ ID NO: 598927 - RNA, 19 nt, Artificial Sequence
  Synthetic
gagcugcuguaguaaaaug

SEQ ID NO: 598928 - RNA, 20 nt, Artificial Sequence
  Synthetic
agagcugcuguaguaaaaug

SEQ ID NO: 598929 - RNA, 21 nt, Artificial Sequence
  Synthetic
cagagcugcuguaguaaaaug

SEQ ID NO: 598930 - RNA, 22 nt, Artificial Sequence
  Synthetic
gcagagcugcuguaguaaaaug

SEQ ID NO: 598931 - RNA, 23 nt, Artificial Sequence
  Synthetic
ggcagagcugcuguaguaaaaug

SEQ ID NO: 598932 - RNA, 24 nt, Artificial Sequence
  Synthetic
gggcagagcugcuguaguaaaaug

SEQ ID NO: 598933 - RNA, 18 nt, Artificial Sequence
  Synthetic
caaaguuugauuaaaaug

SEQ ID NO: 598934 - RNA, 19 nt, Artificial Sequence
  Synthetic
ucaaaguuugauuaaaaug

SEQ ID NO: 598935 - RNA, 20 nt, Artificial Sequence
  Synthetic
gucaaaguuugauuaaaaug

SEQ ID NO: 598936 - RNA, 21 nt, Artificial Sequence
  Synthetic
ggucaaaguuugauuaaaaug

SEQ ID NO: 598937 - RNA, 22 nt, Artificial Sequence
  Synthetic
cggucaaaguuugauuaaaaug

SEQ ID NO: 598938 - RNA, 23 nt, Artificial Sequence
  Synthetic
acggucaaaguuugauuaaaaug

SEQ ID NO: 598939 - RNA, 24 nt, Artificial Sequence
  Synthetic
uacggucaaaguuugauuaaaaug

SEQ ID NO: 598940 - RNA, 18 nt, Artificial Sequence
  Synthetic
uguugagaaguuaaaaug

SEQ ID NO: 598941 - RNA, 19 nt, Artificial Sequence
  Synthetic
auguugagaaguuaaaaug

SEQ ID NO: 598942 - RNA, 20 nt, Artificial Sequence
  Synthetic
uauguugagaaguuaaaaug

SEQ ID NO: 598943 - RNA, 21 nt, Artificial Sequence
  Synthetic
auauguugagaaguuaaaaug

SEQ ID NO: 598944 - RNA, 22 nt, Artificial Sequence
  Synthetic
aauauguugagaaguuaaaaug

SEQ ID NO: 598945 - RNA, 23 nt, Artificial Sequence
  Synthetic
uaauauguugagaaguuaaaaug

SEQ ID NO: 598946 - RNA, 24 nt, Artificial Sequence
  Synthetic
cuaauauguugagaaguuaaaaug

SEQ ID NO: 598947 - RNA, 18 nt, Artificial Sequence
  Synthetic
uuuauuucuguuaaaaug

SEQ ID NO: 598948 - RNA, 19 nt, Artificial Sequence
  Synthetic
uuuuauuucuguuaaaaug

SEQ ID NO: 598949 - RNA, 20 nt, Artificial Sequence
  Synthetic
auuuuauuucuguuaaaaug

SEQ ID NO: 598950 - RNA, 21 nt, Artificial Sequence
  Synthetic
cauuuuauuucuguuaaaaug

SEQ ID NO: 598951 - RNA, 22 nt, Artificial Sequence
  Synthetic
acauuuuauuucuguuaaaaug

SEQ ID NO: 598952 - RNA, 23 nt, Artificial Sequence
  Synthetic
aacauuuuauuucuguuaaaaug

SEQ ID NO: 598953 - RNA, 24 nt, Artificial Sequence
  Synthetic
uaacauuuuauuucuguuaaaaug

SEQ ID NO: 598954 - RNA, 18 nt, Artificial Sequence
  Synthetic
auccucauuuaacaaaug

SEQ ID NO: 598955 - RNA, 19 nt, Artificial Sequence
  Synthetic
uauccucauuuaacaaaug

SEQ ID NO: 598956 - RNA, 20 nt, Artificial Sequence
  Synthetic
uuauccucauuuaacaaaug

SEQ ID NO: 598957 - RNA, 21 nt, Artificial Sequence
  Synthetic
auuauccucauuuaacaaaug

SEQ ID NO: 598958 - RNA, 22 nt, Artificial Sequence
  Synthetic
aauuauccucauuuaacaaaug

SEQ ID NO: 598959 - RNA, 23 nt, Artificial Sequence
  Synthetic
caauuauccucauuuaacaaaug

SEQ ID NO: 598960 - RNA, 24 nt, Artificial Sequence
  Synthetic
gcaauuauccucauuuaacaaaug

SEQ ID NO: 598961 - RNA, 18 nt, Artificial Sequence
  Synthetic
aucacuguuggacaaaug

SEQ ID NO: 598962 - RNA, 19 nt, Artificial Sequence
  Synthetic
caucacuguuggacaaaug

SEQ ID NO: 598963 - RNA, 20 nt, Artificial Sequence
  Synthetic
gcaucacuguuggacaaaug

SEQ ID NO: 598964 - RNA, 21 nt, Artificial Sequence
  Synthetic
ugcaucacuguuggacaaaug

SEQ ID NO: 598965 - RNA, 22 nt, Artificial Sequence
  Synthetic
augcaucacuguuggacaaaug

SEQ ID NO: 598966 - RNA, 23 nt, Artificial Sequence
  Synthetic
aaugcaucacuguuggacaaaug

SEQ ID NO: 598967 - RNA, 24 nt, Artificial Sequence
  Synthetic
uaaugcaucacuguuggacaaaug

SEQ ID NO: 598968 - RNA, 18 nt, Artificial Sequence
  Synthetic
aauagaaugugacaaaug

SEQ ID NO: 598969 - RNA, 19 nt, Artificial Sequence
  Synthetic
aaauagaaugugacaaaug

SEQ ID NO: 598970 - RNA, 20 nt, Artificial Sequence
  Synthetic
aaaauagaaugugacaaaug

SEQ ID NO: 598971 - RNA, 21 nt, Artificial Sequence
  Synthetic
aaaaauagaaugugacaaaug

SEQ ID NO: 598972 - RNA, 22 nt, Artificial Sequence
  Synthetic
gaaaaauagaaugugacaaaug

SEQ ID NO: 598973 - RNA, 23 nt, Artificial Sequence
  Synthetic
ugaaaaauagaaugugacaaaug

SEQ ID NO: 598974 - RNA, 24 nt, Artificial Sequence
  Synthetic
augaaaaauagaaugugacaaaug

SEQ ID NO: 598975 - RNA, 18 nt, Artificial Sequence
  Synthetic
accuuacuaauacaaaug

SEQ ID NO: 598976 - RNA, 19 nt, Artificial Sequence
  Synthetic
uaccuuacuaauacaaaug

SEQ ID NO: 598977 - RNA, 20 nt, Artificial Sequence
  Synthetic
guaccuuacuaauacaaaug

SEQ ID NO: 598978 - RNA, 21 nt, Artificial Sequence
  Synthetic
uguaccuuacuaauacaaaug

SEQ ID NO: 598979 - RNA, 22 nt, Artificial Sequence
  Synthetic
uuguaccuuacuaauacaaaug

SEQ ID NO: 598980 - RNA, 23 nt, Artificial Sequence
  Synthetic
auuguaccuuacuaauacaaaug

SEQ ID NO: 598981 - RNA, 24 nt, Artificial Sequence
  Synthetic
uauuguaccuuacuaauacaaaug

SEQ ID NO: 598982 - RNA, 18 nt, Artificial Sequence
  Synthetic
agagauuucauacaaaug

SEQ ID NO: 598983 - RNA, 19 nt, Artificial Sequence
  Synthetic
cagagauuucauacaaaug

SEQ ID NO: 598984 - RNA, 20 nt, Artificial Sequence
  Synthetic
acagagauuucauacaaaug

SEQ ID NO: 598985 - RNA, 21 nt, Artificial Sequence
  Synthetic
aacagagauuucauacaaaug

SEQ ID NO: 598986 - RNA, 22 nt, Artificial Sequence
  Synthetic
caacagagauuucauacaaaug

SEQ ID NO: 598987 - RNA, 23 nt, Artificial Sequence
  Synthetic
gcaacagagauuucauacaaaug

SEQ ID NO: 598988 - RNA, 24 nt, Artificial Sequence
  Synthetic
agcaacagagauuucauacaaaug

SEQ ID NO: 598989 - RNA, 18 nt, Artificial Sequence
  Synthetic
caguuacaaguacaaaug

SEQ ID NO: 598990 - RNA, 19 nt, Artificial Sequence
  Synthetic
ucaguuacaaguacaaaug

SEQ ID NO: 598991 - RNA, 20 nt, Artificial Sequence
  Synthetic
gucaguuacaaguacaaaug

SEQ ID NO: 598992 - RNA, 21 nt, Artificial Sequence
  Synthetic
ugucaguuacaaguacaaaug

SEQ ID NO: 598993 - RNA, 22 nt, Artificial Sequence
  Synthetic
uugucaguuacaaguacaaaug

SEQ ID NO: 598994 - RNA, 23 nt, Artificial Sequence
  Synthetic
cuugucaguuacaaguacaaaug

SEQ ID NO: 598995 - RNA, 24 nt, Artificial Sequence
  Synthetic
gcuugucaguuacaaguacaaaug

SEQ ID NO: 598996 - RNA, 18 nt, Artificial Sequence
  Synthetic
gacaggcaauuacaaaug

SEQ ID NO: 598997 - RNA, 19 nt, Artificial Sequence
  Synthetic
agacaggcaauuacaaaug

SEQ ID NO: 598998 - RNA, 20 nt, Artificial Sequence
  Synthetic
aagacaggcaauuacaaaug

SEQ ID NO: 598999 - RNA, 21 nt, Artificial Sequence
  Synthetic
aaagacaggcaauuacaaaug

SEQ ID NO: 599000 - RNA, 22 nt, Artificial Sequence
  Synthetic
aaaagacaggcaauuacaaaug

SEQ ID NO: 599001 - RNA, 23 nt, Artificial Sequence
  Synthetic
caaaagacaggcaauuacaaaug

SEQ ID NO: 599002 - RNA, 24 nt, Artificial Sequence
  Synthetic
ccaaaagacaggcaauuacaaaug

SEQ ID NO: 599003 - RNA, 18 nt, Artificial Sequence
  Synthetic
aaccucacuuuacaaaug

SEQ ID NO: 599004 - RNA, 19 nt, Artificial Sequence
  Synthetic
aaaccucacuuuacaaaug

SEQ ID NO: 599005 - RNA, 20 nt, Artificial Sequence
  Synthetic
caaaccucacuuuacaaaug

SEQ ID NO: 599006 - RNA, 21 nt, Artificial Sequence
  Synthetic
ccaaaccucacuuuacaaaug

SEQ ID NO: 599007 - RNA, 22 nt, Artificial Sequence
  Synthetic
cccaaaccucacuuuacaaaug

SEQ ID NO: 599008 - RNA, 23 nt, Artificial Sequence
  Synthetic
ccccaaaccucacuuuacaaaug

SEQ ID NO: 599009 - RNA, 24 nt, Artificial Sequence
  Synthetic
cccccaaaccucacuuuacaaaug

SEQ ID NO: 599010 - RNA, 18 nt, Artificial Sequence
  Synthetic
gaccagccuggccaaaug

SEQ ID NO: 599011 - RNA, 19 nt, Artificial Sequence
  Synthetic
agaccagccuggccaaaug

SEQ ID NO: 599012 - RNA, 20 nt, Artificial Sequence
  Synthetic
uagaccagccuggccaaaug

SEQ ID NO: 599013 - RNA, 21 nt, Artificial Sequence
  Synthetic
cuagaccagccuggccaaaug

SEQ ID NO: 599014 - RNA, 22 nt, Artificial Sequence
  Synthetic
ucuagaccagccuggccaaaug

SEQ ID NO: 599015 - RNA, 23 nt, Artificial Sequence
  Synthetic
uucuagaccagccuggccaaaug

SEQ ID NO: 599016 - RNA, 24 nt, Artificial Sequence
  Synthetic
guucuagaccagccuggccaaaug

SEQ ID NO: 599017 - RNA, 18 nt, Artificial Sequence
  Synthetic
uuuauagacaagcaaaug

SEQ ID NO: 599018 - RNA, 19 nt, Artificial Sequence
  Synthetic
cuuuauagacaagcaaaug

SEQ ID NO: 599019 - RNA, 20 nt, Artificial Sequence
  Synthetic
acuuuauagacaagcaaaug

SEQ ID NO: 599020 - RNA, 21 nt, Artificial Sequence
  Synthetic
uacuuuauagacaagcaaaug

SEQ ID NO: 599021 - RNA, 22 nt, Artificial Sequence
  Synthetic
auacuuuauagacaagcaaaug

SEQ ID NO: 599022 - RNA, 23 nt, Artificial Sequence
  Synthetic
aauacuuuauagacaagcaaaug

SEQ ID NO: 599023 - RNA, 24 nt, Artificial Sequence
  Synthetic
aaauacuuuauagacaagcaaaug

SEQ ID NO: 599024 - RNA, 18 nt, Artificial Sequence
  Synthetic
aauaaauaauagcaaaug

SEQ ID NO: 599025 - RNA, 19 nt, Artificial Sequence
  Synthetic
uaauaaauaauagcaaaug

SEQ ID NO: 599026 - RNA, 20 nt, Artificial Sequence
  Synthetic
uuaauaaauaauagcaaaug

SEQ ID NO: 599027 - RNA, 21 nt, Artificial Sequence
  Synthetic
uuuaauaaauaauagcaaaug

SEQ ID NO: 599028 - RNA, 22 nt, Artificial Sequence
  Synthetic
cuuuaauaaauaauagcaaaug

SEQ ID NO: 599029 - RNA, 23 nt, Artificial Sequence
  Synthetic
ucuuuaauaaauaauagcaaaug

SEQ ID NO: 599030 - RNA, 24 nt, Artificial Sequence
  Synthetic
aucuuuaauaaauaauagcaaaug

SEQ ID NO: 599031 - RNA, 18 nt, Artificial Sequence
  Synthetic
auaguuaagacgcaaaug

SEQ ID NO: 599032 - RNA, 19 nt, Artificial Sequence
  Synthetic
uauaguuaagacgcaaaug

SEQ ID NO: 599033 - RNA, 20 nt, Artificial Sequence
  Synthetic
uuauaguuaagacgcaaaug

SEQ ID NO: 599034 - RNA, 21 nt, Artificial Sequence
  Synthetic
auuauaguuaagacgcaaaug

SEQ ID NO: 599035 - RNA, 22 nt, Artificial Sequence
  Synthetic
uauuauaguuaagacgcaaaug

SEQ ID NO: 599036 - RNA, 23 nt, Artificial Sequence
  Synthetic
uuauuauaguuaagacgcaaaug

SEQ ID NO: 599037 - RNA, 24 nt, Artificial Sequence
  Synthetic
cuuauuauaguuaagacgcaaaug

SEQ ID NO: 599038 - RNA, 18 nt, Artificial Sequence
  Synthetic
ugccuucguuggcaaaug

SEQ ID NO: 599039 - RNA, 19 nt, Artificial Sequence
  Synthetic
gugccuucguuggcaaaug

SEQ ID NO: 599040 - RNA, 20 nt, Artificial Sequence
  Synthetic
ugugccuucguuggcaaaug

SEQ ID NO: 599041 - RNA, 21 nt, Artificial Sequence
  Synthetic
cugugccuucguuggcaaaug

SEQ ID NO: 599042 - RNA, 22 nt, Artificial Sequence
  Synthetic
gcugugccuucguuggcaaaug

SEQ ID NO: 599043 - RNA, 23 nt, Artificial Sequence
  Synthetic
ugcugugccuucguuggcaaaug

SEQ ID NO: 599044 - RNA, 24 nt, Artificial Sequence
  Synthetic
cugcugugccuucguuggcaaaug

SEQ ID NO: 599045 - RNA, 18 nt, Artificial Sequence
  Synthetic
aucggggaaaugcaaaug

SEQ ID NO: 599046 - RNA, 19 nt, Artificial Sequence
  Synthetic
caucggggaaaugcaaaug

SEQ ID NO: 599047 - RNA, 20 nt, Artificial Sequence
  Synthetic
ucaucggggaaaugcaaaug

SEQ ID NO: 599048 - RNA, 21 nt, Artificial Sequence
  Synthetic
aucaucggggaaaugcaaaug

SEQ ID NO: 599049 - RNA, 22 nt, Artificial Sequence
  Synthetic
aaucaucggggaaaugcaaaug

SEQ ID NO: 599050 - RNA, 23 nt, Artificial Sequence
  Synthetic
caaucaucggggaaaugcaaaug

SEQ ID NO: 599051 - RNA, 24 nt, Artificial Sequence
  Synthetic
ucaaucaucggggaaaugcaaaug

SEQ ID NO: 599052 - RNA, 18 nt, Artificial Sequence
  Synthetic
gcacaagauacucaaaug

SEQ ID NO: 599053 - RNA, 19 nt, Artificial Sequence
  Synthetic
ugcacaagauacucaaaug

SEQ ID NO: 599054 - RNA, 20 nt, Artificial Sequence
  Synthetic
gugcacaagauacucaaaug

SEQ ID NO: 599055 - RNA, 21 nt, Artificial Sequence
  Synthetic
agugcacaagauacucaaaug

SEQ ID NO: 599056 - RNA, 22 nt, Artificial Sequence
  Synthetic
uagugcacaagauacucaaaug

SEQ ID NO: 599057 - RNA, 23 nt, Artificial Sequence
  Synthetic
auagugcacaagauacucaaaug

SEQ ID NO: 599058 - RNA, 24 nt, Artificial Sequence
  Synthetic
uauagugcacaagauacucaaaug

SEQ ID NO: 599059 - RNA, 18 nt, Artificial Sequence
  Synthetic
agaacauacucucaaaug

SEQ ID NO: 599060 - RNA, 19 nt, Artificial Sequence
  Synthetic
gagaacauacucucaaaug

SEQ ID NO: 599061 - RNA, 20 nt, Artificial Sequence
  Synthetic
ggagaacauacucucaaaug

SEQ ID NO: 599062 - RNA, 21 nt, Artificial Sequence
  Synthetic
uggagaacauacucucaaaug

SEQ ID NO: 599063 - RNA, 22 nt, Artificial Sequence
  Synthetic
uuggagaacauacucucaaaug

SEQ ID NO: 599064 - RNA, 23 nt, Artificial Sequence
  Synthetic
cuuggagaacauacucucaaaug

SEQ ID NO: 599065 - RNA, 24 nt, Artificial Sequence
  Synthetic
ucuuggagaacauacucucaaaug

SEQ ID NO: 599066 - RNA, 18 nt, Artificial Sequence
  Synthetic
cauuuauuuguucaaaug

SEQ ID NO: 599067 - RNA, 19 nt, Artificial Sequence
  Synthetic
gcauuuauuuguucaaaug

SEQ ID NO: 599068 - RNA, 20 nt, Artificial Sequence
  Synthetic
agcauuuauuuguucaaaug

SEQ ID NO: 599069 - RNA, 21 nt, Artificial Sequence
  Synthetic
gagcauuuauuuguucaaaug

SEQ ID NO: 599070 - RNA, 22 nt, Artificial Sequence
  Synthetic
agagcauuuauuuguucaaaug

SEQ ID NO: 599071 - RNA, 23 nt, Artificial Sequence
  Synthetic
cagagcauuuauuuguucaaaug

SEQ ID NO: 599072 - RNA, 24 nt, Artificial Sequence
  Synthetic
acagagcauuuauuuguucaaaug

SEQ ID NO: 599073 - RNA, 18 nt, Artificial Sequence
  Synthetic
cuaauuaacuuucaaaug

SEQ ID NO: 599074 - RNA, 19 nt, Artificial Sequence
  Synthetic
acuaauuaacuuucaaaug

SEQ ID NO: 599075 - RNA, 20 nt, Artificial Sequence
  Synthetic
cacuaauuaacuuucaaaug

SEQ ID NO: 599076 - RNA, 21 nt, Artificial Sequence
  Synthetic
acacuaauuaacuuucaaaug

SEQ ID NO: 599077 - RNA, 22 nt, Artificial Sequence
  Synthetic
uacacuaauuaacuuucaaaug

SEQ ID NO: 599078 - RNA, 23 nt, Artificial Sequence
  Synthetic
uuacacuaauuaacuuucaaaug

SEQ ID NO: 599079 - RNA, 24 nt, Artificial Sequence
  Synthetic
auuacacuaauuaacuuucaaaug

SEQ ID NO: 599080 - RNA, 18 nt, Artificial Sequence
  Synthetic
acaauugauaaagaaaug

SEQ ID NO: 599081 - RNA, 19 nt, Artificial Sequence
  Synthetic
gacaauugauaaagaaaug

SEQ ID NO: 599082 - RNA, 20 nt, Artificial Sequence
  Synthetic
ugacaauugauaaagaaaug

SEQ ID NO: 599083 - RNA, 21 nt, Artificial Sequence
  Synthetic
uugacaauugauaaagaaaug

SEQ ID NO: 599084 - RNA, 22 nt, Artificial Sequence
  Synthetic
auugacaauugauaaagaaaug

SEQ ID NO: 599085 - RNA, 23 nt, Artificial Sequence
  Synthetic
uauugacaauugauaaagaaaug

SEQ ID NO: 599086 - RNA, 24 nt, Artificial Sequence
  Synthetic
auauugacaauugauaaagaaaug

SEQ ID NO: 599087 - RNA, 18 nt, Artificial Sequence
  Synthetic
gacaaaaaacaagaaaug

SEQ ID NO: 599088 - RNA, 19 nt, Artificial Sequence
  Synthetic
ugacaaaaaacaagaaaug

SEQ ID NO: 599089 - RNA, 20 nt, Artificial Sequence
  Synthetic
cugacaaaaaacaagaaaug

SEQ ID NO: 599090 - RNA, 21 nt, Artificial Sequence
  Synthetic
ccugacaaaaaacaagaaaug

SEQ ID NO: 599091 - RNA, 22 nt, Artificial Sequence
  Synthetic
accugacaaaaaacaagaaaug

SEQ ID NO: 599092 - RNA, 23 nt, Artificial Sequence
  Synthetic
aaccugacaaaaaacaagaaaug

SEQ ID NO: 599093 - RNA, 24 nt, Artificial Sequence
  Synthetic
aaaccugacaaaaaacaagaaaug

SEQ ID NO: 599094 - RNA, 18 nt, Artificial Sequence
  Synthetic
ugacaaaaacaagaaaug

SEQ ID NO: 599095 - RNA, 19 nt, Artificial Sequence
  Synthetic
cugacaaaaacaagaaaug

SEQ ID NO: 599096 - RNA, 20 nt, Artificial Sequence
  Synthetic
ccugacaaaaacaagaaaug

SEQ ID NO: 599097 - RNA, 21 nt, Artificial Sequence
  Synthetic
accugacaaaaacaagaaaug

SEQ ID NO: 599098 - RNA, 22 nt, Artificial Sequence
  Synthetic
aaccugacaaaaacaagaaaug

SEQ ID NO: 599099 - RNA, 23 nt, Artificial Sequence
  Synthetic
aaaccugacaaaaacaagaaaug

SEQ ID NO: 599100 - RNA, 24 nt, Artificial Sequence
  Synthetic
caaaccugacaaaaacaagaaaug

SEQ ID NO: 599101 - RNA, 18 nt, Artificial Sequence
  Synthetic
gaaguuacacaagaaaug

SEQ ID NO: 599102 - RNA, 19 nt, Artificial Sequence
  Synthetic
ggaaguuacacaagaaaug

SEQ ID NO: 599103 - RNA, 20 nt, Artificial Sequence
  Synthetic
uggaaguuacacaagaaaug

SEQ ID NO: 599104 - RNA, 21 nt, Artificial Sequence
  Synthetic
cuggaaguuacacaagaaaug

SEQ ID NO: 599105 - RNA, 22 nt, Artificial Sequence
  Synthetic
ucuggaaguuacacaagaaaug

SEQ ID NO: 599106 - RNA, 23 nt, Artificial Sequence
  Synthetic
cucuggaaguuacacaagaaaug

SEQ ID NO: 599107 - RNA, 24 nt, Artificial Sequence
  Synthetic
acucuggaaguuacacaagaaaug

SEQ ID NO: 599108 - RNA, 18 nt, Artificial Sequence
  Synthetic
uggaggagggaagaaaug

SEQ ID NO: 599109 - RNA, 19 nt, Artificial Sequence
  Synthetic
cuggaggagggaagaaaug

SEQ ID NO: 599110 - RNA, 20 nt, Artificial Sequence
  Synthetic
gcuggaggagggaagaaaug

SEQ ID NO: 599111 - RNA, 21 nt, Artificial Sequence
  Synthetic
ggcuggaggagggaagaaaug

SEQ ID NO: 599112 - RNA, 22 nt, Artificial Sequence
  Synthetic
gggcuggaggagggaagaaaug

SEQ ID NO: 599113 - RNA, 23 nt, Artificial Sequence
  Synthetic
agggcuggaggagggaagaaaug

SEQ ID NO: 599114 - RNA, 24 nt, Artificial Sequence
  Synthetic
aagggcuggaggagggaagaaaug

SEQ ID NO: 599115 - RNA, 18 nt, Artificial Sequence
  Synthetic
cagucaauauaagaaaug

SEQ ID NO: 599116 - RNA, 19 nt, Artificial Sequence
  Synthetic
ucagucaauauaagaaaug

SEQ ID NO: 599117 - RNA, 20 nt, Artificial Sequence
  Synthetic
aucagucaauauaagaaaug

SEQ ID NO: 599118 - RNA, 21 nt, Artificial Sequence
  Synthetic
caucagucaauauaagaaaug

SEQ ID NO: 599119 - RNA, 22 nt, Artificial Sequence
  Synthetic
ccaucagucaauauaagaaaug

SEQ ID NO: 599120 - RNA, 23 nt, Artificial Sequence
  Synthetic
uccaucagucaauauaagaaaug

SEQ ID NO: 599121 - RNA, 24 nt, Artificial Sequence
  Synthetic
auccaucagucaauauaagaaaug

SEQ ID NO: 599122 - RNA, 18 nt, Artificial Sequence
  Synthetic
ucacacagcuaagaaaug

SEQ ID NO: 599123 - RNA, 19 nt, Artificial Sequence
  Synthetic
aucacacagcuaagaaaug

SEQ ID NO: 599124 - RNA, 20 nt, Artificial Sequence
  Synthetic
aaucacacagcuaagaaaug

SEQ ID NO: 599125 - RNA, 21 nt, Artificial Sequence
  Synthetic
aaaucacacagcuaagaaaug

SEQ ID NO: 599126 - RNA, 22 nt, Artificial Sequence
  Synthetic
uaaaucacacagcuaagaaaug

SEQ ID NO: 599127 - RNA, 23 nt, Artificial Sequence
  Synthetic
cuaaaucacacagcuaagaaaug

SEQ ID NO: 599128 - RNA, 24 nt, Artificial Sequence
  Synthetic
ucuaaaucacacagcuaagaaaug

SEQ ID NO: 599129 - RNA, 18 nt, Artificial Sequence
  Synthetic
uacauacaguaagaaaug

SEQ ID NO: 599130 - RNA, 19 nt, Artificial Sequence
  Synthetic
cuacauacaguaagaaaug

SEQ ID NO: 599131 - RNA, 20 nt, Artificial Sequence
  Synthetic
ccuacauacaguaagaaaug

SEQ ID NO: 599132 - RNA, 21 nt, Artificial Sequence
  Synthetic
uccuacauacaguaagaaaug

SEQ ID NO: 599133 - RNA, 22 nt, Artificial Sequence
  Synthetic
guccuacauacaguaagaaaug

SEQ ID NO: 599134 - RNA, 23 nt, Artificial Sequence
  Synthetic
uguccuacauacaguaagaaaug

SEQ ID NO: 599135 - RNA, 24 nt, Artificial Sequence
  Synthetic
auguccuacauacaguaagaaaug

SEQ ID NO: 599136 - RNA, 18 nt, Artificial Sequence
  Synthetic
ccuuggaauuaagaaaug

SEQ ID NO: 599137 - RNA, 19 nt, Artificial Sequence
  Synthetic
accuuggaauuaagaaaug

SEQ ID NO: 599138 - RNA, 20 nt, Artificial Sequence
  Synthetic
aaccuuggaauuaagaaaug

SEQ ID NO: 599139 - RNA, 21 nt, Artificial Sequence
  Synthetic
uaaccuuggaauuaagaaaug

SEQ ID NO: 599140 - RNA, 22 nt, Artificial Sequence
  Synthetic
auaaccuuggaauuaagaaaug

SEQ ID NO: 599141 - RNA, 23 nt, Artificial Sequence
  Synthetic
uauaaccuuggaauuaagaaaug

SEQ ID NO: 599142 - RNA, 24 nt, Artificial Sequence
  Synthetic
uuauaaccuuggaauuaagaaaug

SEQ ID NO: 599143 - RNA, 18 nt, Artificial Sequence
  Synthetic
gcauuggagacagaaaug

SEQ ID NO: 599144 - RNA, 19 nt, Artificial Sequence
  Synthetic
ugcauuggagacagaaaug

SEQ ID NO: 599145 - RNA, 20 nt, Artificial Sequence
  Synthetic
augcauuggagacagaaaug

SEQ ID NO: 599146 - RNA, 21 nt, Artificial Sequence
  Synthetic
aaugcauuggagacagaaaug

SEQ ID NO: 599147 - RNA, 22 nt, Artificial Sequence
  Synthetic
uaaugcauuggagacagaaaug

SEQ ID NO: 599148 - RNA, 23 nt, Artificial Sequence
  Synthetic
uuaaugcauuggagacagaaaug

SEQ ID NO: 599149 - RNA, 24 nt, Artificial Sequence
  Synthetic
cuuaaugcauuggagacagaaaug

SEQ ID NO: 599150 - RNA, 18 nt, Artificial Sequence
  Synthetic
uauaauaauccagaaaug

SEQ ID NO: 599151 - RNA, 19 nt, Artificial Sequence
  Synthetic
auauaauaauccagaaaug

SEQ ID NO: 599152 - RNA, 20 nt, Artificial Sequence
  Synthetic
aauauaauaauccagaaaug

SEQ ID NO: 599153 - RNA, 21 nt, Artificial Sequence
  Synthetic
aaauauaauaauccagaaaug

SEQ ID NO: 599154 - RNA, 22 nt, Artificial Sequence
  Synthetic
aaaauauaauaauccagaaaug

SEQ ID NO: 599155 - RNA, 23 nt, Artificial Sequence
  Synthetic
caaaauauaauaauccagaaaug

SEQ ID NO: 599156 - RNA, 24 nt, Artificial Sequence
  Synthetic
ucaaaauauaauaauccagaaaug

SEQ ID NO: 599157 - RNA, 18 nt, Artificial Sequence
  Synthetic
gagucaguggcagaaaug

SEQ ID NO: 599158 - RNA, 19 nt, Artificial Sequence
  Synthetic
ggagucaguggcagaaaug

SEQ ID NO: 599159 - RNA, 20 nt, Artificial Sequence
  Synthetic
aggagucaguggcagaaaug

SEQ ID NO: 599160 - RNA, 21 nt, Artificial Sequence
  Synthetic
gaggagucaguggcagaaaug

SEQ ID NO: 599161 - RNA, 22 nt, Artificial Sequence
  Synthetic
ggaggagucaguggcagaaaug

SEQ ID NO: 599162 - RNA, 23 nt, Artificial Sequence
  Synthetic
aggaggagucaguggcagaaaug

SEQ ID NO: 599163 - RNA, 24 nt, Artificial Sequence
  Synthetic
gaggaggagucaguggcagaaaug

SEQ ID NO: 599164 - RNA, 18 nt, Artificial Sequence
  Synthetic
acacacaaaauagaaaug

SEQ ID NO: 599165 - RNA, 19 nt, Artificial Sequence
  Synthetic
gacacacaaaauagaaaug

SEQ ID NO: 599166 - RNA, 20 nt, Artificial Sequence
  Synthetic
agacacacaaaauagaaaug

SEQ ID NO: 599167 - RNA, 21 nt, Artificial Sequence
  Synthetic
cagacacacaaaauagaaaug

SEQ ID NO: 599168 - RNA, 22 nt, Artificial Sequence
  Synthetic
acagacacacaaaauagaaaug

SEQ ID NO: 599169 - RNA, 23 nt, Artificial Sequence
  Synthetic
uacagacacacaaaauagaaaug

SEQ ID NO: 599170 - RNA, 24 nt, Artificial Sequence
  Synthetic
auacagacacacaaaauagaaaug

SEQ ID NO: 599171 - RNA, 18 nt, Artificial Sequence
  Synthetic
cucuuuuuccuagaaaug

SEQ ID NO: 599172 - RNA, 19 nt, Artificial Sequence
  Synthetic
ucucuuuuuccuagaaaug

SEQ ID NO: 599173 - RNA, 20 nt, Artificial Sequence
  Synthetic
uucucuuuuuccuagaaaug

SEQ ID NO: 599174 - RNA, 21 nt, Artificial Sequence
  Synthetic
cuucucuuuuuccuagaaaug

SEQ ID NO: 599175 - RNA, 22 nt, Artificial Sequence
  Synthetic
ccuucucuuuuuccuagaaaug

SEQ ID NO: 599176 - RNA, 23 nt, Artificial Sequence
  Synthetic
gccuucucuuuuuccuagaaaug

SEQ ID NO: 599177 - RNA, 24 nt, Artificial Sequence
  Synthetic
agccuucucuuuuuccuagaaaug

SEQ ID NO: 599178 - RNA, 18 nt, Artificial Sequence
  Synthetic
cuccuuccuuuagaaaug

SEQ ID NO: 599179 - RNA, 19 nt, Artificial Sequence
  Synthetic
acuccuuccuuuagaaaug

SEQ ID NO: 599180 - RNA, 20 nt, Artificial Sequence
  Synthetic
gacuccuuccuuuagaaaug

SEQ ID NO: 599181 - RNA, 21 nt, Artificial Sequence
  Synthetic
agacuccuuccuuuagaaaug

SEQ ID NO: 599182 - RNA, 22 nt, Artificial Sequence
  Synthetic
aagacuccuuccuuuagaaaug

SEQ ID NO: 599183 - RNA, 23 nt, Artificial Sequence
  Synthetic
aaagacuccuuccuuuagaaaug

SEQ ID NO: 599184 - RNA, 24 nt, Artificial Sequence
  Synthetic
uaaagacuccuuccuuuagaaaug

SEQ ID NO: 599185 - RNA, 18 nt, Artificial Sequence
  Synthetic
aaagaucugaaggaaaug

SEQ ID NO: 599186 - RNA, 19 nt, Artificial Sequence
  Synthetic
uaaagaucugaaggaaaug

SEQ ID NO: 599187 - RNA, 20 nt, Artificial Sequence
  Synthetic
guaaagaucugaaggaaaug

SEQ ID NO: 599188 - RNA, 21 nt, Artificial Sequence
  Synthetic
aguaaagaucugaaggaaaug

SEQ ID NO: 599189 - RNA, 22 nt, Artificial Sequence
  Synthetic
aaguaaagaucugaaggaaaug

SEQ ID NO: 599190 - RNA, 23 nt, Artificial Sequence
  Synthetic
uaaguaaagaucugaaggaaaug

SEQ ID NO: 599191 - RNA, 24 nt, Artificial Sequence
  Synthetic
uuaaguaaagaucugaaggaaaug

SEQ ID NO: 599192 - RNA, 18 nt, Artificial Sequence
  Synthetic
uagguaccuagggaaaug

SEQ ID NO: 599193 - RNA, 19 nt, Artificial Sequence
  Synthetic
guagguaccuagggaaaug

SEQ ID NO: 599194 - RNA, 20 nt, Artificial Sequence
  Synthetic
aguagguaccuagggaaaug

SEQ ID NO: 599195 - RNA, 21 nt, Artificial Sequence
  Synthetic
gaguagguaccuagggaaaug

SEQ ID NO: 599196 - RNA, 22 nt, Artificial Sequence
  Synthetic
agaguagguaccuagggaaaug

SEQ ID NO: 599197 - RNA, 23 nt, Artificial Sequence
  Synthetic
aagaguagguaccuagggaaaug

SEQ ID NO: 599198 - RNA, 24 nt, Artificial Sequence
  Synthetic
gaagaguagguaccuagggaaaug

SEQ ID NO: 599199 - RNA, 18 nt, Artificial Sequence
  Synthetic
aaauuagggggggaaaug

SEQ ID NO: 599200 - RNA, 19 nt, Artificial Sequence
  Synthetic
gaaauuagggggggaaaug

SEQ ID NO: 599201 - RNA, 20 nt, Artificial Sequence
  Synthetic
ugaaauuagggggggaaaug

SEQ ID NO: 599202 - RNA, 21 nt, Artificial Sequence
  Synthetic
uugaaauuagggggggaaaug

SEQ ID NO: 599203 - RNA, 22 nt, Artificial Sequence
  Synthetic
cuugaaauuagggggggaaaug

SEQ ID NO: 599204 - RNA, 23 nt, Artificial Sequence
  Synthetic
ucuugaaauuagggggggaaaug

SEQ ID NO: 599205 - RNA, 24 nt, Artificial Sequence
  Synthetic
aucuugaaauuagggggggaaaug

SEQ ID NO: 599206 - RNA, 18 nt, Artificial Sequence
  Synthetic
uaagaugaaugggaaaug

SEQ ID NO: 599207 - RNA, 19 nt, Artificial Sequence
  Synthetic
uuaagaugaaugggaaaug

SEQ ID NO: 599208 - RNA, 20 nt, Artificial Sequence
  Synthetic
uuuaagaugaaugggaaaug

SEQ ID NO: 599209 - RNA, 21 nt, Artificial Sequence
  Synthetic
cuuuaagaugaaugggaaaug

SEQ ID NO: 599210 - RNA, 22 nt, Artificial Sequence
  Synthetic
acuuuaagaugaaugggaaaug

SEQ ID NO: 599211 - RNA, 23 nt, Artificial Sequence
  Synthetic
aacuuuaagaugaaugggaaaug

SEQ ID NO: 599212 - RNA, 24 nt, Artificial Sequence
  Synthetic
uaacuuuaagaugaaugggaaaug

SEQ ID NO: 599213 - RNA, 18 nt, Artificial Sequence
  Synthetic
gaaguaauuugggaaaug

SEQ ID NO: 599214 - RNA, 19 nt, Artificial Sequence
  Synthetic
ugaaguaauuugggaaaug

SEQ ID NO: 599215 - RNA, 20 nt, Artificial Sequence
  Synthetic
uugaaguaauuugggaaaug

SEQ ID NO: 599216 - RNA, 21 nt, Artificial Sequence
  Synthetic
uuugaaguaauuugggaaaug

SEQ ID NO: 599217 - RNA, 22 nt, Artificial Sequence
  Synthetic
uuuugaaguaauuugggaaaug

SEQ ID NO: 599218 - RNA, 23 nt, Artificial Sequence
  Synthetic
uuuuugaaguaauuugggaaaug

SEQ ID NO: 599219 - RNA, 24 nt, Artificial Sequence
  Synthetic
cuuuuugaaguaauuugggaaaug

SEQ ID NO: 599220 - RNA, 18 nt, Artificial Sequence
  Synthetic
uaaaacuaucuggaaaug

SEQ ID NO: 599221 - RNA, 19 nt, Artificial Sequence
  Synthetic
uuaaaacuaucuggaaaug

SEQ ID NO: 599222 - RNA, 20 nt, Artificial Sequence
  Synthetic
auuaaaacuaucuggaaaug

SEQ ID NO: 599223 - RNA, 21 nt, Artificial Sequence
  Synthetic
cauuaaaacuaucuggaaaug

SEQ ID NO: 599224 - RNA, 22 nt, Artificial Sequence
  Synthetic
ccauuaaaacuaucuggaaaug

SEQ ID NO: 599225 - RNA, 23 nt, Artificial Sequence
  Synthetic
gccauuaaaacuaucuggaaaug

SEQ ID NO: 599226 - RNA, 24 nt, Artificial Sequence
  Synthetic
ggccauuaaaacuaucuggaaaug

SEQ ID NO: 599227 - RNA, 18 nt, Artificial Sequence
  Synthetic
guacugcaguuggaaaug

SEQ ID NO: 599228 - RNA, 19 nt, Artificial Sequence
  Synthetic
gguacugcaguuggaaaug

SEQ ID NO: 599229 - RNA, 20 nt, Artificial Sequence
  Synthetic
ggguacugcaguuggaaaug

SEQ ID NO: 599230 - RNA, 21 nt, Artificial Sequence
  Synthetic
cggguacugcaguuggaaaug

SEQ ID NO: 599231 - RNA, 22 nt, Artificial Sequence
  Synthetic
ccggguacugcaguuggaaaug

SEQ ID NO: 599232 - RNA, 23 nt, Artificial Sequence
  Synthetic
gccggguacugcaguuggaaaug

SEQ ID NO: 599233 - RNA, 24 nt, Artificial Sequence
  Synthetic
agccggguacugcaguuggaaaug

SEQ ID NO: 599234 - RNA, 18 nt, Artificial Sequence
  Synthetic
guauaaaauuuggaaaug

SEQ ID NO: 599235 - RNA, 19 nt, Artificial Sequence
  Synthetic
uguauaaaauuuggaaaug

SEQ ID NO: 599236 - RNA, 20 nt, Artificial Sequence
  Synthetic
auguauaaaauuuggaaaug

SEQ ID NO: 599237 - RNA, 21 nt, Artificial Sequence
  Synthetic
cauguauaaaauuuggaaaug

SEQ ID NO: 599238 - RNA, 22 nt, Artificial Sequence
  Synthetic
ucauguauaaaauuuggaaaug

SEQ ID NO: 599239 - RNA, 23 nt, Artificial Sequence
  Synthetic
uucauguauaaaauuuggaaaug

SEQ ID NO: 599240 - RNA, 24 nt, Artificial Sequence
  Synthetic
cuucauguauaaaauuuggaaaug

SEQ ID NO: 599241 - RNA, 18 nt, Artificial Sequence
  Synthetic
gauuccccuuuggaaaug

SEQ ID NO: 599242 - RNA, 19 nt, Artificial Sequence
  Synthetic
agauuccccuuuggaaaug

SEQ ID NO: 599243 - RNA, 20 nt, Artificial Sequence
  Synthetic
uagauuccccuuuggaaaug

SEQ ID NO: 599244 - RNA, 21 nt, Artificial Sequence
  Synthetic
cuagauuccccuuuggaaaug

SEQ ID NO: 599245 - RNA, 22 nt, Artificial Sequence
  Synthetic
ccuagauuccccuuuggaaaug

SEQ ID NO: 599246 - RNA, 23 nt, Artificial Sequence
  Synthetic
gccuagauuccccuuuggaaaug

SEQ ID NO: 599247 - RNA, 24 nt, Artificial Sequence
  Synthetic
ugccuagauuccccuuuggaaaug

SEQ ID NO: 599248 - RNA, 18 nt, Artificial Sequence
  Synthetic
aggacaauuuuggaaaug

SEQ ID NO: 599249 - RNA, 19 nt, Artificial Sequence
  Synthetic
uaggacaauuuuggaaaug

SEQ ID NO: 599250 - RNA, 20 nt, Artificial Sequence
  Synthetic
guaggacaauuuuggaaaug

SEQ ID NO: 599251 - RNA, 21 nt, Artificial Sequence
  Synthetic
uguaggacaauuuuggaaaug

SEQ ID NO: 599252 - RNA, 22 nt, Artificial Sequence
  Synthetic
cuguaggacaauuuuggaaaug

SEQ ID NO: 599253 - RNA, 23 nt, Artificial Sequence
  Synthetic
ucuguaggacaauuuuggaaaug

SEQ ID NO: 599254 - RNA, 24 nt, Artificial Sequence
  Synthetic
uucuguaggacaauuuuggaaaug

SEQ ID NO: 599255 - RNA, 18 nt, Artificial Sequence
  Synthetic
uugugcagaaaugaaaug

SEQ ID NO: 599256 - RNA, 19 nt, Artificial Sequence
  Synthetic
uuugugcagaaaugaaaug

SEQ ID NO: 599257 - RNA, 20 nt, Artificial Sequence
  Synthetic
guuugugcagaaaugaaaug

SEQ ID NO: 599258 - RNA, 21 nt, Artificial Sequence
  Synthetic
aguuugugcagaaaugaaaug

SEQ ID NO: 599259 - RNA, 22 nt, Artificial Sequence
  Synthetic
aaguuugugcagaaaugaaaug

SEQ ID NO: 599260 - RNA, 23 nt, Artificial Sequence
  Synthetic
caaguuugugcagaaaugaaaug

SEQ ID NO: 599261 - RNA, 24 nt, Artificial Sequence
  Synthetic
acaaguuugugcagaaaugaaaug

SEQ ID NO: 599262 - RNA, 18 nt, Artificial Sequence
  Synthetic
uuggugcaguaugaaaug

SEQ ID NO: 599263 - RNA, 19 nt, Artificial Sequence
  Synthetic
auuggugcaguaugaaaug

SEQ ID NO: 599264 - RNA, 20 nt, Artificial Sequence
  Synthetic
uauuggugcaguaugaaaug

SEQ ID NO: 599265 - RNA, 21 nt, Artificial Sequence
  Synthetic
guauuggugcaguaugaaaug

SEQ ID NO: 599266 - RNA, 22 nt, Artificial Sequence
  Synthetic
uguauuggugcaguaugaaaug

SEQ ID NO: 599267 - RNA, 23 nt, Artificial Sequence
  Synthetic
auguauuggugcaguaugaaaug

SEQ ID NO: 599268 - RNA, 24 nt, Artificial Sequence
  Synthetic
aauguauuggugcaguaugaaaug

SEQ ID NO: 599269 - RNA, 18 nt, Artificial Sequence
  Synthetic
uaucuugacacugaaaug

SEQ ID NO: 599270 - RNA, 19 nt, Artificial Sequence
  Synthetic
cuaucuugacacugaaaug

SEQ ID NO: 599271 - RNA, 20 nt, Artificial Sequence
  Synthetic
acuaucuugacacugaaaug

SEQ ID NO: 599272 - RNA, 21 nt, Artificial Sequence
  Synthetic
cacuaucuugacacugaaaug

SEQ ID NO: 599273 - RNA, 22 nt, Artificial Sequence
  Synthetic
gcacuaucuugacacugaaaug

SEQ ID NO: 599274 - RNA, 23 nt, Artificial Sequence
  Synthetic
ugcacuaucuugacacugaaaug

SEQ ID NO: 599275 - RNA, 24 nt, Artificial Sequence
  Synthetic
uugcacuaucuugacacugaaaug

SEQ ID NO: 599276 - RNA, 18 nt, Artificial Sequence
  Synthetic
auuauucugacugaaaug

SEQ ID NO: 599277 - RNA, 19 nt, Artificial Sequence
  Synthetic
gauuauucugacugaaaug

SEQ ID NO: 599278 - RNA, 20 nt, Artificial Sequence
  Synthetic
agauuauucugacugaaaug

SEQ ID NO: 599279 - RNA, 21 nt, Artificial Sequence
  Synthetic
cagauuauucugacugaaaug

SEQ ID NO: 599280 - RNA, 22 nt, Artificial Sequence
  Synthetic
acagauuauucugacugaaaug

SEQ ID NO: 599281 - RNA, 23 nt, Artificial Sequence
  Synthetic
cacagauuauucugacugaaaug

SEQ ID NO: 599282 - RNA, 24 nt, Artificial Sequence
  Synthetic
acacagauuauucugacugaaaug

SEQ ID NO: 599283 - RNA, 18 nt, Artificial Sequence
  Synthetic
uaaagguuaggugaaaug

SEQ ID NO: 599284 - RNA, 19 nt, Artificial Sequence
  Synthetic
uuaaagguuaggugaaaug

SEQ ID NO: 599285 - RNA, 20 nt, Artificial Sequence
  Synthetic
guuaaagguuaggugaaaug

SEQ ID NO: 599286 - RNA, 21 nt, Artificial Sequence
  Synthetic
uguuaaagguuaggugaaaug

SEQ ID NO: 599287 - RNA, 22 nt, Artificial Sequence
  Synthetic
auguuaaagguuaggugaaaug

SEQ ID NO: 599288 - RNA, 23 nt, Artificial Sequence
  Synthetic
gauguuaaagguuaggugaaaug

SEQ ID NO: 599289 - RNA, 24 nt, Artificial Sequence
  Synthetic
ugauguuaaagguuaggugaaaug

SEQ ID NO: 599290 - RNA, 18 nt, Artificial Sequence
  Synthetic
augucucaaugugaaaug

SEQ ID NO: 599291 - RNA, 19 nt, Artificial Sequence
  Synthetic
aaugucucaaugugaaaug

SEQ ID NO: 599292 - RNA, 20 nt, Artificial Sequence
  Synthetic
uaaugucucaaugugaaaug

SEQ ID NO: 599293 - RNA, 21 nt, Artificial Sequence
  Synthetic
auaaugucucaaugugaaaug

SEQ ID NO: 599294 - RNA, 22 nt, Artificial Sequence
  Synthetic
cauaaugucucaaugugaaaug

SEQ ID NO: 599295 - RNA, 23 nt, Artificial Sequence
  Synthetic
ucauaaugucucaaugugaaaug

SEQ ID NO: 599296 - RNA, 24 nt, Artificial Sequence
  Synthetic
cucauaaugucucaaugugaaaug

SEQ ID NO: 599297 - RNA, 18 nt, Artificial Sequence
  Synthetic
auucaccaaguugaaaug

SEQ ID NO: 599298 - RNA, 19 nt, Artificial Sequence
  Synthetic
gauucaccaaguugaaaug

SEQ ID NO: 599299 - RNA, 20 nt, Artificial Sequence
  Synthetic
agauucaccaaguugaaaug

SEQ ID NO: 599300 - RNA, 21 nt, Artificial Sequence
  Synthetic
cagauucaccaaguugaaaug

SEQ ID NO: 599301 - RNA, 22 nt, Artificial Sequence
  Synthetic
ucagauucaccaaguugaaaug

SEQ ID NO: 599302 - RNA, 23 nt, Artificial Sequence
  Synthetic
gucagauucaccaaguugaaaug

SEQ ID NO: 599303 - RNA, 24 nt, Artificial Sequence
  Synthetic
ugucagauucaccaaguugaaaug

SEQ ID NO: 599304 - RNA, 18 nt, Artificial Sequence
  Synthetic
uauugagaaaaauaaaug

SEQ ID NO: 599305 - RNA, 19 nt, Artificial Sequence
  Synthetic
uuauugagaaaaauaaaug

SEQ ID NO: 599306 - RNA, 20 nt, Artificial Sequence
  Synthetic
uuuauugagaaaaauaaaug

SEQ ID NO: 599307 - RNA, 21 nt, Artificial Sequence
  Synthetic
cuuuauugagaaaaauaaaug

SEQ ID NO: 599308 - RNA, 22 nt, Artificial Sequence
  Synthetic
acuuuauugagaaaaauaaaug

SEQ ID NO: 599309 - RNA, 23 nt, Artificial Sequence
  Synthetic
cacuuuauugagaaaaauaaaug

SEQ ID NO: 599310 - RNA, 24 nt, Artificial Sequence
  Synthetic
gcacuuuauugagaaaaauaaaug

SEQ ID NO: 599311 - RNA, 18 nt, Artificial Sequence
  Synthetic
aaaauaauaaaauaaaug

SEQ ID NO: 599312 - RNA, 19 nt, Artificial Sequence
  Synthetic
aaaaauaauaaaauaaaug

SEQ ID NO: 599313 - RNA, 20 nt, Artificial Sequence
  Synthetic
aaaaaauaauaaaauaaaug

SEQ ID NO: 599314 - RNA, 21 nt, Artificial Sequence
  Synthetic
caaaaaauaauaaaauaaaug

SEQ ID NO: 599315 - RNA, 22 nt, Artificial Sequence
  Synthetic
acaaaaaauaauaaaauaaaug

SEQ ID NO: 599316 - RNA, 23 nt, Artificial Sequence
  Synthetic
gacaaaaaauaauaaaauaaaug

SEQ ID NO: 599317 - RNA, 24 nt, Artificial Sequence
  Synthetic
agacaaaaaauaauaaaauaaaug

SEQ ID NO: 599318 - RNA, 18 nt, Artificial Sequence
  Synthetic
aucacugagaaauaaaug

SEQ ID NO: 599319 - RNA, 19 nt, Artificial Sequence
  Synthetic
gaucacugagaaauaaaug

SEQ ID NO: 599320 - RNA, 20 nt, Artificial Sequence
  Synthetic
agaucacugagaaauaaaug

SEQ ID NO: 599321 - RNA, 21 nt, Artificial Sequence
  Synthetic
aagaucacugagaaauaaaug

SEQ ID NO: 599322 - RNA, 22 nt, Artificial Sequence
  Synthetic
gaagaucacugagaaauaaaug

SEQ ID NO: 599323 - RNA, 23 nt, Artificial Sequence
  Synthetic
ugaagaucacugagaaauaaaug

SEQ ID NO: 599324 - RNA, 24 nt, Artificial Sequence
  Synthetic
augaagaucacugagaaauaaaug

SEQ ID NO: 599325 - RNA, 18 nt, Artificial Sequence
  Synthetic
gcccccacuaaauaaaug

SEQ ID NO: 599326 - RNA, 19 nt, Artificial Sequence
  Synthetic
ugcccccacuaaauaaaug

SEQ ID NO: 599327 - RNA, 20 nt, Artificial Sequence
  Synthetic
uugcccccacuaaauaaaug

SEQ ID NO: 599328 - RNA, 21 nt, Artificial Sequence
  Synthetic
cuugcccccacuaaauaaaug

SEQ ID NO: 599329 - RNA, 22 nt, Artificial Sequence
  Synthetic
ucuugcccccacuaaauaaaug

SEQ ID NO: 599330 - RNA, 23 nt, Artificial Sequence
  Synthetic
uucuugcccccacuaaauaaaug

SEQ ID NO: 599331 - RNA, 24 nt, Artificial Sequence
  Synthetic
uuucuugcccccacuaaauaaaug

SEQ ID NO: 599332 - RNA, 18 nt, Artificial Sequence
  Synthetic
uaccccagugaauaaaug

SEQ ID NO: 599333 - RNA, 19 nt, Artificial Sequence
  Synthetic
cuaccccagugaauaaaug

SEQ ID NO: 599334 - RNA, 20 nt, Artificial Sequence
  Synthetic
ccuaccccagugaauaaaug

SEQ ID NO: 599335 - RNA, 21 nt, Artificial Sequence
  Synthetic
accuaccccagugaauaaaug

SEQ ID NO: 599336 - RNA, 22 nt, Artificial Sequence
  Synthetic
gaccuaccccagugaauaaaug

SEQ ID NO: 599337 - RNA, 23 nt, Artificial Sequence
  Synthetic
agaccuaccccagugaauaaaug

SEQ ID NO: 599338 - RNA, 24 nt, Artificial Sequence
  Synthetic
uagaccuaccccagugaauaaaug

SEQ ID NO: 599339 - RNA, 18 nt, Artificial Sequence
  Synthetic
uaggaagccacauaaaug

SEQ ID NO: 599340 - RNA, 19 nt, Artificial Sequence
  Synthetic
auaggaagccacauaaaug

SEQ ID NO: 599341 - RNA, 20 nt, Artificial Sequence
  Synthetic
aauaggaagccacauaaaug

SEQ ID NO: 599342 - RNA, 21 nt, Artificial Sequence
  Synthetic
aaauaggaagccacauaaaug

SEQ ID NO: 599343 - RNA, 22 nt, Artificial Sequence
  Synthetic
uaaauaggaagccacauaaaug

SEQ ID NO: 599344 - RNA, 23 nt, Artificial Sequence
  Synthetic
auaaauaggaagccacauaaaug

SEQ ID NO: 599345 - RNA, 24 nt, Artificial Sequence
  Synthetic
aauaaauaggaagccacauaaaug

SEQ ID NO: 599346 - RNA, 18 nt, Artificial Sequence
  Synthetic
uaaaaugggagauaaaug

SEQ ID NO: 599347 - RNA, 19 nt, Artificial Sequence
  Synthetic
auaaaaugggagauaaaug

SEQ ID NO: 599348 - RNA, 20 nt, Artificial Sequence
  Synthetic
uauaaaaugggagauaaaug

SEQ ID NO: 599349 - RNA, 21 nt, Artificial Sequence
  Synthetic
auauaaaaugggagauaaaug

SEQ ID NO: 599350 - RNA, 22 nt, Artificial Sequence
  Synthetic
gauauaaaaugggagauaaaug

SEQ ID NO: 599351 - RNA, 23 nt, Artificial Sequence
  Synthetic
agauauaaaaugggagauaaaug

SEQ ID NO: 599352 - RNA, 24 nt, Artificial Sequence
  Synthetic
uagauauaaaaugggagauaaaug

SEQ ID NO: 599353 - RNA, 18 nt, Artificial Sequence
  Synthetic
ggaugucaaggauaaaug

SEQ ID NO: 599354 - RNA, 19 nt, Artificial Sequence
  Synthetic
uggaugucaaggauaaaug

SEQ ID NO: 599355 - RNA, 20 nt, Artificial Sequence
  Synthetic
guggaugucaaggauaaaug

SEQ ID NO: 599356 - RNA, 21 nt, Artificial Sequence
  Synthetic
uguggaugucaaggauaaaug

SEQ ID NO: 599357 - RNA, 22 nt, Artificial Sequence
  Synthetic
guguggaugucaaggauaaaug

SEQ ID NO: 599358 - RNA, 23 nt, Artificial Sequence
  Synthetic
aguguggaugucaaggauaaaug

SEQ ID NO: 599359 - RNA, 24 nt, Artificial Sequence
  Synthetic
aaguguggaugucaaggauaaaug

SEQ ID NO: 599360 - RNA, 18 nt, Artificial Sequence
  Synthetic
ccauaagguggauaaaug

SEQ ID NO: 599361 - RNA, 19 nt, Artificial Sequence
  Synthetic
accauaagguggauaaaug

SEQ ID NO: 599362 - RNA, 20 nt, Artificial Sequence
  Synthetic
aaccauaagguggauaaaug

SEQ ID NO: 599363 - RNA, 21 nt, Artificial Sequence
  Synthetic
gaaccauaagguggauaaaug

SEQ ID NO: 599364 - RNA, 22 nt, Artificial Sequence
  Synthetic
cgaaccauaagguggauaaaug

SEQ ID NO: 599365 - RNA, 23 nt, Artificial Sequence
  Synthetic
ccgaaccauaagguggauaaaug

SEQ ID NO: 599366 - RNA, 24 nt, Artificial Sequence
  Synthetic
cccgaaccauaagguggauaaaug

SEQ ID NO: 599367 - RNA, 18 nt, Artificial Sequence
  Synthetic
ucagauaaaugauaaaug

SEQ ID NO: 599368 - RNA, 19 nt, Artificial Sequence
  Synthetic
aucagauaaaugauaaaug

SEQ ID NO: 599369 - RNA, 20 nt, Artificial Sequence
  Synthetic
gaucagauaaaugauaaaug

SEQ ID NO: 599370 - RNA, 21 nt, Artificial Sequence
  Synthetic
ugaucagauaaaugauaaaug

SEQ ID NO: 599371 - RNA, 22 nt, Artificial Sequence
  Synthetic
augaucagauaaaugauaaaug

SEQ ID NO: 599372 - RNA, 23 nt, Artificial Sequence
  Synthetic
aaugaucagauaaaugauaaaug

SEQ ID NO: 599373 - RNA, 24 nt, Artificial Sequence
  Synthetic
aaaugaucagauaaaugauaaaug

SEQ ID NO: 599374 - RNA, 18 nt, Artificial Sequence
  Synthetic
caauggcuucccuaaaug

SEQ ID NO: 599375 - RNA, 19 nt, Artificial Sequence
  Synthetic
ucaauggcuucccuaaaug

SEQ ID NO: 599376 - RNA, 20 nt, Artificial Sequence
  Synthetic
aucaauggcuucccuaaaug

SEQ ID NO: 599377 - RNA, 21 nt, Artificial Sequence
  Synthetic
caucaauggcuucccuaaaug

SEQ ID NO: 599378 - RNA, 22 nt, Artificial Sequence
  Synthetic
acaucaauggcuucccuaaaug

SEQ ID NO: 599379 - RNA, 23 nt, Artificial Sequence
  Synthetic
cacaucaauggcuucccuaaaug

SEQ ID NO: 599380 - RNA, 24 nt, Artificial Sequence
  Synthetic
gcacaucaauggcuucccuaaaug

SEQ ID NO: 599381 - RNA, 18 nt, Artificial Sequence
  Synthetic
guacaugcuuccuaaaug

SEQ ID NO: 599382 - RNA, 19 nt, Artificial Sequence
  Synthetic
aguacaugcuuccuaaaug

SEQ ID NO: 599383 - RNA, 20 nt, Artificial Sequence
  Synthetic
caguacaugcuuccuaaaug

SEQ ID NO: 599384 - RNA, 21 nt, Artificial Sequence
  Synthetic
ccaguacaugcuuccuaaaug

SEQ ID NO: 599385 - RNA, 22 nt, Artificial Sequence
  Synthetic
cccaguacaugcuuccuaaaug

SEQ ID NO: 599386 - RNA, 23 nt, Artificial Sequence
  Synthetic
ccccaguacaugcuuccuaaaug

SEQ ID NO: 599387 - RNA, 24 nt, Artificial Sequence
  Synthetic
accccaguacaugcuuccuaaaug

SEQ ID NO: 599388 - RNA, 18 nt, Artificial Sequence
  Synthetic
uaaaacuacagcuaaaug

SEQ ID NO: 599389 - RNA, 19 nt, Artificial Sequence
  Synthetic
uuaaaacuacagcuaaaug

SEQ ID NO: 599390 - RNA, 20 nt, Artificial Sequence
  Synthetic
guuaaaacuacagcuaaaug

SEQ ID NO: 599391 - RNA, 21 nt, Artificial Sequence
  Synthetic
aguuaaaacuacagcuaaaug

SEQ ID NO: 599392 - RNA, 22 nt, Artificial Sequence
  Synthetic
aaguuaaaacuacagcuaaaug

SEQ ID NO: 599393 - RNA, 23 nt, Artificial Sequence
  Synthetic
aaaguuaaaacuacagcuaaaug

SEQ ID NO: 599394 - RNA, 24 nt, Artificial Sequence
  Synthetic
aaaaguuaaaacuacagcuaaaug

SEQ ID NO: 599395 - RNA, 18 nt, Artificial Sequence
  Synthetic
auaagugggagcuaaaug

SEQ ID NO: 599396 - RNA, 19 nt, Artificial Sequence
  Synthetic
uauaagugggagcuaaaug

SEQ ID NO: 599397 - RNA, 20 nt, Artificial Sequence
  Synthetic
uuauaagugggagcuaaaug

SEQ ID NO: 599398 - RNA, 21 nt, Artificial Sequence
  Synthetic
uuuauaagugggagcuaaaug

SEQ ID NO: 599399 - RNA, 22 nt, Artificial Sequence
  Synthetic
auuuauaagugggagcuaaaug

SEQ ID NO: 599400 - RNA, 23 nt, Artificial Sequence
  Synthetic
cauuuauaagugggagcuaaaug

SEQ ID NO: 599401 - RNA, 24 nt, Artificial Sequence
  Synthetic
ucauuuauaagugggagcuaaaug

SEQ ID NO: 599402 - RNA, 18 nt, Artificial Sequence
  Synthetic
auuagugggagcuaaaug

SEQ ID NO: 599403 - RNA, 19 nt, Artificial Sequence
  Synthetic
uauuagugggagcuaaaug

SEQ ID NO: 599404 - RNA, 20 nt, Artificial Sequence
  Synthetic
uuauuagugggagcuaaaug

SEQ ID NO: 599405 - RNA, 21 nt, Artificial Sequence
  Synthetic
cuuauuagugggagcuaaaug

SEQ ID NO: 599406 - RNA, 22 nt, Artificial Sequence
  Synthetic
acuuauuagugggagcuaaaug

SEQ ID NO: 599407 - RNA, 23 nt, Artificial Sequence
  Synthetic
cacuuauuagugggagcuaaaug

SEQ ID NO: 599408 - RNA, 24 nt, Artificial Sequence
  Synthetic
ucacuuauuagugggagcuaaaug

SEQ ID NO: 599409 - RNA, 18 nt, Artificial Sequence
  Synthetic
ugagaggagcgcuaaaug

SEQ ID NO: 599410 - RNA, 19 nt, Artificial Sequence
  Synthetic
uugagaggagcgcuaaaug

SEQ ID NO: 599411 - RNA, 20 nt, Artificial Sequence
  Synthetic
auugagaggagcgcuaaaug

SEQ ID NO: 599412 - RNA, 21 nt, Artificial Sequence
  Synthetic
gauugagaggagcgcuaaaug

SEQ ID NO: 599413 - RNA, 22 nt, Artificial Sequence
  Synthetic
ugauugagaggagcgcuaaaug

SEQ ID NO: 599414 - RNA, 23 nt, Artificial Sequence
  Synthetic
augauugagaggagcgcuaaaug

SEQ ID NO: 599415 - RNA, 24 nt, Artificial Sequence
  Synthetic
gaugauugagaggagcgcuaaaug

SEQ ID NO: 599416 - RNA, 18 nt, Artificial Sequence
  Synthetic
ccuuauuucuaguaaaug

SEQ ID NO: 599417 - RNA, 19 nt, Artificial Sequence
  Synthetic
accuuauuucuaguaaaug

SEQ ID NO: 599418 - RNA, 20 nt, Artificial Sequence
  Synthetic
gaccuuauuucuaguaaaug

SEQ ID NO: 599419 - RNA, 21 nt, Artificial Sequence
  Synthetic
agaccuuauuucuaguaaaug

SEQ ID NO: 599420 - RNA, 22 nt, Artificial Sequence
  Synthetic
aagaccuuauuucuaguaaaug

SEQ ID NO: 599421 - RNA, 23 nt, Artificial Sequence
  Synthetic
gaagaccuuauuucuaguaaaug

SEQ ID NO: 599422 - RNA, 24 nt, Artificial Sequence
  Synthetic
ugaagaccuuauuucuaguaaaug

SEQ ID NO: 599423 - RNA, 18 nt, Artificial Sequence
  Synthetic
cuugcaugaggguaaaug

SEQ ID NO: 599424 - RNA, 19 nt, Artificial Sequence
  Synthetic
ccuugcaugaggguaaaug

SEQ ID NO: 599425 - RNA, 20 nt, Artificial Sequence
  Synthetic
accuugcaugaggguaaaug

SEQ ID NO: 599426 - RNA, 21 nt, Artificial Sequence
  Synthetic
uaccuugcaugaggguaaaug

SEQ ID NO: 599427 - RNA, 22 nt, Artificial Sequence
  Synthetic
guaccuugcaugaggguaaaug

SEQ ID NO: 599428 - RNA, 23 nt, Artificial Sequence
  Synthetic
uguaccuugcaugaggguaaaug

SEQ ID NO: 599429 - RNA, 24 nt, Artificial Sequence
  Synthetic
uuguaccuugcaugaggguaaaug

SEQ ID NO: 599430 - RNA, 18 nt, Artificial Sequence
  Synthetic
ucuguauagauguaaaug

SEQ ID NO: 599431 - RNA, 19 nt, Artificial Sequence
  Synthetic
gucuguauagauguaaaug

SEQ ID NO: 599432 - RNA, 20 nt, Artificial Sequence
  Synthetic
ugucuguauagauguaaaug

SEQ ID NO: 599433 - RNA, 21 nt, Artificial Sequence
  Synthetic
uugucuguauagauguaaaug

SEQ ID NO: 599434 - RNA, 22 nt, Artificial Sequence
  Synthetic
uuugucuguauagauguaaaug

SEQ ID NO: 599435 - RNA, 23 nt, Artificial Sequence
  Synthetic
uuuugucuguauagauguaaaug

SEQ ID NO: 599436 - RNA, 24 nt, Artificial Sequence
  Synthetic
uuuuugucuguauagauguaaaug

SEQ ID NO: 599437 - RNA, 18 nt, Artificial Sequence
  Synthetic
auuuuugcccuguaaaug

SEQ ID NO: 599438 - RNA, 19 nt, Artificial Sequence
  Synthetic
cauuuuugcccuguaaaug

SEQ ID NO: 599439 - RNA, 20 nt, Artificial Sequence
  Synthetic
ucauuuuugcccuguaaaug

SEQ ID NO: 599440 - RNA, 21 nt, Artificial Sequence
  Synthetic
uucauuuuugcccuguaaaug

SEQ ID NO: 599441 - RNA, 22 nt, Artificial Sequence
  Synthetic
cuucauuuuugcccuguaaaug

SEQ ID NO: 599442 - RNA, 23 nt, Artificial Sequence
  Synthetic
ucuucauuuuugcccuguaaaug

SEQ ID NO: 599443 - RNA, 24 nt, Artificial Sequence
  Synthetic
uucuucauuuuugcccuguaaaug

SEQ ID NO: 599444 - RNA, 18 nt, Artificial Sequence
  Synthetic
caggaguguuuguaaaug

SEQ ID NO: 599445 - RNA, 19 nt, Artificial Sequence
  Synthetic
ccaggaguguuuguaaaug

SEQ ID NO: 599446 - RNA, 20 nt, Artificial Sequence
  Synthetic
accaggaguguuuguaaaug

SEQ ID NO: 599447 - RNA, 21 nt, Artificial Sequence
  Synthetic
caccaggaguguuuguaaaug

SEQ ID NO: 599448 - RNA, 22 nt, Artificial Sequence
  Synthetic
ccaccaggaguguuuguaaaug

SEQ ID NO: 599449 - RNA, 23 nt, Artificial Sequence
  Synthetic
cccaccaggaguguuuguaaaug

SEQ ID NO: 599450 - RNA, 24 nt, Artificial Sequence
  Synthetic
ucccaccaggaguguuuguaaaug

SEQ ID NO: 599451 - RNA, 18 nt, Artificial Sequence
  Synthetic
auuaaauuacauuaaaug

SEQ ID NO: 599452 - RNA, 19 nt, Artificial Sequence
  Synthetic
uauuaaauuacauuaaaug

SEQ ID NO: 599453 - RNA, 20 nt, Artificial Sequence
  Synthetic
auauuaaauuacauuaaaug

SEQ ID NO: 599454 - RNA, 21 nt, Artificial Sequence
  Synthetic
gauauuaaauuacauuaaaug

SEQ ID NO: 599455 - RNA, 22 nt, Artificial Sequence
  Synthetic
ugauauuaaauuacauuaaaug

SEQ ID NO: 599456 - RNA, 23 nt, Artificial Sequence
  Synthetic
uugauauuaaauuacauuaaaug

SEQ ID NO: 599457 - RNA, 24 nt, Artificial Sequence
  Synthetic
auugauauuaaauuacauuaaaug

SEQ ID NO: 599458 - RNA, 18 nt, Artificial Sequence
  Synthetic
cuguaauuugcuuaaaug

SEQ ID NO: 599459 - RNA, 19 nt, Artificial Sequence
  Synthetic
acuguaauuugcuuaaaug

SEQ ID NO: 599460 - RNA, 20 nt, Artificial Sequence
  Synthetic
cacuguaauuugcuuaaaug

SEQ ID NO: 599461 - RNA, 21 nt, Artificial Sequence
  Synthetic
acacuguaauuugcuuaaaug

SEQ ID NO: 599462 - RNA, 22 nt, Artificial Sequence
  Synthetic
cacacuguaauuugcuuaaaug

SEQ ID NO: 599463 - RNA, 23 nt, Artificial Sequence
  Synthetic
ucacacuguaauuugcuuaaaug

SEQ ID NO: 599464 - RNA, 24 nt, Artificial Sequence
  Synthetic
uucacacuguaauuugcuuaaaug

SEQ ID NO: 599465 - RNA, 18 nt, Artificial Sequence
  Synthetic
uuucuccaaauuuaaaug

SEQ ID NO: 599466 - RNA, 19 nt, Artificial Sequence
  Synthetic
uuuucuccaaauuuaaaug

SEQ ID NO: 599467 - RNA, 20 nt, Artificial Sequence
  Synthetic
auuuucuccaaauuuaaaug

SEQ ID NO: 599468 - RNA, 21 nt, Artificial Sequence
  Synthetic
aauuuucuccaaauuuaaaug

SEQ ID NO: 599469 - RNA, 22 nt, Artificial Sequence
  Synthetic
aaauuuucuccaaauuuaaaug

SEQ ID NO: 599470 - RNA, 23 nt, Artificial Sequence
  Synthetic
caaauuuucuccaaauuuaaaug

SEQ ID NO: 599471 - RNA, 24 nt, Artificial Sequence
  Synthetic
ccaaauuuucuccaaauuuaaaug

SEQ ID NO: 599472 - RNA, 18 nt, Artificial Sequence
  Synthetic
acccaaguguuuuaaaug

SEQ ID NO: 599473 - RNA, 19 nt, Artificial Sequence
  Synthetic
cacccaaguguuuuaaaug

SEQ ID NO: 599474 - RNA, 20 nt, Artificial Sequence
  Synthetic
ccacccaaguguuuuaaaug

SEQ ID NO: 599475 - RNA, 21 nt, Artificial Sequence
  Synthetic
accacccaaguguuuuaaaug

SEQ ID NO: 599476 - RNA, 22 nt, Artificial Sequence
  Synthetic
aaccacccaaguguuuuaaaug

SEQ ID NO: 599477 - RNA, 23 nt, Artificial Sequence
  Synthetic
gaaccacccaaguguuuuaaaug

SEQ ID NO: 599478 - RNA, 24 nt, Artificial Sequence
  Synthetic
ugaaccacccaaguguuuuaaaug

SEQ ID NO: 599479 - RNA, 18 nt, Artificial Sequence
  Synthetic
ggucauacugaaacaaug

SEQ ID NO: 599480 - RNA, 19 nt, Artificial Sequence
  Synthetic
aggucauacugaaacaaug

SEQ ID NO: 599481 - RNA, 20 nt, Artificial Sequence
  Synthetic
caggucauacugaaacaaug

SEQ ID NO: 599482 - RNA, 21 nt, Artificial Sequence
  Synthetic
acaggucauacugaaacaaug

SEQ ID NO: 599483 - RNA, 22 nt, Artificial Sequence
  Synthetic
aacaggucauacugaaacaaug

SEQ ID NO: 599484 - RNA, 23 nt, Artificial Sequence
  Synthetic
uaacaggucauacugaaacaaug

SEQ ID NO: 599485 - RNA, 24 nt, Artificial Sequence
  Synthetic
guaacaggucauacugaaacaaug

SEQ ID NO: 599486 - RNA, 18 nt, Artificial Sequence
  Synthetic
aagacgcuguaaacaaug

SEQ ID NO: 599487 - RNA, 19 nt, Artificial Sequence
  Synthetic
gaagacgcuguaaacaaug

SEQ ID NO: 599488 - RNA, 20 nt, Artificial Sequence
  Synthetic
ugaagacgcuguaaacaaug

SEQ ID NO: 599489 - RNA, 21 nt, Artificial Sequence
  Synthetic
gugaagacgcuguaaacaaug

SEQ ID NO: 599490 - RNA, 22 nt, Artificial Sequence
  Synthetic
ggugaagacgcuguaaacaaug

SEQ ID NO: 599491 - RNA, 23 nt, Artificial Sequence
  Synthetic
uggugaagacgcuguaaacaaug

SEQ ID NO: 599492 - RNA, 24 nt, Artificial Sequence
  Synthetic
cuggugaagacgcuguaaacaaug

SEQ ID NO: 599493 - RNA, 18 nt, Artificial Sequence
  Synthetic
aaauuuuaaucaacaaug

SEQ ID NO: 599494 - RNA, 19 nt, Artificial Sequence
  Synthetic
caaauuuuaaucaacaaug

SEQ ID NO: 599495 - RNA, 20 nt, Artificial Sequence
  Synthetic
ucaaauuuuaaucaacaaug

SEQ ID NO: 599496 - RNA, 21 nt, Artificial Sequence
  Synthetic
gucaaauuuuaaucaacaaug

SEQ ID NO: 599497 - RNA, 22 nt, Artificial Sequence
  Synthetic
agucaaauuuuaaucaacaaug

SEQ ID NO: 599498 - RNA, 23 nt, Artificial Sequence
  Synthetic
aagucaaauuuuaaucaacaaug

SEQ ID NO: 599499 - RNA, 24 nt, Artificial Sequence
  Synthetic
gaagucaaauuuuaaucaacaaug

SEQ ID NO: 599500 - RNA, 18 nt, Artificial Sequence
  Synthetic
uaugagaacugaacaaug

SEQ ID NO: 599501 - RNA, 19 nt, Artificial Sequence
  Synthetic
cuaugagaacugaacaaug

SEQ ID NO: 599502 - RNA, 20 nt, Artificial Sequence
  Synthetic
gcuaugagaacugaacaaug

SEQ ID NO: 599503 - RNA, 21 nt, Artificial Sequence
  Synthetic
ugcuaugagaacugaacaaug

SEQ ID NO: 599504 - RNA, 22 nt, Artificial Sequence
  Synthetic
cugcuaugagaacugaacaaug

SEQ ID NO: 599505 - RNA, 23 nt, Artificial Sequence
  Synthetic
acugcuaugagaacugaacaaug

SEQ ID NO: 599506 - RNA, 24 nt, Artificial Sequence
  Synthetic
uacugcuaugagaacugaacaaug

SEQ ID NO: 599507 - RNA, 18 nt, Artificial Sequence
  Synthetic
agcugaaauguaacaaug

SEQ ID NO: 599508 - RNA, 19 nt, Artificial Sequence
  Synthetic
aagcugaaauguaacaaug

SEQ ID NO: 599509 - RNA, 20 nt, Artificial Sequence
  Synthetic
uaagcugaaauguaacaaug

SEQ ID NO: 599510 - RNA, 21 nt, Artificial Sequence
  Synthetic
uuaagcugaaauguaacaaug

SEQ ID NO: 599511 - RNA, 22 nt, Artificial Sequence
  Synthetic
auuaagcugaaauguaacaaug

SEQ ID NO: 599512 - RNA, 23 nt, Artificial Sequence
  Synthetic
aauuaagcugaaauguaacaaug

SEQ ID NO: 599513 - RNA, 24 nt, Artificial Sequence
  Synthetic
gaauuaagcugaaauguaacaaug

SEQ ID NO: 599514 - RNA, 18 nt, Artificial Sequence
  Synthetic
guuuucuacagcacaaug

SEQ ID NO: 599515 - RNA, 19 nt, Artificial Sequence
  Synthetic
uguuuucuacagcacaaug

SEQ ID NO: 599516 - RNA, 20 nt, Artificial Sequence
  Synthetic
uuguuuucuacagcacaaug

SEQ ID NO: 599517 - RNA, 21 nt, Artificial Sequence
  Synthetic
auuguuuucuacagcacaaug

SEQ ID NO: 599518 - RNA, 22 nt, Artificial Sequence
  Synthetic
gauuguuuucuacagcacaaug

SEQ ID NO: 599519 - RNA, 23 nt, Artificial Sequence
  Synthetic
agauuguuuucuacagcacaaug

SEQ ID NO: 599520 - RNA, 24 nt, Artificial Sequence
  Synthetic
gagauuguuuucuacagcacaaug

SEQ ID NO: 599521 - RNA, 18 nt, Artificial Sequence
  Synthetic
uuaauaggcaagacaaug

SEQ ID NO: 599522 - RNA, 19 nt, Artificial Sequence
  Synthetic
guuaauaggcaagacaaug

SEQ ID NO: 599523 - RNA, 20 nt, Artificial Sequence
  Synthetic
uguuaauaggcaagacaaug

SEQ ID NO: 599524 - RNA, 21 nt, Artificial Sequence
  Synthetic
auguuaauaggcaagacaaug

SEQ ID NO: 599525 - RNA, 22 nt, Artificial Sequence
  Synthetic
aauguuaauaggcaagacaaug

SEQ ID NO: 599526 - RNA, 23 nt, Artificial Sequence
  Synthetic
caauguuaauaggcaagacaaug

SEQ ID NO: 599527 - RNA, 24 nt, Artificial Sequence
  Synthetic
ccaauguuaauaggcaagacaaug

SEQ ID NO: 599528 - RNA, 18 nt, Artificial Sequence
  Synthetic
acuugugcuaagacaaug

SEQ ID NO: 599529 - RNA, 19 nt, Artificial Sequence
  Synthetic
uacuugugcuaagacaaug

SEQ ID NO: 599530 - RNA, 20 nt, Artificial Sequence
  Synthetic
uuacuugugcuaagacaaug

SEQ ID NO: 599531 - RNA, 21 nt, Artificial Sequence
  Synthetic
guuacuugugcuaagacaaug

SEQ ID NO: 599532 - RNA, 22 nt, Artificial Sequence
  Synthetic
aguuacuugugcuaagacaaug

SEQ ID NO: 599533 - RNA, 23 nt, Artificial Sequence
  Synthetic
caguuacuugugcuaagacaaug

SEQ ID NO: 599534 - RNA, 24 nt, Artificial Sequence
  Synthetic
ccaguuacuugugcuaagacaaug

SEQ ID NO: 599535 - RNA, 18 nt, Artificial Sequence
  Synthetic
gaaaauguucagacaaug

SEQ ID NO: 599536 - RNA, 19 nt, Artificial Sequence
  Synthetic
ggaaaauguucagacaaug

SEQ ID NO: 599537 - RNA, 20 nt, Artificial Sequence
  Synthetic
uggaaaauguucagacaaug

SEQ ID NO: 599538 - RNA, 21 nt, Artificial Sequence
  Synthetic
auggaaaauguucagacaaug

SEQ ID NO: 599539 - RNA, 22 nt, Artificial Sequence
  Synthetic
aauggaaaauguucagacaaug

SEQ ID NO: 599540 - RNA, 23 nt, Artificial Sequence
  Synthetic
uaauggaaaauguucagacaaug

SEQ ID NO: 599541 - RNA, 24 nt, Artificial Sequence
  Synthetic
auaauggaaaauguucagacaaug

SEQ ID NO: 599542 - RNA, 18 nt, Artificial Sequence
  Synthetic
uagcuuuaugagacaaug

SEQ ID NO: 599543 - RNA, 19 nt, Artificial Sequence
  Synthetic
auagcuuuaugagacaaug

SEQ ID NO: 599544 - RNA, 20 nt, Artificial Sequence
  Synthetic
uauagcuuuaugagacaaug

SEQ ID NO: 599545 - RNA, 21 nt, Artificial Sequence
  Synthetic
auauagcuuuaugagacaaug

SEQ ID NO: 599546 - RNA, 22 nt, Artificial Sequence
  Synthetic
aauauagcuuuaugagacaaug

SEQ ID NO: 599547 - RNA, 23 nt, Artificial Sequence
  Synthetic
gaauauagcuuuaugagacaaug

SEQ ID NO: 599548 - RNA, 24 nt, Artificial Sequence
  Synthetic
ugaauauagcuuuaugagacaaug

SEQ ID NO: 599549 - RNA, 18 nt, Artificial Sequence
  Synthetic
augaacuuauauacaaug

SEQ ID NO: 599550 - RNA, 19 nt, Artificial Sequence
  Synthetic
aaugaacuuauauacaaug

SEQ ID NO: 599551 - RNA, 20 nt, Artificial Sequence
  Synthetic
aaaugaacuuauauacaaug

SEQ ID NO: 599552 - RNA, 21 nt, Artificial Sequence
  Synthetic
gaaaugaacuuauauacaaug

SEQ ID NO: 599553 - RNA, 22 nt, Artificial Sequence
  Synthetic
agaaaugaacuuauauacaaug

SEQ ID NO: 599554 - RNA, 23 nt, Artificial Sequence
  Synthetic
cagaaaugaacuuauauacaaug

SEQ ID NO: 599555 - RNA, 24 nt, Artificial Sequence
  Synthetic
ucagaaaugaacuuauauacaaug

SEQ ID NO: 599556 - RNA, 18 nt, Artificial Sequence
  Synthetic
uugacugccacuacaaug

SEQ ID NO: 599557 - RNA, 19 nt, Artificial Sequence
  Synthetic
guugacugccacuacaaug

SEQ ID NO: 599558 - RNA, 20 nt, Artificial Sequence
  Synthetic
uguugacugccacuacaaug

SEQ ID NO: 599559 - RNA, 21 nt, Artificial Sequence
  Synthetic
guguugacugccacuacaaug

SEQ ID NO: 599560 - RNA, 22 nt, Artificial Sequence
  Synthetic
gguguugacugccacuacaaug

SEQ ID NO: 599561 - RNA, 23 nt, Artificial Sequence
  Synthetic
agguguugacugccacuacaaug

SEQ ID NO: 599562 - RNA, 24 nt, Artificial Sequence
  Synthetic
gagguguugacugccacuacaaug

SEQ ID NO: 599563 - RNA, 18 nt, Artificial Sequence
  Synthetic
aaaucacugacuacaaug

SEQ ID NO: 599564 - RNA, 19 nt, Artificial Sequence
  Synthetic
caaaucacugacuacaaug

SEQ ID NO: 599565 - RNA, 20 nt, Artificial Sequence
  Synthetic
ccaaaucacugacuacaaug

SEQ ID NO: 599566 - RNA, 21 nt, Artificial Sequence
  Synthetic
accaaaucacugacuacaaug

SEQ ID NO: 599567 - RNA, 22 nt, Artificial Sequence
  Synthetic
gaccaaaucacugacuacaaug

SEQ ID NO: 599568 - RNA, 23 nt, Artificial Sequence
  Synthetic
ugaccaaaucacugacuacaaug

SEQ ID NO: 599569 - RNA, 24 nt, Artificial Sequence
  Synthetic
uugaccaaaucacugacuacaaug

SEQ ID NO: 599570 - RNA, 18 nt, Artificial Sequence
  Synthetic
uaugaaaagucuacaaug

SEQ ID NO: 599571 - RNA, 19 nt, Artificial Sequence
  Synthetic
auaugaaaagucuacaaug

SEQ ID NO: 599572 - RNA, 20 nt, Artificial Sequence
  Synthetic
cauaugaaaagucuacaaug

SEQ ID NO: 599573 - RNA, 21 nt, Artificial Sequence
  Synthetic
acauaugaaaagucuacaaug

SEQ ID NO: 599574 - RNA, 22 nt, Artificial Sequence
  Synthetic
cacauaugaaaagucuacaaug

SEQ ID NO: 599575 - RNA, 23 nt, Artificial Sequence
  Synthetic
ccacauaugaaaagucuacaaug

SEQ ID NO: 599576 - RNA, 24 nt, Artificial Sequence
  Synthetic
accacauaugaaaagucuacaaug

SEQ ID NO: 599577 - RNA, 18 nt, Artificial Sequence
  Synthetic
ccuaaauggaaaccaaug

SEQ ID NO: 599578 - RNA, 19 nt, Artificial Sequence
  Synthetic
uccuaaauggaaaccaaug

SEQ ID NO: 599579 - RNA, 20 nt, Artificial Sequence
  Synthetic
auccuaaauggaaaccaaug

SEQ ID NO: 599580 - RNA, 21 nt, Artificial Sequence
  Synthetic
aauccuaaauggaaaccaaug

SEQ ID NO: 599581 - RNA, 22 nt, Artificial Sequence
  Synthetic
caauccuaaauggaaaccaaug

SEQ ID NO: 599582 - RNA, 23 nt, Artificial Sequence
  Synthetic
acaauccuaaauggaaaccaaug

SEQ ID NO: 599583 - RNA, 24 nt, Artificial Sequence
  Synthetic
aacaauccuaaauggaaaccaaug

SEQ ID NO: 599584 - RNA, 18 nt, Artificial Sequence
  Synthetic
aggugagccaacccaaug

SEQ ID NO: 599585 - RNA, 19 nt, Artificial Sequence
  Synthetic
uaggugagccaacccaaug

SEQ ID NO: 599586 - RNA, 20 nt, Artificial Sequence
  Synthetic
cuaggugagccaacccaaug

SEQ ID NO: 599587 - RNA, 21 nt, Artificial Sequence
  Synthetic
ucuaggugagccaacccaaug

SEQ ID NO: 599588 - RNA, 22 nt, Artificial Sequence
  Synthetic
aucuaggugagccaacccaaug

SEQ ID NO: 599589 - RNA, 23 nt, Artificial Sequence
  Synthetic
aaucuaggugagccaacccaaug

SEQ ID NO: 599590 - RNA, 24 nt, Artificial Sequence
  Synthetic
caaucuaggugagccaacccaaug

SEQ ID NO: 599591 - RNA, 18 nt, Artificial Sequence
  Synthetic
aaauuguaauccccaaug

SEQ ID NO: 599592 - RNA, 19 nt, Artificial Sequence
  Synthetic
uaaauuguaauccccaaug

SEQ ID NO: 599593 - RNA, 20 nt, Artificial Sequence
  Synthetic
uuaaauuguaauccccaaug

SEQ ID NO: 599594 - RNA, 21 nt, Artificial Sequence
  Synthetic
auuaaauuguaauccccaaug

SEQ ID NO: 599595 - RNA, 22 nt, Artificial Sequence
  Synthetic
uauuaaauuguaauccccaaug

SEQ ID NO: 599596 - RNA, 23 nt, Artificial Sequence
  Synthetic
auauuaaauuguaauccccaaug

SEQ ID NO: 599597 - RNA, 24 nt, Artificial Sequence
  Synthetic
cauauuaaauuguaauccccaaug

SEQ ID NO: 599598 - RNA, 18 nt, Artificial Sequence
  Synthetic
caguggcaaaagccaaug

SEQ ID NO: 599599 - RNA, 19 nt, Artificial Sequence
  Synthetic
ucaguggcaaaagccaaug

SEQ ID NO: 599600 - RNA, 20 nt, Artificial Sequence
  Synthetic
uucaguggcaaaagccaaug

SEQ ID NO: 599601 - RNA, 21 nt, Artificial Sequence
  Synthetic
cuucaguggcaaaagccaaug

SEQ ID NO: 599602 - RNA, 22 nt, Artificial Sequence
  Synthetic
ucuucaguggcaaaagccaaug

SEQ ID NO: 599603 - RNA, 23 nt, Artificial Sequence
  Synthetic
gucuucaguggcaaaagccaaug

SEQ ID NO: 599604 - RNA, 24 nt, Artificial Sequence
  Synthetic
ugucuucaguggcaaaagccaaug

SEQ ID NO: 599605 - RNA, 18 nt, Artificial Sequence
  Synthetic
gcuaucugcaagccaaug

SEQ ID NO: 599606 - RNA, 19 nt, Artificial Sequence
  Synthetic
ggcuaucugcaagccaaug

SEQ ID NO: 599607 - RNA, 20 nt, Artificial Sequence
  Synthetic
cggcuaucugcaagccaaug

SEQ ID NO: 599608 - RNA, 21 nt, Artificial Sequence
  Synthetic
gcggcuaucugcaagccaaug

SEQ ID NO: 599609 - RNA, 22 nt, Artificial Sequence
  Synthetic
ggcggcuaucugcaagccaaug

SEQ ID NO: 599610 - RNA, 23 nt, Artificial Sequence
  Synthetic
aggcggcuaucugcaagccaaug

SEQ ID NO: 599611 - RNA, 24 nt, Artificial Sequence
  Synthetic
aaggcggcuaucugcaagccaaug

SEQ ID NO: 599612 - RNA, 18 nt, Artificial Sequence
  Synthetic
acccaaccccagccaaug

SEQ ID NO: 599613 - RNA, 19 nt, Artificial Sequence
  Synthetic
gacccaaccccagccaaug

SEQ ID NO: 599614 - RNA, 20 nt, Artificial Sequence
  Synthetic
cgacccaaccccagccaaug

SEQ ID NO: 599615 - RNA, 21 nt, Artificial Sequence
  Synthetic
acgacccaaccccagccaaug

SEQ ID NO: 599616 - RNA, 22 nt, Artificial Sequence
  Synthetic
uacgacccaaccccagccaaug

SEQ ID NO: 599617 - RNA, 23 nt, Artificial Sequence
  Synthetic
guacgacccaaccccagccaaug

SEQ ID NO: 599618 - RNA, 24 nt, Artificial Sequence
  Synthetic
uguacgacccaaccccagccaaug

SEQ ID NO: 599619 - RNA, 18 nt, Artificial Sequence
  Synthetic
auuauggaaauuccaaug

SEQ ID NO: 599620 - RNA, 19 nt, Artificial Sequence
  Synthetic
aauuauggaaauuccaaug

SEQ ID NO: 599621 - RNA, 20 nt, Artificial Sequence
  Synthetic
aaauuauggaaauuccaaug

SEQ ID NO: 599622 - RNA, 21 nt, Artificial Sequence
  Synthetic
gaaauuauggaaauuccaaug

SEQ ID NO: 599623 - RNA, 22 nt, Artificial Sequence
  Synthetic
ggaaauuauggaaauuccaaug

SEQ ID NO: 599624 - RNA, 23 nt, Artificial Sequence
  Synthetic
aggaaauuauggaaauuccaaug

SEQ ID NO: 599625 - RNA, 24 nt, Artificial Sequence
  Synthetic
aaggaaauuauggaaauuccaaug

SEQ ID NO: 599626 - RNA, 18 nt, Artificial Sequence
  Synthetic
uaacaccacuuuccaaug

SEQ ID NO: 599627 - RNA, 19 nt, Artificial Sequence
  Synthetic
cuaacaccacuuuccaaug

SEQ ID NO: 599628 - RNA, 20 nt, Artificial Sequence
  Synthetic
acuaacaccacuuuccaaug

SEQ ID NO: 599629 - RNA, 21 nt, Artificial Sequence
  Synthetic
cacuaacaccacuuuccaaug

SEQ ID NO: 599630 - RNA, 22 nt, Artificial Sequence
  Synthetic
ucacuaacaccacuuuccaaug

SEQ ID NO: 599631 - RNA, 23 nt, Artificial Sequence
  Synthetic
aucacuaacaccacuuuccaaug

SEQ ID NO: 599632 - RNA, 24 nt, Artificial Sequence
  Synthetic
aaucacuaacaccacuuuccaaug

SEQ ID NO: 599633 - RNA, 24 nt, Artificial Sequence
  Synthetic
caaaccugacaaaaacaagcaaug

SEQ ID NO: 599634 - RNA, 18 nt, Artificial Sequence
  Synthetic
cuucaugagcaagcaaug

SEQ ID NO: 599635 - RNA, 19 nt, Artificial Sequence
  Synthetic
ucuucaugagcaagcaaug

SEQ ID NO: 599636 - RNA, 20 nt, Artificial Sequence
  Synthetic
gucuucaugagcaagcaaug

SEQ ID NO: 599637 - RNA, 21 nt, Artificial Sequence
  Synthetic
ugucuucaugagcaagcaaug

SEQ ID NO: 599638 - RNA, 22 nt, Artificial Sequence
  Synthetic
augucuucaugagcaagcaaug

SEQ ID NO: 599639 - RNA, 23 nt, Artificial Sequence
  Synthetic
caugucuucaugagcaagcaaug

SEQ ID NO: 599640 - RNA, 24 nt, Artificial Sequence
  Synthetic
ucaugucuucaugagcaagcaaug

SEQ ID NO: 599641 - RNA, 18 nt, Artificial Sequence
  Synthetic
caaucaaguuaagcaaug

SEQ ID NO: 599642 - RNA, 19 nt, Artificial Sequence
  Synthetic
ucaaucaaguuaagcaaug

SEQ ID NO: 599643 - RNA, 20 nt, Artificial Sequence
  Synthetic
gucaaucaaguuaagcaaug

SEQ ID NO: 599644 - RNA, 21 nt, Artificial Sequence
  Synthetic
ugucaaucaaguuaagcaaug

SEQ ID NO: 599645 - RNA, 22 nt, Artificial Sequence
  Synthetic
uugucaaucaaguuaagcaaug

SEQ ID NO: 599646 - RNA, 23 nt, Artificial Sequence
  Synthetic
auugucaaucaaguuaagcaaug

SEQ ID NO: 599647 - RNA, 24 nt, Artificial Sequence
  Synthetic
cauugucaaucaaguuaagcaaug

SEQ ID NO: 599648 - RNA, 18 nt, Artificial Sequence
  Synthetic
uccauacuggcagcaaug

SEQ ID NO: 599649 - RNA, 19 nt, Artificial Sequence
  Synthetic
cuccauacuggcagcaaug

SEQ ID NO: 599650 - RNA, 20 nt, Artificial Sequence
  Synthetic
ucuccauacuggcagcaaug

SEQ ID NO: 599651 - RNA, 21 nt, Artificial Sequence
  Synthetic
cucuccauacuggcagcaaug

SEQ ID NO: 599652 - RNA, 22 nt, Artificial Sequence
  Synthetic
acucuccauacuggcagcaaug

SEQ ID NO: 599653 - RNA, 23 nt, Artificial Sequence
  Synthetic
gacucuccauacuggcagcaaug

SEQ ID NO: 599654 - RNA, 24 nt, Artificial Sequence
  Synthetic
agacucuccauacuggcagcaaug

SEQ ID NO: 599655 - RNA, 18 nt, Artificial Sequence
  Synthetic
uguguucuaucagcaaug

SEQ ID NO: 599656 - RNA, 19 nt, Artificial Sequence
  Synthetic
cuguguucuaucagcaaug

SEQ ID NO: 599657 - RNA, 20 nt, Artificial Sequence
  Synthetic
ccuguguucuaucagcaaug

SEQ ID NO: 599658 - RNA, 21 nt, Artificial Sequence
  Synthetic
accuguguucuaucagcaaug

SEQ ID NO: 599659 - RNA, 22 nt, Artificial Sequence
  Synthetic
uaccuguguucuaucagcaaug

SEQ ID NO: 599660 - RNA, 23 nt, Artificial Sequence
  Synthetic
cuaccuguguucuaucagcaaug

SEQ ID NO: 599661 - RNA, 24 nt, Artificial Sequence
  Synthetic
acuaccuguguucuaucagcaaug

SEQ ID NO: 599662 - RNA, 18 nt, Artificial Sequence
  Synthetic
acaggggagaaggcaaug

SEQ ID NO: 599663 - RNA, 19 nt, Artificial Sequence
  Synthetic
uacaggggagaaggcaaug

SEQ ID NO: 599664 - RNA, 20 nt, Artificial Sequence
  Synthetic
cuacaggggagaaggcaaug

SEQ ID NO: 599665 - RNA, 21 nt, Artificial Sequence
  Synthetic
ucuacaggggagaaggcaaug

SEQ ID NO: 599666 - RNA, 22 nt, Artificial Sequence
  Synthetic
gucuacaggggagaaggcaaug

SEQ ID NO: 599667 - RNA, 23 nt, Artificial Sequence
  Synthetic
agucuacaggggagaaggcaaug

SEQ ID NO: 599668 - RNA, 24 nt, Artificial Sequence
  Synthetic
gagucuacaggggagaaggcaaug

SEQ ID NO: 599669 - RNA, 18 nt, Artificial Sequence
  Synthetic
aacagaugacuggcaaug

SEQ ID NO: 599670 - RNA, 19 nt, Artificial Sequence
  Synthetic
gaacagaugacuggcaaug

SEQ ID NO: 599671 - RNA, 20 nt, Artificial Sequence
  Synthetic
agaacagaugacuggcaaug

SEQ ID NO: 599672 - RNA, 21 nt, Artificial Sequence
  Synthetic
gagaacagaugacuggcaaug

SEQ ID NO: 599673 - RNA, 22 nt, Artificial Sequence
  Synthetic
ggagaacagaugacuggcaaug

SEQ ID NO: 599674 - RNA, 23 nt, Artificial Sequence
  Synthetic
aggagaacagaugacuggcaaug

SEQ ID NO: 599675 - RNA, 24 nt, Artificial Sequence
  Synthetic
aaggagaacagaugacuggcaaug

SEQ ID NO: 599676 - RNA, 18 nt, Artificial Sequence
  Synthetic
gagcagagccaugcaaug

SEQ ID NO: 599677 - RNA, 19 nt, Artificial Sequence
  Synthetic
ggagcagagccaugcaaug

SEQ ID NO: 599678 - RNA, 20 nt, Artificial Sequence
  Synthetic
gggagcagagccaugcaaug

SEQ ID NO: 599679 - RNA, 21 nt, Artificial Sequence
  Synthetic
ggggagcagagccaugcaaug

SEQ ID NO: 599680 - RNA, 22 nt, Artificial Sequence
  Synthetic
uggggagcagagccaugcaaug

SEQ ID NO: 599681 - RNA, 23 nt, Artificial Sequence
  Synthetic
cuggggagcagagccaugcaaug

SEQ ID NO: 599682 - RNA, 24 nt, Artificial Sequence
  Synthetic
acuggggagcagagccaugcaaug

SEQ ID NO: 599683 - RNA, 18 nt, Artificial Sequence
  Synthetic
uaaacuuugucugcaaug

SEQ ID NO: 599684 - RNA, 19 nt, Artificial Sequence
  Synthetic
guaaacuuugucugcaaug

SEQ ID NO: 599685 - RNA, 20 nt, Artificial Sequence
  Synthetic
gguaaacuuugucugcaaug

SEQ ID NO: 599686 - RNA, 21 nt, Artificial Sequence
  Synthetic
agguaaacuuugucugcaaug

SEQ ID NO: 599687 - RNA, 22 nt, Artificial Sequence
  Synthetic
cagguaaacuuugucugcaaug

SEQ ID NO: 599688 - RNA, 23 nt, Artificial Sequence
  Synthetic
ucagguaaacuuugucugcaaug

SEQ ID NO: 599689 - RNA, 24 nt, Artificial Sequence
  Synthetic
uucagguaaacuuugucugcaaug

SEQ ID NO: 599690 - RNA, 18 nt, Artificial Sequence
  Synthetic
caguucuugggugcaaug

SEQ ID NO: 599691 - RNA, 19 nt, Artificial Sequence
  Synthetic
acaguucuugggugcaaug

SEQ ID NO: 599692 - RNA, 20 nt, Artificial Sequence
  Synthetic
gacaguucuugggugcaaug

SEQ ID NO: 599693 - RNA, 21 nt, Artificial Sequence
  Synthetic
ggacaguucuugggugcaaug

SEQ ID NO: 599694 - RNA, 22 nt, Artificial Sequence
  Synthetic
aggacaguucuugggugcaaug

SEQ ID NO: 599695 - RNA, 23 nt, Artificial Sequence
  Synthetic
aaggacaguucuugggugcaaug

SEQ ID NO: 599696 - RNA, 24 nt, Artificial Sequence
  Synthetic
aaaggacaguucuugggugcaaug

SEQ ID NO: 599697 - RNA, 18 nt, Artificial Sequence
  Synthetic
aagaccugauuaucaaug

SEQ ID NO: 599698 - RNA, 19 nt, Artificial Sequence
  Synthetic
uaagaccugauuaucaaug

SEQ ID NO: 599699 - RNA, 20 nt, Artificial Sequence
  Synthetic
uuaagaccugauuaucaaug

SEQ ID NO: 599700 - RNA, 21 nt, Artificial Sequence
  Synthetic
uuuaagaccugauuaucaaug

SEQ ID NO: 599701 - RNA, 22 nt, Artificial Sequence
  Synthetic
uuuuaagaccugauuaucaaug

SEQ ID NO: 599702 - RNA, 23 nt, Artificial Sequence
  Synthetic
uuuuuaagaccugauuaucaaug

SEQ ID NO: 599703 - RNA, 24 nt, Artificial Sequence
  Synthetic
cuuuuuaagaccugauuaucaaug

SEQ ID NO: 599704 - RNA, 18 nt, Artificial Sequence
  Synthetic
cugauaguauacucaaug

SEQ ID NO: 599705 - RNA, 19 nt, Artificial Sequence
  Synthetic
ccugauaguauacucaaug

SEQ ID NO: 599706 - RNA, 20 nt, Artificial Sequence
  Synthetic
gccugauaguauacucaaug

SEQ ID NO: 599707 - RNA, 21 nt, Artificial Sequence
  Synthetic
ugccugauaguauacucaaug

SEQ ID NO: 599708 - RNA, 22 nt, Artificial Sequence
  Synthetic
augccugauaguauacucaaug

SEQ ID NO: 599709 - RNA, 23 nt, Artificial Sequence
  Synthetic
caugccugauaguauacucaaug

SEQ ID NO: 599710 - RNA, 24 nt, Artificial Sequence
  Synthetic
acaugccugauaguauacucaaug

SEQ ID NO: 599711 - RNA, 18 nt, Artificial Sequence
  Synthetic
guauuguuuuccucaaug

SEQ ID NO: 599712 - RNA, 19 nt, Artificial Sequence
  Synthetic
aguauuguuuuccucaaug

SEQ ID NO: 599713 - RNA, 20 nt, Artificial Sequence
  Synthetic
uaguauuguuuuccucaaug

SEQ ID NO: 599714 - RNA, 21 nt, Artificial Sequence
  Synthetic
guaguauuguuuuccucaaug

SEQ ID NO: 599715 - RNA, 22 nt, Artificial Sequence
  Synthetic
aguaguauuguuuuccucaaug

SEQ ID NO: 599716 - RNA, 23 nt, Artificial Sequence
  Synthetic
aaguaguauuguuuuccucaaug

SEQ ID NO: 599717 - RNA, 24 nt, Artificial Sequence
  Synthetic
caaguaguauuguuuuccucaaug

SEQ ID NO: 599718 - RNA, 18 nt, Artificial Sequence
  Synthetic
cuuuacgcauucucaaug

SEQ ID NO: 599719 - RNA, 19 nt, Artificial Sequence
  Synthetic
ucuuuacgcauucucaaug

SEQ ID NO: 599720 - RNA, 20 nt, Artificial Sequence
  Synthetic
uucuuuacgcauucucaaug

SEQ ID NO: 599721 - RNA, 21 nt, Artificial Sequence
  Synthetic
uuucuuuacgcauucucaaug

SEQ ID NO: 599722 - RNA, 22 nt, Artificial Sequence
  Synthetic
guuucuuuacgcauucucaaug

SEQ ID NO: 599723 - RNA, 23 nt, Artificial Sequence
  Synthetic
gguuucuuuacgcauucucaaug

SEQ ID NO: 599724 - RNA, 24 nt, Artificial Sequence
  Synthetic
ggguuucuuuacgcauucucaaug

SEQ ID NO: 599725 - RNA, 18 nt, Artificial Sequence
  Synthetic
ucuuggagagagucaaug

SEQ ID NO: 599726 - RNA, 19 nt, Artificial Sequence
  Synthetic
aucuuggagagagucaaug

SEQ ID NO: 599727 - RNA, 20 nt, Artificial Sequence
  Synthetic
gaucuuggagagagucaaug

SEQ ID NO: 599728 - RNA, 21 nt, Artificial Sequence
  Synthetic
ugaucuuggagagagucaaug

SEQ ID NO: 599729 - RNA, 22 nt, Artificial Sequence
  Synthetic
gugaucuuggagagagucaaug

SEQ ID NO: 599730 - RNA, 23 nt, Artificial Sequence
  Synthetic
ggugaucuuggagagagucaaug

SEQ ID NO: 599731 - RNA, 24 nt, Artificial Sequence
  Synthetic
aggugaucuuggagagagucaaug

SEQ ID NO: 599732 - RNA, 18 nt, Artificial Sequence
  Synthetic
agugugugauagucaaug

SEQ ID NO: 599733 - RNA, 19 nt, Artificial Sequence
  Synthetic
cagugugugauagucaaug

SEQ ID NO: 599734 - RNA, 20 nt, Artificial Sequence
  Synthetic
acagugugugauagucaaug

SEQ ID NO: 599735 - RNA, 21 nt, Artificial Sequence
  Synthetic
aacagugugugauagucaaug

SEQ ID NO: 599736 - RNA, 22 nt, Artificial Sequence
  Synthetic
caacagugugugauagucaaug

SEQ ID NO: 599737 - RNA, 23 nt, Artificial Sequence
  Synthetic
gcaacagugugugauagucaaug

SEQ ID NO: 599738 - RNA, 24 nt, Artificial Sequence
  Synthetic
ugcaacagugugugauagucaaug

SEQ ID NO: 599739 - RNA, 18 nt, Artificial Sequence
  Synthetic
cuaggagggaggucaaug

SEQ ID NO: 599740 - RNA, 19 nt, Artificial Sequence
  Synthetic
acuaggagggaggucaaug

SEQ ID NO: 599741 - RNA, 20 nt, Artificial Sequence
  Synthetic
aacuaggagggaggucaaug

SEQ ID NO: 599742 - RNA, 21 nt, Artificial Sequence
  Synthetic
aaacuaggagggaggucaaug

SEQ ID NO: 599743 - RNA, 22 nt, Artificial Sequence
  Synthetic
aaaacuaggagggaggucaaug

SEQ ID NO: 599744 - RNA, 23 nt, Artificial Sequence
  Synthetic
caaaacuaggagggaggucaaug

SEQ ID NO: 599745 - RNA, 24 nt, Artificial Sequence
  Synthetic
acaaaacuaggagggaggucaaug

SEQ ID NO: 599746 - RNA, 18 nt, Artificial Sequence
  Synthetic
auuucuuaaaugucaaug

SEQ ID NO: 599747 - RNA, 19 nt, Artificial Sequence
  Synthetic
gauuucuuaaaugucaaug

SEQ ID NO: 599748 - RNA, 20 nt, Artificial Sequence
  Synthetic
agauuucuuaaaugucaaug

SEQ ID NO: 599749 - RNA, 21 nt, Artificial Sequence
  Synthetic
cagauuucuuaaaugucaaug

SEQ ID NO: 599750 - RNA, 22 nt, Artificial Sequence
  Synthetic
acagauuucuuaaaugucaaug

SEQ ID NO: 599751 - RNA, 23 nt, Artificial Sequence
  Synthetic
aacagauuucuuaaaugucaaug

SEQ ID NO: 599752 - RNA, 24 nt, Artificial Sequence
  Synthetic
aaacagauuucuuaaaugucaaug

SEQ ID NO: 599753 - RNA, 18 nt, Artificial Sequence
  Synthetic
gucaguuagaugucaaug

SEQ ID NO: 599754 - RNA, 19 nt, Artificial Sequence
  Synthetic
ggucaguuagaugucaaug

SEQ ID NO: 599755 - RNA, 20 nt, Artificial Sequence
  Synthetic
aggucaguuagaugucaaug

SEQ ID NO: 599756 - RNA, 21 nt, Artificial Sequence
  Synthetic
aaggucaguuagaugucaaug

SEQ ID NO: 599757 - RNA, 22 nt, Artificial Sequence
  Synthetic
caaggucaguuagaugucaaug

SEQ ID NO: 599758 - RNA, 23 nt, Artificial Sequence
  Synthetic
acaaggucaguuagaugucaaug

SEQ ID NO: 599759 - RNA, 24 nt, Artificial Sequence
  Synthetic
uacaaggucaguuagaugucaaug

SEQ ID NO: 599760 - RNA, 18 nt, Artificial Sequence
  Synthetic
augacagcacauucaaug

SEQ ID NO: 599761 - RNA, 19 nt, Artificial Sequence
  Synthetic
uaugacagcacauucaaug

SEQ ID NO: 599762 - RNA, 20 nt, Artificial Sequence
  Synthetic
auaugacagcacauucaaug

SEQ ID NO: 599763 - RNA, 21 nt, Artificial Sequence
  Synthetic
gauaugacagcacauucaaug

SEQ ID NO: 599764 - RNA, 22 nt, Artificial Sequence
  Synthetic
agauaugacagcacauucaaug

SEQ ID NO: 599765 - RNA, 23 nt, Artificial Sequence
  Synthetic
gagauaugacagcacauucaaug

SEQ ID NO: 599766 - RNA, 24 nt, Artificial Sequence
  Synthetic
cgagauaugacagcacauucaaug

SEQ ID NO: 599767 - RNA, 18 nt, Artificial Sequence
  Synthetic
cuacaaauuucuucaaug

SEQ ID NO: 599768 - RNA, 19 nt, Artificial Sequence
  Synthetic
ucuacaaauuucuucaaug

SEQ ID NO: 599769 - RNA, 20 nt, Artificial Sequence
  Synthetic
gucuacaaauuucuucaaug

SEQ ID NO: 599770 - RNA, 21 nt, Artificial Sequence
  Synthetic
ugucuacaaauuucuucaaug

SEQ ID NO: 599771 - RNA, 22 nt, Artificial Sequence
  Synthetic
augucuacaaauuucuucaaug

SEQ ID NO: 599772 - RNA, 23 nt, Artificial Sequence
  Synthetic
aaugucuacaaauuucuucaaug

SEQ ID NO: 599773 - RNA, 24 nt, Artificial Sequence
  Synthetic
aaaugucuacaaauuucuucaaug

SEQ ID NO: 599774 - RNA, 18 nt, Artificial Sequence
  Synthetic
aaccuaugggguucaaug

SEQ ID NO: 599775 - RNA, 19 nt, Artificial Sequence
  Synthetic
gaaccuaugggguucaaug

SEQ ID NO: 599776 - RNA, 20 nt, Artificial Sequence
  Synthetic
ugaaccuaugggguucaaug

SEQ ID NO: 599777 - RNA, 21 nt, Artificial Sequence
  Synthetic
uugaaccuaugggguucaaug

SEQ ID NO: 599778 - RNA, 22 nt, Artificial Sequence
  Synthetic
uuugaaccuaugggguucaaug

SEQ ID NO: 599779 - RNA, 23 nt, Artificial Sequence
  Synthetic
guuugaaccuaugggguucaaug

SEQ ID NO: 599780 - RNA, 24 nt, Artificial Sequence
  Synthetic
aguuugaaccuaugggguucaaug

SEQ ID NO: 599781 - RNA, 18 nt, Artificial Sequence
  Synthetic
uuuuauaugcuuucaaug

SEQ ID NO: 599782 - RNA, 19 nt, Artificial Sequence
  Synthetic
cuuuuauaugcuuucaaug

SEQ ID NO: 599783 - RNA, 20 nt, Artificial Sequence
  Synthetic
ccuuuuauaugcuuucaaug

SEQ ID NO: 599784 - RNA, 21 nt, Artificial Sequence
  Synthetic
gccuuuuauaugcuuucaaug

SEQ ID NO: 599785 - RNA, 22 nt, Artificial Sequence
  Synthetic
ugccuuuuauaugcuuucaaug

SEQ ID NO: 599786 - RNA, 23 nt, Artificial Sequence
  Synthetic
uugccuuuuauaugcuuucaaug

SEQ ID NO: 599787 - RNA, 24 nt, Artificial Sequence
  Synthetic
auugccuuuuauaugcuuucaaug

SEQ ID NO: 599788 - RNA, 18 nt, Artificial Sequence
  Synthetic
ucuccuggagaaagaaug

SEQ ID NO: 599789 - RNA, 19 nt, Artificial Sequence
  Synthetic
gucuccuggagaaagaaug

SEQ ID NO: 599790 - RNA, 20 nt, Artificial Sequence
  Synthetic
ugucuccuggagaaagaaug

SEQ ID NO: 599791 - RNA, 21 nt, Artificial Sequence
  Synthetic
cugucuccuggagaaagaaug

SEQ ID NO: 599792 - RNA, 22 nt, Artificial Sequence
  Synthetic
ucugucuccuggagaaagaaug

SEQ ID NO: 599793 - RNA, 23 nt, Artificial Sequence
  Synthetic
cucugucuccuggagaaagaaug

SEQ ID NO: 599794 - RNA, 24 nt, Artificial Sequence
  Synthetic
ccucugucuccuggagaaagaaug

SEQ ID NO: 599795 - RNA, 18 nt, Artificial Sequence
  Synthetic
aaagagcaaugaagaaug

SEQ ID NO: 599796 - RNA, 19 nt, Artificial Sequence
  Synthetic
caaagagcaaugaagaaug

SEQ ID NO: 599797 - RNA, 20 nt, Artificial Sequence
  Synthetic
acaaagagcaaugaagaaug

SEQ ID NO: 599798 - RNA, 21 nt, Artificial Sequence
  Synthetic
uacaaagagcaaugaagaaug

SEQ ID NO: 599799 - RNA, 22 nt, Artificial Sequence
  Synthetic
auacaaagagcaaugaagaaug

SEQ ID NO: 599800 - RNA, 23 nt, Artificial Sequence
  Synthetic
uauacaaagagcaaugaagaaug

SEQ ID NO: 599801 - RNA, 24 nt, Artificial Sequence
  Synthetic
auauacaaagagcaaugaagaaug

SEQ ID NO: 599802 - RNA, 18 nt, Artificial Sequence
  Synthetic
agaacuacgugaagaaug

SEQ ID NO: 599803 - RNA, 19 nt, Artificial Sequence
  Synthetic
gagaacuacgugaagaaug

SEQ ID NO: 599804 - RNA, 20 nt, Artificial Sequence
  Synthetic
cgagaacuacgugaagaaug

SEQ ID NO: 599805 - RNA, 21 nt, Artificial Sequence
  Synthetic
ucgagaacuacgugaagaaug

SEQ ID NO: 599806 - RNA, 22 nt, Artificial Sequence
  Synthetic
cucgagaacuacgugaagaaug

SEQ ID NO: 599807 - RNA, 23 nt, Artificial Sequence
  Synthetic
gcucgagaacuacgugaagaaug

SEQ ID NO: 599808 - RNA, 24 nt, Artificial Sequence
  Synthetic
ggcucgagaacuacgugaagaaug

SEQ ID NO: 599809 - RNA, 18 nt, Artificial Sequence
  Synthetic
uugagauauauaagaaug

SEQ ID NO: 599810 - RNA, 19 nt, Artificial Sequence
  Synthetic
guugagauauauaagaaug

SEQ ID NO: 599811 - RNA, 20 nt, Artificial Sequence
  Synthetic
aguugagauauauaagaaug

SEQ ID NO: 599812 - RNA, 21 nt, Artificial Sequence
  Synthetic
aaguugagauauauaagaaug

SEQ ID NO: 599813 - RNA, 22 nt, Artificial Sequence
  Synthetic
aaaguugagauauauaagaaug

SEQ ID NO: 599814 - RNA, 23 nt, Artificial Sequence
  Synthetic
caaaguugagauauauaagaaug

SEQ ID NO: 599815 - RNA, 24 nt, Artificial Sequence
  Synthetic
acaaaguugagauauauaagaaug

SEQ ID NO: 599816 - RNA, 18 nt, Artificial Sequence
  Synthetic
uuagcuagacuaagaaug

SEQ ID NO: 599817 - RNA, 19 nt, Artificial Sequence
  Synthetic
cuuagcuagacuaagaaug

SEQ ID NO: 599818 - RNA, 20 nt, Artificial Sequence
  Synthetic
ccuuagcuagacuaagaaug

SEQ ID NO: 599819 - RNA, 21 nt, Artificial Sequence
  Synthetic
uccuuagcuagacuaagaaug

SEQ ID NO: 599820 - RNA, 22 nt, Artificial Sequence
  Synthetic
auccuuagcuagacuaagaaug

SEQ ID NO: 599821 - RNA, 23 nt, Artificial Sequence
  Synthetic
aauccuuagcuagacuaagaaug

SEQ ID NO: 599822 - RNA, 24 nt, Artificial Sequence
  Synthetic
aaauccuuagcuagacuaagaaug

SEQ ID NO: 599823 - RNA, 18 nt, Artificial Sequence
  Synthetic
aaggaauugcuaagaaug

SEQ ID NO: 599824 - RNA, 19 nt, Artificial Sequence
  Synthetic
gaaggaauugcuaagaaug

SEQ ID NO: 599825 - RNA, 20 nt, Artificial Sequence
  Synthetic
agaaggaauugcuaagaaug

SEQ ID NO: 599826 - RNA, 21 nt, Artificial Sequence
  Synthetic
uagaaggaauugcuaagaaug

SEQ ID NO: 599827 - RNA, 22 nt, Artificial Sequence
  Synthetic
auagaaggaauugcuaagaaug

SEQ ID NO: 599828 - RNA, 23 nt, Artificial Sequence
  Synthetic
gauagaaggaauugcuaagaaug

SEQ ID NO: 599829 - RNA, 24 nt, Artificial Sequence
  Synthetic
ugauagaaggaauugcuaagaaug

SEQ ID NO: 599830 - RNA, 18 nt, Artificial Sequence
  Synthetic
gauuagacuuuaagaaug

SEQ ID NO: 599831 - RNA, 19 nt, Artificial Sequence
  Synthetic
agauuagacuuuaagaaug

SEQ ID NO: 599832 - RNA, 20 nt, Artificial Sequence
  Synthetic
aagauuagacuuuaagaaug

SEQ ID NO: 599833 - RNA, 21 nt, Artificial Sequence
  Synthetic
uaagauuagacuuuaagaaug

SEQ ID NO: 599834 - RNA, 22 nt, Artificial Sequence
  Synthetic
uuaagauuagacuuuaagaaug

SEQ ID NO: 599835 - RNA, 23 nt, Artificial Sequence
  Synthetic
auuaagauuagacuuuaagaaug

SEQ ID NO: 599836 - RNA, 24 nt, Artificial Sequence
  Synthetic
uauuaagauuagacuuuaagaaug

SEQ ID NO: 599837 - RNA, 18 nt, Artificial Sequence
  Synthetic
aaaguguuggccagaaug

SEQ ID NO: 599838 - RNA, 19 nt, Artificial Sequence
  Synthetic
aaaaguguuggccagaaug

SEQ ID NO: 599839 - RNA, 20 nt, Artificial Sequence
  Synthetic
gaaaaguguuggccagaaug

SEQ ID NO: 599840 - RNA, 21 nt, Artificial Sequence
  Synthetic
agaaaaguguuggccagaaug

SEQ ID NO: 599841 - RNA, 22 nt, Artificial Sequence
  Synthetic
aagaaaaguguuggccagaaug

SEQ ID NO: 599842 - RNA, 23 nt, Artificial Sequence
  Synthetic
aaagaaaaguguuggccagaaug

SEQ ID NO: 599843 - RNA, 24 nt, Artificial Sequence
  Synthetic
aaaagaaaaguguuggccagaaug

SEQ ID NO: 599844 - RNA, 18 nt, Artificial Sequence
  Synthetic
ggaggaaucagcagaaug

SEQ ID NO: 599845 - RNA, 19 nt, Artificial Sequence
  Synthetic
gggaggaaucagcagaaug

SEQ ID NO: 599846 - RNA, 20 nt, Artificial Sequence
  Synthetic
agggaggaaucagcagaaug

SEQ ID NO: 599847 - RNA, 21 nt, Artificial Sequence
  Synthetic
gagggaggaaucagcagaaug

SEQ ID NO: 599848 - RNA, 22 nt, Artificial Sequence
  Synthetic
ugagggaggaaucagcagaaug

SEQ ID NO: 599849 - RNA, 23 nt, Artificial Sequence
  Synthetic
gugagggaggaaucagcagaaug

SEQ ID NO: 599850 - RNA, 24 nt, Artificial Sequence
  Synthetic
agugagggaggaaucagcagaaug

SEQ ID NO: 599851 - RNA, 18 nt, Artificial Sequence
  Synthetic
auuuccacaugcagaaug

SEQ ID NO: 599852 - RNA, 19 nt, Artificial Sequence
  Synthetic
uauuuccacaugcagaaug

SEQ ID NO: 599853 - RNA, 20 nt, Artificial Sequence
  Synthetic
uuauuuccacaugcagaaug

SEQ ID NO: 599854 - RNA, 21 nt, Artificial Sequence
  Synthetic
uuuauuuccacaugcagaaug

SEQ ID NO: 599855 - RNA, 22 nt, Artificial Sequence
  Synthetic
guuuauuuccacaugcagaaug

SEQ ID NO: 599856 - RNA, 23 nt, Artificial Sequence
  Synthetic
uguuuauuuccacaugcagaaug

SEQ ID NO: 599857 - RNA, 24 nt, Artificial Sequence
  Synthetic
auguuuauuuccacaugcagaaug

SEQ ID NO: 599858 - RNA, 18 nt, Artificial Sequence
  Synthetic
gcugucugaugcagaaug

SEQ ID NO: 599859 - RNA, 19 nt, Artificial Sequence
  Synthetic
ggcugucugaugcagaaug

SEQ ID NO: 599860 - RNA, 20 nt, Artificial Sequence
  Synthetic
aggcugucugaugcagaaug

SEQ ID NO: 599861 - RNA, 21 nt, Artificial Sequence
  Synthetic
caggcugucugaugcagaaug

SEQ ID NO: 599862 - RNA, 22 nt, Artificial Sequence
  Synthetic
acaggcugucugaugcagaaug

SEQ ID NO: 599863 - RNA, 23 nt, Artificial Sequence
  Synthetic
gacaggcugucugaugcagaaug

SEQ ID NO: 599864 - RNA, 24 nt, Artificial Sequence
  Synthetic
agacaggcugucugaugcagaaug

SEQ ID NO: 599865 - RNA, 18 nt, Artificial Sequence
  Synthetic
uugggagucaucagaaug

SEQ ID NO: 599866 - RNA, 19 nt, Artificial Sequence
  Synthetic
guugggagucaucagaaug

SEQ ID NO: 599867 - RNA, 20 nt, Artificial Sequence
  Synthetic
aguugggagucaucagaaug

SEQ ID NO: 599868 - RNA, 21 nt, Artificial Sequence
  Synthetic
uaguugggagucaucagaaug

SEQ ID NO: 599869 - RNA, 22 nt, Artificial Sequence
  Synthetic
cuaguugggagucaucagaaug

SEQ ID NO: 599870 - RNA, 23 nt, Artificial Sequence
  Synthetic
ccuaguugggagucaucagaaug

SEQ ID NO: 599871 - RNA, 24 nt, Artificial Sequence
  Synthetic
uccuaguugggagucaucagaaug

SEQ ID NO: 599872 - RNA, 18 nt, Artificial Sequence
  Synthetic
acacauaagaucagaaug

SEQ ID NO: 599873 - RNA, 19 nt, Artificial Sequence
  Synthetic
aacacauaagaucagaaug

SEQ ID NO: 599874 - RNA, 20 nt, Artificial Sequence
  Synthetic
uaacacauaagaucagaaug

SEQ ID NO: 599875 - RNA, 21 nt, Artificial Sequence
  Synthetic
uuaacacauaagaucagaaug

SEQ ID NO: 599876 - RNA, 22 nt, Artificial Sequence
  Synthetic
uuuaacacauaagaucagaaug

SEQ ID NO: 599877 - RNA, 23 nt, Artificial Sequence
  Synthetic
auuuaacacauaagaucagaaug

SEQ ID NO: 599878 - RNA, 24 nt, Artificial Sequence
  Synthetic
uauuuaacacauaagaucagaaug

SEQ ID NO: 599879 - RNA, 18 nt, Artificial Sequence
  Synthetic
uauuugaaacucagaaug

SEQ ID NO: 599880 - RNA, 19 nt, Artificial Sequence
  Synthetic
uuauuugaaacucagaaug

SEQ ID NO: 599881 - RNA, 20 nt, Artificial Sequence
  Synthetic
cuuauuugaaacucagaaug

SEQ ID NO: 599882 - RNA, 21 nt, Artificial Sequence
  Synthetic
ucuuauuugaaacucagaaug

SEQ ID NO: 599883 - RNA, 22 nt, Artificial Sequence
  Synthetic
uucuuauuugaaacucagaaug

SEQ ID NO: 599884 - RNA, 23 nt, Artificial Sequence
  Synthetic
cuucuuauuugaaacucagaaug

SEQ ID NO: 599885 - RNA, 24 nt, Artificial Sequence
  Synthetic
ucuucuuauuugaaacucagaaug

SEQ ID NO: 599886 - RNA, 18 nt, Artificial Sequence
  Synthetic
ucgguuuuauucagaaug

SEQ ID NO: 599887 - RNA, 19 nt, Artificial Sequence
  Synthetic
uucgguuuuauucagaaug

SEQ ID NO: 599888 - RNA, 20 nt, Artificial Sequence
  Synthetic
auucgguuuuauucagaaug

SEQ ID NO: 599889 - RNA, 21 nt, Artificial Sequence
  Synthetic
uauucgguuuuauucagaaug

SEQ ID NO: 599890 - RNA, 22 nt, Artificial Sequence
  Synthetic
guauucgguuuuauucagaaug

SEQ ID NO: 599891 - RNA, 23 nt, Artificial Sequence
  Synthetic
uguauucgguuuuauucagaaug

SEQ ID NO: 599892 - RNA, 24 nt, Artificial Sequence
  Synthetic
auguauucgguuuuauucagaaug

SEQ ID NO: 599893 - RNA, 18 nt, Artificial Sequence
  Synthetic
gcuggagguaagagaaug

SEQ ID NO: 599894 - RNA, 19 nt, Artificial Sequence
  Synthetic
ggcuggagguaagagaaug

SEQ ID NO: 599895 - RNA, 20 nt, Artificial Sequence
  Synthetic
gggcuggagguaagagaaug

SEQ ID NO: 599896 - RNA, 21 nt, Artificial Sequence
  Synthetic
ugggcuggagguaagagaaug

SEQ ID NO: 599897 - RNA, 22 nt, Artificial Sequence
  Synthetic
cugggcuggagguaagagaaug

SEQ ID NO: 599898 - RNA, 23 nt, Artificial Sequence
  Synthetic
gcugggcuggagguaagagaaug

SEQ ID NO: 599899 - RNA, 24 nt, Artificial Sequence
  Synthetic
agcugggcuggagguaagagaaug

SEQ ID NO: 599900 - RNA, 18 nt, Artificial Sequence
  Synthetic
ccugggcuggagagaaug

SEQ ID NO: 599901 - RNA, 19 nt, Artificial Sequence
  Synthetic
gccugggcuggagagaaug

SEQ ID NO: 599902 - RNA, 20 nt, Artificial Sequence
  Synthetic
ugccugggcuggagagaaug

SEQ ID NO: 599903 - RNA, 21 nt, Artificial Sequence
  Synthetic
gugccugggcuggagagaaug

SEQ ID NO: 599904 - RNA, 22 nt, Artificial Sequence
  Synthetic
ugugccugggcuggagagaaug

SEQ ID NO: 599905 - RNA, 23 nt, Artificial Sequence
  Synthetic
uugugccugggcuggagagaaug

SEQ ID NO: 599906 - RNA, 24 nt, Artificial Sequence
  Synthetic
uuugugccugggcuggagagaaug

SEQ ID NO: 599907 - RNA, 18 nt, Artificial Sequence
  Synthetic
ucaaggagcaugagaaug

SEQ ID NO: 599908 - RNA, 19 nt, Artificial Sequence
  Synthetic
aucaaggagcaugagaaug

SEQ ID NO: 599909 - RNA, 20 nt, Artificial Sequence
  Synthetic
caucaaggagcaugagaaug

SEQ ID NO: 599910 - RNA, 21 nt, Artificial Sequence
  Synthetic
ccaucaaggagcaugagaaug

SEQ ID NO: 599911 - RNA, 22 nt, Artificial Sequence
  Synthetic
gccaucaaggagcaugagaaug

SEQ ID NO: 599912 - RNA, 23 nt, Artificial Sequence
  Synthetic
ggccaucaaggagcaugagaaug

SEQ ID NO: 599913 - RNA, 24 nt, Artificial Sequence
  Synthetic
gggccaucaaggagcaugagaaug

SEQ ID NO: 599914 - RNA, 18 nt, Artificial Sequence
  Synthetic
ucccaaaaagcuagaaug

SEQ ID NO: 599915 - RNA, 19 nt, Artificial Sequence
  Synthetic
aucccaaaaagcuagaaug

SEQ ID NO: 599916 - RNA, 20 nt, Artificial Sequence
  Synthetic
aaucccaaaaagcuagaaug

SEQ ID NO: 599917 - RNA, 21 nt, Artificial Sequence
  Synthetic
aaaucccaaaaagcuagaaug

SEQ ID NO: 599918 - RNA, 22 nt, Artificial Sequence
  Synthetic
uaaaucccaaaaagcuagaaug

SEQ ID NO: 599919 - RNA, 23 nt, Artificial Sequence
  Synthetic
cuaaaucccaaaaagcuagaaug

SEQ ID NO: 599920 - RNA, 24 nt, Artificial Sequence
  Synthetic
ucuaaaucccaaaaagcuagaaug

SEQ ID NO: 599921 - RNA, 18 nt, Artificial Sequence
  Synthetic
uuacccuacuguagaaug

SEQ ID NO: 599922 - RNA, 19 nt, Artificial Sequence
  Synthetic
auuacccuacuguagaaug

SEQ ID NO: 599923 - RNA, 20 nt, Artificial Sequence
  Synthetic
uauuacccuacuguagaaug

SEQ ID NO: 599924 - RNA, 21 nt, Artificial Sequence
  Synthetic
auauuacccuacuguagaaug

SEQ ID NO: 599925 - RNA, 22 nt, Artificial Sequence
  Synthetic
uauauuacccuacuguagaaug

SEQ ID NO: 599926 - RNA, 23 nt, Artificial Sequence
  Synthetic
uuauauuacccuacuguagaaug

SEQ ID NO: 599927 - RNA, 24 nt, Artificial Sequence
  Synthetic
guuauauuacccuacuguagaaug

SEQ ID NO: 599928 - RNA, 18 nt, Artificial Sequence
  Synthetic
cucacaccaguuagaaug

SEQ ID NO: 599929 - RNA, 19 nt, Artificial Sequence
  Synthetic
ucucacaccaguuagaaug

SEQ ID NO: 599930 - RNA, 20 nt, Artificial Sequence
  Synthetic
aucucacaccaguuagaaug

SEQ ID NO: 599931 - RNA, 21 nt, Artificial Sequence
  Synthetic
caucucacaccaguuagaaug

SEQ ID NO: 599932 - RNA, 22 nt, Artificial Sequence
  Synthetic
ccaucucacaccaguuagaaug

SEQ ID NO: 599933 - RNA, 23 nt, Artificial Sequence
  Synthetic
accaucucacaccaguuagaaug

SEQ ID NO: 599934 - RNA, 24 nt, Artificial Sequence
  Synthetic
uaccaucucacaccaguuagaaug

SEQ ID NO: 599935 - RNA, 18 nt, Artificial Sequence
  Synthetic
gcaguuuguuuuagaaug

SEQ ID NO: 599936 - RNA, 19 nt, Artificial Sequence
  Synthetic
ggcaguuuguuuuagaaug

SEQ ID NO: 599937 - RNA, 20 nt, Artificial Sequence
  Synthetic
uggcaguuuguuuuagaaug

SEQ ID NO: 599938 - RNA, 21 nt, Artificial Sequence
  Synthetic
cuggcaguuuguuuuagaaug

SEQ ID NO: 599939 - RNA, 22 nt, Artificial Sequence
  Synthetic
gcuggcaguuuguuuuagaaug

SEQ ID NO: 599940 - RNA, 23 nt, Artificial Sequence
  Synthetic
ugcuggcaguuuguuuuagaaug

SEQ ID NO: 599941 - RNA, 24 nt, Artificial Sequence
  Synthetic
uugcuggcaguuuguuuuagaaug

SEQ ID NO: 599942 - RNA, 18 nt, Artificial Sequence
  Synthetic
ugaaaggacaaacgaaug

SEQ ID NO: 599943 - RNA, 19 nt, Artificial Sequence
  Synthetic
cugaaaggacaaacgaaug

SEQ ID NO: 599944 - RNA, 20 nt, Artificial Sequence
  Synthetic
ucugaaaggacaaacgaaug

SEQ ID NO: 599945 - RNA, 21 nt, Artificial Sequence
  Synthetic
cucugaaaggacaaacgaaug

SEQ ID NO: 599946 - RNA, 22 nt, Artificial Sequence
  Synthetic
acucugaaaggacaaacgaaug

SEQ ID NO: 599947 - RNA, 23 nt, Artificial Sequence
  Synthetic
aacucugaaaggacaaacgaaug

SEQ ID NO: 599948 - RNA, 24 nt, Artificial Sequence
  Synthetic
aaacucugaaaggacaaacgaaug

SEQ ID NO: 599949 - RNA, 18 nt, Artificial Sequence
  Synthetic
acagacaacauccgaaug

SEQ ID NO: 599950 - RNA, 19 nt, Artificial Sequence
  Synthetic
cacagacaacauccgaaug

SEQ ID NO: 599951 - RNA, 20 nt, Artificial Sequence
  Synthetic
acacagacaacauccgaaug

SEQ ID NO: 599952 - RNA, 21 nt, Artificial Sequence
  Synthetic
cacacagacaacauccgaaug

SEQ ID NO: 599953 - RNA, 22 nt, Artificial Sequence
  Synthetic
ucacacagacaacauccgaaug

SEQ ID NO: 599954 - RNA, 23 nt, Artificial Sequence
  Synthetic
cucacacagacaacauccgaaug

SEQ ID NO: 599955 - RNA, 24 nt, Artificial Sequence
  Synthetic
acucacacagacaacauccgaaug

SEQ ID NO: 599956 - RNA, 18 nt, Artificial Sequence
  Synthetic
ggaagagaggaaggaaug

SEQ ID NO: 599957 - RNA, 19 nt, Artificial Sequence
  Synthetic
aggaagagaggaaggaaug

SEQ ID NO: 599958 - RNA, 20 nt, Artificial Sequence
  Synthetic
gaggaagagaggaaggaaug

SEQ ID NO: 599959 - RNA, 21 nt, Artificial Sequence
  Synthetic
ggaggaagagaggaaggaaug

SEQ ID NO: 599960 - RNA, 22 nt, Artificial Sequence
  Synthetic
gggaggaagagaggaaggaaug

SEQ ID NO: 599961 - RNA, 23 nt, Artificial Sequence
  Synthetic
agggaggaagagaggaaggaaug

SEQ ID NO: 599962 - RNA, 24 nt, Artificial Sequence
  Synthetic
gagggaggaagagaggaaggaaug

SEQ ID NO: 599963 - RNA, 18 nt, Artificial Sequence
  Synthetic
ucaggauccagaggaaug

SEQ ID NO: 599964 - RNA, 19 nt, Artificial Sequence
  Synthetic
aucaggauccagaggaaug

SEQ ID NO: 599965 - RNA, 20 nt, Artificial Sequence
  Synthetic
aaucaggauccagaggaaug

SEQ ID NO: 599966 - RNA, 21 nt, Artificial Sequence
  Synthetic
gaaucaggauccagaggaaug

SEQ ID NO: 599967 - RNA, 22 nt, Artificial Sequence
  Synthetic
ugaaucaggauccagaggaaug

SEQ ID NO: 599968 - RNA, 23 nt, Artificial Sequence
  Synthetic
gugaaucaggauccagaggaaug

SEQ ID NO: 599969 - RNA, 24 nt, Artificial Sequence
  Synthetic
ggugaaucaggauccagaggaaug

SEQ ID NO: 599970 - RNA, 18 nt, Artificial Sequence
  Synthetic
aaagaaaagggaggaaug

SEQ ID NO: 599971 - RNA, 19 nt, Artificial Sequence
  Synthetic
gaaagaaaagggaggaaug

SEQ ID NO: 599972 - RNA, 20 nt, Artificial Sequence
  Synthetic
agaaagaaaagggaggaaug

SEQ ID NO: 599973 - RNA, 21 nt, Artificial Sequence
  Synthetic
cagaaagaaaagggaggaaug

SEQ ID NO: 599974 - RNA, 22 nt, Artificial Sequence
  Synthetic
gcagaaagaaaagggaggaaug

SEQ ID NO: 599975 - RNA, 23 nt, Artificial Sequence
  Synthetic
ugcagaaagaaaagggaggaaug

SEQ ID NO: 599976 - RNA, 24 nt, Artificial Sequence
  Synthetic
augcagaaagaaaagggaggaaug

SEQ ID NO: 599977 - RNA, 18 nt, Artificial Sequence
  Synthetic
ugucucuggcagggaaug

SEQ ID NO: 599978 - RNA, 19 nt, Artificial Sequence
  Synthetic
uugucucuggcagggaaug

SEQ ID NO: 599979 - RNA, 20 nt, Artificial Sequence
  Synthetic
uuugucucuggcagggaaug

SEQ ID NO: 599980 - RNA, 21 nt, Artificial Sequence
  Synthetic
uuuugucucuggcagggaaug

SEQ ID NO: 599981 - RNA, 22 nt, Artificial Sequence
  Synthetic
auuuugucucuggcagggaaug

SEQ ID NO: 599982 - RNA, 23 nt, Artificial Sequence
  Synthetic
cauuuugucucuggcagggaaug

SEQ ID NO: 599983 - RNA, 24 nt, Artificial Sequence
  Synthetic
acauuuugucucuggcagggaaug

SEQ ID NO: 599984 - RNA, 18 nt, Artificial Sequence
  Synthetic
agucauagauugggaaug

SEQ ID NO: 599985 - RNA, 19 nt, Artificial Sequence
  Synthetic
gagucauagauugggaaug

SEQ ID NO: 599986 - RNA, 20 nt, Artificial Sequence
  Synthetic
ugagucauagauugggaaug

SEQ ID NO: 599987 - RNA, 21 nt, Artificial Sequence
  Synthetic
augagucauagauugggaaug

SEQ ID NO: 599988 - RNA, 22 nt, Artificial Sequence
  Synthetic
caugagucauagauugggaaug

SEQ ID NO: 599989 - RNA, 23 nt, Artificial Sequence
  Synthetic
gcaugagucauagauugggaaug

SEQ ID NO: 599990 - RNA, 24 nt, Artificial Sequence
  Synthetic
agcaugagucauagauugggaaug

SEQ ID NO: 599991 - RNA, 18 nt, Artificial Sequence
  Synthetic
cuaguuaugacuggaaug

SEQ ID NO: 599992 - RNA, 19 nt, Artificial Sequence
  Synthetic
ccuaguuaugacuggaaug

SEQ ID NO: 599993 - RNA, 20 nt, Artificial Sequence
  Synthetic
uccuaguuaugacuggaaug

SEQ ID NO: 599994 - RNA, 21 nt, Artificial Sequence
  Synthetic
auccuaguuaugacuggaaug

SEQ ID NO: 599995 - RNA, 22 nt, Artificial Sequence
  Synthetic
gauccuaguuaugacuggaaug

SEQ ID NO: 599996 - RNA, 23 nt, Artificial Sequence
  Synthetic
ggauccuaguuaugacuggaaug

SEQ ID NO: 599997 - RNA, 24 nt, Artificial Sequence
  Synthetic
gggauccuaguuaugacuggaaug

SEQ ID NO: 599998 - RNA, 18 nt, Artificial Sequence
  Synthetic
uucauggcaucuggaaug

SEQ ID NO: 599999 - RNA, 19 nt, Artificial Sequence
  Synthetic
cuucauggcaucuggaaug

SEQ ID NO: 600000 - RNA, 20 nt, Artificial Sequence
  Synthetic
ucuucauggcaucuggaaug

SEQ ID NO: 600001 - RNA, 21 nt, Artificial Sequence
  Synthetic
uucuucauggcaucuggaaug

SEQ ID NO: 600002 - RNA, 22 nt, Artificial Sequence
  Synthetic
uuucuucauggcaucuggaaug

SEQ ID NO: 600003 - RNA, 23 nt, Artificial Sequence
  Synthetic
uuuucuucauggcaucuggaaug

SEQ ID NO: 600004 - RNA, 24 nt, Artificial Sequence
  Synthetic
auuuucuucauggcaucuggaaug

SEQ ID NO: 600005 - RNA, 18 nt, Artificial Sequence
  Synthetic
uaacauuaggguggaaug

SEQ ID NO: 600006 - RNA, 19 nt, Artificial Sequence
  Synthetic
auaacauuaggguggaaug

SEQ ID NO: 600007 - RNA, 20 nt, Artificial Sequence
  Synthetic
gauaacauuaggguggaaug

SEQ ID NO: 600008 - RNA, 21 nt, Artificial Sequence
  Synthetic
agauaacauuaggguggaaug

SEQ ID NO: 600009 - RNA, 22 nt, Artificial Sequence
  Synthetic
aagauaacauuaggguggaaug

SEQ ID NO: 600010 - RNA, 23 nt, Artificial Sequence
  Synthetic
aaagauaacauuaggguggaaug

SEQ ID NO: 600011 - RNA, 24 nt, Artificial Sequence
  Synthetic
gaaagauaacauuaggguggaaug

SEQ ID NO: 600012 - RNA, 18 nt, Artificial Sequence
  Synthetic
cuggggaaaauuggaaug

SEQ ID NO: 600013 - RNA, 19 nt, Artificial Sequence
  Synthetic
ccuggggaaaauuggaaug

SEQ ID NO: 600014 - RNA, 20 nt, Artificial Sequence
  Synthetic
accuggggaaaauuggaaug

SEQ ID NO: 600015 - RNA, 21 nt, Artificial Sequence
  Synthetic
gaccuggggaaaauuggaaug

SEQ ID NO: 600016 - RNA, 22 nt, Artificial Sequence
  Synthetic
agaccuggggaaaauuggaaug

SEQ ID NO: 600017 - RNA, 23 nt, Artificial Sequence
  Synthetic
aagaccuggggaaaauuggaaug

SEQ ID NO: 600018 - RNA, 24 nt, Artificial Sequence
  Synthetic
caagaccuggggaaaauuggaaug

SEQ ID NO: 600019 - RNA, 18 nt, Artificial Sequence
  Synthetic
ggagagaagaaaugaaug

SEQ ID NO: 600020 - RNA, 19 nt, Artificial Sequence
  Synthetic
aggagagaagaaaugaaug

SEQ ID NO: 600021 - RNA, 20 nt, Artificial Sequence
  Synthetic
uaggagagaagaaaugaaug

SEQ ID NO: 600022 - RNA, 21 nt, Artificial Sequence
  Synthetic
auaggagagaagaaaugaaug

SEQ ID NO: 600023 - RNA, 22 nt, Artificial Sequence
  Synthetic
cauaggagagaagaaaugaaug

SEQ ID NO: 600024 - RNA, 23 nt, Artificial Sequence
  Synthetic
gcauaggagagaagaaaugaaug

SEQ ID NO: 600025 - RNA, 24 nt, Artificial Sequence
  Synthetic
ugcauaggagagaagaaaugaaug

SEQ ID NO: 600026 - RNA, 18 nt, Artificial Sequence
  Synthetic
ugaacaaauaaaugaaug

SEQ ID NO: 600027 - RNA, 19 nt, Artificial Sequence
  Synthetic
augaacaaauaaaugaaug

SEQ ID NO: 600028 - RNA, 20 nt, Artificial Sequence
  Synthetic
aaugaacaaauaaaugaaug

SEQ ID NO: 600029 - RNA, 21 nt, Artificial Sequence
  Synthetic
gaaugaacaaauaaaugaaug

SEQ ID NO: 600030 - RNA, 22 nt, Artificial Sequence
  Synthetic
ugaaugaacaaauaaaugaaug

SEQ ID NO: 600031 - RNA, 23 nt, Artificial Sequence
  Synthetic
uugaaugaacaaauaaaugaaug

SEQ ID NO: 600032 - RNA, 24 nt, Artificial Sequence
  Synthetic
guugaaugaacaaauaaaugaaug

SEQ ID NO: 600033 - RNA, 18 nt, Artificial Sequence
  Synthetic
gugagugaacaaugaaug

SEQ ID NO: 600034 - RNA, 19 nt, Artificial Sequence
  Synthetic
agugagugaacaaugaaug

SEQ ID NO: 600035 - RNA, 20 nt, Artificial Sequence
  Synthetic
gagugagugaacaaugaaug

SEQ ID NO: 600036 - RNA, 21 nt, Artificial Sequence
  Synthetic
ugagugagugaacaaugaaug

SEQ ID NO: 600037 - RNA, 22 nt, Artificial Sequence
  Synthetic
gugagugagugaacaaugaaug

SEQ ID NO: 600038 - RNA, 23 nt, Artificial Sequence
  Synthetic
agugagugagugaacaaugaaug

SEQ ID NO: 600039 - RNA, 24 nt, Artificial Sequence
  Synthetic
uagugagugagugaacaaugaaug

SEQ ID NO: 600040 - RNA, 18 nt, Artificial Sequence
  Synthetic
uuaauacgugaaugaaug

SEQ ID NO: 600041 - RNA, 19 nt, Artificial Sequence
  Synthetic
cuuaauacgugaaugaaug

SEQ ID NO: 600042 - RNA, 20 nt, Artificial Sequence
  Synthetic
ucuuaauacgugaaugaaug

SEQ ID NO: 600043 - RNA, 21 nt, Artificial Sequence
  Synthetic
uucuuaauacgugaaugaaug

SEQ ID NO: 600044 - RNA, 22 nt, Artificial Sequence
  Synthetic
auucuuaauacgugaaugaaug

SEQ ID NO: 600045 - RNA, 23 nt, Artificial Sequence
  Synthetic
uauucuuaauacgugaaugaaug

SEQ ID NO: 600046 - RNA, 24 nt, Artificial Sequence
  Synthetic
cuauucuuaauacgugaaugaaug

SEQ ID NO: 600047 - RNA, 18 nt, Artificial Sequence
  Synthetic
uuucaauaucuaugaaug

SEQ ID NO: 600048 - RNA, 19 nt, Artificial Sequence
  Synthetic
uuuucaauaucuaugaaug

SEQ ID NO: 600049 - RNA, 20 nt, Artificial Sequence
  Synthetic
auuuucaauaucuaugaaug

SEQ ID NO: 600050 - RNA, 21 nt, Artificial Sequence
  Synthetic
uauuuucaauaucuaugaaug

SEQ ID NO: 600051 - RNA, 22 nt, Artificial Sequence
  Synthetic
auauuuucaauaucuaugaaug

SEQ ID NO: 600052 - RNA, 23 nt, Artificial Sequence
  Synthetic
aauauuuucaauaucuaugaaug

SEQ ID NO: 600053 - RNA, 24 nt, Artificial Sequence
  Synthetic
gaauauuuucaauaucuaugaaug

SEQ ID NO: 600054 - RNA, 18 nt, Artificial Sequence
  Synthetic
aagaguuuucuaugaaug

SEQ ID NO: 600055 - RNA, 19 nt, Artificial Sequence
  Synthetic
caagaguuuucuaugaaug

SEQ ID NO: 600056 - RNA, 20 nt, Artificial Sequence
  Synthetic
ccaagaguuuucuaugaaug

SEQ ID NO: 600057 - RNA, 21 nt, Artificial Sequence
  Synthetic
accaagaguuuucuaugaaug

SEQ ID NO: 600058 - RNA, 22 nt, Artificial Sequence
  Synthetic
caccaagaguuuucuaugaaug

SEQ ID NO: 600059 - RNA, 23 nt, Artificial Sequence
  Synthetic
acaccaagaguuuucuaugaaug

SEQ ID NO: 600060 - RNA, 24 nt, Artificial Sequence
  Synthetic
gacaccaagaguuuucuaugaaug

SEQ ID NO: 600061 - RNA, 18 nt, Artificial Sequence
  Synthetic
uguucaguuguaugaaug

SEQ ID NO: 600062 - RNA, 19 nt, Artificial Sequence
  Synthetic
cuguucaguuguaugaaug

SEQ ID NO: 600063 - RNA, 20 nt, Artificial Sequence
  Synthetic
ucuguucaguuguaugaaug

SEQ ID NO: 600064 - RNA, 21 nt, Artificial Sequence
  Synthetic
uucuguucaguuguaugaaug

SEQ ID NO: 600065 - RNA, 22 nt, Artificial Sequence
  Synthetic
auucuguucaguuguaugaaug

SEQ ID NO: 600066 - RNA, 23 nt, Artificial Sequence
  Synthetic
aauucuguucaguuguaugaaug

SEQ ID NO: 600067 - RNA, 24 nt, Artificial Sequence
  Synthetic
caauucuguucaguuguaugaaug

SEQ ID NO: 600068 - RNA, 18 nt, Artificial Sequence
  Synthetic
cuaaggauucccugaaug

SEQ ID NO: 600069 - RNA, 19 nt, Artificial Sequence
  Synthetic
gcuaaggauucccugaaug

SEQ ID NO: 600070 - RNA, 20 nt, Artificial Sequence
  Synthetic
agcuaaggauucccugaaug

SEQ ID NO: 600071 - RNA, 21 nt, Artificial Sequence
  Synthetic
cagcuaaggauucccugaaug

SEQ ID NO: 600072 - RNA, 22 nt, Artificial Sequence
  Synthetic
acagcuaaggauucccugaaug

SEQ ID NO: 600073 - RNA, 23 nt, Artificial Sequence
  Synthetic
aacagcuaaggauucccugaaug

SEQ ID NO: 600074 - RNA, 24 nt, Artificial Sequence
  Synthetic
gaacagcuaaggauucccugaaug

SEQ ID NO: 600075 - RNA, 18 nt, Artificial Sequence
  Synthetic
auaaccaacaucugaaug

SEQ ID NO: 600076 - RNA, 19 nt, Artificial Sequence
  Synthetic
uauaaccaacaucugaaug

SEQ ID NO: 600077 - RNA, 20 nt, Artificial Sequence
  Synthetic
auauaaccaacaucugaaug

SEQ ID NO: 600078 - RNA, 21 nt, Artificial Sequence
  Synthetic
uauauaaccaacaucugaaug

SEQ ID NO: 600079 - RNA, 22 nt, Artificial Sequence
  Synthetic
uuauauaaccaacaucugaaug

SEQ ID NO: 600080 - RNA, 23 nt, Artificial Sequence
  Synthetic
uuuauauaaccaacaucugaaug

SEQ ID NO: 600081 - RNA, 24 nt, Artificial Sequence
  Synthetic
uuuuauauaaccaacaucugaaug

SEQ ID NO: 600082 - RNA, 18 nt, Artificial Sequence
  Synthetic
gaugcagaauucugaaug

SEQ ID NO: 600083 - RNA, 19 nt, Artificial Sequence
  Synthetic
agaugcagaauucugaaug

SEQ ID NO: 600084 - RNA, 20 nt, Artificial Sequence
  Synthetic
aagaugcagaauucugaaug

SEQ ID NO: 600085 - RNA, 21 nt, Artificial Sequence
  Synthetic
uaagaugcagaauucugaaug

SEQ ID NO: 600086 - RNA, 22 nt, Artificial Sequence
  Synthetic
uuaagaugcagaauucugaaug

SEQ ID NO: 600087 - RNA, 23 nt, Artificial Sequence
  Synthetic
cuuaagaugcagaauucugaaug

SEQ ID NO: 600088 - RNA, 24 nt, Artificial Sequence
  Synthetic
ucuuaagaugcagaauucugaaug

SEQ ID NO: 600089 - RNA, 18 nt, Artificial Sequence
  Synthetic
aaagagcauuucugaaug

SEQ ID NO: 600090 - RNA, 19 nt, Artificial Sequence
  Synthetic
uaaagagcauuucugaaug

SEQ ID NO: 600091 - RNA, 20 nt, Artificial Sequence
  Synthetic
cuaaagagcauuucugaaug

SEQ ID NO: 600092 - RNA, 21 nt, Artificial Sequence
  Synthetic
gcuaaagagcauuucugaaug

SEQ ID NO: 600093 - RNA, 22 nt, Artificial Sequence
  Synthetic
ugcuaaagagcauuucugaaug

SEQ ID NO: 600094 - RNA, 23 nt, Artificial Sequence
  Synthetic
cugcuaaagagcauuucugaaug

SEQ ID NO: 600095 - RNA, 24 nt, Artificial Sequence
  Synthetic
ccugcuaaagagcauuucugaaug

SEQ ID NO: 600096 - RNA, 18 nt, Artificial Sequence
  Synthetic
uaauuaaauaggugaaug

SEQ ID NO: 600097 - RNA, 19 nt, Artificial Sequence
  Synthetic
uuaauuaaauaggugaaug

SEQ ID NO: 600098 - RNA, 20 nt, Artificial Sequence
  Synthetic
auuaauuaaauaggugaaug

SEQ ID NO: 600099 - RNA, 21 nt, Artificial Sequence
  Synthetic
uauuaauuaaauaggugaaug

SEQ ID NO: 600100 - RNA, 22 nt, Artificial Sequence
  Synthetic
uuauuaauuaaauaggugaaug

SEQ ID NO: 600101 - RNA, 23 nt, Artificial Sequence
  Synthetic
uuuauuaauuaaauaggugaaug

SEQ ID NO: 600102 - RNA, 24 nt, Artificial Sequence
  Synthetic
uuuuauuaauuaaauaggugaaug

SEQ ID NO: 600103 - RNA, 18 nt, Artificial Sequence
  Synthetic
aaacuuuagaugugaaug

SEQ ID NO: 600104 - RNA, 19 nt, Artificial Sequence
  Synthetic
aaaacuuuagaugugaaug

SEQ ID NO: 600105 - RNA, 20 nt, Artificial Sequence
  Synthetic
uaaaacuuuagaugugaaug

SEQ ID NO: 600106 - RNA, 21 nt, Artificial Sequence
  Synthetic
uuaaaacuuuagaugugaaug

SEQ ID NO: 600107 - RNA, 22 nt, Artificial Sequence
  Synthetic
cuuaaaacuuuagaugugaaug

SEQ ID NO: 600108 - RNA, 23 nt, Artificial Sequence
  Synthetic
ucuuaaaacuuuagaugugaaug

SEQ ID NO: 600109 - RNA, 24 nt, Artificial Sequence
  Synthetic
uucuuaaaacuuuagaugugaaug

SEQ ID NO: 600110 - RNA, 18 nt, Artificial Sequence
  Synthetic
acuugaugucauugaaug

SEQ ID NO: 600111 - RNA, 19 nt, Artificial Sequence
  Synthetic
aacuugaugucauugaaug

SEQ ID NO: 600112 - RNA, 20 nt, Artificial Sequence
  Synthetic
uaacuugaugucauugaaug

SEQ ID NO: 600113 - RNA, 21 nt, Artificial Sequence
  Synthetic
cuaacuugaugucauugaaug

SEQ ID NO: 600114 - RNA, 22 nt, Artificial Sequence
  Synthetic
acuaacuugaugucauugaaug

SEQ ID NO: 600115 - RNA, 23 nt, Artificial Sequence
  Synthetic
aacuaacuugaugucauugaaug

SEQ ID NO: 600116 - RNA, 24 nt, Artificial Sequence
  Synthetic
caacuaacuugaugucauugaaug

SEQ ID NO: 600117 - RNA, 18 nt, Artificial Sequence
  Synthetic
guguagauucauugaaug

SEQ ID NO: 600118 - RNA, 19 nt, Artificial Sequence
  Synthetic
aguguagauucauugaaug

SEQ ID NO: 600119 - RNA, 20 nt, Artificial Sequence
  Synthetic
uaguguagauucauugaaug

SEQ ID NO: 600120 - RNA, 21 nt, Artificial Sequence
  Synthetic
auaguguagauucauugaaug

SEQ ID NO: 600121 - RNA, 22 nt, Artificial Sequence
  Synthetic
cauaguguagauucauugaaug

SEQ ID NO: 600122 - RNA, 23 nt, Artificial Sequence
  Synthetic
acauaguguagauucauugaaug

SEQ ID NO: 600123 - RNA, 24 nt, Artificial Sequence
  Synthetic
cacauaguguagauucauugaaug

SEQ ID NO: 600124 - RNA, 18 nt, Artificial Sequence
  Synthetic
guuggagccccuugaaug

SEQ ID NO: 600125 - RNA, 19 nt, Artificial Sequence
  Synthetic
gguuggagccccuugaaug

SEQ ID NO: 600126 - RNA, 20 nt, Artificial Sequence
  Synthetic
ugguuggagccccuugaaug

SEQ ID NO: 600127 - RNA, 21 nt, Artificial Sequence
  Synthetic
augguuggagccccuugaaug

SEQ ID NO: 600128 - RNA, 22 nt, Artificial Sequence
  Synthetic
aaugguuggagccccuugaaug

SEQ ID NO: 600129 - RNA, 23 nt, Artificial Sequence
  Synthetic
gaaugguuggagccccuugaaug

SEQ ID NO: 600130 - RNA, 24 nt, Artificial Sequence
  Synthetic
agaaugguuggagccccuugaaug

SEQ ID NO: 600131 - RNA, 18 nt, Artificial Sequence
  Synthetic
aauaucacaaaaauaaug

SEQ ID NO: 600132 - RNA, 19 nt, Artificial Sequence
  Synthetic
uaauaucacaaaaauaaug

SEQ ID NO: 600133 - RNA, 20 nt, Artificial Sequence
  Synthetic
auaauaucacaaaaauaaug

SEQ ID NO: 600134 - RNA, 21 nt, Artificial Sequence
  Synthetic
aauaauaucacaaaaauaaug

SEQ ID NO: 600135 - RNA, 22 nt, Artificial Sequence
  Synthetic
gaauaauaucacaaaaauaaug

SEQ ID NO: 600136 - RNA, 23 nt, Artificial Sequence
  Synthetic
agaauaauaucacaaaaauaaug

SEQ ID NO: 600137 - RNA, 24 nt, Artificial Sequence
  Synthetic
uagaauaauaucacaaaaauaaug

SEQ ID NO: 600138 - RNA, 18 nt, Artificial Sequence
  Synthetic
cauaaaaauuaaauaaug

SEQ ID NO: 600139 - RNA, 19 nt, Artificial Sequence
  Synthetic
acauaaaaauuaaauaaug

SEQ ID NO: 600140 - RNA, 20 nt, Artificial Sequence
  Synthetic
aacauaaaaauuaaauaaug

SEQ ID NO: 600141 - RNA, 21 nt, Artificial Sequence
  Synthetic
uaacauaaaaauuaaauaaug

SEQ ID NO: 600142 - RNA, 22 nt, Artificial Sequence
  Synthetic
guaacauaaaaauuaaauaaug

SEQ ID NO: 600143 - RNA, 23 nt, Artificial Sequence
  Synthetic
aguaacauaaaaauuaaauaaug

SEQ ID NO: 600144 - RNA, 24 nt, Artificial Sequence
  Synthetic
uaguaacauaaaaauuaaauaaug

SEQ ID NO: 600145 - RNA, 18 nt, Artificial Sequence
  Synthetic
acaaacuuuuaaauaaug

SEQ ID NO: 600146 - RNA, 19 nt, Artificial Sequence
  Synthetic
uacaaacuuuuaaauaaug

SEQ ID NO: 600147 - RNA, 20 nt, Artificial Sequence
  Synthetic
uuacaaacuuuuaaauaaug

SEQ ID NO: 600148 - RNA, 21 nt, Artificial Sequence
  Synthetic
uuuacaaacuuuuaaauaaug

SEQ ID NO: 600149 - RNA, 22 nt, Artificial Sequence
  Synthetic
uuuuacaaacuuuuaaauaaug

SEQ ID NO: 600150 - RNA, 23 nt, Artificial Sequence
  Synthetic
uuuuuacaaacuuuuaaauaaug

SEQ ID NO: 600151 - RNA, 24 nt, Artificial Sequence
  Synthetic
uuuuuuacaaacuuuuaaauaaug

SEQ ID NO: 600152 - RNA, 18 nt, Artificial Sequence
  Synthetic
cuuauuagccacauaaug

SEQ ID NO: 600153 - RNA, 19 nt, Artificial Sequence
  Synthetic
ccuuauuagccacauaaug

SEQ ID NO: 600154 - RNA, 20 nt, Artificial Sequence
  Synthetic
cccuuauuagccacauaaug

SEQ ID NO: 600155 - RNA, 21 nt, Artificial Sequence
  Synthetic
ucccuuauuagccacauaaug

SEQ ID NO: 600156 - RNA, 22 nt, Artificial Sequence
  Synthetic
uucccuuauuagccacauaaug

SEQ ID NO: 600157 - RNA, 23 nt, Artificial Sequence
  Synthetic
uuucccuuauuagccacauaaug

SEQ ID NO: 600158 - RNA, 24 nt, Artificial Sequence
  Synthetic
cuuucccuuauuagccacauaaug

SEQ ID NO: 600159 - RNA, 18 nt, Artificial Sequence
  Synthetic
aucauaauuagcauaaug

SEQ ID NO: 600160 - RNA, 19 nt, Artificial Sequence
  Synthetic
uaucauaauuagcauaaug

SEQ ID NO: 600161 - RNA, 20 nt, Artificial Sequence
  Synthetic
auaucauaauuagcauaaug

SEQ ID NO: 600162 - RNA, 21 nt, Artificial Sequence
  Synthetic
aauaucauaauuagcauaaug

SEQ ID NO: 600163 - RNA, 22 nt, Artificial Sequence
  Synthetic
uaauaucauaauuagcauaaug

SEQ ID NO: 600164 - RNA, 23 nt, Artificial Sequence
  Synthetic
uuaauaucauaauuagcauaaug

SEQ ID NO: 600165 - RNA, 24 nt, Artificial Sequence
  Synthetic
auuaauaucauaauuagcauaaug

SEQ ID NO: 600166 - RNA, 18 nt, Artificial Sequence
  Synthetic
uuucacgagaagauaaug

SEQ ID NO: 600167 - RNA, 19 nt, Artificial Sequence
  Synthetic
uuuucacgagaagauaaug

SEQ ID NO: 600168 - RNA, 20 nt, Artificial Sequence
  Synthetic
auuuucacgagaagauaaug

SEQ ID NO: 600169 - RNA, 21 nt, Artificial Sequence
  Synthetic
uauuuucacgagaagauaaug

SEQ ID NO: 600170 - RNA, 22 nt, Artificial Sequence
  Synthetic
cuauuuucacgagaagauaaug

SEQ ID NO: 600171 - RNA, 23 nt, Artificial Sequence
  Synthetic
gcuauuuucacgagaagauaaug

SEQ ID NO: 600172 - RNA, 24 nt, Artificial Sequence
  Synthetic
agcuauuuucacgagaagauaaug

SEQ ID NO: 600173 - RNA, 18 nt, Artificial Sequence
  Synthetic
uucuccuucaggauaaug

SEQ ID NO: 600174 - RNA, 19 nt, Artificial Sequence
  Synthetic
cuucuccuucaggauaaug

SEQ ID NO: 600175 - RNA, 20 nt, Artificial Sequence
  Synthetic
ucuucuccuucaggauaaug

SEQ ID NO: 600176 - RNA, 21 nt, Artificial Sequence
  Synthetic
aucuucuccuucaggauaaug

SEQ ID NO: 600177 - RNA, 22 nt, Artificial Sequence
  Synthetic
caucuucuccuucaggauaaug

SEQ ID NO: 600178 - RNA, 23 nt, Artificial Sequence
  Synthetic
ucaucuucuccuucaggauaaug

SEQ ID NO: 600179 - RNA, 24 nt, Artificial Sequence
  Synthetic
uucaucuucuccuucaggauaaug

SEQ ID NO: 600180 - RNA, 18 nt, Artificial Sequence
  Synthetic
uaaauacaguggauaaug

SEQ ID NO: 600181 - RNA, 19 nt, Artificial Sequence
  Synthetic
uuaaauacaguggauaaug

SEQ ID NO: 600182 - RNA, 20 nt, Artificial Sequence
  Synthetic
cuuaaauacaguggauaaug

SEQ ID NO: 600183 - RNA, 21 nt, Artificial Sequence
  Synthetic
ccuuaaauacaguggauaaug

SEQ ID NO: 600184 - RNA, 22 nt, Artificial Sequence
  Synthetic
accuuaaauacaguggauaaug

SEQ ID NO: 600185 - RNA, 23 nt, Artificial Sequence
  Synthetic
aaccuuaaauacaguggauaaug

SEQ ID NO: 600186 - RNA, 24 nt, Artificial Sequence
  Synthetic
aaaccuuaaauacaguggauaaug

SEQ ID NO: 600187 - RNA, 18 nt, Artificial Sequence
  Synthetic
guauggucaaauauaaug

SEQ ID NO: 600188 - RNA, 19 nt, Artificial Sequence
  Synthetic
uguauggucaaauauaaug

SEQ ID NO: 600189 - RNA, 20 nt, Artificial Sequence
  Synthetic
cuguauggucaaauauaaug

SEQ ID NO: 600190 - RNA, 21 nt, Artificial Sequence
  Synthetic
gcuguauggucaaauauaaug

SEQ ID NO: 600191 - RNA, 22 nt, Artificial Sequence
  Synthetic
agcuguauggucaaauauaaug

SEQ ID NO: 600192 - RNA, 23 nt, Artificial Sequence
  Synthetic
uagcuguauggucaaauauaaug

SEQ ID NO: 600193 - RNA, 24 nt, Artificial Sequence
  Synthetic
uuagcuguauggucaaauauaaug

SEQ ID NO: 600194 - RNA, 18 nt, Artificial Sequence
  Synthetic
agagguugaaauauaaug

SEQ ID NO: 600195 - RNA, 19 nt, Artificial Sequence
  Synthetic
gagagguugaaauauaaug

SEQ ID NO: 600196 - RNA, 20 nt, Artificial Sequence
  Synthetic
ggagagguugaaauauaaug

SEQ ID NO: 600197 - RNA, 21 nt, Artificial Sequence
  Synthetic
uggagagguugaaauauaaug

SEQ ID NO: 600198 - RNA, 22 nt, Artificial Sequence
  Synthetic
uuggagagguugaaauauaaug

SEQ ID NO: 600199 - RNA, 23 nt, Artificial Sequence
  Synthetic
uuuggagagguugaaauauaaug

SEQ ID NO: 600200 - RNA, 24 nt, Artificial Sequence
  Synthetic
auuuggagagguugaaauauaaug

SEQ ID NO: 600201 - RNA, 18 nt, Artificial Sequence
  Synthetic
guugcaugacauauaaug

SEQ ID NO: 600202 - RNA, 19 nt, Artificial Sequence
  Synthetic
aguugcaugacauauaaug

SEQ ID NO: 600203 - RNA, 20 nt, Artificial Sequence
  Synthetic
caguugcaugacauauaaug

SEQ ID NO: 600204 - RNA, 21 nt, Artificial Sequence
  Synthetic
acaguugcaugacauauaaug

SEQ ID NO: 600205 - RNA, 22 nt, Artificial Sequence
  Synthetic
uacaguugcaugacauauaaug

SEQ ID NO: 600206 - RNA, 23 nt, Artificial Sequence
  Synthetic
cuacaguugcaugacauauaaug

SEQ ID NO: 600207 - RNA, 24 nt, Artificial Sequence
  Synthetic
acuacaguugcaugacauauaaug

SEQ ID NO: 600208 - RNA, 18 nt, Artificial Sequence
  Synthetic
gauaugagaacuauaaug

SEQ ID NO: 600209 - RNA, 19 nt, Artificial Sequence
  Synthetic
agauaugagaacuauaaug

SEQ ID NO: 600210 - RNA, 20 nt, Artificial Sequence
  Synthetic
cagauaugagaacuauaaug

SEQ ID NO: 600211 - RNA, 21 nt, Artificial Sequence
  Synthetic
gcagauaugagaacuauaaug

SEQ ID NO: 600212 - RNA, 22 nt, Artificial Sequence
  Synthetic
cgcagauaugagaacuauaaug

SEQ ID NO: 600213 - RNA, 23 nt, Artificial Sequence
  Synthetic
acgcagauaugagaacuauaaug

SEQ ID NO: 600214 - RNA, 24 nt, Artificial Sequence
  Synthetic
uacgcagauaugagaacuauaaug

SEQ ID NO: 600215 - RNA, 18 nt, Artificial Sequence
  Synthetic
aagacaauuuuuauaaug

SEQ ID NO: 600216 - RNA, 19 nt, Artificial Sequence
  Synthetic
gaagacaauuuuuauaaug

SEQ ID NO: 600217 - RNA, 20 nt, Artificial Sequence
  Synthetic
agaagacaauuuuuauaaug

SEQ ID NO: 600218 - RNA, 21 nt, Artificial Sequence
  Synthetic
cagaagacaauuuuuauaaug

SEQ ID NO: 600219 - RNA, 22 nt, Artificial Sequence
  Synthetic
ucagaagacaauuuuuauaaug

SEQ ID NO: 600220 - RNA, 23 nt, Artificial Sequence
  Synthetic
aucagaagacaauuuuuauaaug

SEQ ID NO: 600221 - RNA, 24 nt, Artificial Sequence
  Synthetic
caucagaagacaauuuuuauaaug

SEQ ID NO: 600222 - RNA, 18 nt, Artificial Sequence
  Synthetic
uaguggauuuuuauaaug

SEQ ID NO: 600223 - RNA, 19 nt, Artificial Sequence
  Synthetic
uuaguggauuuuuauaaug

SEQ ID NO: 600224 - RNA, 20 nt, Artificial Sequence
  Synthetic
uuuaguggauuuuuauaaug

SEQ ID NO: 600225 - RNA, 21 nt, Artificial Sequence
  Synthetic
uuuuaguggauuuuuauaaug

SEQ ID NO: 600226 - RNA, 22 nt, Artificial Sequence
  Synthetic
cuuuuaguggauuuuuauaaug

SEQ ID NO: 600227 - RNA, 23 nt, Artificial Sequence
  Synthetic
acuuuuaguggauuuuuauaaug

SEQ ID NO: 600228 - RNA, 24 nt, Artificial Sequence
  Synthetic
cacuuuuaguggauuuuuauaaug

SEQ ID NO: 600229 - RNA, 18 nt, Artificial Sequence
  Synthetic
guccuuagcaaacuaaug

SEQ ID NO: 600230 - RNA, 19 nt, Artificial Sequence
  Synthetic
uguccuuagcaaacuaaug

SEQ ID NO: 600231 - RNA, 20 nt, Artificial Sequence
  Synthetic
uuguccuuagcaaacuaaug

SEQ ID NO: 600232 - RNA, 21 nt, Artificial Sequence
  Synthetic
auuguccuuagcaaacuaaug

SEQ ID NO: 600233 - RNA, 22 nt, Artificial Sequence
  Synthetic
cauuguccuuagcaaacuaaug

SEQ ID NO: 600234 - RNA, 23 nt, Artificial Sequence
  Synthetic
ccauuguccuuagcaaacuaaug

SEQ ID NO: 600235 - RNA, 24 nt, Artificial Sequence
  Synthetic
gccauuguccuuagcaaacuaaug

SEQ ID NO: 600236 - RNA, 18 nt, Artificial Sequence
  Synthetic
ucuugagccagacuaaug

SEQ ID NO: 600237 - RNA, 19 nt, Artificial Sequence
  Synthetic
aucuugagccagacuaaug

SEQ ID NO: 600238 - RNA, 20 nt, Artificial Sequence
  Synthetic
aaucuugagccagacuaaug

SEQ ID NO: 600239 - RNA, 21 nt, Artificial Sequence
  Synthetic
aaaucuugagccagacuaaug

SEQ ID NO: 600240 - RNA, 22 nt, Artificial Sequence
  Synthetic
caaaucuugagccagacuaaug

SEQ ID NO: 600241 - RNA, 23 nt, Artificial Sequence
  Synthetic
acaaaucuugagccagacuaaug

SEQ ID NO: 600242 - RNA, 24 nt, Artificial Sequence
  Synthetic
gacaaaucuugagccagacuaaug

SEQ ID NO: 600243 - RNA, 18 nt, Artificial Sequence
  Synthetic
aucuuuuccuaccuaaug

SEQ ID NO: 600244 - RNA, 19 nt, Artificial Sequence
  Synthetic
caucuuuuccuaccuaaug

SEQ ID NO: 600245 - RNA, 20 nt, Artificial Sequence
  Synthetic
acaucuuuuccuaccuaaug

SEQ ID NO: 600246 - RNA, 21 nt, Artificial Sequence
  Synthetic
cacaucuuuuccuaccuaaug

SEQ ID NO: 600247 - RNA, 22 nt, Artificial Sequence
  Synthetic
ccacaucuuuuccuaccuaaug

SEQ ID NO: 600248 - RNA, 23 nt, Artificial Sequence
  Synthetic
uccacaucuuuuccuaccuaaug

SEQ ID NO: 600249 - RNA, 24 nt, Artificial Sequence
  Synthetic
cuccacaucuuuuccuaccuaaug

SEQ ID NO: 600250 - RNA, 18 nt, Artificial Sequence
  Synthetic
cuuuguuuuagccuaaug

SEQ ID NO: 600251 - RNA, 19 nt, Artificial Sequence
  Synthetic
ccuuuguuuuagccuaaug

SEQ ID NO: 600252 - RNA, 20 nt, Artificial Sequence
  Synthetic
accuuuguuuuagccuaaug

SEQ ID NO: 600253 - RNA, 21 nt, Artificial Sequence
  Synthetic
caccuuuguuuuagccuaaug

SEQ ID NO: 600254 - RNA, 22 nt, Artificial Sequence
  Synthetic
acaccuuuguuuuagccuaaug

SEQ ID NO: 600255 - RNA, 23 nt, Artificial Sequence
  Synthetic
aacaccuuuguuuuagccuaaug

SEQ ID NO: 600256 - RNA, 24 nt, Artificial Sequence
  Synthetic
aaacaccuuuguuuuagccuaaug

SEQ ID NO: 600257 - RNA, 18 nt, Artificial Sequence
  Synthetic
guacuucaguagcuaaug

SEQ ID NO: 600258 - RNA, 19 nt, Artificial Sequence
  Synthetic
uguacuucaguagcuaaug

SEQ ID NO: 600259 - RNA, 20 nt, Artificial Sequence
  Synthetic
cuguacuucaguagcuaaug

SEQ ID NO: 600260 - RNA, 21 nt, Artificial Sequence
  Synthetic
ccuguacuucaguagcuaaug

SEQ ID NO: 600261 - RNA, 22 nt, Artificial Sequence
  Synthetic
gccuguacuucaguagcuaaug

SEQ ID NO: 600262 - RNA, 23 nt, Artificial Sequence
  Synthetic
ugccuguacuucaguagcuaaug

SEQ ID NO: 600263 - RNA, 24 nt, Artificial Sequence
  Synthetic
cugccuguacuucaguagcuaaug

SEQ ID NO: 600264 - RNA, 18 nt, Artificial Sequence
  Synthetic
uuacuauaaucucuaaug

SEQ ID NO: 600265 - RNA, 19 nt, Artificial Sequence
  Synthetic
guuacuauaaucucuaaug

SEQ ID NO: 600266 - RNA, 20 nt, Artificial Sequence
  Synthetic
gguuacuauaaucucuaaug

SEQ ID NO: 600267 - RNA, 21 nt, Artificial Sequence
  Synthetic
ggguuacuauaaucucuaaug

SEQ ID NO: 600268 - RNA, 22 nt, Artificial Sequence
  Synthetic
gggguuacuauaaucucuaaug

SEQ ID NO: 600269 - RNA, 23 nt, Artificial Sequence
  Synthetic
agggguuacuauaaucucuaaug

SEQ ID NO: 600270 - RNA, 24 nt, Artificial Sequence
  Synthetic
gagggguuacuauaaucucuaaug

SEQ ID NO: 600271 - RNA, 18 nt, Artificial Sequence
  Synthetic
uuucagaucauucuaaug

SEQ ID NO: 600272 - RNA, 19 nt, Artificial Sequence
  Synthetic
uuuucagaucauucuaaug

SEQ ID NO: 600273 - RNA, 20 nt, Artificial Sequence
  Synthetic
uuuuucagaucauucuaaug

SEQ ID NO: 600274 - RNA, 21 nt, Artificial Sequence
  Synthetic
auuuuucagaucauucuaaug

SEQ ID NO: 600275 - RNA, 22 nt, Artificial Sequence
  Synthetic
cauuuuucagaucauucuaaug

SEQ ID NO: 600276 - RNA, 23 nt, Artificial Sequence
  Synthetic
acauuuuucagaucauucuaaug

SEQ ID NO: 600277 - RNA, 24 nt, Artificial Sequence
  Synthetic
aacauuuuucagaucauucuaaug

SEQ ID NO: 600278 - RNA, 18 nt, Artificial Sequence
  Synthetic
ucaccuuuuguucuaaug

SEQ ID NO: 600279 - RNA, 19 nt, Artificial Sequence
  Synthetic
gucaccuuuuguucuaaug

SEQ ID NO: 600280 - RNA, 20 nt, Artificial Sequence
  Synthetic
ugucaccuuuuguucuaaug

SEQ ID NO: 600281 - RNA, 21 nt, Artificial Sequence
  Synthetic
uugucaccuuuuguucuaaug

SEQ ID NO: 600282 - RNA, 22 nt, Artificial Sequence
  Synthetic
uuugucaccuuuuguucuaaug

SEQ ID NO: 600283 - RNA, 23 nt, Artificial Sequence
  Synthetic
auuugucaccuuuuguucuaaug

SEQ ID NO: 600284 - RNA, 24 nt, Artificial Sequence
  Synthetic
gauuugucaccuuuuguucuaaug

SEQ ID NO: 600285 - RNA, 18 nt, Artificial Sequence
  Synthetic
aauugaaucuuucuaaug

SEQ ID NO: 600286 - RNA, 19 nt, Artificial Sequence
  Synthetic
aaauugaaucuuucuaaug

SEQ ID NO: 600287 - RNA, 20 nt, Artificial Sequence
  Synthetic
uaaauugaaucuuucuaaug

SEQ ID NO: 600288 - RNA, 21 nt, Artificial Sequence
  Synthetic
uuaaauugaaucuuucuaaug

SEQ ID NO: 600289 - RNA, 22 nt, Artificial Sequence
  Synthetic
guuaaauugaaucuuucuaaug

SEQ ID NO: 600290 - RNA, 23 nt, Artificial Sequence
  Synthetic
uguuaaauugaaucuuucuaaug

SEQ ID NO: 600291 - RNA, 24 nt, Artificial Sequence
  Synthetic
guguuaaauugaaucuuucuaaug

SEQ ID NO: 600292 - RNA, 18 nt, Artificial Sequence
  Synthetic
acauauuugaaaguaaug

SEQ ID NO: 600293 - RNA, 19 nt, Artificial Sequence
  Synthetic
aacauauuugaaaguaaug

SEQ ID NO: 600294 - RNA, 20 nt, Artificial Sequence
  Synthetic
aaacauauuugaaaguaaug

SEQ ID NO: 600295 - RNA, 21 nt, Artificial Sequence
  Synthetic
aaaacauauuugaaaguaaug

SEQ ID NO: 600296 - RNA, 22 nt, Artificial Sequence
  Synthetic
caaaacauauuugaaaguaaug

SEQ ID NO: 600297 - RNA, 23 nt, Artificial Sequence
  Synthetic
ucaaaacauauuugaaaguaaug

SEQ ID NO: 600298 - RNA, 24 nt, Artificial Sequence
  Synthetic
uucaaaacauauuugaaaguaaug

SEQ ID NO: 600299 - RNA, 18 nt, Artificial Sequence
  Synthetic
cuagugaggcaaguaaug

SEQ ID NO: 600300 - RNA, 19 nt, Artificial Sequence
  Synthetic
ucuagugaggcaaguaaug

SEQ ID NO: 600301 - RNA, 20 nt, Artificial Sequence
  Synthetic
gucuagugaggcaaguaaug

SEQ ID NO: 600302 - RNA, 21 nt, Artificial Sequence
  Synthetic
agucuagugaggcaaguaaug

SEQ ID NO: 600303 - RNA, 22 nt, Artificial Sequence
  Synthetic
cagucuagugaggcaaguaaug

SEQ ID NO: 600304 - RNA, 23 nt, Artificial Sequence
  Synthetic
ucagucuagugaggcaaguaaug

SEQ ID NO: 600305 - RNA, 24 nt, Artificial Sequence
  Synthetic
gucagucuagugaggcaaguaaug

SEQ ID NO: 600306 - RNA, 18 nt, Artificial Sequence
  Synthetic
ggaagaagcuggguaaug

SEQ ID NO: 600307 - RNA, 19 nt, Artificial Sequence
  Synthetic
uggaagaagcuggguaaug

SEQ ID NO: 600308 - RNA, 20 nt, Artificial Sequence
  Synthetic
uuggaagaagcuggguaaug

SEQ ID NO: 600309 - RNA, 21 nt, Artificial Sequence
  Synthetic
auuggaagaagcuggguaaug

SEQ ID NO: 600310 - RNA, 22 nt, Artificial Sequence
  Synthetic
aauuggaagaagcuggguaaug

SEQ ID NO: 600311 - RNA, 23 nt, Artificial Sequence
  Synthetic
gaauuggaagaagcuggguaaug

SEQ ID NO: 600312 - RNA, 24 nt, Artificial Sequence
  Synthetic
ggaauuggaagaagcuggguaaug

SEQ ID NO: 600313 - RNA, 18 nt, Artificial Sequence
  Synthetic
auguguuacaugguaaug

SEQ ID NO: 600314 - RNA, 19 nt, Artificial Sequence
  Synthetic
gauguguuacaugguaaug

SEQ ID NO: 600315 - RNA, 20 nt, Artificial Sequence
  Synthetic
agauguguuacaugguaaug

SEQ ID NO: 600316 - RNA, 21 nt, Artificial Sequence
  Synthetic
cagauguguuacaugguaaug

SEQ ID NO: 600317 - RNA, 22 nt, Artificial Sequence
  Synthetic
ucagauguguuacaugguaaug

SEQ ID NO: 600318 - RNA, 23 nt, Artificial Sequence
  Synthetic
uucagauguguuacaugguaaug

SEQ ID NO: 600319 - RNA, 24 nt, Artificial Sequence
  Synthetic
auucagauguguuacaugguaaug

SEQ ID NO: 600320 - RNA, 18 nt, Artificial Sequence
  Synthetic
agugagagauugguaaug

SEQ ID NO: 600321 - RNA, 19 nt, Artificial Sequence
  Synthetic
uagugagagauugguaaug

SEQ ID NO: 600322 - RNA, 20 nt, Artificial Sequence
  Synthetic
auagugagagauugguaaug

SEQ ID NO: 600323 - RNA, 21 nt, Artificial Sequence
  Synthetic
uauagugagagauugguaaug

SEQ ID NO: 600324 - RNA, 22 nt, Artificial Sequence
  Synthetic
guauagugagagauugguaaug

SEQ ID NO: 600325 - RNA, 23 nt, Artificial Sequence
  Synthetic
gguauagugagagauugguaaug

SEQ ID NO: 600326 - RNA, 24 nt, Artificial Sequence
  Synthetic
cgguauagugagagauugguaaug

SEQ ID NO: 600327 - RNA, 18 nt, Artificial Sequence
  Synthetic
uaucccagagguguaaug

SEQ ID NO: 600328 - RNA, 19 nt, Artificial Sequence
  Synthetic
guaucccagagguguaaug

SEQ ID NO: 600329 - RNA, 20 nt, Artificial Sequence
  Synthetic
gguaucccagagguguaaug

SEQ ID NO: 600330 - RNA, 21 nt, Artificial Sequence
  Synthetic
agguaucccagagguguaaug

SEQ ID NO: 600331 - RNA, 22 nt, Artificial Sequence
  Synthetic
uagguaucccagagguguaaug

SEQ ID NO: 600332 - RNA, 23 nt, Artificial Sequence
  Synthetic
cuagguaucccagagguguaaug

SEQ ID NO: 600333 - RNA, 24 nt, Artificial Sequence
  Synthetic
acuagguaucccagagguguaaug

SEQ ID NO: 600334 - RNA, 18 nt, Artificial Sequence
  Synthetic
uauuaagaccuuguaaug

SEQ ID NO: 600335 - RNA, 19 nt, Artificial Sequence
  Synthetic
uuauuaagaccuuguaaug

SEQ ID NO: 600336 - RNA, 20 nt, Artificial Sequence
  Synthetic
uuuauuaagaccuuguaaug

SEQ ID NO: 600337 - RNA, 21 nt, Artificial Sequence
  Synthetic
auuuauuaagaccuuguaaug

SEQ ID NO: 600338 - RNA, 22 nt, Artificial Sequence
  Synthetic
aauuuauuaagaccuuguaaug

SEQ ID NO: 600339 - RNA, 23 nt, Artificial Sequence
  Synthetic
caauuuauuaagaccuuguaaug

SEQ ID NO: 600340 - RNA, 24 nt, Artificial Sequence
  Synthetic
gcaauuuauuaagaccuuguaaug

SEQ ID NO: 600341 - RNA, 18 nt, Artificial Sequence
  Synthetic
uugcaaugaaaauuaaug

SEQ ID NO: 600342 - RNA, 19 nt, Artificial Sequence
  Synthetic
uuugcaaugaaaauuaaug

SEQ ID NO: 600343 - RNA, 20 nt, Artificial Sequence
  Synthetic
cuuugcaaugaaaauuaaug

SEQ ID NO: 600344 - RNA, 21 nt, Artificial Sequence
  Synthetic
ccuuugcaaugaaaauuaaug

SEQ ID NO: 600345 - RNA, 22 nt, Artificial Sequence
  Synthetic
gccuuugcaaugaaaauuaaug

SEQ ID NO: 600346 - RNA, 23 nt, Artificial Sequence
  Synthetic
ggccuuugcaaugaaaauuaaug

SEQ ID NO: 600347 - RNA, 24 nt, Artificial Sequence
  Synthetic
aggccuuugcaaugaaaauuaaug

SEQ ID NO: 600348 - RNA, 18 nt, Artificial Sequence
  Synthetic
aaacuguaagaauuaaug

SEQ ID NO: 600349 - RNA, 19 nt, Artificial Sequence
  Synthetic
aaaacuguaagaauuaaug

SEQ ID NO: 600350 - RNA, 20 nt, Artificial Sequence
  Synthetic
aaaaacuguaagaauuaaug

SEQ ID NO: 600351 - RNA, 21 nt, Artificial Sequence
  Synthetic
uaaaaacuguaagaauuaaug

SEQ ID NO: 600352 - RNA, 22 nt, Artificial Sequence
  Synthetic
uuaaaaacuguaagaauuaaug

SEQ ID NO: 600353 - RNA, 23 nt, Artificial Sequence
  Synthetic
uuuaaaaacuguaagaauuaaug

SEQ ID NO: 600354 - RNA, 24 nt, Artificial Sequence
  Synthetic
uuuuaaaaacuguaagaauuaaug

SEQ ID NO: 600355 - RNA, 18 nt, Artificial Sequence
  Synthetic
ugauugccugaauuaaug

SEQ ID NO: 600356 - RNA, 19 nt, Artificial Sequence
  Synthetic
augauugccugaauuaaug

SEQ ID NO: 600357 - RNA, 20 nt, Artificial Sequence
  Synthetic
gaugauugccugaauuaaug

SEQ ID NO: 600358 - RNA, 21 nt, Artificial Sequence
  Synthetic
ugaugauugccugaauuaaug

SEQ ID NO: 600359 - RNA, 22 nt, Artificial Sequence
  Synthetic
gugaugauugccugaauuaaug

SEQ ID NO: 600360 - RNA, 23 nt, Artificial Sequence
  Synthetic
ugugaugauugccugaauuaaug

SEQ ID NO: 600361 - RNA, 24 nt, Artificial Sequence
  Synthetic
uugugaugauugccugaauuaaug

SEQ ID NO: 600362 - RNA, 18 nt, Artificial Sequence
  Synthetic
auucuaagugaauuaaug

SEQ ID NO: 600363 - RNA, 19 nt, Artificial Sequence
  Synthetic
uauucuaagugaauuaaug

SEQ ID NO: 600364 - RNA, 20 nt, Artificial Sequence
  Synthetic
uuauucuaagugaauuaaug

SEQ ID NO: 600365 - RNA, 21 nt, Artificial Sequence
  Synthetic
auuauucuaagugaauuaaug

SEQ ID NO: 600366 - RNA, 22 nt, Artificial Sequence
  Synthetic
cauuauucuaagugaauuaaug

SEQ ID NO: 600367 - RNA, 23 nt, Artificial Sequence
  Synthetic
ccauuauucuaagugaauuaaug

SEQ ID NO: 600368 - RNA, 24 nt, Artificial Sequence
  Synthetic
gccauuauucuaagugaauuaaug

SEQ ID NO: 600369 - RNA, 18 nt, Artificial Sequence
  Synthetic
ccuaggugcccauuaaug

SEQ ID NO: 600370 - RNA, 19 nt, Artificial Sequence
  Synthetic
accuaggugcccauuaaug

SEQ ID NO: 600371 - RNA, 20 nt, Artificial Sequence
  Synthetic
aaccuaggugcccauuaaug

SEQ ID NO: 600372 - RNA, 21 nt, Artificial Sequence
  Synthetic
caaccuaggugcccauuaaug

SEQ ID NO: 600373 - RNA, 22 nt, Artificial Sequence
  Synthetic
ucaaccuaggugcccauuaaug

SEQ ID NO: 600374 - RNA, 23 nt, Artificial Sequence
  Synthetic
aucaaccuaggugcccauuaaug

SEQ ID NO: 600375 - RNA, 24 nt, Artificial Sequence
  Synthetic
aaucaaccuaggugcccauuaaug

SEQ ID NO: 600376 - RNA, 18 nt, Artificial Sequence
  Synthetic
uaacacaaaagauuaaug

SEQ ID NO: 600377 - RNA, 19 nt, Artificial Sequence
  Synthetic
guaacacaaaagauuaaug

SEQ ID NO: 600378 - RNA, 20 nt, Artificial Sequence
  Synthetic
uguaacacaaaagauuaaug

SEQ ID NO: 600379 - RNA, 21 nt, Artificial Sequence
  Synthetic
uuguaacacaaaagauuaaug

SEQ ID NO: 600380 - RNA, 22 nt, Artificial Sequence
  Synthetic
uuuguaacacaaaagauuaaug

SEQ ID NO: 600381 - RNA, 23 nt, Artificial Sequence
  Synthetic
guuuguaacacaaaagauuaaug

SEQ ID NO: 600382 - RNA, 24 nt, Artificial Sequence
  Synthetic
uguuuguaacacaaaagauuaaug

SEQ ID NO: 600383 - RNA, 18 nt, Artificial Sequence
  Synthetic
uccaaugacugauuaaug

SEQ ID NO: 600384 - RNA, 19 nt, Artificial Sequence
  Synthetic
auccaaugacugauuaaug

SEQ ID NO: 600385 - RNA, 20 nt, Artificial Sequence
  Synthetic
cauccaaugacugauuaaug

SEQ ID NO: 600386 - RNA, 21 nt, Artificial Sequence
  Synthetic
ucauccaaugacugauuaaug

SEQ ID NO: 600387 - RNA, 22 nt, Artificial Sequence
  Synthetic
aucauccaaugacugauuaaug

SEQ ID NO: 600388 - RNA, 23 nt, Artificial Sequence
  Synthetic
uaucauccaaugacugauuaaug

SEQ ID NO: 600389 - RNA, 24 nt, Artificial Sequence
  Synthetic
cuaucauccaaugacugauuaaug

SEQ ID NO: 600390 - RNA, 18 nt, Artificial Sequence
  Synthetic
uaaacaacacacuuaaug

SEQ ID NO: 600391 - RNA, 19 nt, Artificial Sequence
  Synthetic
uuaaacaacacacuuaaug

SEQ ID NO: 600392 - RNA, 20 nt, Artificial Sequence
  Synthetic
guuaaacaacacacuuaaug

SEQ ID NO: 600393 - RNA, 21 nt, Artificial Sequence
  Synthetic
aguuaaacaacacacuuaaug

SEQ ID NO: 600394 - RNA, 22 nt, Artificial Sequence
  Synthetic
caguuaaacaacacacuuaaug

SEQ ID NO: 600395 - RNA, 23 nt, Artificial Sequence
  Synthetic
gcaguuaaacaacacacuuaaug

SEQ ID NO: 600396 - RNA, 24 nt, Artificial Sequence
  Synthetic
agcaguuaaacaacacacuuaaug

SEQ ID NO: 600397 - RNA, 18 nt, Artificial Sequence
  Synthetic
auaggaaauugcuuaaug

SEQ ID NO: 600398 - RNA, 19 nt, Artificial Sequence
  Synthetic
gauaggaaauugcuuaaug

SEQ ID NO: 600399 - RNA, 20 nt, Artificial Sequence
  Synthetic
ggauaggaaauugcuuaaug

SEQ ID NO: 600400 - RNA, 21 nt, Artificial Sequence
  Synthetic
aggauaggaaauugcuuaaug

SEQ ID NO: 600401 - RNA, 22 nt, Artificial Sequence
  Synthetic
aaggauaggaaauugcuuaaug

SEQ ID NO: 600402 - RNA, 23 nt, Artificial Sequence
  Synthetic
gaaggauaggaaauugcuuaaug

SEQ ID NO: 600403 - RNA, 24 nt, Artificial Sequence
  Synthetic
cgaaggauaggaaauugcuuaaug

SEQ ID NO: 600404 - RNA, 18 nt, Artificial Sequence
  Synthetic
cuuugacaguucuuaaug

SEQ ID NO: 600405 - RNA, 19 nt, Artificial Sequence
  Synthetic
ucuuugacaguucuuaaug

SEQ ID NO: 600406 - RNA, 20 nt, Artificial Sequence
  Synthetic
aucuuugacaguucuuaaug

SEQ ID NO: 600407 - RNA, 21 nt, Artificial Sequence
  Synthetic
aaucuuugacaguucuuaaug

SEQ ID NO: 600408 - RNA, 22 nt, Artificial Sequence
  Synthetic
aaaucuuugacaguucuuaaug

SEQ ID NO: 600409 - RNA, 23 nt, Artificial Sequence
  Synthetic
uaaaucuuugacaguucuuaaug

SEQ ID NO: 600410 - RNA, 24 nt, Artificial Sequence
  Synthetic
uuaaaucuuugacaguucuuaaug

SEQ ID NO: 600411 - RNA, 24 nt, Artificial Sequence
  Synthetic
uggacuuggacuuuuggguuaaug

SEQ ID NO: 600412 - RNA, 18 nt, Artificial Sequence
  Synthetic
agaaaucaucuguuaaug

SEQ ID NO: 600413 - RNA, 19 nt, Artificial Sequence
  Synthetic
gagaaaucaucuguuaaug

SEQ ID NO: 600414 - RNA, 20 nt, Artificial Sequence
  Synthetic
agagaaaucaucuguuaaug

SEQ ID NO: 600415 - RNA, 21 nt, Artificial Sequence
  Synthetic
cagagaaaucaucuguuaaug

SEQ ID NO: 600416 - RNA, 22 nt, Artificial Sequence
  Synthetic
gcagagaaaucaucuguuaaug

SEQ ID NO: 600417 - RNA, 23 nt, Artificial Sequence
  Synthetic
agcagagaaaucaucuguuaaug

SEQ ID NO: 600418 - RNA, 24 nt, Artificial Sequence
  Synthetic
uagcagagaaaucaucuguuaaug

SEQ ID NO: 600419 - RNA, 18 nt, Artificial Sequence
  Synthetic
ugggucuaucuguuaaug

SEQ ID NO: 600420 - RNA, 19 nt, Artificial Sequence
  Synthetic
augggucuaucuguuaaug

SEQ ID NO: 600421 - RNA, 20 nt, Artificial Sequence
  Synthetic
uaugggucuaucuguuaaug

SEQ ID NO: 600422 - RNA, 21 nt, Artificial Sequence
  Synthetic
auaugggucuaucuguuaaug

SEQ ID NO: 600423 - RNA, 22 nt, Artificial Sequence
  Synthetic
uauaugggucuaucuguuaaug

SEQ ID NO: 600424 - RNA, 23 nt, Artificial Sequence
  Synthetic
cuauaugggucuaucuguuaaug

SEQ ID NO: 600425 - RNA, 24 nt, Artificial Sequence
  Synthetic
gcuauaugggucuaucuguuaaug

SEQ ID NO: 600426 - RNA, 18 nt, Artificial Sequence
  Synthetic
aauggauauuuguuaaug

SEQ ID NO: 600427 - RNA, 19 nt, Artificial Sequence
  Synthetic
caauggauauuuguuaaug

SEQ ID NO: 600428 - RNA, 20 nt, Artificial Sequence
  Synthetic
acaauggauauuuguuaaug

SEQ ID NO: 600429 - RNA, 21 nt, Artificial Sequence
  Synthetic
aacaauggauauuuguuaaug

SEQ ID NO: 600430 - RNA, 22 nt, Artificial Sequence
  Synthetic
uaacaauggauauuuguuaaug

SEQ ID NO: 600431 - RNA, 23 nt, Artificial Sequence
  Synthetic
auaacaauggauauuuguuaaug

SEQ ID NO: 600432 - RNA, 24 nt, Artificial Sequence
  Synthetic
uauaacaauggauauuuguuaaug

SEQ ID NO: 600433 - RNA, 18 nt, Artificial Sequence
  Synthetic
uuucaucuuaauuuaaug

SEQ ID NO: 600434 - RNA, 19 nt, Artificial Sequence
  Synthetic
uuuucaucuuaauuuaaug

SEQ ID NO: 600435 - RNA, 20 nt, Artificial Sequence
  Synthetic
guuuucaucuuaauuuaaug

SEQ ID NO: 600436 - RNA, 21 nt, Artificial Sequence
  Synthetic
uguuuucaucuuaauuuaaug

SEQ ID NO: 600437 - RNA, 22 nt, Artificial Sequence
  Synthetic
guguuuucaucuuaauuuaaug

SEQ ID NO: 600438 - RNA, 23 nt, Artificial Sequence
  Synthetic
uguguuuucaucuuaauuuaaug

SEQ ID NO: 600439 - RNA, 24 nt, Artificial Sequence
  Synthetic
uuguguuuucaucuuaauuuaaug

SEQ ID NO: 600440 - RNA, 18 nt, Artificial Sequence
  Synthetic
aaauaaguugauuuaaug

SEQ ID NO: 600441 - RNA, 19 nt, Artificial Sequence
  Synthetic
aaaauaaguugauuuaaug

SEQ ID NO: 600442 - RNA, 20 nt, Artificial Sequence
  Synthetic
gaaaauaaguugauuuaaug

SEQ ID NO: 600443 - RNA, 21 nt, Artificial Sequence
  Synthetic
agaaaauaaguugauuuaaug

SEQ ID NO: 600444 - RNA, 22 nt, Artificial Sequence
  Synthetic
gagaaaauaaguugauuuaaug

SEQ ID NO: 600445 - RNA, 23 nt, Artificial Sequence
  Synthetic
agagaaaauaaguugauuuaaug

SEQ ID NO: 600446 - RNA, 24 nt, Artificial Sequence
  Synthetic
aagagaaaauaaguugauuuaaug

SEQ ID NO: 600447 - RNA, 18 nt, Artificial Sequence
  Synthetic
caaugucgauguuuaaug

SEQ ID NO: 600448 - RNA, 19 nt, Artificial Sequence
  Synthetic
acaaugucgauguuuaaug

SEQ ID NO: 600449 - RNA, 20 nt, Artificial Sequence
  Synthetic
aacaaugucgauguuuaaug

SEQ ID NO: 600450 - RNA, 21 nt, Artificial Sequence
  Synthetic
aaacaaugucgauguuuaaug

SEQ ID NO: 600451 - RNA, 22 nt, Artificial Sequence
  Synthetic
gaaacaaugucgauguuuaaug

SEQ ID NO: 600452 - RNA, 23 nt, Artificial Sequence
  Synthetic
agaaacaaugucgauguuuaaug

SEQ ID NO: 600453 - RNA, 24 nt, Artificial Sequence
  Synthetic
gagaaacaaugucgauguuuaaug

SEQ ID NO: 600454 - RNA, 18 nt, Artificial Sequence
  Synthetic
uuaccuacuauuuuaaug

SEQ ID NO: 600455 - RNA, 19 nt, Artificial Sequence
  Synthetic
uuuaccuacuauuuuaaug

SEQ ID NO: 600456 - RNA, 20 nt, Artificial Sequence
  Synthetic
uuuuaccuacuauuuuaaug

SEQ ID NO: 600457 - RNA, 21 nt, Artificial Sequence
  Synthetic
auuuuaccuacuauuuuaaug

SEQ ID NO: 600458 - RNA, 22 nt, Artificial Sequence
  Synthetic
aauuuuaccuacuauuuuaaug

SEQ ID NO: 600459 - RNA, 23 nt, Artificial Sequence
  Synthetic
aaauuuuaccuacuauuuuaaug

SEQ ID NO: 600460 - RNA, 24 nt, Artificial Sequence
  Synthetic
aaaauuuuaccuacuauuuuaaug

SEQ ID NO: 600461 - RNA, 18 nt, Artificial Sequence
  Synthetic
uuucauucuuuuuuaaug

SEQ ID NO: 600462 - RNA, 19 nt, Artificial Sequence
  Synthetic
uuuucauucuuuuuuaaug

SEQ ID NO: 600463 - RNA, 20 nt, Artificial Sequence
  Synthetic
auuuucauucuuuuuuaaug

SEQ ID NO: 600464 - RNA, 21 nt, Artificial Sequence
  Synthetic
cauuuucauucuuuuuuaaug

SEQ ID NO: 600465 - RNA, 22 nt, Artificial Sequence
  Synthetic
acauuuucauucuuuuuuaaug

SEQ ID NO: 600466 - RNA, 23 nt, Artificial Sequence
  Synthetic
cacauuuucauucuuuuuuaaug

SEQ ID NO: 600467 - RNA, 24 nt, Artificial Sequence
  Synthetic
ucacauuuucauucuuuuuuaaug

SEQ ID NO: 600468 - RNA, 18 nt, Artificial Sequence
  Synthetic
aaucaaucugaaaacaug

SEQ ID NO: 600469 - RNA, 19 nt, Artificial Sequence
  Synthetic
aaaucaaucugaaaacaug

SEQ ID NO: 600470 - RNA, 20 nt, Artificial Sequence
  Synthetic
aaaaucaaucugaaaacaug

SEQ ID NO: 600471 - RNA, 21 nt, Artificial Sequence
  Synthetic
caaaaucaaucugaaaacaug

SEQ ID NO: 600472 - RNA, 22 nt, Artificial Sequence
  Synthetic
ccaaaaucaaucugaaaacaug

SEQ ID NO: 600473 - RNA, 23 nt, Artificial Sequence
  Synthetic
uccaaaaucaaucugaaaacaug

SEQ ID NO: 600474 - RNA, 24 nt, Artificial Sequence
  Synthetic
uuccaaaaucaaucugaaaacaug

SEQ ID NO: 600475 - RNA, 18 nt, Artificial Sequence
  Synthetic
ucaagaacaagaaacaug

SEQ ID NO: 600476 - RNA, 19 nt, Artificial Sequence
  Synthetic
uucaagaacaagaaacaug

SEQ ID NO: 600477 - RNA, 20 nt, Artificial Sequence
  Synthetic
cuucaagaacaagaaacaug

SEQ ID NO: 600478 - RNA, 21 nt, Artificial Sequence
  Synthetic
acuucaagaacaagaaacaug

SEQ ID NO: 600479 - RNA, 22 nt, Artificial Sequence
  Synthetic
gacuucaagaacaagaaacaug

SEQ ID NO: 600480 - RNA, 23 nt, Artificial Sequence
  Synthetic
ugacuucaagaacaagaaacaug

SEQ ID NO: 600481 - RNA, 24 nt, Artificial Sequence
  Synthetic
cugacuucaagaacaagaaacaug

SEQ ID NO: 600482 - RNA, 18 nt, Artificial Sequence
  Synthetic
augugucuaagaaacaug

SEQ ID NO: 600483 - RNA, 19 nt, Artificial Sequence
  Synthetic
uaugugucuaagaaacaug

SEQ ID NO: 600484 - RNA, 20 nt, Artificial Sequence
  Synthetic
auaugugucuaagaaacaug

SEQ ID NO: 600485 - RNA, 21 nt, Artificial Sequence
  Synthetic
uauaugugucuaagaaacaug

SEQ ID NO: 600486 - RNA, 22 nt, Artificial Sequence
  Synthetic
auauaugugucuaagaaacaug

SEQ ID NO: 600487 - RNA, 23 nt, Artificial Sequence
  Synthetic
aauauaugugucuaagaaacaug

SEQ ID NO: 600488 - RNA, 24 nt, Artificial Sequence
  Synthetic
caauauaugugucuaagaaacaug

SEQ ID NO: 600489 - RNA, 18 nt, Artificial Sequence
  Synthetic
auucagggacuaaacaug

SEQ ID NO: 600490 - RNA, 19 nt, Artificial Sequence
  Synthetic
gauucagggacuaaacaug

SEQ ID NO: 600491 - RNA, 20 nt, Artificial Sequence
  Synthetic
agauucagggacuaaacaug

SEQ ID NO: 600492 - RNA, 21 nt, Artificial Sequence
  Synthetic
uagauucagggacuaaacaug

SEQ ID NO: 600493 - RNA, 22 nt, Artificial Sequence
  Synthetic
uuagauucagggacuaaacaug

SEQ ID NO: 600494 - RNA, 23 nt, Artificial Sequence
  Synthetic
cuuagauucagggacuaaacaug

SEQ ID NO: 600495 - RNA, 24 nt, Artificial Sequence
  Synthetic
acuuagauucagggacuaaacaug

SEQ ID NO: 600496 - RNA, 18 nt, Artificial Sequence
  Synthetic
aaauagcacuuaaacaug

SEQ ID NO: 600497 - RNA, 19 nt, Artificial Sequence
  Synthetic
aaaauagcacuuaaacaug

SEQ ID NO: 600498 - RNA, 20 nt, Artificial Sequence
  Synthetic
uaaaauagcacuuaaacaug

SEQ ID NO: 600499 - RNA, 21 nt, Artificial Sequence
  Synthetic
auaaaauagcacuuaaacaug

SEQ ID NO: 600500 - RNA, 22 nt, Artificial Sequence
  Synthetic
aauaaaauagcacuuaaacaug

SEQ ID NO: 600501 - RNA, 23 nt, Artificial Sequence
  Synthetic
uaauaaaauagcacuuaaacaug

SEQ ID NO: 600502 - RNA, 24 nt, Artificial Sequence
  Synthetic
guaauaaaauagcacuuaaacaug

SEQ ID NO: 600503 - RNA, 18 nt, Artificial Sequence
  Synthetic
uuuucucccuuaaacaug

SEQ ID NO: 600504 - RNA, 19 nt, Artificial Sequence
  Synthetic
uuuuucucccuuaaacaug

SEQ ID NO: 600505 - RNA, 20 nt, Artificial Sequence
  Synthetic
auuuuucucccuuaaacaug

SEQ ID NO: 600506 - RNA, 21 nt, Artificial Sequence
  Synthetic
cauuuuucucccuuaaacaug

SEQ ID NO: 600507 - RNA, 22 nt, Artificial Sequence
  Synthetic
ucauuuuucucccuuaaacaug

SEQ ID NO: 600508 - RNA, 23 nt, Artificial Sequence
  Synthetic
cucauuuuucucccuuaaacaug

SEQ ID NO: 600509 - RNA, 24 nt, Artificial Sequence
  Synthetic
acucauuuuucucccuuaaacaug

SEQ ID NO: 600510 - RNA, 18 nt, Artificial Sequence
  Synthetic
aauuacuaaaacaacaug

SEQ ID NO: 600511 - RNA, 19 nt, Artificial Sequence
  Synthetic
uaauuacuaaaacaacaug

SEQ ID NO: 600512 - RNA, 20 nt, Artificial Sequence
  Synthetic
auaauuacuaaaacaacaug

SEQ ID NO: 600513 - RNA, 21 nt, Artificial Sequence
  Synthetic
aauaauuacuaaaacaacaug

SEQ ID NO: 600514 - RNA, 22 nt, Artificial Sequence
  Synthetic
gaauaauuacuaaaacaacaug

SEQ ID NO: 600515 - RNA, 23 nt, Artificial Sequence
  Synthetic
agaauaauuacuaaaacaacaug

SEQ ID NO: 600516 - RNA, 24 nt, Artificial Sequence
  Synthetic
uagaauaauuacuaaaacaacaug

SEQ ID NO: 600517 - RNA, 18 nt, Artificial Sequence
  Synthetic
acuggcuaaaacaacaug

SEQ ID NO: 600518 - RNA, 19 nt, Artificial Sequence
  Synthetic
cacuggcuaaaacaacaug

SEQ ID NO: 600519 - RNA, 20 nt, Artificial Sequence
  Synthetic
ucacuggcuaaaacaacaug

SEQ ID NO: 600520 - RNA, 21 nt, Artificial Sequence
  Synthetic
cucacuggcuaaaacaacaug

SEQ ID NO: 600521 - RNA, 22 nt, Artificial Sequence
  Synthetic
ccucacuggcuaaaacaacaug

SEQ ID NO: 600522 - RNA, 23 nt, Artificial Sequence
  Synthetic
cccucacuggcuaaaacaacaug

SEQ ID NO: 600523 - RNA, 24 nt, Artificial Sequence
  Synthetic
acccucacuggcuaaaacaacaug

SEQ ID NO: 600524 - RNA, 18 nt, Artificial Sequence
  Synthetic
acaagccuggacaacaug

SEQ ID NO: 600525 - RNA, 19 nt, Artificial Sequence
  Synthetic
gacaagccuggacaacaug

SEQ ID NO: 600526 - RNA, 20 nt, Artificial Sequence
  Synthetic
agacaagccuggacaacaug

SEQ ID NO: 600527 - RNA, 21 nt, Artificial Sequence
  Synthetic
aagacaagccuggacaacaug

SEQ ID NO: 600528 - RNA, 22 nt, Artificial Sequence
  Synthetic
caagacaagccuggacaacaug

SEQ ID NO: 600529 - RNA, 23 nt, Artificial Sequence
  Synthetic
ucaagacaagccuggacaacaug

SEQ ID NO: 600530 - RNA, 24 nt, Artificial Sequence
  Synthetic
uucaagacaagccuggacaacaug

SEQ ID NO: 600531 - RNA, 18 nt, Artificial Sequence
  Synthetic
cuugugcauuacaacaug

SEQ ID NO: 600532 - RNA, 19 nt, Artificial Sequence
  Synthetic
ucuugugcauuacaacaug

SEQ ID NO: 600533 - RNA, 20 nt, Artificial Sequence
  Synthetic
gucuugugcauuacaacaug

SEQ ID NO: 600534 - RNA, 21 nt, Artificial Sequence
  Synthetic
ugucuugugcauuacaacaug

SEQ ID NO: 600535 - RNA, 22 nt, Artificial Sequence
  Synthetic
cugucuugugcauuacaacaug

SEQ ID NO: 600536 - RNA, 23 nt, Artificial Sequence
  Synthetic
gcugucuugugcauuacaacaug

SEQ ID NO: 600537 - RNA, 24 nt, Artificial Sequence
  Synthetic
ggcugucuugugcauuacaacaug

SEQ ID NO: 600538 - RNA, 18 nt, Artificial Sequence
  Synthetic
accagccugaccaacaug

SEQ ID NO: 600539 - RNA, 19 nt, Artificial Sequence
  Synthetic
gaccagccugaccaacaug

SEQ ID NO: 600540 - RNA, 22 nt, Artificial Sequence
  Synthetic
cgagaccagccugaccaacaug

SEQ ID NO: 600541 - RNA, 23 nt, Artificial Sequence
  Synthetic
ucgagaccagccugaccaacaug

SEQ ID NO: 600542 - RNA, 24 nt, Artificial Sequence
  Synthetic
cucgagaccagccugaccaacaug

SEQ ID NO: 600543 - RNA, 24 nt, Artificial Sequence
  Synthetic
uucgagaccagccugaccaacaug

SEQ ID NO: 600544 - RNA, 24 nt, Artificial Sequence
  Synthetic
uuugagaccagccugaccaacaug

SEQ ID NO: 600545 - RNA, 21 nt, Artificial Sequence
  Synthetic
uagaccagccugaccaacaug

SEQ ID NO: 600546 - RNA, 22 nt, Artificial Sequence
  Synthetic
cuagaccagccugaccaacaug

SEQ ID NO: 600547 - RNA, 23 nt, Artificial Sequence
  Synthetic
ucuagaccagccugaccaacaug

SEQ ID NO: 600548 - RNA, 24 nt, Artificial Sequence
  Synthetic
aucuagaccagccugaccaacaug

SEQ ID NO: 600549 - RNA, 20 nt, Artificial Sequence
  Synthetic
ggaccagccugaccaacaug

SEQ ID NO: 600550 - RNA, 21 nt, Artificial Sequence
  Synthetic
aggaccagccugaccaacaug

SEQ ID NO: 600551 - RNA, 22 nt, Artificial Sequence
  Synthetic
caggaccagccugaccaacaug

SEQ ID NO: 600552 - RNA, 23 nt, Artificial Sequence
  Synthetic
ucaggaccagccugaccaacaug

SEQ ID NO: 600553 - RNA, 24 nt, Artificial Sequence
  Synthetic
uucaggaccagccugaccaacaug

SEQ ID NO: 600554 - RNA, 18 nt, Artificial Sequence
  Synthetic
accagacuggccaacaug

SEQ ID NO: 600555 - RNA, 19 nt, Artificial Sequence
  Synthetic
gaccagacuggccaacaug

SEQ ID NO: 600556 - RNA, 20 nt, Artificial Sequence
  Synthetic
agaccagacuggccaacaug

SEQ ID NO: 600557 - RNA, 21 nt, Artificial Sequence
  Synthetic
gagaccagacuggccaacaug

SEQ ID NO: 600558 - RNA, 22 nt, Artificial Sequence
  Synthetic
cgagaccagacuggccaacaug

SEQ ID NO: 600559 - RNA, 23 nt, Artificial Sequence
  Synthetic
ucgagaccagacuggccaacaug

SEQ ID NO: 600560 - RNA, 24 nt, Artificial Sequence
  Synthetic
uucgagaccagacuggccaacaug

SEQ ID NO: 600561 - RNA, 18 nt, Artificial Sequence
  Synthetic
aacagccuggccaacaug

SEQ ID NO: 600562 - RNA, 19 nt, Artificial Sequence
  Synthetic
gaacagccuggccaacaug

SEQ ID NO: 600563 - RNA, 20 nt, Artificial Sequence
  Synthetic
agaacagccuggccaacaug

SEQ ID NO: 600564 - RNA, 21 nt, Artificial Sequence
  Synthetic
gagaacagccuggccaacaug

SEQ ID NO: 600565 - RNA, 22 nt, Artificial Sequence
  Synthetic
ugagaacagccuggccaacaug

SEQ ID NO: 600566 - RNA, 23 nt, Artificial Sequence
  Synthetic
uugagaacagccuggccaacaug

SEQ ID NO: 600567 - RNA, 24 nt, Artificial Sequence
  Synthetic
uuugagaacagccuggccaacaug

SEQ ID NO: 600568 - RNA, 24 nt, Artificial Sequence
  Synthetic
uucgagaccagccuggccaacaug

SEQ ID NO: 600569 - RNA, 22 nt, Artificial Sequence
  Synthetic
ugagaccagccuggccaacaug

SEQ ID NO: 600570 - RNA, 23 nt, Artificial Sequence
  Synthetic
uugagaccagccuggccaacaug

SEQ ID NO: 600571 - RNA, 24 nt, Artificial Sequence
  Synthetic
uuugagaccagccuggccaacaug

SEQ ID NO: 600572 - RNA, 18 nt, Artificial Sequence
  Synthetic
acuagccuggccaacaug

SEQ ID NO: 600573 - RNA, 19 nt, Artificial Sequence
  Synthetic
gacuagccuggccaacaug

SEQ ID NO: 600574 - RNA, 20 nt, Artificial Sequence
  Synthetic
agacuagccuggccaacaug

SEQ ID NO: 600575 - RNA, 21 nt, Artificial Sequence
  Synthetic
gagacuagccuggccaacaug

SEQ ID NO: 600576 - RNA, 22 nt, Artificial Sequence
  Synthetic
cgagacuagccuggccaacaug

SEQ ID NO: 600577 - RNA, 23 nt, Artificial Sequence
  Synthetic
ucgagacuagccuggccaacaug

SEQ ID NO: 600578 - RNA, 24 nt, Artificial Sequence
  Synthetic
uucgagacuagccuggccaacaug

SEQ ID NO: 600579 - RNA, 21 nt, Artificial Sequence
  Synthetic
aagaccauccuggccaacaug

SEQ ID NO: 600580 - RNA, 22 nt, Artificial Sequence
  Synthetic
caagaccauccuggccaacaug

SEQ ID NO: 600581 - RNA, 23 nt, Artificial Sequence
  Synthetic
ucaagaccauccuggccaacaug

SEQ ID NO: 600582 - RNA, 24 nt, Artificial Sequence
  Synthetic
aucaagaccauccuggccaacaug

SEQ ID NO: 600583 - RNA, 24 nt, Artificial Sequence
  Synthetic
aucgagaccauccuggccaacaug

SEQ ID NO: 600584 - RNA, 18 nt, Artificial Sequence
  Synthetic
acuguccuggccaacaug

SEQ ID NO: 600585 - RNA, 19 nt, Artificial Sequence
  Synthetic
gacuguccuggccaacaug

SEQ ID NO: 600586 - RNA, 20 nt, Artificial Sequence
  Synthetic
agacuguccuggccaacaug

SEQ ID NO: 600587 - RNA, 21 nt, Artificial Sequence
  Synthetic
gagacuguccuggccaacaug

SEQ ID NO: 600588 - RNA, 22 nt, Artificial Sequence
  Synthetic
cgagacuguccuggccaacaug

SEQ ID NO: 600589 - RNA, 23 nt, Artificial Sequence
  Synthetic
ucgagacuguccuggccaacaug

SEQ ID NO: 600590 - RNA, 24 nt, Artificial Sequence
  Synthetic
aucgagacuguccuggccaacaug

SEQ ID NO: 600591 - RNA, 18 nt, Artificial Sequence
  Synthetic
accagccugggcaacaug

SEQ ID NO: 600592 - RNA, 19 nt, Artificial Sequence
  Synthetic
gaccagccugggcaacaug

SEQ ID NO: 600593 - RNA, 20 nt, Artificial Sequence
  Synthetic
agaccagccugggcaacaug

SEQ ID NO: 600594 - RNA, 21 nt, Artificial Sequence
  Synthetic
gagaccagccugggcaacaug

SEQ ID NO: 600595 - RNA, 22 nt, Artificial Sequence
  Synthetic
cgagaccagccugggcaacaug

SEQ ID NO: 600596 - RNA, 23 nt, Artificial Sequence
  Synthetic
ucgagaccagccugggcaacaug

SEQ ID NO: 600597 - RNA, 24 nt, Artificial Sequence
  Synthetic
uucgagaccagccugggcaacaug

SEQ ID NO: 600598 - RNA, 18 nt, Artificial Sequence
  Synthetic
aucagucugggcaacaug

SEQ ID NO: 600599 - RNA, 19 nt, Artificial Sequence
  Synthetic
gaucagucugggcaacaug

SEQ ID NO: 600600 - RNA, 20 nt, Artificial Sequence
  Synthetic
agaucagucugggcaacaug

SEQ ID NO: 600601 - RNA, 21 nt, Artificial Sequence
  Synthetic
gagaucagucugggcaacaug

SEQ ID NO: 600602 - RNA, 22 nt, Artificial Sequence
  Synthetic
ugagaucagucugggcaacaug

SEQ ID NO: 600603 - RNA, 23 nt, Artificial Sequence
  Synthetic
uugagaucagucugggcaacaug

SEQ ID NO: 600604 - RNA, 24 nt, Artificial Sequence
  Synthetic
uuugagaucagucugggcaacaug

SEQ ID NO: 600605 - RNA, 18 nt, Artificial Sequence
  Synthetic
caaucaaccugcaacaug

SEQ ID NO: 600606 - RNA, 19 nt, Artificial Sequence
  Synthetic
ccaaucaaccugcaacaug

SEQ ID NO: 600607 - RNA, 20 nt, Artificial Sequence
  Synthetic
cccaaucaaccugcaacaug

SEQ ID NO: 600608 - RNA, 21 nt, Artificial Sequence
  Synthetic
ccccaaucaaccugcaacaug

SEQ ID NO: 600609 - RNA, 22 nt, Artificial Sequence
  Synthetic
accccaaucaaccugcaacaug

SEQ ID NO: 600610 - RNA, 23 nt, Artificial Sequence
  Synthetic
gaccccaaucaaccugcaacaug

SEQ ID NO: 600611 - RNA, 24 nt, Artificial Sequence
  Synthetic
cgaccccaaucaaccugcaacaug

SEQ ID NO: 600612 - RNA, 18 nt, Artificial Sequence
  Synthetic
accagccuggucaacaug

SEQ ID NO: 600613 - RNA, 19 nt, Artificial Sequence
  Synthetic
gaccagccuggucaacaug

SEQ ID NO: 600614 - RNA, 20 nt, Artificial Sequence
  Synthetic
agaccagccuggucaacaug

SEQ ID NO: 600615 - RNA, 21 nt, Artificial Sequence
  Synthetic
gagaccagccuggucaacaug

SEQ ID NO: 600616 - RNA, 22 nt, Artificial Sequence
  Synthetic
cgagaccagccuggucaacaug

SEQ ID NO: 600617 - RNA, 23 nt, Artificial Sequence
  Synthetic
ucgagaccagccuggucaacaug

SEQ ID NO: 600618 - RNA, 24 nt, Artificial Sequence
  Synthetic
cucgagaccagccuggucaacaug

SEQ ID NO: 600619 - RNA, 22 nt, Artificial Sequence
  Synthetic
ugagaccagccuggucaacaug

SEQ ID NO: 600620 - RNA, 23 nt, Artificial Sequence
  Synthetic
uugagaccagccuggucaacaug

SEQ ID NO: 600621 - RNA, 24 nt, Artificial Sequence
  Synthetic
uuugagaccagccuggucaacaug

SEQ ID NO: 600622 - RNA, 18 nt, Artificial Sequence
  Synthetic
gaguggccaaggaacaug

SEQ ID NO: 600623 - RNA, 19 nt, Artificial Sequence
  Synthetic
ggaguggccaaggaacaug

SEQ ID NO: 600624 - RNA, 20 nt, Artificial Sequence
  Synthetic
aggaguggccaaggaacaug

SEQ ID NO: 600625 - RNA, 21 nt, Artificial Sequence
  Synthetic
gaggaguggccaaggaacaug

SEQ ID NO: 600626 - RNA, 22 nt, Artificial Sequence
  Synthetic
ggaggaguggccaaggaacaug

SEQ ID NO: 600627 - RNA, 23 nt, Artificial Sequence
  Synthetic
uggaggaguggccaaggaacaug

SEQ ID NO: 600628 - RNA, 24 nt, Artificial Sequence
  Synthetic
cuggaggaguggccaaggaacaug

SEQ ID NO: 600629 - RNA, 18 nt, Artificial Sequence
  Synthetic
accagccugacuaacaug

SEQ ID NO: 600630 - RNA, 19 nt, Artificial Sequence
  Synthetic
gaccagccugacuaacaug

SEQ ID NO: 600631 - RNA, 20 nt, Artificial Sequence
  Synthetic
agaccagccugacuaacaug

SEQ ID NO: 600632 - RNA, 21 nt, Artificial Sequence
  Synthetic
aagaccagccugacuaacaug

SEQ ID NO: 600633 - RNA, 22 nt, Artificial Sequence
  Synthetic
caagaccagccugacuaacaug

SEQ ID NO: 600634 - RNA, 23 nt, Artificial Sequence
  Synthetic
ucaagaccagccugacuaacaug

SEQ ID NO: 600635 - RNA, 24 nt, Artificial Sequence
  Synthetic
uucaagaccagccugacuaacaug

SEQ ID NO: 600636 - RNA, 18 nt, Artificial Sequence
  Synthetic
accaguccggcuaacaug

SEQ ID NO: 600637 - RNA, 19 nt, Artificial Sequence
  Synthetic
gaccaguccggcuaacaug

SEQ ID NO: 600638 - RNA, 20 nt, Artificial Sequence
  Synthetic
agaccaguccggcuaacaug

SEQ ID NO: 600639 - RNA, 21 nt, Artificial Sequence
  Synthetic
aagaccaguccggcuaacaug

SEQ ID NO: 600640 - RNA, 22 nt, Artificial Sequence
  Synthetic
caagaccaguccggcuaacaug

SEQ ID NO: 600641 - RNA, 23 nt, Artificial Sequence
  Synthetic
ucaagaccaguccggcuaacaug

SEQ ID NO: 600642 - RNA, 24 nt, Artificial Sequence
  Synthetic
uucaagaccaguccggcuaacaug

SEQ ID NO: 600643 - RNA, 18 nt, Artificial Sequence
  Synthetic
aggcagaguaguaacaug

SEQ ID NO: 600644 - RNA, 19 nt, Artificial Sequence
  Synthetic
caggcagaguaguaacaug

SEQ ID NO: 600645 - RNA, 20 nt, Artificial Sequence
  Synthetic
ccaggcagaguaguaacaug

SEQ ID NO: 600646 - RNA, 21 nt, Artificial Sequence
  Synthetic
accaggcagaguaguaacaug

SEQ ID NO: 600647 - RNA, 22 nt, Artificial Sequence
  Synthetic
aaccaggcagaguaguaacaug

SEQ ID NO: 600648 - RNA, 23 nt, Artificial Sequence
  Synthetic
gaaccaggcagaguaguaacaug

SEQ ID NO: 600649 - RNA, 24 nt, Artificial Sequence
  Synthetic
ugaaccaggcagaguaguaacaug

SEQ ID NO: 600650 - RNA, 18 nt, Artificial Sequence
  Synthetic
agccaaaggagacacaug

SEQ ID NO: 600651 - RNA, 19 nt, Artificial Sequence
  Synthetic
aagccaaaggagacacaug

SEQ ID NO: 600652 - RNA, 20 nt, Artificial Sequence
  Synthetic
gaagccaaaggagacacaug

SEQ ID NO: 600653 - RNA, 21 nt, Artificial Sequence
  Synthetic
ggaagccaaaggagacacaug

SEQ ID NO: 600654 - RNA, 22 nt, Artificial Sequence
  Synthetic
gggaagccaaaggagacacaug

SEQ ID NO: 600655 - RNA, 23 nt, Artificial Sequence
  Synthetic
ggggaagccaaaggagacacaug

SEQ ID NO: 600656 - RNA, 24 nt, Artificial Sequence
  Synthetic
uggggaagccaaaggagacacaug

SEQ ID NO: 600657 - RNA, 18 nt, Artificial Sequence
  Synthetic
uucauuuuuuuacacaug

SEQ ID NO: 600658 - RNA, 19 nt, Artificial Sequence
  Synthetic
auucauuuuuuuacacaug

SEQ ID NO: 600659 - RNA, 20 nt, Artificial Sequence
  Synthetic
uauucauuuuuuuacacaug

SEQ ID NO: 600660 - RNA, 21 nt, Artificial Sequence
  Synthetic
auauucauuuuuuuacacaug

SEQ ID NO: 600661 - RNA, 22 nt, Artificial Sequence
  Synthetic
uauauucauuuuuuuacacaug

SEQ ID NO: 600662 - RNA, 23 nt, Artificial Sequence
  Synthetic
cuauauucauuuuuuuacacaug

SEQ ID NO: 600663 - RNA, 24 nt, Artificial Sequence
  Synthetic
acuauauucauuuuuuuacacaug

SEQ ID NO: 600664 - RNA, 18 nt, Artificial Sequence
  Synthetic
aacgaaaagagccacaug

SEQ ID NO: 600665 - RNA, 19 nt, Artificial Sequence
  Synthetic
aaacgaaaagagccacaug

SEQ ID NO: 600666 - RNA, 20 nt, Artificial Sequence
  Synthetic
gaaacgaaaagagccacaug

SEQ ID NO: 600667 - RNA, 21 nt, Artificial Sequence
  Synthetic
agaaacgaaaagagccacaug

SEQ ID NO: 600668 - RNA, 22 nt, Artificial Sequence
  Synthetic
cagaaacgaaaagagccacaug

SEQ ID NO: 600669 - RNA, 23 nt, Artificial Sequence
  Synthetic
gcagaaacgaaaagagccacaug

SEQ ID NO: 600670 - RNA, 24 nt, Artificial Sequence
  Synthetic
ggcagaaacgaaaagagccacaug

SEQ ID NO: 600671 - RNA, 18 nt, Artificial Sequence
  Synthetic
aauuacagaguccacaug

SEQ ID NO: 600672 - RNA, 19 nt, Artificial Sequence
  Synthetic
aaauuacagaguccacaug

SEQ ID NO: 600673 - RNA, 20 nt, Artificial Sequence
  Synthetic
uaaauuacagaguccacaug

SEQ ID NO: 600674 - RNA, 21 nt, Artificial Sequence
  Synthetic
auaaauuacagaguccacaug

SEQ ID NO: 600675 - RNA, 22 nt, Artificial Sequence
  Synthetic
aauaaauuacagaguccacaug

SEQ ID NO: 600676 - RNA, 23 nt, Artificial Sequence
  Synthetic
uaauaaauuacagaguccacaug

SEQ ID NO: 600677 - RNA, 24 nt, Artificial Sequence
  Synthetic
cuaauaaauuacagaguccacaug

SEQ ID NO: 600678 - RNA, 18 nt, Artificial Sequence
  Synthetic
uacuauauaguccacaug

SEQ ID NO: 600679 - RNA, 19 nt, Artificial Sequence
  Synthetic
cuacuauauaguccacaug

SEQ ID NO: 600680 - RNA, 20 nt, Artificial Sequence
  Synthetic
ucuacuauauaguccacaug

SEQ ID NO: 600681 - RNA, 21 nt, Artificial Sequence
  Synthetic
cucuacuauauaguccacaug

SEQ ID NO: 600682 - RNA, 22 nt, Artificial Sequence
  Synthetic
ccucuacuauauaguccacaug

SEQ ID NO: 600683 - RNA, 23 nt, Artificial Sequence
  Synthetic
uccucuacuauauaguccacaug

SEQ ID NO: 600684 - RNA, 24 nt, Artificial Sequence
  Synthetic
auccucuacuauauaguccacaug

SEQ ID NO: 600685 - RNA, 18 nt, Artificial Sequence
  Synthetic
cauggagagguccacaug

SEQ ID NO: 600686 - RNA, 19 nt, Artificial Sequence
  Synthetic
ccauggagagguccacaug

SEQ ID NO: 600687 - RNA, 20 nt, Artificial Sequence
  Synthetic
uccauggagagguccacaug

SEQ ID NO: 600688 - RNA, 21 nt, Artificial Sequence
  Synthetic
cuccauggagagguccacaug

SEQ ID NO: 600689 - RNA, 22 nt, Artificial Sequence
  Synthetic
gcuccauggagagguccacaug

SEQ ID NO: 600690 - RNA, 23 nt, Artificial Sequence
  Synthetic
ugcuccauggagagguccacaug

SEQ ID NO: 600691 - RNA, 24 nt, Artificial Sequence
  Synthetic
cugcuccauggagagguccacaug

SEQ ID NO: 600692 - RNA, 18 nt, Artificial Sequence
  Synthetic
uccacaucuaagcacaug

SEQ ID NO: 600693 - RNA, 19 nt, Artificial Sequence
  Synthetic
auccacaucuaagcacaug

SEQ ID NO: 600694 - RNA, 20 nt, Artificial Sequence
  Synthetic
aauccacaucuaagcacaug

SEQ ID NO: 600695 - RNA, 21 nt, Artificial Sequence
  Synthetic
caauccacaucuaagcacaug

SEQ ID NO: 600696 - RNA, 22 nt, Artificial Sequence
  Synthetic
acaauccacaucuaagcacaug

SEQ ID NO: 600697 - RNA, 23 nt, Artificial Sequence
  Synthetic
aacaauccacaucuaagcacaug

SEQ ID NO: 600698 - RNA, 24 nt, Artificial Sequence
  Synthetic
uaacaauccacaucuaagcacaug

SEQ ID NO: 600699 - RNA, 18 nt, Artificial Sequence
  Synthetic
aaaccuuggcagcacaug

SEQ ID NO: 600700 - RNA, 19 nt, Artificial Sequence
  Synthetic
aaaaccuuggcagcacaug

SEQ ID NO: 600701 - RNA, 20 nt, Artificial Sequence
  Synthetic
gaaaaccuuggcagcacaug

SEQ ID NO: 600702 - RNA, 21 nt, Artificial Sequence
  Synthetic
ugaaaaccuuggcagcacaug

SEQ ID NO: 600703 - RNA, 22 nt, Artificial Sequence
  Synthetic
cugaaaaccuuggcagcacaug

SEQ ID NO: 600704 - RNA, 23 nt, Artificial Sequence
  Synthetic
acugaaaaccuuggcagcacaug

SEQ ID NO: 600705 - RNA, 24 nt, Artificial Sequence
  Synthetic
aacugaaaaccuuggcagcacaug

SEQ ID NO: 600706 - RNA, 18 nt, Artificial Sequence
  Synthetic
uguguugucacucacaug

SEQ ID NO: 600707 - RNA, 19 nt, Artificial Sequence
  Synthetic
auguguugucacucacaug

SEQ ID NO: 600708 - RNA, 20 nt, Artificial Sequence
  Synthetic
uauguguugucacucacaug

SEQ ID NO: 600709 - RNA, 21 nt, Artificial Sequence
  Synthetic
uuauguguugucacucacaug

SEQ ID NO: 600710 - RNA, 22 nt, Artificial Sequence
  Synthetic
auuauguguugucacucacaug

SEQ ID NO: 600711 - RNA, 23 nt, Artificial Sequence
  Synthetic
uauuauguguugucacucacaug

SEQ ID NO: 600712 - RNA, 24 nt, Artificial Sequence
  Synthetic
auauuauguguugucacucacaug

SEQ ID NO: 600713 - RNA, 18 nt, Artificial Sequence
  Synthetic
aagucuuguacucacaug

SEQ ID NO: 600714 - RNA, 19 nt, Artificial Sequence
  Synthetic
aaagucuuguacucacaug

SEQ ID NO: 600715 - RNA, 20 nt, Artificial Sequence
  Synthetic
aaaagucuuguacucacaug

SEQ ID NO: 600716 - RNA, 21 nt, Artificial Sequence
  Synthetic
gaaaagucuuguacucacaug

SEQ ID NO: 600717 - RNA, 22 nt, Artificial Sequence
  Synthetic
ugaaaagucuuguacucacaug

SEQ ID NO: 600718 - RNA, 23 nt, Artificial Sequence
  Synthetic
uugaaaagucuuguacucacaug

SEQ ID NO: 600719 - RNA, 24 nt, Artificial Sequence
  Synthetic
auugaaaagucuuguacucacaug

SEQ ID NO: 600720 - RNA, 18 nt, Artificial Sequence
  Synthetic
uucugaugcucucacaug

SEQ ID NO: 600721 - RNA, 19 nt, Artificial Sequence
  Synthetic
uuucugaugcucucacaug

SEQ ID NO: 600722 - RNA, 20 nt, Artificial Sequence
  Synthetic
uuuucugaugcucucacaug

SEQ ID NO: 600723 - RNA, 21 nt, Artificial Sequence
  Synthetic
auuuucugaugcucucacaug

SEQ ID NO: 600724 - RNA, 22 nt, Artificial Sequence
  Synthetic
uauuuucugaugcucucacaug

SEQ ID NO: 600725 - RNA, 23 nt, Artificial Sequence
  Synthetic
uuauuuucugaugcucucacaug

SEQ ID NO: 600726 - RNA, 24 nt, Artificial Sequence
  Synthetic
auuauuuucugaugcucucacaug

SEQ ID NO: 600727 - RNA, 18 nt, Artificial Sequence
  Synthetic
cauacguauagucacaug

SEQ ID NO: 600728 - RNA, 19 nt, Artificial Sequence
  Synthetic
acauacguauagucacaug

SEQ ID NO: 600729 - RNA, 20 nt, Artificial Sequence
  Synthetic
uacauacguauagucacaug

SEQ ID NO: 600730 - RNA, 21 nt, Artificial Sequence
  Synthetic
auacauacguauagucacaug

SEQ ID NO: 600731 - RNA, 22 nt, Artificial Sequence
  Synthetic
gauacauacguauagucacaug

SEQ ID NO: 600732 - RNA, 23 nt, Artificial Sequence
  Synthetic
ugauacauacguauagucacaug

SEQ ID NO: 600733 - RNA, 24 nt, Artificial Sequence
  Synthetic
uugauacauacguauagucacaug

SEQ ID NO: 600734 - RNA, 18 nt, Artificial Sequence
  Synthetic
acagagagcugucacaug

SEQ ID NO: 600735 - RNA, 19 nt, Artificial Sequence
  Synthetic
cacagagagcugucacaug

SEQ ID NO: 600736 - RNA, 20 nt, Artificial Sequence
  Synthetic
ccacagagagcugucacaug

SEQ ID NO: 600737 - RNA, 21 nt, Artificial Sequence
  Synthetic
accacagagagcugucacaug

SEQ ID NO: 600738 - RNA, 22 nt, Artificial Sequence
  Synthetic
aaccacagagagcugucacaug

SEQ ID NO: 600739 - RNA, 23 nt, Artificial Sequence
  Synthetic
caaccacagagagcugucacaug

SEQ ID NO: 600740 - RNA, 24 nt, Artificial Sequence
  Synthetic
gcaaccacagagagcugucacaug

SEQ ID NO: 600741 - RNA, 18 nt, Artificial Sequence
  Synthetic
gcccuaagacaagacaug

SEQ ID NO: 600742 - RNA, 19 nt, Artificial Sequence
  Synthetic
ggcccuaagacaagacaug

SEQ ID NO: 600743 - RNA, 20 nt, Artificial Sequence
  Synthetic
uggcccuaagacaagacaug

SEQ ID NO: 600744 - RNA, 21 nt, Artificial Sequence
  Synthetic
uuggcccuaagacaagacaug

SEQ ID NO: 600745 - RNA, 22 nt, Artificial Sequence
  Synthetic
uuuggcccuaagacaagacaug

SEQ ID NO: 600746 - RNA, 23 nt, Artificial Sequence
  Synthetic
auuuggcccuaagacaagacaug

SEQ ID NO: 600747 - RNA, 24 nt, Artificial Sequence
  Synthetic
cauuuggcccuaagacaagacaug

SEQ ID NO: 600748 - RNA, 18 nt, Artificial Sequence
  Synthetic
augacuggagaagacaug

SEQ ID NO: 600749 - RNA, 19 nt, Artificial Sequence
  Synthetic
caugacuggagaagacaug

SEQ ID NO: 600750 - RNA, 20 nt, Artificial Sequence
  Synthetic
ucaugacuggagaagacaug

SEQ ID NO: 600751 - RNA, 21 nt, Artificial Sequence
  Synthetic
uucaugacuggagaagacaug

SEQ ID NO: 600752 - RNA, 22 nt, Artificial Sequence
  Synthetic
guucaugacuggagaagacaug

SEQ ID NO: 600753 - RNA, 23 nt, Artificial Sequence
  Synthetic
uguucaugacuggagaagacaug

SEQ ID NO: 600754 - RNA, 24 nt, Artificial Sequence
  Synthetic
auguucaugacuggagaagacaug

SEQ ID NO: 600755 - RNA, 18 nt, Artificial Sequence
  Synthetic
agaguugaugaagacaug

SEQ ID NO: 600756 - RNA, 19 nt, Artificial Sequence
  Synthetic
uagaguugaugaagacaug

SEQ ID NO: 600757 - RNA, 20 nt, Artificial Sequence
  Synthetic
auagaguugaugaagacaug

SEQ ID NO: 600758 - RNA, 21 nt, Artificial Sequence
  Synthetic
uauagaguugaugaagacaug

SEQ ID NO: 600759 - RNA, 22 nt, Artificial Sequence
  Synthetic
auauagaguugaugaagacaug

SEQ ID NO: 600760 - RNA, 23 nt, Artificial Sequence
  Synthetic
aauauagaguugaugaagacaug

SEQ ID NO: 600761 - RNA, 24 nt, Artificial Sequence
  Synthetic
uaauauagaguugaugaagacaug

SEQ ID NO: 600762 - RNA, 18 nt, Artificial Sequence
  Synthetic
auccaagugcuagacaug

SEQ ID NO: 600763 - RNA, 19 nt, Artificial Sequence
  Synthetic
gauccaagugcuagacaug

SEQ ID NO: 600764 - RNA, 20 nt, Artificial Sequence
  Synthetic
ggauccaagugcuagacaug

SEQ ID NO: 600765 - RNA, 21 nt, Artificial Sequence
  Synthetic
gggauccaagugcuagacaug

SEQ ID NO: 600766 - RNA, 22 nt, Artificial Sequence
  Synthetic
ugggauccaagugcuagacaug

SEQ ID NO: 600767 - RNA, 23 nt, Artificial Sequence
  Synthetic
cugggauccaagugcuagacaug

SEQ ID NO: 600768 - RNA, 24 nt, Artificial Sequence
  Synthetic
acugggauccaagugcuagacaug

SEQ ID NO: 600769 - RNA, 18 nt, Artificial Sequence
  Synthetic
accagccugaccgacaug

SEQ ID NO: 600770 - RNA, 19 nt, Artificial Sequence
  Synthetic
gaccagccugaccgacaug

SEQ ID NO: 600771 - RNA, 20 nt, Artificial Sequence
  Synthetic
agaccagccugaccgacaug

SEQ ID NO: 600772 - RNA, 21 nt, Artificial Sequence
  Synthetic
gagaccagccugaccgacaug

SEQ ID NO: 600773 - RNA, 22 nt, Artificial Sequence
  Synthetic
cgagaccagccugaccgacaug

SEQ ID NO: 600774 - RNA, 23 nt, Artificial Sequence
  Synthetic
ucgagaccagccugaccgacaug

SEQ ID NO: 600775 - RNA, 24 nt, Artificial Sequence
  Synthetic
uucgagaccagccugaccgacaug

SEQ ID NO: 600776 - RNA, 18 nt, Artificial Sequence
  Synthetic
accagccuggccgacaug

SEQ ID NO: 600777 - RNA, 19 nt, Artificial Sequence
  Synthetic
gaccagccuggccgacaug

SEQ ID NO: 600778 - RNA, 20 nt, Artificial Sequence
  Synthetic
agaccagccuggccgacaug

SEQ ID NO: 600779 - RNA, 21 nt, Artificial Sequence
  Synthetic
gagaccagccuggccgacaug

SEQ ID NO: 600780 - RNA, 22 nt, Artificial Sequence
  Synthetic
cgagaccagccuggccgacaug

SEQ ID NO: 600781 - RNA, 23 nt, Artificial Sequence
  Synthetic
ucgagaccagccuggccgacaug

SEQ ID NO: 600782 - RNA, 24 nt, Artificial Sequence
  Synthetic
uucgagaccagccuggccgacaug

SEQ ID NO: 600783 - RNA, 18 nt, Artificial Sequence
  Synthetic
ggaguagauugggacaug

SEQ ID NO: 600784 - RNA, 19 nt, Artificial Sequence
  Synthetic
gggaguagauugggacaug

SEQ ID NO: 600785 - RNA, 20 nt, Artificial Sequence
  Synthetic
agggaguagauugggacaug

SEQ ID NO: 600786 - RNA, 21 nt, Artificial Sequence
  Synthetic
gagggaguagauugggacaug

SEQ ID NO: 600787 - RNA, 22 nt, Artificial Sequence
  Synthetic
agagggaguagauugggacaug

SEQ ID NO: 600788 - RNA, 23 nt, Artificial Sequence
  Synthetic
gagagggaguagauugggacaug

SEQ ID NO: 600789 - RNA, 24 nt, Artificial Sequence
  Synthetic
ugagagggaguagauugggacaug

SEQ ID NO: 600790 - RNA, 18 nt, Artificial Sequence
  Synthetic
guuuucacucuggacaug

SEQ ID NO: 600791 - RNA, 19 nt, Artificial Sequence
  Synthetic
uguuuucacucuggacaug

SEQ ID NO: 600792 - RNA, 20 nt, Artificial Sequence
  Synthetic
guguuuucacucuggacaug

SEQ ID NO: 600793 - RNA, 21 nt, Artificial Sequence
  Synthetic
aguguuuucacucuggacaug

SEQ ID NO: 600794 - RNA, 22 nt, Artificial Sequence
  Synthetic
caguguuuucacucuggacaug

SEQ ID NO: 600795 - RNA, 23 nt, Artificial Sequence
  Synthetic
ccaguguuuucacucuggacaug

SEQ ID NO: 600796 - RNA, 24 nt, Artificial Sequence
  Synthetic
cccaguguuuucacucuggacaug

SEQ ID NO: 600797 - RNA, 18 nt, Artificial Sequence
  Synthetic
acaaacaguuuggacaug

SEQ ID NO: 600798 - RNA, 19 nt, Artificial Sequence
  Synthetic
uacaaacaguuuggacaug

SEQ ID NO: 600799 - RNA, 20 nt, Artificial Sequence
  Synthetic
cuacaaacaguuuggacaug

SEQ ID NO: 600800 - RNA, 21 nt, Artificial Sequence
  Synthetic
acuacaaacaguuuggacaug

SEQ ID NO: 600801 - RNA, 22 nt, Artificial Sequence
  Synthetic
cacuacaaacaguuuggacaug

SEQ ID NO: 600802 - RNA, 23 nt, Artificial Sequence
  Synthetic
ccacuacaaacaguuuggacaug

SEQ ID NO: 600803 - RNA, 24 nt, Artificial Sequence
  Synthetic
accacuacaaacaguuuggacaug

SEQ ID NO: 600804 - RNA, 18 nt, Artificial Sequence
  Synthetic
gcauuuuugacugacaug

SEQ ID NO: 600805 - RNA, 19 nt, Artificial Sequence
  Synthetic
cgcauuuuugacugacaug

SEQ ID NO: 600806 - RNA, 20 nt, Artificial Sequence
  Synthetic
acgcauuuuugacugacaug

SEQ ID NO: 600807 - RNA, 21 nt, Artificial Sequence
  Synthetic
cacgcauuuuugacugacaug

SEQ ID NO: 600808 - RNA, 22 nt, Artificial Sequence
  Synthetic
ccacgcauuuuugacugacaug

SEQ ID NO: 600809 - RNA, 23 nt, Artificial Sequence
  Synthetic
uccacgcauuuuugacugacaug

SEQ ID NO: 600810 - RNA, 24 nt, Artificial Sequence
  Synthetic
uuccacgcauuuuugacugacaug

SEQ ID NO: 600811 - RNA, 18 nt, Artificial Sequence
  Synthetic
ggcuccacccuugacaug

SEQ ID NO: 600812 - RNA, 19 nt, Artificial Sequence
  Synthetic
uggcuccacccuugacaug

SEQ ID NO: 600813 - RNA, 20 nt, Artificial Sequence
  Synthetic
cuggcuccacccuugacaug

SEQ ID NO: 600814 - RNA, 21 nt, Artificial Sequence
  Synthetic
ccuggcuccacccuugacaug

SEQ ID NO: 600815 - RNA, 22 nt, Artificial Sequence
  Synthetic
accuggcuccacccuugacaug

SEQ ID NO: 600816 - RNA, 23 nt, Artificial Sequence
  Synthetic
caccuggcuccacccuugacaug

SEQ ID NO: 600817 - RNA, 24 nt, Artificial Sequence
  Synthetic
gcaccuggcuccacccuugacaug

SEQ ID NO: 600818 - RNA, 18 nt, Artificial Sequence
  Synthetic
ucucucucccuugacaug

SEQ ID NO: 600819 - RNA, 19 nt, Artificial Sequence
  Synthetic
gucucucucccuugacaug

SEQ ID NO: 600820 - RNA, 20 nt, Artificial Sequence
  Synthetic
ggucucucucccuugacaug

SEQ ID NO: 600821 - RNA, 21 nt, Artificial Sequence
  Synthetic
uggucucucucccuugacaug

SEQ ID NO: 600822 - RNA, 22 nt, Artificial Sequence
  Synthetic
cuggucucucucccuugacaug

SEQ ID NO: 600823 - RNA, 23 nt, Artificial Sequence
  Synthetic
ccuggucucucucccuugacaug

SEQ ID NO: 600824 - RNA, 24 nt, Artificial Sequence
  Synthetic
accuggucucucucccuugacaug

SEQ ID NO: 600825 - RNA, 18 nt, Artificial Sequence
  Synthetic
gaauaaagaaaauacaug

SEQ ID NO: 600826 - RNA, 19 nt, Artificial Sequence
  Synthetic
ggaauaaagaaaauacaug

SEQ ID NO: 600827 - RNA, 20 nt, Artificial Sequence
  Synthetic
gggaauaaagaaaauacaug

SEQ ID NO: 600828 - RNA, 21 nt, Artificial Sequence
  Synthetic
agggaauaaagaaaauacaug

SEQ ID NO: 600829 - RNA, 22 nt, Artificial Sequence
  Synthetic
aagggaauaaagaaaauacaug

SEQ ID NO: 600830 - RNA, 23 nt, Artificial Sequence
  Synthetic
aaagggaauaaagaaaauacaug

SEQ ID NO: 600831 - RNA, 24 nt, Artificial Sequence
  Synthetic
aaaagggaauaaagaaaauacaug

SEQ ID NO: 600832 - RNA, 18 nt, Artificial Sequence
  Synthetic
caauaucuaaaauacaug

SEQ ID NO: 600833 - RNA, 19 nt, Artificial Sequence
  Synthetic
ucaauaucuaaaauacaug

SEQ ID NO: 600834 - RNA, 20 nt, Artificial Sequence
  Synthetic
gucaauaucuaaaauacaug

SEQ ID NO: 600835 - RNA, 21 nt, Artificial Sequence
  Synthetic
ugucaauaucuaaaauacaug

SEQ ID NO: 600836 - RNA, 22 nt, Artificial Sequence
  Synthetic
gugucaauaucuaaaauacaug

SEQ ID NO: 600837 - RNA, 23 nt, Artificial Sequence
  Synthetic
ggugucaauaucuaaaauacaug

SEQ ID NO: 600838 - RNA, 24 nt, Artificial Sequence
  Synthetic
aggugucaauaucuaaaauacaug

SEQ ID NO: 600839 - RNA, 18 nt, Artificial Sequence
  Synthetic
aaauauuaggaauacaug

SEQ ID NO: 600840 - RNA, 19 nt, Artificial Sequence
  Synthetic
gaaauauuaggaauacaug

SEQ ID NO: 600841 - RNA, 20 nt, Artificial Sequence
  Synthetic
ggaaauauuaggaauacaug

SEQ ID NO: 600842 - RNA, 21 nt, Artificial Sequence
  Synthetic
aggaaauauuaggaauacaug

SEQ ID NO: 600843 - RNA, 22 nt, Artificial Sequence
  Synthetic
uaggaaauauuaggaauacaug

SEQ ID NO: 600844 - RNA, 23 nt, Artificial Sequence
  Synthetic
uuaggaaauauuaggaauacaug

SEQ ID NO: 600845 - RNA, 24 nt, Artificial Sequence
  Synthetic
uuuaggaaauauuaggaauacaug

SEQ ID NO: 600846 - RNA, 18 nt, Artificial Sequence
  Synthetic
ucuauuauugaauacaug

SEQ ID NO: 600847 - RNA, 19 nt, Artificial Sequence
  Synthetic
uucuauuauugaauacaug

SEQ ID NO: 600848 - RNA, 20 nt, Artificial Sequence
  Synthetic
auucuauuauugaauacaug

SEQ ID NO: 600849 - RNA, 21 nt, Artificial Sequence
  Synthetic
cauucuauuauugaauacaug

SEQ ID NO: 600850 - RNA, 22 nt, Artificial Sequence
  Synthetic
gcauucuauuauugaauacaug

SEQ ID NO: 600851 - RNA, 23 nt, Artificial Sequence
  Synthetic
agcauucuauuauugaauacaug

SEQ ID NO: 600852 - RNA, 24 nt, Artificial Sequence
  Synthetic
aagcauucuauuauugaauacaug

SEQ ID NO: 600853 - RNA, 18 nt, Artificial Sequence
  Synthetic
aacuuguugagauacaug

SEQ ID NO: 600854 - RNA, 19 nt, Artificial Sequence
  Synthetic
uaacuuguugagauacaug

SEQ ID NO: 600855 - RNA, 20 nt, Artificial Sequence
  Synthetic
guaacuuguugagauacaug

SEQ ID NO: 600856 - RNA, 21 nt, Artificial Sequence
  Synthetic
uguaacuuguugagauacaug

SEQ ID NO: 600857 - RNA, 22 nt, Artificial Sequence
  Synthetic
guguaacuuguugagauacaug

SEQ ID NO: 600858 - RNA, 23 nt, Artificial Sequence
  Synthetic
uguguaacuuguugagauacaug

SEQ ID NO: 600859 - RNA, 24 nt, Artificial Sequence
  Synthetic
auguguaacuuguugagauacaug

SEQ ID NO: 600860 - RNA, 18 nt, Artificial Sequence
  Synthetic
ucuuuuuaaauauacaug

SEQ ID NO: 600861 - RNA, 19 nt, Artificial Sequence
  Synthetic
cucuuuuuaaauauacaug

SEQ ID NO: 600862 - RNA, 20 nt, Artificial Sequence
  Synthetic
gcucuuuuuaaauauacaug

SEQ ID NO: 600863 - RNA, 21 nt, Artificial Sequence
  Synthetic
cgcucuuuuuaaauauacaug

SEQ ID NO: 600864 - RNA, 22 nt, Artificial Sequence
  Synthetic
acgcucuuuuuaaauauacaug

SEQ ID NO: 600865 - RNA, 23 nt, Artificial Sequence
  Synthetic
aacgcucuuuuuaaauauacaug

SEQ ID NO: 600866 - RNA, 24 nt, Artificial Sequence
  Synthetic
uaacgcucuuuuuaaauauacaug

SEQ ID NO: 600867 - RNA, 18 nt, Artificial Sequence
  Synthetic
gcacagucuguauacaug

SEQ ID NO: 600868 - RNA, 19 nt, Artificial Sequence
  Synthetic
ugcacagucuguauacaug

SEQ ID NO: 600869 - RNA, 20 nt, Artificial Sequence
  Synthetic
gugcacagucuguauacaug

SEQ ID NO: 600870 - RNA, 21 nt, Artificial Sequence
  Synthetic
ugugcacagucuguauacaug

SEQ ID NO: 600871 - RNA, 22 nt, Artificial Sequence
  Synthetic
augugcacagucuguauacaug

SEQ ID NO: 600872 - RNA, 23 nt, Artificial Sequence
  Synthetic
caugugcacagucuguauacaug

SEQ ID NO: 600873 - RNA, 24 nt, Artificial Sequence
  Synthetic
ucaugugcacagucuguauacaug

SEQ ID NO: 600874 - RNA, 18 nt, Artificial Sequence
  Synthetic
gugggugcuugcuacaug

SEQ ID NO: 600875 - RNA, 19 nt, Artificial Sequence
  Synthetic
agugggugcuugcuacaug

SEQ ID NO: 600876 - RNA, 20 nt, Artificial Sequence
  Synthetic
aagugggugcuugcuacaug

SEQ ID NO: 600877 - RNA, 21 nt, Artificial Sequence
  Synthetic
uaagugggugcuugcuacaug

SEQ ID NO: 600878 - RNA, 22 nt, Artificial Sequence
  Synthetic
cuaagugggugcuugcuacaug

SEQ ID NO: 600879 - RNA, 23 nt, Artificial Sequence
  Synthetic
acuaagugggugcuugcuacaug

SEQ ID NO: 600880 - RNA, 24 nt, Artificial Sequence
  Synthetic
uacuaagugggugcuugcuacaug

SEQ ID NO: 600881 - RNA, 18 nt, Artificial Sequence
  Synthetic
gacucaccauucuacaug

SEQ ID NO: 600882 - RNA, 19 nt, Artificial Sequence
  Synthetic
ggacucaccauucuacaug

SEQ ID NO: 600883 - RNA, 20 nt, Artificial Sequence
  Synthetic
uggacucaccauucuacaug

SEQ ID NO: 600884 - RNA, 21 nt, Artificial Sequence
  Synthetic
auggacucaccauucuacaug

SEQ ID NO: 600885 - RNA, 22 nt, Artificial Sequence
  Synthetic
aauggacucaccauucuacaug

SEQ ID NO: 600886 - RNA, 23 nt, Artificial Sequence
  Synthetic
uaauggacucaccauucuacaug

SEQ ID NO: 600887 - RNA, 24 nt, Artificial Sequence
  Synthetic
uuaauggacucaccauucuacaug

SEQ ID NO: 600888 - RNA, 18 nt, Artificial Sequence
  Synthetic
aagccucugaaguacaug

SEQ ID NO: 600889 - RNA, 19 nt, Artificial Sequence
  Synthetic
caagccucugaaguacaug

SEQ ID NO: 600890 - RNA, 20 nt, Artificial Sequence
  Synthetic
ucaagccucugaaguacaug

SEQ ID NO: 600891 - RNA, 21 nt, Artificial Sequence
  Synthetic
cucaagccucugaaguacaug

SEQ ID NO: 600892 - RNA, 22 nt, Artificial Sequence
  Synthetic
ucucaagccucugaaguacaug

SEQ ID NO: 600893 - RNA, 23 nt, Artificial Sequence
  Synthetic
uucucaagccucugaaguacaug

SEQ ID NO: 600894 - RNA, 24 nt, Artificial Sequence
  Synthetic
uuucucaagccucugaaguacaug

SEQ ID NO: 600895 - RNA, 18 nt, Artificial Sequence
  Synthetic
cagggauccuaguacaug

SEQ ID NO: 600896 - RNA, 19 nt, Artificial Sequence
  Synthetic
ucagggauccuaguacaug

SEQ ID NO: 600897 - RNA, 20 nt, Artificial Sequence
  Synthetic
aucagggauccuaguacaug

SEQ ID NO: 600898 - RNA, 21 nt, Artificial Sequence
  Synthetic
caucagggauccuaguacaug

SEQ ID NO: 600899 - RNA, 22 nt, Artificial Sequence
  Synthetic
acaucagggauccuaguacaug

SEQ ID NO: 600900 - RNA, 23 nt, Artificial Sequence
  Synthetic
cacaucagggauccuaguacaug

SEQ ID NO: 600901 - RNA, 24 nt, Artificial Sequence
  Synthetic
acacaucagggauccuaguacaug

SEQ ID NO: 600902 - RNA, 18 nt, Artificial Sequence
  Synthetic
cuguuuauucauuacaug

SEQ ID NO: 600903 - RNA, 19 nt, Artificial Sequence
  Synthetic
acuguuuauucauuacaug

SEQ ID NO: 600904 - RNA, 20 nt, Artificial Sequence
  Synthetic
gacuguuuauucauuacaug

SEQ ID NO: 600905 - RNA, 21 nt, Artificial Sequence
  Synthetic
ugacuguuuauucauuacaug

SEQ ID NO: 600906 - RNA, 22 nt, Artificial Sequence
  Synthetic
uugacuguuuauucauuacaug

SEQ ID NO: 600907 - RNA, 23 nt, Artificial Sequence
  Synthetic
uuugacuguuuauucauuacaug

SEQ ID NO: 600908 - RNA, 24 nt, Artificial Sequence
  Synthetic
auuugacuguuuauucauuacaug

SEQ ID NO: 600909 - RNA, 18 nt, Artificial Sequence
  Synthetic
auuuacauauauuacaug

SEQ ID NO: 600910 - RNA, 19 nt, Artificial Sequence
  Synthetic
uauuuacauauauuacaug

SEQ ID NO: 600911 - RNA, 20 nt, Artificial Sequence
  Synthetic
uuauuuacauauauuacaug

SEQ ID NO: 600912 - RNA, 21 nt, Artificial Sequence
  Synthetic
auuauuuacauauauuacaug

SEQ ID NO: 600913 - RNA, 22 nt, Artificial Sequence
  Synthetic
gauuauuuacauauauuacaug

SEQ ID NO: 600914 - RNA, 23 nt, Artificial Sequence
  Synthetic
ugauuauuuacauauauuacaug

SEQ ID NO: 600915 - RNA, 24 nt, Artificial Sequence
  Synthetic
uugauuauuuacauauauuacaug

SEQ ID NO: 600916 - RNA, 18 nt, Artificial Sequence
  Synthetic
ucgguguguccuuacaug

SEQ ID NO: 600917 - RNA, 19 nt, Artificial Sequence
  Synthetic
uucgguguguccuuacaug

SEQ ID NO: 600918 - RNA, 20 nt, Artificial Sequence
  Synthetic
cuucgguguguccuuacaug

SEQ ID NO: 600919 - RNA, 21 nt, Artificial Sequence
  Synthetic
ucuucgguguguccuuacaug

SEQ ID NO: 600920 - RNA, 22 nt, Artificial Sequence
  Synthetic
aucuucgguguguccuuacaug

SEQ ID NO: 600921 - RNA, 23 nt, Artificial Sequence
  Synthetic
caucuucgguguguccuuacaug

SEQ ID NO: 600922 - RNA, 24 nt, Artificial Sequence
  Synthetic
gcaucuucgguguguccuuacaug

SEQ ID NO: 600923 - RNA, 18 nt, Artificial Sequence
  Synthetic
guuuagcuacuuuacaug

SEQ ID NO: 600924 - RNA, 19 nt, Artificial Sequence
  Synthetic
aguuuagcuacuuuacaug

SEQ ID NO: 600925 - RNA, 20 nt, Artificial Sequence
  Synthetic
uaguuuagcuacuuuacaug

SEQ ID NO: 600926 - RNA, 21 nt, Artificial Sequence
  Synthetic
guaguuuagcuacuuuacaug

SEQ ID NO: 600927 - RNA, 22 nt, Artificial Sequence
  Synthetic
aguaguuuagcuacuuuacaug

SEQ ID NO: 600928 - RNA, 23 nt, Artificial Sequence
  Synthetic
caguaguuuagcuacuuuacaug

SEQ ID NO: 600929 - RNA, 24 nt, Artificial Sequence
  Synthetic
acaguaguuuagcuacuuuacaug

SEQ ID NO: 600930 - RNA, 18 nt, Artificial Sequence
  Synthetic
accaaaccaguuuacaug

SEQ ID NO: 600931 - RNA, 19 nt, Artificial Sequence
  Synthetic
caccaaaccaguuuacaug

SEQ ID NO: 600932 - RNA, 20 nt, Artificial Sequence
  Synthetic
ccaccaaaccaguuuacaug

SEQ ID NO: 600933 - RNA, 21 nt, Artificial Sequence
  Synthetic
uccaccaaaccaguuuacaug

SEQ ID NO: 600934 - RNA, 22 nt, Artificial Sequence
  Synthetic
guccaccaaaccaguuuacaug

SEQ ID NO: 600935 - RNA, 23 nt, Artificial Sequence
  Synthetic
uguccaccaaaccaguuuacaug

SEQ ID NO: 600936 - RNA, 24 nt, Artificial Sequence
  Synthetic
uuguccaccaaaccaguuuacaug

SEQ ID NO: 600937 - RNA, 18 nt, Artificial Sequence
  Synthetic
aguuuacaaccaaccaug

SEQ ID NO: 600938 - RNA, 19 nt, Artificial Sequence
  Synthetic
aaguuuacaaccaaccaug

SEQ ID NO: 600939 - RNA, 20 nt, Artificial Sequence
  Synthetic
gaaguuuacaaccaaccaug

SEQ ID NO: 600940 - RNA, 21 nt, Artificial Sequence
  Synthetic
ggaaguuuacaaccaaccaug

SEQ ID NO: 600941 - RNA, 22 nt, Artificial Sequence
  Synthetic
aggaaguuuacaaccaaccaug

SEQ ID NO: 600942 - RNA, 23 nt, Artificial Sequence
  Synthetic
caggaaguuuacaaccaaccaug

SEQ ID NO: 600943 - RNA, 24 nt, Artificial Sequence
  Synthetic
ucaggaaguuuacaaccaaccaug

SEQ ID NO: 600944 - RNA, 18 nt, Artificial Sequence
  Synthetic
gguggguggguaaccaug

SEQ ID NO: 600945 - RNA, 19 nt, Artificial Sequence
  Synthetic
agguggguggguaaccaug

SEQ ID NO: 600946 - RNA, 20 nt, Artificial Sequence
  Synthetic
gagguggguggguaaccaug

SEQ ID NO: 600947 - RNA, 21 nt, Artificial Sequence
  Synthetic
agagguggguggguaaccaug

SEQ ID NO: 600948 - RNA, 22 nt, Artificial Sequence
  Synthetic
gagagguggguggguaaccaug

SEQ ID NO: 600949 - RNA, 23 nt, Artificial Sequence
  Synthetic
agagagguggguggguaaccaug

SEQ ID NO: 600950 - RNA, 24 nt, Artificial Sequence
  Synthetic
cagagagguggguggguaaccaug

SEQ ID NO: 600951 - RNA, 18 nt, Artificial Sequence
  Synthetic
guugugggagggaccaug

SEQ ID NO: 600952 - RNA, 19 nt, Artificial Sequence
  Synthetic
uguugugggagggaccaug

SEQ ID NO: 600953 - RNA, 20 nt, Artificial Sequence
  Synthetic
guguugugggagggaccaug

SEQ ID NO: 600954 - RNA, 21 nt, Artificial Sequence
  Synthetic
cguguugugggagggaccaug

SEQ ID NO: 600955 - RNA, 22 nt, Artificial Sequence
  Synthetic
acguguugugggagggaccaug

SEQ ID NO: 600956 - RNA, 23 nt, Artificial Sequence
  Synthetic
cacguguugugggagggaccaug

SEQ ID NO: 600957 - RNA, 24 nt, Artificial Sequence
  Synthetic
ccacguguugugggagggaccaug

SEQ ID NO: 600958 - RNA, 18 nt, Artificial Sequence
  Synthetic
auaggucacuggaccaug

SEQ ID NO: 600959 - RNA, 19 nt, Artificial Sequence
  Synthetic
uauaggucacuggaccaug

SEQ ID NO: 600960 - RNA, 20 nt, Artificial Sequence
  Synthetic
uuauaggucacuggaccaug

SEQ ID NO: 600961 - RNA, 21 nt, Artificial Sequence
  Synthetic
uuuauaggucacuggaccaug

SEQ ID NO: 600962 - RNA, 22 nt, Artificial Sequence
  Synthetic
cuuuauaggucacuggaccaug

SEQ ID NO: 600963 - RNA, 23 nt, Artificial Sequence
  Synthetic
acuuuauaggucacuggaccaug

SEQ ID NO: 600964 - RNA, 24 nt, Artificial Sequence
  Synthetic
cacuuuauaggucacuggaccaug

SEQ ID NO: 600965 - RNA, 18 nt, Artificial Sequence
  Synthetic
auuucugaguggaccaug

SEQ ID NO: 600966 - RNA, 19 nt, Artificial Sequence
  Synthetic
uauuucugaguggaccaug

SEQ ID NO: 600967 - RNA, 20 nt, Artificial Sequence
  Synthetic
auauuucugaguggaccaug

SEQ ID NO: 600968 - RNA, 21 nt, Artificial Sequence
  Synthetic
uauauuucugaguggaccaug

SEQ ID NO: 600969 - RNA, 22 nt, Artificial Sequence
  Synthetic
auauauuucugaguggaccaug

SEQ ID NO: 600970 - RNA, 23 nt, Artificial Sequence
  Synthetic
gauauauuucugaguggaccaug

SEQ ID NO: 600971 - RNA, 24 nt, Artificial Sequence
  Synthetic
agauauauuucugaguggaccaug

SEQ ID NO: 600972 - RNA, 18 nt, Artificial Sequence
  Synthetic
gguuuccaagugaccaug

SEQ ID NO: 600973 - RNA, 19 nt, Artificial Sequence
  Synthetic
ggguuuccaagugaccaug

SEQ ID NO: 600974 - RNA, 20 nt, Artificial Sequence
  Synthetic
uggguuuccaagugaccaug

SEQ ID NO: 600975 - RNA, 21 nt, Artificial Sequence
  Synthetic
cuggguuuccaagugaccaug

SEQ ID NO: 600976 - RNA, 22 nt, Artificial Sequence
  Synthetic
ucuggguuuccaagugaccaug

SEQ ID NO: 600977 - RNA, 23 nt, Artificial Sequence
  Synthetic
gucuggguuuccaagugaccaug

SEQ ID NO: 600978 - RNA, 24 nt, Artificial Sequence
  Synthetic
agucuggguuuccaagugaccaug

SEQ ID NO: 600979 - RNA, 18 nt, Artificial Sequence
  Synthetic
uuugggaucuugaccaug

SEQ ID NO: 600980 - RNA, 19 nt, Artificial Sequence
  Synthetic
auuugggaucuugaccaug

SEQ ID NO: 600981 - RNA, 20 nt, Artificial Sequence
  Synthetic
gauuugggaucuugaccaug

SEQ ID NO: 600982 - RNA, 21 nt, Artificial Sequence
  Synthetic
ugauuugggaucuugaccaug

SEQ ID NO: 600983 - RNA, 22 nt, Artificial Sequence
  Synthetic
uugauuugggaucuugaccaug

SEQ ID NO: 600984 - RNA, 23 nt, Artificial Sequence
  Synthetic
uuugauuugggaucuugaccaug

SEQ ID NO: 600985 - RNA, 24 nt, Artificial Sequence
  Synthetic
uuuugauuugggaucuugaccaug

SEQ ID NO: 600986 - RNA, 18 nt, Artificial Sequence
  Synthetic
ucuucuauuguuaccaug

SEQ ID NO: 600987 - RNA, 19 nt, Artificial Sequence
  Synthetic
uucuucuauuguuaccaug

SEQ ID NO: 600988 - RNA, 20 nt, Artificial Sequence
  Synthetic
cuucuucuauuguuaccaug

SEQ ID NO: 600989 - RNA, 21 nt, Artificial Sequence
  Synthetic
gcuucuucuauuguuaccaug

SEQ ID NO: 600990 - RNA, 22 nt, Artificial Sequence
  Synthetic
agcuucuucuauuguuaccaug

SEQ ID NO: 600991 - RNA, 23 nt, Artificial Sequence
  Synthetic
aagcuucuucuauuguuaccaug

SEQ ID NO: 600992 - RNA, 24 nt, Artificial Sequence
  Synthetic
aaagcuucuucuauuguuaccaug

SEQ ID NO: 600993 - RNA, 18 nt, Artificial Sequence
  Synthetic
uagcuguaagcacccaug

SEQ ID NO: 600994 - RNA, 19 nt, Artificial Sequence
  Synthetic
auagcuguaagcacccaug

SEQ ID NO: 600995 - RNA, 20 nt, Artificial Sequence
  Synthetic
cauagcuguaagcacccaug

SEQ ID NO: 600996 - RNA, 21 nt, Artificial Sequence
  Synthetic
gcauagcuguaagcacccaug

SEQ ID NO: 600997 - RNA, 22 nt, Artificial Sequence
  Synthetic
ugcauagcuguaagcacccaug

SEQ ID NO: 600998 - RNA, 23 nt, Artificial Sequence
  Synthetic
augcauagcuguaagcacccaug

SEQ ID NO: 600999 - RNA, 24 nt, Artificial Sequence
  Synthetic
aaugcauagcuguaagcacccaug

SEQ ID NO: 601000 - RNA, 18 nt, Artificial Sequence
  Synthetic
aagaggggaagacccaug

SEQ ID NO: 601001 - RNA, 19 nt, Artificial Sequence
  Synthetic
gaagaggggaagacccaug

SEQ ID NO: 601002 - RNA, 20 nt, Artificial Sequence
  Synthetic
ggaagaggggaagacccaug

SEQ ID NO: 601003 - RNA, 21 nt, Artificial Sequence
  Synthetic
gggaagaggggaagacccaug

SEQ ID NO: 601004 - RNA, 22 nt, Artificial Sequence
  Synthetic
agggaagaggggaagacccaug

SEQ ID NO: 601005 - RNA, 23 nt, Artificial Sequence
  Synthetic
gagggaagaggggaagacccaug

SEQ ID NO: 601006 - RNA, 24 nt, Artificial Sequence
  Synthetic
ggagggaagaggggaagacccaug

SEQ ID NO: 601007 - RNA, 18 nt, Artificial Sequence
  Synthetic
agauuuuucuaccccaug

SEQ ID NO: 601008 - RNA, 19 nt, Artificial Sequence
  Synthetic
uagauuuuucuaccccaug

SEQ ID NO: 601009 - RNA, 20 nt, Artificial Sequence
  Synthetic
cuagauuuuucuaccccaug

SEQ ID NO: 601010 - RNA, 21 nt, Artificial Sequence
  Synthetic
acuagauuuuucuaccccaug

SEQ ID NO: 601011 - RNA, 22 nt, Artificial Sequence
  Synthetic
aacuagauuuuucuaccccaug

SEQ ID NO: 601012 - RNA, 23 nt, Artificial Sequence
  Synthetic
caacuagauuuuucuaccccaug

SEQ ID NO: 601013 - RNA, 24 nt, Artificial Sequence
  Synthetic
acaacuagauuuuucuaccccaug

SEQ ID NO: 601014 - RNA, 18 nt, Artificial Sequence
  Synthetic
guagguuuuggccccaug

SEQ ID NO: 601015 - RNA, 19 nt, Artificial Sequence
  Synthetic
cguagguuuuggccccaug

SEQ ID NO: 601016 - RNA, 20 nt, Artificial Sequence
  Synthetic
acguagguuuuggccccaug

SEQ ID NO: 601017 - RNA, 21 nt, Artificial Sequence
  Synthetic
cacguagguuuuggccccaug

SEQ ID NO: 601018 - RNA, 22 nt, Artificial Sequence
  Synthetic
gcacguagguuuuggccccaug

SEQ ID NO: 601019 - RNA, 23 nt, Artificial Sequence
  Synthetic
ugcacguagguuuuggccccaug

SEQ ID NO: 601020 - RNA, 24 nt, Artificial Sequence
  Synthetic
augcacguagguuuuggccccaug

SEQ ID NO: 601021 - RNA, 18 nt, Artificial Sequence
  Synthetic
cuugcucuauuccccaug

SEQ ID NO: 601022 - RNA, 19 nt, Artificial Sequence
  Synthetic
ucuugcucuauuccccaug

SEQ ID NO: 601023 - RNA, 20 nt, Artificial Sequence
  Synthetic
gucuugcucuauuccccaug

SEQ ID NO: 601024 - RNA, 21 nt, Artificial Sequence
  Synthetic
agucuugcucuauuccccaug

SEQ ID NO: 601025 - RNA, 22 nt, Artificial Sequence
  Synthetic
aagucuugcucuauuccccaug

SEQ ID NO: 601026 - RNA, 23 nt, Artificial Sequence
  Synthetic
gaagucuugcucuauuccccaug

SEQ ID NO: 601027 - RNA, 24 nt, Artificial Sequence
  Synthetic
agaagucuugcucuauuccccaug

SEQ ID NO: 601028 - RNA, 18 nt, Artificial Sequence
  Synthetic
caguuuguuaagcccaug

SEQ ID NO: 601029 - RNA, 19 nt, Artificial Sequence
  Synthetic
ucaguuuguuaagcccaug

SEQ ID NO: 601030 - RNA, 20 nt, Artificial Sequence
  Synthetic
uucaguuuguuaagcccaug

SEQ ID NO: 601031 - RNA, 21 nt, Artificial Sequence
  Synthetic
uuucaguuuguuaagcccaug

SEQ ID NO: 601032 - RNA, 22 nt, Artificial Sequence
  Synthetic
guuucaguuuguuaagcccaug

SEQ ID NO: 601033 - RNA, 23 nt, Artificial Sequence
  Synthetic
uguuucaguuuguuaagcccaug

SEQ ID NO: 601034 - RNA, 24 nt, Artificial Sequence
  Synthetic
guguuucaguuuguuaagcccaug

SEQ ID NO: 601035 - RNA, 18 nt, Artificial Sequence
  Synthetic
ucagaauaagggcccaug

SEQ ID NO: 601036 - RNA, 19 nt, Artificial Sequence
  Synthetic
aucagaauaagggcccaug

SEQ ID NO: 601037 - RNA, 20 nt, Artificial Sequence
  Synthetic
uaucagaauaagggcccaug

SEQ ID NO: 601038 - RNA, 21 nt, Artificial Sequence
  Synthetic
guaucagaauaagggcccaug

SEQ ID NO: 601039 - RNA, 22 nt, Artificial Sequence
  Synthetic
aguaucagaauaagggcccaug

SEQ ID NO: 601040 - RNA, 23 nt, Artificial Sequence
  Synthetic
aaguaucagaauaagggcccaug

SEQ ID NO: 601041 - RNA, 24 nt, Artificial Sequence
  Synthetic
aaaguaucagaauaagggcccaug

SEQ ID NO: 601042 - RNA, 18 nt, Artificial Sequence
  Synthetic
cacucaaguagucccaug

SEQ ID NO: 601043 - RNA, 19 nt, Artificial Sequence
  Synthetic
acacucaaguagucccaug

SEQ ID NO: 601044 - RNA, 20 nt, Artificial Sequence
  Synthetic
aacacucaaguagucccaug

SEQ ID NO: 601045 - RNA, 21 nt, Artificial Sequence
  Synthetic
gaacacucaaguagucccaug

SEQ ID NO: 601046 - RNA, 22 nt, Artificial Sequence
  Synthetic
agaacacucaaguagucccaug

SEQ ID NO: 601047 - RNA, 23 nt, Artificial Sequence
  Synthetic
aagaacacucaaguagucccaug

SEQ ID NO: 601048 - RNA, 24 nt, Artificial Sequence
  Synthetic
uaagaacacucaaguagucccaug

SEQ ID NO: 601049 - RNA, 18 nt, Artificial Sequence
  Synthetic
gaggccuacccagccaug

SEQ ID NO: 601050 - RNA, 19 nt, Artificial Sequence
  Synthetic
ugaggccuacccagccaug

SEQ ID NO: 601051 - RNA, 20 nt, Artificial Sequence
  Synthetic
cugaggccuacccagccaug

SEQ ID NO: 601052 - RNA, 21 nt, Artificial Sequence
  Synthetic
ccugaggccuacccagccaug

SEQ ID NO: 601053 - RNA, 22 nt, Artificial Sequence
  Synthetic
uccugaggccuacccagccaug

SEQ ID NO: 601054 - RNA, 23 nt, Artificial Sequence
  Synthetic
uuccugaggccuacccagccaug

SEQ ID NO: 601055 - RNA, 24 nt, Artificial Sequence
  Synthetic
uuuccugaggccuacccagccaug

SEQ ID NO: 601056 - RNA, 21 nt, Artificial Sequence
  Synthetic
ccugaggccuccccagccaug

SEQ ID NO: 601057 - RNA, 22 nt, Artificial Sequence
  Synthetic
cccugaggccuccccagccaug

SEQ ID NO: 601058 - RNA, 23 nt, Artificial Sequence
  Synthetic
ucccugaggccuccccagccaug

SEQ ID NO: 601059 - RNA, 24 nt, Artificial Sequence
  Synthetic
uucccugaggccuccccagccaug

SEQ ID NO: 601060 - RNA, 22 nt, Artificial Sequence
  Synthetic
uccugaggccuccccagccaug

SEQ ID NO: 601061 - RNA, 23 nt, Artificial Sequence
  Synthetic
uuccugaggccuccccagccaug

SEQ ID NO: 601062 - RNA, 24 nt, Artificial Sequence
  Synthetic
uuuccugaggccuccccagccaug

SEQ ID NO: 601063 - RNA, 18 nt, Artificial Sequence
  Synthetic
gggguggucccagccaug

SEQ ID NO: 601064 - RNA, 19 nt, Artificial Sequence
  Synthetic
agggguggucccagccaug

SEQ ID NO: 601065 - RNA, 20 nt, Artificial Sequence
  Synthetic
uagggguggucccagccaug

SEQ ID NO: 601066 - RNA, 21 nt, Artificial Sequence
  Synthetic
uuagggguggucccagccaug

SEQ ID NO: 601067 - RNA, 22 nt, Artificial Sequence
  Synthetic
uuuagggguggucccagccaug

SEQ ID NO: 601068 - RNA, 23 nt, Artificial Sequence
  Synthetic
uuuuagggguggucccagccaug

SEQ ID NO: 601069 - RNA, 24 nt, Artificial Sequence
  Synthetic
guuuuagggguggucccagccaug

SEQ ID NO: 601070 - RNA, 18 nt, Artificial Sequence
  Synthetic
gaggccucuccagccaug

SEQ ID NO: 601071 - RNA, 19 nt, Artificial Sequence
  Synthetic
ugaggccucuccagccaug

SEQ ID NO: 601072 - RNA, 20 nt, Artificial Sequence
  Synthetic
gugaggccucuccagccaug

SEQ ID NO: 601073 - RNA, 21 nt, Artificial Sequence
  Synthetic
ugugaggccucuccagccaug

SEQ ID NO: 601074 - RNA, 22 nt, Artificial Sequence
  Synthetic
uugugaggccucuccagccaug

SEQ ID NO: 601075 - RNA, 23 nt, Artificial Sequence
  Synthetic
auugugaggccucuccagccaug

SEQ ID NO: 601076 - RNA, 24 nt, Artificial Sequence
  Synthetic
gauugugaggccucuccagccaug

SEQ ID NO: 601077 - RNA, 18 nt, Artificial Sequence
  Synthetic
ccauaucaagcagccaug

SEQ ID NO: 601078 - RNA, 19 nt, Artificial Sequence
  Synthetic
uccauaucaagcagccaug

SEQ ID NO: 601079 - RNA, 20 nt, Artificial Sequence
  Synthetic
auccauaucaagcagccaug

SEQ ID NO: 601080 - RNA, 21 nt, Artificial Sequence
  Synthetic
uauccauaucaagcagccaug

SEQ ID NO: 601081 - RNA, 22 nt, Artificial Sequence
  Synthetic
auauccauaucaagcagccaug

SEQ ID NO: 601082 - RNA, 23 nt, Artificial Sequence
  Synthetic
cauauccauaucaagcagccaug

SEQ ID NO: 601083 - RNA, 24 nt, Artificial Sequence
  Synthetic
acauauccauaucaagcagccaug

SEQ ID NO: 601084 - RNA, 18 nt, Artificial Sequence
  Synthetic
cuuuagaacucagccaug

SEQ ID NO: 601085 - RNA, 19 nt, Artificial Sequence
  Synthetic
ucuuuagaacucagccaug

SEQ ID NO: 601086 - RNA, 20 nt, Artificial Sequence
  Synthetic
aucuuuagaacucagccaug

SEQ ID NO: 601087 - RNA, 21 nt, Artificial Sequence
  Synthetic
gaucuuuagaacucagccaug

SEQ ID NO: 601088 - RNA, 22 nt, Artificial Sequence
  Synthetic
agaucuuuagaacucagccaug

SEQ ID NO: 601089 - RNA, 23 nt, Artificial Sequence
  Synthetic
gagaucuuuagaacucagccaug

SEQ ID NO: 601090 - RNA, 24 nt, Artificial Sequence
  Synthetic
ugagaucuuuagaacucagccaug

SEQ ID NO: 601091 - RNA, 18 nt, Artificial Sequence
  Synthetic
uguuuuugcagagccaug

SEQ ID NO: 601092 - RNA, 19 nt, Artificial Sequence
  Synthetic
uuguuuuugcagagccaug

SEQ ID NO: 601093 - RNA, 20 nt, Artificial Sequence
  Synthetic
uuuguuuuugcagagccaug

SEQ ID NO: 601094 - RNA, 21 nt, Artificial Sequence
  Synthetic
auuuguuuuugcagagccaug

SEQ ID NO: 601095 - RNA, 22 nt, Artificial Sequence
  Synthetic
uauuuguuuuugcagagccaug

SEQ ID NO: 601096 - RNA, 23 nt, Artificial Sequence
  Synthetic
auauuuguuuuugcagagccaug

SEQ ID NO: 601097 - RNA, 24 nt, Artificial Sequence
  Synthetic
cauauuuguuuuugcagagccaug

SEQ ID NO: 601098 - RNA, 18 nt, Artificial Sequence
  Synthetic
ggaggcagaguagccaug

SEQ ID NO: 601099 - RNA, 19 nt, Artificial Sequence
  Synthetic
uggaggcagaguagccaug

SEQ ID NO: 601100 - RNA, 20 nt, Artificial Sequence
  Synthetic
cuggaggcagaguagccaug

SEQ ID NO: 601101 - RNA, 21 nt, Artificial Sequence
  Synthetic
ccuggaggcagaguagccaug

SEQ ID NO: 601102 - RNA, 22 nt, Artificial Sequence
  Synthetic
gccuggaggcagaguagccaug

SEQ ID NO: 601103 - RNA, 23 nt, Artificial Sequence
  Synthetic
ugccuggaggcagaguagccaug

SEQ ID NO: 601104 - RNA, 24 nt, Artificial Sequence
  Synthetic
gugccuggaggcagaguagccaug

SEQ ID NO: 601105 - RNA, 18 nt, Artificial Sequence
  Synthetic
aaggcagugugcgccaug

SEQ ID NO: 601106 - RNA, 19 nt, Artificial Sequence
  Synthetic
uaaggcagugugcgccaug

SEQ ID NO: 601107 - RNA, 20 nt, Artificial Sequence
  Synthetic
guaaggcagugugcgccaug

SEQ ID NO: 601108 - RNA, 21 nt, Artificial Sequence
  Synthetic
gguaaggcagugugcgccaug

SEQ ID NO: 601109 - RNA, 22 nt, Artificial Sequence
  Synthetic
agguaaggcagugugcgccaug

SEQ ID NO: 601110 - RNA, 23 nt, Artificial Sequence
  Synthetic
cagguaaggcagugugcgccaug

SEQ ID NO: 601111 - RNA, 24 nt, Artificial Sequence
  Synthetic
acagguaaggcagugugcgccaug

SEQ ID NO: 601112 - RNA, 18 nt, Artificial Sequence
  Synthetic
uaggugccuaaugccaug

SEQ ID NO: 601113 - RNA, 19 nt, Artificial Sequence
  Synthetic
cuaggugccuaaugccaug

SEQ ID NO: 601114 - RNA, 20 nt, Artificial Sequence
  Synthetic
ccuaggugccuaaugccaug

SEQ ID NO: 601115 - RNA, 21 nt, Artificial Sequence
  Synthetic
uccuaggugccuaaugccaug

SEQ ID NO: 601116 - RNA, 22 nt, Artificial Sequence
  Synthetic
uuccuaggugccuaaugccaug

SEQ ID NO: 601117 - RNA, 23 nt, Artificial Sequence
  Synthetic
cuuccuaggugccuaaugccaug

SEQ ID NO: 601118 - RNA, 24 nt, Artificial Sequence
  Synthetic
acuuccuaggugccuaaugccaug

SEQ ID NO: 601119 - RNA, 18 nt, Artificial Sequence
  Synthetic
cuucuuaaacaugccaug

SEQ ID NO: 601120 - RNA, 19 nt, Artificial Sequence
  Synthetic
ucuucuuaaacaugccaug

SEQ ID NO: 601121 - RNA, 20 nt, Artificial Sequence
  Synthetic
aucuucuuaaacaugccaug

SEQ ID NO: 601122 - RNA, 21 nt, Artificial Sequence
  Synthetic
caucuucuuaaacaugccaug

SEQ ID NO: 601123 - RNA, 22 nt, Artificial Sequence
  Synthetic
ucaucuucuuaaacaugccaug

SEQ ID NO: 601124 - RNA, 23 nt, Artificial Sequence
  Synthetic
gucaucuucuuaaacaugccaug

SEQ ID NO: 601125 - RNA, 24 nt, Artificial Sequence
  Synthetic
ugucaucuucuuaaacaugccaug

SEQ ID NO: 601126 - RNA, 18 nt, Artificial Sequence
  Synthetic
acaacagcaggugccaug

SEQ ID NO: 601127 - RNA, 19 nt, Artificial Sequence
  Synthetic
uacaacagcaggugccaug

SEQ ID NO: 601128 - RNA, 20 nt, Artificial Sequence
  Synthetic
guacaacagcaggugccaug

SEQ ID NO: 601129 - RNA, 21 nt, Artificial Sequence
  Synthetic
uguacaacagcaggugccaug

SEQ ID NO: 601130 - RNA, 22 nt, Artificial Sequence
  Synthetic
uuguacaacagcaggugccaug

SEQ ID NO: 601131 - RNA, 23 nt, Artificial Sequence
  Synthetic
auuguacaacagcaggugccaug

SEQ ID NO: 601132 - RNA, 24 nt, Artificial Sequence
  Synthetic
aauuguacaacagcaggugccaug

SEQ ID NO: 601133 - RNA, 18 nt, Artificial Sequence
  Synthetic
cuugguucuguugccaug

SEQ ID NO: 601134 - RNA, 19 nt, Artificial Sequence
  Synthetic
ucuugguucuguugccaug

SEQ ID NO: 601135 - RNA, 20 nt, Artificial Sequence
  Synthetic
cucuugguucuguugccaug

SEQ ID NO: 601136 - RNA, 21 nt, Artificial Sequence
  Synthetic
acucuugguucuguugccaug

SEQ ID NO: 601137 - RNA, 22 nt, Artificial Sequence
  Synthetic
gacucuugguucuguugccaug

SEQ ID NO: 601138 - RNA, 23 nt, Artificial Sequence
  Synthetic
agacucuugguucuguugccaug

SEQ ID NO: 601139 - RNA, 24 nt, Artificial Sequence
  Synthetic
gagacucuugguucuguugccaug

SEQ ID NO: 601140 - RNA, 18 nt, Artificial Sequence
  Synthetic
aucauuuauuuugccaug

SEQ ID NO: 601141 - RNA, 19 nt, Artificial Sequence
  Synthetic
gaucauuuauuuugccaug

SEQ ID NO: 601142 - RNA, 20 nt, Artificial Sequence
  Synthetic
ugaucauuuauuuugccaug

SEQ ID NO: 601143 - RNA, 21 nt, Artificial Sequence
  Synthetic
uugaucauuuauuuugccaug

SEQ ID NO: 601144 - RNA, 22 nt, Artificial Sequence
  Synthetic
guugaucauuuauuuugccaug

SEQ ID NO: 601145 - RNA, 23 nt, Artificial Sequence
  Synthetic
uguugaucauuuauuuugccaug

SEQ ID NO: 601146 - RNA, 24 nt, Artificial Sequence
  Synthetic
cuguugaucauuuauuuugccaug

SEQ ID NO: 601147 - RNA, 18 nt, Artificial Sequence
  Synthetic
auuacaagauaauccaug

SEQ ID NO: 601148 - RNA, 19 nt, Artificial Sequence
  Synthetic
uauuacaagauaauccaug

SEQ ID NO: 601149 - RNA, 20 nt, Artificial Sequence
  Synthetic
cuauuacaagauaauccaug

SEQ ID NO: 601150 - RNA, 21 nt, Artificial Sequence
  Synthetic
acuauuacaagauaauccaug

SEQ ID NO: 601151 - RNA, 22 nt, Artificial Sequence
  Synthetic
uacuauuacaagauaauccaug

SEQ ID NO: 601152 - RNA, 23 nt, Artificial Sequence
  Synthetic
uuacuauuacaagauaauccaug

SEQ ID NO: 601153 - RNA, 24 nt, Artificial Sequence
  Synthetic
cuuacuauuacaagauaauccaug

SEQ ID NO: 601154 - RNA, 18 nt, Artificial Sequence
  Synthetic
ccuccagguccauccaug

SEQ ID NO: 601155 - RNA, 19 nt, Artificial Sequence
  Synthetic
uccuccagguccauccaug

SEQ ID NO: 601156 - RNA, 20 nt, Artificial Sequence
  Synthetic
guccuccagguccauccaug

SEQ ID NO: 601157 - RNA, 21 nt, Artificial Sequence
  Synthetic
gguccuccagguccauccaug

SEQ ID NO: 601158 - RNA, 22 nt, Artificial Sequence
  Synthetic
agguccuccagguccauccaug

SEQ ID NO: 601159 - RNA, 23 nt, Artificial Sequence
  Synthetic
aagguccuccagguccauccaug

SEQ ID NO: 601160 - RNA, 24 nt, Artificial Sequence
  Synthetic
uaagguccuccagguccauccaug

SEQ ID NO: 601161 - RNA, 18 nt, Artificial Sequence
  Synthetic
caacugcaaucauccaug

SEQ ID NO: 601162 - RNA, 19 nt, Artificial Sequence
  Synthetic
acaacugcaaucauccaug

SEQ ID NO: 601163 - RNA, 20 nt, Artificial Sequence
  Synthetic
gacaacugcaaucauccaug

SEQ ID NO: 601164 - RNA, 21 nt, Artificial Sequence
  Synthetic
agacaacugcaaucauccaug

SEQ ID NO: 601165 - RNA, 22 nt, Artificial Sequence
  Synthetic
uagacaacugcaaucauccaug

SEQ ID NO: 601166 - RNA, 23 nt, Artificial Sequence
  Synthetic
auagacaacugcaaucauccaug

SEQ ID NO: 601167 - RNA, 24 nt, Artificial Sequence
  Synthetic
aauagacaacugcaaucauccaug

SEQ ID NO: 601168 - RNA, 18 nt, Artificial Sequence
  Synthetic
auaaauuuuugauccaug

SEQ ID NO: 601169 - RNA, 19 nt, Artificial Sequence
  Synthetic
aauaaauuuuugauccaug

SEQ ID NO: 601170 - RNA, 20 nt, Artificial Sequence
  Synthetic
aaauaaauuuuugauccaug

SEQ ID NO: 601171 - RNA, 21 nt, Artificial Sequence
  Synthetic
aaaauaaauuuuugauccaug

SEQ ID NO: 601172 - RNA, 22 nt, Artificial Sequence
  Synthetic
aaaaauaaauuuuugauccaug

SEQ ID NO: 601173 - RNA, 23 nt, Artificial Sequence
  Synthetic
uaaaaauaaauuuuugauccaug

SEQ ID NO: 601174 - RNA, 24 nt, Artificial Sequence
  Synthetic
uuaaaaauaaauuuuugauccaug

SEQ ID NO: 601175 - RNA, 18 nt, Artificial Sequence
  Synthetic
agcccaaacugcuccaug

SEQ ID NO: 601176 - RNA, 19 nt, Artificial Sequence
  Synthetic
aagcccaaacugcuccaug

SEQ ID NO: 601177 - RNA, 20 nt, Artificial Sequence
  Synthetic
aaagcccaaacugcuccaug

SEQ ID NO: 601178 - RNA, 21 nt, Artificial Sequence
  Synthetic
aaaagcccaaacugcuccaug

SEQ ID NO: 601179 - RNA, 22 nt, Artificial Sequence
  Synthetic
aaaaagcccaaacugcuccaug

SEQ ID NO: 601180 - RNA, 23 nt, Artificial Sequence
  Synthetic
gaaaaagcccaaacugcuccaug

SEQ ID NO: 601181 - RNA, 24 nt, Artificial Sequence
  Synthetic
ugaaaaagcccaaacugcuccaug

SEQ ID NO: 601182 - RNA, 18 nt, Artificial Sequence
  Synthetic
aacuaaaauaucuccaug

SEQ ID NO: 601183 - RNA, 19 nt, Artificial Sequence
  Synthetic
uaacuaaaauaucuccaug

SEQ ID NO: 601184 - RNA, 20 nt, Artificial Sequence
  Synthetic
guaacuaaaauaucuccaug

SEQ ID NO: 601185 - RNA, 21 nt, Artificial Sequence
  Synthetic
uguaacuaaaauaucuccaug

SEQ ID NO: 601186 - RNA, 22 nt, Artificial Sequence
  Synthetic
guguaacuaaaauaucuccaug

SEQ ID NO: 601187 - RNA, 23 nt, Artificial Sequence
  Synthetic
uguguaacuaaaauaucuccaug

SEQ ID NO: 601188 - RNA, 24 nt, Artificial Sequence
  Synthetic
guguguaacuaaaauaucuccaug

SEQ ID NO: 601189 - RNA, 18 nt, Artificial Sequence
  Synthetic
aauguucagggguccaug

SEQ ID NO: 601190 - RNA, 19 nt, Artificial Sequence
  Synthetic
aaauguucagggguccaug

SEQ ID NO: 601191 - RNA, 20 nt, Artificial Sequence
  Synthetic
aaaauguucagggguccaug

SEQ ID NO: 601192 - RNA, 21 nt, Artificial Sequence
  Synthetic
uaaaauguucagggguccaug

SEQ ID NO: 601193 - RNA, 22 nt, Artificial Sequence
  Synthetic
auaaaauguucagggguccaug

SEQ ID NO: 601194 - RNA, 23 nt, Artificial Sequence
  Synthetic
uauaaaauguucagggguccaug

SEQ ID NO: 601195 - RNA, 24 nt, Artificial Sequence
  Synthetic
uuauaaaauguucagggguccaug

SEQ ID NO: 601196 - RNA, 18 nt, Artificial Sequence
  Synthetic
aucauagaagguuccaug

SEQ ID NO: 601197 - RNA, 19 nt, Artificial Sequence
  Synthetic
gaucauagaagguuccaug

SEQ ID NO: 601198 - RNA, 20 nt, Artificial Sequence
  Synthetic
ugaucauagaagguuccaug

SEQ ID NO: 601199 - RNA, 21 nt, Artificial Sequence
  Synthetic
gugaucauagaagguuccaug

SEQ ID NO: 601200 - RNA, 22 nt, Artificial Sequence
  Synthetic
ggugaucauagaagguuccaug

SEQ ID NO: 601201 - RNA, 23 nt, Artificial Sequence
  Synthetic
gggugaucauagaagguuccaug

SEQ ID NO: 601202 - RNA, 24 nt, Artificial Sequence
  Synthetic
agggugaucauagaagguuccaug

SEQ ID NO: 601203 - RNA, 18 nt, Artificial Sequence
  Synthetic
acacaaaugguuuccaug

SEQ ID NO: 601204 - RNA, 19 nt, Artificial Sequence
  Synthetic
uacacaaaugguuuccaug

SEQ ID NO: 601205 - RNA, 20 nt, Artificial Sequence
  Synthetic
cuacacaaaugguuuccaug

SEQ ID NO: 601206 - RNA, 21 nt, Artificial Sequence
  Synthetic
ucuacacaaaugguuuccaug

SEQ ID NO: 601207 - RNA, 22 nt, Artificial Sequence
  Synthetic
cucuacacaaaugguuuccaug

SEQ ID NO: 601208 - RNA, 23 nt, Artificial Sequence
  Synthetic
gcucuacacaaaugguuuccaug

SEQ ID NO: 601209 - RNA, 24 nt, Artificial Sequence
  Synthetic
ugcucuacacaaaugguuuccaug

SEQ ID NO: 601210 - RNA, 18 nt, Artificial Sequence
  Synthetic
cuggggagauuuuccaug

SEQ ID NO: 601211 - RNA, 19 nt, Artificial Sequence
  Synthetic
ucuggggagauuuuccaug

SEQ ID NO: 601212 - RNA, 20 nt, Artificial Sequence
  Synthetic
gucuggggagauuuuccaug

SEQ ID NO: 601213 - RNA, 21 nt, Artificial Sequence
  Synthetic
agucuggggagauuuuccaug

SEQ ID NO: 601214 - RNA, 22 nt, Artificial Sequence
  Synthetic
uagucuggggagauuuuccaug

SEQ ID NO: 601215 - RNA, 23 nt, Artificial Sequence
  Synthetic
guagucuggggagauuuuccaug

SEQ ID NO: 601216 - RNA, 24 nt, Artificial Sequence
  Synthetic
aguagucuggggagauuuuccaug

SEQ ID NO: 601217 - RNA, 18 nt, Artificial Sequence
  Synthetic
auacccauauuuuccaug

SEQ ID NO: 601218 - RNA, 19 nt, Artificial Sequence
  Synthetic
aauacccauauuuuccaug

SEQ ID NO: 601219 - RNA, 20 nt, Artificial Sequence
  Synthetic
caauacccauauuuuccaug

SEQ ID NO: 601220 - RNA, 21 nt, Artificial Sequence
  Synthetic
acaauacccauauuuuccaug

SEQ ID NO: 601221 - RNA, 22 nt, Artificial Sequence
  Synthetic
uacaauacccauauuuuccaug

SEQ ID NO: 601222 - RNA, 23 nt, Artificial Sequence
  Synthetic
uuacaauacccauauuuuccaug

SEQ ID NO: 601223 - RNA, 24 nt, Artificial Sequence
  Synthetic
uuuacaauacccauauuuuccaug

SEQ ID NO: 601224 - RNA, 18 nt, Artificial Sequence
  Synthetic
guguugcauguaagcaug

SEQ ID NO: 601225 - RNA, 19 nt, Artificial Sequence
  Synthetic
aguguugcauguaagcaug

SEQ ID NO: 601226 - RNA, 20 nt, Artificial Sequence
  Synthetic
caguguugcauguaagcaug

SEQ ID NO: 601227 - RNA, 21 nt, Artificial Sequence
  Synthetic
acaguguugcauguaagcaug

SEQ ID NO: 601228 - RNA, 22 nt, Artificial Sequence
  Synthetic
aacaguguugcauguaagcaug

SEQ ID NO: 601229 - RNA, 23 nt, Artificial Sequence
  Synthetic
caacaguguugcauguaagcaug

SEQ ID NO: 601230 - RNA, 24 nt, Artificial Sequence
  Synthetic
ccaacaguguugcauguaagcaug

SEQ ID NO: 601231 - RNA, 18 nt, Artificial Sequence
  Synthetic
gagagcaacaacagcaug

SEQ ID NO: 601232 - RNA, 19 nt, Artificial Sequence
  Synthetic
cgagagcaacaacagcaug

SEQ ID NO: 601233 - RNA, 20 nt, Artificial Sequence
  Synthetic
ucgagagcaacaacagcaug

SEQ ID NO: 601234 - RNA, 21 nt, Artificial Sequence
  Synthetic
aucgagagcaacaacagcaug

SEQ ID NO: 601235 - RNA, 22 nt, Artificial Sequence
  Synthetic
uaucgagagcaacaacagcaug

SEQ ID NO: 601236 - RNA, 23 nt, Artificial Sequence
  Synthetic
uuaucgagagcaacaacagcaug

SEQ ID NO: 601237 - RNA, 24 nt, Artificial Sequence
  Synthetic
cuuaucgagagcaacaacagcaug

SEQ ID NO: 601238 - RNA, 18 nt, Artificial Sequence
  Synthetic
uaucacgacaacagcaug

SEQ ID NO: 601239 - RNA, 19 nt, Artificial Sequence
  Synthetic
cuaucacgacaacagcaug

SEQ ID NO: 601240 - RNA, 20 nt, Artificial Sequence
  Synthetic
acuaucacgacaacagcaug

SEQ ID NO: 601241 - RNA, 21 nt, Artificial Sequence
  Synthetic
cacuaucacgacaacagcaug

SEQ ID NO: 601242 - RNA, 22 nt, Artificial Sequence
  Synthetic
ucacuaucacgacaacagcaug

SEQ ID NO: 601243 - RNA, 23 nt, Artificial Sequence
  Synthetic
uucacuaucacgacaacagcaug

SEQ ID NO: 601244 - RNA, 24 nt, Artificial Sequence
  Synthetic
auucacuaucacgacaacagcaug

SEQ ID NO: 601245 - RNA, 18 nt, Artificial Sequence
  Synthetic
ccagugggggacagcaug

SEQ ID NO: 601246 - RNA, 19 nt, Artificial Sequence
  Synthetic
uccagugggggacagcaug

SEQ ID NO: 601247 - RNA, 20 nt, Artificial Sequence
  Synthetic
uuccagugggggacagcaug

SEQ ID NO: 601248 - RNA, 21 nt, Artificial Sequence
  Synthetic
cuuccagugggggacagcaug

SEQ ID NO: 601249 - RNA, 22 nt, Artificial Sequence
  Synthetic
ccuuccagugggggacagcaug

SEQ ID NO: 601250 - RNA, 23 nt, Artificial Sequence
  Synthetic
accuuccagugggggacagcaug

SEQ ID NO: 601251 - RNA, 24 nt, Artificial Sequence
  Synthetic
gaccuuccagugggggacagcaug

SEQ ID NO: 601252 - RNA, 18 nt, Artificial Sequence
  Synthetic
acaaauuguaccagcaug

SEQ ID NO: 601253 - RNA, 19 nt, Artificial Sequence
  Synthetic
uacaaauuguaccagcaug

SEQ ID NO: 601254 - RNA, 20 nt, Artificial Sequence
  Synthetic
auacaaauuguaccagcaug

SEQ ID NO: 601255 - RNA, 21 nt, Artificial Sequence
  Synthetic
gauacaaauuguaccagcaug

SEQ ID NO: 601256 - RNA, 22 nt, Artificial Sequence
  Synthetic
ggauacaaauuguaccagcaug

SEQ ID NO: 601257 - RNA, 23 nt, Artificial Sequence
  Synthetic
uggauacaaauuguaccagcaug

SEQ ID NO: 601258 - RNA, 24 nt, Artificial Sequence
  Synthetic
auggauacaaauuguaccagcaug

SEQ ID NO: 601259 - RNA, 18 nt, Artificial Sequence
  Synthetic
acacggagugagagcaug

SEQ ID NO: 601260 - RNA, 19 nt, Artificial Sequence
  Synthetic
cacacggagugagagcaug

SEQ ID NO: 601261 - RNA, 20 nt, Artificial Sequence
  Synthetic
ucacacggagugagagcaug

SEQ ID NO: 601262 - RNA, 21 nt, Artificial Sequence
  Synthetic
gucacacggagugagagcaug

SEQ ID NO: 601263 - RNA, 22 nt, Artificial Sequence
  Synthetic
ggucacacggagugagagcaug

SEQ ID NO: 601264 - RNA, 23 nt, Artificial Sequence
  Synthetic
uggucacacggagugagagcaug

SEQ ID NO: 601265 - RNA, 24 nt, Artificial Sequence
  Synthetic
guggucacacggagugagagcaug

SEQ ID NO: 601266 - RNA, 18 nt, Artificial Sequence
  Synthetic
cacagugggaggagcaug

SEQ ID NO: 601267 - RNA, 19 nt, Artificial Sequence
  Synthetic
ccacagugggaggagcaug

SEQ ID NO: 601268 - RNA, 20 nt, Artificial Sequence
  Synthetic
cccacagugggaggagcaug

SEQ ID NO: 601269 - RNA, 21 nt, Artificial Sequence
  Synthetic
ccccacagugggaggagcaug

SEQ ID NO: 601270 - RNA, 22 nt, Artificial Sequence
  Synthetic
uccccacagugggaggagcaug

SEQ ID NO: 601271 - RNA, 23 nt, Artificial Sequence
  Synthetic
guccccacagugggaggagcaug

SEQ ID NO: 601272 - RNA, 24 nt, Artificial Sequence
  Synthetic
uguccccacagugggaggagcaug

SEQ ID NO: 601273 - RNA, 18 nt, Artificial Sequence
  Synthetic
gcuugaaacaugagcaug

SEQ ID NO: 601274 - RNA, 19 nt, Artificial Sequence
  Synthetic
ggcuugaaacaugagcaug

SEQ ID NO: 601275 - RNA, 20 nt, Artificial Sequence
  Synthetic
uggcuugaaacaugagcaug

SEQ ID NO: 601276 - RNA, 21 nt, Artificial Sequence
  Synthetic
cuggcuugaaacaugagcaug

SEQ ID NO: 601277 - RNA, 22 nt, Artificial Sequence
  Synthetic
ucuggcuugaaacaugagcaug

SEQ ID NO: 601278 - RNA, 23 nt, Artificial Sequence
  Synthetic
uucuggcuugaaacaugagcaug

SEQ ID NO: 601279 - RNA, 24 nt, Artificial Sequence
  Synthetic
cuucuggcuugaaacaugagcaug

SEQ ID NO: 601280 - RNA, 18 nt, Artificial Sequence
  Synthetic
gaaugcagagugagcaug

SEQ ID NO: 601281 - RNA, 19 nt, Artificial Sequence
  Synthetic
agaaugcagagugagcaug

SEQ ID NO: 601282 - RNA, 20 nt, Artificial Sequence
  Synthetic
aagaaugcagagugagcaug

SEQ ID NO: 601283 - RNA, 21 nt, Artificial Sequence
  Synthetic
aaagaaugcagagugagcaug

SEQ ID NO: 601284 - RNA, 22 nt, Artificial Sequence
  Synthetic
caaagaaugcagagugagcaug

SEQ ID NO: 601285 - RNA, 23 nt, Artificial Sequence
  Synthetic
ccaaagaaugcagagugagcaug

SEQ ID NO: 601286 - RNA, 24 nt, Artificial Sequence
  Synthetic
uccaaagaaugcagagugagcaug

SEQ ID NO: 601287 - RNA, 18 nt, Artificial Sequence
  Synthetic
uaucaugagaauagcaug

SEQ ID NO: 601288 - RNA, 19 nt, Artificial Sequence
  Synthetic
cuaucaugagaauagcaug

SEQ ID NO: 601289 - RNA, 20 nt, Artificial Sequence
  Synthetic
acuaucaugagaauagcaug

SEQ ID NO: 601290 - RNA, 21 nt, Artificial Sequence
  Synthetic
cacuaucaugagaauagcaug

SEQ ID NO: 601291 - RNA, 22 nt, Artificial Sequence
  Synthetic
ccacuaucaugagaauagcaug

SEQ ID NO: 601292 - RNA, 23 nt, Artificial Sequence
  Synthetic
cccacuaucaugagaauagcaug

SEQ ID NO: 601293 - RNA, 24 nt, Artificial Sequence
  Synthetic
acccacuaucaugagaauagcaug

SEQ ID NO: 601294 - RNA, 18 nt, Artificial Sequence
  Synthetic
cucggugagucuagcaug

SEQ ID NO: 601295 - RNA, 19 nt, Artificial Sequence
  Synthetic
acucggugagucuagcaug

SEQ ID NO: 601296 - RNA, 20 nt, Artificial Sequence
  Synthetic
aacucggugagucuagcaug

SEQ ID NO: 601297 - RNA, 21 nt, Artificial Sequence
  Synthetic
uaacucggugagucuagcaug

SEQ ID NO: 601298 - RNA, 22 nt, Artificial Sequence
  Synthetic
uuaacucggugagucuagcaug

SEQ ID NO: 601299 - RNA, 23 nt, Artificial Sequence
  Synthetic
auuaacucggugagucuagcaug

SEQ ID NO: 601300 - RNA, 24 nt, Artificial Sequence
  Synthetic
gauuaacucggugagucuagcaug

SEQ ID NO: 601301 - RNA, 21 nt, Artificial Sequence
  Synthetic
uuauugagaguuuuuagcaug

SEQ ID NO: 601302 - RNA, 22 nt, Artificial Sequence
  Synthetic
uuuauugagaguuuuuagcaug

SEQ ID NO: 601303 - RNA, 23 nt, Artificial Sequence
  Synthetic
auuuauugagaguuuuuagcaug

SEQ ID NO: 601304 - RNA, 24 nt, Artificial Sequence
  Synthetic
aauuuauugagaguuuuuagcaug

SEQ ID NO: 601305 - RNA, 18 nt, Artificial Sequence
  Synthetic
cuugguuaggaaggcaug

SEQ ID NO: 601306 - RNA, 19 nt, Artificial Sequence
  Synthetic
gcuugguuaggaaggcaug

SEQ ID NO: 601307 - RNA, 20 nt, Artificial Sequence
  Synthetic
agcuugguuaggaaggcaug

SEQ ID NO: 601308 - RNA, 21 nt, Artificial Sequence
  Synthetic
aagcuugguuaggaaggcaug

SEQ ID NO: 601309 - RNA, 22 nt, Artificial Sequence
  Synthetic
uaagcuugguuaggaaggcaug

SEQ ID NO: 601310 - RNA, 23 nt, Artificial Sequence
  Synthetic
uuaagcuugguuaggaaggcaug

SEQ ID NO: 601311 - RNA, 24 nt, Artificial Sequence
  Synthetic
auuaagcuugguuaggaaggcaug

SEQ ID NO: 601312 - RNA, 18 nt, Artificial Sequence
  Synthetic
aaaaauuagccaggcaug

SEQ ID NO: 601313 - RNA, 19 nt, Artificial Sequence
  Synthetic
aaaaaauuagccaggcaug

SEQ ID NO: 601314 - RNA, 20 nt, Artificial Sequence
  Synthetic
uaaaaaauuagccaggcaug

SEQ ID NO: 601315 - RNA, 21 nt, Artificial Sequence
  Synthetic
auaaaaaauuagccaggcaug

SEQ ID NO: 601316 - RNA, 22 nt, Artificial Sequence
  Synthetic
aauaaaaaauuagccaggcaug

SEQ ID NO: 601317 - RNA, 23 nt, Artificial Sequence
  Synthetic
aaauaaaaaauuagccaggcaug

SEQ ID NO: 601318 - RNA, 24 nt, Artificial Sequence
  Synthetic
aaaauaaaaaauuagccaggcaug

SEQ ID NO: 601319 - RNA, 18 nt, Artificial Sequence
  Synthetic
gagggaugaauaggcaug

SEQ ID NO: 601320 - RNA, 19 nt, Artificial Sequence
  Synthetic
agagggaugaauaggcaug

SEQ ID NO: 601321 - RNA, 20 nt, Artificial Sequence
  Synthetic
gagagggaugaauaggcaug

SEQ ID NO: 601322 - RNA, 21 nt, Artificial Sequence
  Synthetic
ggagagggaugaauaggcaug

SEQ ID NO: 601323 - RNA, 22 nt, Artificial Sequence
  Synthetic
uggagagggaugaauaggcaug

SEQ ID NO: 601324 - RNA, 23 nt, Artificial Sequence
  Synthetic
cuggagagggaugaauaggcaug

SEQ ID NO: 601325 - RNA, 24 nt, Artificial Sequence
  Synthetic
acuggagagggaugaauaggcaug

SEQ ID NO: 601326 - RNA, 18 nt, Artificial Sequence
  Synthetic
ggacaacacauaggcaug

SEQ ID NO: 601327 - RNA, 19 nt, Artificial Sequence
  Synthetic
gggacaacacauaggcaug

SEQ ID NO: 601328 - RNA, 20 nt, Artificial Sequence
  Synthetic
agggacaacacauaggcaug

SEQ ID NO: 601329 - RNA, 21 nt, Artificial Sequence
  Synthetic
aagggacaacacauaggcaug

SEQ ID NO: 601330 - RNA, 22 nt, Artificial Sequence
  Synthetic
gaagggacaacacauaggcaug

SEQ ID NO: 601331 - RNA, 23 nt, Artificial Sequence
  Synthetic
cgaagggacaacacauaggcaug

SEQ ID NO: 601332 - RNA, 24 nt, Artificial Sequence
  Synthetic
gcgaagggacaacacauaggcaug

SEQ ID NO: 601333 - RNA, 18 nt, Artificial Sequence
  Synthetic
auuaaguuuguaggcaug

SEQ ID NO: 601334 - RNA, 19 nt, Artificial Sequence
  Synthetic
uauuaaguuuguaggcaug

SEQ ID NO: 601335 - RNA, 20 nt, Artificial Sequence
  Synthetic
auauuaaguuuguaggcaug

SEQ ID NO: 601336 - RNA, 21 nt, Artificial Sequence
  Synthetic
aauauuaaguuuguaggcaug

SEQ ID NO: 601337 - RNA, 22 nt, Artificial Sequence
  Synthetic
caauauuaaguuuguaggcaug

SEQ ID NO: 601338 - RNA, 23 nt, Artificial Sequence
  Synthetic
acaauauuaaguuuguaggcaug

SEQ ID NO: 601339 - RNA, 24 nt, Artificial Sequence
  Synthetic
aacaauauuaaguuuguaggcaug

SEQ ID NO: 601340 - RNA, 18 nt, Artificial Sequence
  Synthetic
agaaucucagagggcaug

SEQ ID NO: 601341 - RNA, 19 nt, Artificial Sequence
  Synthetic
cagaaucucagagggcaug

SEQ ID NO: 601342 - RNA, 20 nt, Artificial Sequence
  Synthetic
acagaaucucagagggcaug

SEQ ID NO: 601343 - RNA, 21 nt, Artificial Sequence
  Synthetic
aacagaaucucagagggcaug

SEQ ID NO: 601344 - RNA, 22 nt, Artificial Sequence
  Synthetic
gaacagaaucucagagggcaug

SEQ ID NO: 601345 - RNA, 23 nt, Artificial Sequence
  Synthetic
agaacagaaucucagagggcaug

SEQ ID NO: 601346 - RNA, 24 nt, Artificial Sequence
  Synthetic
cagaacagaaucucagagggcaug

SEQ ID NO: 601347 - RNA, 18 nt, Artificial Sequence
  Synthetic
ccugggguagugggcaug

SEQ ID NO: 601348 - RNA, 19 nt, Artificial Sequence
  Synthetic
accugggguagugggcaug

SEQ ID NO: 601349 - RNA, 20 nt, Artificial Sequence
  Synthetic
uaccugggguagugggcaug

SEQ ID NO: 601350 - RNA, 21 nt, Artificial Sequence
  Synthetic
cuaccugggguagugggcaug

SEQ ID NO: 601351 - RNA, 22 nt, Artificial Sequence
  Synthetic
acuaccugggguagugggcaug

SEQ ID NO: 601352 - RNA, 23 nt, Artificial Sequence
  Synthetic
uacuaccugggguagugggcaug

SEQ ID NO: 601353 - RNA, 24 nt, Artificial Sequence
  Synthetic
uuacuaccugggguagugggcaug

SEQ ID NO: 601354 - RNA, 18 nt, Artificial Sequence
  Synthetic
gcaaagggagguggcaug

SEQ ID NO: 601355 - RNA, 19 nt, Artificial Sequence
  Synthetic
ggcaaagggagguggcaug

SEQ ID NO: 601356 - RNA, 20 nt, Artificial Sequence
  Synthetic
gggcaaagggagguggcaug

SEQ ID NO: 601357 - RNA, 21 nt, Artificial Sequence
  Synthetic
ggggcaaagggagguggcaug

SEQ ID NO: 601358 - RNA, 22 nt, Artificial Sequence
  Synthetic
uggggcaaagggagguggcaug

SEQ ID NO: 601359 - RNA, 23 nt, Artificial Sequence
  Synthetic
auggggcaaagggagguggcaug

SEQ ID NO: 601360 - RNA, 24 nt, Artificial Sequence
  Synthetic
uauggggcaaagggagguggcaug

SEQ ID NO: 601361 - RNA, 18 nt, Artificial Sequence
  Synthetic
ugccguauucaaugcaug

SEQ ID NO: 601362 - RNA, 19 nt, Artificial Sequence
  Synthetic
cugccguauucaaugcaug

SEQ ID NO: 601363 - RNA, 20 nt, Artificial Sequence
  Synthetic
ucugccguauucaaugcaug

SEQ ID NO: 601364 - RNA, 21 nt, Artificial Sequence
  Synthetic
uucugccguauucaaugcaug

SEQ ID NO: 601365 - RNA, 22 nt, Artificial Sequence
  Synthetic
auucugccguauucaaugcaug

SEQ ID NO: 601366 - RNA, 23 nt, Artificial Sequence
  Synthetic
aauucugccguauucaaugcaug

SEQ ID NO: 601367 - RNA, 24 nt, Artificial Sequence
  Synthetic
aaauucugccguauucaaugcaug

SEQ ID NO: 601368 - RNA, 21 nt, Artificial Sequence
  Synthetic
aggacaaauaccuaaugcaug

SEQ ID NO: 601369 - RNA, 22 nt, Artificial Sequence
  Synthetic
uaggacaaauaccuaaugcaug

SEQ ID NO: 601370 - RNA, 23 nt, Artificial Sequence
  Synthetic
uuaggacaaauaccuaaugcaug

SEQ ID NO: 601371 - RNA, 24 nt, Artificial Sequence
  Synthetic
auuaggacaaauaccuaaugcaug

SEQ ID NO: 601372 - RNA, 18 nt, Artificial Sequence
  Synthetic
ugguuaaugacaugcaug

SEQ ID NO: 601373 - RNA, 19 nt, Artificial Sequence
  Synthetic
cugguuaaugacaugcaug

SEQ ID NO: 601374 - RNA, 20 nt, Artificial Sequence
  Synthetic
ucugguuaaugacaugcaug

SEQ ID NO: 601375 - RNA, 21 nt, Artificial Sequence
  Synthetic
cucugguuaaugacaugcaug

SEQ ID NO: 601376 - RNA, 22 nt, Artificial Sequence
  Synthetic
gcucugguuaaugacaugcaug

SEQ ID NO: 601377 - RNA, 23 nt, Artificial Sequence
  Synthetic
agcucugguuaaugacaugcaug

SEQ ID NO: 601378 - RNA, 24 nt, Artificial Sequence
  Synthetic
gagcucugguuaaugacaugcaug

SEQ ID NO: 601379 - RNA, 18 nt, Artificial Sequence
  Synthetic
ggaagaaaacuaugcaug

SEQ ID NO: 601380 - RNA, 19 nt, Artificial Sequence
  Synthetic
uggaagaaaacuaugcaug

SEQ ID NO: 601381 - RNA, 20 nt, Artificial Sequence
  Synthetic
uuggaagaaaacuaugcaug

SEQ ID NO: 601382 - RNA, 21 nt, Artificial Sequence
  Synthetic
uuuggaagaaaacuaugcaug

SEQ ID NO: 601383 - RNA, 22 nt, Artificial Sequence
  Synthetic
cuuuggaagaaaacuaugcaug

SEQ ID NO: 601384 - RNA, 23 nt, Artificial Sequence
  Synthetic
acuuuggaagaaaacuaugcaug

SEQ ID NO: 601385 - RNA, 24 nt, Artificial Sequence
  Synthetic
aacuuuggaagaaaacuaugcaug

SEQ ID NO: 601386 - RNA, 18 nt, Artificial Sequence
  Synthetic
uuacacuagugcugcaug

SEQ ID NO: 601387 - RNA, 19 nt, Artificial Sequence
  Synthetic
auuacacuagugcugcaug

SEQ ID NO: 601388 - RNA, 20 nt, Artificial Sequence
  Synthetic
gauuacacuagugcugcaug

SEQ ID NO: 601389 - RNA, 21 nt, Artificial Sequence
  Synthetic
ggauuacacuagugcugcaug

SEQ ID NO: 601390 - RNA, 22 nt, Artificial Sequence
  Synthetic
gggauuacacuagugcugcaug

SEQ ID NO: 601391 - RNA, 23 nt, Artificial Sequence
  Synthetic
agggauuacacuagugcugcaug

SEQ ID NO: 601392 - RNA, 24 nt, Artificial Sequence
  Synthetic
gagggauuacacuagugcugcaug

SEQ ID NO: 601393 - RNA, 18 nt, Artificial Sequence
  Synthetic
aaacaugcugagugcaug

SEQ ID NO: 601394 - RNA, 19 nt, Artificial Sequence
  Synthetic
caaacaugcugagugcaug

SEQ ID NO: 601395 - RNA, 20 nt, Artificial Sequence
  Synthetic
gcaaacaugcugagugcaug

SEQ ID NO: 601396 - RNA, 21 nt, Artificial Sequence
  Synthetic
ggcaaacaugcugagugcaug

SEQ ID NO: 601397 - RNA, 22 nt, Artificial Sequence
  Synthetic
uggcaaacaugcugagugcaug

SEQ ID NO: 601398 - RNA, 23 nt, Artificial Sequence
  Synthetic
cuggcaaacaugcugagugcaug

SEQ ID NO: 601399 - RNA, 24 nt, Artificial Sequence
  Synthetic
gcuggcaaacaugcugagugcaug

SEQ ID NO: 601400 - RNA, 18 nt, Artificial Sequence
  Synthetic
aguauacugcugugcaug

SEQ ID NO: 601401 - RNA, 19 nt, Artificial Sequence
  Synthetic
gaguauacugcugugcaug

SEQ ID NO: 601402 - RNA, 20 nt, Artificial Sequence
  Synthetic
ugaguauacugcugugcaug

SEQ ID NO: 601403 - RNA, 21 nt, Artificial Sequence
  Synthetic
cugaguauacugcugugcaug

SEQ ID NO: 601404 - RNA, 22 nt, Artificial Sequence
  Synthetic
ucugaguauacugcugugcaug

SEQ ID NO: 601405 - RNA, 23 nt, Artificial Sequence
  Synthetic
cucugaguauacugcugugcaug

SEQ ID NO: 601406 - RNA, 24 nt, Artificial Sequence
  Synthetic
ucucugaguauacugcugugcaug

SEQ ID NO: 601407 - RNA, 18 nt, Artificial Sequence
  Synthetic
ggggguguucugugcaug

SEQ ID NO: 601408 - RNA, 19 nt, Artificial Sequence
  Synthetic
gggggguguucugugcaug

SEQ ID NO: 601409 - RNA, 20 nt, Artificial Sequence
  Synthetic
ggggggguguucugugcaug

SEQ ID NO: 601410 - RNA, 21 nt, Artificial Sequence
  Synthetic
gggggggguguucugugcaug

SEQ ID NO: 601411 - RNA, 22 nt, Artificial Sequence
  Synthetic
ugggggggguguucugugcaug

SEQ ID NO: 601412 - RNA, 23 nt, Artificial Sequence
  Synthetic
gugggggggguguucugugcaug

SEQ ID NO: 601413 - RNA, 24 nt, Artificial Sequence
  Synthetic
ugugggggggguguucugugcaug

SEQ ID NO: 601414 - RNA, 18 nt, Artificial Sequence
  Synthetic
uuugcaucuuugugcaug

SEQ ID NO: 601415 - RNA, 19 nt, Artificial Sequence
  Synthetic
uuuugcaucuuugugcaug

SEQ ID NO: 601416 - RNA, 20 nt, Artificial Sequence
  Synthetic
cuuuugcaucuuugugcaug

SEQ ID NO: 601417 - RNA, 21 nt, Artificial Sequence
  Synthetic
ucuuuugcaucuuugugcaug

SEQ ID NO: 601418 - RNA, 22 nt, Artificial Sequence
  Synthetic
uucuuuugcaucuuugugcaug

SEQ ID NO: 601419 - RNA, 23 nt, Artificial Sequence
  Synthetic
uuucuuuugcaucuuugugcaug

SEQ ID NO: 601420 - RNA, 24 nt, Artificial Sequence
  Synthetic
auuucuuuugcaucuuugugcaug

SEQ ID NO: 601421 - RNA, 18 nt, Artificial Sequence
  Synthetic
aaacugcuuaauugcaug

SEQ ID NO: 601422 - RNA, 19 nt, Artificial Sequence
  Synthetic
aaaacugcuuaauugcaug

SEQ ID NO: 601423 - RNA, 20 nt, Artificial Sequence
  Synthetic
uaaaacugcuuaauugcaug

SEQ ID NO: 601424 - RNA, 21 nt, Artificial Sequence
  Synthetic
auaaaacugcuuaauugcaug

SEQ ID NO: 601425 - RNA, 22 nt, Artificial Sequence
  Synthetic
uauaaaacugcuuaauugcaug

SEQ ID NO: 601426 - RNA, 23 nt, Artificial Sequence
  Synthetic
guauaaaacugcuuaauugcaug

SEQ ID NO: 601427 - RNA, 24 nt, Artificial Sequence
  Synthetic
aguauaaaacugcuuaauugcaug

SEQ ID NO: 601428 - RNA, 18 nt, Artificial Sequence
  Synthetic
uuuucuauugauugcaug

SEQ ID NO: 601429 - RNA, 19 nt, Artificial Sequence
  Synthetic
uuuuucuauugauugcaug

SEQ ID NO: 601430 - RNA, 20 nt, Artificial Sequence
  Synthetic
uuuuuucuauugauugcaug

SEQ ID NO: 601431 - RNA, 21 nt, Artificial Sequence
  Synthetic
auuuuuucuauugauugcaug

SEQ ID NO: 601432 - RNA, 22 nt, Artificial Sequence
  Synthetic
cauuuuuucuauugauugcaug

SEQ ID NO: 601433 - RNA, 23 nt, Artificial Sequence
  Synthetic
acauuuuuucuauugauugcaug

SEQ ID NO: 601434 - RNA, 24 nt, Artificial Sequence
  Synthetic
uacauuuuuucuauugauugcaug

SEQ ID NO: 601435 - RNA, 18 nt, Artificial Sequence
  Synthetic
acauggguauguugcaug

SEQ ID NO: 601436 - RNA, 19 nt, Artificial Sequence
  Synthetic
uacauggguauguugcaug

SEQ ID NO: 601437 - RNA, 20 nt, Artificial Sequence
  Synthetic
uuacauggguauguugcaug

SEQ ID NO: 601438 - RNA, 21 nt, Artificial Sequence
  Synthetic
guuacauggguauguugcaug

SEQ ID NO: 601439 - RNA, 22 nt, Artificial Sequence
  Synthetic
uguuacauggguauguugcaug

SEQ ID NO: 601440 - RNA, 23 nt, Artificial Sequence
  Synthetic
uuguuacauggguauguugcaug

SEQ ID NO: 601441 - RNA, 24 nt, Artificial Sequence
  Synthetic
auuguuacauggguauguugcaug

SEQ ID NO: 601442 - RNA, 18 nt, Artificial Sequence
  Synthetic
auuugauugaaaaucaug

SEQ ID NO: 601443 - RNA, 19 nt, Artificial Sequence
  Synthetic
uauuugauugaaaaucaug

SEQ ID NO: 601444 - RNA, 20 nt, Artificial Sequence
  Synthetic
guauuugauugaaaaucaug

SEQ ID NO: 601445 - RNA, 21 nt, Artificial Sequence
  Synthetic
cguauuugauugaaaaucaug

SEQ ID NO: 601446 - RNA, 22 nt, Artificial Sequence
  Synthetic
gcguauuugauugaaaaucaug

SEQ ID NO: 601447 - RNA, 23 nt, Artificial Sequence
  Synthetic
agcguauuugauugaaaaucaug

SEQ ID NO: 601448 - RNA, 24 nt, Artificial Sequence
  Synthetic
aagcguauuugauugaaaaucaug

SEQ ID NO: 601449 - RNA, 18 nt, Artificial Sequence
  Synthetic
cggaaacuuacaaucaug

SEQ ID NO: 601450 - RNA, 19 nt, Artificial Sequence
  Synthetic
ccggaaacuuacaaucaug

SEQ ID NO: 601451 - RNA, 20 nt, Artificial Sequence
  Synthetic
uccggaaacuuacaaucaug

SEQ ID NO: 601452 - RNA, 21 nt, Artificial Sequence
  Synthetic
cuccggaaacuuacaaucaug

SEQ ID NO: 601453 - RNA, 22 nt, Artificial Sequence
  Synthetic
ccuccggaaacuuacaaucaug

SEQ ID NO: 601454 - RNA, 23 nt, Artificial Sequence
  Synthetic
gccuccggaaacuuacaaucaug

SEQ ID NO: 601455 - RNA, 24 nt, Artificial Sequence
  Synthetic
ggccuccggaaacuuacaaucaug

SEQ ID NO: 601456 - RNA, 18 nt, Artificial Sequence
  Synthetic
ggaggccucagaaucaug

SEQ ID NO: 601457 - RNA, 19 nt, Artificial Sequence
  Synthetic
gggaggccucagaaucaug

SEQ ID NO: 601458 - RNA, 20 nt, Artificial Sequence
  Synthetic
ggggaggccucagaaucaug

SEQ ID NO: 601459 - RNA, 21 nt, Artificial Sequence
  Synthetic
uggggaggccucagaaucaug

SEQ ID NO: 601460 - RNA, 22 nt, Artificial Sequence
  Synthetic
cuggggaggccucagaaucaug

SEQ ID NO: 601461 - RNA, 23 nt, Artificial Sequence
  Synthetic
acuggggaggccucagaaucaug

SEQ ID NO: 601462 - RNA, 24 nt, Artificial Sequence
  Synthetic
gacuggggaggccucagaaucaug

SEQ ID NO: 601463 - RNA, 18 nt, Artificial Sequence
  Synthetic
ucaggaaaacacaucaug

SEQ ID NO: 601464 - RNA, 19 nt, Artificial Sequence
  Synthetic
uucaggaaaacacaucaug

SEQ ID NO: 601465 - RNA, 20 nt, Artificial Sequence
  Synthetic
cuucaggaaaacacaucaug

SEQ ID NO: 601466 - RNA, 21 nt, Artificial Sequence
  Synthetic
ucuucaggaaaacacaucaug

SEQ ID NO: 601467 - RNA, 22 nt, Artificial Sequence
  Synthetic
uucuucaggaaaacacaucaug

SEQ ID NO: 601468 - RNA, 23 nt, Artificial Sequence
  Synthetic
uuucuucaggaaaacacaucaug

SEQ ID NO: 601469 - RNA, 24 nt, Artificial Sequence
  Synthetic
auuucuucaggaaaacacaucaug

SEQ ID NO: 601470 - RNA, 18 nt, Artificial Sequence
  Synthetic
gguaauaaucacaucaug

SEQ ID NO: 601471 - RNA, 19 nt, Artificial Sequence
  Synthetic
ggguaauaaucacaucaug

SEQ ID NO: 601472 - RNA, 20 nt, Artificial Sequence
  Synthetic
uggguaauaaucacaucaug

SEQ ID NO: 601473 - RNA, 21 nt, Artificial Sequence
  Synthetic
auggguaauaaucacaucaug

SEQ ID NO: 601474 - RNA, 22 nt, Artificial Sequence
  Synthetic
aauggguaauaaucacaucaug

SEQ ID NO: 601475 - RNA, 23 nt, Artificial Sequence
  Synthetic
caauggguaauaaucacaucaug

SEQ ID NO: 601476 - RNA, 24 nt, Artificial Sequence
  Synthetic
gcaauggguaauaaucacaucaug

SEQ ID NO: 601477 - RNA, 18 nt, Artificial Sequence
  Synthetic
ccaaauaaggacaucaug

SEQ ID NO: 601478 - RNA, 19 nt, Artificial Sequence
  Synthetic
cccaaauaaggacaucaug

SEQ ID NO: 601479 - RNA, 20 nt, Artificial Sequence
  Synthetic
gcccaaauaaggacaucaug

SEQ ID NO: 601480 - RNA, 21 nt, Artificial Sequence
  Synthetic
ugcccaaauaaggacaucaug

SEQ ID NO: 601481 - RNA, 22 nt, Artificial Sequence
  Synthetic
augcccaaauaaggacaucaug

SEQ ID NO: 601482 - RNA, 23 nt, Artificial Sequence
  Synthetic
gaugcccaaauaaggacaucaug

SEQ ID NO: 601483 - RNA, 24 nt, Artificial Sequence
  Synthetic
agaugcccaaauaaggacaucaug

SEQ ID NO: 601484 - RNA, 18 nt, Artificial Sequence
  Synthetic
ccugguagguacaucaug

SEQ ID NO: 601485 - RNA, 19 nt, Artificial Sequence
  Synthetic
cccugguagguacaucaug

SEQ ID NO: 601486 - RNA, 20 nt, Artificial Sequence
  Synthetic
acccugguagguacaucaug

SEQ ID NO: 601487 - RNA, 21 nt, Artificial Sequence
  Synthetic
gacccugguagguacaucaug

SEQ ID NO: 601488 - RNA, 22 nt, Artificial Sequence
  Synthetic
ggacccugguagguacaucaug

SEQ ID NO: 601489 - RNA, 23 nt, Artificial Sequence
  Synthetic
uggacccugguagguacaucaug

SEQ ID NO: 601490 - RNA, 24 nt, Artificial Sequence
  Synthetic
uuggacccugguagguacaucaug

SEQ ID NO: 601491 - RNA, 18 nt, Artificial Sequence
  Synthetic
uuugaaaauuccaucaug

SEQ ID NO: 601492 - RNA, 19 nt, Artificial Sequence
  Synthetic
auuugaaaauuccaucaug

SEQ ID NO: 601493 - RNA, 20 nt, Artificial Sequence
  Synthetic
uauuugaaaauuccaucaug

SEQ ID NO: 601494 - RNA, 21 nt, Artificial Sequence
  Synthetic
auauuugaaaauuccaucaug

SEQ ID NO: 601495 - RNA, 22 nt, Artificial Sequence
  Synthetic
gauauuugaaaauuccaucaug

SEQ ID NO: 601496 - RNA, 23 nt, Artificial Sequence
  Synthetic
ugauauuugaaaauuccaucaug

SEQ ID NO: 601497 - RNA, 24 nt, Artificial Sequence
  Synthetic
gugauauuugaaaauuccaucaug

SEQ ID NO: 601498 - RNA, 18 nt, Artificial Sequence
  Synthetic
cuacaauuugucaucaug

SEQ ID NO: 601499 - RNA, 19 nt, Artificial Sequence
  Synthetic
gcuacaauuugucaucaug

SEQ ID NO: 601500 - RNA, 20 nt, Artificial Sequence
  Synthetic
ugcuacaauuugucaucaug

SEQ ID NO: 601501 - RNA, 21 nt, Artificial Sequence
  Synthetic
gugcuacaauuugucaucaug

SEQ ID NO: 601502 - RNA, 22 nt, Artificial Sequence
  Synthetic
ugugcuacaauuugucaucaug

SEQ ID NO: 601503 - RNA, 23 nt, Artificial Sequence
  Synthetic
uugugcuacaauuugucaucaug

SEQ ID NO: 601504 - RNA, 24 nt, Artificial Sequence
  Synthetic
cuugugcuacaauuugucaucaug

SEQ ID NO: 601505 - RNA, 18 nt, Artificial Sequence
  Synthetic
uucaaucuauugaucaug

SEQ ID NO: 601506 - RNA, 19 nt, Artificial Sequence
  Synthetic
guucaaucuauugaucaug

SEQ ID NO: 601507 - RNA, 20 nt, Artificial Sequence
  Synthetic
uguucaaucuauugaucaug

SEQ ID NO: 601508 - RNA, 21 nt, Artificial Sequence
  Synthetic
auguucaaucuauugaucaug

SEQ ID NO: 601509 - RNA, 22 nt, Artificial Sequence
  Synthetic
aauguucaaucuauugaucaug

SEQ ID NO: 601510 - RNA, 23 nt, Artificial Sequence
  Synthetic
caauguucaaucuauugaucaug

SEQ ID NO: 601511 - RNA, 24 nt, Artificial Sequence
  Synthetic
ccaauguucaaucuauugaucaug

SEQ ID NO: 601512 - RNA, 18 nt, Artificial Sequence
  Synthetic
aguucuguuuugaucaug

SEQ ID NO: 601513 - RNA, 19 nt, Artificial Sequence
  Synthetic
gaguucuguuuugaucaug

SEQ ID NO: 601514 - RNA, 20 nt, Artificial Sequence
  Synthetic
ggaguucuguuuugaucaug

SEQ ID NO: 601515 - RNA, 21 nt, Artificial Sequence
  Synthetic
aggaguucuguuuugaucaug

SEQ ID NO: 601516 - RNA, 22 nt, Artificial Sequence
  Synthetic
uaggaguucuguuuugaucaug

SEQ ID NO: 601517 - RNA, 23 nt, Artificial Sequence
  Synthetic
auaggaguucuguuuugaucaug

SEQ ID NO: 601518 - RNA, 24 nt, Artificial Sequence
  Synthetic
aauaggaguucuguuuugaucaug

SEQ ID NO: 601519 - RNA, 18 nt, Artificial Sequence
  Synthetic
caucuuugagauaucaug

SEQ ID NO: 601520 - RNA, 19 nt, Artificial Sequence
  Synthetic
ccaucuuugagauaucaug

SEQ ID NO: 601521 - RNA, 20 nt, Artificial Sequence
  Synthetic
accaucuuugagauaucaug

SEQ ID NO: 601522 - RNA, 21 nt, Artificial Sequence
  Synthetic
uaccaucuuugagauaucaug

SEQ ID NO: 601523 - RNA, 22 nt, Artificial Sequence
  Synthetic
cuaccaucuuugagauaucaug

SEQ ID NO: 601524 - RNA, 23 nt, Artificial Sequence
  Synthetic
ucuaccaucuuugagauaucaug

SEQ ID NO: 601525 - RNA, 24 nt, Artificial Sequence
  Synthetic
aucuaccaucuuugagauaucaug

SEQ ID NO: 601526 - RNA, 18 nt, Artificial Sequence
  Synthetic
agcuuaccugauaucaug

SEQ ID NO: 601527 - RNA, 19 nt, Artificial Sequence
  Synthetic
cagcuuaccugauaucaug

SEQ ID NO: 601528 - RNA, 20 nt, Artificial Sequence
  Synthetic
ccagcuuaccugauaucaug

SEQ ID NO: 601529 - RNA, 21 nt, Artificial Sequence
  Synthetic
gccagcuuaccugauaucaug

SEQ ID NO: 601530 - RNA, 22 nt, Artificial Sequence
  Synthetic
ggccagcuuaccugauaucaug

SEQ ID NO: 601531 - RNA, 23 nt, Artificial Sequence
  Synthetic
cggccagcuuaccugauaucaug

SEQ ID NO: 601532 - RNA, 24 nt, Artificial Sequence
  Synthetic
ucggccagcuuaccugauaucaug

SEQ ID NO: 601533 - RNA, 18 nt, Artificial Sequence
  Synthetic
guuuuugauucuaucaug

SEQ ID NO: 601534 - RNA, 19 nt, Artificial Sequence
  Synthetic
uguuuuugauucuaucaug

SEQ ID NO: 601535 - RNA, 20 nt, Artificial Sequence
  Synthetic
cuguuuuugauucuaucaug

SEQ ID NO: 601536 - RNA, 21 nt, Artificial Sequence
  Synthetic
acuguuuuugauucuaucaug

SEQ ID NO: 601537 - RNA, 22 nt, Artificial Sequence
  Synthetic
cacuguuuuugauucuaucaug

SEQ ID NO: 601538 - RNA, 23 nt, Artificial Sequence
  Synthetic
acacuguuuuugauucuaucaug

SEQ ID NO: 601539 - RNA, 24 nt, Artificial Sequence
  Synthetic
gacacuguuuuugauucuaucaug

SEQ ID NO: 601540 - RNA, 18 nt, Artificial Sequence
  Synthetic
caugaaaaaauuaucaug

SEQ ID NO: 601541 - RNA, 19 nt, Artificial Sequence
  Synthetic
gcaugaaaaaauuaucaug

SEQ ID NO: 601542 - RNA, 20 nt, Artificial Sequence
  Synthetic
agcaugaaaaaauuaucaug

SEQ ID NO: 601543 - RNA, 21 nt, Artificial Sequence
  Synthetic
gagcaugaaaaaauuaucaug

SEQ ID NO: 601544 - RNA, 22 nt, Artificial Sequence
  Synthetic
cgagcaugaaaaaauuaucaug

SEQ ID NO: 601545 - RNA, 23 nt, Artificial Sequence
  Synthetic
ucgagcaugaaaaaauuaucaug

SEQ ID NO: 601546 - RNA, 24 nt, Artificial Sequence
  Synthetic
uucgagcaugaaaaaauuaucaug

SEQ ID NO: 601547 - RNA, 18 nt, Artificial Sequence
  Synthetic
gcaauaauucuuaucaug

SEQ ID NO: 601548 - RNA, 19 nt, Artificial Sequence
  Synthetic
ggcaauaauucuuaucaug

SEQ ID NO: 601549 - RNA, 20 nt, Artificial Sequence
  Synthetic
uggcaauaauucuuaucaug

SEQ ID NO: 601550 - RNA, 21 nt, Artificial Sequence
  Synthetic
auggcaauaauucuuaucaug

SEQ ID NO: 601551 - RNA, 22 nt, Artificial Sequence
  Synthetic
aauggcaauaauucuuaucaug

SEQ ID NO: 601552 - RNA, 23 nt, Artificial Sequence
  Synthetic
aaauggcaauaauucuuaucaug

SEQ ID NO: 601553 - RNA, 24 nt, Artificial Sequence
  Synthetic
aaaauggcaauaauucuuaucaug

SEQ ID NO: 601554 - RNA, 18 nt, Artificial Sequence
  Synthetic
guacuaauaacacucaug

SEQ ID NO: 601555 - RNA, 19 nt, Artificial Sequence
  Synthetic
gguacuaauaacacucaug

SEQ ID NO: 601556 - RNA, 20 nt, Artificial Sequence
  Synthetic
ugguacuaauaacacucaug

SEQ ID NO: 601557 - RNA, 21 nt, Artificial Sequence
  Synthetic
uugguacuaauaacacucaug

SEQ ID NO: 601558 - RNA, 22 nt, Artificial Sequence
  Synthetic
cuugguacuaauaacacucaug

SEQ ID NO: 601559 - RNA, 23 nt, Artificial Sequence
  Synthetic
ccuugguacuaauaacacucaug

SEQ ID NO: 601560 - RNA, 24 nt, Artificial Sequence
  Synthetic
uccuugguacuaauaacacucaug

SEQ ID NO: 601561 - RNA, 18 nt, Artificial Sequence
  Synthetic
aaauaauagacacucaug

SEQ ID NO: 601562 - RNA, 19 nt, Artificial Sequence
  Synthetic
caaauaauagacacucaug

SEQ ID NO: 601563 - RNA, 20 nt, Artificial Sequence
  Synthetic
ucaaauaauagacacucaug

SEQ ID NO: 601564 - RNA, 21 nt, Artificial Sequence
  Synthetic
cucaaauaauagacacucaug

SEQ ID NO: 601565 - RNA, 22 nt, Artificial Sequence
  Synthetic
ucucaaauaauagacacucaug

SEQ ID NO: 601566 - RNA, 23 nt, Artificial Sequence
  Synthetic
uucucaaauaauagacacucaug

SEQ ID NO: 601567 - RNA, 24 nt, Artificial Sequence
  Synthetic
uuucucaaauaauagacacucaug

SEQ ID NO: 601568 - RNA, 18 nt, Artificial Sequence
  Synthetic
cugacuccuauacucaug

SEQ ID NO: 601569 - RNA, 19 nt, Artificial Sequence
  Synthetic
ucugacuccuauacucaug

SEQ ID NO: 601570 - RNA, 20 nt, Artificial Sequence
  Synthetic
aucugacuccuauacucaug

SEQ ID NO: 601571 - RNA, 21 nt, Artificial Sequence
  Synthetic
aaucugacuccuauacucaug

SEQ ID NO: 601572 - RNA, 22 nt, Artificial Sequence
  Synthetic
aaaucugacuccuauacucaug

SEQ ID NO: 601573 - RNA, 23 nt, Artificial Sequence
  Synthetic
gaaaucugacuccuauacucaug

SEQ ID NO: 601574 - RNA, 24 nt, Artificial Sequence
  Synthetic
ggaaaucugacuccuauacucaug

SEQ ID NO: 601575 - RNA, 18 nt, Artificial Sequence
  Synthetic
gagcauugguuacucaug

SEQ ID NO: 601576 - RNA, 19 nt, Artificial Sequence
  Synthetic
agagcauugguuacucaug

SEQ ID NO: 601577 - RNA, 20 nt, Artificial Sequence
  Synthetic
uagagcauugguuacucaug

SEQ ID NO: 601578 - RNA, 21 nt, Artificial Sequence
  Synthetic
uuagagcauugguuacucaug

SEQ ID NO: 601579 - RNA, 22 nt, Artificial Sequence
  Synthetic
uuuagagcauugguuacucaug

SEQ ID NO: 601580 - RNA, 23 nt, Artificial Sequence
  Synthetic
auuuagagcauugguuacucaug

SEQ ID NO: 601581 - RNA, 24 nt, Artificial Sequence
  Synthetic
uauuuagagcauugguuacucaug

SEQ ID NO: 601582 - RNA, 18 nt, Artificial Sequence
  Synthetic
aggaaugaagaccucaug

SEQ ID NO: 601583 - RNA, 19 nt, Artificial Sequence
  Synthetic
caggaaugaagaccucaug

SEQ ID NO: 601584 - RNA, 20 nt, Artificial Sequence
  Synthetic
gcaggaaugaagaccucaug

SEQ ID NO: 601585 - RNA, 21 nt, Artificial Sequence
  Synthetic
ugcaggaaugaagaccucaug

SEQ ID NO: 601586 - RNA, 22 nt, Artificial Sequence
  Synthetic
cugcaggaaugaagaccucaug

SEQ ID NO: 601587 - RNA, 23 nt, Artificial Sequence
  Synthetic
gcugcaggaaugaagaccucaug

SEQ ID NO: 601588 - RNA, 24 nt, Artificial Sequence
  Synthetic
ugcugcaggaaugaagaccucaug

SEQ ID NO: 601589 - RNA, 18 nt, Artificial Sequence
  Synthetic
ggugaugagacccucaug

SEQ ID NO: 601590 - RNA, 19 nt, Artificial Sequence
  Synthetic
gggugaugagacccucaug

SEQ ID NO: 601591 - RNA, 20 nt, Artificial Sequence
  Synthetic
ggggugaugagacccucaug

SEQ ID NO: 601592 - RNA, 21 nt, Artificial Sequence
  Synthetic
gggggugaugagacccucaug

SEQ ID NO: 601593 - RNA, 22 nt, Artificial Sequence
  Synthetic
ggggggugaugagacccucaug

SEQ ID NO: 601594 - RNA, 23 nt, Artificial Sequence
  Synthetic
uggggggugaugagacccucaug

SEQ ID NO: 601595 - RNA, 24 nt, Artificial Sequence
  Synthetic
guggggggugaugagacccucaug

SEQ ID NO: 601596 - RNA, 18 nt, Artificial Sequence
  Synthetic
uuauaauuaucccucaug

SEQ ID NO: 601597 - RNA, 19 nt, Artificial Sequence
  Synthetic
auuauaauuaucccucaug

SEQ ID NO: 601598 - RNA, 20 nt, Artificial Sequence
  Synthetic
aauuauaauuaucccucaug

SEQ ID NO: 601599 - RNA, 21 nt, Artificial Sequence
  Synthetic
gaauuauaauuaucccucaug

SEQ ID NO: 601600 - RNA, 22 nt, Artificial Sequence
  Synthetic
ggaauuauaauuaucccucaug

SEQ ID NO: 601601 - RNA, 23 nt, Artificial Sequence
  Synthetic
uggaauuauaauuaucccucaug

SEQ ID NO: 601602 - RNA, 24 nt, Artificial Sequence
  Synthetic
guggaauuauaauuaucccucaug

SEQ ID NO: 601603 - RNA, 18 nt, Artificial Sequence
  Synthetic
gacagcaauuuccucaug

SEQ ID NO: 601604 - RNA, 19 nt, Artificial Sequence
  Synthetic
ugacagcaauuuccucaug

SEQ ID NO: 601605 - RNA, 20 nt, Artificial Sequence
  Synthetic
uugacagcaauuuccucaug

SEQ ID NO: 601606 - RNA, 21 nt, Artificial Sequence
  Synthetic
guugacagcaauuuccucaug

SEQ ID NO: 601607 - RNA, 22 nt, Artificial Sequence
  Synthetic
uguugacagcaauuuccucaug

SEQ ID NO: 601608 - RNA, 23 nt, Artificial Sequence
  Synthetic
uuguugacagcaauuuccucaug

SEQ ID NO: 601609 - RNA, 24 nt, Artificial Sequence
  Synthetic
auuguugacagcaauuuccucaug

SEQ ID NO: 601610 - RNA, 18 nt, Artificial Sequence
  Synthetic
uucgaguucaagcucaug

SEQ ID NO: 601611 - RNA, 19 nt, Artificial Sequence
  Synthetic
cuucgaguucaagcucaug

SEQ ID NO: 601612 - RNA, 20 nt, Artificial Sequence
  Synthetic
acuucgaguucaagcucaug

SEQ ID NO: 601613 - RNA, 21 nt, Artificial Sequence
  Synthetic
uacuucgaguucaagcucaug

SEQ ID NO: 601614 - RNA, 22 nt, Artificial Sequence
  Synthetic
auacuucgaguucaagcucaug

SEQ ID NO: 601615 - RNA, 23 nt, Artificial Sequence
  Synthetic
aauacuucgaguucaagcucaug

SEQ ID NO: 601616 - RNA, 24 nt, Artificial Sequence
  Synthetic
uaauacuucgaguucaagcucaug

SEQ ID NO: 601617 - RNA, 18 nt, Artificial Sequence
  Synthetic
caaaaugugaagcucaug

SEQ ID NO: 601618 - RNA, 19 nt, Artificial Sequence
  Synthetic
acaaaaugugaagcucaug

SEQ ID NO: 601619 - RNA, 20 nt, Artificial Sequence
  Synthetic
aacaaaaugugaagcucaug

SEQ ID NO: 601620 - RNA, 21 nt, Artificial Sequence
  Synthetic
aaacaaaaugugaagcucaug

SEQ ID NO: 601621 - RNA, 22 nt, Artificial Sequence
  Synthetic
gaaacaaaaugugaagcucaug

SEQ ID NO: 601622 - RNA, 23 nt, Artificial Sequence
  Synthetic
ugaaacaaaaugugaagcucaug

SEQ ID NO: 601623 - RNA, 24 nt, Artificial Sequence
  Synthetic
uugaaacaaaaugugaagcucaug

SEQ ID NO: 601624 - RNA, 18 nt, Artificial Sequence
  Synthetic
uccccuccaaaucucaug

SEQ ID NO: 601625 - RNA, 19 nt, Artificial Sequence
  Synthetic
guccccuccaaaucucaug

SEQ ID NO: 601626 - RNA, 20 nt, Artificial Sequence
  Synthetic
uguccccuccaaaucucaug

SEQ ID NO: 601627 - RNA, 21 nt, Artificial Sequence
  Synthetic
uuguccccuccaaaucucaug

SEQ ID NO: 601628 - RNA, 22 nt, Artificial Sequence
  Synthetic
guuguccccuccaaaucucaug

SEQ ID NO: 601629 - RNA, 23 nt, Artificial Sequence
  Synthetic
uguuguccccuccaaaucucaug

SEQ ID NO: 601630 - RNA, 24 nt, Artificial Sequence
  Synthetic
auguuguccccuccaaaucucaug

SEQ ID NO: 601631 - RNA, 18 nt, Artificial Sequence
  Synthetic
cuuucauuuccucucaug

SEQ ID NO: 601632 - RNA, 19 nt, Artificial Sequence
  Synthetic
gcuuucauuuccucucaug

SEQ ID NO: 601633 - RNA, 20 nt, Artificial Sequence
  Synthetic
ggcuuucauuuccucucaug

SEQ ID NO: 601634 - RNA, 21 nt, Artificial Sequence
  Synthetic
aggcuuucauuuccucucaug

SEQ ID NO: 601635 - RNA, 22 nt, Artificial Sequence
  Synthetic
uaggcuuucauuuccucucaug

SEQ ID NO: 601636 - RNA, 23 nt, Artificial Sequence
  Synthetic
cuaggcuuucauuuccucucaug

SEQ ID NO: 601637 - RNA, 24 nt, Artificial Sequence
  Synthetic
ucuaggcuuucauuuccucucaug

SEQ ID NO: 601638 - RNA, 18 nt, Artificial Sequence
  Synthetic
caaaaagaaagucucaug

SEQ ID NO: 601639 - RNA, 19 nt, Artificial Sequence
  Synthetic
acaaaaagaaagucucaug

SEQ ID NO: 601640 - RNA, 20 nt, Artificial Sequence
  Synthetic
aacaaaaagaaagucucaug

SEQ ID NO: 601641 - RNA, 21 nt, Artificial Sequence
  Synthetic
aaacaaaaagaaagucucaug

SEQ ID NO: 601642 - RNA, 22 nt, Artificial Sequence
  Synthetic
aaaacaaaaagaaagucucaug

SEQ ID NO: 601643 - RNA, 23 nt, Artificial Sequence
  Synthetic
caaaacaaaaagaaagucucaug

SEQ ID NO: 601644 - RNA, 24 nt, Artificial Sequence
  Synthetic
acaaaacaaaaagaaagucucaug

SEQ ID NO: 601645 - RNA, 18 nt, Artificial Sequence
  Synthetic
auaccacguguucucaug

SEQ ID NO: 601646 - RNA, 19 nt, Artificial Sequence
  Synthetic
aauaccacguguucucaug

SEQ ID NO: 601647 - RNA, 20 nt, Artificial Sequence
  Synthetic
aaauaccacguguucucaug

SEQ ID NO: 601648 - RNA, 21 nt, Artificial Sequence
  Synthetic
caaauaccacguguucucaug

SEQ ID NO: 601649 - RNA, 22 nt, Artificial Sequence
  Synthetic
ccaaauaccacguguucucaug

SEQ ID NO: 601650 - RNA, 23 nt, Artificial Sequence
  Synthetic
accaaauaccacguguucucaug

SEQ ID NO: 601651 - RNA, 24 nt, Artificial Sequence
  Synthetic
uaccaaauaccacguguucucaug

SEQ ID NO: 601652 - RNA, 18 nt, Artificial Sequence
  Synthetic
uaaguaaacuuagucaug

SEQ ID NO: 601653 - RNA, 19 nt, Artificial Sequence
  Synthetic
cuaaguaaacuuagucaug

SEQ ID NO: 601654 - RNA, 20 nt, Artificial Sequence
  Synthetic
gcuaaguaaacuuagucaug

SEQ ID NO: 601655 - RNA, 21 nt, Artificial Sequence
  Synthetic
ugcuaaguaaacuuagucaug

SEQ ID NO: 601656 - RNA, 22 nt, Artificial Sequence
  Synthetic
uugcuaaguaaacuuagucaug

SEQ ID NO: 601657 - RNA, 23 nt, Artificial Sequence
  Synthetic
uuugcuaaguaaacuuagucaug

SEQ ID NO: 601658 - RNA, 24 nt, Artificial Sequence
  Synthetic
uuuugcuaaguaaacuuagucaug

SEQ ID NO: 601659 - RNA, 18 nt, Artificial Sequence
  Synthetic
cacagaggaaaggucaug

SEQ ID NO: 601660 - RNA, 19 nt, Artificial Sequence
  Synthetic
acacagaggaaaggucaug

SEQ ID NO: 601661 - RNA, 20 nt, Artificial Sequence
  Synthetic
uacacagaggaaaggucaug

SEQ ID NO: 601662 - RNA, 21 nt, Artificial Sequence
  Synthetic
auacacagaggaaaggucaug

SEQ ID NO: 601663 - RNA, 22 nt, Artificial Sequence
  Synthetic
cauacacagaggaaaggucaug

SEQ ID NO: 601664 - RNA, 23 nt, Artificial Sequence
  Synthetic
acauacacagaggaaaggucaug

SEQ ID NO: 601665 - RNA, 24 nt, Artificial Sequence
  Synthetic
cacauacacagaggaaaggucaug

SEQ ID NO: 601666 - RNA, 18 nt, Artificial Sequence
  Synthetic
accuccugaauugucaug

SEQ ID NO: 601667 - RNA, 19 nt, Artificial Sequence
  Synthetic
gaccuccugaauugucaug

SEQ ID NO: 601668 - RNA, 20 nt, Artificial Sequence
  Synthetic
ugaccuccugaauugucaug

SEQ ID NO: 601669 - RNA, 21 nt, Artificial Sequence
  Synthetic
uugaccuccugaauugucaug

SEQ ID NO: 601670 - RNA, 22 nt, Artificial Sequence
  Synthetic
cuugaccuccugaauugucaug

SEQ ID NO: 601671 - RNA, 23 nt, Artificial Sequence
  Synthetic
acuugaccuccugaauugucaug

SEQ ID NO: 601672 - RNA, 24 nt, Artificial Sequence
  Synthetic
aacuugaccuccugaauugucaug

SEQ ID NO: 601673 - RNA, 18 nt, Artificial Sequence
  Synthetic
gugcaucucauugucaug

SEQ ID NO: 601674 - RNA, 19 nt, Artificial Sequence
  Synthetic
ugugcaucucauugucaug

SEQ ID NO: 601675 - RNA, 20 nt, Artificial Sequence
  Synthetic
gugugcaucucauugucaug

SEQ ID NO: 601676 - RNA, 21 nt, Artificial Sequence
  Synthetic
agugugcaucucauugucaug

SEQ ID NO: 601677 - RNA, 22 nt, Artificial Sequence
  Synthetic
uagugugcaucucauugucaug

SEQ ID NO: 601678 - RNA, 23 nt, Artificial Sequence
  Synthetic
auagugugcaucucauugucaug

SEQ ID NO: 601679 - RNA, 24 nt, Artificial Sequence
  Synthetic
aauagugugcaucucauugucaug

SEQ ID NO: 601680 - RNA, 18 nt, Artificial Sequence
  Synthetic
auuucuucccuauucaug

SEQ ID NO: 601681 - RNA, 19 nt, Artificial Sequence
  Synthetic
uauuucuucccuauucaug

SEQ ID NO: 601682 - RNA, 20 nt, Artificial Sequence
  Synthetic
uuauuucuucccuauucaug

SEQ ID NO: 601683 - RNA, 21 nt, Artificial Sequence
  Synthetic
auuauuucuucccuauucaug

SEQ ID NO: 601684 - RNA, 22 nt, Artificial Sequence
  Synthetic
aauuauuucuucccuauucaug

SEQ ID NO: 601685 - RNA, 23 nt, Artificial Sequence
  Synthetic
aaauuauuucuucccuauucaug

SEQ ID NO: 601686 - RNA, 24 nt, Artificial Sequence
  Synthetic
aaaauuauuucuucccuauucaug

SEQ ID NO: 601687 - RNA, 18 nt, Artificial Sequence
  Synthetic
auuuucugcaacuucaug

SEQ ID NO: 601688 - RNA, 19 nt, Artificial Sequence
  Synthetic
cauuuucugcaacuucaug

SEQ ID NO: 601689 - RNA, 20 nt, Artificial Sequence
  Synthetic
ucauuuucugcaacuucaug

SEQ ID NO: 601690 - RNA, 21 nt, Artificial Sequence
  Synthetic
uucauuuucugcaacuucaug

SEQ ID NO: 601691 - RNA, 22 nt, Artificial Sequence
  Synthetic
auucauuuucugcaacuucaug

SEQ ID NO: 601692 - RNA, 23 nt, Artificial Sequence
  Synthetic
uauucauuuucugcaacuucaug

SEQ ID NO: 601693 - RNA, 24 nt, Artificial Sequence
  Synthetic
auauucauuuucugcaacuucaug

SEQ ID NO: 601694 - RNA, 18 nt, Artificial Sequence
  Synthetic
augggcaaggacuucaug

SEQ ID NO: 601695 - RNA, 19 nt, Artificial Sequence
  Synthetic
caugggcaaggacuucaug

SEQ ID NO: 601696 - RNA, 20 nt, Artificial Sequence
  Synthetic
gcaugggcaaggacuucaug

SEQ ID NO: 601697 - RNA, 21 nt, Artificial Sequence
  Synthetic
ggcaugggcaaggacuucaug

SEQ ID NO: 601698 - RNA, 22 nt, Artificial Sequence
  Synthetic
aggcaugggcaaggacuucaug

SEQ ID NO: 601699 - RNA, 23 nt, Artificial Sequence
  Synthetic
aaggcaugggcaaggacuucaug

SEQ ID NO: 601700 - RNA, 24 nt, Artificial Sequence
  Synthetic
aaaggcaugggcaaggacuucaug

SEQ ID NO: 601701 - RNA, 18 nt, Artificial Sequence
  Synthetic
uaaaccaaauccuucaug

SEQ ID NO: 601702 - RNA, 19 nt, Artificial Sequence
  Synthetic
cuaaaccaaauccuucaug

SEQ ID NO: 601703 - RNA, 20 nt, Artificial Sequence
  Synthetic
acuaaaccaaauccuucaug

SEQ ID NO: 601704 - RNA, 21 nt, Artificial Sequence
  Synthetic
gacuaaaccaaauccuucaug

SEQ ID NO: 601705 - RNA, 22 nt, Artificial Sequence
  Synthetic
agacuaaaccaaauccuucaug

SEQ ID NO: 601706 - RNA, 23 nt, Artificial Sequence
  Synthetic
uagacuaaaccaaauccuucaug

SEQ ID NO: 601707 - RNA, 24 nt, Artificial Sequence
  Synthetic
uuagacuaaaccaaauccuucaug

SEQ ID NO: 601708 - RNA, 18 nt, Artificial Sequence
  Synthetic
aucagcaucagcuucaug

SEQ ID NO: 601709 - RNA, 19 nt, Artificial Sequence
  Synthetic
uaucagcaucagcuucaug

SEQ ID NO: 601710 - RNA, 20 nt, Artificial Sequence
  Synthetic
uuaucagcaucagcuucaug

SEQ ID NO: 601711 - RNA, 21 nt, Artificial Sequence
  Synthetic
uuuaucagcaucagcuucaug

SEQ ID NO: 601712 - RNA, 22 nt, Artificial Sequence
  Synthetic
uuuuaucagcaucagcuucaug

SEQ ID NO: 601713 - RNA, 23 nt, Artificial Sequence
  Synthetic
auuuuaucagcaucagcuucaug

SEQ ID NO: 601714 - RNA, 24 nt, Artificial Sequence
  Synthetic
cauuuuaucagcaucagcuucaug

SEQ ID NO: 601715 - RNA, 18 nt, Artificial Sequence
  Synthetic
ucagacucucucuucaug

SEQ ID NO: 601716 - RNA, 19 nt, Artificial Sequence
  Synthetic
cucagacucucucuucaug

SEQ ID NO: 601717 - RNA, 20 nt, Artificial Sequence
  Synthetic
ccucagacucucucuucaug

SEQ ID NO: 601718 - RNA, 21 nt, Artificial Sequence
  Synthetic
uccucagacucucucuucaug

SEQ ID NO: 601719 - RNA, 22 nt, Artificial Sequence
  Synthetic
uuccucagacucucucuucaug

SEQ ID NO: 601720 - RNA, 23 nt, Artificial Sequence
  Synthetic
uuuccucagacucucucuucaug

SEQ ID NO: 601721 - RNA, 24 nt, Artificial Sequence
  Synthetic
uuuuccucagacucucucuucaug

SEQ ID NO: 601722 - RNA, 18 nt, Artificial Sequence
  Synthetic
gucccagcauucuucaug

SEQ ID NO: 601723 - RNA, 19 nt, Artificial Sequence
  Synthetic
agucccagcauucuucaug

SEQ ID NO: 601724 - RNA, 20 nt, Artificial Sequence
  Synthetic
aagucccagcauucuucaug

SEQ ID NO: 601725 - RNA, 21 nt, Artificial Sequence
  Synthetic
aaagucccagcauucuucaug

SEQ ID NO: 601726 - RNA, 22 nt, Artificial Sequence
  Synthetic
aaaagucccagcauucuucaug

SEQ ID NO: 601727 - RNA, 23 nt, Artificial Sequence
  Synthetic
gaaaagucccagcauucuucaug

SEQ ID NO: 601728 - RNA, 24 nt, Artificial Sequence
  Synthetic
agaaaagucccagcauucuucaug

SEQ ID NO: 601729 - RNA, 18 nt, Artificial Sequence
  Synthetic
uaaguuaccaaguucaug

SEQ ID NO: 601730 - RNA, 19 nt, Artificial Sequence
  Synthetic
guaaguuaccaaguucaug

SEQ ID NO: 601731 - RNA, 20 nt, Artificial Sequence
  Synthetic
aguaaguuaccaaguucaug

SEQ ID NO: 601732 - RNA, 21 nt, Artificial Sequence
  Synthetic
aaguaaguuaccaaguucaug

SEQ ID NO: 601733 - RNA, 22 nt, Artificial Sequence
  Synthetic
gaaguaaguuaccaaguucaug

SEQ ID NO: 601734 - RNA, 23 nt, Artificial Sequence
  Synthetic
ggaaguaaguuaccaaguucaug

SEQ ID NO: 601735 - RNA, 24 nt, Artificial Sequence
  Synthetic
uggaaguaaguuaccaaguucaug

SEQ ID NO: 601736 - RNA, 18 nt, Artificial Sequence
  Synthetic
guuaaaagaccuuucaug

SEQ ID NO: 601737 - RNA, 19 nt, Artificial Sequence
  Synthetic
aguuaaaagaccuuucaug

SEQ ID NO: 601738 - RNA, 20 nt, Artificial Sequence
  Synthetic
caguuaaaagaccuuucaug

SEQ ID NO: 601739 - RNA, 21 nt, Artificial Sequence
  Synthetic
acaguuaaaagaccuuucaug

SEQ ID NO: 601740 - RNA, 22 nt, Artificial Sequence
  Synthetic
aacaguuaaaagaccuuucaug

SEQ ID NO: 601741 - RNA, 23 nt, Artificial Sequence
  Synthetic
aaacaguuaaaagaccuuucaug

SEQ ID NO: 601742 - RNA, 24 nt, Artificial Sequence
  Synthetic
caaacaguuaaaagaccuuucaug

SEQ ID NO: 601743 - RNA, 18 nt, Artificial Sequence
  Synthetic
ggcuuuccccuuuucaug

SEQ ID NO: 601744 - RNA, 19 nt, Artificial Sequence
  Synthetic
cggcuuuccccuuuucaug

SEQ ID NO: 601745 - RNA, 20 nt, Artificial Sequence
  Synthetic
ucggcuuuccccuuuucaug

SEQ ID NO: 601746 - RNA, 21 nt, Artificial Sequence
  Synthetic
cucggcuuuccccuuuucaug

SEQ ID NO: 601747 - RNA, 22 nt, Artificial Sequence
  Synthetic
gcucggcuuuccccuuuucaug

SEQ ID NO: 601748 - RNA, 23 nt, Artificial Sequence
  Synthetic
agcucggcuuuccccuuuucaug

SEQ ID NO: 601749 - RNA, 24 nt, Artificial Sequence
  Synthetic
aagcucggcuuuccccuuuucaug

SEQ ID NO: 601750 - RNA, 18 nt, Artificial Sequence
  Synthetic
acauuuuaaguuuucaug

SEQ ID NO: 601751 - RNA, 19 nt, Artificial Sequence
  Synthetic
cacauuuuaaguuuucaug

SEQ ID NO: 601752 - RNA, 20 nt, Artificial Sequence
  Synthetic
gcacauuuuaaguuuucaug

SEQ ID NO: 601753 - RNA, 21 nt, Artificial Sequence
  Synthetic
ggcacauuuuaaguuuucaug

SEQ ID NO: 601754 - RNA, 22 nt, Artificial Sequence
  Synthetic
aggcacauuuuaaguuuucaug

SEQ ID NO: 601755 - RNA, 23 nt, Artificial Sequence
  Synthetic
caggcacauuuuaaguuuucaug

SEQ ID NO: 601756 - RNA, 24 nt, Artificial Sequence
  Synthetic
gcaggcacauuuuaaguuuucaug

SEQ ID NO: 601757 - RNA, 18 nt, Artificial Sequence
  Synthetic
gggagggcaaaaaagaug

SEQ ID NO: 601758 - RNA, 19 nt, Artificial Sequence
  Synthetic
ggggagggcaaaaaagaug

SEQ ID NO: 601759 - RNA, 20 nt, Artificial Sequence
  Synthetic
aggggagggcaaaaaagaug

SEQ ID NO: 601760 - RNA, 21 nt, Artificial Sequence
  Synthetic
gaggggagggcaaaaaagaug

SEQ ID NO: 601761 - RNA, 22 nt, Artificial Sequence
  Synthetic
ggaggggagggcaaaaaagaug

SEQ ID NO: 601762 - RNA, 23 nt, Artificial Sequence
  Synthetic
uggaggggagggcaaaaaagaug

SEQ ID NO: 601763 - RNA, 24 nt, Artificial Sequence
  Synthetic
uuggaggggagggcaaaaaagaug

SEQ ID NO: 601764 - RNA, 18 nt, Artificial Sequence
  Synthetic
aauugguagcaaaagaug

SEQ ID NO: 601765 - RNA, 19 nt, Artificial Sequence
  Synthetic
uaauugguagcaaaagaug

SEQ ID NO: 601766 - RNA, 20 nt, Artificial Sequence
  Synthetic
auaauugguagcaaaagaug

SEQ ID NO: 601767 - RNA, 21 nt, Artificial Sequence
  Synthetic
cauaauugguagcaaaagaug

SEQ ID NO: 601768 - RNA, 22 nt, Artificial Sequence
  Synthetic
acauaauugguagcaaaagaug

SEQ ID NO: 601769 - RNA, 23 nt, Artificial Sequence
  Synthetic
aacauaauugguagcaaaagaug

SEQ ID NO: 601770 - RNA, 24 nt, Artificial Sequence
  Synthetic
gaacauaauugguagcaaaagaug

SEQ ID NO: 601771 - RNA, 18 nt, Artificial Sequence
  Synthetic
ucaucuaaguaaaagaug

SEQ ID NO: 601772 - RNA, 19 nt, Artificial Sequence
  Synthetic
aucaucuaaguaaaagaug

SEQ ID NO: 601773 - RNA, 20 nt, Artificial Sequence
  Synthetic
uaucaucuaaguaaaagaug

SEQ ID NO: 601774 - RNA, 21 nt, Artificial Sequence
  Synthetic
uuaucaucuaaguaaaagaug

SEQ ID NO: 601775 - RNA, 22 nt, Artificial Sequence
  Synthetic
guuaucaucuaaguaaaagaug

SEQ ID NO: 601776 - RNA, 23 nt, Artificial Sequence
  Synthetic
uguuaucaucuaaguaaaagaug

SEQ ID NO: 601777 - RNA, 24 nt, Artificial Sequence
  Synthetic
cuguuaucaucuaaguaaaagaug

SEQ ID NO: 601778 - RNA, 18 nt, Artificial Sequence
  Synthetic
aagugcuaaacaaagaug

SEQ ID NO: 601779 - RNA, 19 nt, Artificial Sequence
  Synthetic
gaagugcuaaacaaagaug

SEQ ID NO: 601780 - RNA, 20 nt, Artificial Sequence
  Synthetic
ugaagugcuaaacaaagaug

SEQ ID NO: 601781 - RNA, 21 nt, Artificial Sequence
  Synthetic
uugaagugcuaaacaaagaug

SEQ ID NO: 601782 - RNA, 22 nt, Artificial Sequence
  Synthetic
guugaagugcuaaacaaagaug

SEQ ID NO: 601783 - RNA, 23 nt, Artificial Sequence
  Synthetic
aguugaagugcuaaacaaagaug

SEQ ID NO: 601784 - RNA, 24 nt, Artificial Sequence
  Synthetic
gaguugaagugcuaaacaaagaug

SEQ ID NO: 601785 - RNA, 18 nt, Artificial Sequence
  Synthetic
acuagcugagcaaagaug

SEQ ID NO: 601786 - RNA, 19 nt, Artificial Sequence
  Synthetic
cacuagcugagcaaagaug

SEQ ID NO: 601787 - RNA, 20 nt, Artificial Sequence
  Synthetic
ccacuagcugagcaaagaug

SEQ ID NO: 601788 - RNA, 21 nt, Artificial Sequence
  Synthetic
uccacuagcugagcaaagaug

SEQ ID NO: 601789 - RNA, 22 nt, Artificial Sequence
  Synthetic
uuccacuagcugagcaaagaug

SEQ ID NO: 601790 - RNA, 23 nt, Artificial Sequence
  Synthetic
auuccacuagcugagcaaagaug

SEQ ID NO: 601791 - RNA, 24 nt, Artificial Sequence
  Synthetic
gauuccacuagcugagcaaagaug

SEQ ID NO: 601792 - RNA, 18 nt, Artificial Sequence
  Synthetic
cauaaaaagagaaagaug

SEQ ID NO: 601793 - RNA, 19 nt, Artificial Sequence
  Synthetic
ccauaaaaagagaaagaug

SEQ ID NO: 601794 - RNA, 20 nt, Artificial Sequence
  Synthetic
uccauaaaaagagaaagaug

SEQ ID NO: 601795 - RNA, 21 nt, Artificial Sequence
  Synthetic
cuccauaaaaagagaaagaug

SEQ ID NO: 601796 - RNA, 22 nt, Artificial Sequence
  Synthetic
acuccauaaaaagagaaagaug

SEQ ID NO: 601797 - RNA, 23 nt, Artificial Sequence
  Synthetic
aacuccauaaaaagagaaagaug

SEQ ID NO: 601798 - RNA, 24 nt, Artificial Sequence
  Synthetic
gaacuccauaaaaagagaaagaug

SEQ ID NO: 601799 - RNA, 18 nt, Artificial Sequence
  Synthetic
auacuuauaugaaagaug

SEQ ID NO: 601800 - RNA, 19 nt, Artificial Sequence
  Synthetic
uauacuuauaugaaagaug

SEQ ID NO: 601801 - RNA, 20 nt, Artificial Sequence
  Synthetic
auauacuuauaugaaagaug

SEQ ID NO: 601802 - RNA, 21 nt, Artificial Sequence
  Synthetic
uauauacuuauaugaaagaug

SEQ ID NO: 601803 - RNA, 22 nt, Artificial Sequence
  Synthetic
auauauacuuauaugaaagaug

SEQ ID NO: 601804 - RNA, 23 nt, Artificial Sequence
  Synthetic
uauauauacuuauaugaaagaug

SEQ ID NO: 601805 - RNA, 24 nt, Artificial Sequence
  Synthetic
auauauauacuuauaugaaagaug

SEQ ID NO: 601806 - RNA, 18 nt, Artificial Sequence
  Synthetic
agacaacugcuaaagaug

SEQ ID NO: 601807 - RNA, 19 nt, Artificial Sequence
  Synthetic
aagacaacugcuaaagaug

SEQ ID NO: 601808 - RNA, 20 nt, Artificial Sequence
  Synthetic
caagacaacugcuaaagaug

SEQ ID NO: 601809 - RNA, 21 nt, Artificial Sequence
  Synthetic
acaagacaacugcuaaagaug

SEQ ID NO: 601810 - RNA, 22 nt, Artificial Sequence
  Synthetic
aacaagacaacugcuaaagaug

SEQ ID NO: 601811 - RNA, 23 nt, Artificial Sequence
  Synthetic
gaacaagacaacugcuaaagaug

SEQ ID NO: 601812 - RNA, 24 nt, Artificial Sequence
  Synthetic
ugaacaagacaacugcuaaagaug

SEQ ID NO: 601813 - RNA, 18 nt, Artificial Sequence
  Synthetic
guuuuggguguaaagaug

SEQ ID NO: 601814 - RNA, 19 nt, Artificial Sequence
  Synthetic
gguuuuggguguaaagaug

SEQ ID NO: 601815 - RNA, 20 nt, Artificial Sequence
  Synthetic
ugguuuuggguguaaagaug

SEQ ID NO: 601816 - RNA, 21 nt, Artificial Sequence
  Synthetic
uugguuuuggguguaaagaug

SEQ ID NO: 601817 - RNA, 22 nt, Artificial Sequence
  Synthetic
uuugguuuuggguguaaagaug

SEQ ID NO: 601818 - RNA, 23 nt, Artificial Sequence
  Synthetic
uuuugguuuuggguguaaagaug

SEQ ID NO: 601819 - RNA, 24 nt, Artificial Sequence
  Synthetic
cuuuugguuuuggguguaaagaug

SEQ ID NO: 601820 - RNA, 18 nt, Artificial Sequence
  Synthetic
aucaaccuggccaagaug

SEQ ID NO: 601821 - RNA, 19 nt, Artificial Sequence
  Synthetic
gaucaaccuggccaagaug

SEQ ID NO: 601822 - RNA, 20 nt, Artificial Sequence
  Synthetic
agaucaaccuggccaagaug

SEQ ID NO: 601823 - RNA, 21 nt, Artificial Sequence
  Synthetic
aagaucaaccuggccaagaug

SEQ ID NO: 601824 - RNA, 22 nt, Artificial Sequence
  Synthetic
uaagaucaaccuggccaagaug

SEQ ID NO: 601825 - RNA, 23 nt, Artificial Sequence
  Synthetic
uuaagaucaaccuggccaagaug

SEQ ID NO: 601826 - RNA, 24 nt, Artificial Sequence
  Synthetic
cuuaagaucaaccuggccaagaug

SEQ ID NO: 601827 - RNA, 18 nt, Artificial Sequence
  Synthetic
accagccuggccaagaug

SEQ ID NO: 601828 - RNA, 19 nt, Artificial Sequence
  Synthetic
gaccagccuggccaagaug

SEQ ID NO: 601829 - RNA, 20 nt, Artificial Sequence
  Synthetic
agaccagccuggccaagaug

SEQ ID NO: 601830 - RNA, 21 nt, Artificial Sequence
  Synthetic
aagaccagccuggccaagaug

SEQ ID NO: 601831 - RNA, 22 nt, Artificial Sequence
  Synthetic
caagaccagccuggccaagaug

SEQ ID NO: 601832 - RNA, 23 nt, Artificial Sequence
  Synthetic
ucaagaccagccuggccaagaug

SEQ ID NO: 601833 - RNA, 24 nt, Artificial Sequence
  Synthetic
uucaagaccagccuggccaagaug

SEQ ID NO: 601834 - RNA, 18 nt, Artificial Sequence
  Synthetic
accagucuggccaagaug

SEQ ID NO: 601835 - RNA, 19 nt, Artificial Sequence
  Synthetic
gaccagucuggccaagaug

SEQ ID NO: 601836 - RNA, 20 nt, Artificial Sequence
  Synthetic
agaccagucuggccaagaug

SEQ ID NO: 601837 - RNA, 21 nt, Artificial Sequence
  Synthetic
aagaccagucuggccaagaug

SEQ ID NO: 601838 - RNA, 22 nt, Artificial Sequence
  Synthetic
caagaccagucuggccaagaug

SEQ ID NO: 601839 - RNA, 23 nt, Artificial Sequence
  Synthetic
ucaagaccagucuggccaagaug

SEQ ID NO: 601840 - RNA, 24 nt, Artificial Sequence
  Synthetic
uucaagaccagucuggccaagaug

SEQ ID NO: 601841 - RNA, 18 nt, Artificial Sequence
  Synthetic
aauacaaaaaagaagaug

SEQ ID NO: 601842 - RNA, 19 nt, Artificial Sequence
  Synthetic
gaauacaaaaaagaagaug

SEQ ID NO: 601843 - RNA, 20 nt, Artificial Sequence
  Synthetic
ggaauacaaaaaagaagaug

SEQ ID NO: 601844 - RNA, 21 nt, Artificial Sequence
  Synthetic
uggaauacaaaaaagaagaug

SEQ ID NO: 601845 - RNA, 22 nt, Artificial Sequence
  Synthetic
uuggaauacaaaaaagaagaug

SEQ ID NO: 601846 - RNA, 23 nt, Artificial Sequence
  Synthetic
uuuggaauacaaaaaagaagaug

SEQ ID NO: 601847 - RNA, 24 nt, Artificial Sequence
  Synthetic
cuuuggaauacaaaaaagaagaug

SEQ ID NO: 601848 - RNA, 18 nt, Artificial Sequence
  Synthetic
uaucccuaaaagaagaug

SEQ ID NO: 601849 - RNA, 19 nt, Artificial Sequence
  Synthetic
uuaucccuaaaagaagaug

SEQ ID NO: 601850 - RNA, 20 nt, Artificial Sequence
  Synthetic
guuaucccuaaaagaagaug

SEQ ID NO: 601851 - RNA, 21 nt, Artificial Sequence
  Synthetic
uguuaucccuaaaagaagaug

SEQ ID NO: 601852 - RNA, 22 nt, Artificial Sequence
  Synthetic
cuguuaucccuaaaagaagaug

SEQ ID NO: 601853 - RNA, 23 nt, Artificial Sequence
  Synthetic
ccuguuaucccuaaaagaagaug

SEQ ID NO: 601854 - RNA, 24 nt, Artificial Sequence
  Synthetic
cccuguuaucccuaaaagaagaug

SEQ ID NO: 601855 - RNA, 18 nt, Artificial Sequence
  Synthetic
cuacacagaaagaagaug

SEQ ID NO: 601856 - RNA, 19 nt, Artificial Sequence
  Synthetic
ccuacacagaaagaagaug

SEQ ID NO: 601857 - RNA, 20 nt, Artificial Sequence
  Synthetic
gccuacacagaaagaagaug

SEQ ID NO: 601858 - RNA, 21 nt, Artificial Sequence
  Synthetic
ugccuacacagaaagaagaug

SEQ ID NO: 601859 - RNA, 22 nt, Artificial Sequence
  Synthetic
augccuacacagaaagaagaug

SEQ ID NO: 601860 - RNA, 23 nt, Artificial Sequence
  Synthetic
gaugccuacacagaaagaagaug

SEQ ID NO: 601861 - RNA, 24 nt, Artificial Sequence
  Synthetic
ggaugccuacacagaaagaagaug

SEQ ID NO: 601862 - RNA, 18 nt, Artificial Sequence
  Synthetic
cugaugcuggagaagaug

SEQ ID NO: 601863 - RNA, 19 nt, Artificial Sequence
  Synthetic
acugaugcuggagaagaug

SEQ ID NO: 601864 - RNA, 20 nt, Artificial Sequence
  Synthetic
aacugaugcuggagaagaug

SEQ ID NO: 601865 - RNA, 21 nt, Artificial Sequence
  Synthetic
caacugaugcuggagaagaug

SEQ ID NO: 601866 - RNA, 22 nt, Artificial Sequence
  Synthetic
acaacugaugcuggagaagaug

SEQ ID NO: 601867 - RNA, 23 nt, Artificial Sequence
  Synthetic
aacaacugaugcuggagaagaug

SEQ ID NO: 601868 - RNA, 24 nt, Artificial Sequence
  Synthetic
aaacaacugaugcuggagaagaug

SEQ ID NO: 601869 - RNA, 18 nt, Artificial Sequence
  Synthetic
ucagaagacaggaagaug

SEQ ID NO: 601870 - RNA, 19 nt, Artificial Sequence
  Synthetic
gucagaagacaggaagaug

SEQ ID NO: 601871 - RNA, 20 nt, Artificial Sequence
  Synthetic
ggucagaagacaggaagaug

SEQ ID NO: 601872 - RNA, 21 nt, Artificial Sequence
  Synthetic
gggucagaagacaggaagaug

SEQ ID NO: 601873 - RNA, 22 nt, Artificial Sequence
  Synthetic
ggggucagaagacaggaagaug

SEQ ID NO: 601874 - RNA, 23 nt, Artificial Sequence
  Synthetic
aggggucagaagacaggaagaug

SEQ ID NO: 601875 - RNA, 24 nt, Artificial Sequence
  Synthetic
gaggggucagaagacaggaagaug

SEQ ID NO: 601876 - RNA, 18 nt, Artificial Sequence
  Synthetic
gagagaggagggaagaug

SEQ ID NO: 601877 - RNA, 19 nt, Artificial Sequence
  Synthetic
agagagaggagggaagaug

SEQ ID NO: 601878 - RNA, 20 nt, Artificial Sequence
  Synthetic
aagagagaggagggaagaug

SEQ ID NO: 601879 - RNA, 21 nt, Artificial Sequence
  Synthetic
caagagagaggagggaagaug

SEQ ID NO: 601880 - RNA, 22 nt, Artificial Sequence
  Synthetic
ucaagagagaggagggaagaug

SEQ ID NO: 601881 - RNA, 23 nt, Artificial Sequence
  Synthetic
uucaagagagaggagggaagaug

SEQ ID NO: 601882 - RNA, 24 nt, Artificial Sequence
  Synthetic
uuucaagagagaggagggaagaug

SEQ ID NO: 601883 - RNA, 18 nt, Artificial Sequence
  Synthetic
uguauuaaggggaagaug

SEQ ID NO: 601884 - RNA, 19 nt, Artificial Sequence
  Synthetic
uuguauuaaggggaagaug

SEQ ID NO: 601885 - RNA, 20 nt, Artificial Sequence
  Synthetic
uuuguauuaaggggaagaug

SEQ ID NO: 601886 - RNA, 21 nt, Artificial Sequence
  Synthetic
uuuuguauuaaggggaagaug

SEQ ID NO: 601887 - RNA, 22 nt, Artificial Sequence
  Synthetic
cuuuuguauuaaggggaagaug

SEQ ID NO: 601888 - RNA, 23 nt, Artificial Sequence
  Synthetic
gcuuuuguauuaaggggaagaug

SEQ ID NO: 601889 - RNA, 24 nt, Artificial Sequence
  Synthetic
ggcuuuuguauuaaggggaagaug

SEQ ID NO: 601890 - RNA, 18 nt, Artificial Sequence
  Synthetic
aauauugaggggaagaug

SEQ ID NO: 601891 - RNA, 19 nt, Artificial Sequence
  Synthetic
aaauauugaggggaagaug

SEQ ID NO: 601892 - RNA, 20 nt, Artificial Sequence
  Synthetic
gaaauauugaggggaagaug

SEQ ID NO: 601893 - RNA, 21 nt, Artificial Sequence
  Synthetic
ggaaauauugaggggaagaug

SEQ ID NO: 601894 - RNA, 22 nt, Artificial Sequence
  Synthetic
uggaaauauugaggggaagaug

SEQ ID NO: 601895 - RNA, 23 nt, Artificial Sequence
  Synthetic
auggaaauauugaggggaagaug

SEQ ID NO: 601896 - RNA, 24 nt, Artificial Sequence
  Synthetic
gauggaaauauugaggggaagaug

SEQ ID NO: 601897 - RNA, 18 nt, Artificial Sequence
  Synthetic
augaggccaaugaagaug

SEQ ID NO: 601898 - RNA, 19 nt, Artificial Sequence
  Synthetic
caugaggccaaugaagaug

SEQ ID NO: 601899 - RNA, 20 nt, Artificial Sequence
  Synthetic
acaugaggccaaugaagaug

SEQ ID NO: 601900 - RNA, 21 nt, Artificial Sequence
  Synthetic
cacaugaggccaaugaagaug

SEQ ID NO: 601901 - RNA, 22 nt, Artificial Sequence
  Synthetic
ccacaugaggccaaugaagaug

SEQ ID NO: 601902 - RNA, 23 nt, Artificial Sequence
  Synthetic
accacaugaggccaaugaagaug

SEQ ID NO: 601903 - RNA, 24 nt, Artificial Sequence
  Synthetic
uaccacaugaggccaaugaagaug

SEQ ID NO: 601904 - RNA, 18 nt, Artificial Sequence
  Synthetic
auaagagucuugaagaug

SEQ ID NO: 601905 - RNA, 19 nt, Artificial Sequence
  Synthetic
gauaagagucuugaagaug

SEQ ID NO: 601906 - RNA, 20 nt, Artificial Sequence
  Synthetic
agauaagagucuugaagaug

SEQ ID NO: 601907 - RNA, 21 nt, Artificial Sequence
  Synthetic
gagauaagagucuugaagaug

SEQ ID NO: 601908 - RNA, 22 nt, Artificial Sequence
  Synthetic
ggagauaagagucuugaagaug

SEQ ID NO: 601909 - RNA, 23 nt, Artificial Sequence
  Synthetic
aggagauaagagucuugaagaug

SEQ ID NO: 601910 - RNA, 24 nt, Artificial Sequence
  Synthetic
aaggagauaagagucuugaagaug

SEQ ID NO: 601911 - RNA, 18 nt, Artificial Sequence
  Synthetic
uuuguaggaaauaagaug

SEQ ID NO: 601912 - RNA, 19 nt, Artificial Sequence
  Synthetic
auuuguaggaaauaagaug

SEQ ID NO: 601913 - RNA, 20 nt, Artificial Sequence
  Synthetic
aauuuguaggaaauaagaug

SEQ ID NO: 601914 - RNA, 21 nt, Artificial Sequence
  Synthetic
uaauuuguaggaaauaagaug

SEQ ID NO: 601915 - RNA, 22 nt, Artificial Sequence
  Synthetic
uuaauuuguaggaaauaagaug

SEQ ID NO: 601916 - RNA, 23 nt, Artificial Sequence
  Synthetic
uuuaauuuguaggaaauaagaug

SEQ ID NO: 601917 - RNA, 24 nt, Artificial Sequence
  Synthetic
uuuuaauuuguaggaaauaagaug

SEQ ID NO: 601918 - RNA, 18 nt, Artificial Sequence
  Synthetic
uaagcccaucauaagaug

SEQ ID NO: 601919 - RNA, 19 nt, Artificial Sequence
  Synthetic
guaagcccaucauaagaug

SEQ ID NO: 601920 - RNA, 20 nt, Artificial Sequence
  Synthetic
uguaagcccaucauaagaug

SEQ ID NO: 601921 - RNA, 21 nt, Artificial Sequence
  Synthetic
auguaagcccaucauaagaug

SEQ ID NO: 601922 - RNA, 22 nt, Artificial Sequence
  Synthetic
aauguaagcccaucauaagaug

SEQ ID NO: 601923 - RNA, 23 nt, Artificial Sequence
  Synthetic
aaauguaagcccaucauaagaug

SEQ ID NO: 601924 - RNA, 24 nt, Artificial Sequence
  Synthetic
uaaauguaagcccaucauaagaug

SEQ ID NO: 601925 - RNA, 18 nt, Artificial Sequence
  Synthetic
gugaccuggccuaagaug

SEQ ID NO: 601926 - RNA, 19 nt, Artificial Sequence
  Synthetic
ggugaccuggccuaagaug

SEQ ID NO: 601927 - RNA, 20 nt, Artificial Sequence
  Synthetic
aggugaccuggccuaagaug

SEQ ID NO: 601928 - RNA, 21 nt, Artificial Sequence
  Synthetic
gaggugaccuggccuaagaug

SEQ ID NO: 601929 - RNA, 22 nt, Artificial Sequence
  Synthetic
agaggugaccuggccuaagaug

SEQ ID NO: 601930 - RNA, 23 nt, Artificial Sequence
  Synthetic
cagaggugaccuggccuaagaug

SEQ ID NO: 601931 - RNA, 24 nt, Artificial Sequence
  Synthetic
gcagaggugaccuggccuaagaug

SEQ ID NO: 601932 - RNA, 18 nt, Artificial Sequence
  Synthetic
uucacaauagcuaagaug

SEQ ID NO: 601933 - RNA, 19 nt, Artificial Sequence
  Synthetic
auucacaauagcuaagaug

SEQ ID NO: 601934 - RNA, 20 nt, Artificial Sequence
  Synthetic
gauucacaauagcuaagaug

SEQ ID NO: 601935 - RNA, 21 nt, Artificial Sequence
  Synthetic
agauucacaauagcuaagaug

SEQ ID NO: 601936 - RNA, 22 nt, Artificial Sequence
  Synthetic
cagauucacaauagcuaagaug

SEQ ID NO: 601937 - RNA, 23 nt, Artificial Sequence
  Synthetic
acagauucacaauagcuaagaug

SEQ ID NO: 601938 - RNA, 24 nt, Artificial Sequence
  Synthetic
aacagauucacaauagcuaagaug

SEQ ID NO: 601939 - RNA, 18 nt, Artificial Sequence
  Synthetic
aagcuaauaucuaagaug

SEQ ID NO: 601940 - RNA, 19 nt, Artificial Sequence
  Synthetic
caagcuaauaucuaagaug

SEQ ID NO: 601941 - RNA, 20 nt, Artificial Sequence
  Synthetic
ucaagcuaauaucuaagaug

SEQ ID NO: 601942 - RNA, 21 nt, Artificial Sequence
  Synthetic
aucaagcuaauaucuaagaug

SEQ ID NO: 601943 - RNA, 22 nt, Artificial Sequence
  Synthetic
gaucaagcuaauaucuaagaug

SEQ ID NO: 601944 - RNA, 23 nt, Artificial Sequence
  Synthetic
agaucaagcuaauaucuaagaug

SEQ ID NO: 601945 - RNA, 24 nt, Artificial Sequence
  Synthetic
aagaucaagcuaauaucuaagaug

SEQ ID NO: 601946 - RNA, 18 nt, Artificial Sequence
  Synthetic
auacccuuuauuaagaug

SEQ ID NO: 601947 - RNA, 19 nt, Artificial Sequence
  Synthetic
gauacccuuuauuaagaug

SEQ ID NO: 601948 - RNA, 20 nt, Artificial Sequence
  Synthetic
agauacccuuuauuaagaug

SEQ ID NO: 601949 - RNA, 21 nt, Artificial Sequence
  Synthetic
uagauacccuuuauuaagaug

SEQ ID NO: 601950 - RNA, 22 nt, Artificial Sequence
  Synthetic
guagauacccuuuauuaagaug

SEQ ID NO: 601951 - RNA, 23 nt, Artificial Sequence
  Synthetic
uguagauacccuuuauuaagaug

SEQ ID NO: 601952 - RNA, 24 nt, Artificial Sequence
  Synthetic
cuguagauacccuuuauuaagaug

SEQ ID NO: 601953 - RNA, 18 nt, Artificial Sequence
  Synthetic
auuucugaaguuaagaug

SEQ ID NO: 601954 - RNA, 19 nt, Artificial Sequence
  Synthetic
aauuucugaaguuaagaug

SEQ ID NO: 601955 - RNA, 20 nt, Artificial Sequence
  Synthetic
uaauuucugaaguuaagaug

SEQ ID NO: 601956 - RNA, 21 nt, Artificial Sequence
  Synthetic
guaauuucugaaguuaagaug

SEQ ID NO: 601957 - RNA, 22 nt, Artificial Sequence
  Synthetic
aguaauuucugaaguuaagaug

SEQ ID NO: 601958 - RNA, 23 nt, Artificial Sequence
  Synthetic
caguaauuucugaaguuaagaug

SEQ ID NO: 601959 - RNA, 24 nt, Artificial Sequence
  Synthetic
ucaguaauuucugaaguuaagaug

SEQ ID NO: 601960 - RNA, 18 nt, Artificial Sequence
  Synthetic
ugugcuuucuuuaagaug

SEQ ID NO: 601961 - RNA, 19 nt, Artificial Sequence
  Synthetic
gugugcuuucuuuaagaug

SEQ ID NO: 601962 - RNA, 20 nt, Artificial Sequence
  Synthetic
ugugugcuuucuuuaagaug

SEQ ID NO: 601963 - RNA, 21 nt, Artificial Sequence
  Synthetic
gugugugcuuucuuuaagaug

SEQ ID NO: 601964 - RNA, 22 nt, Artificial Sequence
  Synthetic
cgugugugcuuucuuuaagaug

SEQ ID NO: 601965 - RNA, 23 nt, Artificial Sequence
  Synthetic
acgugugugcuuucuuuaagaug

SEQ ID NO: 601966 - RNA, 24 nt, Artificial Sequence
  Synthetic
uacgugugugcuuucuuuaagaug

SEQ ID NO: 601967 - RNA, 21 nt, Artificial Sequence
  Synthetic
aaagucaggaaacaacagaug

SEQ ID NO: 601968 - RNA, 22 nt, Artificial Sequence
  Synthetic
aaaagucaggaaacaacagaug

SEQ ID NO: 601969 - RNA, 23 nt, Artificial Sequence
  Synthetic
aaaaagucaggaaacaacagaug

SEQ ID NO: 601970 - RNA, 24 nt, Artificial Sequence
  Synthetic
uaaaaagucaggaaacaacagaug

SEQ ID NO: 601971 - RNA, 18 nt, Artificial Sequence
  Synthetic
gucaggcaacaacagaug

SEQ ID NO: 601972 - RNA, 19 nt, Artificial Sequence
  Synthetic
agucaggcaacaacagaug

SEQ ID NO: 601973 - RNA, 20 nt, Artificial Sequence
  Synthetic
aagucaggcaacaacagaug

SEQ ID NO: 601974 - RNA, 21 nt, Artificial Sequence
  Synthetic
aaagucaggcaacaacagaug

SEQ ID NO: 601975 - RNA, 22 nt, Artificial Sequence
  Synthetic
aaaagucaggcaacaacagaug

SEQ ID NO: 601976 - RNA, 23 nt, Artificial Sequence
  Synthetic
caaaagucaggcaacaacagaug

SEQ ID NO: 601977 - RNA, 24 nt, Artificial Sequence
  Synthetic
ucaaaagucaggcaacaacagaug

SEQ ID NO: 601978 - RNA, 18 nt, Artificial Sequence
  Synthetic
aaucuuauuucacagaug

SEQ ID NO: 601979 - RNA, 19 nt, Artificial Sequence
  Synthetic
uaaucuuauuucacagaug

SEQ ID NO: 601980 - RNA, 20 nt, Artificial Sequence
  Synthetic
uuaaucuuauuucacagaug

SEQ ID NO: 601981 - RNA, 21 nt, Artificial Sequence
  Synthetic
auuaaucuuauuucacagaug

SEQ ID NO: 601982 - RNA, 22 nt, Artificial Sequence
  Synthetic
cauuaaucuuauuucacagaug

SEQ ID NO: 601983 - RNA, 23 nt, Artificial Sequence
  Synthetic
ucauuaaucuuauuucacagaug

SEQ ID NO: 601984 - RNA, 24 nt, Artificial Sequence
  Synthetic
gucauuaaucuuauuucacagaug

SEQ ID NO: 601985 - RNA, 18 nt, Artificial Sequence
  Synthetic
caggauuucagacagaug

SEQ ID NO: 601986 - RNA, 19 nt, Artificial Sequence
  Synthetic
acaggauuucagacagaug

SEQ ID NO: 601987 - RNA, 20 nt, Artificial Sequence
  Synthetic
aacaggauuucagacagaug

SEQ ID NO: 601988 - RNA, 21 nt, Artificial Sequence
  Synthetic
uaacaggauuucagacagaug

SEQ ID NO: 601989 - RNA, 22 nt, Artificial Sequence
  Synthetic
guaacaggauuucagacagaug

SEQ ID NO: 601990 - RNA, 23 nt, Artificial Sequence
  Synthetic
gguaacaggauuucagacagaug

SEQ ID NO: 601991 - RNA, 24 nt, Artificial Sequence
  Synthetic
ggguaacaggauuucagacagaug

SEQ ID NO: 601992 - RNA, 18 nt, Artificial Sequence
  Synthetic
aauugacaguuacagaug

SEQ ID NO: 601993 - RNA, 19 nt, Artificial Sequence
  Synthetic
gaauugacaguuacagaug

SEQ ID NO: 601994 - RNA, 20 nt, Artificial Sequence
  Synthetic
ugaauugacaguuacagaug

SEQ ID NO: 601995 - RNA, 21 nt, Artificial Sequence
  Synthetic
uugaauugacaguuacagaug

SEQ ID NO: 601996 - RNA, 22 nt, Artificial Sequence
  Synthetic
cuugaauugacaguuacagaug

SEQ ID NO: 601997 - RNA, 23 nt, Artificial Sequence
  Synthetic
ccuugaauugacaguuacagaug

SEQ ID NO: 601998 - RNA, 24 nt, Artificial Sequence
  Synthetic
accuugaauugacaguuacagaug

SEQ ID NO: 601999 - RNA, 18 nt, Artificial Sequence
  Synthetic
uuguuuaaaaaccagaug

SEQ ID NO: 602000 - RNA, 19 nt, Artificial Sequence
  Synthetic
cuuguuuaaaaaccagaug

SEQ ID NO: 602001 - RNA, 20 nt, Artificial Sequence
  Synthetic
acuuguuuaaaaaccagaug

SEQ ID NO: 602002 - RNA, 21 nt, Artificial Sequence
  Synthetic
uacuuguuuaaaaaccagaug

SEQ ID NO: 602003 - RNA, 22 nt, Artificial Sequence
  Synthetic
auacuuguuuaaaaaccagaug

SEQ ID NO: 602004 - RNA, 23 nt, Artificial Sequence
  Synthetic
uauacuuguuuaaaaaccagaug

SEQ ID NO: 602005 - RNA, 24 nt, Artificial Sequence
  Synthetic
auauacuuguuuaaaaaccagaug

SEQ ID NO: 602006 - RNA, 18 nt, Artificial Sequence
  Synthetic
ggaguuugagaccagaug

SEQ ID NO: 602007 - RNA, 19 nt, Artificial Sequence
  Synthetic
aggaguuugagaccagaug

SEQ ID NO: 602008 - RNA, 20 nt, Artificial Sequence
  Synthetic
caggaguuugagaccagaug

SEQ ID NO: 602009 - RNA, 21 nt, Artificial Sequence
  Synthetic
ucaggaguuugagaccagaug

SEQ ID NO: 602010 - RNA, 22 nt, Artificial Sequence
  Synthetic
cucaggaguuugagaccagaug

SEQ ID NO: 602011 - RNA, 23 nt, Artificial Sequence
  Synthetic
gcucaggaguuugagaccagaug

SEQ ID NO: 602012 - RNA, 24 nt, Artificial Sequence
  Synthetic
agcucaggaguuugagaccagaug

SEQ ID NO: 602013 - RNA, 18 nt, Artificial Sequence
  Synthetic
gcacagccagcccagaug

SEQ ID NO: 602014 - RNA, 19 nt, Artificial Sequence
  Synthetic
ugcacagccagcccagaug

SEQ ID NO: 602015 - RNA, 20 nt, Artificial Sequence
  Synthetic
cugcacagccagcccagaug

SEQ ID NO: 602016 - RNA, 21 nt, Artificial Sequence
  Synthetic
ucugcacagccagcccagaug

SEQ ID NO: 602017 - RNA, 22 nt, Artificial Sequence
  Synthetic
cucugcacagccagcccagaug

SEQ ID NO: 602018 - RNA, 23 nt, Artificial Sequence
  Synthetic
gcucugcacagccagcccagaug

SEQ ID NO: 602019 - RNA, 24 nt, Artificial Sequence
  Synthetic
agcucugcacagccagcccagaug

SEQ ID NO: 602020 - RNA, 18 nt, Artificial Sequence
  Synthetic
uaacuacuuauccagaug

SEQ ID NO: 602021 - RNA, 19 nt, Artificial Sequence
  Synthetic
uuaacuacuuauccagaug

SEQ ID NO: 602022 - RNA, 20 nt, Artificial Sequence
  Synthetic
auuaacuacuuauccagaug

SEQ ID NO: 602023 - RNA, 21 nt, Artificial Sequence
  Synthetic
aauuaacuacuuauccagaug

SEQ ID NO: 602024 - RNA, 22 nt, Artificial Sequence
  Synthetic
gaauuaacuacuuauccagaug

SEQ ID NO: 602025 - RNA, 23 nt, Artificial Sequence
  Synthetic
agaauuaacuacuuauccagaug

SEQ ID NO: 602026 - RNA, 24 nt, Artificial Sequence
  Synthetic
cagaauuaacuacuuauccagaug

SEQ ID NO: 602027 - RNA, 18 nt, Artificial Sequence
  Synthetic
cguacagcuuuccagaug

SEQ ID NO: 602028 - RNA, 19 nt, Artificial Sequence
  Synthetic
ucguacagcuuuccagaug

SEQ ID NO: 602029 - RNA, 20 nt, Artificial Sequence
  Synthetic
aucguacagcuuuccagaug

SEQ ID NO: 602030 - RNA, 21 nt, Artificial Sequence
  Synthetic
gaucguacagcuuuccagaug

SEQ ID NO: 602031 - RNA, 22 nt, Artificial Sequence
  Synthetic
ugaucguacagcuuuccagaug

SEQ ID NO: 602032 - RNA, 23 nt, Artificial Sequence
  Synthetic
cugaucguacagcuuuccagaug

SEQ ID NO: 602033 - RNA, 24 nt, Artificial Sequence
  Synthetic
gcugaucguacagcuuuccagaug

SEQ ID NO: 602034 - RNA, 18 nt, Artificial Sequence
  Synthetic
ugaggucaggagcagaug

SEQ ID NO: 602035 - RNA, 19 nt, Artificial Sequence
  Synthetic
gugaggucaggagcagaug

SEQ ID NO: 602036 - RNA, 20 nt, Artificial Sequence
  Synthetic
ugugaggucaggagcagaug

SEQ ID NO: 602037 - RNA, 21 nt, Artificial Sequence
  Synthetic
augugaggucaggagcagaug

SEQ ID NO: 602038 - RNA, 22 nt, Artificial Sequence
  Synthetic
uaugugaggucaggagcagaug

SEQ ID NO: 602039 - RNA, 23 nt, Artificial Sequence
  Synthetic
uuaugugaggucaggagcagaug

SEQ ID NO: 602040 - RNA, 24 nt, Artificial Sequence
  Synthetic
guuaugugaggucaggagcagaug

SEQ ID NO: 602041 - RNA, 18 nt, Artificial Sequence
  Synthetic
ucaguugggaggcagaug

SEQ ID NO: 602042 - RNA, 19 nt, Artificial Sequence
  Synthetic
uucaguugggaggcagaug

SEQ ID NO: 602043 - RNA, 20 nt, Artificial Sequence
  Synthetic
uuucaguugggaggcagaug

SEQ ID NO: 602044 - RNA, 21 nt, Artificial Sequence
  Synthetic
guuucaguugggaggcagaug

SEQ ID NO: 602045 - RNA, 22 nt, Artificial Sequence
  Synthetic
uguuucaguugggaggcagaug

SEQ ID NO: 602046 - RNA, 23 nt, Artificial Sequence
  Synthetic
guguuucaguugggaggcagaug

SEQ ID NO: 602047 - RNA, 24 nt, Artificial Sequence
  Synthetic
aguguuucaguugggaggcagaug

SEQ ID NO: 602048 - RNA, 18 nt, Artificial Sequence
  Synthetic
augguacugugucagaug

SEQ ID NO: 602049 - RNA, 19 nt, Artificial Sequence
  Synthetic
gaugguacugugucagaug

SEQ ID NO: 602050 - RNA, 20 nt, Artificial Sequence
  Synthetic
agaugguacugugucagaug

SEQ ID NO: 602051 - RNA, 21 nt, Artificial Sequence
  Synthetic
cagaugguacugugucagaug

SEQ ID NO: 602052 - RNA, 22 nt, Artificial Sequence
  Synthetic
gcagaugguacugugucagaug

SEQ ID NO: 602053 - RNA, 23 nt, Artificial Sequence
  Synthetic
ggcagaugguacugugucagaug

SEQ ID NO: 602054 - RNA, 24 nt, Artificial Sequence
  Synthetic
aggcagaugguacugugucagaug

SEQ ID NO: 602055 - RNA, 18 nt, Artificial Sequence
  Synthetic
ggggcaaguuuucagaug

SEQ ID NO: 602056 - RNA, 19 nt, Artificial Sequence
  Synthetic
uggggcaaguuuucagaug

SEQ ID NO: 602057 - RNA, 20 nt, Artificial Sequence
  Synthetic
uuggggcaaguuuucagaug

SEQ ID NO: 602058 - RNA, 21 nt, Artificial Sequence
  Synthetic
uuuggggcaaguuuucagaug

SEQ ID NO: 602059 - RNA, 22 nt, Artificial Sequence
  Synthetic
cuuuggggcaaguuuucagaug

SEQ ID NO: 602060 - RNA, 23 nt, Artificial Sequence
  Synthetic
acuuuggggcaaguuuucagaug

SEQ ID NO: 602061 - RNA, 24 nt, Artificial Sequence
  Synthetic
aacuuuggggcaaguuuucagaug

SEQ ID NO: 602062 - RNA, 18 nt, Artificial Sequence
  Synthetic
acugugaguuuucagaug

SEQ ID NO: 602063 - RNA, 19 nt, Artificial Sequence
  Synthetic
gacugugaguuuucagaug

SEQ ID NO: 602064 - RNA, 20 nt, Artificial Sequence
  Synthetic
ggacugugaguuuucagaug

SEQ ID NO: 602065 - RNA, 21 nt, Artificial Sequence
  Synthetic
uggacugugaguuuucagaug

SEQ ID NO: 602066 - RNA, 22 nt, Artificial Sequence
  Synthetic
uuggacugugaguuuucagaug

SEQ ID NO: 602067 - RNA, 23 nt, Artificial Sequence
  Synthetic
auuggacugugaguuuucagaug

SEQ ID NO: 602068 - RNA, 24 nt, Artificial Sequence
  Synthetic
uauuggacugugaguuuucagaug

SEQ ID NO: 602069 - RNA, 18 nt, Artificial Sequence
  Synthetic
uuucuuuuaaaagagaug

SEQ ID NO: 602070 - RNA, 19 nt, Artificial Sequence
  Synthetic
uuuucuuuuaaaagagaug

SEQ ID NO: 602071 - RNA, 20 nt, Artificial Sequence
  Synthetic
auuuucuuuuaaaagagaug

SEQ ID NO: 602072 - RNA, 21 nt, Artificial Sequence
  Synthetic
uauuuucuuuuaaaagagaug

SEQ ID NO: 602073 - RNA, 22 nt, Artificial Sequence
  Synthetic
uuauuuucuuuuaaaagagaug

SEQ ID NO: 602074 - RNA, 23 nt, Artificial Sequence
  Synthetic
auuauuuucuuuuaaaagagaug

SEQ ID NO: 602075 - RNA, 24 nt, Artificial Sequence
  Synthetic
aauuauuuucuuuuaaaagagaug

SEQ ID NO: 602076 - RNA, 18 nt, Artificial Sequence
  Synthetic
caguccaggaaagagaug

SEQ ID NO: 602077 - RNA, 19 nt, Artificial Sequence
  Synthetic
acaguccaggaaagagaug

SEQ ID NO: 602078 - RNA, 20 nt, Artificial Sequence
  Synthetic
aacaguccaggaaagagaug

SEQ ID NO: 602079 - RNA, 21 nt, Artificial Sequence
  Synthetic
uaacaguccaggaaagagaug

SEQ ID NO: 602080 - RNA, 22 nt, Artificial Sequence
  Synthetic
guaacaguccaggaaagagaug

SEQ ID NO: 602081 - RNA, 23 nt, Artificial Sequence
  Synthetic
uguaacaguccaggaaagagaug

SEQ ID NO: 602082 - RNA, 24 nt, Artificial Sequence
  Synthetic
cuguaacaguccaggaaagagaug

SEQ ID NO: 602083 - RNA, 18 nt, Artificial Sequence
  Synthetic
aaaaacucccaagagaug

SEQ ID NO: 602084 - RNA, 19 nt, Artificial Sequence
  Synthetic
aaaaaacucccaagagaug

SEQ ID NO: 602085 - RNA, 20 nt, Artificial Sequence
  Synthetic
aaaaaaacucccaagagaug

SEQ ID NO: 602086 - RNA, 21 nt, Artificial Sequence
  Synthetic
uaaaaaaacucccaagagaug

SEQ ID NO: 602087 - RNA, 22 nt, Artificial Sequence
  Synthetic
cuaaaaaaacucccaagagaug

SEQ ID NO: 602088 - RNA, 23 nt, Artificial Sequence
  Synthetic
ucuaaaaaaacucccaagagaug

SEQ ID NO: 602089 - RNA, 24 nt, Artificial Sequence
  Synthetic
uucuaaaaaaacucccaagagaug

SEQ ID NO: 602090 - RNA, 18 nt, Artificial Sequence
  Synthetic
cuuugacaagaagagaug

SEQ ID NO: 602091 - RNA, 19 nt, Artificial Sequence
  Synthetic
gcuuugacaagaagagaug

SEQ ID NO: 602092 - RNA, 20 nt, Artificial Sequence
  Synthetic
agcuuugacaagaagagaug

SEQ ID NO: 602093 - RNA, 21 nt, Artificial Sequence
  Synthetic
aagcuuugacaagaagagaug

SEQ ID NO: 602094 - RNA, 22 nt, Artificial Sequence
  Synthetic
aaagcuuugacaagaagagaug

SEQ ID NO: 602095 - RNA, 23 nt, Artificial Sequence
  Synthetic
aaaagcuuugacaagaagagaug

SEQ ID NO: 602096 - RNA, 24 nt, Artificial Sequence
  Synthetic
aaaaagcuuugacaagaagagaug

SEQ ID NO: 602097 - RNA, 18 nt, Artificial Sequence
  Synthetic
aggagaacuacagagaug

SEQ ID NO: 602098 - RNA, 19 nt, Artificial Sequence
  Synthetic
gaggagaacuacagagaug

SEQ ID NO: 602099 - RNA, 20 nt, Artificial Sequence
  Synthetic
agaggagaacuacagagaug

SEQ ID NO: 602100 - RNA, 21 nt, Artificial Sequence
  Synthetic
cagaggagaacuacagagaug

SEQ ID NO: 602101 - RNA, 22 nt, Artificial Sequence
  Synthetic
ccagaggagaacuacagagaug

SEQ ID NO: 602102 - RNA, 23 nt, Artificial Sequence
  Synthetic
accagaggagaacuacagagaug

SEQ ID NO: 602103 - RNA, 24 nt, Artificial Sequence
  Synthetic
caccagaggagaacuacagagaug

SEQ ID NO: 602104 - RNA, 18 nt, Artificial Sequence
  Synthetic
aggagaggaagagagaug

SEQ ID NO: 602105 - RNA, 19 nt, Artificial Sequence
  Synthetic
aaggagaggaagagagaug

SEQ ID NO: 602106 - RNA, 20 nt, Artificial Sequence
  Synthetic
caaggagaggaagagagaug

SEQ ID NO: 602107 - RNA, 21 nt, Artificial Sequence
  Synthetic
ccaaggagaggaagagagaug

SEQ ID NO: 602108 - RNA, 22 nt, Artificial Sequence
  Synthetic
cccaaggagaggaagagagaug

SEQ ID NO: 602109 - RNA, 23 nt, Artificial Sequence
  Synthetic
gcccaaggagaggaagagagaug

SEQ ID NO: 602110 - RNA, 24 nt, Artificial Sequence
  Synthetic
ggcccaaggagaggaagagagaug

SEQ ID NO: 602111 - RNA, 18 nt, Artificial Sequence
  Synthetic
auagaggugagagagaug

SEQ ID NO: 602112 - RNA, 19 nt, Artificial Sequence
  Synthetic
cauagaggugagagagaug

SEQ ID NO: 602113 - RNA, 20 nt, Artificial Sequence
  Synthetic
ucauagaggugagagagaug

SEQ ID NO: 602114 - RNA, 21 nt, Artificial Sequence
  Synthetic
gucauagaggugagagagaug

SEQ ID NO: 602115 - RNA, 22 nt, Artificial Sequence
  Synthetic
agucauagaggugagagagaug

SEQ ID NO: 602116 - RNA, 23 nt, Artificial Sequence
  Synthetic
gagucauagaggugagagagaug

SEQ ID NO: 602117 - RNA, 24 nt, Artificial Sequence
  Synthetic
agagucauagaggugagagagaug

SEQ ID NO: 602118 - RNA, 18 nt, Artificial Sequence
  Synthetic
gacaaaaucauagagaug

SEQ ID NO: 602119 - RNA, 19 nt, Artificial Sequence
  Synthetic
agacaaaaucauagagaug

SEQ ID NO: 602120 - RNA, 20 nt, Artificial Sequence
  Synthetic
aagacaaaaucauagagaug

SEQ ID NO: 602121 - RNA, 21 nt, Artificial Sequence
  Synthetic
aaagacaaaaucauagagaug

SEQ ID NO: 602122 - RNA, 22 nt, Artificial Sequence
  Synthetic
aaaagacaaaaucauagagaug

SEQ ID NO: 602123 - RNA, 23 nt, Artificial Sequence
  Synthetic
gaaaagacaaaaucauagagaug

SEQ ID NO: 602124 - RNA, 24 nt, Artificial Sequence
  Synthetic
ugaaaagacaaaaucauagagaug

SEQ ID NO: 602125 - RNA, 18 nt, Artificial Sequence
  Synthetic
ggcaacagagacgagaug

SEQ ID NO: 602126 - RNA, 19 nt, Artificial Sequence
  Synthetic
aggcaacagagacgagaug

SEQ ID NO: 602127 - RNA, 20 nt, Artificial Sequence
  Synthetic
aaggcaacagagacgagaug

SEQ ID NO: 602128 - RNA, 21 nt, Artificial Sequence
  Synthetic
aaaggcaacagagacgagaug

SEQ ID NO: 602129 - RNA, 22 nt, Artificial Sequence
  Synthetic
gaaaggcaacagagacgagaug

SEQ ID NO: 602130 - RNA, 23 nt, Artificial Sequence
  Synthetic
agaaaggcaacagagacgagaug

SEQ ID NO: 602131 - RNA, 24 nt, Artificial Sequence
  Synthetic
gagaaaggcaacagagacgagaug

SEQ ID NO: 602132 - RNA, 18 nt, Artificial Sequence
  Synthetic
auuggauuaaaggagaug

SEQ ID NO: 602133 - RNA, 19 nt, Artificial Sequence
  Synthetic
cauuggauuaaaggagaug

SEQ ID NO: 602134 - RNA, 20 nt, Artificial Sequence
  Synthetic
ucauuggauuaaaggagaug

SEQ ID NO: 602135 - RNA, 21 nt, Artificial Sequence
  Synthetic
aucauuggauuaaaggagaug

SEQ ID NO: 602136 - RNA, 22 nt, Artificial Sequence
  Synthetic
aaucauuggauuaaaggagaug

SEQ ID NO: 602137 - RNA, 23 nt, Artificial Sequence
  Synthetic
aaaucauuggauuaaaggagaug

SEQ ID NO: 602138 - RNA, 24 nt, Artificial Sequence
  Synthetic
caaaucauuggauuaaaggagaug

SEQ ID NO: 602139 - RNA, 18 nt, Artificial Sequence
  Synthetic
uaagccugagaggagaug

SEQ ID NO: 602140 - RNA, 19 nt, Artificial Sequence
  Synthetic
cuaagccugagaggagaug

SEQ ID NO: 602141 - RNA, 20 nt, Artificial Sequence
  Synthetic
ucuaagccugagaggagaug

SEQ ID NO: 602142 - RNA, 21 nt, Artificial Sequence
  Synthetic
cucuaagccugagaggagaug

SEQ ID NO: 602143 - RNA, 22 nt, Artificial Sequence
  Synthetic
gcucuaagccugagaggagaug

SEQ ID NO: 602144 - RNA, 23 nt, Artificial Sequence
  Synthetic
ugcucuaagccugagaggagaug

SEQ ID NO: 602145 - RNA, 24 nt, Artificial Sequence
  Synthetic
uugcucuaagccugagaggagaug

SEQ ID NO: 602146 - RNA, 18 nt, Artificial Sequence
  Synthetic
ccuaagaugggggagaug

SEQ ID NO: 602147 - RNA, 19 nt, Artificial Sequence
  Synthetic
gccuaagaugggggagaug

SEQ ID NO: 602148 - RNA, 20 nt, Artificial Sequence
  Synthetic
ggccuaagaugggggagaug

SEQ ID NO: 602149 - RNA, 21 nt, Artificial Sequence
  Synthetic
uggccuaagaugggggagaug

SEQ ID NO: 602150 - RNA, 22 nt, Artificial Sequence
  Synthetic
cuggccuaagaugggggagaug

SEQ ID NO: 602151 - RNA, 23 nt, Artificial Sequence
  Synthetic
ccuggccuaagaugggggagaug

SEQ ID NO: 602152 - RNA, 24 nt, Artificial Sequence
  Synthetic
accuggccuaagaugggggagaug

SEQ ID NO: 602153 - RNA, 18 nt, Artificial Sequence
  Synthetic
agcuauucuggggagaug

SEQ ID NO: 602154 - RNA, 19 nt, Artificial Sequence
  Synthetic
aagcuauucuggggagaug

SEQ ID NO: 602155 - RNA, 20 nt, Artificial Sequence
  Synthetic
aaagcuauucuggggagaug

SEQ ID NO: 602156 - RNA, 21 nt, Artificial Sequence
  Synthetic
uaaagcuauucuggggagaug

SEQ ID NO: 602157 - RNA, 22 nt, Artificial Sequence
  Synthetic
guaaagcuauucuggggagaug

SEQ ID NO: 602158 - RNA, 23 nt, Artificial Sequence
  Synthetic
uguaaagcuauucuggggagaug

SEQ ID NO: 602159 - RNA, 24 nt, Artificial Sequence
  Synthetic
uuguaaagcuauucuggggagaug

SEQ ID NO: 602160 - RNA, 18 nt, Artificial Sequence
  Synthetic
uggucucagauggagaug

SEQ ID NO: 602161 - RNA, 19 nt, Artificial Sequence
  Synthetic
guggucucagauggagaug

SEQ ID NO: 602162 - RNA, 20 nt, Artificial Sequence
  Synthetic
gguggucucagauggagaug

SEQ ID NO: 602163 - RNA, 21 nt, Artificial Sequence
  Synthetic
agguggucucagauggagaug

SEQ ID NO: 602164 - RNA, 22 nt, Artificial Sequence
  Synthetic
gagguggucucagauggagaug

SEQ ID NO: 602165 - RNA, 23 nt, Artificial Sequence
  Synthetic
agagguggucucagauggagaug

SEQ ID NO: 602166 - RNA, 24 nt, Artificial Sequence
  Synthetic
cagagguggucucagauggagaug

SEQ ID NO: 602167 - RNA, 18 nt, Artificial Sequence
  Synthetic
cugagauuccuggagaug

SEQ ID NO: 602168 - RNA, 19 nt, Artificial Sequence
  Synthetic
ccugagauuccuggagaug

SEQ ID NO: 602169 - RNA, 20 nt, Artificial Sequence
  Synthetic
gccugagauuccuggagaug

SEQ ID NO: 602170 - RNA, 21 nt, Artificial Sequence
  Synthetic
ugccugagauuccuggagaug

SEQ ID NO: 602171 - RNA, 22 nt, Artificial Sequence
  Synthetic
gugccugagauuccuggagaug

SEQ ID NO: 602172 - RNA, 23 nt, Artificial Sequence
  Synthetic
ggugccugagauuccuggagaug

SEQ ID NO: 602173 - RNA, 24 nt, Artificial Sequence
  Synthetic
aggugccugagauuccuggagaug

SEQ ID NO: 602174 - RNA, 18 nt, Artificial Sequence
  Synthetic
cagucagauuuggagaug

SEQ ID NO: 602175 - RNA, 19 nt, Artificial Sequence
  Synthetic
acagucagauuuggagaug

SEQ ID NO: 602176 - RNA, 20 nt, Artificial Sequence
  Synthetic
uacagucagauuuggagaug

SEQ ID NO: 602177 - RNA, 21 nt, Artificial Sequence
  Synthetic
uuacagucagauuuggagaug

SEQ ID NO: 602178 - RNA, 22 nt, Artificial Sequence
  Synthetic
auuacagucagauuuggagaug

SEQ ID NO: 602179 - RNA, 23 nt, Artificial Sequence
  Synthetic
aauuacagucagauuuggagaug

SEQ ID NO: 602180 - RNA, 24 nt, Artificial Sequence
  Synthetic
gaauuacagucagauuuggagaug

SEQ ID NO: 602181 - RNA, 18 nt, Artificial Sequence
  Synthetic
guuauuaaaagugagaug

SEQ ID NO: 602182 - RNA, 19 nt, Artificial Sequence
  Synthetic
uguuauuaaaagugagaug

SEQ ID NO: 602183 - RNA, 20 nt, Artificial Sequence
  Synthetic
cuguuauuaaaagugagaug

SEQ ID NO: 602184 - RNA, 21 nt, Artificial Sequence
  Synthetic
ccuguuauuaaaagugagaug

SEQ ID NO: 602185 - RNA, 22 nt, Artificial Sequence
  Synthetic
accuguuauuaaaagugagaug

SEQ ID NO: 602186 - RNA, 23 nt, Artificial Sequence
  Synthetic
uaccuguuauuaaaagugagaug

SEQ ID NO: 602187 - RNA, 24 nt, Artificial Sequence
  Synthetic
uuaccuguuauuaaaagugagaug

SEQ ID NO: 602188 - RNA, 18 nt, Artificial Sequence
  Synthetic
gaagagucaggugagaug

SEQ ID NO: 602189 - RNA, 19 nt, Artificial Sequence
  Synthetic
cgaagagucaggugagaug

SEQ ID NO: 602190 - RNA, 20 nt, Artificial Sequence
  Synthetic
ucgaagagucaggugagaug

SEQ ID NO: 602191 - RNA, 21 nt, Artificial Sequence
  Synthetic
cucgaagagucaggugagaug

SEQ ID NO: 602192 - RNA, 22 nt, Artificial Sequence
  Synthetic
ucucgaagagucaggugagaug

SEQ ID NO: 602193 - RNA, 23 nt, Artificial Sequence
  Synthetic
aucucgaagagucaggugagaug

SEQ ID NO: 602194 - RNA, 24 nt, Artificial Sequence
  Synthetic
gaucucgaagagucaggugagaug

SEQ ID NO: 602195 - RNA, 21 nt, Artificial Sequence
  Synthetic
acaugauuaucucaauagaug

SEQ ID NO: 602196 - RNA, 22 nt, Artificial Sequence
  Synthetic
cacaugauuaucucaauagaug

SEQ ID NO: 602197 - RNA, 23 nt, Artificial Sequence
  Synthetic
ccacaugauuaucucaauagaug

SEQ ID NO: 602198 - RNA, 24 nt, Artificial Sequence
  Synthetic
accacaugauuaucucaauagaug

SEQ ID NO: 602199 - RNA, 18 nt, Artificial Sequence
  Synthetic
ugguuaucucaauagaug

SEQ ID NO: 602200 - RNA, 19 nt, Artificial Sequence
  Synthetic
augguuaucucaauagaug

SEQ ID NO: 602201 - RNA, 20 nt, Artificial Sequence
  Synthetic
caugguuaucucaauagaug

SEQ ID NO: 602202 - RNA, 21 nt, Artificial Sequence
  Synthetic
acaugguuaucucaauagaug

SEQ ID NO: 602203 - RNA, 22 nt, Artificial Sequence
  Synthetic
cacaugguuaucucaauagaug

SEQ ID NO: 602204 - RNA, 23 nt, Artificial Sequence
  Synthetic
ccacaugguuaucucaauagaug

SEQ ID NO: 602205 - RNA, 24 nt, Artificial Sequence
  Synthetic
accacaugguuaucucaauagaug

SEQ ID NO: 602206 - RNA, 18 nt, Artificial Sequence
  Synthetic
uuggugacugaauagaug

SEQ ID NO: 602207 - RNA, 19 nt, Artificial Sequence
  Synthetic
uuuggugacugaauagaug

SEQ ID NO: 602208 - RNA, 20 nt, Artificial Sequence
  Synthetic
auuuggugacugaauagaug

SEQ ID NO: 602209 - RNA, 21 nt, Artificial Sequence
  Synthetic
aauuuggugacugaauagaug

SEQ ID NO: 602210 - RNA, 22 nt, Artificial Sequence
  Synthetic
aaauuuggugacugaauagaug

SEQ ID NO: 602211 - RNA, 23 nt, Artificial Sequence
  Synthetic
aaaauuuggugacugaauagaug

SEQ ID NO: 602212 - RNA, 24 nt, Artificial Sequence
  Synthetic
gaaaauuuggugacugaauagaug

SEQ ID NO: 602213 - RNA, 18 nt, Artificial Sequence
  Synthetic
ggauugggauuauagaug

SEQ ID NO: 602214 - RNA, 19 nt, Artificial Sequence
  Synthetic
gggauugggauuauagaug

SEQ ID NO: 602215 - RNA, 20 nt, Artificial Sequence
  Synthetic
agggauugggauuauagaug

SEQ ID NO: 602216 - RNA, 21 nt, Artificial Sequence
  Synthetic
cagggauugggauuauagaug

SEQ ID NO: 602217 - RNA, 22 nt, Artificial Sequence
  Synthetic
gcagggauugggauuauagaug

SEQ ID NO: 602218 - RNA, 23 nt, Artificial Sequence
  Synthetic
ugcagggauugggauuauagaug

SEQ ID NO: 602219 - RNA, 24 nt, Artificial Sequence
  Synthetic
uugcagggauugggauuauagaug

SEQ ID NO: 602220 - RNA, 18 nt, Artificial Sequence
  Synthetic
augaacaguuuauagaug

SEQ ID NO: 602221 - RNA, 19 nt, Artificial Sequence
  Synthetic
caugaacaguuuauagaug

SEQ ID NO: 602222 - RNA, 20 nt, Artificial Sequence
  Synthetic
ucaugaacaguuuauagaug

SEQ ID NO: 602223 - RNA, 21 nt, Artificial Sequence
  Synthetic
aucaugaacaguuuauagaug

SEQ ID NO: 602224 - RNA, 22 nt, Artificial Sequence
  Synthetic
uaucaugaacaguuuauagaug

SEQ ID NO: 602225 - RNA, 23 nt, Artificial Sequence
  Synthetic
uuaucaugaacaguuuauagaug

SEQ ID NO: 602226 - RNA, 24 nt, Artificial Sequence
  Synthetic
auuaucaugaacaguuuauagaug

SEQ ID NO: 602227 - RNA, 18 nt, Artificial Sequence
  Synthetic
aggaagugaugcuagaug

SEQ ID NO: 602228 - RNA, 19 nt, Artificial Sequence
  Synthetic
gaggaagugaugcuagaug

SEQ ID NO: 602229 - RNA, 20 nt, Artificial Sequence
  Synthetic
ugaggaagugaugcuagaug

SEQ ID NO: 602230 - RNA, 21 nt, Artificial Sequence
  Synthetic
cugaggaagugaugcuagaug

SEQ ID NO: 602231 - RNA, 22 nt, Artificial Sequence
  Synthetic
gcugaggaagugaugcuagaug

SEQ ID NO: 602232 - RNA, 23 nt, Artificial Sequence
  Synthetic
ggcugaggaagugaugcuagaug

SEQ ID NO: 602233 - RNA, 24 nt, Artificial Sequence
  Synthetic
uggcugaggaagugaugcuagaug

SEQ ID NO: 602234 - RNA, 18 nt, Artificial Sequence
  Synthetic
guuaugaagugcuagaug

SEQ ID NO: 602235 - RNA, 19 nt, Artificial Sequence
  Synthetic
aguuaugaagugcuagaug

SEQ ID NO: 602236 - RNA, 20 nt, Artificial Sequence
  Synthetic
gaguuaugaagugcuagaug

SEQ ID NO: 602237 - RNA, 21 nt, Artificial Sequence
  Synthetic
ggaguuaugaagugcuagaug

SEQ ID NO: 602238 - RNA, 22 nt, Artificial Sequence
  Synthetic
cggaguuaugaagugcuagaug

SEQ ID NO: 602239 - RNA, 23 nt, Artificial Sequence
  Synthetic
acggaguuaugaagugcuagaug

SEQ ID NO: 602240 - RNA, 24 nt, Artificial Sequence
  Synthetic
gacggaguuaugaagugcuagaug

SEQ ID NO: 602241 - RNA, 18 nt, Artificial Sequence
  Synthetic
agacucuuguucuagaug

SEQ ID NO: 602242 - RNA, 19 nt, Artificial Sequence
  Synthetic
aagacucuuguucuagaug

SEQ ID NO: 602243 - RNA, 20 nt, Artificial Sequence
  Synthetic
aaagacucuuguucuagaug

SEQ ID NO: 602244 - RNA, 21 nt, Artificial Sequence
  Synthetic
gaaagacucuuguucuagaug

SEQ ID NO: 602245 - RNA, 22 nt, Artificial Sequence
  Synthetic
agaaagacucuuguucuagaug

SEQ ID NO: 602246 - RNA, 23 nt, Artificial Sequence
  Synthetic
aagaaagacucuuguucuagaug

SEQ ID NO: 602247 - RNA, 24 nt, Artificial Sequence
  Synthetic
aaagaaagacucuuguucuagaug

SEQ ID NO: 602248 - RNA, 18 nt, Artificial Sequence
  Synthetic
ggguggcaagaguagaug

SEQ ID NO: 602249 - RNA, 19 nt, Artificial Sequence
  Synthetic
aggguggcaagaguagaug

SEQ ID NO: 602250 - RNA, 20 nt, Artificial Sequence
  Synthetic
uaggguggcaagaguagaug

SEQ ID NO: 602251 - RNA, 21 nt, Artificial Sequence
  Synthetic
guaggguggcaagaguagaug

SEQ ID NO: 602252 - RNA, 22 nt, Artificial Sequence
  Synthetic
uguaggguggcaagaguagaug

SEQ ID NO: 602253 - RNA, 23 nt, Artificial Sequence
  Synthetic
uuguaggguggcaagaguagaug

SEQ ID NO: 602254 - RNA, 24 nt, Artificial Sequence
  Synthetic
auuguaggguggcaagaguagaug

SEQ ID NO: 602255 - RNA, 18 nt, Artificial Sequence
  Synthetic
gcaacuuuugaguagaug

SEQ ID NO: 602256 - RNA, 19 nt, Artificial Sequence
  Synthetic
agcaacuuuugaguagaug

SEQ ID NO: 602257 - RNA, 20 nt, Artificial Sequence
  Synthetic
uagcaacuuuugaguagaug

SEQ ID NO: 602258 - RNA, 21 nt, Artificial Sequence
  Synthetic
uuagcaacuuuugaguagaug

SEQ ID NO: 602259 - RNA, 22 nt, Artificial Sequence
  Synthetic
auuagcaacuuuugaguagaug

SEQ ID NO: 602260 - RNA, 23 nt, Artificial Sequence
  Synthetic
gauuagcaacuuuugaguagaug

SEQ ID NO: 602261 - RNA, 24 nt, Artificial Sequence
  Synthetic
ugauuagcaacuuuugaguagaug

SEQ ID NO: 602262 - RNA, 18 nt, Artificial Sequence
  Synthetic
accgcggacuaguagaug

SEQ ID NO: 602263 - RNA, 19 nt, Artificial Sequence
  Synthetic
uaccgcggacuaguagaug

SEQ ID NO: 602264 - RNA, 20 nt, Artificial Sequence
  Synthetic
auaccgcggacuaguagaug

SEQ ID NO: 602265 - RNA, 21 nt, Artificial Sequence
  Synthetic
gauaccgcggacuaguagaug

SEQ ID NO: 602266 - RNA, 22 nt, Artificial Sequence
  Synthetic
agauaccgcggacuaguagaug

SEQ ID NO: 602267 - RNA, 23 nt, Artificial Sequence
  Synthetic
cagauaccgcggacuaguagaug

SEQ ID NO: 602268 - RNA, 24 nt, Artificial Sequence
  Synthetic
acagauaccgcggacuaguagaug

SEQ ID NO: 602269 - RNA, 18 nt, Artificial Sequence
  Synthetic
ccacucacuguguagaug

SEQ ID NO: 602270 - RNA, 19 nt, Artificial Sequence
  Synthetic
accacucacuguguagaug

SEQ ID NO: 602271 - RNA, 20 nt, Artificial Sequence
  Synthetic
aaccacucacuguguagaug

SEQ ID NO: 602272 - RNA, 21 nt, Artificial Sequence
  Synthetic
uaaccacucacuguguagaug

SEQ ID NO: 602273 - RNA, 22 nt, Artificial Sequence
  Synthetic
cuaaccacucacuguguagaug

SEQ ID NO: 602274 - RNA, 23 nt, Artificial Sequence
  Synthetic
ucuaaccacucacuguguagaug

SEQ ID NO: 602275 - RNA, 24 nt, Artificial Sequence
  Synthetic
aucuaaccacucacuguguagaug

SEQ ID NO: 602276 - RNA, 18 nt, Artificial Sequence
  Synthetic
aaaguauguguguagaug

SEQ ID NO: 602277 - RNA, 19 nt, Artificial Sequence
  Synthetic
aaaaguauguguguagaug

SEQ ID NO: 602278 - RNA, 20 nt, Artificial Sequence
  Synthetic
uaaaaguauguguguagaug

SEQ ID NO: 602279 - RNA, 21 nt, Artificial Sequence
  Synthetic
auaaaaguauguguguagaug

SEQ ID NO: 602280 - RNA, 22 nt, Artificial Sequence
  Synthetic
aauaaaaguauguguguagaug

SEQ ID NO: 602281 - RNA, 23 nt, Artificial Sequence
  Synthetic
aaauaaaaguauguguguagaug

SEQ ID NO: 602282 - RNA, 24 nt, Artificial Sequence
  Synthetic
uaaauaaaaguauguguguagaug

SEQ ID NO: 602283 - RNA, 18 nt, Artificial Sequence
  Synthetic
aaaugaagcuuguagaug

SEQ ID NO: 602284 - RNA, 19 nt, Artificial Sequence
  Synthetic
aaaaugaagcuuguagaug

SEQ ID NO: 602285 - RNA, 20 nt, Artificial Sequence
  Synthetic
caaaaugaagcuuguagaug

SEQ ID NO: 602286 - RNA, 21 nt, Artificial Sequence
  Synthetic
gcaaaaugaagcuuguagaug

SEQ ID NO: 602287 - RNA, 22 nt, Artificial Sequence
  Synthetic
agcaaaaugaagcuuguagaug

SEQ ID NO: 602288 - RNA, 23 nt, Artificial Sequence
  Synthetic
aagcaaaaugaagcuuguagaug

SEQ ID NO: 602289 - RNA, 24 nt, Artificial Sequence
  Synthetic
aaagcaaaaugaagcuuguagaug

SEQ ID NO: 602290 - RNA, 18 nt, Artificial Sequence
  Synthetic
uugaguggaaguuagaug

SEQ ID NO: 602291 - RNA, 19 nt, Artificial Sequence
  Synthetic
uuugaguggaaguuagaug

SEQ ID NO: 602292 - RNA, 20 nt, Artificial Sequence
  Synthetic
guuugaguggaaguuagaug

SEQ ID NO: 602293 - RNA, 21 nt, Artificial Sequence
  Synthetic
aguuugaguggaaguuagaug

SEQ ID NO: 602294 - RNA, 22 nt, Artificial Sequence
  Synthetic
aaguuugaguggaaguuagaug

SEQ ID NO: 602295 - RNA, 23 nt, Artificial Sequence
  Synthetic
aaaguuugaguggaaguuagaug

SEQ ID NO: 602296 - RNA, 24 nt, Artificial Sequence
  Synthetic
uaaaguuugaguggaaguuagaug

SEQ ID NO: 602297 - RNA, 18 nt, Artificial Sequence
  Synthetic
uagauguggaaaacgaug

SEQ ID NO: 602298 - RNA, 19 nt, Artificial Sequence
  Synthetic
guagauguggaaaacgaug

SEQ ID NO: 602299 - RNA, 20 nt, Artificial Sequence
  Synthetic
aguagauguggaaaacgaug

SEQ ID NO: 602300 - RNA, 21 nt, Artificial Sequence
  Synthetic
gaguagauguggaaaacgaug

SEQ ID NO: 602301 - RNA, 22 nt, Artificial Sequence
  Synthetic
ugaguagauguggaaaacgaug

SEQ ID NO: 602302 - RNA, 23 nt, Artificial Sequence
  Synthetic
uugaguagauguggaaaacgaug

SEQ ID NO: 602303 - RNA, 24 nt, Artificial Sequence
  Synthetic
uuugaguagauguggaaaacgaug

SEQ ID NO: 602304 - RNA, 18 nt, Artificial Sequence
  Synthetic
uugauaugaaacacgaug

SEQ ID NO: 602305 - RNA, 19 nt, Artificial Sequence
  Synthetic
guugauaugaaacacgaug

SEQ ID NO: 602306 - RNA, 20 nt, Artificial Sequence
  Synthetic
aguugauaugaaacacgaug

SEQ ID NO: 602307 - RNA, 21 nt, Artificial Sequence
  Synthetic
caguugauaugaaacacgaug

SEQ ID NO: 602308 - RNA, 22 nt, Artificial Sequence
  Synthetic
acaguugauaugaaacacgaug

SEQ ID NO: 602309 - RNA, 23 nt, Artificial Sequence
  Synthetic
aacaguugauaugaaacacgaug

SEQ ID NO: 602310 - RNA, 24 nt, Artificial Sequence
  Synthetic
gaacaguugauaugaaacacgaug

SEQ ID NO: 602311 - RNA, 18 nt, Artificial Sequence
  Synthetic
ucauuugagcccacgaug

SEQ ID NO: 602312 - RNA, 19 nt, Artificial Sequence
  Synthetic
aucauuugagcccacgaug

SEQ ID NO: 602313 - RNA, 20 nt, Artificial Sequence
  Synthetic
aaucauuugagcccacgaug

SEQ ID NO: 602314 - RNA, 21 nt, Artificial Sequence
  Synthetic
gaaucauuugagcccacgaug

SEQ ID NO: 602315 - RNA, 22 nt, Artificial Sequence
  Synthetic
agaaucauuugagcccacgaug

SEQ ID NO: 602316 - RNA, 23 nt, Artificial Sequence
  Synthetic
gagaaucauuugagcccacgaug

SEQ ID NO: 602317 - RNA, 24 nt, Artificial Sequence
  Synthetic
ggagaaucauuugagcccacgaug

SEQ ID NO: 602318 - RNA, 18 nt, Artificial Sequence
  Synthetic
gccaccugauggacgaug

SEQ ID NO: 602319 - RNA, 19 nt, Artificial Sequence
  Synthetic
ugccaccugauggacgaug

SEQ ID NO: 602320 - RNA, 20 nt, Artificial Sequence
  Synthetic
cugccaccugauggacgaug

SEQ ID NO: 602321 - RNA, 21 nt, Artificial Sequence
  Synthetic
ccugccaccugauggacgaug

SEQ ID NO: 602322 - RNA, 22 nt, Artificial Sequence
  Synthetic
uccugccaccugauggacgaug

SEQ ID NO: 602323 - RNA, 23 nt, Artificial Sequence
  Synthetic
guccugccaccugauggacgaug

SEQ ID NO: 602324 - RNA, 24 nt, Artificial Sequence
  Synthetic
cguccugccaccugauggacgaug

SEQ ID NO: 602325 - RNA, 18 nt, Artificial Sequence
  Synthetic
gaagcacguauuacgaug

SEQ ID NO: 602326 - RNA, 19 nt, Artificial Sequence
  Synthetic
ggaagcacguauuacgaug

SEQ ID NO: 602327 - RNA, 20 nt, Artificial Sequence
  Synthetic
aggaagcacguauuacgaug

SEQ ID NO: 602328 - RNA, 21 nt, Artificial Sequence
  Synthetic
aaggaagcacguauuacgaug

SEQ ID NO: 602329 - RNA, 22 nt, Artificial Sequence
  Synthetic
aaaggaagcacguauuacgaug

SEQ ID NO: 602330 - RNA, 23 nt, Artificial Sequence
  Synthetic
uaaaggaagcacguauuacgaug

SEQ ID NO: 602331 - RNA, 24 nt, Artificial Sequence
  Synthetic
uuaaaggaagcacguauuacgaug

SEQ ID NO: 602332 - RNA, 18 nt, Artificial Sequence
  Synthetic
gguucagaaaaggcgaug

SEQ ID NO: 602333 - RNA, 19 nt, Artificial Sequence
  Synthetic
ggguucagaaaaggcgaug

SEQ ID NO: 602334 - RNA, 20 nt, Artificial Sequence
  Synthetic
aggguucagaaaaggcgaug

SEQ ID NO: 602335 - RNA, 21 nt, Artificial Sequence
  Synthetic
caggguucagaaaaggcgaug

SEQ ID NO: 602336 - RNA, 22 nt, Artificial Sequence
  Synthetic
ccaggguucagaaaaggcgaug

SEQ ID NO: 602337 - RNA, 23 nt, Artificial Sequence
  Synthetic
cccaggguucagaaaaggcgaug

SEQ ID NO: 602338 - RNA, 24 nt, Artificial Sequence
  Synthetic
ucccaggguucagaaaaggcgaug

SEQ ID NO: 602339 - RNA, 18 nt, Artificial Sequence
  Synthetic
ggcuuuaugcuuucgaug

SEQ ID NO: 602340 - RNA, 19 nt, Artificial Sequence
  Synthetic
uggcuuuaugcuuucgaug

SEQ ID NO: 602341 - RNA, 20 nt, Artificial Sequence
  Synthetic
auggcuuuaugcuuucgaug

SEQ ID NO: 602342 - RNA, 21 nt, Artificial Sequence
  Synthetic
aauggcuuuaugcuuucgaug

SEQ ID NO: 602343 - RNA, 22 nt, Artificial Sequence
  Synthetic
aaauggcuuuaugcuuucgaug

SEQ ID NO: 602344 - RNA, 23 nt, Artificial Sequence
  Synthetic
uaaauggcuuuaugcuuucgaug

SEQ ID NO: 602345 - RNA, 24 nt, Artificial Sequence
  Synthetic
auaaauggcuuuaugcuuucgaug

SEQ ID NO: 602346 - RNA, 18 nt, Artificial Sequence
  Synthetic
gcucaaaauaaaaggaug

SEQ ID NO: 602347 - RNA, 19 nt, Artificial Sequence
  Synthetic
ggcucaaaauaaaaggaug

SEQ ID NO: 602348 - RNA, 20 nt, Artificial Sequence
  Synthetic
aggcucaaaauaaaaggaug

SEQ ID NO: 602349 - RNA, 21 nt, Artificial Sequence
  Synthetic
uaggcucaaaauaaaaggaug

SEQ ID NO: 602350 - RNA, 22 nt, Artificial Sequence
  Synthetic
auaggcucaaaauaaaaggaug

SEQ ID NO: 602351 - RNA, 23 nt, Artificial Sequence
  Synthetic
cauaggcucaaaauaaaaggaug

SEQ ID NO: 602352 - RNA, 24 nt, Artificial Sequence
  Synthetic
acauaggcucaaaauaaaaggaug

SEQ ID NO: 602353 - RNA, 18 nt, Artificial Sequence
  Synthetic
agaaaucuacaaaggaug

SEQ ID NO: 602354 - RNA, 19 nt, Artificial Sequence
  Synthetic
cagaaaucuacaaaggaug

SEQ ID NO: 602355 - RNA, 20 nt, Artificial Sequence
  Synthetic
ccagaaaucuacaaaggaug

SEQ ID NO: 602356 - RNA, 21 nt, Artificial Sequence
  Synthetic
cccagaaaucuacaaaggaug

SEQ ID NO: 602357 - RNA, 22 nt, Artificial Sequence
  Synthetic
ucccagaaaucuacaaaggaug

SEQ ID NO: 602358 - RNA, 23 nt, Artificial Sequence
  Synthetic
cucccagaaaucuacaaaggaug

SEQ ID NO: 602359 - RNA, 24 nt, Artificial Sequence
  Synthetic
ucucccagaaaucuacaaaggaug

SEQ ID NO: 602360 - RNA, 18 nt, Artificial Sequence
  Synthetic
aaagugagugaaaggaug

SEQ ID NO: 602361 - RNA, 19 nt, Artificial Sequence
  Synthetic
caaagugagugaaaggaug

SEQ ID NO: 602362 - RNA, 20 nt, Artificial Sequence
  Synthetic
ucaaagugagugaaaggaug

SEQ ID NO: 602363 - RNA, 21 nt, Artificial Sequence
  Synthetic
aucaaagugagugaaaggaug

SEQ ID NO: 602364 - RNA, 22 nt, Artificial Sequence
  Synthetic
uaucaaagugagugaaaggaug

SEQ ID NO: 602365 - RNA, 23 nt, Artificial Sequence
  Synthetic
uuaucaaagugagugaaaggaug

SEQ ID NO: 602366 - RNA, 24 nt, Artificial Sequence
  Synthetic
cuuaucaaagugagugaaaggaug

SEQ ID NO: 602367 - RNA, 18 nt, Artificial Sequence
  Synthetic
caugugcuggcaaggaug

SEQ ID NO: 602368 - RNA, 19 nt, Artificial Sequence
  Synthetic
acaugugcuggcaaggaug

SEQ ID NO: 602369 - RNA, 20 nt, Artificial Sequence
  Synthetic
aacaugugcuggcaaggaug

SEQ ID NO: 602370 - RNA, 21 nt, Artificial Sequence
  Synthetic
uaacaugugcuggcaaggaug

SEQ ID NO: 602371 - RNA, 22 nt, Artificial Sequence
  Synthetic
auaacaugugcuggcaaggaug

SEQ ID NO: 602372 - RNA, 23 nt, Artificial Sequence
  Synthetic
aauaacaugugcuggcaaggaug

SEQ ID NO: 602373 - RNA, 24 nt, Artificial Sequence
  Synthetic
aaauaacaugugcuggcaaggaug

SEQ ID NO: 602374 - RNA, 18 nt, Artificial Sequence
  Synthetic
ucaauaaagugaaggaug

SEQ ID NO: 602375 - RNA, 19 nt, Artificial Sequence
  Synthetic
uucaauaaagugaaggaug

SEQ ID NO: 602376 - RNA, 20 nt, Artificial Sequence
  Synthetic
uuucaauaaagugaaggaug

SEQ ID NO: 602377 - RNA, 21 nt, Artificial Sequence
  Synthetic
auuucaauaaagugaaggaug

SEQ ID NO: 602378 - RNA, 22 nt, Artificial Sequence
  Synthetic
aauuucaauaaagugaaggaug

SEQ ID NO: 602379 - RNA, 23 nt, Artificial Sequence
  Synthetic
aaauuucaauaaagugaaggaug

SEQ ID NO: 602380 - RNA, 24 nt, Artificial Sequence
  Synthetic
uaaauuucaauaaagugaaggaug

SEQ ID NO: 602381 - RNA, 18 nt, Artificial Sequence
  Synthetic
accaucuuuugaaggaug

SEQ ID NO: 602382 - RNA, 19 nt, Artificial Sequence
  Synthetic
aaccaucuuuugaaggaug

SEQ ID NO: 602383 - RNA, 20 nt, Artificial Sequence
  Synthetic
gaaccaucuuuugaaggaug

SEQ ID NO: 602384 - RNA, 21 nt, Artificial Sequence
  Synthetic
agaaccaucuuuugaaggaug

SEQ ID NO: 602385 - RNA, 22 nt, Artificial Sequence
  Synthetic
aagaaccaucuuuugaaggaug

SEQ ID NO: 602386 - RNA, 23 nt, Artificial Sequence
  Synthetic
aaagaaccaucuuuugaaggaug

SEQ ID NO: 602387 - RNA, 24 nt, Artificial Sequence
  Synthetic
aaaagaaccaucuuuugaaggaug

SEQ ID NO: 602388 - RNA, 18 nt, Artificial Sequence
  Synthetic
guaucugguauaaggaug

SEQ ID NO: 602389 - RNA, 19 nt, Artificial Sequence
  Synthetic
aguaucugguauaaggaug

SEQ ID NO: 602390 - RNA, 20 nt, Artificial Sequence
  Synthetic
caguaucugguauaaggaug

SEQ ID NO: 602391 - RNA, 21 nt, Artificial Sequence
  Synthetic
acaguaucugguauaaggaug

SEQ ID NO: 602392 - RNA, 22 nt, Artificial Sequence
  Synthetic
cacaguaucugguauaaggaug

SEQ ID NO: 602393 - RNA, 23 nt, Artificial Sequence
  Synthetic
ucacaguaucugguauaaggaug

SEQ ID NO: 602394 - RNA, 24 nt, Artificial Sequence
  Synthetic
uucacaguaucugguauaaggaug

SEQ ID NO: 602395 - RNA, 18 nt, Artificial Sequence
  Synthetic
caaacugaauuaaggaug

SEQ ID NO: 602396 - RNA, 19 nt, Artificial Sequence
  Synthetic
acaaacugaauuaaggaug

SEQ ID NO: 602397 - RNA, 20 nt, Artificial Sequence
  Synthetic
uacaaacugaauuaaggaug

SEQ ID NO: 602398 - RNA, 21 nt, Artificial Sequence
  Synthetic
uuacaaacugaauuaaggaug

SEQ ID NO: 602399 - RNA, 22 nt, Artificial Sequence
  Synthetic
auuacaaacugaauuaaggaug

SEQ ID NO: 602400 - RNA, 23 nt, Artificial Sequence
  Synthetic
aauuacaaacugaauuaaggaug

SEQ ID NO: 602401 - RNA, 24 nt, Artificial Sequence
  Synthetic
uaauuacaaacugaauuaaggaug

SEQ ID NO: 602402 - RNA, 18 nt, Artificial Sequence
  Synthetic
agaguuacacacaggaug

SEQ ID NO: 602403 - RNA, 19 nt, Artificial Sequence
  Synthetic
cagaguuacacacaggaug

SEQ ID NO: 602404 - RNA, 20 nt, Artificial Sequence
  Synthetic
acagaguuacacacaggaug

SEQ ID NO: 602405 - RNA, 21 nt, Artificial Sequence
  Synthetic
aacagaguuacacacaggaug

SEQ ID NO: 602406 - RNA, 22 nt, Artificial Sequence
  Synthetic
gaacagaguuacacacaggaug

SEQ ID NO: 602407 - RNA, 23 nt, Artificial Sequence
  Synthetic
ugaacagaguuacacacaggaug

SEQ ID NO: 602408 - RNA, 24 nt, Artificial Sequence
  Synthetic
uugaacagaguuacacacaggaug

SEQ ID NO: 602409 - RNA, 18 nt, Artificial Sequence
  Synthetic
aaagaagaugccaggaug

SEQ ID NO: 602410 - RNA, 19 nt, Artificial Sequence
  Synthetic
gaaagaagaugccaggaug

SEQ ID NO: 602411 - RNA, 20 nt, Artificial Sequence
  Synthetic
agaaagaagaugccaggaug

SEQ ID NO: 602412 - RNA, 21 nt, Artificial Sequence
  Synthetic
aagaaagaagaugccaggaug

SEQ ID NO: 602413 - RNA, 22 nt, Artificial Sequence
  Synthetic
gaagaaagaagaugccaggaug

SEQ ID NO: 602414 - RNA, 23 nt, Artificial Sequence
  Synthetic
ggaagaaagaagaugccaggaug

SEQ ID NO: 602415 - RNA, 24 nt, Artificial Sequence
  Synthetic
uggaagaaagaagaugccaggaug

SEQ ID NO: 602416 - RNA, 18 nt, Artificial Sequence
  Synthetic
uggggucaaagcaggaug

SEQ ID NO: 602417 - RNA, 19 nt, Artificial Sequence
  Synthetic
guggggucaaagcaggaug

SEQ ID NO: 602418 - RNA, 20 nt, Artificial Sequence
  Synthetic
aguggggucaaagcaggaug

SEQ ID NO: 602419 - RNA, 21 nt, Artificial Sequence
  Synthetic
aaguggggucaaagcaggaug

SEQ ID NO: 602420 - RNA, 22 nt, Artificial Sequence
  Synthetic
aaaguggggucaaagcaggaug

SEQ ID NO: 602421 - RNA, 23 nt, Artificial Sequence
  Synthetic
gaaaguggggucaaagcaggaug

SEQ ID NO: 602422 - RNA, 24 nt, Artificial Sequence
  Synthetic
agaaaguggggucaaagcaggaug

SEQ ID NO: 602423 - RNA, 18 nt, Artificial Sequence
  Synthetic
uccacaacuagcaggaug

SEQ ID NO: 602424 - RNA, 19 nt, Artificial Sequence
  Synthetic
uuccacaacuagcaggaug

SEQ ID NO: 602425 - RNA, 20 nt, Artificial Sequence
  Synthetic
cuuccacaacuagcaggaug

SEQ ID NO: 602426 - RNA, 21 nt, Artificial Sequence
  Synthetic
gcuuccacaacuagcaggaug

SEQ ID NO: 602427 - RNA, 22 nt, Artificial Sequence
  Synthetic
ugcuuccacaacuagcaggaug

SEQ ID NO: 602428 - RNA, 23 nt, Artificial Sequence
  Synthetic
augcuuccacaacuagcaggaug

SEQ ID NO: 602429 - RNA, 24 nt, Artificial Sequence
  Synthetic
aaugcuuccacaacuagcaggaug

SEQ ID NO: 602430 - RNA, 18 nt, Artificial Sequence
  Synthetic
agaauaaaaaucaggaug

SEQ ID NO: 602431 - RNA, 19 nt, Artificial Sequence
  Synthetic
cagaauaaaaaucaggaug

SEQ ID NO: 602432 - RNA, 20 nt, Artificial Sequence
  Synthetic
ucagaauaaaaaucaggaug

SEQ ID NO: 602433 - RNA, 21 nt, Artificial Sequence
  Synthetic
cucagaauaaaaaucaggaug

SEQ ID NO: 602434 - RNA, 22 nt, Artificial Sequence
  Synthetic
ucucagaauaaaaaucaggaug

SEQ ID NO: 602435 - RNA, 23 nt, Artificial Sequence
  Synthetic
uucucagaauaaaaaucaggaug

SEQ ID NO: 602436 - RNA, 24 nt, Artificial Sequence
  Synthetic
uuucucagaauaaaaaucaggaug

SEQ ID NO: 602437 - RNA, 18 nt, Artificial Sequence
  Synthetic
aagcauauucagaggaug

SEQ ID NO: 602438 - RNA, 19 nt, Artificial Sequence
  Synthetic
gaagcauauucagaggaug

SEQ ID NO: 602439 - RNA, 20 nt, Artificial Sequence
  Synthetic
ugaagcauauucagaggaug

SEQ ID NO: 602440 - RNA, 21 nt, Artificial Sequence
  Synthetic
cugaagcauauucagaggaug

SEQ ID NO: 602441 - RNA, 22 nt, Artificial Sequence
  Synthetic
gcugaagcauauucagaggaug

SEQ ID NO: 602442 - RNA, 23 nt, Artificial Sequence
  Synthetic
agcugaagcauauucagaggaug

SEQ ID NO: 602443 - RNA, 24 nt, Artificial Sequence
  Synthetic
uagcugaagcauauucagaggaug

SEQ ID NO: 602444 - RNA, 24 nt, Artificial Sequence
  Synthetic
caacaacagaugcuggagaggaug

SEQ ID NO: 602445 - RNA, 21 nt, Artificial Sequence
  Synthetic
caacaggugcuggagaggaug

SEQ ID NO: 602446 - RNA, 22 nt, Artificial Sequence
  Synthetic
acaacaggugcuggagaggaug

SEQ ID NO: 602447 - RNA, 23 nt, Artificial Sequence
  Synthetic
aacaacaggugcuggagaggaug

SEQ ID NO: 602448 - RNA, 24 nt, Artificial Sequence
  Synthetic
aaacaacaggugcuggagaggaug

SEQ ID NO: 602449 - RNA, 18 nt, Artificial Sequence
  Synthetic
guggagggugggaggaug

SEQ ID NO: 602450 - RNA, 19 nt, Artificial Sequence
  Synthetic
gguggagggugggaggaug

SEQ ID NO: 602451 - RNA, 20 nt, Artificial Sequence
  Synthetic
ggguggagggugggaggaug

SEQ ID NO: 602452 - RNA, 21 nt, Artificial Sequence
  Synthetic
aggguggagggugggaggaug

SEQ ID NO: 602453 - RNA, 22 nt, Artificial Sequence
  Synthetic
uaggguggagggugggaggaug

SEQ ID NO: 602454 - RNA, 23 nt, Artificial Sequence
  Synthetic
cuaggguggagggugggaggaug

SEQ ID NO: 602455 - RNA, 24 nt, Artificial Sequence
  Synthetic
ucuaggguggagggugggaggaug

SEQ ID NO: 602456 - RNA, 18 nt, Artificial Sequence
  Synthetic
ucaauguuuuggaggaug

SEQ ID NO: 602457 - RNA, 19 nt, Artificial Sequence
  Synthetic
uucaauguuuuggaggaug

SEQ ID NO: 602458 - RNA, 20 nt, Artificial Sequence
  Synthetic
cuucaauguuuuggaggaug

SEQ ID NO: 602459 - RNA, 21 nt, Artificial Sequence
  Synthetic
gcuucaauguuuuggaggaug

SEQ ID NO: 602460 - RNA, 22 nt, Artificial Sequence
  Synthetic
ugcuucaauguuuuggaggaug

SEQ ID NO: 602461 - RNA, 23 nt, Artificial Sequence
  Synthetic
cugcuucaauguuuuggaggaug

SEQ ID NO: 602462 - RNA, 24 nt, Artificial Sequence
  Synthetic
ccugcuucaauguuuuggaggaug

SEQ ID NO: 602463 - RNA, 18 nt, Artificial Sequence
  Synthetic
acuucuagaaugaggaug

SEQ ID NO: 602464 - RNA, 19 nt, Artificial Sequence
  Synthetic
aacuucuagaaugaggaug

SEQ ID NO: 602465 - RNA, 20 nt, Artificial Sequence
  Synthetic
caacuucuagaaugaggaug

SEQ ID NO: 602466 - RNA, 21 nt, Artificial Sequence
  Synthetic
acaacuucuagaaugaggaug

SEQ ID NO: 602467 - RNA, 22 nt, Artificial Sequence
  Synthetic
gacaacuucuagaaugaggaug

SEQ ID NO: 602468 - RNA, 23 nt, Artificial Sequence
  Synthetic
ggacaacuucuagaaugaggaug

SEQ ID NO: 602469 - RNA, 24 nt, Artificial Sequence
  Synthetic
aggacaacuucuagaaugaggaug

SEQ ID NO: 602470 - RNA, 18 nt, Artificial Sequence
  Synthetic
aauagcauuuauaggaug

SEQ ID NO: 602471 - RNA, 19 nt, Artificial Sequence
  Synthetic
uaauagcauuuauaggaug

SEQ ID NO: 602472 - RNA, 20 nt, Artificial Sequence
  Synthetic
guaauagcauuuauaggaug

SEQ ID NO: 602473 - RNA, 21 nt, Artificial Sequence
  Synthetic
gguaauagcauuuauaggaug

SEQ ID NO: 602474 - RNA, 22 nt, Artificial Sequence
  Synthetic
agguaauagcauuuauaggaug

SEQ ID NO: 602475 - RNA, 23 nt, Artificial Sequence
  Synthetic
cagguaauagcauuuauaggaug

SEQ ID NO: 602476 - RNA, 24 nt, Artificial Sequence
  Synthetic
ccagguaauagcauuuauaggaug

SEQ ID NO: 602477 - RNA, 18 nt, Artificial Sequence
  Synthetic
uguguuauggcuaggaug

SEQ ID NO: 602478 - RNA, 19 nt, Artificial Sequence
  Synthetic
uuguguuauggcuaggaug

SEQ ID NO: 602479 - RNA, 20 nt, Artificial Sequence
  Synthetic
auuguguuauggcuaggaug

SEQ ID NO: 602480 - RNA, 21 nt, Artificial Sequence
  Synthetic
cauuguguuauggcuaggaug

SEQ ID NO: 602481 - RNA, 22 nt, Artificial Sequence
  Synthetic
ucauuguguuauggcuaggaug

SEQ ID NO: 602482 - RNA, 23 nt, Artificial Sequence
  Synthetic
uucauuguguuauggcuaggaug

SEQ ID NO: 602483 - RNA, 24 nt, Artificial Sequence
  Synthetic
auucauuguguuauggcuaggaug

SEQ ID NO: 602484 - RNA, 18 nt, Artificial Sequence
  Synthetic
aaugggugaucuaggaug

SEQ ID NO: 602485 - RNA, 19 nt, Artificial Sequence
  Synthetic
aaaugggugaucuaggaug

SEQ ID NO: 602486 - RNA, 20 nt, Artificial Sequence
  Synthetic
aaaaugggugaucuaggaug

SEQ ID NO: 602487 - RNA, 21 nt, Artificial Sequence
  Synthetic
gaaaaugggugaucuaggaug

SEQ ID NO: 602488 - RNA, 22 nt, Artificial Sequence
  Synthetic
ggaaaaugggugaucuaggaug

SEQ ID NO: 602489 - RNA, 23 nt, Artificial Sequence
  Synthetic
aggaaaaugggugaucuaggaug

SEQ ID NO: 602490 - RNA, 24 nt, Artificial Sequence
  Synthetic
caggaaaaugggugaucuaggaug

SEQ ID NO: 602491 - RNA, 18 nt, Artificial Sequence
  Synthetic
aaaaguucucuuaggaug

SEQ ID NO: 602492 - RNA, 19 nt, Artificial Sequence
  Synthetic
aaaaaguucucuuaggaug

SEQ ID NO: 602493 - RNA, 20 nt, Artificial Sequence
  Synthetic
aaaaaaguucucuuaggaug

SEQ ID NO: 602494 - RNA, 21 nt, Artificial Sequence
  Synthetic
uaaaaaaguucucuuaggaug

SEQ ID NO: 602495 - RNA, 22 nt, Artificial Sequence
  Synthetic
cuaaaaaaguucucuuaggaug

SEQ ID NO: 602496 - RNA, 23 nt, Artificial Sequence
  Synthetic
acuaaaaaaguucucuuaggaug

SEQ ID NO: 602497 - RNA, 24 nt, Artificial Sequence
  Synthetic
uacuaaaaaaguucucuuaggaug

SEQ ID NO: 602498 - RNA, 18 nt, Artificial Sequence
  Synthetic
aauucugucuuuaggaug

SEQ ID NO: 602499 - RNA, 19 nt, Artificial Sequence
  Synthetic
caauucugucuuuaggaug

SEQ ID NO: 602500 - RNA, 20 nt, Artificial Sequence
  Synthetic
acaauucugucuuuaggaug

SEQ ID NO: 602501 - RNA, 21 nt, Artificial Sequence
  Synthetic
gacaauucugucuuuaggaug

SEQ ID NO: 602502 - RNA, 22 nt, Artificial Sequence
  Synthetic
ugacaauucugucuuuaggaug

SEQ ID NO: 602503 - RNA, 23 nt, Artificial Sequence
  Synthetic
gugacaauucugucuuuaggaug

SEQ ID NO: 602504 - RNA, 24 nt, Artificial Sequence
  Synthetic
cgugacaauucugucuuuaggaug

SEQ ID NO: 602505 - RNA, 18 nt, Artificial Sequence
  Synthetic
ucccagcacuuucggaug

SEQ ID NO: 602506 - RNA, 19 nt, Artificial Sequence
  Synthetic
aucccagcacuuucggaug

SEQ ID NO: 602507 - RNA, 20 nt, Artificial Sequence
  Synthetic
aaucccagcacuuucggaug

SEQ ID NO: 602508 - RNA, 21 nt, Artificial Sequence
  Synthetic
uaaucccagcacuuucggaug

SEQ ID NO: 602509 - RNA, 22 nt, Artificial Sequence
  Synthetic
guaaucccagcacuuucggaug

SEQ ID NO: 602510 - RNA, 23 nt, Artificial Sequence
  Synthetic
uguaaucccagcacuuucggaug

SEQ ID NO: 602511 - RNA, 24 nt, Artificial Sequence
  Synthetic
cuguaaucccagcacuuucggaug

SEQ ID NO: 602512 - RNA, 18 nt, Artificial Sequence
  Synthetic
gggaaagggaaagggaug

SEQ ID NO: 602513 - RNA, 19 nt, Artificial Sequence
  Synthetic
agggaaagggaaagggaug

SEQ ID NO: 602514 - RNA, 20 nt, Artificial Sequence
  Synthetic
gagggaaagggaaagggaug

SEQ ID NO: 602515 - RNA, 21 nt, Artificial Sequence
  Synthetic
agagggaaagggaaagggaug

SEQ ID NO: 602516 - RNA, 22 nt, Artificial Sequence
  Synthetic
gagagggaaagggaaagggaug

SEQ ID NO: 602517 - RNA, 23 nt, Artificial Sequence
  Synthetic
ggagagggaaagggaaagggaug

SEQ ID NO: 602518 - RNA, 24 nt, Artificial Sequence
  Synthetic
gggagagggaaagggaaagggaug

SEQ ID NO: 602519 - RNA, 18 nt, Artificial Sequence
  Synthetic
aucuaggcccaagggaug

SEQ ID NO: 602520 - RNA, 19 nt, Artificial Sequence
  Synthetic
caucuaggcccaagggaug

SEQ ID NO: 602521 - RNA, 20 nt, Artificial Sequence
  Synthetic
acaucuaggcccaagggaug

SEQ ID NO: 602522 - RNA, 21 nt, Artificial Sequence
  Synthetic
uacaucuaggcccaagggaug

SEQ ID NO: 602523 - RNA, 22 nt, Artificial Sequence
  Synthetic
cuacaucuaggcccaagggaug

SEQ ID NO: 602524 - RNA, 23 nt, Artificial Sequence
  Synthetic
acuacaucuaggcccaagggaug

SEQ ID NO: 602525 - RNA, 24 nt, Artificial Sequence
  Synthetic
uacuacaucuaggcccaagggaug

SEQ ID NO: 602526 - RNA, 18 nt, Artificial Sequence
  Synthetic
agguagggggaagggaug

SEQ ID NO: 602527 - RNA, 19 nt, Artificial Sequence
  Synthetic
aagguagggggaagggaug

SEQ ID NO: 602528 - RNA, 20 nt, Artificial Sequence
  Synthetic
aaagguagggggaagggaug

SEQ ID NO: 602529 - RNA, 21 nt, Artificial Sequence
  Synthetic
uaaagguagggggaagggaug

SEQ ID NO: 602530 - RNA, 22 nt, Artificial Sequence
  Synthetic
auaaagguagggggaagggaug

SEQ ID NO: 602531 - RNA, 23 nt, Artificial Sequence
  Synthetic
aauaaagguagggggaagggaug

SEQ ID NO: 602532 - RNA, 24 nt, Artificial Sequence
  Synthetic
aaauaaagguagggggaagggaug

SEQ ID NO: 602533 - RNA, 18 nt, Artificial Sequence
  Synthetic
ucuuacucauaagggaug

SEQ ID NO: 602534 - RNA, 19 nt, Artificial Sequence
  Synthetic
aucuuacucauaagggaug

SEQ ID NO: 602535 - RNA, 20 nt, Artificial Sequence
  Synthetic
gaucuuacucauaagggaug

SEQ ID NO: 602536 - RNA, 21 nt, Artificial Sequence
  Synthetic
ugaucuuacucauaagggaug

SEQ ID NO: 602537 - RNA, 22 nt, Artificial Sequence
  Synthetic
cugaucuuacucauaagggaug

SEQ ID NO: 602538 - RNA, 23 nt, Artificial Sequence
  Synthetic
ucugaucuuacucauaagggaug

SEQ ID NO: 602539 - RNA, 24 nt, Artificial Sequence
  Synthetic
cucugaucuuacucauaagggaug

SEQ ID NO: 602540 - RNA, 18 nt, Artificial Sequence
  Synthetic
cauucccucuaagggaug

SEQ ID NO: 602541 - RNA, 19 nt, Artificial Sequence
  Synthetic
gcauucccucuaagggaug

SEQ ID NO: 602542 - RNA, 20 nt, Artificial Sequence
  Synthetic
ugcauucccucuaagggaug

SEQ ID NO: 602543 - RNA, 21 nt, Artificial Sequence
  Synthetic
uugcauucccucuaagggaug

SEQ ID NO: 602544 - RNA, 22 nt, Artificial Sequence
  Synthetic
cuugcauucccucuaagggaug

SEQ ID NO: 602545 - RNA, 23 nt, Artificial Sequence
  Synthetic
gcuugcauucccucuaagggaug

SEQ ID NO: 602546 - RNA, 24 nt, Artificial Sequence
  Synthetic
agcuugcauucccucuaagggaug

SEQ ID NO: 602547 - RNA, 18 nt, Artificial Sequence
  Synthetic
caccugagcccagggaug

SEQ ID NO: 602548 - RNA, 19 nt, Artificial Sequence
  Synthetic
ucaccugagcccagggaug

SEQ ID NO: 602549 - RNA, 20 nt, Artificial Sequence
  Synthetic
aucaccugagcccagggaug

SEQ ID NO: 602550 - RNA, 21 nt, Artificial Sequence
  Synthetic
gaucaccugagcccagggaug

SEQ ID NO: 602551 - RNA, 22 nt, Artificial Sequence
  Synthetic
ggaucaccugagcccagggaug

SEQ ID NO: 602552 - RNA, 23 nt, Artificial Sequence
  Synthetic
aggaucaccugagcccagggaug

SEQ ID NO: 602553 - RNA, 24 nt, Artificial Sequence
  Synthetic
gaggaucaccugagcccagggaug

SEQ ID NO: 602554 - RNA, 18 nt, Artificial Sequence
  Synthetic
uuuacuuugagggggaug

SEQ ID NO: 602555 - RNA, 19 nt, Artificial Sequence
  Synthetic
guuuacuuugagggggaug

SEQ ID NO: 602556 - RNA, 20 nt, Artificial Sequence
  Synthetic
uguuuacuuugagggggaug

SEQ ID NO: 602557 - RNA, 21 nt, Artificial Sequence
  Synthetic
cuguuuacuuugagggggaug

SEQ ID NO: 602558 - RNA, 22 nt, Artificial Sequence
  Synthetic
ccuguuuacuuugagggggaug

SEQ ID NO: 602559 - RNA, 23 nt, Artificial Sequence
  Synthetic
cccuguuuacuuugagggggaug

SEQ ID NO: 602560 - RNA, 24 nt, Artificial Sequence
  Synthetic
ucccuguuuacuuugagggggaug

SEQ ID NO: 602561 - RNA, 18 nt, Artificial Sequence
  Synthetic
uggggaacacgggggaug

SEQ ID NO: 602562 - RNA, 19 nt, Artificial Sequence
  Synthetic
cuggggaacacgggggaug

SEQ ID NO: 602563 - RNA, 20 nt, Artificial Sequence
  Synthetic
gcuggggaacacgggggaug

SEQ ID NO: 602564 - RNA, 21 nt, Artificial Sequence
  Synthetic
ugcuggggaacacgggggaug

SEQ ID NO: 602565 - RNA, 22 nt, Artificial Sequence
  Synthetic
uugcuggggaacacgggggaug

SEQ ID NO: 602566 - RNA, 23 nt, Artificial Sequence
  Synthetic
uuugcuggggaacacgggggaug

SEQ ID NO: 602567 - RNA, 24 nt, Artificial Sequence
  Synthetic
guuugcuggggaacacgggggaug

SEQ ID NO: 602568 - RNA, 18 nt, Artificial Sequence
  Synthetic
gucauagaguuggggaug

SEQ ID NO: 602569 - RNA, 19 nt, Artificial Sequence
  Synthetic
agucauagaguuggggaug

SEQ ID NO: 602570 - RNA, 20 nt, Artificial Sequence
  Synthetic
uagucauagaguuggggaug

SEQ ID NO: 602571 - RNA, 21 nt, Artificial Sequence
  Synthetic
auagucauagaguuggggaug

SEQ ID NO: 602572 - RNA, 22 nt, Artificial Sequence
  Synthetic
gauagucauagaguuggggaug

SEQ ID NO: 602573 - RNA, 23 nt, Artificial Sequence
  Synthetic
ugauagucauagaguuggggaug

SEQ ID NO: 602574 - RNA, 24 nt, Artificial Sequence
  Synthetic
augauagucauagaguuggggaug

SEQ ID NO: 602575 - RNA, 18 nt, Artificial Sequence
  Synthetic
gugucauucacugggaug

SEQ ID NO: 602576 - RNA, 19 nt, Artificial Sequence
  Synthetic
agugucauucacugggaug

SEQ ID NO: 602577 - RNA, 20 nt, Artificial Sequence
  Synthetic
uagugucauucacugggaug

SEQ ID NO: 602578 - RNA, 21 nt, Artificial Sequence
  Synthetic
auagugucauucacugggaug

SEQ ID NO: 602579 - RNA, 22 nt, Artificial Sequence
  Synthetic
gauagugucauucacugggaug

SEQ ID NO: 602580 - RNA, 23 nt, Artificial Sequence
  Synthetic
ggauagugucauucacugggaug

SEQ ID NO: 602581 - RNA, 24 nt, Artificial Sequence
  Synthetic
uggauagugucauucacugggaug

SEQ ID NO: 602582 - RNA, 18 nt, Artificial Sequence
  Synthetic
guauugccuucugggaug

SEQ ID NO: 602583 - RNA, 19 nt, Artificial Sequence
  Synthetic
gguauugccuucugggaug

SEQ ID NO: 602584 - RNA, 20 nt, Artificial Sequence
  Synthetic
ggguauugccuucugggaug

SEQ ID NO: 602585 - RNA, 21 nt, Artificial Sequence
  Synthetic
aggguauugccuucugggaug

SEQ ID NO: 602586 - RNA, 22 nt, Artificial Sequence
  Synthetic
uaggguauugccuucugggaug

SEQ ID NO: 602587 - RNA, 23 nt, Artificial Sequence
  Synthetic
cuaggguauugccuucugggaug

SEQ ID NO: 602588 - RNA, 24 nt, Artificial Sequence
  Synthetic
gcuaggguauugccuucugggaug

SEQ ID NO: 602589 - RNA, 18 nt, Artificial Sequence
  Synthetic
uucauucaaagugggaug

SEQ ID NO: 602590 - RNA, 19 nt, Artificial Sequence
  Synthetic
guucauucaaagugggaug

SEQ ID NO: 602591 - RNA, 20 nt, Artificial Sequence
  Synthetic
aguucauucaaagugggaug

SEQ ID NO: 602592 - RNA, 21 nt, Artificial Sequence
  Synthetic
uaguucauucaaagugggaug

SEQ ID NO: 602593 - RNA, 22 nt, Artificial Sequence
  Synthetic
auaguucauucaaagugggaug

SEQ ID NO: 602594 - RNA, 23 nt, Artificial Sequence
  Synthetic
aauaguucauucaaagugggaug

SEQ ID NO: 602595 - RNA, 24 nt, Artificial Sequence
  Synthetic
aaauaguucauucaaagugggaug

SEQ ID NO: 602596 - RNA, 18 nt, Artificial Sequence
  Synthetic
ccacaaccucgugggaug

SEQ ID NO: 602597 - RNA, 19 nt, Artificial Sequence
  Synthetic
cccacaaccucgugggaug

SEQ ID NO: 602598 - RNA, 20 nt, Artificial Sequence
  Synthetic
gcccacaaccucgugggaug

SEQ ID NO: 602599 - RNA, 21 nt, Artificial Sequence
  Synthetic
ugcccacaaccucgugggaug

SEQ ID NO: 602600 - RNA, 22 nt, Artificial Sequence
  Synthetic
uugcccacaaccucgugggaug

SEQ ID NO: 602601 - RNA, 23 nt, Artificial Sequence
  Synthetic
cuugcccacaaccucgugggaug

SEQ ID NO: 602602 - RNA, 24 nt, Artificial Sequence
  Synthetic
gcuugcccacaaccucgugggaug

SEQ ID NO: 602603 - RNA, 18 nt, Artificial Sequence
  Synthetic
uuccaucuacuugggaug

SEQ ID NO: 602604 - RNA, 19 nt, Artificial Sequence
  Synthetic
guuccaucuacuugggaug

SEQ ID NO: 602605 - RNA, 20 nt, Artificial Sequence
  Synthetic
aguuccaucuacuugggaug

SEQ ID NO: 602606 - RNA, 21 nt, Artificial Sequence
  Synthetic
uaguuccaucuacuugggaug

SEQ ID NO: 602607 - RNA, 22 nt, Artificial Sequence
  Synthetic
guaguuccaucuacuugggaug

SEQ ID NO: 602608 - RNA, 23 nt, Artificial Sequence
  Synthetic
uguaguuccaucuacuugggaug

SEQ ID NO: 602609 - RNA, 24 nt, Artificial Sequence
  Synthetic
cuguaguuccaucuacuugggaug

SEQ ID NO: 602610 - RNA, 18 nt, Artificial Sequence
  Synthetic
uucaguagguuugggaug

SEQ ID NO: 602611 - RNA, 19 nt, Artificial Sequence
  Synthetic
auucaguagguuugggaug

SEQ ID NO: 602612 - RNA, 20 nt, Artificial Sequence
  Synthetic
gauucaguagguuugggaug

SEQ ID NO: 602613 - RNA, 21 nt, Artificial Sequence
  Synthetic
ugauucaguagguuugggaug

SEQ ID NO: 602614 - RNA, 22 nt, Artificial Sequence
  Synthetic
cugauucaguagguuugggaug

SEQ ID NO: 602615 - RNA, 23 nt, Artificial Sequence
  Synthetic
acugauucaguagguuugggaug

SEQ ID NO: 602616 - RNA, 24 nt, Artificial Sequence
  Synthetic
cacugauucaguagguuugggaug

SEQ ID NO: 602617 - RNA, 18 nt, Artificial Sequence
  Synthetic
cuuuaaucuaaauggaug

SEQ ID NO: 602618 - RNA, 19 nt, Artificial Sequence
  Synthetic
ucuuuaaucuaaauggaug

SEQ ID NO: 602619 - RNA, 20 nt, Artificial Sequence
  Synthetic
gucuuuaaucuaaauggaug

SEQ ID NO: 602620 - RNA, 21 nt, Artificial Sequence
  Synthetic
agucuuuaaucuaaauggaug

SEQ ID NO: 602621 - RNA, 22 nt, Artificial Sequence
  Synthetic
aagucuuuaaucuaaauggaug

SEQ ID NO: 602622 - RNA, 23 nt, Artificial Sequence
  Synthetic
aaagucuuuaaucuaaauggaug

SEQ ID NO: 602623 - RNA, 24 nt, Artificial Sequence
  Synthetic
uaaagucuuuaaucuaaauggaug

SEQ ID NO: 602624 - RNA, 18 nt, Artificial Sequence
  Synthetic
uuuauaaagucauggaug

SEQ ID NO: 602625 - RNA, 19 nt, Artificial Sequence
  Synthetic
auuuauaaagucauggaug

SEQ ID NO: 602626 - RNA, 20 nt, Artificial Sequence
  Synthetic
aauuuauaaagucauggaug

SEQ ID NO: 602627 - RNA, 21 nt, Artificial Sequence
  Synthetic
caauuuauaaagucauggaug

SEQ ID NO: 602628 - RNA, 22 nt, Artificial Sequence
  Synthetic
ucaauuuauaaagucauggaug

SEQ ID NO: 602629 - RNA, 23 nt, Artificial Sequence
  Synthetic
uucaauuuauaaagucauggaug

SEQ ID NO: 602630 - RNA, 24 nt, Artificial Sequence
  Synthetic
uuucaauuuauaaagucauggaug

SEQ ID NO: 602631 - RNA, 18 nt, Artificial Sequence
  Synthetic
ugaagauacauauggaug

SEQ ID NO: 602632 - RNA, 19 nt, Artificial Sequence
  Synthetic
gugaagauacauauggaug

SEQ ID NO: 602633 - RNA, 20 nt, Artificial Sequence
  Synthetic
agugaagauacauauggaug

SEQ ID NO: 602634 - RNA, 21 nt, Artificial Sequence
  Synthetic
aagugaagauacauauggaug

SEQ ID NO: 602635 - RNA, 22 nt, Artificial Sequence
  Synthetic
aaagugaagauacauauggaug

SEQ ID NO: 602636 - RNA, 23 nt, Artificial Sequence
  Synthetic
caaagugaagauacauauggaug

SEQ ID NO: 602637 - RNA, 24 nt, Artificial Sequence
  Synthetic
acaaagugaagauacauauggaug

SEQ ID NO: 602638 - RNA, 18 nt, Artificial Sequence
  Synthetic
uacagaggcauauggaug

SEQ ID NO: 602639 - RNA, 19 nt, Artificial Sequence
  Synthetic
auacagaggcauauggaug

SEQ ID NO: 602640 - RNA, 20 nt, Artificial Sequence
  Synthetic
gauacagaggcauauggaug

SEQ ID NO: 602641 - RNA, 21 nt, Artificial Sequence
  Synthetic
ggauacagaggcauauggaug

SEQ ID NO: 602642 - RNA, 22 nt, Artificial Sequence
  Synthetic
gggauacagaggcauauggaug

SEQ ID NO: 602643 - RNA, 23 nt, Artificial Sequence
  Synthetic
agggauacagaggcauauggaug

SEQ ID NO: 602644 - RNA, 24 nt, Artificial Sequence
  Synthetic
cagggauacagaggcauauggaug

SEQ ID NO: 602645 - RNA, 18 nt, Artificial Sequence
  Synthetic
uuugagcuauuauggaug

SEQ ID NO: 602646 - RNA, 19 nt, Artificial Sequence
  Synthetic
uuuugagcuauuauggaug

SEQ ID NO: 602647 - RNA, 20 nt, Artificial Sequence
  Synthetic
guuuugagcuauuauggaug

SEQ ID NO: 602648 - RNA, 21 nt, Artificial Sequence
  Synthetic
uguuuugagcuauuauggaug

SEQ ID NO: 602649 - RNA, 22 nt, Artificial Sequence
  Synthetic
auguuuugagcuauuauggaug

SEQ ID NO: 602650 - RNA, 23 nt, Artificial Sequence
  Synthetic
aauguuuugagcuauuauggaug

SEQ ID NO: 602651 - RNA, 24 nt, Artificial Sequence
  Synthetic
aaauguuuugagcuauuauggaug

SEQ ID NO: 602652 - RNA, 18 nt, Artificial Sequence
  Synthetic
aggggaagucacuggaug

SEQ ID NO: 602653 - RNA, 19 nt, Artificial Sequence
  Synthetic
uaggggaagucacuggaug

SEQ ID NO: 602654 - RNA, 20 nt, Artificial Sequence
  Synthetic
guaggggaagucacuggaug

SEQ ID NO: 602655 - RNA, 21 nt, Artificial Sequence
  Synthetic
aguaggggaagucacuggaug

SEQ ID NO: 602656 - RNA, 22 nt, Artificial Sequence
  Synthetic
uaguaggggaagucacuggaug

SEQ ID NO: 602657 - RNA, 23 nt, Artificial Sequence
  Synthetic
uuaguaggggaagucacuggaug

SEQ ID NO: 602658 - RNA, 24 nt, Artificial Sequence
  Synthetic
uuuaguaggggaagucacuggaug

SEQ ID NO: 602659 - RNA, 18 nt, Artificial Sequence
  Synthetic
auaagaacucucuggaug

SEQ ID NO: 602660 - RNA, 19 nt, Artificial Sequence
  Synthetic
cauaagaacucucuggaug

SEQ ID NO: 602661 - RNA, 20 nt, Artificial Sequence
  Synthetic
acauaagaacucucuggaug

SEQ ID NO: 602662 - RNA, 21 nt, Artificial Sequence
  Synthetic
gacauaagaacucucuggaug

SEQ ID NO: 602663 - RNA, 22 nt, Artificial Sequence
  Synthetic
agacauaagaacucucuggaug

SEQ ID NO: 602664 - RNA, 23 nt, Artificial Sequence
  Synthetic
uagacauaagaacucucuggaug

SEQ ID NO: 602665 - RNA, 24 nt, Artificial Sequence
  Synthetic
guagacauaagaacucucuggaug

SEQ ID NO: 602666 - RNA, 18 nt, Artificial Sequence
  Synthetic
gagagauaggcguggaug

SEQ ID NO: 602667 - RNA, 19 nt, Artificial Sequence
  Synthetic
agagagauaggcguggaug

SEQ ID NO: 602668 - RNA, 20 nt, Artificial Sequence
  Synthetic
gagagagauaggcguggaug

SEQ ID NO: 602669 - RNA, 21 nt, Artificial Sequence
  Synthetic
agagagagauaggcguggaug

SEQ ID NO: 602670 - RNA, 22 nt, Artificial Sequence
  Synthetic
cagagagagauaggcguggaug

SEQ ID NO: 602671 - RNA, 23 nt, Artificial Sequence
  Synthetic
acagagagagauaggcguggaug

SEQ ID NO: 602672 - RNA, 24 nt, Artificial Sequence
  Synthetic
cacagagagagauaggcguggaug

SEQ ID NO: 602673 - RNA, 18 nt, Artificial Sequence
  Synthetic
ucaaagaucagguggaug

SEQ ID NO: 602674 - RNA, 19 nt, Artificial Sequence
  Synthetic
uucaaagaucagguggaug

SEQ ID NO: 602675 - RNA, 20 nt, Artificial Sequence
  Synthetic
auucaaagaucagguggaug

SEQ ID NO: 602676 - RNA, 21 nt, Artificial Sequence
  Synthetic
cauucaaagaucagguggaug

SEQ ID NO: 602677 - RNA, 22 nt, Artificial Sequence
  Synthetic
ucauucaaagaucagguggaug

SEQ ID NO: 602678 - RNA, 23 nt, Artificial Sequence
  Synthetic
cucauucaaagaucagguggaug

SEQ ID NO: 602679 - RNA, 24 nt, Artificial Sequence
  Synthetic
acucauucaaagaucagguggaug

SEQ ID NO: 602680 - RNA, 18 nt, Artificial Sequence
  Synthetic
uagccaggcguguggaug

SEQ ID NO: 602681 - RNA, 19 nt, Artificial Sequence
  Synthetic
guagccaggcguguggaug

SEQ ID NO: 602682 - RNA, 20 nt, Artificial Sequence
  Synthetic
aguagccaggcguguggaug

SEQ ID NO: 602683 - RNA, 21 nt, Artificial Sequence
  Synthetic
caguagccaggcguguggaug

SEQ ID NO: 602684 - RNA, 22 nt, Artificial Sequence
  Synthetic
acaguagccaggcguguggaug

SEQ ID NO: 602685 - RNA, 23 nt, Artificial Sequence
  Synthetic
aacaguagccaggcguguggaug

SEQ ID NO: 602686 - RNA, 24 nt, Artificial Sequence
  Synthetic
aaacaguagccaggcguguggaug

SEQ ID NO: 602687 - RNA, 18 nt, Artificial Sequence
  Synthetic
augauguaacauuggaug

SEQ ID NO: 602688 - RNA, 19 nt, Artificial Sequence
  Synthetic
gaugauguaacauuggaug

SEQ ID NO: 602689 - RNA, 20 nt, Artificial Sequence
  Synthetic
ugaugauguaacauuggaug

SEQ ID NO: 602690 - RNA, 21 nt, Artificial Sequence
  Synthetic
gugaugauguaacauuggaug

SEQ ID NO: 602691 - RNA, 22 nt, Artificial Sequence
  Synthetic
agugaugauguaacauuggaug

SEQ ID NO: 602692 - RNA, 23 nt, Artificial Sequence
  Synthetic
gagugaugauguaacauuggaug

SEQ ID NO: 602693 - RNA, 24 nt, Artificial Sequence
  Synthetic
agagugaugauguaacauuggaug

SEQ ID NO: 602694 - RNA, 18 nt, Artificial Sequence
  Synthetic
uuuguuauaauuuggaug

SEQ ID NO: 602695 - RNA, 19 nt, Artificial Sequence
  Synthetic
uuuuguuauaauuuggaug

SEQ ID NO: 602696 - RNA, 20 nt, Artificial Sequence
  Synthetic
guuuuguuauaauuuggaug

SEQ ID NO: 602697 - RNA, 21 nt, Artificial Sequence
  Synthetic
uguuuuguuauaauuuggaug

SEQ ID NO: 602698 - RNA, 22 nt, Artificial Sequence
  Synthetic
uuguuuuguuauaauuuggaug

SEQ ID NO: 602699 - RNA, 23 nt, Artificial Sequence
  Synthetic
uuuguuuuguuauaauuuggaug

SEQ ID NO: 602700 - RNA, 24 nt, Artificial Sequence
  Synthetic
cuuuguuuuguuauaauuuggaug

SEQ ID NO: 602701 - RNA, 18 nt, Artificial Sequence
  Synthetic
cgugacuuccuuuggaug

SEQ ID NO: 602702 - RNA, 19 nt, Artificial Sequence
  Synthetic
acgugacuuccuuuggaug

SEQ ID NO: 602703 - RNA, 20 nt, Artificial Sequence
  Synthetic
cacgugacuuccuuuggaug

SEQ ID NO: 602704 - RNA, 21 nt, Artificial Sequence
  Synthetic
ccacgugacuuccuuuggaug

SEQ ID NO: 602705 - RNA, 22 nt, Artificial Sequence
  Synthetic
accacgugacuuccuuuggaug

SEQ ID NO: 602706 - RNA, 23 nt, Artificial Sequence
  Synthetic
gaccacgugacuuccuuuggaug

SEQ ID NO: 602707 - RNA, 24 nt, Artificial Sequence
  Synthetic
ugaccacgugacuuccuuuggaug

SEQ ID NO: 602708 - RNA, 18 nt, Artificial Sequence
  Synthetic
auauuccauuuuuggaug

SEQ ID NO: 602709 - RNA, 19 nt, Artificial Sequence
  Synthetic
aauauuccauuuuuggaug

SEQ ID NO: 602710 - RNA, 20 nt, Artificial Sequence
  Synthetic
uaauauuccauuuuuggaug

SEQ ID NO: 602711 - RNA, 21 nt, Artificial Sequence
  Synthetic
auaauauuccauuuuuggaug

SEQ ID NO: 602712 - RNA, 22 nt, Artificial Sequence
  Synthetic
aauaauauuccauuuuuggaug

SEQ ID NO: 602713 - RNA, 23 nt, Artificial Sequence
  Synthetic
aaauaauauuccauuuuuggaug

SEQ ID NO: 602714 - RNA, 24 nt, Artificial Sequence
  Synthetic
uaaauaauauuccauuuuuggaug

SEQ ID NO: 602715 - RNA, 18 nt, Artificial Sequence
  Synthetic
ggugaagagagaaugaug

SEQ ID NO: 602716 - RNA, 19 nt, Artificial Sequence
  Synthetic
aggugaagagagaaugaug

SEQ ID NO: 602717 - RNA, 20 nt, Artificial Sequence
  Synthetic
caggugaagagagaaugaug

SEQ ID NO: 602718 - RNA, 21 nt, Artificial Sequence
  Synthetic
gcaggugaagagagaaugaug

SEQ ID NO: 602719 - RNA, 22 nt, Artificial Sequence
  Synthetic
ugcaggugaagagagaaugaug

SEQ ID NO: 602720 - RNA, 23 nt, Artificial Sequence
  Synthetic
uugcaggugaagagagaaugaug

SEQ ID NO: 602721 - RNA, 24 nt, Artificial Sequence
  Synthetic
auugcaggugaagagagaaugaug

SEQ ID NO: 602722 - RNA, 18 nt, Artificial Sequence
  Synthetic
agggcuggcaacaugaug

SEQ ID NO: 602723 - RNA, 19 nt, Artificial Sequence
  Synthetic
cagggcuggcaacaugaug

SEQ ID NO: 602724 - RNA, 20 nt, Artificial Sequence
  Synthetic
gcagggcuggcaacaugaug

SEQ ID NO: 602725 - RNA, 21 nt, Artificial Sequence
  Synthetic
agcagggcuggcaacaugaug

SEQ ID NO: 602726 - RNA, 22 nt, Artificial Sequence
  Synthetic
aagcagggcuggcaacaugaug

SEQ ID NO: 602727 - RNA, 23 nt, Artificial Sequence
  Synthetic
aaagcagggcuggcaacaugaug

SEQ ID NO: 602728 - RNA, 24 nt, Artificial Sequence
  Synthetic
uaaagcagggcuggcaacaugaug

SEQ ID NO: 602729 - RNA, 18 nt, Artificial Sequence
  Synthetic
uguauuuaagacaugaug

SEQ ID NO: 602730 - RNA, 19 nt, Artificial Sequence
  Synthetic
cuguauuuaagacaugaug

SEQ ID NO: 602731 - RNA, 20 nt, Artificial Sequence
  Synthetic
ucuguauuuaagacaugaug

SEQ ID NO: 602732 - RNA, 21 nt, Artificial Sequence
  Synthetic
cucuguauuuaagacaugaug

SEQ ID NO: 602733 - RNA, 22 nt, Artificial Sequence
  Synthetic
acucuguauuuaagacaugaug

SEQ ID NO: 602734 - RNA, 23 nt, Artificial Sequence
  Synthetic
gacucuguauuuaagacaugaug

SEQ ID NO: 602735 - RNA, 24 nt, Artificial Sequence
  Synthetic
ggacucuguauuuaagacaugaug

SEQ ID NO: 602736 - RNA, 18 nt, Artificial Sequence
  Synthetic
cugccuuaagccaugaug

SEQ ID NO: 602737 - RNA, 19 nt, Artificial Sequence
  Synthetic
acugccuuaagccaugaug

SEQ ID NO: 602738 - RNA, 20 nt, Artificial Sequence
  Synthetic
gacugccuuaagccaugaug

SEQ ID NO: 602739 - RNA, 21 nt, Artificial Sequence
  Synthetic
cgacugccuuaagccaugaug

SEQ ID NO: 602740 - RNA, 22 nt, Artificial Sequence
  Synthetic
ucgacugccuuaagccaugaug

SEQ ID NO: 602741 - RNA, 23 nt, Artificial Sequence
  Synthetic
aucgacugccuuaagccaugaug

SEQ ID NO: 602742 - RNA, 24 nt, Artificial Sequence
  Synthetic
uaucgacugccuuaagccaugaug

SEQ ID NO: 602743 - RNA, 18 nt, Artificial Sequence
  Synthetic
aauuagcugggcaugaug

SEQ ID NO: 602744 - RNA, 19 nt, Artificial Sequence
  Synthetic
aaauuagcugggcaugaug

SEQ ID NO: 602745 - RNA, 20 nt, Artificial Sequence
  Synthetic
aaaauuagcugggcaugaug

SEQ ID NO: 602746 - RNA, 21 nt, Artificial Sequence
  Synthetic
aaaaauuagcugggcaugaug

SEQ ID NO: 602747 - RNA, 22 nt, Artificial Sequence
  Synthetic
aaaaaauuagcugggcaugaug

SEQ ID NO: 602748 - RNA, 23 nt, Artificial Sequence
  Synthetic
aaaaaaauuagcugggcaugaug

SEQ ID NO: 602749 - RNA, 24 nt, Artificial Sequence
  Synthetic
caaaaaaauuagcugggcaugaug

SEQ ID NO: 602750 - RNA, 18 nt, Artificial Sequence
  Synthetic
caagcugcccagaugaug

SEQ ID NO: 602751 - RNA, 19 nt, Artificial Sequence
  Synthetic
ucaagcugcccagaugaug

SEQ ID NO: 602752 - RNA, 20 nt, Artificial Sequence
  Synthetic
aucaagcugcccagaugaug

SEQ ID NO: 602753 - RNA, 21 nt, Artificial Sequence
  Synthetic
uaucaagcugcccagaugaug

SEQ ID NO: 602754 - RNA, 22 nt, Artificial Sequence
  Synthetic
uuaucaagcugcccagaugaug

SEQ ID NO: 602755 - RNA, 23 nt, Artificial Sequence
  Synthetic
uuuaucaagcugcccagaugaug

SEQ ID NO: 602756 - RNA, 24 nt, Artificial Sequence
  Synthetic
cuuuaucaagcugcccagaugaug

SEQ ID NO: 602757 - RNA, 18 nt, Artificial Sequence
  Synthetic
auaaaaaucaggaugaug

SEQ ID NO: 602758 - RNA, 19 nt, Artificial Sequence
  Synthetic
aauaaaaaucaggaugaug

SEQ ID NO: 602759 - RNA, 20 nt, Artificial Sequence
  Synthetic
gaauaaaaaucaggaugaug

SEQ ID NO: 602760 - RNA, 21 nt, Artificial Sequence
  Synthetic
agaauaaaaaucaggaugaug

SEQ ID NO: 602761 - RNA, 22 nt, Artificial Sequence
  Synthetic
cagaauaaaaaucaggaugaug

SEQ ID NO: 602762 - RNA, 23 nt, Artificial Sequence
  Synthetic
ucagaauaaaaaucaggaugaug

SEQ ID NO: 602763 - RNA, 24 nt, Artificial Sequence
  Synthetic
cucagaauaaaaaucaggaugaug

SEQ ID NO: 602764 - RNA, 18 nt, Artificial Sequence
  Synthetic
cauauucagaggaugaug

SEQ ID NO: 602765 - RNA, 19 nt, Artificial Sequence
  Synthetic
gcauauucagaggaugaug

SEQ ID NO: 602766 - RNA, 20 nt, Artificial Sequence
  Synthetic
agcauauucagaggaugaug

SEQ ID NO: 602767 - RNA, 21 nt, Artificial Sequence
  Synthetic
aagcauauucagaggaugaug

SEQ ID NO: 602768 - RNA, 22 nt, Artificial Sequence
  Synthetic
gaagcauauucagaggaugaug

SEQ ID NO: 602769 - RNA, 23 nt, Artificial Sequence
  Synthetic
ugaagcauauucagaggaugaug

SEQ ID NO: 602770 - RNA, 24 nt, Artificial Sequence
  Synthetic
cugaagcauauucagaggaugaug

SEQ ID NO: 602771 - RNA, 18 nt, Artificial Sequence
  Synthetic
aagagagugaugaugaug

SEQ ID NO: 602772 - RNA, 19 nt, Artificial Sequence
  Synthetic
gaagagagugaugaugaug

SEQ ID NO: 602773 - RNA, 20 nt, Artificial Sequence
  Synthetic
ggaagagagugaugaugaug

SEQ ID NO: 602774 - RNA, 21 nt, Artificial Sequence
  Synthetic
aggaagagagugaugaugaug

SEQ ID NO: 602775 - RNA, 22 nt, Artificial Sequence
  Synthetic
gaggaagagagugaugaugaug

SEQ ID NO: 602776 - RNA, 23 nt, Artificial Sequence
  Synthetic
agaggaagagagugaugaugaug

SEQ ID NO: 602777 - RNA, 24 nt, Artificial Sequence
  Synthetic
cagaggaagagagugaugaugaug

SEQ ID NO: 602778 - RNA, 18 nt, Artificial Sequence
  Synthetic
augaugauuuugaugaug

SEQ ID NO: 602779 - RNA, 19 nt, Artificial Sequence
  Synthetic
gaugaugauuuugaugaug

SEQ ID NO: 602780 - RNA, 20 nt, Artificial Sequence
  Synthetic
ugaugaugauuuugaugaug

SEQ ID NO: 602781 - RNA, 21 nt, Artificial Sequence
  Synthetic
augaugaugauuuugaugaug

SEQ ID NO: 602782 - RNA, 22 nt, Artificial Sequence
  Synthetic
gaugaugaugauuuugaugaug

SEQ ID NO: 602783 - RNA, 23 nt, Artificial Sequence
  Synthetic
ugaugaugaugauuuugaugaug

SEQ ID NO: 602784 - RNA, 24 nt, Artificial Sequence
  Synthetic
augaugaugaugauuuugaugaug

SEQ ID NO: 602785 - RNA, 18 nt, Artificial Sequence
  Synthetic
uuguaaaaauuuaugaug

SEQ ID NO: 602786 - RNA, 19 nt, Artificial Sequence
  Synthetic
uuuguaaaaauuuaugaug

SEQ ID NO: 602787 - RNA, 20 nt, Artificial Sequence
  Synthetic
uuuuguaaaaauuuaugaug

SEQ ID NO: 602788 - RNA, 21 nt, Artificial Sequence
  Synthetic
uuuuuguaaaaauuuaugaug

SEQ ID NO: 602789 - RNA, 22 nt, Artificial Sequence
  Synthetic
guuuuuguaaaaauuuaugaug

SEQ ID NO: 602790 - RNA, 23 nt, Artificial Sequence
  Synthetic
uguuuuuguaaaaauuuaugaug

SEQ ID NO: 602791 - RNA, 24 nt, Artificial Sequence
  Synthetic
uuguuuuuguaaaaauuuaugaug

SEQ ID NO: 602792 - RNA, 18 nt, Artificial Sequence
  Synthetic
uucccuccaaaacugaug

SEQ ID NO: 602793 - RNA, 19 nt, Artificial Sequence
  Synthetic
uuucccuccaaaacugaug

SEQ ID NO: 602794 - RNA, 20 nt, Artificial Sequence
  Synthetic
uuuucccuccaaaacugaug

SEQ ID NO: 602795 - RNA, 21 nt, Artificial Sequence
  Synthetic
uuuuucccuccaaaacugaug

SEQ ID NO: 602796 - RNA, 22 nt, Artificial Sequence
  Synthetic
guuuuucccuccaaaacugaug

SEQ ID NO: 602797 - RNA, 23 nt, Artificial Sequence
  Synthetic
uguuuuucccuccaaaacugaug

SEQ ID NO: 602798 - RNA, 24 nt, Artificial Sequence
  Synthetic
auguuuuucccuccaaaacugaug

SEQ ID NO: 602799 - RNA, 18 nt, Artificial Sequence
  Synthetic
gucaggaaacaacugaug

SEQ ID NO: 602800 - RNA, 19 nt, Artificial Sequence
  Synthetic
agucaggaaacaacugaug

SEQ ID NO: 602801 - RNA, 20 nt, Artificial Sequence
  Synthetic
aagucaggaaacaacugaug

SEQ ID NO: 602802 - RNA, 21 nt, Artificial Sequence
  Synthetic
aaagucaggaaacaacugaug

SEQ ID NO: 602803 - RNA, 22 nt, Artificial Sequence
  Synthetic
aaaagucaggaaacaacugaug

SEQ ID NO: 602804 - RNA, 23 nt, Artificial Sequence
  Synthetic
aaaaagucaggaaacaacugaug

SEQ ID NO: 602805 - RNA, 24 nt, Artificial Sequence
  Synthetic
uaaaaagucaggaaacaacugaug

SEQ ID NO: 602806 - RNA, 18 nt, Artificial Sequence
  Synthetic
aguuggccaacacugaug

SEQ ID NO: 602807 - RNA, 19 nt, Artificial Sequence
  Synthetic
aaguuggccaacacugaug

SEQ ID NO: 602808 - RNA, 20 nt, Artificial Sequence
  Synthetic
aaaguuggccaacacugaug

SEQ ID NO: 602809 - RNA, 21 nt, Artificial Sequence
  Synthetic
aaaaguuggccaacacugaug

SEQ ID NO: 602810 - RNA, 22 nt, Artificial Sequence
  Synthetic
aaaaaguuggccaacacugaug

SEQ ID NO: 602811 - RNA, 23 nt, Artificial Sequence
  Synthetic
aaaaaaguuggccaacacugaug

SEQ ID NO: 602812 - RNA, 24 nt, Artificial Sequence
  Synthetic
gaaaaaaguuggccaacacugaug

SEQ ID NO: 602813 - RNA, 18 nt, Artificial Sequence
  Synthetic
uuaacuuauccacugaug

SEQ ID NO: 602814 - RNA, 19 nt, Artificial Sequence
  Synthetic
cuuaacuuauccacugaug

SEQ ID NO: 602815 - RNA, 20 nt, Artificial Sequence
  Synthetic
ccuuaacuuauccacugaug

SEQ ID NO: 602816 - RNA, 21 nt, Artificial Sequence
  Synthetic
uccuuaacuuauccacugaug

SEQ ID NO: 602817 - RNA, 22 nt, Artificial Sequence
  Synthetic
cuccuuaacuuauccacugaug

SEQ ID NO: 602818 - RNA, 23 nt, Artificial Sequence
  Synthetic
ucuccuuaacuuauccacugaug

SEQ ID NO: 602819 - RNA, 24 nt, Artificial Sequence
  Synthetic
uucuccuuaacuuauccacugaug

SEQ ID NO: 602820 - RNA, 18 nt, Artificial Sequence
  Synthetic
aaugaaagcucacugaug

SEQ ID NO: 602821 - RNA, 19 nt, Artificial Sequence
  Synthetic
uaaugaaagcucacugaug

SEQ ID NO: 602822 - RNA, 20 nt, Artificial Sequence
  Synthetic
auaaugaaagcucacugaug

SEQ ID NO: 602823 - RNA, 21 nt, Artificial Sequence
  Synthetic
cauaaugaaagcucacugaug

SEQ ID NO: 602824 - RNA, 22 nt, Artificial Sequence
  Synthetic
acauaaugaaagcucacugaug

SEQ ID NO: 602825 - RNA, 23 nt, Artificial Sequence
  Synthetic
cacauaaugaaagcucacugaug

SEQ ID NO: 602826 - RNA, 24 nt, Artificial Sequence
  Synthetic
ccacauaaugaaagcucacugaug

SEQ ID NO: 602827 - RNA, 18 nt, Artificial Sequence
  Synthetic
auuggugguuaccugaug

SEQ ID NO: 602828 - RNA, 19 nt, Artificial Sequence
  Synthetic
gauuggugguuaccugaug

SEQ ID NO: 602829 - RNA, 20 nt, Artificial Sequence
  Synthetic
ugauuggugguuaccugaug

SEQ ID NO: 602830 - RNA, 21 nt, Artificial Sequence
  Synthetic
gugauuggugguuaccugaug

SEQ ID NO: 602831 - RNA, 22 nt, Artificial Sequence
  Synthetic
ugugauuggugguuaccugaug

SEQ ID NO: 602832 - RNA, 23 nt, Artificial Sequence
  Synthetic
cugugauuggugguuaccugaug

SEQ ID NO: 602833 - RNA, 24 nt, Artificial Sequence
  Synthetic
ucugugauuggugguuaccugaug

SEQ ID NO: 602834 - RNA, 18 nt, Artificial Sequence
  Synthetic
auauaccaccuccugaug

SEQ ID NO: 602835 - RNA, 19 nt, Artificial Sequence
  Synthetic
uauauaccaccuccugaug

SEQ ID NO: 602836 - RNA, 20 nt, Artificial Sequence
  Synthetic
uuauauaccaccuccugaug

SEQ ID NO: 602837 - RNA, 21 nt, Artificial Sequence
  Synthetic
auuauauaccaccuccugaug

SEQ ID NO: 602838 - RNA, 22 nt, Artificial Sequence
  Synthetic
cauuauauaccaccuccugaug

SEQ ID NO: 602839 - RNA, 23 nt, Artificial Sequence
  Synthetic
gcauuauauaccaccuccugaug

SEQ ID NO: 602840 - RNA, 24 nt, Artificial Sequence
  Synthetic
ggcauuauauaccaccuccugaug

SEQ ID NO: 602841 - RNA, 18 nt, Artificial Sequence
  Synthetic
gcagcucaccuccugaug

SEQ ID NO: 602842 - RNA, 19 nt, Artificial Sequence
  Synthetic
ugcagcucaccuccugaug

SEQ ID NO: 602843 - RNA, 20 nt, Artificial Sequence
  Synthetic
cugcagcucaccuccugaug

SEQ ID NO: 602844 - RNA, 21 nt, Artificial Sequence
  Synthetic
ccugcagcucaccuccugaug

SEQ ID NO: 602845 - RNA, 22 nt, Artificial Sequence
  Synthetic
cccugcagcucaccuccugaug

SEQ ID NO: 602846 - RNA, 23 nt, Artificial Sequence
  Synthetic
gcccugcagcucaccuccugaug

SEQ ID NO: 602847 - RNA, 24 nt, Artificial Sequence
  Synthetic
ggcccugcagcucaccuccugaug

SEQ ID NO: 602848 - RNA, 18 nt, Artificial Sequence
  Synthetic
auaauaugaaagcugaug

SEQ ID NO: 602849 - RNA, 19 nt, Artificial Sequence
  Synthetic
aauaauaugaaagcugaug

SEQ ID NO: 602850 - RNA, 20 nt, Artificial Sequence
  Synthetic
uaauaauaugaaagcugaug

SEQ ID NO: 602851 - RNA, 21 nt, Artificial Sequence
  Synthetic
uuaauaauaugaaagcugaug

SEQ ID NO: 602852 - RNA, 22 nt, Artificial Sequence
  Synthetic
uuuaauaauaugaaagcugaug

SEQ ID NO: 602853 - RNA, 23 nt, Artificial Sequence
  Synthetic
guuuaauaauaugaaagcugaug

SEQ ID NO: 602854 - RNA, 24 nt, Artificial Sequence
  Synthetic
aguuuaauaauaugaaagcugaug

SEQ ID NO: 602855 - RNA, 18 nt, Artificial Sequence
  Synthetic
cucccuaagaggcugaug

SEQ ID NO: 602856 - RNA, 19 nt, Artificial Sequence
  Synthetic
ucucccuaagaggcugaug

SEQ ID NO: 602857 - RNA, 20 nt, Artificial Sequence
  Synthetic
gucucccuaagaggcugaug

SEQ ID NO: 602858 - RNA, 21 nt, Artificial Sequence
  Synthetic
agucucccuaagaggcugaug

SEQ ID NO: 602859 - RNA, 22 nt, Artificial Sequence
  Synthetic
aagucucccuaagaggcugaug

SEQ ID NO: 602860 - RNA, 23 nt, Artificial Sequence
  Synthetic
uaagucucccuaagaggcugaug

SEQ ID NO: 602861 - RNA, 24 nt, Artificial Sequence
  Synthetic
uuaagucucccuaagaggcugaug

SEQ ID NO: 602862 - RNA, 18 nt, Artificial Sequence
  Synthetic
cuacuugggaggcugaug

SEQ ID NO: 602863 - RNA, 19 nt, Artificial Sequence
  Synthetic
gcuacuugggaggcugaug

SEQ ID NO: 602864 - RNA, 20 nt, Artificial Sequence
  Synthetic
ggcuacuugggaggcugaug

SEQ ID NO: 602865 - RNA, 21 nt, Artificial Sequence
  Synthetic
uggcuacuugggaggcugaug

SEQ ID NO: 602866 - RNA, 22 nt, Artificial Sequence
  Synthetic
cuggcuacuugggaggcugaug

SEQ ID NO: 602867 - RNA, 23 nt, Artificial Sequence
  Synthetic
ccuggcuacuugggaggcugaug

SEQ ID NO: 602868 - RNA, 24 nt, Artificial Sequence
  Synthetic
accuggcuacuugggaggcugaug

SEQ ID NO: 602869 - RNA, 18 nt, Artificial Sequence
  Synthetic
cagagaaagaugcugaug

SEQ ID NO: 602870 - RNA, 19 nt, Artificial Sequence
  Synthetic
gcagagaaagaugcugaug

SEQ ID NO: 602871 - RNA, 20 nt, Artificial Sequence
  Synthetic
ugcagagaaagaugcugaug

SEQ ID NO: 602872 - RNA, 21 nt, Artificial Sequence
  Synthetic
gugcagagaaagaugcugaug

SEQ ID NO: 602873 - RNA, 22 nt, Artificial Sequence
  Synthetic
ggugcagagaaagaugcugaug

SEQ ID NO: 602874 - RNA, 23 nt, Artificial Sequence
  Synthetic
aggugcagagaaagaugcugaug

SEQ ID NO: 602875 - RNA, 24 nt, Artificial Sequence
  Synthetic
aaggugcagagaaagaugcugaug

SEQ ID NO: 602876 - RNA, 19 nt, Artificial Sequence
  Synthetic
ggagcaacaagugcugaug

SEQ ID NO: 602877 - RNA, 20 nt, Artificial Sequence
  Synthetic
uggagcaacaagugcugaug

SEQ ID NO: 602878 - RNA, 21 nt, Artificial Sequence
  Synthetic
guggagcaacaagugcugaug

SEQ ID NO: 602879 - RNA, 22 nt, Artificial Sequence
  Synthetic
gguggagcaacaagugcugaug

SEQ ID NO: 602880 - RNA, 23 nt, Artificial Sequence
  Synthetic
agguggagcaacaagugcugaug

SEQ ID NO: 602881 - RNA, 24 nt, Artificial Sequence
  Synthetic
aagguggagcaacaagugcugaug

SEQ ID NO: 602882 - RNA, 18 nt, Artificial Sequence
  Synthetic
aaaaaaauagugcugaug

SEQ ID NO: 602883 - RNA, 19 nt, Artificial Sequence
  Synthetic
aaaaaaaauagugcugaug

SEQ ID NO: 602884 - RNA, 20 nt, Artificial Sequence
  Synthetic
aaaaaaaaauagugcugaug

SEQ ID NO: 602885 - RNA, 21 nt, Artificial Sequence
  Synthetic
aaaaaaaaaauagugcugaug

SEQ ID NO: 602886 - RNA, 22 nt, Artificial Sequence
  Synthetic
aaaaaaaaaaauagugcugaug

SEQ ID NO: 602887 - RNA, 23 nt, Artificial Sequence
  Synthetic
aaaaaaaaaaaauagugcugaug

SEQ ID NO: 602888 - RNA, 24 nt, Artificial Sequence
  Synthetic
caaaaaaaaaaaauagugcugaug

SEQ ID NO: 602889 - RNA, 18 nt, Artificial Sequence
  Synthetic
uacaaauggaaucugaug

SEQ ID NO: 602890 - RNA, 19 nt, Artificial Sequence
  Synthetic
auacaaauggaaucugaug

SEQ ID NO: 602891 - RNA, 20 nt, Artificial Sequence
  Synthetic
aauacaaauggaaucugaug

SEQ ID NO: 602892 - RNA, 21 nt, Artificial Sequence
  Synthetic
aaauacaaauggaaucugaug

SEQ ID NO: 602893 - RNA, 22 nt, Artificial Sequence
  Synthetic
caaauacaaauggaaucugaug

SEQ ID NO: 602894 - RNA, 23 nt, Artificial Sequence
  Synthetic
ccaaauacaaauggaaucugaug

SEQ ID NO: 602895 - RNA, 24 nt, Artificial Sequence
  Synthetic
cccaaauacaaauggaaucugaug

SEQ ID NO: 602896 - RNA, 18 nt, Artificial Sequence
  Synthetic
auauaaaaucaucugaug

SEQ ID NO: 602897 - RNA, 19 nt, Artificial Sequence
  Synthetic
aauauaaaaucaucugaug

SEQ ID NO: 602898 - RNA, 20 nt, Artificial Sequence
  Synthetic
aaauauaaaaucaucugaug

SEQ ID NO: 602899 - RNA, 21 nt, Artificial Sequence
  Synthetic
caaauauaaaaucaucugaug

SEQ ID NO: 602900 - RNA, 22 nt, Artificial Sequence
  Synthetic
acaaauauaaaaucaucugaug

SEQ ID NO: 602901 - RNA, 23 nt, Artificial Sequence
  Synthetic
uacaaauauaaaaucaucugaug

SEQ ID NO: 602902 - RNA, 24 nt, Artificial Sequence
  Synthetic
auacaaauauaaaaucaucugaug

SEQ ID NO: 602903 - RNA, 18 nt, Artificial Sequence
  Synthetic
ccauaucuugaucugaug

SEQ ID NO: 602904 - RNA, 19 nt, Artificial Sequence
  Synthetic
accauaucuugaucugaug

SEQ ID NO: 602905 - RNA, 20 nt, Artificial Sequence
  Synthetic
aaccauaucuugaucugaug

SEQ ID NO: 602906 - RNA, 21 nt, Artificial Sequence
  Synthetic
gaaccauaucuugaucugaug

SEQ ID NO: 602907 - RNA, 22 nt, Artificial Sequence
  Synthetic
ggaaccauaucuugaucugaug

SEQ ID NO: 602908 - RNA, 23 nt, Artificial Sequence
  Synthetic
aggaaccauaucuugaucugaug

SEQ ID NO: 602909 - RNA, 24 nt, Artificial Sequence
  Synthetic
gaggaaccauaucuugaucugaug

SEQ ID NO: 602910 - RNA, 18 nt, Artificial Sequence
  Synthetic
cccuaggagauucugaug

SEQ ID NO: 602911 - RNA, 19 nt, Artificial Sequence
  Synthetic
ucccuaggagauucugaug

SEQ ID NO: 602912 - RNA, 20 nt, Artificial Sequence
  Synthetic
cucccuaggagauucugaug

SEQ ID NO: 602913 - RNA, 21 nt, Artificial Sequence
  Synthetic
gcucccuaggagauucugaug

SEQ ID NO: 602914 - RNA, 22 nt, Artificial Sequence
  Synthetic
agcucccuaggagauucugaug

SEQ ID NO: 602915 - RNA, 23 nt, Artificial Sequence
  Synthetic
aagcucccuaggagauucugaug

SEQ ID NO: 602916 - RNA, 24 nt, Artificial Sequence
  Synthetic
caagcucccuaggagauucugaug

SEQ ID NO: 602917 - RNA, 18 nt, Artificial Sequence
  Synthetic
uaacuaauacuucugaug

SEQ ID NO: 602918 - RNA, 19 nt, Artificial Sequence
  Synthetic
auaacuaauacuucugaug

SEQ ID NO: 602919 - RNA, 20 nt, Artificial Sequence
  Synthetic
uauaacuaauacuucugaug

SEQ ID NO: 602920 - RNA, 21 nt, Artificial Sequence
  Synthetic
auauaacuaauacuucugaug

SEQ ID NO: 602921 - RNA, 22 nt, Artificial Sequence
  Synthetic
uauauaacuaauacuucugaug

SEQ ID NO: 602922 - RNA, 23 nt, Artificial Sequence
  Synthetic
auauauaacuaauacuucugaug

SEQ ID NO: 602923 - RNA, 24 nt, Artificial Sequence
  Synthetic
uauauauaacuaauacuucugaug

SEQ ID NO: 602924 - RNA, 21 nt, Artificial Sequence
  Synthetic
uugguguaccugaaagugaug

SEQ ID NO: 602925 - RNA, 22 nt, Artificial Sequence
  Synthetic
auugguguaccugaaagugaug

SEQ ID NO: 602926 - RNA, 23 nt, Artificial Sequence
  Synthetic
gauugguguaccugaaagugaug

SEQ ID NO: 602927 - RNA, 24 nt, Artificial Sequence
  Synthetic
ugauugguguaccugaaagugaug

SEQ ID NO: 602928 - RNA, 18 nt, Artificial Sequence
  Synthetic
auagggugaacagugaug

SEQ ID NO: 602929 - RNA, 19 nt, Artificial Sequence
  Synthetic
aauagggugaacagugaug

SEQ ID NO: 602930 - RNA, 20 nt, Artificial Sequence
  Synthetic
caauagggugaacagugaug

SEQ ID NO: 602931 - RNA, 21 nt, Artificial Sequence
  Synthetic
acaauagggugaacagugaug

SEQ ID NO: 602932 - RNA, 22 nt, Artificial Sequence
  Synthetic
uacaauagggugaacagugaug

SEQ ID NO: 602933 - RNA, 23 nt, Artificial Sequence
  Synthetic
auacaauagggugaacagugaug

SEQ ID NO: 602934 - RNA, 24 nt, Artificial Sequence
  Synthetic
uauacaauagggugaacagugaug

SEQ ID NO: 602935 - RNA, 18 nt, Artificial Sequence
  Synthetic
cucuaaucaccagugaug

SEQ ID NO: 602936 - RNA, 19 nt, Artificial Sequence
  Synthetic
ucucuaaucaccagugaug

SEQ ID NO: 602937 - RNA, 20 nt, Artificial Sequence
  Synthetic
uucucuaaucaccagugaug

SEQ ID NO: 602938 - RNA, 21 nt, Artificial Sequence
  Synthetic
uuucucuaaucaccagugaug

SEQ ID NO: 602939 - RNA, 22 nt, Artificial Sequence
  Synthetic
auuucucuaaucaccagugaug

SEQ ID NO: 602940 - RNA, 23 nt, Artificial Sequence
  Synthetic
cauuucucuaaucaccagugaug

SEQ ID NO: 602941 - RNA, 24 nt, Artificial Sequence
  Synthetic
gcauuucucuaaucaccagugaug

SEQ ID NO: 602942 - RNA, 24 nt, Artificial Sequence
  Synthetic
gcauuucucuaaugaccagugaug

SEQ ID NO: 602943 - RNA, 18 nt, Artificial Sequence
  Synthetic
cucugauggccagugaug

SEQ ID NO: 602944 - RNA, 19 nt, Artificial Sequence
  Synthetic
acucugauggccagugaug

SEQ ID NO: 602945 - RNA, 20 nt, Artificial Sequence
  Synthetic
uacucugauggccagugaug

SEQ ID NO: 602946 - RNA, 21 nt, Artificial Sequence
  Synthetic
uuacucugauggccagugaug

SEQ ID NO: 602947 - RNA, 22 nt, Artificial Sequence
  Synthetic
auuacucugauggccagugaug

SEQ ID NO: 602948 - RNA, 23 nt, Artificial Sequence
  Synthetic
cauuacucugauggccagugaug

SEQ ID NO: 602949 - RNA, 24 nt, Artificial Sequence
  Synthetic
gcauuacucugauggccagugaug

SEQ ID NO: 602950 - RNA, 19 nt, Artificial Sequence
  Synthetic
ucucugauggccagugaug

SEQ ID NO: 602951 - RNA, 20 nt, Artificial Sequence
  Synthetic
gucucugauggccagugaug

SEQ ID NO: 602952 - RNA, 21 nt, Artificial Sequence
  Synthetic
ugucucugauggccagugaug

SEQ ID NO: 602953 - RNA, 22 nt, Artificial Sequence
  Synthetic
augucucugauggccagugaug

SEQ ID NO: 602954 - RNA, 23 nt, Artificial Sequence
  Synthetic
caugucucugauggccagugaug

SEQ ID NO: 602955 - RNA, 24 nt, Artificial Sequence
  Synthetic
gcaugucucugauggccagugaug

SEQ ID NO: 602956 - RNA, 18 nt, Artificial Sequence
  Synthetic
uaagauaugagagugaug

SEQ ID NO: 602957 - RNA, 19 nt, Artificial Sequence
  Synthetic
auaagauaugagagugaug

SEQ ID NO: 602958 - RNA, 20 nt, Artificial Sequence
  Synthetic
gauaagauaugagagugaug

SEQ ID NO: 602959 - RNA, 21 nt, Artificial Sequence
  Synthetic
agauaagauaugagagugaug

SEQ ID NO: 602960 - RNA, 22 nt, Artificial Sequence
  Synthetic
cagauaagauaugagagugaug

SEQ ID NO: 602961 - RNA, 23 nt, Artificial Sequence
  Synthetic
acagauaagauaugagagugaug

SEQ ID NO: 602962 - RNA, 24 nt, Artificial Sequence
  Synthetic
gacagauaagauaugagagugaug

SEQ ID NO: 602963 - RNA, 18 nt, Artificial Sequence
  Synthetic
ggcagaaauggagugaug

SEQ ID NO: 602964 - RNA, 19 nt, Artificial Sequence
  Synthetic
aggcagaaauggagugaug

SEQ ID NO: 602965 - RNA, 20 nt, Artificial Sequence
  Synthetic
caggcagaaauggagugaug

SEQ ID NO: 602966 - RNA, 21 nt, Artificial Sequence
  Synthetic
ucaggcagaaauggagugaug

SEQ ID NO: 602967 - RNA, 22 nt, Artificial Sequence
  Synthetic
cucaggcagaaauggagugaug

SEQ ID NO: 602968 - RNA, 23 nt, Artificial Sequence
  Synthetic
gcucaggcagaaauggagugaug

SEQ ID NO: 602969 - RNA, 24 nt, Artificial Sequence
  Synthetic
agcucaggcagaaauggagugaug

SEQ ID NO: 602970 - RNA, 18 nt, Artificial Sequence
  Synthetic
cucuaaugaugagugaug

SEQ ID NO: 602971 - RNA, 19 nt, Artificial Sequence
  Synthetic
ucucuaaugaugagugaug

SEQ ID NO: 602972 - RNA, 20 nt, Artificial Sequence
  Synthetic
uucucuaaugaugagugaug

SEQ ID NO: 602973 - RNA, 21 nt, Artificial Sequence
  Synthetic
uuucucuaaugaugagugaug

SEQ ID NO: 602974 - RNA, 22 nt, Artificial Sequence
  Synthetic
auuucucuaaugaugagugaug

SEQ ID NO: 602975 - RNA, 23 nt, Artificial Sequence
  Synthetic
cauuucucuaaugaugagugaug

SEQ ID NO: 602976 - RNA, 24 nt, Artificial Sequence
  Synthetic
gcauuucucuaaugaugagugaug

SEQ ID NO: 602977 - RNA, 18 nt, Artificial Sequence
  Synthetic
gcucuuaacugagugaug

SEQ ID NO: 602978 - RNA, 19 nt, Artificial Sequence
  Synthetic
agcucuuaacugagugaug

SEQ ID NO: 602979 - RNA, 20 nt, Artificial Sequence
  Synthetic
aagcucuuaacugagugaug

SEQ ID NO: 602980 - RNA, 21 nt, Artificial Sequence
  Synthetic
gaagcucuuaacugagugaug

SEQ ID NO: 602981 - RNA, 22 nt, Artificial Sequence
  Synthetic
agaagcucuuaacugagugaug

SEQ ID NO: 602982 - RNA, 23 nt, Artificial Sequence
  Synthetic
cagaagcucuuaacugagugaug

SEQ ID NO: 602983 - RNA, 24 nt, Artificial Sequence
  Synthetic
acagaagcucuuaacugagugaug

SEQ ID NO: 602984 - RNA, 18 nt, Artificial Sequence
  Synthetic
cccugaugacuagugaug

SEQ ID NO: 602985 - RNA, 19 nt, Artificial Sequence
  Synthetic
ucccugaugacuagugaug

SEQ ID NO: 602986 - RNA, 20 nt, Artificial Sequence
  Synthetic
uucccugaugacuagugaug

SEQ ID NO: 602987 - RNA, 21 nt, Artificial Sequence
  Synthetic
uuucccugaugacuagugaug

SEQ ID NO: 602988 - RNA, 22 nt, Artificial Sequence
  Synthetic
auuucccugaugacuagugaug

SEQ ID NO: 602989 - RNA, 23 nt, Artificial Sequence
  Synthetic
cauuucccugaugacuagugaug

SEQ ID NO: 602990 - RNA, 24 nt, Artificial Sequence
  Synthetic
gcauuucccugaugacuagugaug

SEQ ID NO: 602991 - RNA, 18 nt, Artificial Sequence
  Synthetic
ggauggucauuagugaug

SEQ ID NO: 602992 - RNA, 19 nt, Artificial Sequence
  Synthetic
gggauggucauuagugaug

SEQ ID NO: 602993 - RNA, 20 nt, Artificial Sequence
  Synthetic
agggauggucauuagugaug

SEQ ID NO: 602994 - RNA, 21 nt, Artificial Sequence
  Synthetic
cagggauggucauuagugaug

SEQ ID NO: 602995 - RNA, 22 nt, Artificial Sequence
  Synthetic
ucagggauggucauuagugaug

SEQ ID NO: 602996 - RNA, 23 nt, Artificial Sequence
  Synthetic
gucagggauggucauuagugaug

SEQ ID NO: 602997 - RNA, 24 nt, Artificial Sequence
  Synthetic
agucagggauggucauuagugaug

SEQ ID NO: 602998 - RNA, 18 nt, Artificial Sequence
  Synthetic
ccccaaugauuagugaug

SEQ ID NO: 602999 - RNA, 19 nt, Artificial Sequence
  Synthetic
uccccaaugauuagugaug

SEQ ID NO: 603000 - RNA, 20 nt, Artificial Sequence
  Synthetic
uuccccaaugauuagugaug

SEQ ID NO: 603001 - RNA, 21 nt, Artificial Sequence
  Synthetic
uuuccccaaugauuagugaug

SEQ ID NO: 603002 - RNA, 22 nt, Artificial Sequence
  Synthetic
auuuccccaaugauuagugaug

SEQ ID NO: 603003 - RNA, 23 nt, Artificial Sequence
  Synthetic
cauuuccccaaugauuagugaug

SEQ ID NO: 603004 - RNA, 24 nt, Artificial Sequence
  Synthetic
gcauuuccccaaugauuagugaug

SEQ ID NO: 603005 - RNA, 18 nt, Artificial Sequence
  Synthetic
uggauauauggcgugaug

SEQ ID NO: 603006 - RNA, 19 nt, Artificial Sequence
  Synthetic
cuggauauauggcgugaug

SEQ ID NO: 603007 - RNA, 20 nt, Artificial Sequence
  Synthetic
ccuggauauauggcgugaug

SEQ ID NO: 603008 - RNA, 21 nt, Artificial Sequence
  Synthetic
accuggauauauggcgugaug

SEQ ID NO: 603009 - RNA, 22 nt, Artificial Sequence
  Synthetic
uaccuggauauauggcgugaug

SEQ ID NO: 603010 - RNA, 23 nt, Artificial Sequence
  Synthetic
uuaccuggauauauggcgugaug

SEQ ID NO: 603011 - RNA, 24 nt, Artificial Sequence
  Synthetic
guuaccuggauauauggcgugaug

SEQ ID NO: 603012 - RNA, 18 nt, Artificial Sequence
  Synthetic
aggguauacugcgugaug

SEQ ID NO: 603013 - RNA, 19 nt, Artificial Sequence
  Synthetic
aaggguauacugcgugaug

SEQ ID NO: 603014 - RNA, 20 nt, Artificial Sequence
  Synthetic
caaggguauacugcgugaug

SEQ ID NO: 603015 - RNA, 21 nt, Artificial Sequence
  Synthetic
acaaggguauacugcgugaug

SEQ ID NO: 603016 - RNA, 22 nt, Artificial Sequence
  Synthetic
uacaaggguauacugcgugaug

SEQ ID NO: 603017 - RNA, 23 nt, Artificial Sequence
  Synthetic
uuacaaggguauacugcgugaug

SEQ ID NO: 603018 - RNA, 24 nt, Artificial Sequence
  Synthetic
guuacaaggguauacugcgugaug

SEQ ID NO: 603019 - RNA, 18 nt, Artificial Sequence
  Synthetic
acaagcuuucaggugaug

SEQ ID NO: 603020 - RNA, 19 nt, Artificial Sequence
  Synthetic
aacaagcuuucaggugaug

SEQ ID NO: 603021 - RNA, 20 nt, Artificial Sequence
  Synthetic
uaacaagcuuucaggugaug

SEQ ID NO: 603022 - RNA, 21 nt, Artificial Sequence
  Synthetic
cuaacaagcuuucaggugaug

SEQ ID NO: 603023 - RNA, 22 nt, Artificial Sequence
  Synthetic
ucuaacaagcuuucaggugaug

SEQ ID NO: 603024 - RNA, 23 nt, Artificial Sequence
  Synthetic
uucuaacaagcuuucaggugaug

SEQ ID NO: 603025 - RNA, 24 nt, Artificial Sequence
  Synthetic
guucuaacaagcuuucaggugaug

SEQ ID NO: 603026 - RNA, 18 nt, Artificial Sequence
  Synthetic
aaauuuauccuugugaug

SEQ ID NO: 603027 - RNA, 19 nt, Artificial Sequence
  Synthetic
aaaauuuauccuugugaug

SEQ ID NO: 603028 - RNA, 20 nt, Artificial Sequence
  Synthetic
uaaaauuuauccuugugaug

SEQ ID NO: 603029 - RNA, 21 nt, Artificial Sequence
  Synthetic
auaaaauuuauccuugugaug

SEQ ID NO: 603030 - RNA, 22 nt, Artificial Sequence
  Synthetic
aauaaaauuuauccuugugaug

SEQ ID NO: 603031 - RNA, 23 nt, Artificial Sequence
  Synthetic
gaauaaaauuuauccuugugaug

SEQ ID NO: 603032 - RNA, 24 nt, Artificial Sequence
  Synthetic
agaauaaaauuuauccuugugaug

SEQ ID NO: 603033 - RNA, 18 nt, Artificial Sequence
  Synthetic
cagaugcggagauugaug

SEQ ID NO: 603034 - RNA, 19 nt, Artificial Sequence
  Synthetic
acagaugcggagauugaug

SEQ ID NO: 603035 - RNA, 20 nt, Artificial Sequence
  Synthetic
cacagaugcggagauugaug

SEQ ID NO: 603036 - RNA, 21 nt, Artificial Sequence
  Synthetic
ucacagaugcggagauugaug

SEQ ID NO: 603037 - RNA, 22 nt, Artificial Sequence
  Synthetic
uucacagaugcggagauugaug

SEQ ID NO: 603038 - RNA, 23 nt, Artificial Sequence
  Synthetic
uuucacagaugcggagauugaug

SEQ ID NO: 603039 - RNA, 24 nt, Artificial Sequence
  Synthetic
auuucacagaugcggagauugaug

SEQ ID NO: 603040 - RNA, 18 nt, Artificial Sequence
  Synthetic
cauaacauaauauugaug

SEQ ID NO: 603041 - RNA, 19 nt, Artificial Sequence
  Synthetic
gcauaacauaauauugaug

SEQ ID NO: 603042 - RNA, 20 nt, Artificial Sequence
  Synthetic
agcauaacauaauauugaug

SEQ ID NO: 603043 - RNA, 21 nt, Artificial Sequence
  Synthetic
uagcauaacauaauauugaug

SEQ ID NO: 603044 - RNA, 22 nt, Artificial Sequence
  Synthetic
cuagcauaacauaauauugaug

SEQ ID NO: 603045 - RNA, 23 nt, Artificial Sequence
  Synthetic
gcuagcauaacauaauauugaug

SEQ ID NO: 603046 - RNA, 24 nt, Artificial Sequence
  Synthetic
agcuagcauaacauaauauugaug

SEQ ID NO: 603047 - RNA, 18 nt, Artificial Sequence
  Synthetic
ccucccuuauuauugaug

SEQ ID NO: 603048 - RNA, 19 nt, Artificial Sequence
  Synthetic
cccucccuuauuauugaug

SEQ ID NO: 603049 - RNA, 20 nt, Artificial Sequence
  Synthetic
ccccucccuuauuauugaug

SEQ ID NO: 603050 - RNA, 21 nt, Artificial Sequence
  Synthetic
cccccucccuuauuauugaug

SEQ ID NO: 603051 - RNA, 22 nt, Artificial Sequence
  Synthetic
gcccccucccuuauuauugaug

SEQ ID NO: 603052 - RNA, 23 nt, Artificial Sequence
  Synthetic
agcccccucccuuauuauugaug

SEQ ID NO: 603053 - RNA, 24 nt, Artificial Sequence
  Synthetic
aagcccccucccuuauuauugaug

SEQ ID NO: 603054 - RNA, 18 nt, Artificial Sequence
  Synthetic
gacuggcaggacuugaug

SEQ ID NO: 603055 - RNA, 19 nt, Artificial Sequence
  Synthetic
ggacuggcaggacuugaug

SEQ ID NO: 603056 - RNA, 20 nt, Artificial Sequence
  Synthetic
aggacuggcaggacuugaug

SEQ ID NO: 603057 - RNA, 21 nt, Artificial Sequence
  Synthetic
aaggacuggcaggacuugaug

SEQ ID NO: 603058 - RNA, 22 nt, Artificial Sequence
  Synthetic
aaaggacuggcaggacuugaug

SEQ ID NO: 603059 - RNA, 23 nt, Artificial Sequence
  Synthetic
uaaaggacuggcaggacuugaug

SEQ ID NO: 603060 - RNA, 24 nt, Artificial Sequence
  Synthetic
auaaaggacuggcaggacuugaug

SEQ ID NO: 603061 - RNA, 18 nt, Artificial Sequence
  Synthetic
uagaggcuacgcuugaug

SEQ ID NO: 603062 - RNA, 19 nt, Artificial Sequence
  Synthetic
auagaggcuacgcuugaug

SEQ ID NO: 603063 - RNA, 20 nt, Artificial Sequence
  Synthetic
uauagaggcuacgcuugaug

SEQ ID NO: 603064 - RNA, 21 nt, Artificial Sequence
  Synthetic
auauagaggcuacgcuugaug

SEQ ID NO: 603065 - RNA, 22 nt, Artificial Sequence
  Synthetic
uauauagaggcuacgcuugaug

SEQ ID NO: 603066 - RNA, 23 nt, Artificial Sequence
  Synthetic
guauauagaggcuacgcuugaug

SEQ ID NO: 603067 - RNA, 24 nt, Artificial Sequence
  Synthetic
aguauauagaggcuacgcuugaug

SEQ ID NO: 603068 - RNA, 18 nt, Artificial Sequence
  Synthetic
uaaaacuacaucuugaug

SEQ ID NO: 603069 - RNA, 19 nt, Artificial Sequence
  Synthetic
guaaaacuacaucuugaug

SEQ ID NO: 603070 - RNA, 20 nt, Artificial Sequence
  Synthetic
aguaaaacuacaucuugaug

SEQ ID NO: 603071 - RNA, 21 nt, Artificial Sequence
  Synthetic
aaguaaaacuacaucuugaug

SEQ ID NO: 603072 - RNA, 22 nt, Artificial Sequence
  Synthetic
uaaguaaaacuacaucuugaug

SEQ ID NO: 603073 - RNA, 23 nt, Artificial Sequence
  Synthetic
auaaguaaaacuacaucuugaug

SEQ ID NO: 603074 - RNA, 24 nt, Artificial Sequence
  Synthetic
aauaaguaaaacuacaucuugaug

SEQ ID NO: 603075 - RNA, 18 nt, Artificial Sequence
  Synthetic
guuuuucaacauuugaug

SEQ ID NO: 603076 - RNA, 19 nt, Artificial Sequence
  Synthetic
aguuuuucaacauuugaug

SEQ ID NO: 603077 - RNA, 20 nt, Artificial Sequence
  Synthetic
aaguuuuucaacauuugaug

SEQ ID NO: 603078 - RNA, 21 nt, Artificial Sequence
  Synthetic
uaaguuuuucaacauuugaug

SEQ ID NO: 603079 - RNA, 22 nt, Artificial Sequence
  Synthetic
auaaguuuuucaacauuugaug

SEQ ID NO: 603080 - RNA, 23 nt, Artificial Sequence
  Synthetic
uauaaguuuuucaacauuugaug

SEQ ID NO: 603081 - RNA, 24 nt, Artificial Sequence
  Synthetic
cuauaaguuuuucaacauuugaug

SEQ ID NO: 603082 - RNA, 18 nt, Artificial Sequence
  Synthetic
agagggagccauuugaug

SEQ ID NO: 603083 - RNA, 19 nt, Artificial Sequence
  Synthetic
gagagggagccauuugaug

SEQ ID NO: 603084 - RNA, 20 nt, Artificial Sequence
  Synthetic
ggagagggagccauuugaug

SEQ ID NO: 603085 - RNA, 21 nt, Artificial Sequence
  Synthetic
aggagagggagccauuugaug

SEQ ID NO: 603086 - RNA, 22 nt, Artificial Sequence
  Synthetic
uaggagagggagccauuugaug

SEQ ID NO: 603087 - RNA, 23 nt, Artificial Sequence
  Synthetic
cuaggagagggagccauuugaug

SEQ ID NO: 603088 - RNA, 24 nt, Artificial Sequence
  Synthetic
ccuaggagagggagccauuugaug

SEQ ID NO: 603089 - RNA, 18 nt, Artificial Sequence
  Synthetic
gcaauuauuacuuugaug

SEQ ID NO: 603090 - RNA, 19 nt, Artificial Sequence
  Synthetic
agcaauuauuacuuugaug

SEQ ID NO: 603091 - RNA, 20 nt, Artificial Sequence
  Synthetic
aagcaauuauuacuuugaug

SEQ ID NO: 603092 - RNA, 21 nt, Artificial Sequence
  Synthetic
uaagcaauuauuacuuugaug

SEQ ID NO: 603093 - RNA, 22 nt, Artificial Sequence
  Synthetic
cuaagcaauuauuacuuugaug

SEQ ID NO: 603094 - RNA, 23 nt, Artificial Sequence
  Synthetic
acuaagcaauuauuacuuugaug

SEQ ID NO: 603095 - RNA, 24 nt, Artificial Sequence
  Synthetic
aacuaagcaauuauuacuuugaug

SEQ ID NO: 603096 - RNA, 18 nt, Artificial Sequence
  Synthetic
agcuaaauugcuuugaug

SEQ ID NO: 603097 - RNA, 19 nt, Artificial Sequence
  Synthetic
aagcuaaauugcuuugaug

SEQ ID NO: 603098 - RNA, 20 nt, Artificial Sequence
  Synthetic
uaagcuaaauugcuuugaug

SEQ ID NO: 603099 - RNA, 21 nt, Artificial Sequence
  Synthetic
auaagcuaaauugcuuugaug

SEQ ID NO: 603100 - RNA, 22 nt, Artificial Sequence
  Synthetic
aauaagcuaaauugcuuugaug

SEQ ID NO: 603101 - RNA, 23 nt, Artificial Sequence
  Synthetic
aaauaagcuaaauugcuuugaug

SEQ ID NO: 603102 - RNA, 24 nt, Artificial Sequence
  Synthetic
gaaauaagcuaaauugcuuugaug

SEQ ID NO: 603103 - RNA, 18 nt, Artificial Sequence
  Synthetic
augaugaugauuuugaug

SEQ ID NO: 603104 - RNA, 19 nt, Artificial Sequence
  Synthetic
gaugaugaugauuuugaug

SEQ ID NO: 603105 - RNA, 20 nt, Artificial Sequence
  Synthetic
ugaugaugaugauuuugaug

SEQ ID NO: 603106 - RNA, 21 nt, Artificial Sequence
  Synthetic
augaugaugaugauuuugaug

SEQ ID NO: 603107 - RNA, 22 nt, Artificial Sequence
  Synthetic
gaugaugaugaugauuuugaug

SEQ ID NO: 603108 - RNA, 23 nt, Artificial Sequence
  Synthetic
ugaugaugaugaugauuuugaug

SEQ ID NO: 603109 - RNA, 24 nt, Artificial Sequence
  Synthetic
uugaugaugaugaugauuuugaug

SEQ ID NO: 603110 - RNA, 18 nt, Artificial Sequence
  Synthetic
ucuuuguauuuuuugaug

SEQ ID NO: 603111 - RNA, 19 nt, Artificial Sequence
  Synthetic
uucuuuguauuuuuugaug

SEQ ID NO: 603112 - RNA, 20 nt, Artificial Sequence
  Synthetic
uuucuuuguauuuuuugaug

SEQ ID NO: 603113 - RNA, 21 nt, Artificial Sequence
  Synthetic
cuuucuuuguauuuuuugaug

SEQ ID NO: 603114 - RNA, 22 nt, Artificial Sequence
  Synthetic
ccuuucuuuguauuuuuugaug

SEQ ID NO: 603115 - RNA, 23 nt, Artificial Sequence
  Synthetic
cccuuucuuuguauuuuuugaug

SEQ ID NO: 603116 - RNA, 24 nt, Artificial Sequence
  Synthetic
ccccuuucuuuguauuuuuugaug

SEQ ID NO: 603117 - RNA, 18 nt, Artificial Sequence
  Synthetic
aaggcacugccaaauaug

SEQ ID NO: 603118 - RNA, 19 nt, Artificial Sequence
  Synthetic
caaggcacugccaaauaug

SEQ ID NO: 603119 - RNA, 20 nt, Artificial Sequence
  Synthetic
ucaaggcacugccaaauaug

SEQ ID NO: 603120 - RNA, 21 nt, Artificial Sequence
  Synthetic
uucaaggcacugccaaauaug

SEQ ID NO: 603121 - RNA, 22 nt, Artificial Sequence
  Synthetic
uuucaaggcacugccaaauaug

SEQ ID NO: 603122 - RNA, 23 nt, Artificial Sequence
  Synthetic
guuucaaggcacugccaaauaug

SEQ ID NO: 603123 - RNA, 24 nt, Artificial Sequence
  Synthetic
uguuucaaggcacugccaaauaug

SEQ ID NO: 603124 - RNA, 18 nt, Artificial Sequence
  Synthetic
accagccuggcaaauaug

SEQ ID NO: 603125 - RNA, 19 nt, Artificial Sequence
  Synthetic
gaccagccuggcaaauaug

SEQ ID NO: 603126 - RNA, 20 nt, Artificial Sequence
  Synthetic
cgaccagccuggcaaauaug

SEQ ID NO: 603127 - RNA, 21 nt, Artificial Sequence
  Synthetic
gcgaccagccuggcaaauaug

SEQ ID NO: 603128 - RNA, 22 nt, Artificial Sequence
  Synthetic
ugcgaccagccuggcaaauaug

SEQ ID NO: 603129 - RNA, 23 nt, Artificial Sequence
  Synthetic
uugcgaccagccuggcaaauaug

SEQ ID NO: 603130 - RNA, 24 nt, Artificial Sequence
  Synthetic
uuugcgaccagccuggcaaauaug

SEQ ID NO: 603131 - RNA, 18 nt, Artificial Sequence
  Synthetic
aaaauacaaagaaauaug

SEQ ID NO: 603132 - RNA, 19 nt, Artificial Sequence
  Synthetic
gaaaauacaaagaaauaug

SEQ ID NO: 603133 - RNA, 20 nt, Artificial Sequence
  Synthetic
agaaaauacaaagaaauaug

SEQ ID NO: 603134 - RNA, 21 nt, Artificial Sequence
  Synthetic
gagaaaauacaaagaaauaug

SEQ ID NO: 603135 - RNA, 22 nt, Artificial Sequence
  Synthetic
agagaaaauacaaagaaauaug

SEQ ID NO: 603136 - RNA, 23 nt, Artificial Sequence
  Synthetic
cagagaaaauacaaagaaauaug

SEQ ID NO: 603137 - RNA, 24 nt, Artificial Sequence
  Synthetic
ucagagaaaauacaaagaaauaug

SEQ ID NO: 603138 - RNA, 18 nt, Artificial Sequence
  Synthetic
auaaaauuaagaaauaug

SEQ ID NO: 603139 - RNA, 19 nt, Artificial Sequence
  Synthetic
uauaaaauuaagaaauaug

SEQ ID NO: 603140 - RNA, 20 nt, Artificial Sequence
  Synthetic
auauaaaauuaagaaauaug

SEQ ID NO: 603141 - RNA, 21 nt, Artificial Sequence
  Synthetic
cauauaaaauuaagaaauaug

SEQ ID NO: 603142 - RNA, 22 nt, Artificial Sequence
  Synthetic
ucauauaaaauuaagaaauaug

SEQ ID NO: 603143 - RNA, 23 nt, Artificial Sequence
  Synthetic
aucauauaaaauuaagaaauaug

SEQ ID NO: 603144 - RNA, 24 nt, Artificial Sequence
  Synthetic
aaucauauaaaauuaagaaauaug

SEQ ID NO: 603145 - RNA, 18 nt, Artificial Sequence
  Synthetic
uguacuuuuugaaauaug

SEQ ID NO: 603146 - RNA, 19 nt, Artificial Sequence
  Synthetic
auguacuuuuugaaauaug

SEQ ID NO: 603147 - RNA, 20 nt, Artificial Sequence
  Synthetic
cauguacuuuuugaaauaug

SEQ ID NO: 603148 - RNA, 21 nt, Artificial Sequence
  Synthetic
ccauguacuuuuugaaauaug

SEQ ID NO: 603149 - RNA, 22 nt, Artificial Sequence
  Synthetic
cccauguacuuuuugaaauaug

SEQ ID NO: 603150 - RNA, 23 nt, Artificial Sequence
  Synthetic
ccccauguacuuuuugaaauaug

SEQ ID NO: 603151 - RNA, 24 nt, Artificial Sequence
  Synthetic
accccauguacuuuuugaaauaug

SEQ ID NO: 603152 - RNA, 18 nt, Artificial Sequence
  Synthetic
gcucuguuccuaaauaug

SEQ ID NO: 603153 - RNA, 19 nt, Artificial Sequence
  Synthetic
agcucuguuccuaaauaug

SEQ ID NO: 603154 - RNA, 20 nt, Artificial Sequence
  Synthetic
aagcucuguuccuaaauaug

SEQ ID NO: 603155 - RNA, 21 nt, Artificial Sequence
  Synthetic
caagcucuguuccuaaauaug

SEQ ID NO: 603156 - RNA, 22 nt, Artificial Sequence
  Synthetic
acaagcucuguuccuaaauaug

SEQ ID NO: 603157 - RNA, 23 nt, Artificial Sequence
  Synthetic
aacaagcucuguuccuaaauaug

SEQ ID NO: 603158 - RNA, 24 nt, Artificial Sequence
  Synthetic
aaacaagcucuguuccuaaauaug

SEQ ID NO: 603159 - RNA, 18 nt, Artificial Sequence
  Synthetic
ccaagccuucacaauaug

SEQ ID NO: 603160 - RNA, 19 nt, Artificial Sequence
  Synthetic
accaagccuucacaauaug

SEQ ID NO: 603161 - RNA, 20 nt, Artificial Sequence
  Synthetic
uaccaagccuucacaauaug

SEQ ID NO: 603162 - RNA, 21 nt, Artificial Sequence
  Synthetic
auaccaagccuucacaauaug

SEQ ID NO: 603163 - RNA, 22 nt, Artificial Sequence
  Synthetic
cauaccaagccuucacaauaug

SEQ ID NO: 603164 - RNA, 23 nt, Artificial Sequence
  Synthetic
acauaccaagccuucacaauaug

SEQ ID NO: 603165 - RNA, 24 nt, Artificial Sequence
  Synthetic
aacauaccaagccuucacaauaug

SEQ ID NO: 603166 - RNA, 18 nt, Artificial Sequence
  Synthetic
aaguacuuacccaauaug

SEQ ID NO: 603167 - RNA, 19 nt, Artificial Sequence
  Synthetic
uaaguacuuacccaauaug

SEQ ID NO: 603168 - RNA, 20 nt, Artificial Sequence
  Synthetic
auaaguacuuacccaauaug

SEQ ID NO: 603169 - RNA, 21 nt, Artificial Sequence
  Synthetic
aauaaguacuuacccaauaug

SEQ ID NO: 603170 - RNA, 22 nt, Artificial Sequence
  Synthetic
caauaaguacuuacccaauaug

SEQ ID NO: 603171 - RNA, 23 nt, Artificial Sequence
  Synthetic
ucaauaaguacuuacccaauaug

SEQ ID NO: 603172 - RNA, 24 nt, Artificial Sequence
  Synthetic
aucaauaaguacuuacccaauaug

SEQ ID NO: 603173 - RNA, 18 nt, Artificial Sequence
  Synthetic
aacagccuggccaauaug

SEQ ID NO: 603174 - RNA, 19 nt, Artificial Sequence
  Synthetic
gaacagccuggccaauaug

SEQ ID NO: 603175 - RNA, 20 nt, Artificial Sequence
  Synthetic
agaacagccuggccaauaug

SEQ ID NO: 603176 - RNA, 21 nt, Artificial Sequence
  Synthetic
gagaacagccuggccaauaug

SEQ ID NO: 603177 - RNA, 22 nt, Artificial Sequence
  Synthetic
cgagaacagccuggccaauaug

SEQ ID NO: 603178 - RNA, 23 nt, Artificial Sequence
  Synthetic
ucgagaacagccuggccaauaug

SEQ ID NO: 603179 - RNA, 24 nt, Artificial Sequence
  Synthetic
cucgagaacagccuggccaauaug

SEQ ID NO: 603180 - RNA, 18 nt, Artificial Sequence
  Synthetic
auagacuugcgcaauaug

SEQ ID NO: 603181 - RNA, 19 nt, Artificial Sequence
  Synthetic
uauagacuugcgcaauaug

SEQ ID NO: 603182 - RNA, 20 nt, Artificial Sequence
  Synthetic
cuauagacuugcgcaauaug

SEQ ID NO: 603183 - RNA, 21 nt, Artificial Sequence
  Synthetic
gcuauagacuugcgcaauaug

SEQ ID NO: 603184 - RNA, 22 nt, Artificial Sequence
  Synthetic
ugcuauagacuugcgcaauaug

SEQ ID NO: 603185 - RNA, 23 nt, Artificial Sequence
  Synthetic
gugcuauagacuugcgcaauaug

SEQ ID NO: 603186 - RNA, 24 nt, Artificial Sequence
  Synthetic
agugcuauagacuugcgcaauaug

SEQ ID NO: 603187 - RNA, 18 nt, Artificial Sequence
  Synthetic
auuugauucugcaauaug

SEQ ID NO: 603188 - RNA, 19 nt, Artificial Sequence
  Synthetic
uauuugauucugcaauaug

SEQ ID NO: 603189 - RNA, 20 nt, Artificial Sequence
  Synthetic
auauuugauucugcaauaug

SEQ ID NO: 603190 - RNA, 21 nt, Artificial Sequence
  Synthetic
uauauuugauucugcaauaug

SEQ ID NO: 603191 - RNA, 22 nt, Artificial Sequence
  Synthetic
uuauauuugauucugcaauaug

SEQ ID NO: 603192 - RNA, 23 nt, Artificial Sequence
  Synthetic
auuauauuugauucugcaauaug

SEQ ID NO: 603193 - RNA, 24 nt, Artificial Sequence
  Synthetic
uauuauauuugauucugcaauaug

SEQ ID NO: 603194 - RNA, 18 nt, Artificial Sequence
  Synthetic
acuuaaauauucaauaug

SEQ ID NO: 603195 - RNA, 19 nt, Artificial Sequence
  Synthetic
aacuuaaauauucaauaug

SEQ ID NO: 603196 - RNA, 20 nt, Artificial Sequence
  Synthetic
caacuuaaauauucaauaug

SEQ ID NO: 603197 - RNA, 21 nt, Artificial Sequence
  Synthetic
acaacuuaaauauucaauaug

SEQ ID NO: 603198 - RNA, 22 nt, Artificial Sequence
  Synthetic
aacaacuuaaauauucaauaug

SEQ ID NO: 603199 - RNA, 23 nt, Artificial Sequence
  Synthetic
aaacaacuuaaauauucaauaug

SEQ ID NO: 603200 - RNA, 24 nt, Artificial Sequence
  Synthetic
gaaacaacuuaaauauucaauaug

SEQ ID NO: 603201 - RNA, 18 nt, Artificial Sequence
  Synthetic
gauuggauaaagaauaug

SEQ ID NO: 603202 - RNA, 19 nt, Artificial Sequence
  Synthetic
ugauuggauaaagaauaug

SEQ ID NO: 603203 - RNA, 20 nt, Artificial Sequence
  Synthetic
augauuggauaaagaauaug

SEQ ID NO: 603204 - RNA, 21 nt, Artificial Sequence
  Synthetic
gaugauuggauaaagaauaug

SEQ ID NO: 603205 - RNA, 22 nt, Artificial Sequence
  Synthetic
agaugauuggauaaagaauaug

SEQ ID NO: 603206 - RNA, 23 nt, Artificial Sequence
  Synthetic
cagaugauuggauaaagaauaug

SEQ ID NO: 603207 - RNA, 24 nt, Artificial Sequence
  Synthetic
acagaugauuggauaaagaauaug

SEQ ID NO: 603208 - RNA, 18 nt, Artificial Sequence
  Synthetic
aaggugauaaagaauaug

SEQ ID NO: 603209 - RNA, 19 nt, Artificial Sequence
  Synthetic
caaggugauaaagaauaug

SEQ ID NO: 603210 - RNA, 20 nt, Artificial Sequence
  Synthetic
acaaggugauaaagaauaug

SEQ ID NO: 603211 - RNA, 21 nt, Artificial Sequence
  Synthetic
uacaaggugauaaagaauaug

SEQ ID NO: 603212 - RNA, 22 nt, Artificial Sequence
  Synthetic
auacaaggugauaaagaauaug

SEQ ID NO: 603213 - RNA, 23 nt, Artificial Sequence
  Synthetic
gauacaaggugauaaagaauaug

SEQ ID NO: 603214 - RNA, 24 nt, Artificial Sequence
  Synthetic
ugauacaaggugauaaagaauaug

SEQ ID NO: 603215 - RNA, 18 nt, Artificial Sequence
  Synthetic
uuguaauccaagaauaug

SEQ ID NO: 603216 - RNA, 19 nt, Artificial Sequence
  Synthetic
uuuguaauccaagaauaug

SEQ ID NO: 603217 - RNA, 20 nt, Artificial Sequence
  Synthetic
auuuguaauccaagaauaug

SEQ ID NO: 603218 - RNA, 21 nt, Artificial Sequence
  Synthetic
gauuuguaauccaagaauaug

SEQ ID NO: 603219 - RNA, 22 nt, Artificial Sequence
  Synthetic
agauuuguaauccaagaauaug

SEQ ID NO: 603220 - RNA, 23 nt, Artificial Sequence
  Synthetic
cagauuuguaauccaagaauaug

SEQ ID NO: 603221 - RNA, 24 nt, Artificial Sequence
  Synthetic
acagauuuguaauccaagaauaug

SEQ ID NO: 603222 - RNA, 18 nt, Artificial Sequence
  Synthetic
aguguuggcaagaauaug

SEQ ID NO: 603223 - RNA, 19 nt, Artificial Sequence
  Synthetic
aaguguuggcaagaauaug

SEQ ID NO: 603224 - RNA, 20 nt, Artificial Sequence
  Synthetic
aaaguguuggcaagaauaug

SEQ ID NO: 603225 - RNA, 21 nt, Artificial Sequence
  Synthetic
aaaaguguuggcaagaauaug

SEQ ID NO: 603226 - RNA, 22 nt, Artificial Sequence
  Synthetic
aaaaaguguuggcaagaauaug

SEQ ID NO: 603227 - RNA, 23 nt, Artificial Sequence
  Synthetic
uaaaaaguguuggcaagaauaug

SEQ ID NO: 603228 - RNA, 24 nt, Artificial Sequence
  Synthetic
auaaaaaguguuggcaagaauaug

SEQ ID NO: 603229 - RNA, 18 nt, Artificial Sequence
  Synthetic
aauuacuuugagaauaug

SEQ ID NO: 603230 - RNA, 19 nt, Artificial Sequence
  Synthetic
aaauuacuuugagaauaug

SEQ ID NO: 603231 - RNA, 20 nt, Artificial Sequence
  Synthetic
gaaauuacuuugagaauaug

SEQ ID NO: 603232 - RNA, 21 nt, Artificial Sequence
  Synthetic
agaaauuacuuugagaauaug

SEQ ID NO: 603233 - RNA, 22 nt, Artificial Sequence
  Synthetic
gagaaauuacuuugagaauaug

SEQ ID NO: 603234 - RNA, 23 nt, Artificial Sequence
  Synthetic
ugagaaauuacuuugagaauaug

SEQ ID NO: 603235 - RNA, 24 nt, Artificial Sequence
  Synthetic
augagaaauuacuuugagaauaug

SEQ ID NO: 603236 - RNA, 18 nt, Artificial Sequence
  Synthetic
acuauaaauaggaauaug

SEQ ID NO: 603237 - RNA, 19 nt, Artificial Sequence
  Synthetic
aacuauaaauaggaauaug

SEQ ID NO: 603238 - RNA, 20 nt, Artificial Sequence
  Synthetic
gaacuauaaauaggaauaug

SEQ ID NO: 603239 - RNA, 21 nt, Artificial Sequence
  Synthetic
ugaacuauaaauaggaauaug

SEQ ID NO: 603240 - RNA, 22 nt, Artificial Sequence
  Synthetic
uugaacuauaaauaggaauaug

SEQ ID NO: 603241 - RNA, 23 nt, Artificial Sequence
  Synthetic
uuugaacuauaaauaggaauaug

SEQ ID NO: 603242 - RNA, 24 nt, Artificial Sequence
  Synthetic
cuuugaacuauaaauaggaauaug

SEQ ID NO: 603243 - RNA, 18 nt, Artificial Sequence
  Synthetic
gugaagugaaugaauaug

SEQ ID NO: 603244 - RNA, 19 nt, Artificial Sequence
  Synthetic
ggugaagugaaugaauaug

SEQ ID NO: 603245 - RNA, 20 nt, Artificial Sequence
  Synthetic
aggugaagugaaugaauaug

SEQ ID NO: 603246 - RNA, 21 nt, Artificial Sequence
  Synthetic
uaggugaagugaaugaauaug

SEQ ID NO: 603247 - RNA, 22 nt, Artificial Sequence
  Synthetic
auaggugaagugaaugaauaug

SEQ ID NO: 603248 - RNA, 23 nt, Artificial Sequence
  Synthetic
uauaggugaagugaaugaauaug

SEQ ID NO: 603249 - RNA, 24 nt, Artificial Sequence
  Synthetic
auauaggugaagugaaugaauaug

SEQ ID NO: 603250 - RNA, 18 nt, Artificial Sequence
  Synthetic
ggaguaaacgugaauaug

SEQ ID NO: 603251 - RNA, 19 nt, Artificial Sequence
  Synthetic
aggaguaaacgugaauaug

SEQ ID NO: 603252 - RNA, 20 nt, Artificial Sequence
  Synthetic
aaggaguaaacgugaauaug

SEQ ID NO: 603253 - RNA, 21 nt, Artificial Sequence
  Synthetic
uaaggaguaaacgugaauaug

SEQ ID NO: 603254 - RNA, 22 nt, Artificial Sequence
  Synthetic
guaaggaguaaacgugaauaug

SEQ ID NO: 603255 - RNA, 23 nt, Artificial Sequence
  Synthetic
aguaaggaguaaacgugaauaug

SEQ ID NO: 603256 - RNA, 24 nt, Artificial Sequence
  Synthetic
aaguaaggaguaaacgugaauaug

SEQ ID NO: 603257 - RNA, 18 nt, Artificial Sequence
  Synthetic
acuauucaaaauaauaug

SEQ ID NO: 603258 - RNA, 19 nt, Artificial Sequence
  Synthetic
cacuauucaaaauaauaug

SEQ ID NO: 603259 - RNA, 20 nt, Artificial Sequence
  Synthetic
gcacuauucaaaauaauaug

SEQ ID NO: 603260 - RNA, 21 nt, Artificial Sequence
  Synthetic
agcacuauucaaaauaauaug

SEQ ID NO: 603261 - RNA, 22 nt, Artificial Sequence
  Synthetic
aagcacuauucaaaauaauaug

SEQ ID NO: 603262 - RNA, 23 nt, Artificial Sequence
  Synthetic
gaagcacuauucaaaauaauaug

SEQ ID NO: 603263 - RNA, 24 nt, Artificial Sequence
  Synthetic
agaagcacuauucaaaauaauaug

SEQ ID NO: 603264 - RNA, 18 nt, Artificial Sequence
  Synthetic
uuuuaaaaugauaauaug

SEQ ID NO: 603265 - RNA, 19 nt, Artificial Sequence
  Synthetic
auuuuaaaaugauaauaug

SEQ ID NO: 603266 - RNA, 20 nt, Artificial Sequence
  Synthetic
aauuuuaaaaugauaauaug

SEQ ID NO: 603267 - RNA, 21 nt, Artificial Sequence
  Synthetic
aaauuuuaaaaugauaauaug

SEQ ID NO: 603268 - RNA, 22 nt, Artificial Sequence
  Synthetic
uaaauuuuaaaaugauaauaug

SEQ ID NO: 603269 - RNA, 23 nt, Artificial Sequence
  Synthetic
guaaauuuuaaaaugauaauaug

SEQ ID NO: 603270 - RNA, 24 nt, Artificial Sequence
  Synthetic
aguaaauuuuaaaaugauaauaug

SEQ ID NO: 603271 - RNA, 18 nt, Artificial Sequence
  Synthetic
aggcuuugugauaauaug

SEQ ID NO: 603272 - RNA, 19 nt, Artificial Sequence
  Synthetic
uaggcuuugugauaauaug

SEQ ID NO: 603273 - RNA, 20 nt, Artificial Sequence
  Synthetic
guaggcuuugugauaauaug

SEQ ID NO: 603274 - RNA, 21 nt, Artificial Sequence
  Synthetic
aguaggcuuugugauaauaug

SEQ ID NO: 603275 - RNA, 22 nt, Artificial Sequence
  Synthetic
caguaggcuuugugauaauaug

SEQ ID NO: 603276 - RNA, 23 nt, Artificial Sequence
  Synthetic
ucaguaggcuuugugauaauaug

SEQ ID NO: 603277 - RNA, 24 nt, Artificial Sequence
  Synthetic
aucaguaggcuuugugauaauaug

SEQ ID NO: 603278 - RNA, 18 nt, Artificial Sequence
  Synthetic
agauaacaaccuaauaug

SEQ ID NO: 603279 - RNA, 19 nt, Artificial Sequence
  Synthetic
aagauaacaaccuaauaug

SEQ ID NO: 603280 - RNA, 20 nt, Artificial Sequence
  Synthetic
uaagauaacaaccuaauaug

SEQ ID NO: 603281 - RNA, 21 nt, Artificial Sequence
  Synthetic
cuaagauaacaaccuaauaug

SEQ ID NO: 603282 - RNA, 22 nt, Artificial Sequence
  Synthetic
ucuaagauaacaaccuaauaug

SEQ ID NO: 603283 - RNA, 23 nt, Artificial Sequence
  Synthetic
aucuaagauaacaaccuaauaug

SEQ ID NO: 603284 - RNA, 24 nt, Artificial Sequence
  Synthetic
aaucuaagauaacaaccuaauaug

SEQ ID NO: 603285 - RNA, 18 nt, Artificial Sequence
  Synthetic
auuuggaguuuuaauaug

SEQ ID NO: 603286 - RNA, 19 nt, Artificial Sequence
  Synthetic
gauuuggaguuuuaauaug

SEQ ID NO: 603287 - RNA, 20 nt, Artificial Sequence
  Synthetic
agauuuggaguuuuaauaug

SEQ ID NO: 603288 - RNA, 21 nt, Artificial Sequence
  Synthetic
uagauuuggaguuuuaauaug

SEQ ID NO: 603289 - RNA, 22 nt, Artificial Sequence
  Synthetic
cuagauuuggaguuuuaauaug

SEQ ID NO: 603290 - RNA, 23 nt, Artificial Sequence
  Synthetic
ccuagauuuggaguuuuaauaug

SEQ ID NO: 603291 - RNA, 24 nt, Artificial Sequence
  Synthetic
accuagauuuggaguuuuaauaug

SEQ ID NO: 603292 - RNA, 18 nt, Artificial Sequence
  Synthetic
gggaaguaugaacauaug

SEQ ID NO: 603293 - RNA, 19 nt, Artificial Sequence
  Synthetic
agggaaguaugaacauaug

SEQ ID NO: 603294 - RNA, 20 nt, Artificial Sequence
  Synthetic
aagggaaguaugaacauaug

SEQ ID NO: 603295 - RNA, 21 nt, Artificial Sequence
  Synthetic
aaagggaaguaugaacauaug

SEQ ID NO: 603296 - RNA, 22 nt, Artificial Sequence
  Synthetic
caaagggaaguaugaacauaug

SEQ ID NO: 603297 - RNA, 23 nt, Artificial Sequence
  Synthetic
gcaaagggaaguaugaacauaug

SEQ ID NO: 603298 - RNA, 24 nt, Artificial Sequence
  Synthetic
ggcaaagggaaguaugaacauaug

SEQ ID NO: 603299 - RNA, 18 nt, Artificial Sequence
  Synthetic
uugauauuaucacauaug

SEQ ID NO: 603300 - RNA, 19 nt, Artificial Sequence
  Synthetic
uuugauauuaucacauaug

SEQ ID NO: 603301 - RNA, 20 nt, Artificial Sequence
  Synthetic
guuugauauuaucacauaug

SEQ ID NO: 603302 - RNA, 21 nt, Artificial Sequence
  Synthetic
uguuugauauuaucacauaug

SEQ ID NO: 603303 - RNA, 22 nt, Artificial Sequence
  Synthetic
cuguuugauauuaucacauaug

SEQ ID NO: 603304 - RNA, 23 nt, Artificial Sequence
  Synthetic
ucuguuugauauuaucacauaug

SEQ ID NO: 603305 - RNA, 24 nt, Artificial Sequence
  Synthetic
aucuguuugauauuaucacauaug

SEQ ID NO: 603306 - RNA, 18 nt, Artificial Sequence
  Synthetic
aaagauuguagacauaug

SEQ ID NO: 603307 - RNA, 19 nt, Artificial Sequence
  Synthetic
caaagauuguagacauaug

SEQ ID NO: 603308 - RNA, 20 nt, Artificial Sequence
  Synthetic
ccaaagauuguagacauaug

SEQ ID NO: 603309 - RNA, 21 nt, Artificial Sequence
  Synthetic
accaaagauuguagacauaug

SEQ ID NO: 603310 - RNA, 22 nt, Artificial Sequence
  Synthetic
gaccaaagauuguagacauaug

SEQ ID NO: 603311 - RNA, 23 nt, Artificial Sequence
  Synthetic
agaccaaagauuguagacauaug

SEQ ID NO: 603312 - RNA, 24 nt, Artificial Sequence
  Synthetic
cagaccaaagauuguagacauaug

SEQ ID NO: 603313 - RNA, 18 nt, Artificial Sequence
  Synthetic
ccuuucugccaccauaug

SEQ ID NO: 603314 - RNA, 19 nt, Artificial Sequence
  Synthetic
uccuuucugccaccauaug

SEQ ID NO: 603315 - RNA, 20 nt, Artificial Sequence
  Synthetic
cuccuuucugccaccauaug

SEQ ID NO: 603316 - RNA, 21 nt, Artificial Sequence
  Synthetic
ucuccuuucugccaccauaug

SEQ ID NO: 603317 - RNA, 22 nt, Artificial Sequence
  Synthetic
uucuccuuucugccaccauaug

SEQ ID NO: 603318 - RNA, 23 nt, Artificial Sequence
  Synthetic
cuucuccuuucugccaccauaug

SEQ ID NO: 603319 - RNA, 24 nt, Artificial Sequence
  Synthetic
acuucuccuuucugccaccauaug

SEQ ID NO: 603320 - RNA, 18 nt, Artificial Sequence
  Synthetic
uggcugguuagccauaug

SEQ ID NO: 603321 - RNA, 19 nt, Artificial Sequence
  Synthetic
auggcugguuagccauaug

SEQ ID NO: 603322 - RNA, 20 nt, Artificial Sequence
  Synthetic
gauggcugguuagccauaug

SEQ ID NO: 603323 - RNA, 21 nt, Artificial Sequence
  Synthetic
ggauggcugguuagccauaug

SEQ ID NO: 603324 - RNA, 22 nt, Artificial Sequence
  Synthetic
gggauggcugguuagccauaug

SEQ ID NO: 603325 - RNA, 23 nt, Artificial Sequence
  Synthetic
ugggauggcugguuagccauaug

SEQ ID NO: 603326 - RNA, 24 nt, Artificial Sequence
  Synthetic
cugggauggcugguuagccauaug

SEQ ID NO: 603327 - RNA, 18 nt, Artificial Sequence
  Synthetic
aaacuggcuggccauaug

SEQ ID NO: 603328 - RNA, 19 nt, Artificial Sequence
  Synthetic
aaaacuggcuggccauaug

SEQ ID NO: 603329 - RNA, 20 nt, Artificial Sequence
  Synthetic
gaaaacuggcuggccauaug

SEQ ID NO: 603330 - RNA, 21 nt, Artificial Sequence
  Synthetic
ggaaaacuggcuggccauaug

SEQ ID NO: 603331 - RNA, 22 nt, Artificial Sequence
  Synthetic
gggaaaacuggcuggccauaug

SEQ ID NO: 603332 - RNA, 23 nt, Artificial Sequence
  Synthetic
cgggaaaacuggcuggccauaug

SEQ ID NO: 603333 - RNA, 24 nt, Artificial Sequence
  Synthetic
ucgggaaaacuggcuggccauaug

SEQ ID NO: 603334 - RNA, 18 nt, Artificial Sequence
  Synthetic
auuugguaaaagcauaug

SEQ ID NO: 603335 - RNA, 19 nt, Artificial Sequence
  Synthetic
aauuugguaaaagcauaug

SEQ ID NO: 603336 - RNA, 20 nt, Artificial Sequence
  Synthetic
uaauuugguaaaagcauaug

SEQ ID NO: 603337 - RNA, 21 nt, Artificial Sequence
  Synthetic
uuaauuugguaaaagcauaug

SEQ ID NO: 603338 - RNA, 22 nt, Artificial Sequence
  Synthetic
auuaauuugguaaaagcauaug

SEQ ID NO: 603339 - RNA, 23 nt, Artificial Sequence
  Synthetic
gauuaauuugguaaaagcauaug

SEQ ID NO: 603340 - RNA, 24 nt, Artificial Sequence
  Synthetic
agauuaauuugguaaaagcauaug

SEQ ID NO: 603341 - RNA, 18 nt, Artificial Sequence
  Synthetic
uaagaacacaagcauaug

SEQ ID NO: 603342 - RNA, 19 nt, Artificial Sequence
  Synthetic
auaagaacacaagcauaug

SEQ ID NO: 603343 - RNA, 20 nt, Artificial Sequence
  Synthetic
aauaagaacacaagcauaug

SEQ ID NO: 603344 - RNA, 21 nt, Artificial Sequence
  Synthetic
uaauaagaacacaagcauaug

SEQ ID NO: 603345 - RNA, 22 nt, Artificial Sequence
  Synthetic
cuaauaagaacacaagcauaug

SEQ ID NO: 603346 - RNA, 23 nt, Artificial Sequence
  Synthetic
gcuaauaagaacacaagcauaug

SEQ ID NO: 603347 - RNA, 24 nt, Artificial Sequence
  Synthetic
ugcuaauaagaacacaagcauaug

SEQ ID NO: 603348 - RNA, 18 nt, Artificial Sequence
  Synthetic
uuguuguaugugcauaug

SEQ ID NO: 603349 - RNA, 19 nt, Artificial Sequence
  Synthetic
uuuguuguaugugcauaug

SEQ ID NO: 603350 - RNA, 20 nt, Artificial Sequence
  Synthetic
auuuguuguaugugcauaug

SEQ ID NO: 603351 - RNA, 21 nt, Artificial Sequence
  Synthetic
uauuuguuguaugugcauaug

SEQ ID NO: 603352 - RNA, 22 nt, Artificial Sequence
  Synthetic
guauuuguuguaugugcauaug

SEQ ID NO: 603353 - RNA, 23 nt, Artificial Sequence
  Synthetic
aguauuuguuguaugugcauaug

SEQ ID NO: 603354 - RNA, 24 nt, Artificial Sequence
  Synthetic
caguauuuguuguaugugcauaug

SEQ ID NO: 603355 - RNA, 18 nt, Artificial Sequence
  Synthetic
gcauuggaauugcauaug

SEQ ID NO: 603356 - RNA, 19 nt, Artificial Sequence
  Synthetic
ggcauuggaauugcauaug

SEQ ID NO: 603357 - RNA, 20 nt, Artificial Sequence
  Synthetic
aggcauuggaauugcauaug

SEQ ID NO: 603358 - RNA, 21 nt, Artificial Sequence
  Synthetic
caggcauuggaauugcauaug

SEQ ID NO: 603359 - RNA, 22 nt, Artificial Sequence
  Synthetic
ucaggcauuggaauugcauaug

SEQ ID NO: 603360 - RNA, 23 nt, Artificial Sequence
  Synthetic
gucaggcauuggaauugcauaug

SEQ ID NO: 603361 - RNA, 24 nt, Artificial Sequence
  Synthetic
ugucaggcauuggaauugcauaug

SEQ ID NO: 603362 - RNA, 18 nt, Artificial Sequence
  Synthetic
cuucuuguuuugcauaug

SEQ ID NO: 603363 - RNA, 19 nt, Artificial Sequence
  Synthetic
ccuucuuguuuugcauaug

SEQ ID NO: 603364 - RNA, 20 nt, Artificial Sequence
  Synthetic
accuucuuguuuugcauaug

SEQ ID NO: 603365 - RNA, 21 nt, Artificial Sequence
  Synthetic
aaccuucuuguuuugcauaug

SEQ ID NO: 603366 - RNA, 22 nt, Artificial Sequence
  Synthetic
caaccuucuuguuuugcauaug

SEQ ID NO: 603367 - RNA, 23 nt, Artificial Sequence
  Synthetic
ucaaccuucuuguuuugcauaug

SEQ ID NO: 603368 - RNA, 24 nt, Artificial Sequence
  Synthetic
uucaaccuucuuguuuugcauaug

SEQ ID NO: 603369 - RNA, 18 nt, Artificial Sequence
  Synthetic
aaacuggcuagucauaug

SEQ ID NO: 603370 - RNA, 19 nt, Artificial Sequence
  Synthetic
aaaacuggcuagucauaug

SEQ ID NO: 603371 - RNA, 20 nt, Artificial Sequence
  Synthetic
gaaaacuggcuagucauaug

SEQ ID NO: 603372 - RNA, 21 nt, Artificial Sequence
  Synthetic
ggaaaacuggcuagucauaug

SEQ ID NO: 603373 - RNA, 22 nt, Artificial Sequence
  Synthetic
gggaaaacuggcuagucauaug

SEQ ID NO: 603374 - RNA, 23 nt, Artificial Sequence
  Synthetic
ugggaaaacuggcuagucauaug

SEQ ID NO: 603375 - RNA, 24 nt, Artificial Sequence
  Synthetic
uugggaaaacuggcuagucauaug

SEQ ID NO: 603376 - RNA, 18 nt, Artificial Sequence
  Synthetic
cucaaccccauucauaug

SEQ ID NO: 603377 - RNA, 19 nt, Artificial Sequence
  Synthetic
ccucaaccccauucauaug

SEQ ID NO: 603378 - RNA, 20 nt, Artificial Sequence
  Synthetic
uccucaaccccauucauaug

SEQ ID NO: 603379 - RNA, 21 nt, Artificial Sequence
  Synthetic
cuccucaaccccauucauaug

SEQ ID NO: 603380 - RNA, 22 nt, Artificial Sequence
  Synthetic
ucuccucaaccccauucauaug

SEQ ID NO: 603381 - RNA, 23 nt, Artificial Sequence
  Synthetic
gucuccucaaccccauucauaug

SEQ ID NO: 603382 - RNA, 24 nt, Artificial Sequence
  Synthetic
ggucuccucaaccccauucauaug

SEQ ID NO: 603383 - RNA, 18 nt, Artificial Sequence
  Synthetic
ggaaagacaccagauaug

SEQ ID NO: 603384 - RNA, 19 nt, Artificial Sequence
  Synthetic
uggaaagacaccagauaug

SEQ ID NO: 603385 - RNA, 20 nt, Artificial Sequence
  Synthetic
uuggaaagacaccagauaug

SEQ ID NO: 603386 - RNA, 21 nt, Artificial Sequence
  Synthetic
uuuggaaagacaccagauaug

SEQ ID NO: 603387 - RNA, 22 nt, Artificial Sequence
  Synthetic
guuuggaaagacaccagauaug

SEQ ID NO: 603388 - RNA, 23 nt, Artificial Sequence
  Synthetic
uguuuggaaagacaccagauaug

SEQ ID NO: 603389 - RNA, 24 nt, Artificial Sequence
  Synthetic
cuguuuggaaagacaccagauaug

SEQ ID NO: 603390 - RNA, 18 nt, Artificial Sequence
  Synthetic
gaacccuaugcagauaug

SEQ ID NO: 603391 - RNA, 19 nt, Artificial Sequence
  Synthetic
agaacccuaugcagauaug

SEQ ID NO: 603392 - RNA, 20 nt, Artificial Sequence
  Synthetic
aagaacccuaugcagauaug

SEQ ID NO: 603393 - RNA, 21 nt, Artificial Sequence
  Synthetic
gaagaacccuaugcagauaug

SEQ ID NO: 603394 - RNA, 22 nt, Artificial Sequence
  Synthetic
agaagaacccuaugcagauaug

SEQ ID NO: 603395 - RNA, 23 nt, Artificial Sequence
  Synthetic
cagaagaacccuaugcagauaug

SEQ ID NO: 603396 - RNA, 24 nt, Artificial Sequence
  Synthetic
gcagaagaacccuaugcagauaug

SEQ ID NO: 603397 - RNA, 18 nt, Artificial Sequence
  Synthetic
uauauauauauagauaug

SEQ ID NO: 603398 - RNA, 19 nt, Artificial Sequence
  Synthetic
cuauauauauauagauaug

SEQ ID NO: 603399 - RNA, 20 nt, Artificial Sequence
  Synthetic
ucuauauauauauagauaug

SEQ ID NO: 603400 - RNA, 21 nt, Artificial Sequence
  Synthetic
aucuauauauauauagauaug

SEQ ID NO: 603401 - RNA, 22 nt, Artificial Sequence
  Synthetic
caucuauauauauauagauaug

SEQ ID NO: 603402 - RNA, 23 nt, Artificial Sequence
  Synthetic
acaucuauauauauauagauaug

SEQ ID NO: 603403 - RNA, 24 nt, Artificial Sequence
  Synthetic
uacaucuauauauauauagauaug

SEQ ID NO: 603404 - RNA, 18 nt, Artificial Sequence
  Synthetic
ccaacagccaaggauaug

SEQ ID NO: 603405 - RNA, 19 nt, Artificial Sequence
  Synthetic
accaacagccaaggauaug

SEQ ID NO: 603406 - RNA, 20 nt, Artificial Sequence
  Synthetic
gaccaacagccaaggauaug

SEQ ID NO: 603407 - RNA, 21 nt, Artificial Sequence
  Synthetic
ggaccaacagccaaggauaug

SEQ ID NO: 603408 - RNA, 22 nt, Artificial Sequence
  Synthetic
uggaccaacagccaaggauaug

SEQ ID NO: 603409 - RNA, 23 nt, Artificial Sequence
  Synthetic
uuggaccaacagccaaggauaug

SEQ ID NO: 603410 - RNA, 24 nt, Artificial Sequence
  Synthetic
cuuggaccaacagccaaggauaug

SEQ ID NO: 603411 - RNA, 18 nt, Artificial Sequence
  Synthetic
aguggaaauggggauaug

SEQ ID NO: 603412 - RNA, 19 nt, Artificial Sequence
  Synthetic
uaguggaaauggggauaug

SEQ ID NO: 603413 - RNA, 20 nt, Artificial Sequence
  Synthetic
auaguggaaauggggauaug

SEQ ID NO: 603414 - RNA, 21 nt, Artificial Sequence
  Synthetic
uauaguggaaauggggauaug

SEQ ID NO: 603415 - RNA, 22 nt, Artificial Sequence
  Synthetic
cuauaguggaaauggggauaug

SEQ ID NO: 603416 - RNA, 23 nt, Artificial Sequence
  Synthetic
ccuauaguggaaauggggauaug

SEQ ID NO: 603417 - RNA, 24 nt, Artificial Sequence
  Synthetic
accuauaguggaaauggggauaug

SEQ ID NO: 603418 - RNA, 18 nt, Artificial Sequence
  Synthetic
uuccaguugugggauaug

SEQ ID NO: 603419 - RNA, 19 nt, Artificial Sequence
  Synthetic
cuuccaguugugggauaug

SEQ ID NO: 603420 - RNA, 20 nt, Artificial Sequence
  Synthetic
ucuuccaguugugggauaug

SEQ ID NO: 603421 - RNA, 21 nt, Artificial Sequence
  Synthetic
uucuuccaguugugggauaug

SEQ ID NO: 603422 - RNA, 22 nt, Artificial Sequence
  Synthetic
uuucuuccaguugugggauaug

SEQ ID NO: 603423 - RNA, 23 nt, Artificial Sequence
  Synthetic
guuucuuccaguugugggauaug

SEQ ID NO: 603424 - RNA, 24 nt, Artificial Sequence
  Synthetic
uguuucuuccaguugugggauaug

SEQ ID NO: 603425 - RNA, 18 nt, Artificial Sequence
  Synthetic
gacuucaacauggauaug

SEQ ID NO: 603426 - RNA, 19 nt, Artificial Sequence
  Synthetic
agacuucaacauggauaug

SEQ ID NO: 603427 - RNA, 20 nt, Artificial Sequence
  Synthetic
uagacuucaacauggauaug

SEQ ID NO: 603428 - RNA, 21 nt, Artificial Sequence
  Synthetic
cuagacuucaacauggauaug

SEQ ID NO: 603429 - RNA, 22 nt, Artificial Sequence
  Synthetic
ccuagacuucaacauggauaug

SEQ ID NO: 603430 - RNA, 23 nt, Artificial Sequence
  Synthetic
accuagacuucaacauggauaug

SEQ ID NO: 603431 - RNA, 24 nt, Artificial Sequence
  Synthetic
gaccuagacuucaacauggauaug

SEQ ID NO: 603432 - RNA, 18 nt, Artificial Sequence
  Synthetic
auagauuaacuugauaug

SEQ ID NO: 603433 - RNA, 19 nt, Artificial Sequence
  Synthetic
cauagauuaacuugauaug

SEQ ID NO: 603434 - RNA, 20 nt, Artificial Sequence
  Synthetic
acauagauuaacuugauaug

SEQ ID NO: 603435 - RNA, 21 nt, Artificial Sequence
  Synthetic
aacauagauuaacuugauaug

SEQ ID NO: 603436 - RNA, 22 nt, Artificial Sequence
  Synthetic
gaacauagauuaacuugauaug

SEQ ID NO: 603437 - RNA, 23 nt, Artificial Sequence
  Synthetic
ugaacauagauuaacuugauaug

SEQ ID NO: 603438 - RNA, 24 nt, Artificial Sequence
  Synthetic
uugaacauagauuaacuugauaug

SEQ ID NO: 603439 - RNA, 18 nt, Artificial Sequence
  Synthetic
gacuggauauuugauaug

SEQ ID NO: 603440 - RNA, 19 nt, Artificial Sequence
  Synthetic
ggacuggauauuugauaug

SEQ ID NO: 603441 - RNA, 20 nt, Artificial Sequence
  Synthetic
uggacuggauauuugauaug

SEQ ID NO: 603442 - RNA, 21 nt, Artificial Sequence
  Synthetic
auggacuggauauuugauaug

SEQ ID NO: 603443 - RNA, 22 nt, Artificial Sequence
  Synthetic
uauggacuggauauuugauaug

SEQ ID NO: 603444 - RNA, 23 nt, Artificial Sequence
  Synthetic
auauggacuggauauuugauaug

SEQ ID NO: 603445 - RNA, 24 nt, Artificial Sequence
  Synthetic
aauauggacuggauauuugauaug

SEQ ID NO: 603446 - RNA, 18 nt, Artificial Sequence
  Synthetic
aaaagcaagaaauauaug

SEQ ID NO: 603447 - RNA, 19 nt, Artificial Sequence
  Synthetic
caaaagcaagaaauauaug

SEQ ID NO: 603448 - RNA, 20 nt, Artificial Sequence
  Synthetic
acaaaagcaagaaauauaug

SEQ ID NO: 603449 - RNA, 21 nt, Artificial Sequence
  Synthetic
gacaaaagcaagaaauauaug

SEQ ID NO: 603450 - RNA, 22 nt, Artificial Sequence
  Synthetic
agacaaaagcaagaaauauaug

SEQ ID NO: 603451 - RNA, 23 nt, Artificial Sequence
  Synthetic
uagacaaaagcaagaaauauaug

SEQ ID NO: 603452 - RNA, 24 nt, Artificial Sequence
  Synthetic
cuagacaaaagcaagaaauauaug

SEQ ID NO: 603453 - RNA, 18 nt, Artificial Sequence
  Synthetic
uagggaggccaauauaug

SEQ ID NO: 603454 - RNA, 19 nt, Artificial Sequence
  Synthetic
uuagggaggccaauauaug

SEQ ID NO: 603455 - RNA, 20 nt, Artificial Sequence
  Synthetic
auuagggaggccaauauaug

SEQ ID NO: 603456 - RNA, 21 nt, Artificial Sequence
  Synthetic
cauuagggaggccaauauaug

SEQ ID NO: 603457 - RNA, 22 nt, Artificial Sequence
  Synthetic
ccauuagggaggccaauauaug

SEQ ID NO: 603458 - RNA, 23 nt, Artificial Sequence
  Synthetic
cccauuagggaggccaauauaug

SEQ ID NO: 603459 - RNA, 24 nt, Artificial Sequence
  Synthetic
ucccauuagggaggccaauauaug

SEQ ID NO: 603460 - RNA, 18 nt, Artificial Sequence
  Synthetic
gaauucuuucaauauaug

SEQ ID NO: 603461 - RNA, 19 nt, Artificial Sequence
  Synthetic
agaauucuuucaauauaug

SEQ ID NO: 603462 - RNA, 20 nt, Artificial Sequence
  Synthetic
cagaauucuuucaauauaug

SEQ ID NO: 603463 - RNA, 21 nt, Artificial Sequence
  Synthetic
ucagaauucuuucaauauaug

SEQ ID NO: 603464 - RNA, 22 nt, Artificial Sequence
  Synthetic
uucagaauucuuucaauauaug

SEQ ID NO: 603465 - RNA, 23 nt, Artificial Sequence
  Synthetic
auucagaauucuuucaauauaug

SEQ ID NO: 603466 - RNA, 24 nt, Artificial Sequence
  Synthetic
uauucagaauucuuucaauauaug

SEQ ID NO: 603467 - RNA, 18 nt, Artificial Sequence
  Synthetic
accauaaacacauauaug

SEQ ID NO: 603468 - RNA, 19 nt, Artificial Sequence
  Synthetic
caccauaaacacauauaug

SEQ ID NO: 603469 - RNA, 20 nt, Artificial Sequence
  Synthetic
gcaccauaaacacauauaug

SEQ ID NO: 603470 - RNA, 21 nt, Artificial Sequence
  Synthetic
agcaccauaaacacauauaug

SEQ ID NO: 603471 - RNA, 22 nt, Artificial Sequence
  Synthetic
gagcaccauaaacacauauaug

SEQ ID NO: 603472 - RNA, 23 nt, Artificial Sequence
  Synthetic
ggagcaccauaaacacauauaug

SEQ ID NO: 603473 - RNA, 24 nt, Artificial Sequence
  Synthetic
gggagcaccauaaacacauauaug

SEQ ID NO: 603474 - RNA, 18 nt, Artificial Sequence
  Synthetic
cuguagaaaacguauaug

SEQ ID NO: 603475 - RNA, 19 nt, Artificial Sequence
  Synthetic
ccuguagaaaacguauaug

SEQ ID NO: 603476 - RNA, 20 nt, Artificial Sequence
  Synthetic
uccuguagaaaacguauaug

SEQ ID NO: 603477 - RNA, 21 nt, Artificial Sequence
  Synthetic
uuccuguagaaaacguauaug

SEQ ID NO: 603478 - RNA, 22 nt, Artificial Sequence
  Synthetic
uuuccuguagaaaacguauaug

SEQ ID NO: 603479 - RNA, 23 nt, Artificial Sequence
  Synthetic
uuuuccuguagaaaacguauaug

SEQ ID NO: 603480 - RNA, 24 nt, Artificial Sequence
  Synthetic
uuuuuccuguagaaaacguauaug

SEQ ID NO: 603481 - RNA, 18 nt, Artificial Sequence
  Synthetic
aauggauaaggguauaug

SEQ ID NO: 603482 - RNA, 19 nt, Artificial Sequence
  Synthetic
aaauggauaaggguauaug

SEQ ID NO: 603483 - RNA, 20 nt, Artificial Sequence
  Synthetic
gaaauggauaaggguauaug

SEQ ID NO: 603484 - RNA, 21 nt, Artificial Sequence
  Synthetic
agaaauggauaaggguauaug

SEQ ID NO: 603485 - RNA, 22 nt, Artificial Sequence
  Synthetic
aagaaauggauaaggguauaug

SEQ ID NO: 603486 - RNA, 23 nt, Artificial Sequence
  Synthetic
aaagaaauggauaaggguauaug

SEQ ID NO: 603487 - RNA, 24 nt, Artificial Sequence
  Synthetic
gaaagaaauggauaaggguauaug

SEQ ID NO: 603488 - RNA, 18 nt, Artificial Sequence
  Synthetic
cauguguguggguauaug

SEQ ID NO: 603489 - RNA, 19 nt, Artificial Sequence
  Synthetic
ccauguguguggguauaug

SEQ ID NO: 603490 - RNA, 20 nt, Artificial Sequence
  Synthetic
cccauguguguggguauaug

SEQ ID NO: 603491 - RNA, 21 nt, Artificial Sequence
  Synthetic
gcccauguguguggguauaug

SEQ ID NO: 603492 - RNA, 22 nt, Artificial Sequence
  Synthetic
ugcccauguguguggguauaug

SEQ ID NO: 603493 - RNA, 23 nt, Artificial Sequence
  Synthetic
augcccauguguguggguauaug

SEQ ID NO: 603494 - RNA, 24 nt, Artificial Sequence
  Synthetic
caugcccauguguguggguauaug

SEQ ID NO: 603495 - RNA, 18 nt, Artificial Sequence
  Synthetic
aauaauacacauuauaug

SEQ ID NO: 603496 - RNA, 19 nt, Artificial Sequence
  Synthetic
gaauaauacacauuauaug

SEQ ID NO: 603497 - RNA, 20 nt, Artificial Sequence
  Synthetic
ugaauaauacacauuauaug

SEQ ID NO: 603498 - RNA, 21 nt, Artificial Sequence
  Synthetic
augaauaauacacauuauaug

SEQ ID NO: 603499 - RNA, 22 nt, Artificial Sequence
  Synthetic
uaugaauaauacacauuauaug

SEQ ID NO: 603500 - RNA, 23 nt, Artificial Sequence
  Synthetic
auaugaauaauacacauuauaug

SEQ ID NO: 603501 - RNA, 24 nt, Artificial Sequence
  Synthetic
uauaugaauaauacacauuauaug

SEQ ID NO: 603502 - RNA, 18 nt, Artificial Sequence
  Synthetic
aauugggcaguuuauaug

SEQ ID NO: 603503 - RNA, 19 nt, Artificial Sequence
  Synthetic
gaauugggcaguuuauaug

SEQ ID NO: 603504 - RNA, 20 nt, Artificial Sequence
  Synthetic
ggaauugggcaguuuauaug

SEQ ID NO: 603505 - RNA, 21 nt, Artificial Sequence
  Synthetic
gggaauugggcaguuuauaug

SEQ ID NO: 603506 - RNA, 22 nt, Artificial Sequence
  Synthetic
ugggaauugggcaguuuauaug

SEQ ID NO: 603507 - RNA, 23 nt, Artificial Sequence
  Synthetic
gugggaauugggcaguuuauaug

SEQ ID NO: 603508 - RNA, 24 nt, Artificial Sequence
  Synthetic
agugggaauugggcaguuuauaug

SEQ ID NO: 603509 - RNA, 18 nt, Artificial Sequence
  Synthetic
uucuagaaaacaacuaug

SEQ ID NO: 603510 - RNA, 19 nt, Artificial Sequence
  Synthetic
uuucuagaaaacaacuaug

SEQ ID NO: 603511 - RNA, 20 nt, Artificial Sequence
  Synthetic
cuuucuagaaaacaacuaug

SEQ ID NO: 603512 - RNA, 21 nt, Artificial Sequence
  Synthetic
ucuuucuagaaaacaacuaug

SEQ ID NO: 603513 - RNA, 22 nt, Artificial Sequence
  Synthetic
uucuuucuagaaaacaacuaug

SEQ ID NO: 603514 - RNA, 23 nt, Artificial Sequence
  Synthetic
uuucuuucuagaaaacaacuaug

SEQ ID NO: 603515 - RNA, 24 nt, Artificial Sequence
  Synthetic
guuucuuucuagaaaacaacuaug

SEQ ID NO: 603516 - RNA, 18 nt, Artificial Sequence
  Synthetic
uaacagugacuaacuaug

SEQ ID NO: 603517 - RNA, 19 nt, Artificial Sequence
  Synthetic
guaacagugacuaacuaug

SEQ ID NO: 603518 - RNA, 20 nt, Artificial Sequence
  Synthetic
aguaacagugacuaacuaug

SEQ ID NO: 603519 - RNA, 21 nt, Artificial Sequence
  Synthetic
aaguaacagugacuaacuaug

SEQ ID NO: 603520 - RNA, 22 nt, Artificial Sequence
  Synthetic
uaaguaacagugacuaacuaug

SEQ ID NO: 603521 - RNA, 23 nt, Artificial Sequence
  Synthetic
uuaaguaacagugacuaacuaug

SEQ ID NO: 603522 - RNA, 24 nt, Artificial Sequence
  Synthetic
uuuaaguaacagugacuaacuaug

SEQ ID NO: 603523 - RNA, 18 nt, Artificial Sequence
  Synthetic
uauaagauaaacacuaug

SEQ ID NO: 603524 - RNA, 19 nt, Artificial Sequence
  Synthetic
cuauaagauaaacacuaug

SEQ ID NO: 603525 - RNA, 20 nt, Artificial Sequence
  Synthetic
acuauaagauaaacacuaug

SEQ ID NO: 603526 - RNA, 21 nt, Artificial Sequence
  Synthetic
cacuauaagauaaacacuaug

SEQ ID NO: 603527 - RNA, 22 nt, Artificial Sequence
  Synthetic
ucacuauaagauaaacacuaug

SEQ ID NO: 603528 - RNA, 23 nt, Artificial Sequence
  Synthetic
uucacuauaagauaaacacuaug

SEQ ID NO: 603529 - RNA, 24 nt, Artificial Sequence
  Synthetic
auucacuauaagauaaacacuaug

SEQ ID NO: 603530 - RNA, 18 nt, Artificial Sequence
  Synthetic
uuuauugaauacacuaug

SEQ ID NO: 603531 - RNA, 19 nt, Artificial Sequence
  Synthetic
auuuauugaauacacuaug

SEQ ID NO: 603532 - RNA, 20 nt, Artificial Sequence
  Synthetic
aauuuauugaauacacuaug

SEQ ID NO: 603533 - RNA, 21 nt, Artificial Sequence
  Synthetic
uaauuuauugaauacacuaug

SEQ ID NO: 603534 - RNA, 22 nt, Artificial Sequence
  Synthetic
auaauuuauugaauacacuaug

SEQ ID NO: 603535 - RNA, 23 nt, Artificial Sequence
  Synthetic
aauaauuuauugaauacacuaug

SEQ ID NO: 603536 - RNA, 24 nt, Artificial Sequence
  Synthetic
uaauaauuuauugaauacacuaug

SEQ ID NO: 603537 - RNA, 18 nt, Artificial Sequence
  Synthetic
auuagcacaaccacuaug

SEQ ID NO: 603538 - RNA, 19 nt, Artificial Sequence
  Synthetic
aauuagcacaaccacuaug

SEQ ID NO: 603539 - RNA, 20 nt, Artificial Sequence
  Synthetic
aaauuagcacaaccacuaug

SEQ ID NO: 603540 - RNA, 21 nt, Artificial Sequence
  Synthetic
uaaauuagcacaaccacuaug

SEQ ID NO: 603541 - RNA, 22 nt, Artificial Sequence
  Synthetic
guaaauuagcacaaccacuaug

SEQ ID NO: 603542 - RNA, 23 nt, Artificial Sequence
  Synthetic
uguaaauuagcacaaccacuaug

SEQ ID NO: 603543 - RNA, 24 nt, Artificial Sequence
  Synthetic
auguaaauuagcacaaccacuaug

SEQ ID NO: 603544 - RNA, 18 nt, Artificial Sequence
  Synthetic
agacgggguuucacuaug

SEQ ID NO: 603545 - RNA, 19 nt, Artificial Sequence
  Synthetic
gagacgggguuucacuaug

SEQ ID NO: 603546 - RNA, 20 nt, Artificial Sequence
  Synthetic
agagacgggguuucacuaug

SEQ ID NO: 603547 - RNA, 21 nt, Artificial Sequence
  Synthetic
uagagacgggguuucacuaug

SEQ ID NO: 603548 - RNA, 22 nt, Artificial Sequence
  Synthetic
guagagacgggguuucacuaug

SEQ ID NO: 603549 - RNA, 23 nt, Artificial Sequence
  Synthetic
aguagagacgggguuucacuaug

SEQ ID NO: 603550 - RNA, 24 nt, Artificial Sequence
  Synthetic
uaguagagacgggguuucacuaug

SEQ ID NO: 603551 - RNA, 18 nt, Artificial Sequence
  Synthetic
uaaccucauaugacuaug

SEQ ID NO: 603552 - RNA, 19 nt, Artificial Sequence
  Synthetic
cuaaccucauaugacuaug

SEQ ID NO: 603553 - RNA, 20 nt, Artificial Sequence
  Synthetic
ucuaaccucauaugacuaug

SEQ ID NO: 603554 - RNA, 21 nt, Artificial Sequence
  Synthetic
uucuaaccucauaugacuaug

SEQ ID NO: 603555 - RNA, 22 nt, Artificial Sequence
  Synthetic
guucuaaccucauaugacuaug

SEQ ID NO: 603556 - RNA, 23 nt, Artificial Sequence
  Synthetic
aguucuaaccucauaugacuaug

SEQ ID NO: 603557 - RNA, 24 nt, Artificial Sequence
  Synthetic
caguucuaaccucauaugacuaug

SEQ ID NO: 603558 - RNA, 18 nt, Artificial Sequence
  Synthetic
uuuuuaaaaaauacuaug

SEQ ID NO: 603559 - RNA, 19 nt, Artificial Sequence
  Synthetic
guuuuuaaaaaauacuaug

SEQ ID NO: 603560 - RNA, 20 nt, Artificial Sequence
  Synthetic
gguuuuuaaaaaauacuaug

SEQ ID NO: 603561 - RNA, 21 nt, Artificial Sequence
  Synthetic
cgguuuuuaaaaaauacuaug

SEQ ID NO: 603562 - RNA, 22 nt, Artificial Sequence
  Synthetic
acgguuuuuaaaaaauacuaug

SEQ ID NO: 603563 - RNA, 23 nt, Artificial Sequence
  Synthetic
uacgguuuuuaaaaaauacuaug

SEQ ID NO: 603564 - RNA, 24 nt, Artificial Sequence
  Synthetic
auacgguuuuuaaaaaauacuaug

SEQ ID NO: 603565 - RNA, 18 nt, Artificial Sequence
  Synthetic
caggucugugauacuaug

SEQ ID NO: 603566 - RNA, 19 nt, Artificial Sequence
  Synthetic
gcaggucugugauacuaug

SEQ ID NO: 603567 - RNA, 20 nt, Artificial Sequence
  Synthetic
ugcaggucugugauacuaug

SEQ ID NO: 603568 - RNA, 21 nt, Artificial Sequence
  Synthetic
uugcaggucugugauacuaug

SEQ ID NO: 603569 - RNA, 22 nt, Artificial Sequence
  Synthetic
cuugcaggucugugauacuaug

SEQ ID NO: 603570 - RNA, 23 nt, Artificial Sequence
  Synthetic
gcuugcaggucugugauacuaug

SEQ ID NO: 603571 - RNA, 24 nt, Artificial Sequence
  Synthetic
ugcuugcaggucugugauacuaug

SEQ ID NO: 603572 - RNA, 18 nt, Artificial Sequence
  Synthetic
cuaucccuuacuacuaug

SEQ ID NO: 603573 - RNA, 19 nt, Artificial Sequence
  Synthetic
ccuaucccuuacuacuaug

SEQ ID NO: 603574 - RNA, 20 nt, Artificial Sequence
  Synthetic
uccuaucccuuacuacuaug

SEQ ID NO: 603575 - RNA, 21 nt, Artificial Sequence
  Synthetic
uuccuaucccuuacuacuaug

SEQ ID NO: 603576 - RNA, 22 nt, Artificial Sequence
  Synthetic
uuuccuaucccuuacuacuaug

SEQ ID NO: 603577 - RNA, 23 nt, Artificial Sequence
  Synthetic
uuuuccuaucccuuacuacuaug

SEQ ID NO: 603578 - RNA, 24 nt, Artificial Sequence
  Synthetic
auuuuccuaucccuuacuacuaug

SEQ ID NO: 603579 - RNA, 18 nt, Artificial Sequence
  Synthetic
cauaaagaugaaccuaug

SEQ ID NO: 603580 - RNA, 19 nt, Artificial Sequence
  Synthetic
gcauaaagaugaaccuaug

SEQ ID NO: 603581 - RNA, 20 nt, Artificial Sequence
  Synthetic
agcauaaagaugaaccuaug

SEQ ID NO: 603582 - RNA, 21 nt, Artificial Sequence
  Synthetic
uagcauaaagaugaaccuaug

SEQ ID NO: 603583 - RNA, 22 nt, Artificial Sequence
  Synthetic
guagcauaaagaugaaccuaug

SEQ ID NO: 603584 - RNA, 23 nt, Artificial Sequence
  Synthetic
gguagcauaaagaugaaccuaug

SEQ ID NO: 603585 - RNA, 24 nt, Artificial Sequence
  Synthetic
agguagcauaaagaugaaccuaug

SEQ ID NO: 603586 - RNA, 18 nt, Artificial Sequence
  Synthetic
auuuuuugcuaaccuaug

SEQ ID NO: 603587 - RNA, 19 nt, Artificial Sequence
  Synthetic
cauuuuuugcuaaccuaug

SEQ ID NO: 603588 - RNA, 20 nt, Artificial Sequence
  Synthetic
ccauuuuuugcuaaccuaug

SEQ ID NO: 603589 - RNA, 21 nt, Artificial Sequence
  Synthetic
accauuuuuugcuaaccuaug

SEQ ID NO: 603590 - RNA, 22 nt, Artificial Sequence
  Synthetic
uaccauuuuuugcuaaccuaug

SEQ ID NO: 603591 - RNA, 23 nt, Artificial Sequence
  Synthetic
guaccauuuuuugcuaaccuaug

SEQ ID NO: 603592 - RNA, 24 nt, Artificial Sequence
  Synthetic
aguaccauuuuuugcuaaccuaug

SEQ ID NO: 603593 - RNA, 18 nt, Artificial Sequence
  Synthetic
aguggauuuguaccuaug

SEQ ID NO: 603594 - RNA, 19 nt, Artificial Sequence
  Synthetic
aaguggauuuguaccuaug

SEQ ID NO: 603595 - RNA, 20 nt, Artificial Sequence
  Synthetic
caaguggauuuguaccuaug

SEQ ID NO: 603596 - RNA, 21 nt, Artificial Sequence
  Synthetic
gcaaguggauuuguaccuaug

SEQ ID NO: 603597 - RNA, 22 nt, Artificial Sequence
  Synthetic
ggcaaguggauuuguaccuaug

SEQ ID NO: 603598 - RNA, 23 nt, Artificial Sequence
  Synthetic
aggcaaguggauuuguaccuaug

SEQ ID NO: 603599 - RNA, 24 nt, Artificial Sequence
  Synthetic
aaggcaaguggauuuguaccuaug

SEQ ID NO: 603600 - RNA, 18 nt, Artificial Sequence
  Synthetic
uuuagaguaaacccuaug

SEQ ID NO: 603601 - RNA, 19 nt, Artificial Sequence
  Synthetic
cuuuagaguaaacccuaug

SEQ ID NO: 603602 - RNA, 20 nt, Artificial Sequence
  Synthetic
gcuuuagaguaaacccuaug

SEQ ID NO: 603603 - RNA, 21 nt, Artificial Sequence
  Synthetic
ugcuuuagaguaaacccuaug

SEQ ID NO: 603604 - RNA, 22 nt, Artificial Sequence
  Synthetic
uugcuuuagaguaaacccuaug

SEQ ID NO: 603605 - RNA, 23 nt, Artificial Sequence
  Synthetic
guugcuuuagaguaaacccuaug

SEQ ID NO: 603606 - RNA, 24 nt, Artificial Sequence
  Synthetic
uguugcuuuagaguaaacccuaug

SEQ ID NO: 603607 - RNA, 18 nt, Artificial Sequence
  Synthetic
cccccucaaauuccuaug

SEQ ID NO: 603608 - RNA, 19 nt, Artificial Sequence
  Synthetic
ccccccucaaauuccuaug

SEQ ID NO: 603609 - RNA, 20 nt, Artificial Sequence
  Synthetic
uccccccucaaauuccuaug

SEQ ID NO: 603610 - RNA, 21 nt, Artificial Sequence
  Synthetic
guccccccucaaauuccuaug

SEQ ID NO: 603611 - RNA, 22 nt, Artificial Sequence
  Synthetic
uguccccccucaaauuccuaug

SEQ ID NO: 603612 - RNA, 23 nt, Artificial Sequence
  Synthetic
guguccccccucaaauuccuaug

SEQ ID NO: 603613 - RNA, 24 nt, Artificial Sequence
  Synthetic
uguguccccccucaaauuccuaug

SEQ ID NO: 603614 - RNA, 18 nt, Artificial Sequence
  Synthetic
agcuccuucauuccuaug

SEQ ID NO: 603615 - RNA, 19 nt, Artificial Sequence
  Synthetic
cagcuccuucauuccuaug

SEQ ID NO: 603616 - RNA, 20 nt, Artificial Sequence
  Synthetic
ucagcuccuucauuccuaug

SEQ ID NO: 603617 - RNA, 21 nt, Artificial Sequence
  Synthetic
gucagcuccuucauuccuaug

SEQ ID NO: 603618 - RNA, 22 nt, Artificial Sequence
  Synthetic
ugucagcuccuucauuccuaug

SEQ ID NO: 603619 - RNA, 23 nt, Artificial Sequence
  Synthetic
uugucagcuccuucauuccuaug

SEQ ID NO: 603620 - RNA, 24 nt, Artificial Sequence
  Synthetic
uuugucagcuccuucauuccuaug

SEQ ID NO: 603621 - RNA, 18 nt, Artificial Sequence
  Synthetic
uaaaucgguccagcuaug

SEQ ID NO: 603622 - RNA, 19 nt, Artificial Sequence
  Synthetic
auaaaucgguccagcuaug

SEQ ID NO: 603623 - RNA, 20 nt, Artificial Sequence
  Synthetic
uauaaaucgguccagcuaug

SEQ ID NO: 603624 - RNA, 21 nt, Artificial Sequence
  Synthetic
uuauaaaucgguccagcuaug

SEQ ID NO: 603625 - RNA, 22 nt, Artificial Sequence
  Synthetic
uuuauaaaucgguccagcuaug

SEQ ID NO: 603626 - RNA, 23 nt, Artificial Sequence
  Synthetic
guuuauaaaucgguccagcuaug

SEQ ID NO: 603627 - RNA, 24 nt, Artificial Sequence
  Synthetic
gguuuauaaaucgguccagcuaug

SEQ ID NO: 603628 - RNA, 18 nt, Artificial Sequence
  Synthetic
ucaacacuuuuagcuaug

SEQ ID NO: 603629 - RNA, 19 nt, Artificial Sequence
  Synthetic
cucaacacuuuuagcuaug

SEQ ID NO: 603630 - RNA, 20 nt, Artificial Sequence
  Synthetic
acucaacacuuuuagcuaug

SEQ ID NO: 603631 - RNA, 21 nt, Artificial Sequence
  Synthetic
uacucaacacuuuuagcuaug

SEQ ID NO: 603632 - RNA, 22 nt, Artificial Sequence
  Synthetic
uuacucaacacuuuuagcuaug

SEQ ID NO: 603633 - RNA, 23 nt, Artificial Sequence
  Synthetic
auuacucaacacuuuuagcuaug

SEQ ID NO: 603634 - RNA, 24 nt, Artificial Sequence
  Synthetic
aauuacucaacacuuuuagcuaug

SEQ ID NO: 603635 - RNA, 18 nt, Artificial Sequence
  Synthetic
gucaaaggagaggcuaug

SEQ ID NO: 603636 - RNA, 19 nt, Artificial Sequence
  Synthetic
ugucaaaggagaggcuaug

SEQ ID NO: 603637 - RNA, 20 nt, Artificial Sequence
  Synthetic
gugucaaaggagaggcuaug

SEQ ID NO: 603638 - RNA, 21 nt, Artificial Sequence
  Synthetic
ggugucaaaggagaggcuaug

SEQ ID NO: 603639 - RNA, 22 nt, Artificial Sequence
  Synthetic
aggugucaaaggagaggcuaug

SEQ ID NO: 603640 - RNA, 23 nt, Artificial Sequence
  Synthetic
caggugucaaaggagaggcuaug

SEQ ID NO: 603641 - RNA, 24 nt, Artificial Sequence
  Synthetic
ccaggugucaaaggagaggcuaug

SEQ ID NO: 603642 - RNA, 18 nt, Artificial Sequence
  Synthetic
agcuugaaauuggcuaug

SEQ ID NO: 603643 - RNA, 19 nt, Artificial Sequence
  Synthetic
uagcuugaaauuggcuaug

SEQ ID NO: 603644 - RNA, 20 nt, Artificial Sequence
  Synthetic
guagcuugaaauuggcuaug

SEQ ID NO: 603645 - RNA, 21 nt, Artificial Sequence
  Synthetic
gguagcuugaaauuggcuaug

SEQ ID NO: 603646 - RNA, 22 nt, Artificial Sequence
  Synthetic
ugguagcuugaaauuggcuaug

SEQ ID NO: 603647 - RNA, 23 nt, Artificial Sequence
  Synthetic
cugguagcuugaaauuggcuaug

SEQ ID NO: 603648 - RNA, 24 nt, Artificial Sequence
  Synthetic
acugguagcuugaaauuggcuaug

SEQ ID NO: 603649 - RNA, 18 nt, Artificial Sequence
  Synthetic
auguauauguaugcuaug

SEQ ID NO: 603650 - RNA, 19 nt, Artificial Sequence
  Synthetic
uauguauauguaugcuaug

SEQ ID NO: 603651 - RNA, 20 nt, Artificial Sequence
  Synthetic
auauguauauguaugcuaug

SEQ ID NO: 603652 - RNA, 21 nt, Artificial Sequence
  Synthetic
uauauguauauguaugcuaug

SEQ ID NO: 603653 - RNA, 22 nt, Artificial Sequence
  Synthetic
auauauguauauguaugcuaug

SEQ ID NO: 603654 - RNA, 23 nt, Artificial Sequence
  Synthetic
uauauauguauauguaugcuaug

SEQ ID NO: 603655 - RNA, 24 nt, Artificial Sequence
  Synthetic
auauauauguauauguaugcuaug

SEQ ID NO: 603656 - RNA, 18 nt, Artificial Sequence
  Synthetic
cguucucaugcugcuaug

SEQ ID NO: 603657 - RNA, 19 nt, Artificial Sequence
  Synthetic
ccguucucaugcugcuaug

SEQ ID NO: 603658 - RNA, 20 nt, Artificial Sequence
  Synthetic
uccguucucaugcugcuaug

SEQ ID NO: 603659 - RNA, 21 nt, Artificial Sequence
  Synthetic
guccguucucaugcugcuaug

SEQ ID NO: 603660 - RNA, 22 nt, Artificial Sequence
  Synthetic
aguccguucucaugcugcuaug

SEQ ID NO: 603661 - RNA, 23 nt, Artificial Sequence
  Synthetic
uaguccguucucaugcugcuaug

SEQ ID NO: 603662 - RNA, 24 nt, Artificial Sequence
  Synthetic
uuaguccguucucaugcugcuaug

SEQ ID NO: 603663 - RNA, 18 nt, Artificial Sequence
  Synthetic
uguucucaugcugcuaug

SEQ ID NO: 603664 - RNA, 19 nt, Artificial Sequence
  Synthetic
cuguucucaugcugcuaug

SEQ ID NO: 603665 - RNA, 20 nt, Artificial Sequence
  Synthetic
ucuguucucaugcugcuaug

SEQ ID NO: 603666 - RNA, 21 nt, Artificial Sequence
  Synthetic
gucuguucucaugcugcuaug

SEQ ID NO: 603667 - RNA, 22 nt, Artificial Sequence
  Synthetic
agucuguucucaugcugcuaug

SEQ ID NO: 603668 - RNA, 23 nt, Artificial Sequence
  Synthetic
uagucuguucucaugcugcuaug

SEQ ID NO: 603669 - RNA, 24 nt, Artificial Sequence
  Synthetic
uuagucuguucucaugcugcuaug

SEQ ID NO: 603670 - RNA, 18 nt, Artificial Sequence
  Synthetic
gguucuggaaaaucuaug

SEQ ID NO: 603671 - RNA, 19 nt, Artificial Sequence
  Synthetic
agguucuggaaaaucuaug

SEQ ID NO: 603672 - RNA, 20 nt, Artificial Sequence
  Synthetic
uagguucuggaaaaucuaug

SEQ ID NO: 603673 - RNA, 21 nt, Artificial Sequence
  Synthetic
cuagguucuggaaaaucuaug

SEQ ID NO: 603674 - RNA, 22 nt, Artificial Sequence
  Synthetic
ucuagguucuggaaaaucuaug

SEQ ID NO: 603675 - RNA, 23 nt, Artificial Sequence
  Synthetic
aucuagguucuggaaaaucuaug

SEQ ID NO: 603676 - RNA, 24 nt, Artificial Sequence
  Synthetic
gaucuagguucuggaaaaucuaug

SEQ ID NO: 603677 - RNA, 18 nt, Artificial Sequence
  Synthetic
uggcucagagaaucuaug

SEQ ID NO: 603678 - RNA, 19 nt, Artificial Sequence
  Synthetic
uuggcucagagaaucuaug

SEQ ID NO: 603679 - RNA, 20 nt, Artificial Sequence
  Synthetic
cuuggcucagagaaucuaug

SEQ ID NO: 603680 - RNA, 21 nt, Artificial Sequence
  Synthetic
ucuuggcucagagaaucuaug

SEQ ID NO: 603681 - RNA, 22 nt, Artificial Sequence
  Synthetic
cucuuggcucagagaaucuaug

SEQ ID NO: 603682 - RNA, 23 nt, Artificial Sequence
  Synthetic
ucucuuggcucagagaaucuaug

SEQ ID NO: 603683 - RNA, 24 nt, Artificial Sequence
  Synthetic
uucucuuggcucagagaaucuaug

SEQ ID NO: 603684 - RNA, 18 nt, Artificial Sequence
  Synthetic
gaacaagaaucaucuaug

SEQ ID NO: 603685 - RNA, 19 nt, Artificial Sequence
  Synthetic
agaacaagaaucaucuaug

SEQ ID NO: 603686 - RNA, 20 nt, Artificial Sequence
  Synthetic
aagaacaagaaucaucuaug

SEQ ID NO: 603687 - RNA, 21 nt, Artificial Sequence
  Synthetic
gaagaacaagaaucaucuaug

SEQ ID NO: 603688 - RNA, 22 nt, Artificial Sequence
  Synthetic
ugaagaacaagaaucaucuaug

SEQ ID NO: 603689 - RNA, 23 nt, Artificial Sequence
  Synthetic
cugaagaacaagaaucaucuaug

SEQ ID NO: 603690 - RNA, 24 nt, Artificial Sequence
  Synthetic
acugaagaacaagaaucaucuaug

SEQ ID NO: 603691 - RNA, 18 nt, Artificial Sequence
  Synthetic
uccacuuacagaucuaug

SEQ ID NO: 603692 - RNA, 19 nt, Artificial Sequence
  Synthetic
uuccacuuacagaucuaug

SEQ ID NO: 603693 - RNA, 20 nt, Artificial Sequence
  Synthetic
auuccacuuacagaucuaug

SEQ ID NO: 603694 - RNA, 21 nt, Artificial Sequence
  Synthetic
uauuccacuuacagaucuaug

SEQ ID NO: 603695 - RNA, 22 nt, Artificial Sequence
  Synthetic
auauuccacuuacagaucuaug

SEQ ID NO: 603696 - RNA, 23 nt, Artificial Sequence
  Synthetic
uauauuccacuuacagaucuaug

SEQ ID NO: 603697 - RNA, 24 nt, Artificial Sequence
  Synthetic
auauauuccacuuacagaucuaug

SEQ ID NO: 603698 - RNA, 18 nt, Artificial Sequence
  Synthetic
acacagagaggaucuaug

SEQ ID NO: 603699 - RNA, 19 nt, Artificial Sequence
  Synthetic
uacacagagaggaucuaug

SEQ ID NO: 603700 - RNA, 20 nt, Artificial Sequence
  Synthetic
uuacacagagaggaucuaug

SEQ ID NO: 603701 - RNA, 21 nt, Artificial Sequence
  Synthetic
cuuacacagagaggaucuaug

SEQ ID NO: 603702 - RNA, 22 nt, Artificial Sequence
  Synthetic
ucuuacacagagaggaucuaug

SEQ ID NO: 603703 - RNA, 23 nt, Artificial Sequence
  Synthetic
gucuuacacagagaggaucuaug

SEQ ID NO: 603704 - RNA, 24 nt, Artificial Sequence
  Synthetic
ugucuuacacagagaggaucuaug

SEQ ID NO: 603705 - RNA, 18 nt, Artificial Sequence
  Synthetic
ugguuccuucacucuaug

SEQ ID NO: 603706 - RNA, 19 nt, Artificial Sequence
  Synthetic
cugguuccuucacucuaug

SEQ ID NO: 603707 - RNA, 20 nt, Artificial Sequence
  Synthetic
ccugguuccuucacucuaug

SEQ ID NO: 603708 - RNA, 21 nt, Artificial Sequence
  Synthetic
cccugguuccuucacucuaug

SEQ ID NO: 603709 - RNA, 22 nt, Artificial Sequence
  Synthetic
ucccugguuccuucacucuaug

SEQ ID NO: 603710 - RNA, 23 nt, Artificial Sequence
  Synthetic
aucccugguuccuucacucuaug

SEQ ID NO: 603711 - RNA, 24 nt, Artificial Sequence
  Synthetic
aaucccugguuccuucacucuaug

SEQ ID NO: 603712 - RNA, 18 nt, Artificial Sequence
  Synthetic
augaccacugggucuaug

SEQ ID NO: 603713 - RNA, 19 nt, Artificial Sequence
  Synthetic
aaugaccacugggucuaug

SEQ ID NO: 603714 - RNA, 20 nt, Artificial Sequence
  Synthetic
aaaugaccacugggucuaug

SEQ ID NO: 603715 - RNA, 21 nt, Artificial Sequence
  Synthetic
uaaaugaccacugggucuaug

SEQ ID NO: 603716 - RNA, 22 nt, Artificial Sequence
  Synthetic
cuaaaugaccacugggucuaug

SEQ ID NO: 603717 - RNA, 23 nt, Artificial Sequence
  Synthetic
acuaaaugaccacugggucuaug

SEQ ID NO: 603718 - RNA, 24 nt, Artificial Sequence
  Synthetic
uacuaaaugaccacugggucuaug

SEQ ID NO: 603719 - RNA, 18 nt, Artificial Sequence
  Synthetic
ucucccuuuaauucuaug

SEQ ID NO: 603720 - RNA, 19 nt, Artificial Sequence
  Synthetic
aucucccuuuaauucuaug

SEQ ID NO: 603721 - RNA, 20 nt, Artificial Sequence
  Synthetic
aaucucccuuuaauucuaug

SEQ ID NO: 603722 - RNA, 21 nt, Artificial Sequence
  Synthetic
gaaucucccuuuaauucuaug

SEQ ID NO: 603723 - RNA, 22 nt, Artificial Sequence
  Synthetic
cgaaucucccuuuaauucuaug

SEQ ID NO: 603724 - RNA, 23 nt, Artificial Sequence
  Synthetic
ccgaaucucccuuuaauucuaug

SEQ ID NO: 603725 - RNA, 24 nt, Artificial Sequence
  Synthetic
cccgaaucucccuuuaauucuaug

SEQ ID NO: 603726 - RNA, 18 nt, Artificial Sequence
  Synthetic
gaagggacauauucuaug

SEQ ID NO: 603727 - RNA, 19 nt, Artificial Sequence
  Synthetic
ggaagggacauauucuaug

SEQ ID NO: 603728 - RNA, 20 nt, Artificial Sequence
  Synthetic
aggaagggacauauucuaug

SEQ ID NO: 603729 - RNA, 21 nt, Artificial Sequence
  Synthetic
aaggaagggacauauucuaug

SEQ ID NO: 603730 - RNA, 22 nt, Artificial Sequence
  Synthetic
aaaggaagggacauauucuaug

SEQ ID NO: 603731 - RNA, 23 nt, Artificial Sequence
  Synthetic
uaaaggaagggacauauucuaug

SEQ ID NO: 603732 - RNA, 24 nt, Artificial Sequence
  Synthetic
uuaaaggaagggacauauucuaug

SEQ ID NO: 603733 - RNA, 18 nt, Artificial Sequence
  Synthetic
cugacgagauguucuaug

SEQ ID NO: 603734 - RNA, 19 nt, Artificial Sequence
  Synthetic
acugacgagauguucuaug

SEQ ID NO: 603735 - RNA, 20 nt, Artificial Sequence
  Synthetic
uacugacgagauguucuaug

SEQ ID NO: 603736 - RNA, 21 nt, Artificial Sequence
  Synthetic
auacugacgagauguucuaug

SEQ ID NO: 603737 - RNA, 22 nt, Artificial Sequence
  Synthetic
aauacugacgagauguucuaug

SEQ ID NO: 603738 - RNA, 23 nt, Artificial Sequence
  Synthetic
uaauacugacgagauguucuaug

SEQ ID NO: 603739 - RNA, 24 nt, Artificial Sequence
  Synthetic
cuaauacugacgagauguucuaug

SEQ ID NO: 603740 - RNA, 18 nt, Artificial Sequence
  Synthetic
aaaaugacaaaaaguaug

SEQ ID NO: 603741 - RNA, 19 nt, Artificial Sequence
  Synthetic
aaaaaugacaaaaaguaug

SEQ ID NO: 603742 - RNA, 20 nt, Artificial Sequence
  Synthetic
aaaaaaugacaaaaaguaug

SEQ ID NO: 603743 - RNA, 21 nt, Artificial Sequence
  Synthetic
uaaaaaaugacaaaaaguaug

SEQ ID NO: 603744 - RNA, 22 nt, Artificial Sequence
  Synthetic
cuaaaaaaugacaaaaaguaug

SEQ ID NO: 603745 - RNA, 23 nt, Artificial Sequence
  Synthetic
ucuaaaaaaugacaaaaaguaug

SEQ ID NO: 603746 - RNA, 24 nt, Artificial Sequence
  Synthetic
cucuaaaaaaugacaaaaaguaug

SEQ ID NO: 603747 - RNA, 18 nt, Artificial Sequence
  Synthetic
uaucuucccaaaaguaug

SEQ ID NO: 603748 - RNA, 19 nt, Artificial Sequence
  Synthetic
uuaucuucccaaaaguaug

SEQ ID NO: 603749 - RNA, 20 nt, Artificial Sequence
  Synthetic
guuaucuucccaaaaguaug

SEQ ID NO: 603750 - RNA, 21 nt, Artificial Sequence
  Synthetic
uguuaucuucccaaaaguaug

SEQ ID NO: 603751 - RNA, 22 nt, Artificial Sequence
  Synthetic
guguuaucuucccaaaaguaug

SEQ ID NO: 603752 - RNA, 23 nt, Artificial Sequence
  Synthetic
cguguuaucuucccaaaaguaug

SEQ ID NO: 603753 - RNA, 24 nt, Artificial Sequence
  Synthetic
ucguguuaucuucccaaaaguaug

SEQ ID NO: 603754 - RNA, 18 nt, Artificial Sequence
  Synthetic
guuaucucguaaaguaug

SEQ ID NO: 603755 - RNA, 19 nt, Artificial Sequence
  Synthetic
aguuaucucguaaaguaug

SEQ ID NO: 603756 - RNA, 20 nt, Artificial Sequence
  Synthetic
aaguuaucucguaaaguaug

SEQ ID NO: 603757 - RNA, 21 nt, Artificial Sequence
  Synthetic
gaaguuaucucguaaaguaug

SEQ ID NO: 603758 - RNA, 22 nt, Artificial Sequence
  Synthetic
ggaaguuaucucguaaaguaug

SEQ ID NO: 603759 - RNA, 23 nt, Artificial Sequence
  Synthetic
aggaaguuaucucguaaaguaug

SEQ ID NO: 603760 - RNA, 24 nt, Artificial Sequence
  Synthetic
aaggaaguuaucucguaaaguaug

SEQ ID NO: 603761 - RNA, 18 nt, Artificial Sequence
  Synthetic
cuuaucuuaauaaguaug

SEQ ID NO: 603762 - RNA, 19 nt, Artificial Sequence
  Synthetic
gcuuaucuuaauaaguaug

SEQ ID NO: 603763 - RNA, 20 nt, Artificial Sequence
  Synthetic
ugcuuaucuuaauaaguaug

SEQ ID NO: 603764 - RNA, 21 nt, Artificial Sequence
  Synthetic
uugcuuaucuuaauaaguaug

SEQ ID NO: 603765 - RNA, 22 nt, Artificial Sequence
  Synthetic
auugcuuaucuuaauaaguaug

SEQ ID NO: 603766 - RNA, 23 nt, Artificial Sequence
  Synthetic
uauugcuuaucuuaauaaguaug

SEQ ID NO: 603767 - RNA, 24 nt, Artificial Sequence
  Synthetic
guauugcuuaucuuaauaaguaug

SEQ ID NO: 603768 - RNA, 18 nt, Artificial Sequence
  Synthetic
gcaauucaacuaaguaug

SEQ ID NO: 603769 - RNA, 19 nt, Artificial Sequence
  Synthetic
ugcaauucaacuaaguaug

SEQ ID NO: 603770 - RNA, 20 nt, Artificial Sequence
  Synthetic
gugcaauucaacuaaguaug

SEQ ID NO: 603771 - RNA, 21 nt, Artificial Sequence
  Synthetic
ggugcaauucaacuaaguaug

SEQ ID NO: 603772 - RNA, 22 nt, Artificial Sequence
  Synthetic
gggugcaauucaacuaaguaug

SEQ ID NO: 603773 - RNA, 23 nt, Artificial Sequence
  Synthetic
ugggugcaauucaacuaaguaug

SEQ ID NO: 603774 - RNA, 24 nt, Artificial Sequence
  Synthetic
cugggugcaauucaacuaaguaug

SEQ ID NO: 603775 - RNA, 18 nt, Artificial Sequence
  Synthetic
uaccaugagaacaguaug

SEQ ID NO: 603776 - RNA, 19 nt, Artificial Sequence
  Synthetic
guaccaugagaacaguaug

SEQ ID NO: 603777 - RNA, 20 nt, Artificial Sequence
  Synthetic
aguaccaugagaacaguaug

SEQ ID NO: 603778 - RNA, 21 nt, Artificial Sequence
  Synthetic
caguaccaugagaacaguaug

SEQ ID NO: 603779 - RNA, 22 nt, Artificial Sequence
  Synthetic
ucaguaccaugagaacaguaug

SEQ ID NO: 603780 - RNA, 23 nt, Artificial Sequence
  Synthetic
uucaguaccaugagaacaguaug

SEQ ID NO: 603781 - RNA, 24 nt, Artificial Sequence
  Synthetic
auucaguaccaugagaacaguaug

SEQ ID NO: 603782 - RNA, 18 nt, Artificial Sequence
  Synthetic
ccucaagguuccaguaug

SEQ ID NO: 603783 - RNA, 19 nt, Artificial Sequence
  Synthetic
cccucaagguuccaguaug

SEQ ID NO: 603784 - RNA, 20 nt, Artificial Sequence
  Synthetic
acccucaagguuccaguaug

SEQ ID NO: 603785 - RNA, 21 nt, Artificial Sequence
  Synthetic
aacccucaagguuccaguaug

SEQ ID NO: 603786 - RNA, 22 nt, Artificial Sequence
  Synthetic
gaacccucaagguuccaguaug

SEQ ID NO: 603787 - RNA, 23 nt, Artificial Sequence
  Synthetic
agaacccucaagguuccaguaug

SEQ ID NO: 603788 - RNA, 24 nt, Artificial Sequence
  Synthetic
gagaacccucaagguuccaguaug

SEQ ID NO: 603789 - RNA, 18 nt, Artificial Sequence
  Synthetic
accacguuccucaguaug

SEQ ID NO: 603790 - RNA, 19 nt, Artificial Sequence
  Synthetic
uaccacguuccucaguaug

SEQ ID NO: 603791 - RNA, 20 nt, Artificial Sequence
  Synthetic
guaccacguuccucaguaug

SEQ ID NO: 603792 - RNA, 21 nt, Artificial Sequence
  Synthetic
gguaccacguuccucaguaug

SEQ ID NO: 603793 - RNA, 22 nt, Artificial Sequence
  Synthetic
agguaccacguuccucaguaug

SEQ ID NO: 603794 - RNA, 23 nt, Artificial Sequence
  Synthetic
uagguaccacguuccucaguaug

SEQ ID NO: 603795 - RNA, 24 nt, Artificial Sequence
  Synthetic
uuagguaccacguuccucaguaug

SEQ ID NO: 603796 - RNA, 18 nt, Artificial Sequence
  Synthetic
agcucagaaccacguaug

SEQ ID NO: 603797 - RNA, 19 nt, Artificial Sequence
  Synthetic
uagcucagaaccacguaug

SEQ ID NO: 603798 - RNA, 20 nt, Artificial Sequence
  Synthetic
guagcucagaaccacguaug

SEQ ID NO: 603799 - RNA, 21 nt, Artificial Sequence
  Synthetic
aguagcucagaaccacguaug

SEQ ID NO: 603800 - RNA, 22 nt, Artificial Sequence
  Synthetic
aaguagcucagaaccacguaug

SEQ ID NO: 603801 - RNA, 23 nt, Artificial Sequence
  Synthetic
gaaguagcucagaaccacguaug

SEQ ID NO: 603802 - RNA, 24 nt, Artificial Sequence
  Synthetic
agaaguagcucagaaccacguaug

SEQ ID NO: 603803 - RNA, 18 nt, Artificial Sequence
  Synthetic
auuuuaagcaagcguaug

SEQ ID NO: 603804 - RNA, 19 nt, Artificial Sequence
  Synthetic
uauuuuaagcaagcguaug

SEQ ID NO: 603805 - RNA, 20 nt, Artificial Sequence
  Synthetic
auauuuuaagcaagcguaug

SEQ ID NO: 603806 - RNA, 21 nt, Artificial Sequence
  Synthetic
aauauuuuaagcaagcguaug

SEQ ID NO: 603807 - RNA, 22 nt, Artificial Sequence
  Synthetic
aaauauuuuaagcaagcguaug

SEQ ID NO: 603808 - RNA, 23 nt, Artificial Sequence
  Synthetic
caaauauuuuaagcaagcguaug

SEQ ID NO: 603809 - RNA, 24 nt, Artificial Sequence
  Synthetic
acaaauauuuuaagcaagcguaug

SEQ ID NO: 603810 - RNA, 18 nt, Artificial Sequence
  Synthetic
cagaauaaugugcguaug

SEQ ID NO: 603811 - RNA, 19 nt, Artificial Sequence
  Synthetic
acagaauaaugugcguaug

SEQ ID NO: 603812 - RNA, 20 nt, Artificial Sequence
  Synthetic
gacagaauaaugugcguaug

SEQ ID NO: 603813 - RNA, 21 nt, Artificial Sequence
  Synthetic
ugacagaauaaugugcguaug

SEQ ID NO: 603814 - RNA, 22 nt, Artificial Sequence
  Synthetic
cugacagaauaaugugcguaug

SEQ ID NO: 603815 - RNA, 23 nt, Artificial Sequence
  Synthetic
acugacagaauaaugugcguaug

SEQ ID NO: 603816 - RNA, 24 nt, Artificial Sequence
  Synthetic
cacugacagaauaaugugcguaug

SEQ ID NO: 603817 - RNA, 18 nt, Artificial Sequence
  Synthetic
aaauuccuugugcguaug

SEQ ID NO: 603818 - RNA, 19 nt, Artificial Sequence
  Synthetic
gaaauuccuugugcguaug

SEQ ID NO: 603819 - RNA, 20 nt, Artificial Sequence
  Synthetic
ggaaauuccuugugcguaug

SEQ ID NO: 603820 - RNA, 21 nt, Artificial Sequence
  Synthetic
uggaaauuccuugugcguaug

SEQ ID NO: 603821 - RNA, 22 nt, Artificial Sequence
  Synthetic
uuggaaauuccuugugcguaug

SEQ ID NO: 603822 - RNA, 23 nt, Artificial Sequence
  Synthetic
uuuggaaauuccuugugcguaug

SEQ ID NO: 603823 - RNA, 24 nt, Artificial Sequence
  Synthetic
uuuuggaaauuccuugugcguaug

SEQ ID NO: 603824 - RNA, 18 nt, Artificial Sequence
  Synthetic
aauaauccauuagguaug

SEQ ID NO: 603825 - RNA, 19 nt, Artificial Sequence
  Synthetic
aaauaauccauuagguaug

SEQ ID NO: 603826 - RNA, 20 nt, Artificial Sequence
  Synthetic
gaaauaauccauuagguaug

SEQ ID NO: 603827 - RNA, 21 nt, Artificial Sequence
  Synthetic
ugaaauaauccauuagguaug

SEQ ID NO: 603828 - RNA, 22 nt, Artificial Sequence
  Synthetic
uugaaauaauccauuagguaug

SEQ ID NO: 603829 - RNA, 23 nt, Artificial Sequence
  Synthetic
auugaaauaauccauuagguaug

SEQ ID NO: 603830 - RNA, 24 nt, Artificial Sequence
  Synthetic
aauugaaauaauccauuagguaug

SEQ ID NO: 603831 - RNA, 18 nt, Artificial Sequence
  Synthetic
uagcugugugacgguaug

SEQ ID NO: 603832 - RNA, 19 nt, Artificial Sequence
  Synthetic
cuagcugugugacgguaug

SEQ ID NO: 603833 - RNA, 20 nt, Artificial Sequence
  Synthetic
acuagcugugugacgguaug

SEQ ID NO: 603834 - RNA, 21 nt, Artificial Sequence
  Synthetic
uacuagcugugugacgguaug

SEQ ID NO: 603835 - RNA, 22 nt, Artificial Sequence
  Synthetic
uuacuagcugugugacgguaug

SEQ ID NO: 603836 - RNA, 23 nt, Artificial Sequence
  Synthetic
uuuacuagcugugugacgguaug

SEQ ID NO: 603837 - RNA, 24 nt, Artificial Sequence
  Synthetic
cuuuacuagcugugugacgguaug

SEQ ID NO: 603838 - RNA, 18 nt, Artificial Sequence
  Synthetic
ugagugggcacggguaug

SEQ ID NO: 603839 - RNA, 19 nt, Artificial Sequence
  Synthetic
cugagugggcacggguaug

SEQ ID NO: 603840 - RNA, 20 nt, Artificial Sequence
  Synthetic
acugagugggcacggguaug

SEQ ID NO: 603841 - RNA, 21 nt, Artificial Sequence
  Synthetic
cacugagugggcacggguaug

SEQ ID NO: 603842 - RNA, 22 nt, Artificial Sequence
  Synthetic
acacugagugggcacggguaug

SEQ ID NO: 603843 - RNA, 23 nt, Artificial Sequence
  Synthetic
cacacugagugggcacggguaug

SEQ ID NO: 603844 - RNA, 24 nt, Artificial Sequence
  Synthetic
acacacugagugggcacggguaug

SEQ ID NO: 603845 - RNA, 18 nt, Artificial Sequence
  Synthetic
ugaaugugcagggguaug

SEQ ID NO: 603846 - RNA, 19 nt, Artificial Sequence
  Synthetic
uugaaugugcagggguaug

SEQ ID NO: 603847 - RNA, 20 nt, Artificial Sequence
  Synthetic
uuugaaugugcagggguaug

SEQ ID NO: 603848 - RNA, 21 nt, Artificial Sequence
  Synthetic
auuugaaugugcagggguaug

SEQ ID NO: 603849 - RNA, 22 nt, Artificial Sequence
  Synthetic
uauuugaaugugcagggguaug

SEQ ID NO: 603850 - RNA, 23 nt, Artificial Sequence
  Synthetic
cuauuugaaugugcagggguaug

SEQ ID NO: 603851 - RNA, 24 nt, Artificial Sequence
  Synthetic
ucuauuugaaugugcagggguaug

SEQ ID NO: 603852 - RNA, 18 nt, Artificial Sequence
  Synthetic
ugagccacagcugguaug

SEQ ID NO: 603853 - RNA, 19 nt, Artificial Sequence
  Synthetic
uugagccacagcugguaug

SEQ ID NO: 603854 - RNA, 20 nt, Artificial Sequence
  Synthetic
uuugagccacagcugguaug

SEQ ID NO: 603855 - RNA, 21 nt, Artificial Sequence
  Synthetic
cuuugagccacagcugguaug

SEQ ID NO: 603856 - RNA, 22 nt, Artificial Sequence
  Synthetic
ucuuugagccacagcugguaug

SEQ ID NO: 603857 - RNA, 23 nt, Artificial Sequence
  Synthetic
uucuuugagccacagcugguaug

SEQ ID NO: 603858 - RNA, 24 nt, Artificial Sequence
  Synthetic
cuucuuugagccacagcugguaug

SEQ ID NO: 603859 - RNA, 18 nt, Artificial Sequence
  Synthetic
cucuuuuguuaauguaug

SEQ ID NO: 603860 - RNA, 19 nt, Artificial Sequence
  Synthetic
acucuuuuguuaauguaug

SEQ ID NO: 603861 - RNA, 20 nt, Artificial Sequence
  Synthetic
uacucuuuuguuaauguaug

SEQ ID NO: 603862 - RNA, 21 nt, Artificial Sequence
  Synthetic
uuacucuuuuguuaauguaug

SEQ ID NO: 603863 - RNA, 22 nt, Artificial Sequence
  Synthetic
guuacucuuuuguuaauguaug

SEQ ID NO: 603864 - RNA, 23 nt, Artificial Sequence
  Synthetic
aguuacucuuuuguuaauguaug

SEQ ID NO: 603865 - RNA, 24 nt, Artificial Sequence
  Synthetic
aaguuacucuuuuguuaauguaug

SEQ ID NO: 603866 - RNA, 18 nt, Artificial Sequence
  Synthetic
acuggacaugcauguaug

SEQ ID NO: 603867 - RNA, 19 nt, Artificial Sequence
  Synthetic
cacuggacaugcauguaug

SEQ ID NO: 603868 - RNA, 20 nt, Artificial Sequence
  Synthetic
ccacuggacaugcauguaug

SEQ ID NO: 603869 - RNA, 21 nt, Artificial Sequence
  Synthetic
cccacuggacaugcauguaug

SEQ ID NO: 603870 - RNA, 22 nt, Artificial Sequence
  Synthetic
ucccacuggacaugcauguaug

SEQ ID NO: 603871 - RNA, 23 nt, Artificial Sequence
  Synthetic
aucccacuggacaugcauguaug

SEQ ID NO: 603872 - RNA, 24 nt, Artificial Sequence
  Synthetic
uaucccacuggacaugcauguaug

SEQ ID NO: 603873 - RNA, 18 nt, Artificial Sequence
  Synthetic
aggugauucugauguaug

SEQ ID NO: 603874 - RNA, 19 nt, Artificial Sequence
  Synthetic
caggugauucugauguaug

SEQ ID NO: 603875 - RNA, 20 nt, Artificial Sequence
  Synthetic
ccaggugauucugauguaug

SEQ ID NO: 603876 - RNA, 21 nt, Artificial Sequence
  Synthetic
uccaggugauucugauguaug

SEQ ID NO: 603877 - RNA, 22 nt, Artificial Sequence
  Synthetic
cuccaggugauucugauguaug

SEQ ID NO: 603878 - RNA, 23 nt, Artificial Sequence
  Synthetic
ccuccaggugauucugauguaug

SEQ ID NO: 603879 - RNA, 24 nt, Artificial Sequence
  Synthetic
cccuccaggugauucugauguaug

SEQ ID NO: 603880 - RNA, 18 nt, Artificial Sequence
  Synthetic
ucuucaaugauauguaug

SEQ ID NO: 603881 - RNA, 19 nt, Artificial Sequence
  Synthetic
cucuucaaugauauguaug

SEQ ID NO: 603882 - RNA, 20 nt, Artificial Sequence
  Synthetic
ucucuucaaugauauguaug

SEQ ID NO: 603883 - RNA, 21 nt, Artificial Sequence
  Synthetic
uucucuucaaugauauguaug

SEQ ID NO: 603884 - RNA, 22 nt, Artificial Sequence
  Synthetic
uuucucuucaaugauauguaug

SEQ ID NO: 603885 - RNA, 23 nt, Artificial Sequence
  Synthetic
uuuucucuucaaugauauguaug

SEQ ID NO: 603886 - RNA, 24 nt, Artificial Sequence
  Synthetic
auuuucucuucaaugauauguaug

SEQ ID NO: 603887 - RNA, 18 nt, Artificial Sequence
  Synthetic
uuuauugauuucuguaug

SEQ ID NO: 603888 - RNA, 19 nt, Artificial Sequence
  Synthetic
guuuauugauuucuguaug

SEQ ID NO: 603889 - RNA, 20 nt, Artificial Sequence
  Synthetic
uguuuauugauuucuguaug

SEQ ID NO: 603890 - RNA, 21 nt, Artificial Sequence
  Synthetic
auguuuauugauuucuguaug

SEQ ID NO: 603891 - RNA, 22 nt, Artificial Sequence
  Synthetic
uauguuuauugauuucuguaug

SEQ ID NO: 603892 - RNA, 23 nt, Artificial Sequence
  Synthetic
uuauguuuauugauuucuguaug

SEQ ID NO: 603893 - RNA, 24 nt, Artificial Sequence
  Synthetic
auuauguuuauugauuucuguaug

SEQ ID NO: 603894 - RNA, 18 nt, Artificial Sequence
  Synthetic
ccugcuguuugguguaug

SEQ ID NO: 603895 - RNA, 19 nt, Artificial Sequence
  Synthetic
gccugcuguuugguguaug

SEQ ID NO: 603896 - RNA, 20 nt, Artificial Sequence
  Synthetic
ugccugcuguuugguguaug

SEQ ID NO: 603897 - RNA, 21 nt, Artificial Sequence
  Synthetic
gugccugcuguuugguguaug

SEQ ID NO: 603898 - RNA, 22 nt, Artificial Sequence
  Synthetic
ggugccugcuguuugguguaug

SEQ ID NO: 603899 - RNA, 23 nt, Artificial Sequence
  Synthetic
uggugccugcuguuugguguaug

SEQ ID NO: 603900 - RNA, 24 nt, Artificial Sequence
  Synthetic
cuggugccugcuguuugguguaug

SEQ ID NO: 603901 - RNA, 18 nt, Artificial Sequence
  Synthetic
aaagucacaauguguaug

SEQ ID NO: 603902 - RNA, 19 nt, Artificial Sequence
  Synthetic
caaagucacaauguguaug

SEQ ID NO: 603903 - RNA, 20 nt, Artificial Sequence
  Synthetic
ucaaagucacaauguguaug

SEQ ID NO: 603904 - RNA, 21 nt, Artificial Sequence
  Synthetic
cucaaagucacaauguguaug

SEQ ID NO: 603905 - RNA, 22 nt, Artificial Sequence
  Synthetic
gcucaaagucacaauguguaug

SEQ ID NO: 603906 - RNA, 23 nt, Artificial Sequence
  Synthetic
ugcucaaagucacaauguguaug

SEQ ID NO: 603907 - RNA, 24 nt, Artificial Sequence
  Synthetic
uugcucaaagucacaauguguaug

SEQ ID NO: 603908 - RNA, 18 nt, Artificial Sequence
  Synthetic
ggaacacacguguguaug

SEQ ID NO: 603909 - RNA, 19 nt, Artificial Sequence
  Synthetic
aggaacacacguguguaug

SEQ ID NO: 603910 - RNA, 20 nt, Artificial Sequence
  Synthetic
caggaacacacguguguaug

SEQ ID NO: 603911 - RNA, 21 nt, Artificial Sequence
  Synthetic
ucaggaacacacguguguaug

SEQ ID NO: 603912 - RNA, 22 nt, Artificial Sequence
  Synthetic
uucaggaacacacguguguaug

SEQ ID NO: 603913 - RNA, 23 nt, Artificial Sequence
  Synthetic
uuucaggaacacacguguguaug

SEQ ID NO: 603914 - RNA, 24 nt, Artificial Sequence
  Synthetic
cuuucaggaacacacguguguaug

SEQ ID NO: 603915 - RNA, 18 nt, Artificial Sequence
  Synthetic
augacaaccaauuguaug

SEQ ID NO: 603916 - RNA, 19 nt, Artificial Sequence
  Synthetic
aaugacaaccaauuguaug

SEQ ID NO: 603917 - RNA, 20 nt, Artificial Sequence
  Synthetic
aaaugacaaccaauuguaug

SEQ ID NO: 603918 - RNA, 21 nt, Artificial Sequence
  Synthetic
caaaugacaaccaauuguaug

SEQ ID NO: 603919 - RNA, 22 nt, Artificial Sequence
  Synthetic
ccaaaugacaaccaauuguaug

SEQ ID NO: 603920 - RNA, 23 nt, Artificial Sequence
  Synthetic
accaaaugacaaccaauuguaug

SEQ ID NO: 603921 - RNA, 24 nt, Artificial Sequence
  Synthetic
gaccaaaugacaaccaauuguaug

SEQ ID NO: 603922 - RNA, 18 nt, Artificial Sequence
  Synthetic
aucaauuuagcuuguaug

SEQ ID NO: 603923 - RNA, 19 nt, Artificial Sequence
  Synthetic
uaucaauuuagcuuguaug

SEQ ID NO: 603924 - RNA, 20 nt, Artificial Sequence
  Synthetic
uuaucaauuuagcuuguaug

SEQ ID NO: 603925 - RNA, 21 nt, Artificial Sequence
  Synthetic
cuuaucaauuuagcuuguaug

SEQ ID NO: 603926 - RNA, 22 nt, Artificial Sequence
  Synthetic
ucuuaucaauuuagcuuguaug

SEQ ID NO: 603927 - RNA, 23 nt, Artificial Sequence
  Synthetic
uucuuaucaauuuagcuuguaug

SEQ ID NO: 603928 - RNA, 24 nt, Artificial Sequence
  Synthetic
uuucuuaucaauuuagcuuguaug

SEQ ID NO: 603929 - RNA, 18 nt, Artificial Sequence
  Synthetic
uguggguuugcuuguaug

SEQ ID NO: 603930 - RNA, 19 nt, Artificial Sequence
  Synthetic
uuguggguuugcuuguaug

SEQ ID NO: 603931 - RNA, 20 nt, Artificial Sequence
  Synthetic
uuuguggguuugcuuguaug

SEQ ID NO: 603932 - RNA, 21 nt, Artificial Sequence
  Synthetic
uuuuguggguuugcuuguaug

SEQ ID NO: 603933 - RNA, 22 nt, Artificial Sequence
  Synthetic
cuuuuguggguuugcuuguaug

SEQ ID NO: 603934 - RNA, 23 nt, Artificial Sequence
  Synthetic
ccuuuuguggguuugcuuguaug

SEQ ID NO: 603935 - RNA, 24 nt, Artificial Sequence
  Synthetic
accuuuuguggguuugcuuguaug

SEQ ID NO: 603936 - RNA, 18 nt, Artificial Sequence
  Synthetic
ccggcuaaaauuuguaug

SEQ ID NO: 603937 - RNA, 19 nt, Artificial Sequence
  Synthetic
gccggcuaaaauuuguaug

SEQ ID NO: 603938 - RNA, 20 nt, Artificial Sequence
  Synthetic
cgccggcuaaaauuuguaug

SEQ ID NO: 603939 - RNA, 21 nt, Artificial Sequence
  Synthetic
ccgccggcuaaaauuuguaug

SEQ ID NO: 603940 - RNA, 22 nt, Artificial Sequence
  Synthetic
cccgccggcuaaaauuuguaug

SEQ ID NO: 603941 - RNA, 23 nt, Artificial Sequence
  Synthetic
ccccgccggcuaaaauuuguaug

SEQ ID NO: 603942 - RNA, 24 nt, Artificial Sequence
  Synthetic
cccccgccggcuaaaauuuguaug

SEQ ID NO: 603943 - RNA, 18 nt, Artificial Sequence
  Synthetic
cuuaaaggcguuuguaug

SEQ ID NO: 603944 - RNA, 19 nt, Artificial Sequence
  Synthetic
acuuaaaggcguuuguaug

SEQ ID NO: 603945 - RNA, 20 nt, Artificial Sequence
  Synthetic
aacuuaaaggcguuuguaug

SEQ ID NO: 603946 - RNA, 21 nt, Artificial Sequence
  Synthetic
uaacuuaaaggcguuuguaug

SEQ ID NO: 603947 - RNA, 22 nt, Artificial Sequence
  Synthetic
uuaacuuaaaggcguuuguaug

SEQ ID NO: 603948 - RNA, 23 nt, Artificial Sequence
  Synthetic
uuuaacuuaaaggcguuuguaug

SEQ ID NO: 603949 - RNA, 24 nt, Artificial Sequence
  Synthetic
auuuaacuuaaaggcguuuguaug

SEQ ID NO: 603950 - RNA, 18 nt, Artificial Sequence
  Synthetic
acacagaguguuuguaug

SEQ ID NO: 603951 - RNA, 19 nt, Artificial Sequence
  Synthetic
gacacagaguguuuguaug

SEQ ID NO: 603952 - RNA, 20 nt, Artificial Sequence
  Synthetic
agacacagaguguuuguaug

SEQ ID NO: 603953 - RNA, 21 nt, Artificial Sequence
  Synthetic
gagacacagaguguuuguaug

SEQ ID NO: 603954 - RNA, 22 nt, Artificial Sequence
  Synthetic
agagacacagaguguuuguaug

SEQ ID NO: 603955 - RNA, 23 nt, Artificial Sequence
  Synthetic
aagagacacagaguguuuguaug

SEQ ID NO: 603956 - RNA, 24 nt, Artificial Sequence
  Synthetic
gaagagacacagaguguuuguaug

SEQ ID NO: 603957 - RNA, 18 nt, Artificial Sequence
  Synthetic
ucuggauuuucaauuaug

SEQ ID NO: 603958 - RNA, 19 nt, Artificial Sequence
  Synthetic
uucuggauuuucaauuaug

SEQ ID NO: 603959 - RNA, 20 nt, Artificial Sequence
  Synthetic
uuucuggauuuucaauuaug

SEQ ID NO: 603960 - RNA, 21 nt, Artificial Sequence
  Synthetic
guuucuggauuuucaauuaug

SEQ ID NO: 603961 - RNA, 22 nt, Artificial Sequence
  Synthetic
uguuucuggauuuucaauuaug

SEQ ID NO: 603962 - RNA, 23 nt, Artificial Sequence
  Synthetic
guguuucuggauuuucaauuaug

SEQ ID NO: 603963 - RNA, 24 nt, Artificial Sequence
  Synthetic
uguguuucuggauuuucaauuaug

SEQ ID NO: 603964 - RNA, 18 nt, Artificial Sequence
  Synthetic
cagauuggaugaauuaug

SEQ ID NO: 603965 - RNA, 19 nt, Artificial Sequence
  Synthetic
acagauuggaugaauuaug

SEQ ID NO: 603966 - RNA, 20 nt, Artificial Sequence
  Synthetic
gacagauuggaugaauuaug

SEQ ID NO: 603967 - RNA, 21 nt, Artificial Sequence
  Synthetic
ugacagauuggaugaauuaug

SEQ ID NO: 603968 - RNA, 22 nt, Artificial Sequence
  Synthetic
augacagauuggaugaauuaug

SEQ ID NO: 603969 - RNA, 23 nt, Artificial Sequence
  Synthetic
aaugacagauuggaugaauuaug

SEQ ID NO: 603970 - RNA, 24 nt, Artificial Sequence
  Synthetic
caaugacagauuggaugaauuaug

SEQ ID NO: 603971 - RNA, 18 nt, Artificial Sequence
  Synthetic
uucacauuuugaauuaug

SEQ ID NO: 603972 - RNA, 19 nt, Artificial Sequence
  Synthetic
uuucacauuuugaauuaug

SEQ ID NO: 603973 - RNA, 20 nt, Artificial Sequence
  Synthetic
uuuucacauuuugaauuaug

SEQ ID NO: 603974 - RNA, 21 nt, Artificial Sequence
  Synthetic
auuuucacauuuugaauuaug

SEQ ID NO: 603975 - RNA, 22 nt, Artificial Sequence
  Synthetic
aauuuucacauuuugaauuaug

SEQ ID NO: 603976 - RNA, 23 nt, Artificial Sequence
  Synthetic
caauuuucacauuuugaauuaug

SEQ ID NO: 603977 - RNA, 24 nt, Artificial Sequence
  Synthetic
ccaauuuucacauuuugaauuaug

SEQ ID NO: 603978 - RNA, 18 nt, Artificial Sequence
  Synthetic
gucaucucuguaauuaug

SEQ ID NO: 603979 - RNA, 19 nt, Artificial Sequence
  Synthetic
agucaucucuguaauuaug

SEQ ID NO: 603980 - RNA, 20 nt, Artificial Sequence
  Synthetic
uagucaucucuguaauuaug

SEQ ID NO: 603981 - RNA, 21 nt, Artificial Sequence
  Synthetic
cuagucaucucuguaauuaug

SEQ ID NO: 603982 - RNA, 22 nt, Artificial Sequence
  Synthetic
ucuagucaucucuguaauuaug

SEQ ID NO: 603983 - RNA, 23 nt, Artificial Sequence
  Synthetic
gucuagucaucucuguaauuaug

SEQ ID NO: 603984 - RNA, 24 nt, Artificial Sequence
  Synthetic
ugucuagucaucucuguaauuaug

SEQ ID NO: 603985 - RNA, 18 nt, Artificial Sequence
  Synthetic
accaucauuaccauuaug

SEQ ID NO: 603986 - RNA, 19 nt, Artificial Sequence
  Synthetic
caccaucauuaccauuaug

SEQ ID NO: 603987 - RNA, 20 nt, Artificial Sequence
  Synthetic
gcaccaucauuaccauuaug

SEQ ID NO: 603988 - RNA, 21 nt, Artificial Sequence
  Synthetic
ugcaccaucauuaccauuaug

SEQ ID NO: 603989 - RNA, 22 nt, Artificial Sequence
  Synthetic
uugcaccaucauuaccauuaug

SEQ ID NO: 603990 - RNA, 23 nt, Artificial Sequence
  Synthetic
auugcaccaucauuaccauuaug

SEQ ID NO: 603991 - RNA, 24 nt, Artificial Sequence
  Synthetic
cauugcaccaucauuaccauuaug

SEQ ID NO: 603992 - RNA, 18 nt, Artificial Sequence
  Synthetic
augaguacauccauuaug

SEQ ID NO: 603993 - RNA, 19 nt, Artificial Sequence
  Synthetic
aaugaguacauccauuaug

SEQ ID NO: 603994 - RNA, 20 nt, Artificial Sequence
  Synthetic
aaaugaguacauccauuaug

SEQ ID NO: 603995 - RNA, 21 nt, Artificial Sequence
  Synthetic
uaaaugaguacauccauuaug

SEQ ID NO: 603996 - RNA, 22 nt, Artificial Sequence
  Synthetic
guaaaugaguacauccauuaug

SEQ ID NO: 603997 - RNA, 23 nt, Artificial Sequence
  Synthetic
uguaaaugaguacauccauuaug

SEQ ID NO: 603998 - RNA, 24 nt, Artificial Sequence
  Synthetic
auguaaaugaguacauccauuaug

SEQ ID NO: 603999 - RNA, 18 nt, Artificial Sequence
  Synthetic
gccagccugaucauuaug

SEQ ID NO: 604000 - RNA, 19 nt, Artificial Sequence
  Synthetic
ggccagccugaucauuaug

SEQ ID NO: 604001 - RNA, 20 nt, Artificial Sequence
  Synthetic
aggccagccugaucauuaug

SEQ ID NO: 604002 - RNA, 21 nt, Artificial Sequence
  Synthetic
aaggccagccugaucauuaug

SEQ ID NO: 604003 - RNA, 22 nt, Artificial Sequence
  Synthetic
caaggccagccugaucauuaug

SEQ ID NO: 604004 - RNA, 23 nt, Artificial Sequence
  Synthetic
ucaaggccagccugaucauuaug

SEQ ID NO: 604005 - RNA, 24 nt, Artificial Sequence
  Synthetic
uucaaggccagccugaucauuaug

SEQ ID NO: 604006 - RNA, 18 nt, Artificial Sequence
  Synthetic
cugaaugcccugauuaug

SEQ ID NO: 604007 - RNA, 19 nt, Artificial Sequence
  Synthetic
ucugaaugcccugauuaug

SEQ ID NO: 604008 - RNA, 20 nt, Artificial Sequence
  Synthetic
aucugaaugcccugauuaug

SEQ ID NO: 604009 - RNA, 21 nt, Artificial Sequence
  Synthetic
aaucugaaugcccugauuaug

SEQ ID NO: 604010 - RNA, 22 nt, Artificial Sequence
  Synthetic
gaaucugaaugcccugauuaug

SEQ ID NO: 604011 - RNA, 23 nt, Artificial Sequence
  Synthetic
agaaucugaaugcccugauuaug

SEQ ID NO: 604012 - RNA, 24 nt, Artificial Sequence
  Synthetic
cagaaucugaaugcccugauuaug

SEQ ID NO: 604013 - RNA, 18 nt, Artificial Sequence
  Synthetic
aaccuugaaaauauuaug

SEQ ID NO: 604014 - RNA, 19 nt, Artificial Sequence
  Synthetic
gaaccuugaaaauauuaug

SEQ ID NO: 604015 - RNA, 20 nt, Artificial Sequence
  Synthetic
ugaaccuugaaaauauuaug

SEQ ID NO: 604016 - RNA, 21 nt, Artificial Sequence
  Synthetic
augaaccuugaaaauauuaug

SEQ ID NO: 604017 - RNA, 22 nt, Artificial Sequence
  Synthetic
gaugaaccuugaaaauauuaug

SEQ ID NO: 604018 - RNA, 23 nt, Artificial Sequence
  Synthetic
agaugaaccuugaaaauauuaug

SEQ ID NO: 604019 - RNA, 24 nt, Artificial Sequence
  Synthetic
uagaugaaccuugaaaauauuaug

SEQ ID NO: 604020 - RNA, 18 nt, Artificial Sequence
  Synthetic
gcaguucuuccuauuaug

SEQ ID NO: 604021 - RNA, 19 nt, Artificial Sequence
  Synthetic
agcaguucuuccuauuaug

SEQ ID NO: 604022 - RNA, 20 nt, Artificial Sequence
  Synthetic
aagcaguucuuccuauuaug

SEQ ID NO: 604023 - RNA, 21 nt, Artificial Sequence
  Synthetic
aaagcaguucuuccuauuaug

SEQ ID NO: 604024 - RNA, 22 nt, Artificial Sequence
  Synthetic
uaaagcaguucuuccuauuaug

SEQ ID NO: 604025 - RNA, 23 nt, Artificial Sequence
  Synthetic
auaaagcaguucuuccuauuaug

SEQ ID NO: 604026 - RNA, 24 nt, Artificial Sequence
  Synthetic
gauaaagcaguucuuccuauuaug

SEQ ID NO: 604027 - RNA, 18 nt, Artificial Sequence
  Synthetic
ggcuuucagaguauuaug

SEQ ID NO: 604028 - RNA, 19 nt, Artificial Sequence
  Synthetic
gggcuuucagaguauuaug

SEQ ID NO: 604029 - RNA, 20 nt, Artificial Sequence
  Synthetic
agggcuuucagaguauuaug

SEQ ID NO: 604030 - RNA, 21 nt, Artificial Sequence
  Synthetic
gagggcuuucagaguauuaug

SEQ ID NO: 604031 - RNA, 22 nt, Artificial Sequence
  Synthetic
agagggcuuucagaguauuaug

SEQ ID NO: 604032 - RNA, 23 nt, Artificial Sequence
  Synthetic
cagagggcuuucagaguauuaug

SEQ ID NO: 604033 - RNA, 24 nt, Artificial Sequence
  Synthetic
ccagagggcuuucagaguauuaug

SEQ ID NO: 604034 - RNA, 18 nt, Artificial Sequence
  Synthetic
guuuguaguuguauuaug

SEQ ID NO: 604035 - RNA, 19 nt, Artificial Sequence
  Synthetic
aguuuguaguuguauuaug

SEQ ID NO: 604036 - RNA, 20 nt, Artificial Sequence
  Synthetic
gaguuuguaguuguauuaug

SEQ ID NO: 604037 - RNA, 21 nt, Artificial Sequence
  Synthetic
ugaguuuguaguuguauuaug

SEQ ID NO: 604038 - RNA, 22 nt, Artificial Sequence
  Synthetic
augaguuuguaguuguauuaug

SEQ ID NO: 604039 - RNA, 23 nt, Artificial Sequence
  Synthetic
gaugaguuuguaguuguauuaug

SEQ ID NO: 604040 - RNA, 24 nt, Artificial Sequence
  Synthetic
agaugaguuuguaguuguauuaug

SEQ ID NO: 604041 - RNA, 18 nt, Artificial Sequence
  Synthetic
ugauauuuucaacuuaug

SEQ ID NO: 604042 - RNA, 19 nt, Artificial Sequence
  Synthetic
augauauuuucaacuuaug

SEQ ID NO: 604043 - RNA, 20 nt, Artificial Sequence
  Synthetic
caugauauuuucaacuuaug

SEQ ID NO: 604044 - RNA, 21 nt, Artificial Sequence
  Synthetic
acaugauauuuucaacuuaug

SEQ ID NO: 604045 - RNA, 22 nt, Artificial Sequence
  Synthetic
gacaugauauuuucaacuuaug

SEQ ID NO: 604046 - RNA, 23 nt, Artificial Sequence
  Synthetic
ugacaugauauuuucaacuuaug

SEQ ID NO: 604047 - RNA, 24 nt, Artificial Sequence
  Synthetic
uugacaugauauuuucaacuuaug

SEQ ID NO: 604048 - RNA, 18 nt, Artificial Sequence
  Synthetic
guuaauaaaauacuuaug

SEQ ID NO: 604049 - RNA, 19 nt, Artificial Sequence
  Synthetic
uguuaauaaaauacuuaug

SEQ ID NO: 604050 - RNA, 20 nt, Artificial Sequence
  Synthetic
uuguuaauaaaauacuuaug

SEQ ID NO: 604051 - RNA, 21 nt, Artificial Sequence
  Synthetic
auuguuaauaaaauacuuaug

SEQ ID NO: 604052 - RNA, 22 nt, Artificial Sequence
  Synthetic
aauuguuaauaaaauacuuaug

SEQ ID NO: 604053 - RNA, 23 nt, Artificial Sequence
  Synthetic
gaauuguuaauaaaauacuuaug

SEQ ID NO: 604054 - RNA, 24 nt, Artificial Sequence
  Synthetic
ugaauuguuaauaaaauacuuaug

SEQ ID NO: 604055 - RNA, 18 nt, Artificial Sequence
  Synthetic
gggaaaugguaccuuaug

SEQ ID NO: 604056 - RNA, 19 nt, Artificial Sequence
  Synthetic
ugggaaaugguaccuuaug

SEQ ID NO: 604057 - RNA, 20 nt, Artificial Sequence
  Synthetic
gugggaaaugguaccuuaug

SEQ ID NO: 604058 - RNA, 21 nt, Artificial Sequence
  Synthetic
ggugggaaaugguaccuuaug

SEQ ID NO: 604059 - RNA, 22 nt, Artificial Sequence
  Synthetic
gggugggaaaugguaccuuaug

SEQ ID NO: 604060 - RNA, 23 nt, Artificial Sequence
  Synthetic
cgggugggaaaugguaccuuaug

SEQ ID NO: 604061 - RNA, 24 nt, Artificial Sequence
  Synthetic
gcgggugggaaaugguaccuuaug

SEQ ID NO: 604062 - RNA, 18 nt, Artificial Sequence
  Synthetic
uuucuuggggcccuuaug

SEQ ID NO: 604063 - RNA, 19 nt, Artificial Sequence
  Synthetic
cuuucuuggggcccuuaug

SEQ ID NO: 604064 - RNA, 20 nt, Artificial Sequence
  Synthetic
ccuuucuuggggcccuuaug

SEQ ID NO: 604065 - RNA, 21 nt, Artificial Sequence
  Synthetic
accuuucuuggggcccuuaug

SEQ ID NO: 604066 - RNA, 22 nt, Artificial Sequence
  Synthetic
caccuuucuuggggcccuuaug

SEQ ID NO: 604067 - RNA, 23 nt, Artificial Sequence
  Synthetic
gcaccuuucuuggggcccuuaug

SEQ ID NO: 604068 - RNA, 24 nt, Artificial Sequence
  Synthetic
agcaccuuucuuggggcccuuaug

SEQ ID NO: 604069 - RNA, 18 nt, Artificial Sequence
  Synthetic
aucagaauccaucuuaug

SEQ ID NO: 604070 - RNA, 19 nt, Artificial Sequence
  Synthetic
aaucagaauccaucuuaug

SEQ ID NO: 604071 - RNA, 20 nt, Artificial Sequence
  Synthetic
caaucagaauccaucuuaug

SEQ ID NO: 604072 - RNA, 21 nt, Artificial Sequence
  Synthetic
gcaaucagaauccaucuuaug

SEQ ID NO: 604073 - RNA, 22 nt, Artificial Sequence
  Synthetic
agcaaucagaauccaucuuaug

SEQ ID NO: 604074 - RNA, 23 nt, Artificial Sequence
  Synthetic
uagcaaucagaauccaucuuaug

SEQ ID NO: 604075 - RNA, 24 nt, Artificial Sequence
  Synthetic
auagcaaucagaauccaucuuaug

SEQ ID NO: 604076 - RNA, 18 nt, Artificial Sequence
  Synthetic
uguuauauaagucuuaug

SEQ ID NO: 604077 - RNA, 19 nt, Artificial Sequence
  Synthetic
auguuauauaagucuuaug

SEQ ID NO: 604078 - RNA, 20 nt, Artificial Sequence
  Synthetic
cauguuauauaagucuuaug

SEQ ID NO: 604079 - RNA, 21 nt, Artificial Sequence
  Synthetic
acauguuauauaagucuuaug

SEQ ID NO: 604080 - RNA, 22 nt, Artificial Sequence
  Synthetic
gacauguuauauaagucuuaug

SEQ ID NO: 604081 - RNA, 23 nt, Artificial Sequence
  Synthetic
ugacauguuauauaagucuuaug

SEQ ID NO: 604082 - RNA, 24 nt, Artificial Sequence
  Synthetic
augacauguuauauaagucuuaug

SEQ ID NO: 604083 - RNA, 18 nt, Artificial Sequence
  Synthetic
agggaaccaugucuuaug

SEQ ID NO: 604084 - RNA, 19 nt, Artificial Sequence
  Synthetic
uagggaaccaugucuuaug

SEQ ID NO: 604085 - RNA, 20 nt, Artificial Sequence
  Synthetic
guagggaaccaugucuuaug

SEQ ID NO: 604086 - RNA, 21 nt, Artificial Sequence
  Synthetic
uguagggaaccaugucuuaug

SEQ ID NO: 604087 - RNA, 22 nt, Artificial Sequence
  Synthetic
cuguagggaaccaugucuuaug

SEQ ID NO: 604088 - RNA, 23 nt, Artificial Sequence
  Synthetic
ccuguagggaaccaugucuuaug

SEQ ID NO: 604089 - RNA, 24 nt, Artificial Sequence
  Synthetic
gccuguagggaaccaugucuuaug

SEQ ID NO: 604090 - RNA, 18 nt, Artificial Sequence
  Synthetic
ccucauauaauucuuaug

SEQ ID NO: 604091 - RNA, 19 nt, Artificial Sequence
  Synthetic
uccucauauaauucuuaug

SEQ ID NO: 604092 - RNA, 20 nt, Artificial Sequence
  Synthetic
auccucauauaauucuuaug

SEQ ID NO: 604093 - RNA, 21 nt, Artificial Sequence
  Synthetic
cauccucauauaauucuuaug

SEQ ID NO: 604094 - RNA, 22 nt, Artificial Sequence
  Synthetic
acauccucauauaauucuuaug

SEQ ID NO: 604095 - RNA, 23 nt, Artificial Sequence
  Synthetic
uacauccucauauaauucuuaug

SEQ ID NO: 604096 - RNA, 24 nt, Artificial Sequence
  Synthetic
auacauccucauauaauucuuaug

SEQ ID NO: 604097 - RNA, 18 nt, Artificial Sequence
  Synthetic
augucagaauuucuuaug

SEQ ID NO: 604098 - RNA, 19 nt, Artificial Sequence
  Synthetic
uaugucagaauuucuuaug

SEQ ID NO: 604099 - RNA, 20 nt, Artificial Sequence
  Synthetic
uuaugucagaauuucuuaug

SEQ ID NO: 604100 - RNA, 21 nt, Artificial Sequence
  Synthetic
auuaugucagaauuucuuaug

SEQ ID NO: 604101 - RNA, 22 nt, Artificial Sequence
  Synthetic
uauuaugucagaauuucuuaug

SEQ ID NO: 604102 - RNA, 23 nt, Artificial Sequence
  Synthetic
cuauuaugucagaauuucuuaug

SEQ ID NO: 604103 - RNA, 24 nt, Artificial Sequence
  Synthetic
ccuauuaugucagaauuucuuaug

SEQ ID NO: 604104 - RNA, 18 nt, Artificial Sequence
  Synthetic
agucuuuccuuucuuaug

SEQ ID NO: 604105 - RNA, 19 nt, Artificial Sequence
  Synthetic
uagucuuuccuuucuuaug

SEQ ID NO: 604106 - RNA, 20 nt, Artificial Sequence
  Synthetic
uuagucuuuccuuucuuaug

SEQ ID NO: 604107 - RNA, 21 nt, Artificial Sequence
  Synthetic
uuuagucuuuccuuucuuaug

SEQ ID NO: 604108 - RNA, 22 nt, Artificial Sequence
  Synthetic
uuuuagucuuuccuuucuuaug

SEQ ID NO: 604109 - RNA, 23 nt, Artificial Sequence
  Synthetic
auuuuagucuuuccuuucuuaug

SEQ ID NO: 604110 - RNA, 24 nt, Artificial Sequence
  Synthetic
cauuuuagucuuuccuuucuuaug

SEQ ID NO: 604111 - RNA, 18 nt, Artificial Sequence
  Synthetic
uuuuucuaguuucuuaug

SEQ ID NO: 604112 - RNA, 19 nt, Artificial Sequence
  Synthetic
cuuuuucuaguuucuuaug

SEQ ID NO: 604113 - RNA, 20 nt, Artificial Sequence
  Synthetic
ucuuuuucuaguuucuuaug

SEQ ID NO: 604114 - RNA, 21 nt, Artificial Sequence
  Synthetic
uucuuuuucuaguuucuuaug

SEQ ID NO: 604115 - RNA, 22 nt, Artificial Sequence
  Synthetic
cuucuuuuucuaguuucuuaug

SEQ ID NO: 604116 - RNA, 23 nt, Artificial Sequence
  Synthetic
ucuucuuuuucuaguuucuuaug

SEQ ID NO: 604117 - RNA, 24 nt, Artificial Sequence
  Synthetic
uucuucuuuuucuaguuucuuaug

SEQ ID NO: 604118 - RNA, 18 nt, Artificial Sequence
  Synthetic
uaaggaccaaaaguuaug

SEQ ID NO: 604119 - RNA, 19 nt, Artificial Sequence
  Synthetic
uuaaggaccaaaaguuaug

SEQ ID NO: 604120 - RNA, 20 nt, Artificial Sequence
  Synthetic
uuuaaggaccaaaaguuaug

SEQ ID NO: 604121 - RNA, 21 nt, Artificial Sequence
  Synthetic
cuuuaaggaccaaaaguuaug

SEQ ID NO: 604122 - RNA, 22 nt, Artificial Sequence
  Synthetic
acuuuaaggaccaaaaguuaug

SEQ ID NO: 604123 - RNA, 23 nt, Artificial Sequence
  Synthetic
gacuuuaaggaccaaaaguuaug

SEQ ID NO: 604124 - RNA, 24 nt, Artificial Sequence
  Synthetic
agacuuuaaggaccaaaaguuaug

SEQ ID NO: 604125 - RNA, 18 nt, Artificial Sequence
  Synthetic
gcaagugacagaguuaug

SEQ ID NO: 604126 - RNA, 19 nt, Artificial Sequence
  Synthetic
agcaagugacagaguuaug

SEQ ID NO: 604127 - RNA, 20 nt, Artificial Sequence
  Synthetic
cagcaagugacagaguuaug

SEQ ID NO: 604128 - RNA, 21 nt, Artificial Sequence
  Synthetic
ucagcaagugacagaguuaug

SEQ ID NO: 604129 - RNA, 22 nt, Artificial Sequence
  Synthetic
uucagcaagugacagaguuaug

SEQ ID NO: 604130 - RNA, 23 nt, Artificial Sequence
  Synthetic
uuucagcaagugacagaguuaug

SEQ ID NO: 604131 - RNA, 24 nt, Artificial Sequence
  Synthetic
guuucagcaagugacagaguuaug

SEQ ID NO: 604132 - RNA, 18 nt, Artificial Sequence
  Synthetic
ucugccuuucugguuaug

SEQ ID NO: 604133 - RNA, 19 nt, Artificial Sequence
  Synthetic
aucugccuuucugguuaug

SEQ ID NO: 604134 - RNA, 20 nt, Artificial Sequence
  Synthetic
caucugccuuucugguuaug

SEQ ID NO: 604135 - RNA, 21 nt, Artificial Sequence
  Synthetic
ucaucugccuuucugguuaug

SEQ ID NO: 604136 - RNA, 22 nt, Artificial Sequence
  Synthetic
cucaucugccuuucugguuaug

SEQ ID NO: 604137 - RNA, 23 nt, Artificial Sequence
  Synthetic
ucucaucugccuuucugguuaug

SEQ ID NO: 604138 - RNA, 24 nt, Artificial Sequence
  Synthetic
uucucaucugccuuucugguuaug

SEQ ID NO: 604139 - RNA, 18 nt, Artificial Sequence
  Synthetic
ccagcuguggugguuaug

SEQ ID NO: 604140 - RNA, 19 nt, Artificial Sequence
  Synthetic
cccagcuguggugguuaug

SEQ ID NO: 604141 - RNA, 20 nt, Artificial Sequence
  Synthetic
ucccagcuguggugguuaug

SEQ ID NO: 604142 - RNA, 21 nt, Artificial Sequence
  Synthetic
uucccagcuguggugguuaug

SEQ ID NO: 604143 - RNA, 22 nt, Artificial Sequence
  Synthetic
auucccagcuguggugguuaug

SEQ ID NO: 604144 - RNA, 23 nt, Artificial Sequence
  Synthetic
aauucccagcuguggugguuaug

SEQ ID NO: 604145 - RNA, 24 nt, Artificial Sequence
  Synthetic
aaauucccagcuguggugguuaug

SEQ ID NO: 604146 - RNA, 18 nt, Artificial Sequence
  Synthetic
auagaaauauaauuuaug

SEQ ID NO: 604147 - RNA, 19 nt, Artificial Sequence
  Synthetic
cauagaaauauaauuuaug

SEQ ID NO: 604148 - RNA, 20 nt, Artificial Sequence
  Synthetic
acauagaaauauaauuuaug

SEQ ID NO: 604149 - RNA, 21 nt, Artificial Sequence
  Synthetic
uacauagaaauauaauuuaug

SEQ ID NO: 604150 - RNA, 22 nt, Artificial Sequence
  Synthetic
uuacauagaaauauaauuuaug

SEQ ID NO: 604151 - RNA, 23 nt, Artificial Sequence
  Synthetic
auuacauagaaauauaauuuaug

SEQ ID NO: 604152 - RNA, 24 nt, Artificial Sequence
  Synthetic
uauuacauagaaauauaauuuaug

SEQ ID NO: 604153 - RNA, 18 nt, Artificial Sequence
  Synthetic
gagacuggguaauuuaug

SEQ ID NO: 604154 - RNA, 19 nt, Artificial Sequence
  Synthetic
cgagacuggguaauuuaug

SEQ ID NO: 604155 - RNA, 20 nt, Artificial Sequence
  Synthetic
ccgagacuggguaauuuaug

SEQ ID NO: 604156 - RNA, 21 nt, Artificial Sequence
  Synthetic
cccgagacuggguaauuuaug

SEQ ID NO: 604157 - RNA, 22 nt, Artificial Sequence
  Synthetic
acccgagacuggguaauuuaug

SEQ ID NO: 604158 - RNA, 23 nt, Artificial Sequence
  Synthetic
uacccgagacuggguaauuuaug

SEQ ID NO: 604159 - RNA, 24 nt, Artificial Sequence
  Synthetic
auacccgagacuggguaauuuaug

SEQ ID NO: 604160 - RNA, 18 nt, Artificial Sequence
  Synthetic
uuuuugaguucauuuaug

SEQ ID NO: 604161 - RNA, 19 nt, Artificial Sequence
  Synthetic
guuuuugaguucauuuaug

SEQ ID NO: 604162 - RNA, 20 nt, Artificial Sequence
  Synthetic
aguuuuugaguucauuuaug

SEQ ID NO: 604163 - RNA, 21 nt, Artificial Sequence
  Synthetic
aaguuuuugaguucauuuaug

SEQ ID NO: 604164 - RNA, 22 nt, Artificial Sequence
  Synthetic
aaaguuuuugaguucauuuaug

SEQ ID NO: 604165 - RNA, 23 nt, Artificial Sequence
  Synthetic
caaaguuuuugaguucauuuaug

SEQ ID NO: 604166 - RNA, 24 nt, Artificial Sequence
  Synthetic
ucaaaguuuuugaguucauuuaug

SEQ ID NO: 604167 - RNA, 18 nt, Artificial Sequence
  Synthetic
gauagugaaggauuuaug

SEQ ID NO: 604168 - RNA, 19 nt, Artificial Sequence
  Synthetic
ggauagugaaggauuuaug

SEQ ID NO: 604169 - RNA, 20 nt, Artificial Sequence
  Synthetic
aggauagugaaggauuuaug

SEQ ID NO: 604170 - RNA, 21 nt, Artificial Sequence
  Synthetic
gaggauagugaaggauuuaug

SEQ ID NO: 604171 - RNA, 22 nt, Artificial Sequence
  Synthetic
agaggauagugaaggauuuaug

SEQ ID NO: 604172 - RNA, 23 nt, Artificial Sequence
  Synthetic
gagaggauagugaaggauuuaug

SEQ ID NO: 604173 - RNA, 24 nt, Artificial Sequence
  Synthetic
agagaggauagugaaggauuuaug

SEQ ID NO: 604174 - RNA, 18 nt, Artificial Sequence
  Synthetic
auauuaacaguauuuaug

SEQ ID NO: 604175 - RNA, 19 nt, Artificial Sequence
  Synthetic
aauauuaacaguauuuaug

SEQ ID NO: 604176 - RNA, 20 nt, Artificial Sequence
  Synthetic
gaauauuaacaguauuuaug

SEQ ID NO: 604177 - RNA, 21 nt, Artificial Sequence
  Synthetic
ggaauauuaacaguauuuaug

SEQ ID NO: 604178 - RNA, 22 nt, Artificial Sequence
  Synthetic
gggaauauuaacaguauuuaug

SEQ ID NO: 604179 - RNA, 23 nt, Artificial Sequence
  Synthetic
ugggaauauuaacaguauuuaug

SEQ ID NO: 604180 - RNA, 24 nt, Artificial Sequence
  Synthetic
augggaauauuaacaguauuuaug

SEQ ID NO: 604181 - RNA, 18 nt, Artificial Sequence
  Synthetic
aucucagagguauuuaug

SEQ ID NO: 604182 - RNA, 19 nt, Artificial Sequence
  Synthetic
aaucucagagguauuuaug

SEQ ID NO: 604183 - RNA, 20 nt, Artificial Sequence
  Synthetic
caaucucagagguauuuaug

SEQ ID NO: 604184 - RNA, 21 nt, Artificial Sequence
  Synthetic
acaaucucagagguauuuaug

SEQ ID NO: 604185 - RNA, 22 nt, Artificial Sequence
  Synthetic
cacaaucucagagguauuuaug

SEQ ID NO: 604186 - RNA, 23 nt, Artificial Sequence
  Synthetic
ccacaaucucagagguauuuaug

SEQ ID NO: 604187 - RNA, 24 nt, Artificial Sequence
  Synthetic
accacaaucucagagguauuuaug

SEQ ID NO: 604188 - RNA, 18 nt, Artificial Sequence
  Synthetic
gaaacagaaaacuuuaug

SEQ ID NO: 604189 - RNA, 19 nt, Artificial Sequence
  Synthetic
agaaacagaaaacuuuaug

SEQ ID NO: 604190 - RNA, 20 nt, Artificial Sequence
  Synthetic
aagaaacagaaaacuuuaug

SEQ ID NO: 604191 - RNA, 21 nt, Artificial Sequence
  Synthetic
uaagaaacagaaaacuuuaug

SEQ ID NO: 604192 - RNA, 22 nt, Artificial Sequence
  Synthetic
cuaagaaacagaaaacuuuaug

SEQ ID NO: 604193 - RNA, 23 nt, Artificial Sequence
  Synthetic
ccuaagaaacagaaaacuuuaug

SEQ ID NO: 604194 - RNA, 24 nt, Artificial Sequence
  Synthetic
cccuaagaaacagaaaacuuuaug

SEQ ID NO: 604195 - RNA, 18 nt, Artificial Sequence
  Synthetic
cagguucuuaacuuuaug

SEQ ID NO: 604196 - RNA, 19 nt, Artificial Sequence
  Synthetic
gcagguucuuaacuuuaug

SEQ ID NO: 604197 - RNA, 20 nt, Artificial Sequence
  Synthetic
ggcagguucuuaacuuuaug

SEQ ID NO: 604198 - RNA, 21 nt, Artificial Sequence
  Synthetic
uggcagguucuuaacuuuaug

SEQ ID NO: 604199 - RNA, 22 nt, Artificial Sequence
  Synthetic
cuggcagguucuuaacuuuaug

SEQ ID NO: 604200 - RNA, 23 nt, Artificial Sequence
  Synthetic
acuggcagguucuuaacuuuaug

SEQ ID NO: 604201 - RNA, 24 nt, Artificial Sequence
  Synthetic
gacuggcagguucuuaacuuuaug

SEQ ID NO: 604202 - RNA, 18 nt, Artificial Sequence
  Synthetic
ccuaggcuggacuuuaug

SEQ ID NO: 604203 - RNA, 19 nt, Artificial Sequence
  Synthetic
accuaggcuggacuuuaug

SEQ ID NO: 604204 - RNA, 20 nt, Artificial Sequence
  Synthetic
uaccuaggcuggacuuuaug

SEQ ID NO: 604205 - RNA, 21 nt, Artificial Sequence
  Synthetic
guaccuaggcuggacuuuaug

SEQ ID NO: 604206 - RNA, 22 nt, Artificial Sequence
  Synthetic
cguaccuaggcuggacuuuaug

SEQ ID NO: 604207 - RNA, 23 nt, Artificial Sequence
  Synthetic
acguaccuaggcuggacuuuaug

SEQ ID NO: 604208 - RNA, 24 nt, Artificial Sequence
  Synthetic
uacguaccuaggcuggacuuuaug

SEQ ID NO: 604209 - RNA, 18 nt, Artificial Sequence
  Synthetic
uugaagcucuacuuuaug

SEQ ID NO: 604210 - RNA, 19 nt, Artificial Sequence
  Synthetic
uuugaagcucuacuuuaug

SEQ ID NO: 604211 - RNA, 20 nt, Artificial Sequence
  Synthetic
auuugaagcucuacuuuaug

SEQ ID NO: 604212 - RNA, 21 nt, Artificial Sequence
  Synthetic
aauuugaagcucuacuuuaug

SEQ ID NO: 604213 - RNA, 22 nt, Artificial Sequence
  Synthetic
caauuugaagcucuacuuuaug

SEQ ID NO: 604214 - RNA, 23 nt, Artificial Sequence
  Synthetic
acaauuugaagcucuacuuuaug

SEQ ID NO: 604215 - RNA, 24 nt, Artificial Sequence
  Synthetic
gacaauuugaagcucuacuuuaug

SEQ ID NO: 604216 - RNA, 18 nt, Artificial Sequence
  Synthetic
ugaaauuucugcuuuaug

SEQ ID NO: 604217 - RNA, 19 nt, Artificial Sequence
  Synthetic
augaaauuucugcuuuaug

SEQ ID NO: 604218 - RNA, 20 nt, Artificial Sequence
  Synthetic
uaugaaauuucugcuuuaug

SEQ ID NO: 604219 - RNA, 21 nt, Artificial Sequence
  Synthetic
cuaugaaauuucugcuuuaug

SEQ ID NO: 604220 - RNA, 22 nt, Artificial Sequence
  Synthetic
acuaugaaauuucugcuuuaug

SEQ ID NO: 604221 - RNA, 23 nt, Artificial Sequence
  Synthetic
aacuaugaaauuucugcuuuaug

SEQ ID NO: 604222 - RNA, 24 nt, Artificial Sequence
  Synthetic
aaacuaugaaauuucugcuuuaug

SEQ ID NO: 604223 - RNA, 18 nt, Artificial Sequence
  Synthetic
ugcacuuuugaguuuaug

SEQ ID NO: 604224 - RNA, 19 nt, Artificial Sequence
  Synthetic
uugcacuuuugaguuuaug

SEQ ID NO: 604225 - RNA, 20 nt, Artificial Sequence
  Synthetic
auugcacuuuugaguuuaug

SEQ ID NO: 604226 - RNA, 21 nt, Artificial Sequence
  Synthetic
gauugcacuuuugaguuuaug

SEQ ID NO: 604227 - RNA, 22 nt, Artificial Sequence
  Synthetic
agauugcacuuuugaguuuaug

SEQ ID NO: 604228 - RNA, 23 nt, Artificial Sequence
  Synthetic
uagauugcacuuuugaguuuaug

SEQ ID NO: 604229 - RNA, 24 nt, Artificial Sequence
  Synthetic
uuagauugcacuuuugaguuuaug

SEQ ID NO: 604230 - RNA, 18 nt, Artificial Sequence
  Synthetic
aagaauaaaucguuuaug

SEQ ID NO: 604231 - RNA, 19 nt, Artificial Sequence
  Synthetic
uaagaauaaaucguuuaug

SEQ ID NO: 604232 - RNA, 20 nt, Artificial Sequence
  Synthetic
uuaagaauaaaucguuuaug

SEQ ID NO: 604233 - RNA, 21 nt, Artificial Sequence
  Synthetic
cuuaagaauaaaucguuuaug

SEQ ID NO: 604234 - RNA, 22 nt, Artificial Sequence
  Synthetic
acuuaagaauaaaucguuuaug

SEQ ID NO: 604235 - RNA, 23 nt, Artificial Sequence
  Synthetic
aacuuaagaauaaaucguuuaug

SEQ ID NO: 604236 - RNA, 24 nt, Artificial Sequence
  Synthetic
aaacuuaagaauaaaucguuuaug

SEQ ID NO: 604237 - RNA, 18 nt, Artificial Sequence
  Synthetic
uggccucuauuguuuaug

SEQ ID NO: 604238 - RNA, 19 nt, Artificial Sequence
  Synthetic
cuggccucuauuguuuaug

SEQ ID NO: 604239 - RNA, 20 nt, Artificial Sequence
  Synthetic
ucuggccucuauuguuuaug

SEQ ID NO: 604240 - RNA, 21 nt, Artificial Sequence
  Synthetic
cucuggccucuauuguuuaug

SEQ ID NO: 604241 - RNA, 22 nt, Artificial Sequence
  Synthetic
ccucuggccucuauuguuuaug

SEQ ID NO: 604242 - RNA, 23 nt, Artificial Sequence
  Synthetic
accucuggccucuauuguuuaug

SEQ ID NO: 604243 - RNA, 24 nt, Artificial Sequence
  Synthetic
uaccucuggccucuauuguuuaug

SEQ ID NO: 604244 - RNA, 18 nt, Artificial Sequence
  Synthetic
uuacauaaguuguuuaug

SEQ ID NO: 604245 - RNA, 19 nt, Artificial Sequence
  Synthetic
cuuacauaaguuguuuaug

SEQ ID NO: 604246 - RNA, 20 nt, Artificial Sequence
  Synthetic
acuuacauaaguuguuuaug

SEQ ID NO: 604247 - RNA, 21 nt, Artificial Sequence
  Synthetic
cacuuacauaaguuguuuaug

SEQ ID NO: 604248 - RNA, 22 nt, Artificial Sequence
  Synthetic
acacuuacauaaguuguuuaug

SEQ ID NO: 604249 - RNA, 23 nt, Artificial Sequence
  Synthetic
uacacuuacauaaguuguuuaug

SEQ ID NO: 604250 - RNA, 24 nt, Artificial Sequence
  Synthetic
cuacacuuacauaaguuguuuaug

SEQ ID NO: 604251 - RNA, 18 nt, Artificial Sequence
  Synthetic
uacauuuuuaauuuuaug

SEQ ID NO: 604252 - RNA, 19 nt, Artificial Sequence
  Synthetic
cuacauuuuuaauuuuaug

SEQ ID NO: 604253 - RNA, 20 nt, Artificial Sequence
  Synthetic
gcuacauuuuuaauuuuaug

SEQ ID NO: 604254 - RNA, 21 nt, Artificial Sequence
  Synthetic
ggcuacauuuuuaauuuuaug

SEQ ID NO: 604255 - RNA, 22 nt, Artificial Sequence
  Synthetic
cggcuacauuuuuaauuuuaug

SEQ ID NO: 604256 - RNA, 23 nt, Artificial Sequence
  Synthetic
ucggcuacauuuuuaauuuuaug

SEQ ID NO: 604257 - RNA, 24 nt, Artificial Sequence
  Synthetic
gucggcuacauuuuuaauuuuaug

SEQ ID NO: 604258 - RNA, 18 nt, Artificial Sequence
  Synthetic
auaaaaguacauuuuaug

SEQ ID NO: 604259 - RNA, 19 nt, Artificial Sequence
  Synthetic
aauaaaaguacauuuuaug

SEQ ID NO: 604260 - RNA, 20 nt, Artificial Sequence
  Synthetic
uaauaaaaguacauuuuaug

SEQ ID NO: 604261 - RNA, 21 nt, Artificial Sequence
  Synthetic
cuaauaaaaguacauuuuaug

SEQ ID NO: 604262 - RNA, 22 nt, Artificial Sequence
  Synthetic
ccuaauaaaaguacauuuuaug

SEQ ID NO: 604263 - RNA, 23 nt, Artificial Sequence
  Synthetic
accuaauaaaaguacauuuuaug

SEQ ID NO: 604264 - RNA, 24 nt, Artificial Sequence
  Synthetic
caccuaauaaaaguacauuuuaug

SEQ ID NO: 604265 - RNA, 18 nt, Artificial Sequence
  Synthetic
ugauuugaagguuuuaug

SEQ ID NO: 604266 - RNA, 19 nt, Artificial Sequence
  Synthetic
uugauuugaagguuuuaug

SEQ ID NO: 604267 - RNA, 20 nt, Artificial Sequence
  Synthetic
auugauuugaagguuuuaug

SEQ ID NO: 604268 - RNA, 21 nt, Artificial Sequence
  Synthetic
cauugauuugaagguuuuaug

SEQ ID NO: 604269 - RNA, 22 nt, Artificial Sequence
  Synthetic
acauugauuugaagguuuuaug

SEQ ID NO: 604270 - RNA, 23 nt, Artificial Sequence
  Synthetic
cacauugauuugaagguuuuaug

SEQ ID NO: 604271 - RNA, 24 nt, Artificial Sequence
  Synthetic
ccacauugauuugaagguuuuaug

SEQ ID NO: 604272 - RNA, 18 nt, Artificial Sequence
  Synthetic
ggccagguagguuuuaug

SEQ ID NO: 604273 - RNA, 19 nt, Artificial Sequence
  Synthetic
gggccagguagguuuuaug

SEQ ID NO: 604274 - RNA, 20 nt, Artificial Sequence
  Synthetic
agggccagguagguuuuaug

SEQ ID NO: 604275 - RNA, 21 nt, Artificial Sequence
  Synthetic
gagggccagguagguuuuaug

SEQ ID NO: 604276 - RNA, 22 nt, Artificial Sequence
  Synthetic
ggagggccagguagguuuuaug

SEQ ID NO: 604277 - RNA, 23 nt, Artificial Sequence
  Synthetic
aggagggccagguagguuuuaug

SEQ ID NO: 604278 - RNA, 24 nt, Artificial Sequence
  Synthetic
gaggagggccagguagguuuuaug

SEQ ID NO: 604279 - RNA, 18 nt, Artificial Sequence
  Synthetic
aguacauacauuuuuaug

SEQ ID NO: 604280 - RNA, 19 nt, Artificial Sequence
  Synthetic
gaguacauacauuuuuaug

SEQ ID NO: 604281 - RNA, 20 nt, Artificial Sequence
  Synthetic
ugaguacauacauuuuuaug

SEQ ID NO: 604282 - RNA, 21 nt, Artificial Sequence
  Synthetic
cugaguacauacauuuuuaug

SEQ ID NO: 604283 - RNA, 22 nt, Artificial Sequence
  Synthetic
acugaguacauacauuuuuaug

SEQ ID NO: 604284 - RNA, 23 nt, Artificial Sequence
  Synthetic
uacugaguacauacauuuuuaug

SEQ ID NO: 604285 - RNA, 24 nt, Artificial Sequence
  Synthetic
cuacugaguacauacauuuuuaug

SEQ ID NO: 604286 - RNA, 18 nt, Artificial Sequence
  Synthetic
ucuuaucauuuuuuuaug

SEQ ID NO: 604287 - RNA, 19 nt, Artificial Sequence
  Synthetic
uucuuaucauuuuuuuaug

SEQ ID NO: 604288 - RNA, 20 nt, Artificial Sequence
  Synthetic
auucuuaucauuuuuuuaug

SEQ ID NO: 604289 - RNA, 21 nt, Artificial Sequence
  Synthetic
cauucuuaucauuuuuuuaug

SEQ ID NO: 604290 - RNA, 22 nt, Artificial Sequence
  Synthetic
acauucuuaucauuuuuuuaug

SEQ ID NO: 604291 - RNA, 23 nt, Artificial Sequence
  Synthetic
cacauucuuaucauuuuuuuaug

SEQ ID NO: 604292 - RNA, 24 nt, Artificial Sequence
  Synthetic
ccacauucuuaucauuuuuuuaug

SEQ ID NO: 604293 - RNA, 18 nt, Artificial Sequence
  Synthetic
gggcauaaagaaaaacug

SEQ ID NO: 604294 - RNA, 19 nt, Artificial Sequence
  Synthetic
ugggcauaaagaaaaacug

SEQ ID NO: 604295 - RNA, 20 nt, Artificial Sequence
  Synthetic
augggcauaaagaaaaacug

SEQ ID NO: 604296 - RNA, 21 nt, Artificial Sequence
  Synthetic
aaugggcauaaagaaaaacug

SEQ ID NO: 604297 - RNA, 22 nt, Artificial Sequence
  Synthetic
uaaugggcauaaagaaaaacug

SEQ ID NO: 604298 - RNA, 23 nt, Artificial Sequence
  Synthetic
cuaaugggcauaaagaaaaacug

SEQ ID NO: 604299 - RNA, 24 nt, Artificial Sequence
  Synthetic
acuaaugggcauaaagaaaaacug

SEQ ID NO: 604300 - RNA, 18 nt, Artificial Sequence
  Synthetic
aaucucagcuaaaaacug

SEQ ID NO: 604301 - RNA, 19 nt, Artificial Sequence
  Synthetic
aaaucucagcuaaaaacug

SEQ ID NO: 604302 - RNA, 20 nt, Artificial Sequence
  Synthetic
uaaaucucagcuaaaaacug

SEQ ID NO: 604303 - RNA, 21 nt, Artificial Sequence
  Synthetic
guaaaucucagcuaaaaacug

SEQ ID NO: 604304 - RNA, 22 nt, Artificial Sequence
  Synthetic
aguaaaucucagcuaaaaacug

SEQ ID NO: 604305 - RNA, 23 nt, Artificial Sequence
  Synthetic
caguaaaucucagcuaaaaacug

SEQ ID NO: 604306 - RNA, 24 nt, Artificial Sequence
  Synthetic
ccaguaaaucucagcuaaaaacug

SEQ ID NO: 604307 - RNA, 18 nt, Artificial Sequence
  Synthetic
uuaauaccuccaaaacug

SEQ ID NO: 604308 - RNA, 19 nt, Artificial Sequence
  Synthetic
uuuaauaccuccaaaacug

SEQ ID NO: 604309 - RNA, 20 nt, Artificial Sequence
  Synthetic
uuuuaauaccuccaaaacug

SEQ ID NO: 604310 - RNA, 21 nt, Artificial Sequence
  Synthetic
auuuuaauaccuccaaaacug

SEQ ID NO: 604311 - RNA, 22 nt, Artificial Sequence
  Synthetic
cauuuuaauaccuccaaaacug

SEQ ID NO: 604312 - RNA, 23 nt, Artificial Sequence
  Synthetic
ccauuuuaauaccuccaaaacug

SEQ ID NO: 604313 - RNA, 24 nt, Artificial Sequence
  Synthetic
gccauuuuaauaccuccaaaacug

SEQ ID NO: 604314 - RNA, 18 nt, Artificial Sequence
  Synthetic
cuauaguguagaaaacug

SEQ ID NO: 604315 - RNA, 19 nt, Artificial Sequence
  Synthetic
acuauaguguagaaaacug

SEQ ID NO: 604316 - RNA, 20 nt, Artificial Sequence
  Synthetic
aacuauaguguagaaaacug

SEQ ID NO: 604317 - RNA, 21 nt, Artificial Sequence
  Synthetic
uaacuauaguguagaaaacug

SEQ ID NO: 604318 - RNA, 22 nt, Artificial Sequence
  Synthetic
uuaacuauaguguagaaaacug

SEQ ID NO: 604319 - RNA, 23 nt, Artificial Sequence
  Synthetic
auuaacuauaguguagaaaacug

SEQ ID NO: 604320 - RNA, 24 nt, Artificial Sequence
  Synthetic
cauuaacuauaguguagaaaacug

SEQ ID NO: 604321 - RNA, 18 nt, Artificial Sequence
  Synthetic
guauguuuacgaaaacug

SEQ ID NO: 604322 - RNA, 19 nt, Artificial Sequence
  Synthetic
uguauguuuacgaaaacug

SEQ ID NO: 604323 - RNA, 20 nt, Artificial Sequence
  Synthetic
cuguauguuuacgaaaacug

SEQ ID NO: 604324 - RNA, 21 nt, Artificial Sequence
  Synthetic
ucuguauguuuacgaaaacug

SEQ ID NO: 604325 - RNA, 22 nt, Artificial Sequence
  Synthetic
cucuguauguuuacgaaaacug

SEQ ID NO: 604326 - RNA, 23 nt, Artificial Sequence
  Synthetic
ucucuguauguuuacgaaaacug

SEQ ID NO: 604327 - RNA, 24 nt, Artificial Sequence
  Synthetic
uucucuguauguuuacgaaaacug

SEQ ID NO: 604328 - RNA, 18 nt, Artificial Sequence
  Synthetic
ucacgucauugaaaacug

SEQ ID NO: 604329 - RNA, 19 nt, Artificial Sequence
  Synthetic
uucacgucauugaaaacug

SEQ ID NO: 604330 - RNA, 20 nt, Artificial Sequence
  Synthetic
guucacgucauugaaaacug

SEQ ID NO: 604331 - RNA, 21 nt, Artificial Sequence
  Synthetic
gguucacgucauugaaaacug

SEQ ID NO: 604332 - RNA, 22 nt, Artificial Sequence
  Synthetic
ugguucacgucauugaaaacug

SEQ ID NO: 604333 - RNA, 23 nt, Artificial Sequence
  Synthetic
cugguucacgucauugaaaacug

SEQ ID NO: 604334 - RNA, 24 nt, Artificial Sequence
  Synthetic
acugguucacgucauugaaaacug

SEQ ID NO: 604335 - RNA, 18 nt, Artificial Sequence
  Synthetic
ggauggcuuugcaaacug

SEQ ID NO: 604336 - RNA, 19 nt, Artificial Sequence
  Synthetic
uggauggcuuugcaaacug

SEQ ID NO: 604337 - RNA, 20 nt, Artificial Sequence
  Synthetic
guggauggcuuugcaaacug

SEQ ID NO: 604338 - RNA, 21 nt, Artificial Sequence
  Synthetic
aguggauggcuuugcaaacug

SEQ ID NO: 604339 - RNA, 22 nt, Artificial Sequence
  Synthetic
gaguggauggcuuugcaaacug

SEQ ID NO: 604340 - RNA, 23 nt, Artificial Sequence
  Synthetic
ugaguggauggcuuugcaaacug

SEQ ID NO: 604341 - RNA, 24 nt, Artificial Sequence
  Synthetic
uugaguggauggcuuugcaaacug

SEQ ID NO: 604342 - RNA, 18 nt, Artificial Sequence
  Synthetic
cccaccccgcucaaacug

SEQ ID NO: 604343 - RNA, 19 nt, Artificial Sequence
  Synthetic
ccccaccccgcucaaacug

SEQ ID NO: 604344 - RNA, 20 nt, Artificial Sequence
  Synthetic
uccccaccccgcucaaacug

SEQ ID NO: 604345 - RNA, 21 nt, Artificial Sequence
  Synthetic
cuccccaccccgcucaaacug

SEQ ID NO: 604346 - RNA, 22 nt, Artificial Sequence
  Synthetic
ucuccccaccccgcucaaacug

SEQ ID NO: 604347 - RNA, 23 nt, Artificial Sequence
  Synthetic
cucuccccaccccgcucaaacug

SEQ ID NO: 604348 - RNA, 24 nt, Artificial Sequence
  Synthetic
gcucuccccaccccgcucaaacug

SEQ ID NO: 604349 - RNA, 18 nt, Artificial Sequence
  Synthetic
ggcuuucacuucaaacug

SEQ ID NO: 604350 - RNA, 19 nt, Artificial Sequence
  Synthetic
uggcuuucacuucaaacug

SEQ ID NO: 604351 - RNA, 20 nt, Artificial Sequence
  Synthetic
auggcuuucacuucaaacug

SEQ ID NO: 604352 - RNA, 21 nt, Artificial Sequence
  Synthetic
uauggcuuucacuucaaacug

SEQ ID NO: 604353 - RNA, 22 nt, Artificial Sequence
  Synthetic
guauggcuuucacuucaaacug

SEQ ID NO: 604354 - RNA, 23 nt, Artificial Sequence
  Synthetic
aguauggcuuucacuucaaacug

SEQ ID NO: 604355 - RNA, 24 nt, Artificial Sequence
  Synthetic
gaguauggcuuucacuucaaacug

SEQ ID NO: 604356 - RNA, 18 nt, Artificial Sequence
  Synthetic
agaggccaccagaaacug

SEQ ID NO: 604357 - RNA, 19 nt, Artificial Sequence
  Synthetic
uagaggccaccagaaacug

SEQ ID NO: 604358 - RNA, 20 nt, Artificial Sequence
  Synthetic
auagaggccaccagaaacug

SEQ ID NO: 604359 - RNA, 21 nt, Artificial Sequence
  Synthetic
uauagaggccaccagaaacug

SEQ ID NO: 604360 - RNA, 22 nt, Artificial Sequence
  Synthetic
guauagaggccaccagaaacug

SEQ ID NO: 604361 - RNA, 23 nt, Artificial Sequence
  Synthetic
gguauagaggccaccagaaacug

SEQ ID NO: 604362 - RNA, 24 nt, Artificial Sequence
  Synthetic
ggguauagaggccaccagaaacug

SEQ ID NO: 604363 - RNA, 18 nt, Artificial Sequence
  Synthetic
uugaugaugaggaaacug

SEQ ID NO: 604364 - RNA, 19 nt, Artificial Sequence
  Synthetic
uuugaugaugaggaaacug

SEQ ID NO: 604365 - RNA, 20 nt, Artificial Sequence
  Synthetic
uuuugaugaugaggaaacug

SEQ ID NO: 604366 - RNA, 21 nt, Artificial Sequence
  Synthetic
auuuugaugaugaggaaacug

SEQ ID NO: 604367 - RNA, 22 nt, Artificial Sequence
  Synthetic
gauuuugaugaugaggaaacug

SEQ ID NO: 604368 - RNA, 23 nt, Artificial Sequence
  Synthetic
ugauuuugaugaugaggaaacug

SEQ ID NO: 604369 - RNA, 24 nt, Artificial Sequence
  Synthetic
augauuuugaugaugaggaaacug

SEQ ID NO: 604370 - RNA, 18 nt, Artificial Sequence
  Synthetic
agcugacaugggaaacug

SEQ ID NO: 604371 - RNA, 19 nt, Artificial Sequence
  Synthetic
uagcugacaugggaaacug

SEQ ID NO: 604372 - RNA, 20 nt, Artificial Sequence
  Synthetic
guagcugacaugggaaacug

SEQ ID NO: 604373 - RNA, 21 nt, Artificial Sequence
  Synthetic
gguagcugacaugggaaacug

SEQ ID NO: 604374 - RNA, 22 nt, Artificial Sequence
  Synthetic
cgguagcugacaugggaaacug

SEQ ID NO: 604375 - RNA, 23 nt, Artificial Sequence
  Synthetic
gcgguagcugacaugggaaacug

SEQ ID NO: 604376 - RNA, 24 nt, Artificial Sequence
  Synthetic
ugcgguagcugacaugggaaacug

SEQ ID NO: 604377 - RNA, 18 nt, Artificial Sequence
  Synthetic
caugggucacugaaacug

SEQ ID NO: 604378 - RNA, 19 nt, Artificial Sequence
  Synthetic
ccaugggucacugaaacug

SEQ ID NO: 604379 - RNA, 20 nt, Artificial Sequence
  Synthetic
accaugggucacugaaacug

SEQ ID NO: 604380 - RNA, 21 nt, Artificial Sequence
  Synthetic
gaccaugggucacugaaacug

SEQ ID NO: 604381 - RNA, 22 nt, Artificial Sequence
  Synthetic
ugaccaugggucacugaaacug

SEQ ID NO: 604382 - RNA, 23 nt, Artificial Sequence
  Synthetic
uugaccaugggucacugaaacug

SEQ ID NO: 604383 - RNA, 24 nt, Artificial Sequence
  Synthetic
guugaccaugggucacugaaacug

SEQ ID NO: 604384 - RNA, 18 nt, Artificial Sequence
  Synthetic
caaccaacucugaaacug

SEQ ID NO: 604385 - RNA, 19 nt, Artificial Sequence
  Synthetic
acaaccaacucugaaacug

SEQ ID NO: 604386 - RNA, 20 nt, Artificial Sequence
  Synthetic
aacaaccaacucugaaacug

SEQ ID NO: 604387 - RNA, 21 nt, Artificial Sequence
  Synthetic
gaacaaccaacucugaaacug

SEQ ID NO: 604388 - RNA, 22 nt, Artificial Sequence
  Synthetic
agaacaaccaacucugaaacug

SEQ ID NO: 604389 - RNA, 23 nt, Artificial Sequence
  Synthetic
cagaacaaccaacucugaaacug

SEQ ID NO: 604390 - RNA, 24 nt, Artificial Sequence
  Synthetic
acagaacaaccaacucugaaacug

SEQ ID NO: 604391 - RNA, 18 nt, Artificial Sequence
  Synthetic
uguaaacucuauaaacug

SEQ ID NO: 604392 - RNA, 19 nt, Artificial Sequence
  Synthetic
cuguaaacucuauaaacug

SEQ ID NO: 604393 - RNA, 20 nt, Artificial Sequence
  Synthetic
ucuguaaacucuauaaacug

SEQ ID NO: 604394 - RNA, 21 nt, Artificial Sequence
  Synthetic
cucuguaaacucuauaaacug

SEQ ID NO: 604395 - RNA, 22 nt, Artificial Sequence
  Synthetic
gcucuguaaacucuauaaacug

SEQ ID NO: 604396 - RNA, 23 nt, Artificial Sequence
  Synthetic
ugcucuguaaacucuauaaacug

SEQ ID NO: 604397 - RNA, 24 nt, Artificial Sequence
  Synthetic
gugcucuguaaacucuauaaacug

SEQ ID NO: 604398 - RNA, 18 nt, Artificial Sequence
  Synthetic
uccuccaaaaguaaacug

SEQ ID NO: 604399 - RNA, 19 nt, Artificial Sequence
  Synthetic
auccuccaaaaguaaacug

SEQ ID NO: 604400 - RNA, 20 nt, Artificial Sequence
  Synthetic
gauccuccaaaaguaaacug

SEQ ID NO: 604401 - RNA, 21 nt, Artificial Sequence
  Synthetic
agauccuccaaaaguaaacug

SEQ ID NO: 604402 - RNA, 22 nt, Artificial Sequence
  Synthetic
cagauccuccaaaaguaaacug

SEQ ID NO: 604403 - RNA, 23 nt, Artificial Sequence
  Synthetic
gcagauccuccaaaaguaaacug

SEQ ID NO: 604404 - RNA, 24 nt, Artificial Sequence
  Synthetic
agcagauccuccaaaaguaaacug

SEQ ID NO: 604405 - RNA, 18 nt, Artificial Sequence
  Synthetic
ugggaucuaauuaaacug

SEQ ID NO: 604406 - RNA, 19 nt, Artificial Sequence
  Synthetic
augggaucuaauuaaacug

SEQ ID NO: 604407 - RNA, 20 nt, Artificial Sequence
  Synthetic
aaugggaucuaauuaaacug

SEQ ID NO: 604408 - RNA, 21 nt, Artificial Sequence
  Synthetic
aaaugggaucuaauuaaacug

SEQ ID NO: 604409 - RNA, 22 nt, Artificial Sequence
  Synthetic
caaaugggaucuaauuaaacug

SEQ ID NO: 604410 - RNA, 23 nt, Artificial Sequence
  Synthetic
acaaaugggaucuaauuaaacug

SEQ ID NO: 604411 - RNA, 24 nt, Artificial Sequence
  Synthetic
gacaaaugggaucuaauuaaacug

SEQ ID NO: 604412 - RNA, 18 nt, Artificial Sequence
  Synthetic
ucgggacuguuuaaacug

SEQ ID NO: 604413 - RNA, 19 nt, Artificial Sequence
  Synthetic
uucgggacuguuuaaacug

SEQ ID NO: 604414 - RNA, 20 nt, Artificial Sequence
  Synthetic
auucgggacuguuuaaacug

SEQ ID NO: 604415 - RNA, 21 nt, Artificial Sequence
  Synthetic
aauucgggacuguuuaaacug

SEQ ID NO: 604416 - RNA, 22 nt, Artificial Sequence
  Synthetic
aaauucgggacuguuuaaacug

SEQ ID NO: 604417 - RNA, 23 nt, Artificial Sequence
  Synthetic
aaaauucgggacuguuuaaacug

SEQ ID NO: 604418 - RNA, 24 nt, Artificial Sequence
  Synthetic
aaaaauucgggacuguuuaaacug

SEQ ID NO: 604419 - RNA, 18 nt, Artificial Sequence
  Synthetic
ugggauggacaacaacug

SEQ ID NO: 604420 - RNA, 19 nt, Artificial Sequence
  Synthetic
gugggauggacaacaacug

SEQ ID NO: 604421 - RNA, 20 nt, Artificial Sequence
  Synthetic
agugggauggacaacaacug

SEQ ID NO: 604422 - RNA, 21 nt, Artificial Sequence
  Synthetic
gagugggauggacaacaacug

SEQ ID NO: 604423 - RNA, 22 nt, Artificial Sequence
  Synthetic
ggagugggauggacaacaacug

SEQ ID NO: 604424 - RNA, 23 nt, Artificial Sequence
  Synthetic
gggagugggauggacaacaacug

SEQ ID NO: 604425 - RNA, 24 nt, Artificial Sequence
  Synthetic
ggggagugggauggacaacaacug

SEQ ID NO: 604426 - RNA, 18 nt, Artificial Sequence
  Synthetic
accuucuaucaacaacug

SEQ ID NO: 604427 - RNA, 19 nt, Artificial Sequence
  Synthetic
uaccuucuaucaacaacug

SEQ ID NO: 604428 - RNA, 20 nt, Artificial Sequence
  Synthetic
auaccuucuaucaacaacug

SEQ ID NO: 604429 - RNA, 21 nt, Artificial Sequence
  Synthetic
aauaccuucuaucaacaacug

SEQ ID NO: 604430 - RNA, 22 nt, Artificial Sequence
  Synthetic
gaauaccuucuaucaacaacug

SEQ ID NO: 604431 - RNA, 23 nt, Artificial Sequence
  Synthetic
ugaauaccuucuaucaacaacug

SEQ ID NO: 604432 - RNA, 24 nt, Artificial Sequence
  Synthetic
augaauaccuucuaucaacaacug

SEQ ID NO: 604433 - RNA, 18 nt, Artificial Sequence
  Synthetic
uuuuaaaguagacaacug

SEQ ID NO: 604434 - RNA, 19 nt, Artificial Sequence
  Synthetic
auuuuaaaguagacaacug

SEQ ID NO: 604435 - RNA, 20 nt, Artificial Sequence
  Synthetic
aauuuuaaaguagacaacug

SEQ ID NO: 604436 - RNA, 21 nt, Artificial Sequence
  Synthetic
caauuuuaaaguagacaacug

SEQ ID NO: 604437 - RNA, 22 nt, Artificial Sequence
  Synthetic
ucaauuuuaaaguagacaacug

SEQ ID NO: 604438 - RNA, 23 nt, Artificial Sequence
  Synthetic
uucaauuuuaaaguagacaacug

SEQ ID NO: 604439 - RNA, 24 nt, Artificial Sequence
  Synthetic
guucaauuuuaaaguagacaacug

SEQ ID NO: 604440 - RNA, 18 nt, Artificial Sequence
  Synthetic
cugaaauaaugacaacug

SEQ ID NO: 604441 - RNA, 19 nt, Artificial Sequence
  Synthetic
acugaaauaaugacaacug

SEQ ID NO: 604442 - RNA, 20 nt, Artificial Sequence
  Synthetic
aacugaaauaaugacaacug

SEQ ID NO: 604443 - RNA, 21 nt, Artificial Sequence
  Synthetic
aaacugaaauaaugacaacug

SEQ ID NO: 604444 - RNA, 22 nt, Artificial Sequence
  Synthetic
caaacugaaauaaugacaacug

SEQ ID NO: 604445 - RNA, 23 nt, Artificial Sequence
  Synthetic
ccaaacugaaauaaugacaacug

SEQ ID NO: 604446 - RNA, 24 nt, Artificial Sequence
  Synthetic
cccaaacugaaauaaugacaacug

SEQ ID NO: 604447 - RNA, 18 nt, Artificial Sequence
  Synthetic
uuucuaacaugacaacug

SEQ ID NO: 604448 - RNA, 19 nt, Artificial Sequence
  Synthetic
uuuucuaacaugacaacug

SEQ ID NO: 604449 - RNA, 20 nt, Artificial Sequence
  Synthetic
uuuuucuaacaugacaacug

SEQ ID NO: 604450 - RNA, 21 nt, Artificial Sequence
  Synthetic
cuuuuucuaacaugacaacug

SEQ ID NO: 604451 - RNA, 22 nt, Artificial Sequence
  Synthetic
acuuuuucuaacaugacaacug

SEQ ID NO: 604452 - RNA, 23 nt, Artificial Sequence
  Synthetic
aacuuuuucuaacaugacaacug

SEQ ID NO: 604453 - RNA, 24 nt, Artificial Sequence
  Synthetic
caacuuuuucuaacaugacaacug

SEQ ID NO: 604454 - RNA, 18 nt, Artificial Sequence
  Synthetic
uaaguaauaauacaacug

SEQ ID NO: 604455 - RNA, 19 nt, Artificial Sequence
  Synthetic
auaaguaauaauacaacug

SEQ ID NO: 604456 - RNA, 20 nt, Artificial Sequence
  Synthetic
cauaaguaauaauacaacug

SEQ ID NO: 604457 - RNA, 21 nt, Artificial Sequence
  Synthetic
ucauaaguaauaauacaacug

SEQ ID NO: 604458 - RNA, 22 nt, Artificial Sequence
  Synthetic
uucauaaguaauaauacaacug

SEQ ID NO: 604459 - RNA, 23 nt, Artificial Sequence
  Synthetic
guucauaaguaauaauacaacug

SEQ ID NO: 604460 - RNA, 24 nt, Artificial Sequence
  Synthetic
uguucauaaguaauaauacaacug

SEQ ID NO: 604461 - RNA, 18 nt, Artificial Sequence
  Synthetic
cugcagauuuuacaacug

SEQ ID NO: 604462 - RNA, 19 nt, Artificial Sequence
  Synthetic
acugcagauuuuacaacug

SEQ ID NO: 604463 - RNA, 20 nt, Artificial Sequence
  Synthetic
aacugcagauuuuacaacug

SEQ ID NO: 604464 - RNA, 21 nt, Artificial Sequence
  Synthetic
uaacugcagauuuuacaacug

SEQ ID NO: 604465 - RNA, 22 nt, Artificial Sequence
  Synthetic
cuaacugcagauuuuacaacug

SEQ ID NO: 604466 - RNA, 23 nt, Artificial Sequence
  Synthetic
ucuaacugcagauuuuacaacug

SEQ ID NO: 604467 - RNA, 24 nt, Artificial Sequence
  Synthetic
cucuaacugcagauuuuacaacug

SEQ ID NO: 604468 - RNA, 18 nt, Artificial Sequence
  Synthetic
guccaucauaaccaacug

SEQ ID NO: 604469 - RNA, 19 nt, Artificial Sequence
  Synthetic
aguccaucauaaccaacug

SEQ ID NO: 604470 - RNA, 20 nt, Artificial Sequence
  Synthetic
aaguccaucauaaccaacug

SEQ ID NO: 604471 - RNA, 21 nt, Artificial Sequence
  Synthetic
gaaguccaucauaaccaacug

SEQ ID NO: 604472 - RNA, 22 nt, Artificial Sequence
  Synthetic
ugaaguccaucauaaccaacug

SEQ ID NO: 604473 - RNA, 23 nt, Artificial Sequence
  Synthetic
gugaaguccaucauaaccaacug

SEQ ID NO: 604474 - RNA, 24 nt, Artificial Sequence
  Synthetic
agugaaguccaucauaaccaacug

SEQ ID NO: 604475 - RNA, 18 nt, Artificial Sequence
  Synthetic
gaccagccuaggcaacug

SEQ ID NO: 604476 - RNA, 19 nt, Artificial Sequence
  Synthetic
agaccagccuaggcaacug

SEQ ID NO: 604477 - RNA, 20 nt, Artificial Sequence
  Synthetic
gagaccagccuaggcaacug

SEQ ID NO: 604478 - RNA, 21 nt, Artificial Sequence
  Synthetic
ugagaccagccuaggcaacug

SEQ ID NO: 604479 - RNA, 22 nt, Artificial Sequence
  Synthetic
uugagaccagccuaggcaacug

SEQ ID NO: 604480 - RNA, 23 nt, Artificial Sequence
  Synthetic
auugagaccagccuaggcaacug

SEQ ID NO: 604481 - RNA, 24 nt, Artificial Sequence
  Synthetic
gauugagaccagccuaggcaacug

SEQ ID NO: 604482 - RNA, 18 nt, Artificial Sequence
  Synthetic
uaguaguucuaucaacug

SEQ ID NO: 604483 - RNA, 19 nt, Artificial Sequence
  Synthetic
uuaguaguucuaucaacug

SEQ ID NO: 604484 - RNA, 20 nt, Artificial Sequence
  Synthetic
uuuaguaguucuaucaacug

SEQ ID NO: 604485 - RNA, 21 nt, Artificial Sequence
  Synthetic
auuuaguaguucuaucaacug

SEQ ID NO: 604486 - RNA, 22 nt, Artificial Sequence
  Synthetic
cauuuaguaguucuaucaacug

SEQ ID NO: 604487 - RNA, 23 nt, Artificial Sequence
  Synthetic
ccauuuaguaguucuaucaacug

SEQ ID NO: 604488 - RNA, 24 nt, Artificial Sequence
  Synthetic
uccauuuaguaguucuaucaacug

SEQ ID NO: 604489 - RNA, 18 nt, Artificial Sequence
  Synthetic
auucaguuuccucaacug

SEQ ID NO: 604490 - RNA, 19 nt, Artificial Sequence
  Synthetic
uauucaguuuccucaacug

SEQ ID NO: 604491 - RNA, 20 nt, Artificial Sequence
  Synthetic
uuauucaguuuccucaacug

SEQ ID NO: 604492 - RNA, 21 nt, Artificial Sequence
  Synthetic
cuuauucaguuuccucaacug

SEQ ID NO: 604493 - RNA, 22 nt, Artificial Sequence
  Synthetic
ucuuauucaguuuccucaacug

SEQ ID NO: 604494 - RNA, 23 nt, Artificial Sequence
  Synthetic
cucuuauucaguuuccucaacug

SEQ ID NO: 604495 - RNA, 24 nt, Artificial Sequence
  Synthetic
ccucuuauucaguuuccucaacug

SEQ ID NO: 604496 - RNA, 18 nt, Artificial Sequence
  Synthetic
ucaacugggucucaacug

SEQ ID NO: 604497 - RNA, 19 nt, Artificial Sequence
  Synthetic
uucaacugggucucaacug

SEQ ID NO: 604498 - RNA, 20 nt, Artificial Sequence
  Synthetic
cuucaacugggucucaacug

SEQ ID NO: 604499 - RNA, 21 nt, Artificial Sequence
  Synthetic
acuucaacugggucucaacug

SEQ ID NO: 604500 - RNA, 22 nt, Artificial Sequence
  Synthetic
cacuucaacugggucucaacug

SEQ ID NO: 604501 - RNA, 23 nt, Artificial Sequence
  Synthetic
ccacuucaacugggucucaacug

SEQ ID NO: 604502 - RNA, 24 nt, Artificial Sequence
  Synthetic
accacuucaacugggucucaacug

SEQ ID NO: 604503 - RNA, 18 nt, Artificial Sequence
  Synthetic
gcuugacaaauucaacug

SEQ ID NO: 604504 - RNA, 19 nt, Artificial Sequence
  Synthetic
agcuugacaaauucaacug

SEQ ID NO: 604505 - RNA, 20 nt, Artificial Sequence
  Synthetic
gagcuugacaaauucaacug

SEQ ID NO: 604506 - RNA, 21 nt, Artificial Sequence
  Synthetic
ugagcuugacaaauucaacug

SEQ ID NO: 604507 - RNA, 22 nt, Artificial Sequence
  Synthetic
augagcuugacaaauucaacug

SEQ ID NO: 604508 - RNA, 23 nt, Artificial Sequence
  Synthetic
caugagcuugacaaauucaacug

SEQ ID NO: 604509 - RNA, 24 nt, Artificial Sequence
  Synthetic
ccaugagcuugacaaauucaacug

SEQ ID NO: 604510 - RNA, 18 nt, Artificial Sequence
  Synthetic
agacaagugaaagaacug

SEQ ID NO: 604511 - RNA, 19 nt, Artificial Sequence
  Synthetic
aagacaagugaaagaacug

SEQ ID NO: 604512 - RNA, 20 nt, Artificial Sequence
  Synthetic
aaagacaagugaaagaacug

SEQ ID NO: 604513 - RNA, 21 nt, Artificial Sequence
  Synthetic
gaaagacaagugaaagaacug

SEQ ID NO: 604514 - RNA, 22 nt, Artificial Sequence
  Synthetic
agaaagacaagugaaagaacug

SEQ ID NO: 604515 - RNA, 23 nt, Artificial Sequence
  Synthetic
cagaaagacaagugaaagaacug

SEQ ID NO: 604516 - RNA, 24 nt, Artificial Sequence
  Synthetic
acagaaagacaagugaaagaacug

SEQ ID NO: 604517 - RNA, 18 nt, Artificial Sequence
  Synthetic
caugcagcucaagaacug

SEQ ID NO: 604518 - RNA, 19 nt, Artificial Sequence
  Synthetic
acaugcagcucaagaacug

SEQ ID NO: 604519 - RNA, 20 nt, Artificial Sequence
  Synthetic
cacaugcagcucaagaacug

SEQ ID NO: 604520 - RNA, 21 nt, Artificial Sequence
  Synthetic
acacaugcagcucaagaacug

SEQ ID NO: 604521 - RNA, 22 nt, Artificial Sequence
  Synthetic
aacacaugcagcucaagaacug

SEQ ID NO: 604522 - RNA, 23 nt, Artificial Sequence
  Synthetic
caacacaugcagcucaagaacug

SEQ ID NO: 604523 - RNA, 24 nt, Artificial Sequence
  Synthetic
ucaacacaugcagcucaagaacug

SEQ ID NO: 604524 - RNA, 18 nt, Artificial Sequence
  Synthetic
acaguugccuaagaacug

SEQ ID NO: 604525 - RNA, 19 nt, Artificial Sequence
  Synthetic
aacaguugccuaagaacug

SEQ ID NO: 604526 - RNA, 20 nt, Artificial Sequence
  Synthetic
aaacaguugccuaagaacug

SEQ ID NO: 604527 - RNA, 21 nt, Artificial Sequence
  Synthetic
gaaacaguugccuaagaacug

SEQ ID NO: 604528 - RNA, 22 nt, Artificial Sequence
  Synthetic
agaaacaguugccuaagaacug

SEQ ID NO: 604529 - RNA, 23 nt, Artificial Sequence
  Synthetic
gagaaacaguugccuaagaacug

SEQ ID NO: 604530 - RNA, 24 nt, Artificial Sequence
  Synthetic
agagaaacaguugccuaagaacug

SEQ ID NO: 604531 - RNA, 18 nt, Artificial Sequence
  Synthetic
aacacugaguaagaacug

SEQ ID NO: 604532 - RNA, 19 nt, Artificial Sequence
  Synthetic
gaacacugaguaagaacug

SEQ ID NO: 604533 - RNA, 20 nt, Artificial Sequence
  Synthetic
agaacacugaguaagaacug

SEQ ID NO: 604534 - RNA, 21 nt, Artificial Sequence
  Synthetic
gagaacacugaguaagaacug

SEQ ID NO: 604535 - RNA, 22 nt, Artificial Sequence
  Synthetic
agagaacacugaguaagaacug

SEQ ID NO: 604536 - RNA, 23 nt, Artificial Sequence
  Synthetic
cagagaacacugaguaagaacug

SEQ ID NO: 604537 - RNA, 24 nt, Artificial Sequence
  Synthetic
acagagaacacugaguaagaacug

SEQ ID NO: 604538 - RNA, 18 nt, Artificial Sequence
  Synthetic
aaaaucagagcagaacug

SEQ ID NO: 604539 - RNA, 19 nt, Artificial Sequence
  Synthetic
uaaaaucagagcagaacug

SEQ ID NO: 604540 - RNA, 20 nt, Artificial Sequence
  Synthetic
cuaaaaucagagcagaacug

SEQ ID NO: 604541 - RNA, 21 nt, Artificial Sequence
  Synthetic
acuaaaaucagagcagaacug

SEQ ID NO: 604542 - RNA, 22 nt, Artificial Sequence
  Synthetic
aacuaaaaucagagcagaacug

SEQ ID NO: 604543 - RNA, 23 nt, Artificial Sequence
  Synthetic
uaacuaaaaucagagcagaacug

SEQ ID NO: 604544 - RNA, 24 nt, Artificial Sequence
  Synthetic
auaacuaaaaucagagcagaacug

SEQ ID NO: 604545 - RNA, 18 nt, Artificial Sequence
  Synthetic
aagacauauaaggaacug

SEQ ID NO: 604546 - RNA, 19 nt, Artificial Sequence
  Synthetic
aaagacauauaaggaacug

SEQ ID NO: 604547 - RNA, 20 nt, Artificial Sequence
  Synthetic
caaagacauauaaggaacug

SEQ ID NO: 604548 - RNA, 21 nt, Artificial Sequence
  Synthetic
acaaagacauauaaggaacug

SEQ ID NO: 604549 - RNA, 22 nt, Artificial Sequence
  Synthetic
uacaaagacauauaaggaacug

SEQ ID NO: 604550 - RNA, 23 nt, Artificial Sequence
  Synthetic
auacaaagacauauaaggaacug

SEQ ID NO: 604551 - RNA, 24 nt, Artificial Sequence
  Synthetic
cauacaaagacauauaaggaacug

SEQ ID NO: 604552 - RNA, 18 nt, Artificial Sequence
  Synthetic
cauccugccaaugaacug

SEQ ID NO: 604553 - RNA, 19 nt, Artificial Sequence
  Synthetic
acauccugccaaugaacug

SEQ ID NO: 604554 - RNA, 20 nt, Artificial Sequence
  Synthetic
aacauccugccaaugaacug

SEQ ID NO: 604555 - RNA, 21 nt, Artificial Sequence
  Synthetic
aaacauccugccaaugaacug

SEQ ID NO: 604556 - RNA, 22 nt, Artificial Sequence
  Synthetic
caaacauccugccaaugaacug

SEQ ID NO: 604557 - RNA, 23 nt, Artificial Sequence
  Synthetic
gcaaacauccugccaaugaacug

SEQ ID NO: 604558 - RNA, 24 nt, Artificial Sequence
  Synthetic
agcaaacauccugccaaugaacug

SEQ ID NO: 604559 - RNA, 18 nt, Artificial Sequence
  Synthetic
cguucugcuucugaacug

SEQ ID NO: 604560 - RNA, 19 nt, Artificial Sequence
  Synthetic
ucguucugcuucugaacug

SEQ ID NO: 604561 - RNA, 20 nt, Artificial Sequence
  Synthetic
aucguucugcuucugaacug

SEQ ID NO: 604562 - RNA, 21 nt, Artificial Sequence
  Synthetic
caucguucugcuucugaacug

SEQ ID NO: 604563 - RNA, 22 nt, Artificial Sequence
  Synthetic
acaucguucugcuucugaacug

SEQ ID NO: 604564 - RNA, 23 nt, Artificial Sequence
  Synthetic
uacaucguucugcuucugaacug

SEQ ID NO: 604565 - RNA, 24 nt, Artificial Sequence
  Synthetic
guacaucguucugcuucugaacug

SEQ ID NO: 604566 - RNA, 18 nt, Artificial Sequence
  Synthetic
ccuucuugaagugaacug

SEQ ID NO: 604567 - RNA, 19 nt, Artificial Sequence
  Synthetic
uccuucuugaagugaacug

SEQ ID NO: 604568 - RNA, 20 nt, Artificial Sequence
  Synthetic
guccuucuugaagugaacug

SEQ ID NO: 604569 - RNA, 21 nt, Artificial Sequence
  Synthetic
cguccuucuugaagugaacug

SEQ ID NO: 604570 - RNA, 22 nt, Artificial Sequence
  Synthetic
ccguccuucuugaagugaacug

SEQ ID NO: 604571 - RNA, 23 nt, Artificial Sequence
  Synthetic
gccguccuucuugaagugaacug

SEQ ID NO: 604572 - RNA, 24 nt, Artificial Sequence
  Synthetic
ugccguccuucuugaagugaacug

SEQ ID NO: 604573 - RNA, 18 nt, Artificial Sequence
  Synthetic
cacuguaggaacuaacug

SEQ ID NO: 604574 - RNA, 19 nt, Artificial Sequence
  Synthetic
ucacuguaggaacuaacug

SEQ ID NO: 604575 - RNA, 20 nt, Artificial Sequence
  Synthetic
aucacuguaggaacuaacug

SEQ ID NO: 604576 - RNA, 21 nt, Artificial Sequence
  Synthetic
uaucacuguaggaacuaacug

SEQ ID NO: 604577 - RNA, 22 nt, Artificial Sequence
  Synthetic
auaucacuguaggaacuaacug

SEQ ID NO: 604578 - RNA, 23 nt, Artificial Sequence
  Synthetic
aauaucacuguaggaacuaacug

SEQ ID NO: 604579 - RNA, 24 nt, Artificial Sequence
  Synthetic
aaauaucacuguaggaacuaacug

SEQ ID NO: 604580 - RNA, 18 nt, Artificial Sequence
  Synthetic
agugacacagacuaacug

SEQ ID NO: 604581 - RNA, 19 nt, Artificial Sequence
  Synthetic
cagugacacagacuaacug

SEQ ID NO: 604582 - RNA, 20 nt, Artificial Sequence
  Synthetic
ccagugacacagacuaacug

SEQ ID NO: 604583 - RNA, 21 nt, Artificial Sequence
  Synthetic
cccagugacacagacuaacug

SEQ ID NO: 604584 - RNA, 22 nt, Artificial Sequence
  Synthetic
ucccagugacacagacuaacug

SEQ ID NO: 604585 - RNA, 23 nt, Artificial Sequence
  Synthetic
cucccagugacacagacuaacug

SEQ ID NO: 604586 - RNA, 24 nt, Artificial Sequence
  Synthetic
acucccagugacacagacuaacug

SEQ ID NO: 604587 - RNA, 18 nt, Artificial Sequence
  Synthetic
uccuuuagacucuaacug

SEQ ID NO: 604588 - RNA, 19 nt, Artificial Sequence
  Synthetic
uuccuuuagacucuaacug

SEQ ID NO: 604589 - RNA, 20 nt, Artificial Sequence
  Synthetic
cuuccuuuagacucuaacug

SEQ ID NO: 604590 - RNA, 21 nt, Artificial Sequence
  Synthetic
ucuuccuuuagacucuaacug

SEQ ID NO: 604591 - RNA, 22 nt, Artificial Sequence
  Synthetic
cucuuccuuuagacucuaacug

SEQ ID NO: 604592 - RNA, 23 nt, Artificial Sequence
  Synthetic
ucucuuccuuuagacucuaacug

SEQ ID NO: 604593 - RNA, 24 nt, Artificial Sequence
  Synthetic
uucucuuccuuuagacucuaacug

SEQ ID NO: 604594 - RNA, 18 nt, Artificial Sequence
  Synthetic
uugguuaauauguaacug

SEQ ID NO: 604595 - RNA, 19 nt, Artificial Sequence
  Synthetic
uuugguuaauauguaacug

SEQ ID NO: 604596 - RNA, 20 nt, Artificial Sequence
  Synthetic
auuugguuaauauguaacug

SEQ ID NO: 604597 - RNA, 21 nt, Artificial Sequence
  Synthetic
uauuugguuaauauguaacug

SEQ ID NO: 604598 - RNA, 22 nt, Artificial Sequence
  Synthetic
guauuugguuaauauguaacug

SEQ ID NO: 604599 - RNA, 23 nt, Artificial Sequence
  Synthetic
uguauuugguuaauauguaacug

SEQ ID NO: 604600 - RNA, 24 nt, Artificial Sequence
  Synthetic
cuguauuugguuaauauguaacug

SEQ ID NO: 604601 - RNA, 18 nt, Artificial Sequence
  Synthetic
cuagccuguauguaacug

SEQ ID NO: 604602 - RNA, 19 nt, Artificial Sequence
  Synthetic
ccuagccuguauguaacug

SEQ ID NO: 604603 - RNA, 20 nt, Artificial Sequence
  Synthetic
cccuagccuguauguaacug

SEQ ID NO: 604604 - RNA, 21 nt, Artificial Sequence
  Synthetic
ucccuagccuguauguaacug

SEQ ID NO: 604605 - RNA, 22 nt, Artificial Sequence
  Synthetic
cucccuagccuguauguaacug

SEQ ID NO: 604606 - RNA, 23 nt, Artificial Sequence
  Synthetic
acucccuagccuguauguaacug

SEQ ID NO: 604607 - RNA, 24 nt, Artificial Sequence
  Synthetic
cacucccuagccuguauguaacug

SEQ ID NO: 604608 - RNA, 18 nt, Artificial Sequence
  Synthetic
agaugagaaaauuaacug

SEQ ID NO: 604609 - RNA, 19 nt, Artificial Sequence
  Synthetic
cagaugagaaaauuaacug

SEQ ID NO: 604610 - RNA, 20 nt, Artificial Sequence
  Synthetic
acagaugagaaaauuaacug

SEQ ID NO: 604611 - RNA, 21 nt, Artificial Sequence
  Synthetic
uacagaugagaaaauuaacug

SEQ ID NO: 604612 - RNA, 22 nt, Artificial Sequence
  Synthetic
uuacagaugagaaaauuaacug

SEQ ID NO: 604613 - RNA, 23 nt, Artificial Sequence
  Synthetic
uuuacagaugagaaaauuaacug

SEQ ID NO: 604614 - RNA, 24 nt, Artificial Sequence
  Synthetic
uuuuacagaugagaaaauuaacug

SEQ ID NO: 604615 - RNA, 18 nt, Artificial Sequence
  Synthetic
uucugucugcauuaacug

SEQ ID NO: 604616 - RNA, 19 nt, Artificial Sequence
  Synthetic
cuucugucugcauuaacug

SEQ ID NO: 604617 - RNA, 20 nt, Artificial Sequence
  Synthetic
ucuucugucugcauuaacug

SEQ ID NO: 604618 - RNA, 21 nt, Artificial Sequence
  Synthetic
aucuucugucugcauuaacug

SEQ ID NO: 604619 - RNA, 22 nt, Artificial Sequence
  Synthetic
aaucuucugucugcauuaacug

SEQ ID NO: 604620 - RNA, 23 nt, Artificial Sequence
  Synthetic
aaaucuucugucugcauuaacug

SEQ ID NO: 604621 - RNA, 24 nt, Artificial Sequence
  Synthetic
aaaaucuucugucugcauuaacug

SEQ ID NO: 604622 - RNA, 18 nt, Artificial Sequence
  Synthetic
cgugcuuggucuuaacug

SEQ ID NO: 604623 - RNA, 19 nt, Artificial Sequence
  Synthetic
ccgugcuuggucuuaacug

SEQ ID NO: 604624 - RNA, 20 nt, Artificial Sequence
  Synthetic
uccgugcuuggucuuaacug

SEQ ID NO: 604625 - RNA, 21 nt, Artificial Sequence
  Synthetic
guccgugcuuggucuuaacug

SEQ ID NO: 604626 - RNA, 22 nt, Artificial Sequence
  Synthetic
aguccgugcuuggucuuaacug

SEQ ID NO: 604627 - RNA, 23 nt, Artificial Sequence
  Synthetic
caguccgugcuuggucuuaacug

SEQ ID NO: 604628 - RNA, 24 nt, Artificial Sequence
  Synthetic
acaguccgugcuuggucuuaacug

SEQ ID NO: 604629 - RNA, 18 nt, Artificial Sequence
  Synthetic
gagcgcagaauuuaacug

SEQ ID NO: 604630 - RNA, 19 nt, Artificial Sequence
  Synthetic
ggagcgcagaauuuaacug

SEQ ID NO: 604631 - RNA, 20 nt, Artificial Sequence
  Synthetic
aggagcgcagaauuuaacug

SEQ ID NO: 604632 - RNA, 21 nt, Artificial Sequence
  Synthetic
aaggagcgcagaauuuaacug

SEQ ID NO: 604633 - RNA, 22 nt, Artificial Sequence
  Synthetic
caaggagcgcagaauuuaacug

SEQ ID NO: 604634 - RNA, 23 nt, Artificial Sequence
  Synthetic
ccaaggagcgcagaauuuaacug

SEQ ID NO: 604635 - RNA, 24 nt, Artificial Sequence
  Synthetic
uccaaggagcgcagaauuuaacug

SEQ ID NO: 604636 - RNA, 18 nt, Artificial Sequence
  Synthetic
auagucucucuuuaacug

SEQ ID NO: 604637 - RNA, 19 nt, Artificial Sequence
  Synthetic
uauagucucucuuuaacug

SEQ ID NO: 604638 - RNA, 20 nt, Artificial Sequence
  Synthetic
cuauagucucucuuuaacug

SEQ ID NO: 604639 - RNA, 21 nt, Artificial Sequence
  Synthetic
gcuauagucucucuuuaacug

SEQ ID NO: 604640 - RNA, 22 nt, Artificial Sequence
  Synthetic
ugcuauagucucucuuuaacug

SEQ ID NO: 604641 - RNA, 23 nt, Artificial Sequence
  Synthetic
uugcuauagucucucuuuaacug

SEQ ID NO: 604642 - RNA, 24 nt, Artificial Sequence
  Synthetic
guugcuauagucucucuuuaacug

SEQ ID NO: 604643 - RNA, 18 nt, Artificial Sequence
  Synthetic
gcuugucuuuuuuaacug

SEQ ID NO: 604644 - RNA, 19 nt, Artificial Sequence
  Synthetic
ggcuugucuuuuuuaacug

SEQ ID NO: 604645 - RNA, 20 nt, Artificial Sequence
  Synthetic
gggcuugucuuuuuuaacug

SEQ ID NO: 604646 - RNA, 21 nt, Artificial Sequence
  Synthetic
ugggcuugucuuuuuuaacug

SEQ ID NO: 604647 - RNA, 22 nt, Artificial Sequence
  Synthetic
augggcuugucuuuuuuaacug

SEQ ID NO: 604648 - RNA, 23 nt, Artificial Sequence
  Synthetic
caugggcuugucuuuuuuaacug

SEQ ID NO: 604649 - RNA, 24 nt, Artificial Sequence
  Synthetic
acaugggcuugucuuuuuuaacug

SEQ ID NO: 604650 - RNA, 18 nt, Artificial Sequence
  Synthetic
ugauccuaggaaacacug

SEQ ID NO: 604651 - RNA, 19 nt, Artificial Sequence
  Synthetic
gugauccuaggaaacacug

SEQ ID NO: 604652 - RNA, 20 nt, Artificial Sequence
  Synthetic
ggugauccuaggaaacacug

SEQ ID NO: 604653 - RNA, 21 nt, Artificial Sequence
  Synthetic
aggugauccuaggaaacacug

SEQ ID NO: 604654 - RNA, 22 nt, Artificial Sequence
  Synthetic
gaggugauccuaggaaacacug

SEQ ID NO: 604655 - RNA, 23 nt, Artificial Sequence
  Synthetic
ugaggugauccuaggaaacacug

SEQ ID NO: 604656 - RNA, 24 nt, Artificial Sequence
  Synthetic
cugaggugauccuaggaaacacug

SEQ ID NO: 604657 - RNA, 18 nt, Artificial Sequence
  Synthetic
aaagacugaggaacacug

SEQ ID NO: 604658 - RNA, 19 nt, Artificial Sequence
  Synthetic
aaaagacugaggaacacug

SEQ ID NO: 604659 - RNA, 20 nt, Artificial Sequence
  Synthetic
aaaaagacugaggaacacug

SEQ ID NO: 604660 - RNA, 21 nt, Artificial Sequence
  Synthetic
caaaaagacugaggaacacug

SEQ ID NO: 604661 - RNA, 22 nt, Artificial Sequence
  Synthetic
ucaaaaagacugaggaacacug

SEQ ID NO: 604662 - RNA, 23 nt, Artificial Sequence
  Synthetic
aucaaaaagacugaggaacacug

SEQ ID NO: 604663 - RNA, 24 nt, Artificial Sequence
  Synthetic
uaucaaaaagacugaggaacacug

SEQ ID NO: 604664 - RNA, 18 nt, Artificial Sequence
  Synthetic
cucaaagaaugaacacug

SEQ ID NO: 604665 - RNA, 19 nt, Artificial Sequence
  Synthetic
ccucaaagaaugaacacug

SEQ ID NO: 604666 - RNA, 20 nt, Artificial Sequence
  Synthetic
accucaaagaaugaacacug

SEQ ID NO: 604667 - RNA, 21 nt, Artificial Sequence
  Synthetic
gaccucaaagaaugaacacug

SEQ ID NO: 604668 - RNA, 22 nt, Artificial Sequence
  Synthetic
agaccucaaagaaugaacacug

SEQ ID NO: 604669 - RNA, 23 nt, Artificial Sequence
  Synthetic
cagaccucaaagaaugaacacug

SEQ ID NO: 604670 - RNA, 24 nt, Artificial Sequence
  Synthetic
acagaccucaaagaaugaacacug

SEQ ID NO: 604671 - RNA, 18 nt, Artificial Sequence
  Synthetic
cgugugaggugaacacug

SEQ ID NO: 604672 - RNA, 19 nt, Artificial Sequence
  Synthetic
acgugugaggugaacacug

SEQ ID NO: 604673 - RNA, 20 nt, Artificial Sequence
  Synthetic
cacgugugaggugaacacug

SEQ ID NO: 604674 - RNA, 21 nt, Artificial Sequence
  Synthetic
gcacgugugaggugaacacug

SEQ ID NO: 604675 - RNA, 22 nt, Artificial Sequence
  Synthetic
ugcacgugugaggugaacacug

SEQ ID NO: 604676 - RNA, 23 nt, Artificial Sequence
  Synthetic
uugcacgugugaggugaacacug

SEQ ID NO: 604677 - RNA, 24 nt, Artificial Sequence
  Synthetic
cuugcacgugugaggugaacacug

SEQ ID NO: 604678 - RNA, 18 nt, Artificial Sequence
  Synthetic
agcuaaguaguaacacug

SEQ ID NO: 604679 - RNA, 19 nt, Artificial Sequence
  Synthetic
aagcuaaguaguaacacug

SEQ ID NO: 604680 - RNA, 20 nt, Artificial Sequence
  Synthetic
aaagcuaaguaguaacacug

SEQ ID NO: 604681 - RNA, 21 nt, Artificial Sequence
  Synthetic
uaaagcuaaguaguaacacug

SEQ ID NO: 604682 - RNA, 22 nt, Artificial Sequence
  Synthetic
auaaagcuaaguaguaacacug

SEQ ID NO: 604683 - RNA, 23 nt, Artificial Sequence
  Synthetic
aauaaagcuaaguaguaacacug

SEQ ID NO: 604684 - RNA, 24 nt, Artificial Sequence
  Synthetic
aaauaaagcuaaguaguaacacug

SEQ ID NO: 604685 - RNA, 18 nt, Artificial Sequence
  Synthetic
uguacuuugguaacacug

SEQ ID NO: 604686 - RNA, 19 nt, Artificial Sequence
  Synthetic
guguacuuugguaacacug

SEQ ID NO: 604687 - RNA, 20 nt, Artificial Sequence
  Synthetic
cguguacuuugguaacacug

SEQ ID NO: 604688 - RNA, 21 nt, Artificial Sequence
  Synthetic
ucguguacuuugguaacacug

SEQ ID NO: 604689 - RNA, 22 nt, Artificial Sequence
  Synthetic
aucguguacuuugguaacacug

SEQ ID NO: 604690 - RNA, 23 nt, Artificial Sequence
  Synthetic
aaucguguacuuugguaacacug

SEQ ID NO: 604691 - RNA, 24 nt, Artificial Sequence
  Synthetic
caaucguguacuuugguaacacug

SEQ ID NO: 604692 - RNA, 18 nt, Artificial Sequence
  Synthetic
caggugauauuaacacug

SEQ ID NO: 604693 - RNA, 19 nt, Artificial Sequence
  Synthetic
ccaggugauauuaacacug

SEQ ID NO: 604694 - RNA, 20 nt, Artificial Sequence
  Synthetic
uccaggugauauuaacacug

SEQ ID NO: 604695 - RNA, 21 nt, Artificial Sequence
  Synthetic
uuccaggugauauuaacacug

SEQ ID NO: 604696 - RNA, 22 nt, Artificial Sequence
  Synthetic
cuuccaggugauauuaacacug

SEQ ID NO: 604697 - RNA, 23 nt, Artificial Sequence
  Synthetic
acuuccaggugauauuaacacug

SEQ ID NO: 604698 - RNA, 24 nt, Artificial Sequence
  Synthetic
aacuuccaggugauauuaacacug

SEQ ID NO: 604699 - RNA, 18 nt, Artificial Sequence
  Synthetic
ucagggcugagcacacug

SEQ ID NO: 604700 - RNA, 19 nt, Artificial Sequence
  Synthetic
uucagggcugagcacacug

SEQ ID NO: 604701 - RNA, 20 nt, Artificial Sequence
  Synthetic
uuucagggcugagcacacug

SEQ ID NO: 604702 - RNA, 21 nt, Artificial Sequence
  Synthetic
guuucagggcugagcacacug

SEQ ID NO: 604703 - RNA, 22 nt, Artificial Sequence
  Synthetic
cguuucagggcugagcacacug

SEQ ID NO: 604704 - RNA, 23 nt, Artificial Sequence
  Synthetic
gcguuucagggcugagcacacug

SEQ ID NO: 604705 - RNA, 24 nt, Artificial Sequence
  Synthetic
ggcguuucagggcugagcacacug

SEQ ID NO: 604706 - RNA, 18 nt, Artificial Sequence
  Synthetic
ugaaacuauaagacacug

SEQ ID NO: 604707 - RNA, 19 nt, Artificial Sequence
  Synthetic
uugaaacuauaagacacug

SEQ ID NO: 604708 - RNA, 20 nt, Artificial Sequence
  Synthetic
guugaaacuauaagacacug

SEQ ID NO: 604709 - RNA, 21 nt, Artificial Sequence
  Synthetic
uguugaaacuauaagacacug

SEQ ID NO: 604710 - RNA, 22 nt, Artificial Sequence
  Synthetic
guguugaaacuauaagacacug

SEQ ID NO: 604711 - RNA, 23 nt, Artificial Sequence
  Synthetic
cguguugaaacuauaagacacug

SEQ ID NO: 604712 - RNA, 24 nt, Artificial Sequence
  Synthetic
gcguguugaaacuauaagacacug

SEQ ID NO: 604713 - RNA, 18 nt, Artificial Sequence
  Synthetic
ccuauuagccagacacug

SEQ ID NO: 604714 - RNA, 19 nt, Artificial Sequence
  Synthetic
uccuauuagccagacacug

SEQ ID NO: 604715 - RNA, 20 nt, Artificial Sequence
  Synthetic
cuccuauuagccagacacug

SEQ ID NO: 604716 - RNA, 21 nt, Artificial Sequence
  Synthetic
ccuccuauuagccagacacug

SEQ ID NO: 604717 - RNA, 22 nt, Artificial Sequence
  Synthetic
accuccuauuagccagacacug

SEQ ID NO: 604718 - RNA, 23 nt, Artificial Sequence
  Synthetic
uaccuccuauuagccagacacug

SEQ ID NO: 604719 - RNA, 24 nt, Artificial Sequence
  Synthetic
auaccuccuauuagccagacacug

SEQ ID NO: 604720 - RNA, 18 nt, Artificial Sequence
  Synthetic
cuugcaagcuauacacug

SEQ ID NO: 604721 - RNA, 19 nt, Artificial Sequence
  Synthetic
gcuugcaagcuauacacug

SEQ ID NO: 604722 - RNA, 20 nt, Artificial Sequence
  Synthetic
ugcuugcaagcuauacacug

SEQ ID NO: 604723 - RNA, 21 nt, Artificial Sequence
  Synthetic
uugcuugcaagcuauacacug

SEQ ID NO: 604724 - RNA, 22 nt, Artificial Sequence
  Synthetic
cuugcuugcaagcuauacacug

SEQ ID NO: 604725 - RNA, 23 nt, Artificial Sequence
  Synthetic
acuugcuugcaagcuauacacug

SEQ ID NO: 604726 - RNA, 24 nt, Artificial Sequence
  Synthetic
cacuugcuugcaagcuauacacug

SEQ ID NO: 604727 - RNA, 18 nt, Artificial Sequence
  Synthetic
accaaaaagaguacacug

SEQ ID NO: 604728 - RNA, 19 nt, Artificial Sequence
  Synthetic
gaccaaaaagaguacacug

SEQ ID NO: 604729 - RNA, 20 nt, Artificial Sequence
  Synthetic
agaccaaaaagaguacacug

SEQ ID NO: 604730 - RNA, 21 nt, Artificial Sequence
  Synthetic
aagaccaaaaagaguacacug

SEQ ID NO: 604731 - RNA, 22 nt, Artificial Sequence
  Synthetic
gaagaccaaaaagaguacacug

SEQ ID NO: 604732 - RNA, 23 nt, Artificial Sequence
  Synthetic
ggaagaccaaaaagaguacacug

SEQ ID NO: 604733 - RNA, 24 nt, Artificial Sequence
  Synthetic
aggaagaccaaaaagaguacacug

SEQ ID NO: 604734 - RNA, 18 nt, Artificial Sequence
  Synthetic
uacccagggaguacacug

SEQ ID NO: 604735 - RNA, 19 nt, Artificial Sequence
  Synthetic
auacccagggaguacacug

SEQ ID NO: 604736 - RNA, 20 nt, Artificial Sequence
  Synthetic
aauacccagggaguacacug

SEQ ID NO: 604737 - RNA, 21 nt, Artificial Sequence
  Synthetic
caauacccagggaguacacug

SEQ ID NO: 604738 - RNA, 22 nt, Artificial Sequence
  Synthetic
gcaauacccagggaguacacug

SEQ ID NO: 604739 - RNA, 23 nt, Artificial Sequence
  Synthetic
ugcaauacccagggaguacacug

SEQ ID NO: 604740 - RNA, 24 nt, Artificial Sequence
  Synthetic
uugcaauacccagggaguacacug

SEQ ID NO: 604741 - RNA, 18 nt, Artificial Sequence
  Synthetic
acaucuaucuguacacug

SEQ ID NO: 604742 - RNA, 19 nt, Artificial Sequence
  Synthetic
aacaucuaucuguacacug

SEQ ID NO: 604743 - RNA, 20 nt, Artificial Sequence
  Synthetic
gaacaucuaucuguacacug

SEQ ID NO: 604744 - RNA, 21 nt, Artificial Sequence
  Synthetic
agaacaucuaucuguacacug

SEQ ID NO: 604745 - RNA, 22 nt, Artificial Sequence
  Synthetic
aagaacaucuaucuguacacug

SEQ ID NO: 604746 - RNA, 23 nt, Artificial Sequence
  Synthetic
gaagaacaucuaucuguacacug

SEQ ID NO: 604747 - RNA, 24 nt, Artificial Sequence
  Synthetic
ugaagaacaucuaucuguacacug

SEQ ID NO: 604748 - RNA, 18 nt, Artificial Sequence
  Synthetic
aggacuagcaaaccacug

SEQ ID NO: 604749 - RNA, 19 nt, Artificial Sequence
  Synthetic
gaggacuagcaaaccacug

SEQ ID NO: 604750 - RNA, 20 nt, Artificial Sequence
  Synthetic
agaggacuagcaaaccacug

SEQ ID NO: 604751 - RNA, 21 nt, Artificial Sequence
  Synthetic
gagaggacuagcaaaccacug

SEQ ID NO: 604752 - RNA, 22 nt, Artificial Sequence
  Synthetic
ggagaggacuagcaaaccacug

SEQ ID NO: 604753 - RNA, 23 nt, Artificial Sequence
  Synthetic
aggagaggacuagcaaaccacug

SEQ ID NO: 604754 - RNA, 24 nt, Artificial Sequence
  Synthetic
aaggagaggacuagcaaaccacug

SEQ ID NO: 604755 - RNA, 18 nt, Artificial Sequence
  Synthetic
ucauucaauccaccacug

SEQ ID NO: 604756 - RNA, 19 nt, Artificial Sequence
  Synthetic
uucauucaauccaccacug

SEQ ID NO: 604757 - RNA, 20 nt, Artificial Sequence
  Synthetic
uuucauucaauccaccacug

SEQ ID NO: 604758 - RNA, 21 nt, Artificial Sequence
  Synthetic
auuucauucaauccaccacug

SEQ ID NO: 604759 - RNA, 22 nt, Artificial Sequence
  Synthetic
uauuucauucaauccaccacug

SEQ ID NO: 604760 - RNA, 23 nt, Artificial Sequence
  Synthetic
uuauuucauucaauccaccacug

SEQ ID NO: 604761 - RNA, 24 nt, Artificial Sequence
  Synthetic
uuuauuucauucaauccaccacug

SEQ ID NO: 604762 - RNA, 18 nt, Artificial Sequence
  Synthetic
uauuuuguuccaccacug

SEQ ID NO: 604763 - RNA, 19 nt, Artificial Sequence
  Synthetic
auauuuuguuccaccacug

SEQ ID NO: 604764 - RNA, 20 nt, Artificial Sequence
  Synthetic
gauauuuuguuccaccacug

SEQ ID NO: 604765 - RNA, 21 nt, Artificial Sequence
  Synthetic
ggauauuuuguuccaccacug

SEQ ID NO: 604766 - RNA, 22 nt, Artificial Sequence
  Synthetic
uggauauuuuguuccaccacug

SEQ ID NO: 604767 - RNA, 23 nt, Artificial Sequence
  Synthetic
guggauauuuuguuccaccacug

SEQ ID NO: 604768 - RNA, 24 nt, Artificial Sequence
  Synthetic
uguggauauuuuguuccaccacug

SEQ ID NO: 604769 - RNA, 18 nt, Artificial Sequence
  Synthetic
auauuuccaaccccacug

SEQ ID NO: 604770 - RNA, 19 nt, Artificial Sequence
  Synthetic
gauauuuccaaccccacug

SEQ ID NO: 604771 - RNA, 20 nt, Artificial Sequence
  Synthetic
ggauauuuccaaccccacug

SEQ ID NO: 604772 - RNA, 21 nt, Artificial Sequence
  Synthetic
aggauauuuccaaccccacug

SEQ ID NO: 604773 - RNA, 22 nt, Artificial Sequence
  Synthetic
aaggauauuuccaaccccacug

SEQ ID NO: 604774 - RNA, 23 nt, Artificial Sequence
  Synthetic
gaaggauauuuccaaccccacug

SEQ ID NO: 604775 - RNA, 24 nt, Artificial Sequence
  Synthetic
agaaggauauuuccaaccccacug

SEQ ID NO: 604776 - RNA, 18 nt, Artificial Sequence
  Synthetic
ucuucauccaagccacug

SEQ ID NO: 604777 - RNA, 19 nt, Artificial Sequence
  Synthetic
gucuucauccaagccacug

SEQ ID NO: 604778 - RNA, 20 nt, Artificial Sequence
  Synthetic
ugucuucauccaagccacug

SEQ ID NO: 604779 - RNA, 21 nt, Artificial Sequence
  Synthetic
augucuucauccaagccacug

SEQ ID NO: 604780 - RNA, 22 nt, Artificial Sequence
  Synthetic
uaugucuucauccaagccacug

SEQ ID NO: 604781 - RNA, 23 nt, Artificial Sequence
  Synthetic
cuaugucuucauccaagccacug

SEQ ID NO: 604782 - RNA, 24 nt, Artificial Sequence
  Synthetic
ucuaugucuucauccaagccacug

SEQ ID NO: 604783 - RNA, 18 nt, Artificial Sequence
  Synthetic
aaauuaguucagccacug

SEQ ID NO: 604784 - RNA, 19 nt, Artificial Sequence
  Synthetic
uaaauuaguucagccacug

SEQ ID NO: 604785 - RNA, 20 nt, Artificial Sequence
  Synthetic
guaaauuaguucagccacug

SEQ ID NO: 604786 - RNA, 21 nt, Artificial Sequence
  Synthetic
uguaaauuaguucagccacug

SEQ ID NO: 604787 - RNA, 22 nt, Artificial Sequence
  Synthetic
auguaaauuaguucagccacug

SEQ ID NO: 604788 - RNA, 23 nt, Artificial Sequence
  Synthetic
aauguaaauuaguucagccacug

SEQ ID NO: 604789 - RNA, 24 nt, Artificial Sequence
  Synthetic
gaauguaaauuaguucagccacug

SEQ ID NO: 604790 - RNA, 18 nt, Artificial Sequence
  Synthetic
guuggauuggagccacug

SEQ ID NO: 604791 - RNA, 19 nt, Artificial Sequence
  Synthetic
aguuggauuggagccacug

SEQ ID NO: 604792 - RNA, 20 nt, Artificial Sequence
  Synthetic
aaguuggauuggagccacug

SEQ ID NO: 604793 - RNA, 21 nt, Artificial Sequence
  Synthetic
caaguuggauuggagccacug

SEQ ID NO: 604794 - RNA, 22 nt, Artificial Sequence
  Synthetic
gcaaguuggauuggagccacug

SEQ ID NO: 604795 - RNA, 23 nt, Artificial Sequence
  Synthetic
ugcaaguuggauuggagccacug

SEQ ID NO: 604796 - RNA, 24 nt, Artificial Sequence
  Synthetic
cugcaaguuggauuggagccacug

SEQ ID NO: 604797 - RNA, 18 nt, Artificial Sequence
  Synthetic
uuuacgaaugggccacug

SEQ ID NO: 604798 - RNA, 19 nt, Artificial Sequence
  Synthetic
cuuuacgaaugggccacug

SEQ ID NO: 604799 - RNA, 20 nt, Artificial Sequence
  Synthetic
gcuuuacgaaugggccacug

SEQ ID NO: 604800 - RNA, 21 nt, Artificial Sequence
  Synthetic
agcuuuacgaaugggccacug

SEQ ID NO: 604801 - RNA, 22 nt, Artificial Sequence
  Synthetic
uagcuuuacgaaugggccacug

SEQ ID NO: 604802 - RNA, 23 nt, Artificial Sequence
  Synthetic
auagcuuuacgaaugggccacug

SEQ ID NO: 604803 - RNA, 24 nt, Artificial Sequence
  Synthetic
uauagcuuuacgaaugggccacug

SEQ ID NO: 604804 - RNA, 18 nt, Artificial Sequence
  Synthetic
uacauuugucugccacug

SEQ ID NO: 604805 - RNA, 19 nt, Artificial Sequence
  Synthetic
cuacauuugucugccacug

SEQ ID NO: 604806 - RNA, 20 nt, Artificial Sequence
  Synthetic
ucuacauuugucugccacug

SEQ ID NO: 604807 - RNA, 21 nt, Artificial Sequence
  Synthetic
aucuacauuugucugccacug

SEQ ID NO: 604808 - RNA, 22 nt, Artificial Sequence
  Synthetic
caucuacauuugucugccacug

SEQ ID NO: 604809 - RNA, 23 nt, Artificial Sequence
  Synthetic
acaucuacauuugucugccacug

SEQ ID NO: 604810 - RNA, 24 nt, Artificial Sequence
  Synthetic
cacaucuacauuugucugccacug

SEQ ID NO: 604811 - RNA, 18 nt, Artificial Sequence
  Synthetic
uuuucaauucauccacug

SEQ ID NO: 604812 - RNA, 19 nt, Artificial Sequence
  Synthetic
cuuuucaauucauccacug

SEQ ID NO: 604813 - RNA, 20 nt, Artificial Sequence
  Synthetic
ucuuuucaauucauccacug

SEQ ID NO: 604814 - RNA, 21 nt, Artificial Sequence
  Synthetic
uucuuuucaauucauccacug

SEQ ID NO: 604815 - RNA, 22 nt, Artificial Sequence
  Synthetic
uuucuuuucaauucauccacug

SEQ ID NO: 604816 - RNA, 23 nt, Artificial Sequence
  Synthetic
uuuucuuuucaauucauccacug

SEQ ID NO: 604817 - RNA, 24 nt, Artificial Sequence
  Synthetic
auuuucuuuucaauucauccacug

SEQ ID NO: 604818 - RNA, 18 nt, Artificial Sequence
  Synthetic
uuauccauucauccacug

SEQ ID NO: 604819 - RNA, 19 nt, Artificial Sequence
  Synthetic
uuuauccauucauccacug

SEQ ID NO: 604820 - RNA, 20 nt, Artificial Sequence
  Synthetic
cuuuauccauucauccacug

SEQ ID NO: 604821 - RNA, 21 nt, Artificial Sequence
  Synthetic
ucuuuauccauucauccacug

SEQ ID NO: 604822 - RNA, 22 nt, Artificial Sequence
  Synthetic
uucuuuauccauucauccacug

SEQ ID NO: 604823 - RNA, 23 nt, Artificial Sequence
  Synthetic
uuucuuuauccauucauccacug

SEQ ID NO: 604824 - RNA, 24 nt, Artificial Sequence
  Synthetic
uuuucuuuauccauucauccacug

SEQ ID NO: 604825 - RNA, 18 nt, Artificial Sequence
  Synthetic
acuucuuaauauccacug

SEQ ID NO: 604826 - RNA, 19 nt, Artificial Sequence
  Synthetic
cacuucuuaauauccacug

SEQ ID NO: 604827 - RNA, 20 nt, Artificial Sequence
  Synthetic
ccacuucuuaauauccacug

SEQ ID NO: 604828 - RNA, 21 nt, Artificial Sequence
  Synthetic
uccacuucuuaauauccacug

SEQ ID NO: 604829 - RNA, 22 nt, Artificial Sequence
  Synthetic
cuccacuucuuaauauccacug

SEQ ID NO: 604830 - RNA, 23 nt, Artificial Sequence
  Synthetic
acuccacuucuuaauauccacug

SEQ ID NO: 604831 - RNA, 24 nt, Artificial Sequence
  Synthetic
uacuccacuucuuaauauccacug

SEQ ID NO: 604832 - RNA, 18 nt, Artificial Sequence
  Synthetic
caacacuagucuccacug

SEQ ID NO: 604833 - RNA, 19 nt, Artificial Sequence
  Synthetic
gcaacacuagucuccacug

SEQ ID NO: 604834 - RNA, 20 nt, Artificial Sequence
  Synthetic
agcaacacuagucuccacug

SEQ ID NO: 604835 - RNA, 21 nt, Artificial Sequence
  Synthetic
uagcaacacuagucuccacug

SEQ ID NO: 604836 - RNA, 22 nt, Artificial Sequence
  Synthetic
auagcaacacuagucuccacug

SEQ ID NO: 604837 - RNA, 23 nt, Artificial Sequence
  Synthetic
gauagcaacacuagucuccacug

SEQ ID NO: 604838 - RNA, 24 nt, Artificial Sequence
  Synthetic
ugauagcaacacuagucuccacug

SEQ ID NO: 604839 - RNA, 18 nt, Artificial Sequence
  Synthetic
cucuccccccuuccacug

SEQ ID NO: 604840 - RNA, 19 nt, Artificial Sequence
  Synthetic
ucucuccccccuuccacug

SEQ ID NO: 604841 - RNA, 20 nt, Artificial Sequence
  Synthetic
aucucuccccccuuccacug

SEQ ID NO: 604842 - RNA, 21 nt, Artificial Sequence
  Synthetic
caucucuccccccuuccacug

SEQ ID NO: 604843 - RNA, 22 nt, Artificial Sequence
  Synthetic
acaucucuccccccuuccacug

SEQ ID NO: 604844 - RNA, 23 nt, Artificial Sequence
  Synthetic
aacaucucuccccccuuccacug

SEQ ID NO: 604845 - RNA, 24 nt, Artificial Sequence
  Synthetic
uaacaucucuccccccuuccacug

SEQ ID NO: 604846 - RNA, 18 nt, Artificial Sequence
  Synthetic
cauguaaucccagcacug

SEQ ID NO: 604847 - RNA, 19 nt, Artificial Sequence
  Synthetic
gcauguaaucccagcacug

SEQ ID NO: 604848 - RNA, 20 nt, Artificial Sequence
  Synthetic
ugcauguaaucccagcacug

SEQ ID NO: 604849 - RNA, 21 nt, Artificial Sequence
  Synthetic
augcauguaaucccagcacug

SEQ ID NO: 604850 - RNA, 22 nt, Artificial Sequence
  Synthetic
caugcauguaaucccagcacug

SEQ ID NO: 604851 - RNA, 23 nt, Artificial Sequence
  Synthetic
ucaugcauguaaucccagcacug

SEQ ID NO: 604852 - RNA, 24 nt, Artificial Sequence
  Synthetic
cucaugcauguaaucccagcacug

SEQ ID NO: 604853 - RNA, 18 nt, Artificial Sequence
  Synthetic
ccuguaaucccagcacug

SEQ ID NO: 604854 - RNA, 19 nt, Artificial Sequence
  Synthetic
gccuguaaucccagcacug

SEQ ID NO: 604855 - RNA, 20 nt, Artificial Sequence
  Synthetic
ugccuguaaucccagcacug

SEQ ID NO: 604856 - RNA, 21 nt, Artificial Sequence
  Synthetic
augccuguaaucccagcacug

SEQ ID NO: 604857 - RNA, 22 nt, Artificial Sequence
  Synthetic
caugccuguaaucccagcacug

SEQ ID NO: 604858 - RNA, 23 nt, Artificial Sequence
  Synthetic
acaugccuguaaucccagcacug

SEQ ID NO: 604859 - RNA, 24 nt, Artificial Sequence
  Synthetic
cacaugccuguaaucccagcacug

SEQ ID NO: 604860 - RNA, 18 nt, Artificial Sequence
  Synthetic
aaugaguuuucagcacug

SEQ ID NO: 604861 - RNA, 19 nt, Artificial Sequence
  Synthetic
caaugaguuuucagcacug

SEQ ID NO: 604862 - RNA, 20 nt, Artificial Sequence
  Synthetic
ccaaugaguuuucagcacug

SEQ ID NO: 604863 - RNA, 21 nt, Artificial Sequence
  Synthetic
uccaaugaguuuucagcacug

SEQ ID NO: 604864 - RNA, 22 nt, Artificial Sequence
  Synthetic
uuccaaugaguuuucagcacug

SEQ ID NO: 604865 - RNA, 23 nt, Artificial Sequence
  Synthetic
cuuccaaugaguuuucagcacug

SEQ ID NO: 604866 - RNA, 24 nt, Artificial Sequence
  Synthetic
acuuccaaugaguuuucagcacug

SEQ ID NO: 604867 - RNA, 18 nt, Artificial Sequence
  Synthetic
cccuuuaauuacgcacug

SEQ ID NO: 604868 - RNA, 19 nt, Artificial Sequence
  Synthetic
gcccuuuaauuacgcacug

SEQ ID NO: 604869 - RNA, 20 nt, Artificial Sequence
  Synthetic
ggcccuuuaauuacgcacug

SEQ ID NO: 604870 - RNA, 21 nt, Artificial Sequence
  Synthetic
aggcccuuuaauuacgcacug

SEQ ID NO: 604871 - RNA, 22 nt, Artificial Sequence
  Synthetic
uaggcccuuuaauuacgcacug

SEQ ID NO: 604872 - RNA, 23 nt, Artificial Sequence
  Synthetic
auaggcccuuuaauuacgcacug

SEQ ID NO: 604873 - RNA, 24 nt, Artificial Sequence
  Synthetic
cauaggcccuuuaauuacgcacug

SEQ ID NO: 604874 - RNA, 18 nt, Artificial Sequence
  Synthetic
uugaggacaggcgcacug

SEQ ID NO: 604875 - RNA, 19 nt, Artificial Sequence
  Synthetic
guugaggacaggcgcacug

SEQ ID NO: 604876 - RNA, 20 nt, Artificial Sequence
  Synthetic
aguugaggacaggcgcacug

SEQ ID NO: 604877 - RNA, 21 nt, Artificial Sequence
  Synthetic
aaguugaggacaggcgcacug

SEQ ID NO: 604878 - RNA, 22 nt, Artificial Sequence
  Synthetic
aaaguugaggacaggcgcacug

SEQ ID NO: 604879 - RNA, 23 nt, Artificial Sequence
  Synthetic
caaaguugaggacaggcgcacug

SEQ ID NO: 604880 - RNA, 24 nt, Artificial Sequence
  Synthetic
gcaaaguugaggacaggcgcacug

SEQ ID NO: 604881 - RNA, 18 nt, Artificial Sequence
  Synthetic
ucuggauauaaggcacug

SEQ ID NO: 604882 - RNA, 19 nt, Artificial Sequence
  Synthetic
uucuggauauaaggcacug

SEQ ID NO: 604883 - RNA, 20 nt, Artificial Sequence
  Synthetic
uuucuggauauaaggcacug

SEQ ID NO: 604884 - RNA, 21 nt, Artificial Sequence
  Synthetic
auuucuggauauaaggcacug

SEQ ID NO: 604885 - RNA, 22 nt, Artificial Sequence
  Synthetic
uauuucuggauauaaggcacug

SEQ ID NO: 604886 - RNA, 23 nt, Artificial Sequence
  Synthetic
uuauuucuggauauaaggcacug

SEQ ID NO: 604887 - RNA, 24 nt, Artificial Sequence
  Synthetic
guuauuucuggauauaaggcacug

SEQ ID NO: 604888 - RNA, 18 nt, Artificial Sequence
  Synthetic
caguagaguggggcacug

SEQ ID NO: 604889 - RNA, 19 nt, Artificial Sequence
  Synthetic
ccaguagaguggggcacug

SEQ ID NO: 604890 - RNA, 20 nt, Artificial Sequence
  Synthetic
accaguagaguggggcacug

SEQ ID NO: 604891 - RNA, 21 nt, Artificial Sequence
  Synthetic
uaccaguagaguggggcacug

SEQ ID NO: 604892 - RNA, 22 nt, Artificial Sequence
  Synthetic
guaccaguagaguggggcacug

SEQ ID NO: 604893 - RNA, 23 nt, Artificial Sequence
  Synthetic
gguaccaguagaguggggcacug

SEQ ID NO: 604894 - RNA, 24 nt, Artificial Sequence
  Synthetic
ugguaccaguagaguggggcacug

SEQ ID NO: 604895 - RNA, 18 nt, Artificial Sequence
  Synthetic
gacccgauggcugcacug

SEQ ID NO: 604896 - RNA, 19 nt, Artificial Sequence
  Synthetic
ggacccgauggcugcacug

SEQ ID NO: 604897 - RNA, 20 nt, Artificial Sequence
  Synthetic
gggacccgauggcugcacug

SEQ ID NO: 604898 - RNA, 21 nt, Artificial Sequence
  Synthetic
ugggacccgauggcugcacug

SEQ ID NO: 604899 - RNA, 22 nt, Artificial Sequence
  Synthetic
uugggacccgauggcugcacug

SEQ ID NO: 604900 - RNA, 23 nt, Artificial Sequence
  Synthetic
cuugggacccgauggcugcacug

SEQ ID NO: 604901 - RNA, 24 nt, Artificial Sequence
  Synthetic
gcuugggacccgauggcugcacug

SEQ ID NO: 604902 - RNA, 18 nt, Artificial Sequence
  Synthetic
ugcuuccaacaaucacug

SEQ ID NO: 604903 - RNA, 19 nt, Artificial Sequence
  Synthetic
cugcuuccaacaaucacug

SEQ ID NO: 604904 - RNA, 20 nt, Artificial Sequence
  Synthetic
gcugcuuccaacaaucacug

SEQ ID NO: 604905 - RNA, 21 nt, Artificial Sequence
  Synthetic
ggcugcuuccaacaaucacug

SEQ ID NO: 604906 - RNA, 22 nt, Artificial Sequence
  Synthetic
gggcugcuuccaacaaucacug

SEQ ID NO: 604907 - RNA, 23 nt, Artificial Sequence
  Synthetic
ugggcugcuuccaacaaucacug

SEQ ID NO: 604908 - RNA, 24 nt, Artificial Sequence
  Synthetic
cugggcugcuuccaacaaucacug

SEQ ID NO: 604909 - RNA, 18 nt, Artificial Sequence
  Synthetic
auaaaauacacaucacug

SEQ ID NO: 604910 - RNA, 19 nt, Artificial Sequence
  Synthetic
gauaaaauacacaucacug

SEQ ID NO: 604911 - RNA, 20 nt, Artificial Sequence
  Synthetic
ugauaaaauacacaucacug

SEQ ID NO: 604912 - RNA, 21 nt, Artificial Sequence
  Synthetic
cugauaaaauacacaucacug

SEQ ID NO: 604913 - RNA, 22 nt, Artificial Sequence
  Synthetic
acugauaaaauacacaucacug

SEQ ID NO: 604914 - RNA, 23 nt, Artificial Sequence
  Synthetic
cacugauaaaauacacaucacug

SEQ ID NO: 604915 - RNA, 24 nt, Artificial Sequence
  Synthetic
ucacugauaaaauacacaucacug

SEQ ID NO: 604916 - RNA, 18 nt, Artificial Sequence
  Synthetic
uuauccaguccaucacug

SEQ ID NO: 604917 - RNA, 19 nt, Artificial Sequence
  Synthetic
uuuauccaguccaucacug

SEQ ID NO: 604918 - RNA, 20 nt, Artificial Sequence
  Synthetic
cuuuauccaguccaucacug

SEQ ID NO: 604919 - RNA, 21 nt, Artificial Sequence
  Synthetic
ucuuuauccaguccaucacug

SEQ ID NO: 604920 - RNA, 22 nt, Artificial Sequence
  Synthetic
uucuuuauccaguccaucacug

SEQ ID NO: 604921 - RNA, 23 nt, Artificial Sequence
  Synthetic
uuucuuuauccaguccaucacug

SEQ ID NO: 604922 - RNA, 24 nt, Artificial Sequence
  Synthetic
uuuucuuuauccaguccaucacug

SEQ ID NO: 604923 - RNA, 18 nt, Artificial Sequence
  Synthetic
gcagcuaaagcaucacug

SEQ ID NO: 604924 - RNA, 19 nt, Artificial Sequence
  Synthetic
ggcagcuaaagcaucacug

SEQ ID NO: 604925 - RNA, 20 nt, Artificial Sequence
  Synthetic
uggcagcuaaagcaucacug

SEQ ID NO: 604926 - RNA, 21 nt, Artificial Sequence
  Synthetic
uuggcagcuaaagcaucacug

SEQ ID NO: 604927 - RNA, 22 nt, Artificial Sequence
  Synthetic
uuuggcagcuaaagcaucacug

SEQ ID NO: 604928 - RNA, 23 nt, Artificial Sequence
  Synthetic
uuuuggcagcuaaagcaucacug

SEQ ID NO: 604929 - RNA, 24 nt, Artificial Sequence
  Synthetic
uuuuuggcagcuaaagcaucacug

SEQ ID NO: 604930 - RNA, 18 nt, Artificial Sequence
  Synthetic
cuucauaaugcaucacug

SEQ ID NO: 604931 - RNA, 19 nt, Artificial Sequence
  Synthetic
gcuucauaaugcaucacug

SEQ ID NO: 604932 - RNA, 20 nt, Artificial Sequence
  Synthetic
ugcuucauaaugcaucacug

SEQ ID NO: 604933 - RNA, 21 nt, Artificial Sequence
  Synthetic
augcuucauaaugcaucacug

SEQ ID NO: 604934 - RNA, 22 nt, Artificial Sequence
  Synthetic
caugcuucauaaugcaucacug

SEQ ID NO: 604935 - RNA, 23 nt, Artificial Sequence
  Synthetic
acaugcuucauaaugcaucacug

SEQ ID NO: 604936 - RNA, 24 nt, Artificial Sequence
  Synthetic
aacaugcuucauaaugcaucacug

SEQ ID NO: 604937 - RNA, 18 nt, Artificial Sequence
  Synthetic
gaccaaaugucaucacug

SEQ ID NO: 604938 - RNA, 19 nt, Artificial Sequence
  Synthetic
ggaccaaaugucaucacug

SEQ ID NO: 604939 - RNA, 20 nt, Artificial Sequence
  Synthetic
aggaccaaaugucaucacug

SEQ ID NO: 604940 - RNA, 21 nt, Artificial Sequence
  Synthetic
caggaccaaaugucaucacug

SEQ ID NO: 604941 - RNA, 22 nt, Artificial Sequence
  Synthetic
ccaggaccaaaugucaucacug

SEQ ID NO: 604942 - RNA, 23 nt, Artificial Sequence
  Synthetic
cccaggaccaaaugucaucacug

SEQ ID NO: 604943 - RNA, 24 nt, Artificial Sequence
  Synthetic
gcccaggaccaaaugucaucacug

SEQ ID NO: 604944 - RNA, 18 nt, Artificial Sequence
  Synthetic
gaccuugagagaucacug

SEQ ID NO: 604945 - RNA, 19 nt, Artificial Sequence
  Synthetic
ugaccuugagagaucacug

SEQ ID NO: 604946 - RNA, 20 nt, Artificial Sequence
  Synthetic
cugaccuugagagaucacug

SEQ ID NO: 604947 - RNA, 21 nt, Artificial Sequence
  Synthetic
gcugaccuugagagaucacug

SEQ ID NO: 604948 - RNA, 22 nt, Artificial Sequence
  Synthetic
agcugaccuugagagaucacug

SEQ ID NO: 604949 - RNA, 23 nt, Artificial Sequence
  Synthetic
gagcugaccuugagagaucacug

SEQ ID NO: 604950 - RNA, 24 nt, Artificial Sequence
  Synthetic
ugagcugaccuugagagaucacug

SEQ ID NO: 604951 - RNA, 18 nt, Artificial Sequence
  Synthetic
uaaauuaaaauaucacug

SEQ ID NO: 604952 - RNA, 19 nt, Artificial Sequence
  Synthetic
cuaaauuaaaauaucacug

SEQ ID NO: 604953 - RNA, 20 nt, Artificial Sequence
  Synthetic
gcuaaauuaaaauaucacug

SEQ ID NO: 604954 - RNA, 21 nt, Artificial Sequence
  Synthetic
agcuaaauuaaaauaucacug

SEQ ID NO: 604955 - RNA, 22 nt, Artificial Sequence
  Synthetic
gagcuaaauuaaaauaucacug

SEQ ID NO: 604956 - RNA, 23 nt, Artificial Sequence
  Synthetic
agagcuaaauuaaaauaucacug

SEQ ID NO: 604957 - RNA, 24 nt, Artificial Sequence
  Synthetic
gagagcuaaauuaaaauaucacug

SEQ ID NO: 604958 - RNA, 21 nt, Artificial Sequence
  Synthetic
ucuuaauccagucuaucacug

SEQ ID NO: 604959 - RNA, 22 nt, Artificial Sequence
  Synthetic
uucuuaauccagucuaucacug

SEQ ID NO: 604960 - RNA, 23 nt, Artificial Sequence
  Synthetic
uuucuuaauccagucuaucacug

SEQ ID NO: 604961 - RNA, 24 nt, Artificial Sequence
  Synthetic
uuuucuuaauccagucuaucacug

SEQ ID NO: 604962 - RNA, 18 nt, Artificial Sequence
  Synthetic
gcucucaacuccucacug

SEQ ID NO: 604963 - RNA, 19 nt, Artificial Sequence
  Synthetic
ugcucucaacuccucacug

SEQ ID NO: 604964 - RNA, 20 nt, Artificial Sequence
  Synthetic
cugcucucaacuccucacug

SEQ ID NO: 604965 - RNA, 21 nt, Artificial Sequence
  Synthetic
acugcucucaacuccucacug

SEQ ID NO: 604966 - RNA, 22 nt, Artificial Sequence
  Synthetic
cacugcucucaacuccucacug

SEQ ID NO: 604967 - RNA, 23 nt, Artificial Sequence
  Synthetic
ccacugcucucaacuccucacug

SEQ ID NO: 604968 - RNA, 24 nt, Artificial Sequence
  Synthetic
cccacugcucucaacuccucacug

SEQ ID NO: 604969 - RNA, 18 nt, Artificial Sequence
  Synthetic
ucuggauaguccucacug

SEQ ID NO: 604970 - RNA, 19 nt, Artificial Sequence
  Synthetic
uucuggauaguccucacug

SEQ ID NO: 604971 - RNA, 20 nt, Artificial Sequence
  Synthetic
cuucuggauaguccucacug

SEQ ID NO: 604972 - RNA, 21 nt, Artificial Sequence
  Synthetic
ucuucuggauaguccucacug

SEQ ID NO: 604973 - RNA, 22 nt, Artificial Sequence
  Synthetic
gucuucuggauaguccucacug

SEQ ID NO: 604974 - RNA, 23 nt, Artificial Sequence
  Synthetic
ggucuucuggauaguccucacug

SEQ ID NO: 604975 - RNA, 24 nt, Artificial Sequence
  Synthetic
uggucuucuggauaguccucacug

SEQ ID NO: 604976 - RNA, 18 nt, Artificial Sequence
  Synthetic
auaugguaauagucacug

SEQ ID NO: 604977 - RNA, 19 nt, Artificial Sequence
  Synthetic
aauaugguaauagucacug

SEQ ID NO: 604978 - RNA, 20 nt, Artificial Sequence
  Synthetic
aaauaugguaauagucacug

SEQ ID NO: 604979 - RNA, 21 nt, Artificial Sequence
  Synthetic
aaaauaugguaauagucacug

SEQ ID NO: 604980 - RNA, 22 nt, Artificial Sequence
  Synthetic
caaaauaugguaauagucacug

SEQ ID NO: 604981 - RNA, 23 nt, Artificial Sequence
  Synthetic
gcaaaauaugguaauagucacug

SEQ ID NO: 604982 - RNA, 24 nt, Artificial Sequence
  Synthetic
ugcaaaauaugguaauagucacug

SEQ ID NO: 604983 - RNA, 18 nt, Artificial Sequence
  Synthetic
uccucuacuuagucacug

SEQ ID NO: 604984 - RNA, 19 nt, Artificial Sequence
  Synthetic
uuccucuacuuagucacug

SEQ ID NO: 604985 - RNA, 20 nt, Artificial Sequence
  Synthetic
guuccucuacuuagucacug

SEQ ID NO: 604986 - RNA, 21 nt, Artificial Sequence
  Synthetic
uguuccucuacuuagucacug

SEQ ID NO: 604987 - RNA, 22 nt, Artificial Sequence
  Synthetic
cuguuccucuacuuagucacug

SEQ ID NO: 604988 - RNA, 23 nt, Artificial Sequence
  Synthetic
ucuguuccucuacuuagucacug

SEQ ID NO: 604989 - RNA, 24 nt, Artificial Sequence
  Synthetic
aucuguuccucuacuuagucacug

SEQ ID NO: 604990 - RNA, 18 nt, Artificial Sequence
  Synthetic
aauaaauuaaugucacug

SEQ ID NO: 604991 - RNA, 19 nt, Artificial Sequence
  Synthetic
caauaaauuaaugucacug

SEQ ID NO: 604992 - RNA, 20 nt, Artificial Sequence
  Synthetic
acaauaaauuaaugucacug

SEQ ID NO: 604993 - RNA, 21 nt, Artificial Sequence
  Synthetic
aacaauaaauuaaugucacug

SEQ ID NO: 604994 - RNA, 22 nt, Artificial Sequence
  Synthetic
caacaauaaauuaaugucacug

SEQ ID NO: 604995 - RNA, 23 nt, Artificial Sequence
  Synthetic
acaacaauaaauuaaugucacug

SEQ ID NO: 604996 - RNA, 24 nt, Artificial Sequence
  Synthetic
aacaacaauaaauuaaugucacug

SEQ ID NO: 604997 - RNA, 18 nt, Artificial Sequence
  Synthetic
aaaguagagauuucacug

SEQ ID NO: 604998 - RNA, 19 nt, Artificial Sequence
  Synthetic
uaaaguagagauuucacug

SEQ ID NO: 604999 - RNA, 20 nt, Artificial Sequence
  Synthetic
uuaaaguagagauuucacug

SEQ ID NO: 605000 - RNA, 21 nt, Artificial Sequence
  Synthetic
cuuaaaguagagauuucacug

SEQ ID NO: 605001 - RNA, 22 nt, Artificial Sequence
  Synthetic
acuuaaaguagagauuucacug

SEQ ID NO: 605002 - RNA, 23 nt, Artificial Sequence
  Synthetic
aacuuaaaguagagauuucacug

SEQ ID NO: 605003 - RNA, 24 nt, Artificial Sequence
  Synthetic
aaacuuaaaguagagauuucacug

SEQ ID NO: 605004 - RNA, 18 nt, Artificial Sequence
  Synthetic
agcccuguucuuucacug

SEQ ID NO: 605005 - RNA, 19 nt, Artificial Sequence
  Synthetic
aagcccuguucuuucacug

SEQ ID NO: 605006 - RNA, 20 nt, Artificial Sequence
  Synthetic
uaagcccuguucuuucacug

SEQ ID NO: 605007 - RNA, 21 nt, Artificial Sequence
  Synthetic
uuaagcccuguucuuucacug

SEQ ID NO: 605008 - RNA, 22 nt, Artificial Sequence
  Synthetic
uuuaagcccuguucuuucacug

SEQ ID NO: 605009 - RNA, 23 nt, Artificial Sequence
  Synthetic
auuuaagcccuguucuuucacug

SEQ ID NO: 605010 - RNA, 24 nt, Artificial Sequence
  Synthetic
aauuuaagcccuguucuuucacug

SEQ ID NO: 605011 - RNA, 18 nt, Artificial Sequence
  Synthetic
acuuuccuauuuucacug

SEQ ID NO: 605012 - RNA, 19 nt, Artificial Sequence
  Synthetic
uacuuuccuauuuucacug

SEQ ID NO: 605013 - RNA, 20 nt, Artificial Sequence
  Synthetic
cuacuuuccuauuuucacug

SEQ ID NO: 605014 - RNA, 21 nt, Artificial Sequence
  Synthetic
ucuacuuuccuauuuucacug

SEQ ID NO: 605015 - RNA, 22 nt, Artificial Sequence
  Synthetic
uucuacuuuccuauuuucacug

SEQ ID NO: 605016 - RNA, 23 nt, Artificial Sequence
  Synthetic
uuucuacuuuccuauuuucacug

SEQ ID NO: 605017 - RNA, 24 nt, Artificial Sequence
  Synthetic
auuucuacuuuccuauuuucacug

SEQ ID NO: 605018 - RNA, 18 nt, Artificial Sequence
  Synthetic
augauaucaaaaagacug

SEQ ID NO: 605019 - RNA, 19 nt, Artificial Sequence
  Synthetic
caugauaucaaaaagacug

SEQ ID NO: 605020 - RNA, 20 nt, Artificial Sequence
  Synthetic
ucaugauaucaaaaagacug

SEQ ID NO: 605021 - RNA, 21 nt, Artificial Sequence
  Synthetic
aucaugauaucaaaaagacug

SEQ ID NO: 605022 - RNA, 22 nt, Artificial Sequence
  Synthetic
caucaugauaucaaaaagacug

SEQ ID NO: 605023 - RNA, 23 nt, Artificial Sequence
  Synthetic
ucaucaugauaucaaaaagacug

SEQ ID NO: 605024 - RNA, 24 nt, Artificial Sequence
  Synthetic
uucaucaugauaucaaaaagacug

SEQ ID NO: 605025 - RNA, 18 nt, Artificial Sequence
  Synthetic
caaugguguaaaagacug

SEQ ID NO: 605026 - RNA, 19 nt, Artificial Sequence
  Synthetic
acaaugguguaaaagacug

SEQ ID NO: 605027 - RNA, 20 nt, Artificial Sequence
  Synthetic
uacaaugguguaaaagacug

SEQ ID NO: 605028 - RNA, 21 nt, Artificial Sequence
  Synthetic
cuacaaugguguaaaagacug

SEQ ID NO: 605029 - RNA, 22 nt, Artificial Sequence
  Synthetic
acuacaaugguguaaaagacug

SEQ ID NO: 605030 - RNA, 23 nt, Artificial Sequence
  Synthetic
gacuacaaugguguaaaagacug

SEQ ID NO: 605031 - RNA, 24 nt, Artificial Sequence
  Synthetic
ugacuacaaugguguaaaagacug

SEQ ID NO: 605032 - RNA, 18 nt, Artificial Sequence
  Synthetic
uggucacaacaaagacug

SEQ ID NO: 605033 - RNA, 19 nt, Artificial Sequence
  Synthetic
cuggucacaacaaagacug

SEQ ID NO: 605034 - RNA, 20 nt, Artificial Sequence
  Synthetic
gcuggucacaacaaagacug

SEQ ID NO: 605035 - RNA, 21 nt, Artificial Sequence
  Synthetic
agcuggucacaacaaagacug

SEQ ID NO: 605036 - RNA, 22 nt, Artificial Sequence
  Synthetic
gagcuggucacaacaaagacug

SEQ ID NO: 605037 - RNA, 23 nt, Artificial Sequence
  Synthetic
agagcuggucacaacaaagacug

SEQ ID NO: 605038 - RNA, 24 nt, Artificial Sequence
  Synthetic
gagagcuggucacaacaaagacug

SEQ ID NO: 605039 - RNA, 18 nt, Artificial Sequence
  Synthetic
gauacuauccaaagacug

SEQ ID NO: 605040 - RNA, 19 nt, Artificial Sequence
  Synthetic
agauacuauccaaagacug

SEQ ID NO: 605041 - RNA, 20 nt, Artificial Sequence
  Synthetic
aagauacuauccaaagacug

SEQ ID NO: 605042 - RNA, 21 nt, Artificial Sequence
  Synthetic
aaagauacuauccaaagacug

SEQ ID NO: 605043 - RNA, 22 nt, Artificial Sequence
  Synthetic
uaaagauacuauccaaagacug

SEQ ID NO: 605044 - RNA, 23 nt, Artificial Sequence
  Synthetic
cuaaagauacuauccaaagacug

SEQ ID NO: 605045 - RNA, 24 nt, Artificial Sequence
  Synthetic
ccuaaagauacuauccaaagacug

SEQ ID NO: 605046 - RNA, 18 nt, Artificial Sequence
  Synthetic
gaacuaggauaaagacug

SEQ ID NO: 605047 - RNA, 19 nt, Artificial Sequence
  Synthetic
ugaacuaggauaaagacug

SEQ ID NO: 605048 - RNA, 20 nt, Artificial Sequence
  Synthetic
gugaacuaggauaaagacug

SEQ ID NO: 605049 - RNA, 21 nt, Artificial Sequence
  Synthetic
ggugaacuaggauaaagacug

SEQ ID NO: 605050 - RNA, 22 nt, Artificial Sequence
  Synthetic
aggugaacuaggauaaagacug

SEQ ID NO: 605051 - RNA, 23 nt, Artificial Sequence
  Synthetic
aaggugaacuaggauaaagacug

SEQ ID NO: 605052 - RNA, 24 nt, Artificial Sequence
  Synthetic
uaaggugaacuaggauaaagacug

SEQ ID NO: 605053 - RNA, 18 nt, Artificial Sequence
  Synthetic
gacuccggaggcagacug

SEQ ID NO: 605054 - RNA, 19 nt, Artificial Sequence
  Synthetic
ggacuccggaggcagacug

SEQ ID NO: 605055 - RNA, 20 nt, Artificial Sequence
  Synthetic
aggacuccggaggcagacug

SEQ ID NO: 605056 - RNA, 21 nt, Artificial Sequence
  Synthetic
aaggacuccggaggcagacug

SEQ ID NO: 605057 - RNA, 22 nt, Artificial Sequence
  Synthetic
uaaggacuccggaggcagacug

SEQ ID NO: 605058 - RNA, 23 nt, Artificial Sequence
  Synthetic
guaaggacuccggaggcagacug

SEQ ID NO: 605059 - RNA, 24 nt, Artificial Sequence
  Synthetic
aguaaggacuccggaggcagacug

SEQ ID NO: 605060 - RNA, 18 nt, Artificial Sequence
  Synthetic
cccaucaguggcagacug

SEQ ID NO: 605061 - RNA, 19 nt, Artificial Sequence
  Synthetic
gcccaucaguggcagacug

SEQ ID NO: 605062 - RNA, 20 nt, Artificial Sequence
  Synthetic
ugcccaucaguggcagacug

SEQ ID NO: 605063 - RNA, 21 nt, Artificial Sequence
  Synthetic
gugcccaucaguggcagacug

SEQ ID NO: 605064 - RNA, 22 nt, Artificial Sequence
  Synthetic
ggugcccaucaguggcagacug

SEQ ID NO: 605065 - RNA, 23 nt, Artificial Sequence
  Synthetic
aggugcccaucaguggcagacug

SEQ ID NO: 605066 - RNA, 24 nt, Artificial Sequence
  Synthetic
uaggugcccaucaguggcagacug

SEQ ID NO: 605067 - RNA, 18 nt, Artificial Sequence
  Synthetic
acccauaaaaagagacug

SEQ ID NO: 605068 - RNA, 19 nt, Artificial Sequence
  Synthetic
aacccauaaaaagagacug

SEQ ID NO: 605069 - RNA, 20 nt, Artificial Sequence
  Synthetic
caacccauaaaaagagacug

SEQ ID NO: 605070 - RNA, 21 nt, Artificial Sequence
  Synthetic
ccaacccauaaaaagagacug

SEQ ID NO: 605071 - RNA, 22 nt, Artificial Sequence
  Synthetic
cccaacccauaaaaagagacug

SEQ ID NO: 605072 - RNA, 23 nt, Artificial Sequence
  Synthetic
ucccaacccauaaaaagagacug

SEQ ID NO: 605073 - RNA, 24 nt, Artificial Sequence
  Synthetic
gucccaacccauaaaaagagacug

SEQ ID NO: 605074 - RNA, 18 nt, Artificial Sequence
  Synthetic
aagagauguaagagacug

SEQ ID NO: 605075 - RNA, 19 nt, Artificial Sequence
  Synthetic
aaagagauguaagagacug

SEQ ID NO: 605076 - RNA, 20 nt, Artificial Sequence
  Synthetic
aaaagagauguaagagacug

SEQ ID NO: 605077 - RNA, 21 nt, Artificial Sequence
  Synthetic
gaaaagagauguaagagacug

SEQ ID NO: 605078 - RNA, 22 nt, Artificial Sequence
  Synthetic
ggaaaagagauguaagagacug

SEQ ID NO: 605079 - RNA, 23 nt, Artificial Sequence
  Synthetic
aggaaaagagauguaagagacug

SEQ ID NO: 605080 - RNA, 24 nt, Artificial Sequence
  Synthetic
aaggaaaagagauguaagagacug

SEQ ID NO: 605081 - RNA, 18 nt, Artificial Sequence
  Synthetic
gaaguaguggagagacug

SEQ ID NO: 605082 - RNA, 19 nt, Artificial Sequence
  Synthetic
ugaaguaguggagagacug

SEQ ID NO: 605083 - RNA, 20 nt, Artificial Sequence
  Synthetic
uugaaguaguggagagacug

SEQ ID NO: 605084 - RNA, 21 nt, Artificial Sequence
  Synthetic
uuugaaguaguggagagacug

SEQ ID NO: 605085 - RNA, 22 nt, Artificial Sequence
  Synthetic
guuugaaguaguggagagacug

SEQ ID NO: 605086 - RNA, 23 nt, Artificial Sequence
  Synthetic
gguuugaaguaguggagagacug

SEQ ID NO: 605087 - RNA, 24 nt, Artificial Sequence
  Synthetic
agguuugaaguaguggagagacug

SEQ ID NO: 605088 - RNA, 18 nt, Artificial Sequence
  Synthetic
aguaaaaaugggagacug

SEQ ID NO: 605089 - RNA, 19 nt, Artificial Sequence
  Synthetic
uaguaaaaaugggagacug

SEQ ID NO: 605090 - RNA, 20 nt, Artificial Sequence
  Synthetic
uuaguaaaaaugggagacug

SEQ ID NO: 605091 - RNA, 21 nt, Artificial Sequence
  Synthetic
uuuaguaaaaaugggagacug

SEQ ID NO: 605092 - RNA, 22 nt, Artificial Sequence
  Synthetic
cuuuaguaaaaaugggagacug

SEQ ID NO: 605093 - RNA, 23 nt, Artificial Sequence
  Synthetic
ucuuuaguaaaaaugggagacug

SEQ ID NO: 605094 - RNA, 24 nt, Artificial Sequence
  Synthetic
aucuuuaguaaaaaugggagacug

SEQ ID NO: 605095 - RNA, 18 nt, Artificial Sequence
  Synthetic
ggacauuugaaucgacug

SEQ ID NO: 605096 - RNA, 19 nt, Artificial Sequence
  Synthetic
aggacauuugaaucgacug

SEQ ID NO: 605097 - RNA, 20 nt, Artificial Sequence
  Synthetic
gaggacauuugaaucgacug

SEQ ID NO: 605098 - RNA, 21 nt, Artificial Sequence
  Synthetic
agaggacauuugaaucgacug

SEQ ID NO: 605099 - RNA, 22 nt, Artificial Sequence
  Synthetic
aagaggacauuugaaucgacug

SEQ ID NO: 605100 - RNA, 23 nt, Artificial Sequence
  Synthetic
uaagaggacauuugaaucgacug

SEQ ID NO: 605101 - RNA, 24 nt, Artificial Sequence
  Synthetic
uuaagaggacauuugaaucgacug

SEQ ID NO: 605102 - RNA, 18 nt, Artificial Sequence
  Synthetic
cagcccaguucaggacug

SEQ ID NO: 605103 - RNA, 19 nt, Artificial Sequence
  Synthetic
ucagcccaguucaggacug

SEQ ID NO: 605104 - RNA, 20 nt, Artificial Sequence
  Synthetic
uucagcccaguucaggacug

SEQ ID NO: 605105 - RNA, 21 nt, Artificial Sequence
  Synthetic
guucagcccaguucaggacug

SEQ ID NO: 605106 - RNA, 22 nt, Artificial Sequence
  Synthetic
gguucagcccaguucaggacug

SEQ ID NO: 605107 - RNA, 23 nt, Artificial Sequence
  Synthetic
ugguucagcccaguucaggacug

SEQ ID NO: 605108 - RNA, 24 nt, Artificial Sequence
  Synthetic
uugguucagcccaguucaggacug

SEQ ID NO: 605109 - RNA, 18 nt, Artificial Sequence
  Synthetic
agagagagaagaggacug

SEQ ID NO: 605110 - RNA, 19 nt, Artificial Sequence
  Synthetic
gagagagagaagaggacug

SEQ ID NO: 605111 - RNA, 20 nt, Artificial Sequence
  Synthetic
agagagagagaagaggacug

SEQ ID NO: 605112 - RNA, 21 nt, Artificial Sequence
  Synthetic
gagagagagagaagaggacug

SEQ ID NO: 605113 - RNA, 22 nt, Artificial Sequence
  Synthetic
agagagagagagaagaggacug

SEQ ID NO: 605114 - RNA, 23 nt, Artificial Sequence
  Synthetic
gagagagagagagaagaggacug

SEQ ID NO: 605115 - RNA, 24 nt, Artificial Sequence
  Synthetic
agagagagagagagaagaggacug

SEQ ID NO: 605116 - RNA, 18 nt, Artificial Sequence
  Synthetic
aguucaccucagggacug

SEQ ID NO: 605117 - RNA, 19 nt, Artificial Sequence
  Synthetic
caguucaccucagggacug

SEQ ID NO: 605118 - RNA, 20 nt, Artificial Sequence
  Synthetic
ccaguucaccucagggacug

SEQ ID NO: 605119 - RNA, 21 nt, Artificial Sequence
  Synthetic
cccaguucaccucagggacug

SEQ ID NO: 605120 - RNA, 22 nt, Artificial Sequence
  Synthetic
ucccaguucaccucagggacug

SEQ ID NO: 605121 - RNA, 23 nt, Artificial Sequence
  Synthetic
aucccaguucaccucagggacug

SEQ ID NO: 605122 - RNA, 24 nt, Artificial Sequence
  Synthetic
aaucccaguucaccucagggacug

SEQ ID NO: 605123 - RNA, 18 nt, Artificial Sequence
  Synthetic
uugcuacaugauggacug

SEQ ID NO: 605124 - RNA, 19 nt, Artificial Sequence
  Synthetic
cuugcuacaugauggacug

SEQ ID NO: 605125 - RNA, 20 nt, Artificial Sequence
  Synthetic
gcuugcuacaugauggacug

SEQ ID NO: 605126 - RNA, 21 nt, Artificial Sequence
  Synthetic
ugcuugcuacaugauggacug

SEQ ID NO: 605127 - RNA, 22 nt, Artificial Sequence
  Synthetic
gugcuugcuacaugauggacug

SEQ ID NO: 605128 - RNA, 23 nt, Artificial Sequence
  Synthetic
ggugcuugcuacaugauggacug

SEQ ID NO: 605129 - RNA, 24 nt, Artificial Sequence
  Synthetic
gggugcuugcuacaugauggacug

SEQ ID NO: 605130 - RNA, 18 nt, Artificial Sequence
  Synthetic
aaaugagauaaaugacug

SEQ ID NO: 605131 - RNA, 19 nt, Artificial Sequence
  Synthetic
caaaugagauaaaugacug

SEQ ID NO: 605132 - RNA, 20 nt, Artificial Sequence
  Synthetic
acaaaugagauaaaugacug

SEQ ID NO: 605133 - RNA, 21 nt, Artificial Sequence
  Synthetic
aacaaaugagauaaaugacug

SEQ ID NO: 605134 - RNA, 22 nt, Artificial Sequence
  Synthetic
uaacaaaugagauaaaugacug

SEQ ID NO: 605135 - RNA, 23 nt, Artificial Sequence
  Synthetic
auaacaaaugagauaaaugacug

SEQ ID NO: 605136 - RNA, 24 nt, Artificial Sequence
  Synthetic
aauaacaaaugagauaaaugacug

SEQ ID NO: 605137 - RNA, 18 nt, Artificial Sequence
  Synthetic
uauaguuccacaugacug

SEQ ID NO: 605138 - RNA, 19 nt, Artificial Sequence
  Synthetic
uuauaguuccacaugacug

SEQ ID NO: 605139 - RNA, 20 nt, Artificial Sequence
  Synthetic
cuuauaguuccacaugacug

SEQ ID NO: 605140 - RNA, 21 nt, Artificial Sequence
  Synthetic
acuuauaguuccacaugacug

SEQ ID NO: 605141 - RNA, 22 nt, Artificial Sequence
  Synthetic
aacuuauaguuccacaugacug

SEQ ID NO: 605142 - RNA, 23 nt, Artificial Sequence
  Synthetic
gaacuuauaguuccacaugacug

SEQ ID NO: 605143 - RNA, 24 nt, Artificial Sequence
  Synthetic
ugaacuuauaguuccacaugacug

SEQ ID NO: 605144 - RNA, 18 nt, Artificial Sequence
  Synthetic
gugaaauguucaugacug

SEQ ID NO: 605145 - RNA, 19 nt, Artificial Sequence
  Synthetic
ugugaaauguucaugacug

SEQ ID NO: 605146 - RNA, 20 nt, Artificial Sequence
  Synthetic
uugugaaauguucaugacug

SEQ ID NO: 605147 - RNA, 21 nt, Artificial Sequence
  Synthetic
cuugugaaauguucaugacug

SEQ ID NO: 605148 - RNA, 22 nt, Artificial Sequence
  Synthetic
ccuugugaaauguucaugacug

SEQ ID NO: 605149 - RNA, 23 nt, Artificial Sequence
  Synthetic
cccuugugaaauguucaugacug

SEQ ID NO: 605150 - RNA, 24 nt, Artificial Sequence
  Synthetic
acccuugugaaauguucaugacug

SEQ ID NO: 605151 - RNA, 18 nt, Artificial Sequence
  Synthetic
gcuuuaacuagaugacug

SEQ ID NO: 605152 - RNA, 19 nt, Artificial Sequence
  Synthetic
ugcuuuaacuagaugacug

SEQ ID NO: 605153 - RNA, 20 nt, Artificial Sequence
  Synthetic
uugcuuuaacuagaugacug

SEQ ID NO: 605154 - RNA, 21 nt, Artificial Sequence
  Synthetic
guugcuuuaacuagaugacug

SEQ ID NO: 605155 - RNA, 22 nt, Artificial Sequence
  Synthetic
aguugcuuuaacuagaugacug

SEQ ID NO: 605156 - RNA, 23 nt, Artificial Sequence
  Synthetic
uaguugcuuuaacuagaugacug

SEQ ID NO: 605157 - RNA, 24 nt, Artificial Sequence
  Synthetic
uuaguugcuuuaacuagaugacug

SEQ ID NO: 605158 - RNA, 18 nt, Artificial Sequence
  Synthetic
uaccuagaaauaugacug

SEQ ID NO: 605159 - RNA, 19 nt, Artificial Sequence
  Synthetic
cuaccuagaaauaugacug

SEQ ID NO: 605160 - RNA, 20 nt, Artificial Sequence
  Synthetic
ucuaccuagaaauaugacug

SEQ ID NO: 605161 - RNA, 21 nt, Artificial Sequence
  Synthetic
aucuaccuagaaauaugacug

SEQ ID NO: 605162 - RNA, 22 nt, Artificial Sequence
  Synthetic
caucuaccuagaaauaugacug

SEQ ID NO: 605163 - RNA, 23 nt, Artificial Sequence
  Synthetic
acaucuaccuagaaauaugacug

SEQ ID NO: 605164 - RNA, 24 nt, Artificial Sequence
  Synthetic
aacaucuaccuagaaauaugacug

SEQ ID NO: 605165 - RNA, 18 nt, Artificial Sequence
  Synthetic
cuucuagugggcugacug

SEQ ID NO: 605166 - RNA, 19 nt, Artificial Sequence
  Synthetic
ccuucuagugggcugacug

SEQ ID NO: 605167 - RNA, 20 nt, Artificial Sequence
  Synthetic
gccuucuagugggcugacug

SEQ ID NO: 605168 - RNA, 21 nt, Artificial Sequence
  Synthetic
ugccuucuagugggcugacug

SEQ ID NO: 605169 - RNA, 22 nt, Artificial Sequence
  Synthetic
augccuucuagugggcugacug

SEQ ID NO: 605170 - RNA, 23 nt, Artificial Sequence
  Synthetic
caugccuucuagugggcugacug

SEQ ID NO: 605171 - RNA, 24 nt, Artificial Sequence
  Synthetic
gcaugccuucuagugggcugacug

SEQ ID NO: 605172 - RNA, 18 nt, Artificial Sequence
  Synthetic
uaucuaacugucugacug

SEQ ID NO: 605173 - RNA, 19 nt, Artificial Sequence
  Synthetic
uuaucuaacugucugacug

SEQ ID NO: 605174 - RNA, 20 nt, Artificial Sequence
  Synthetic
uuuaucuaacugucugacug

SEQ ID NO: 605175 - RNA, 21 nt, Artificial Sequence
  Synthetic
cuuuaucuaacugucugacug

SEQ ID NO: 605176 - RNA, 22 nt, Artificial Sequence
  Synthetic
ccuuuaucuaacugucugacug

SEQ ID NO: 605177 - RNA, 23 nt, Artificial Sequence
  Synthetic
gccuuuaucuaacugucugacug

SEQ ID NO: 605178 - RNA, 24 nt, Artificial Sequence
  Synthetic
ggccuuuaucuaacugucugacug

SEQ ID NO: 605179 - RNA, 18 nt, Artificial Sequence
  Synthetic
agaggaaauaagugacug

SEQ ID NO: 605180 - RNA, 19 nt, Artificial Sequence
  Synthetic
aagaggaaauaagugacug

SEQ ID NO: 605181 - RNA, 20 nt, Artificial Sequence
  Synthetic
caagaggaaauaagugacug

SEQ ID NO: 605182 - RNA, 21 nt, Artificial Sequence
  Synthetic
gcaagaggaaauaagugacug

SEQ ID NO: 605183 - RNA, 22 nt, Artificial Sequence
  Synthetic
ugcaagaggaaauaagugacug

SEQ ID NO: 605184 - RNA, 23 nt, Artificial Sequence
  Synthetic
uugcaagaggaaauaagugacug

SEQ ID NO: 605185 - RNA, 24 nt, Artificial Sequence
  Synthetic
cuugcaagaggaaauaagugacug

SEQ ID NO: 605186 - RNA, 18 nt, Artificial Sequence
  Synthetic
gcccucauucagugacug

SEQ ID NO: 605187 - RNA, 19 nt, Artificial Sequence
  Synthetic
agcccucauucagugacug

SEQ ID NO: 605188 - RNA, 20 nt, Artificial Sequence
  Synthetic
cagcccucauucagugacug

SEQ ID NO: 605189 - RNA, 21 nt, Artificial Sequence
  Synthetic
gcagcccucauucagugacug

SEQ ID NO: 605190 - RNA, 22 nt, Artificial Sequence
  Synthetic
ggcagcccucauucagugacug

SEQ ID NO: 605191 - RNA, 23 nt, Artificial Sequence
  Synthetic
aggcagcccucauucagugacug

SEQ ID NO: 605192 - RNA, 24 nt, Artificial Sequence
  Synthetic
caggcagcccucauucagugacug

SEQ ID NO: 605193 - RNA, 18 nt, Artificial Sequence
  Synthetic
auacuuguagagugacug

SEQ ID NO: 605194 - RNA, 19 nt, Artificial Sequence
  Synthetic
gauacuuguagagugacug

SEQ ID NO: 605195 - RNA, 20 nt, Artificial Sequence
  Synthetic
ugauacuuguagagugacug

SEQ ID NO: 605196 - RNA, 21 nt, Artificial Sequence
  Synthetic
gugauacuuguagagugacug

SEQ ID NO: 605197 - RNA, 22 nt, Artificial Sequence
  Synthetic
agugauacuuguagagugacug

SEQ ID NO: 605198 - RNA, 23 nt, Artificial Sequence
  Synthetic
cagugauacuuguagagugacug

SEQ ID NO: 605199 - RNA, 24 nt, Artificial Sequence
  Synthetic
ccagugauacuuguagagugacug

SEQ ID NO: 605200 - RNA, 18 nt, Artificial Sequence
  Synthetic
uaagacuuugagugacug

SEQ ID NO: 605201 - RNA, 19 nt, Artificial Sequence
  Synthetic
uuaagacuuugagugacug

SEQ ID NO: 605202 - RNA, 20 nt, Artificial Sequence
  Synthetic
guuaagacuuugagugacug

SEQ ID NO: 605203 - RNA, 21 nt, Artificial Sequence
  Synthetic
aguuaagacuuugagugacug

SEQ ID NO: 605204 - RNA, 22 nt, Artificial Sequence
  Synthetic
gaguuaagacuuugagugacug

SEQ ID NO: 605205 - RNA, 23 nt, Artificial Sequence
  Synthetic
ugaguuaagacuuugagugacug

SEQ ID NO: 605206 - RNA, 24 nt, Artificial Sequence
  Synthetic
gugaguuaagacuuugagugacug

SEQ ID NO: 605207 - RNA, 18 nt, Artificial Sequence
  Synthetic
aaucuacaaacgugacug

SEQ ID NO: 605208 - RNA, 19 nt, Artificial Sequence
  Synthetic
aaaucuacaaacgugacug

SEQ ID NO: 605209 - RNA, 20 nt, Artificial Sequence
  Synthetic
aaaaucuacaaacgugacug

SEQ ID NO: 605210 - RNA, 21 nt, Artificial Sequence
  Synthetic
aaaaaucuacaaacgugacug

SEQ ID NO: 605211 - RNA, 22 nt, Artificial Sequence
  Synthetic
caaaaaucuacaaacgugacug

SEQ ID NO: 605212 - RNA, 23 nt, Artificial Sequence
  Synthetic
ucaaaaaucuacaaacgugacug

SEQ ID NO: 605213 - RNA, 24 nt, Artificial Sequence
  Synthetic
uucaaaaaucuacaaacgugacug

SEQ ID NO: 605214 - RNA, 18 nt, Artificial Sequence
  Synthetic
gagugugggaguugacug

SEQ ID NO: 605215 - RNA, 19 nt, Artificial Sequence
  Synthetic
agagugugggaguugacug

SEQ ID NO: 605216 - RNA, 20 nt, Artificial Sequence
  Synthetic
aagagugugggaguugacug

SEQ ID NO: 605217 - RNA, 21 nt, Artificial Sequence
  Synthetic
aaagagugugggaguugacug

SEQ ID NO: 605218 - RNA, 22 nt, Artificial Sequence
  Synthetic
aaaagagugugggaguugacug

SEQ ID NO: 605219 - RNA, 23 nt, Artificial Sequence
  Synthetic
gaaaagagugugggaguugacug

SEQ ID NO: 605220 - RNA, 24 nt, Artificial Sequence
  Synthetic
ugaaaagagugugggaguugacug

SEQ ID NO: 605221 - RNA, 18 nt, Artificial Sequence
  Synthetic
aaagugggaaaaauacug

SEQ ID NO: 605222 - RNA, 19 nt, Artificial Sequence
  Synthetic
aaaagugggaaaaauacug

SEQ ID NO: 605223 - RNA, 20 nt, Artificial Sequence
  Synthetic
gaaaagugggaaaaauacug

SEQ ID NO: 605224 - RNA, 21 nt, Artificial Sequence
  Synthetic
agaaaagugggaaaaauacug

SEQ ID NO: 605225 - RNA, 22 nt, Artificial Sequence
  Synthetic
uagaaaagugggaaaaauacug

SEQ ID NO: 605226 - RNA, 23 nt, Artificial Sequence
  Synthetic
cuagaaaagugggaaaaauacug

SEQ ID NO: 605227 - RNA, 24 nt, Artificial Sequence
  Synthetic
ucuagaaaagugggaaaaauacug

SEQ ID NO: 605228 - RNA, 18 nt, Artificial Sequence
  Synthetic
cagaaacagaaaauacug

SEQ ID NO: 605229 - RNA, 19 nt, Artificial Sequence
  Synthetic
acagaaacagaaaauacug

SEQ ID NO: 605230 - RNA, 20 nt, Artificial Sequence
  Synthetic
cacagaaacagaaaauacug

SEQ ID NO: 605231 - RNA, 21 nt, Artificial Sequence
  Synthetic
acacagaaacagaaaauacug

SEQ ID NO: 605232 - RNA, 22 nt, Artificial Sequence
  Synthetic
cacacagaaacagaaaauacug

SEQ ID NO: 605233 - RNA, 23 nt, Artificial Sequence
  Synthetic
acacacagaaacagaaaauacug

SEQ ID NO: 605234 - RNA, 24 nt, Artificial Sequence
  Synthetic
gacacacagaaacagaaaauacug

SEQ ID NO: 605235 - RNA, 18 nt, Artificial Sequence
  Synthetic
uaaacggaacaaauacug

SEQ ID NO: 605236 - RNA, 19 nt, Artificial Sequence
  Synthetic
uuaaacggaacaaauacug

SEQ ID NO: 605237 - RNA, 20 nt, Artificial Sequence
  Synthetic
auuaaacggaacaaauacug

SEQ ID NO: 605238 - RNA, 21 nt, Artificial Sequence
  Synthetic
aauuaaacggaacaaauacug

SEQ ID NO: 605239 - RNA, 22 nt, Artificial Sequence
  Synthetic
gaauuaaacggaacaaauacug

SEQ ID NO: 605240 - RNA, 23 nt, Artificial Sequence
  Synthetic
ggaauuaaacggaacaaauacug

SEQ ID NO: 605241 - RNA, 24 nt, Artificial Sequence
  Synthetic
aggaauuaaacggaacaaauacug

SEQ ID NO: 605242 - RNA, 18 nt, Artificial Sequence
  Synthetic
uucauucuacaaauacug

SEQ ID NO: 605243 - RNA, 19 nt, Artificial Sequence
  Synthetic
auucauucuacaaauacug

SEQ ID NO: 605244 - RNA, 20 nt, Artificial Sequence
  Synthetic
cauucauucuacaaauacug

SEQ ID NO: 605245 - RNA, 21 nt, Artificial Sequence
  Synthetic
ucauucauucuacaaauacug

SEQ ID NO: 605246 - RNA, 22 nt, Artificial Sequence
  Synthetic
uucauucauucuacaaauacug

SEQ ID NO: 605247 - RNA, 23 nt, Artificial Sequence
  Synthetic
cuucauucauucuacaaauacug

SEQ ID NO: 605248 - RNA, 24 nt, Artificial Sequence
  Synthetic
ccuucauucauucuacaaauacug

SEQ ID NO: 605249 - RNA, 18 nt, Artificial Sequence
  Synthetic
cauaacuacuaaauacug

SEQ ID NO: 605250 - RNA, 19 nt, Artificial Sequence
  Synthetic
acauaacuacuaaauacug

SEQ ID NO: 605251 - RNA, 20 nt, Artificial Sequence
  Synthetic
aacauaacuacuaaauacug

SEQ ID NO: 605252 - RNA, 21 nt, Artificial Sequence
  Synthetic
aaacauaacuacuaaauacug

SEQ ID NO: 605253 - RNA, 22 nt, Artificial Sequence
  Synthetic
gaaacauaacuacuaaauacug

SEQ ID NO: 605254 - RNA, 23 nt, Artificial Sequence
  Synthetic
agaaacauaacuacuaaauacug

SEQ ID NO: 605255 - RNA, 24 nt, Artificial Sequence
  Synthetic
gagaaacauaacuacuaaauacug

SEQ ID NO: 605256 - RNA, 18 nt, Artificial Sequence
  Synthetic
ggauugauuuaaauacug

SEQ ID NO: 605257 - RNA, 19 nt, Artificial Sequence
  Synthetic
gggauugauuuaaauacug

SEQ ID NO: 605258 - RNA, 20 nt, Artificial Sequence
  Synthetic
agggauugauuuaaauacug

SEQ ID NO: 605259 - RNA, 21 nt, Artificial Sequence
  Synthetic
uagggauugauuuaaauacug

SEQ ID NO: 605260 - RNA, 22 nt, Artificial Sequence
  Synthetic
uuagggauugauuuaaauacug

SEQ ID NO: 605261 - RNA, 23 nt, Artificial Sequence
  Synthetic
auuagggauugauuuaaauacug

SEQ ID NO: 605262 - RNA, 24 nt, Artificial Sequence
  Synthetic
gauuagggauugauuuaaauacug

SEQ ID NO: 605263 - RNA, 18 nt, Artificial Sequence
  Synthetic
agauauaugagaauacug

SEQ ID NO: 605264 - RNA, 19 nt, Artificial Sequence
  Synthetic
gagauauaugagaauacug

SEQ ID NO: 605265 - RNA, 20 nt, Artificial Sequence
  Synthetic
ugagauauaugagaauacug

SEQ ID NO: 605266 - RNA, 21 nt, Artificial Sequence
  Synthetic
uugagauauaugagaauacug

SEQ ID NO: 605267 - RNA, 22 nt, Artificial Sequence
  Synthetic
guugagauauaugagaauacug

SEQ ID NO: 605268 - RNA, 23 nt, Artificial Sequence
  Synthetic
aguugagauauaugagaauacug

SEQ ID NO: 605269 - RNA, 24 nt, Artificial Sequence
  Synthetic
aaguugagauauaugagaauacug

SEQ ID NO: 605270 - RNA, 18 nt, Artificial Sequence
  Synthetic
uacuacuagcgaauacug

SEQ ID NO: 605271 - RNA, 19 nt, Artificial Sequence
  Synthetic
auacuacuagcgaauacug

SEQ ID NO: 605272 - RNA, 20 nt, Artificial Sequence
  Synthetic
aauacuacuagcgaauacug

SEQ ID NO: 605273 - RNA, 21 nt, Artificial Sequence
  Synthetic
caauacuacuagcgaauacug

SEQ ID NO: 605274 - RNA, 22 nt, Artificial Sequence
  Synthetic
acaauacuacuagcgaauacug

SEQ ID NO: 605275 - RNA, 23 nt, Artificial Sequence
  Synthetic
gacaauacuacuagcgaauacug

SEQ ID NO: 605276 - RNA, 24 nt, Artificial Sequence
  Synthetic
ugacaauacuacuagcgaauacug

SEQ ID NO: 605277 - RNA, 18 nt, Artificial Sequence
  Synthetic
uuuuagauuggaauacug

SEQ ID NO: 605278 - RNA, 19 nt, Artificial Sequence
  Synthetic
auuuuagauuggaauacug

SEQ ID NO: 605279 - RNA, 20 nt, Artificial Sequence
  Synthetic
aauuuuagauuggaauacug

SEQ ID NO: 605280 - RNA, 21 nt, Artificial Sequence
  Synthetic
aaauuuuagauuggaauacug

SEQ ID NO: 605281 - RNA, 22 nt, Artificial Sequence
  Synthetic
aaaauuuuagauuggaauacug

SEQ ID NO: 605282 - RNA, 23 nt, Artificial Sequence
  Synthetic
uaaaauuuuagauuggaauacug

SEQ ID NO: 605283 - RNA, 24 nt, Artificial Sequence
  Synthetic
cuaaaauuuuagauuggaauacug

SEQ ID NO: 605284 - RNA, 18 nt, Artificial Sequence
  Synthetic
aaaccuuuccuaauacug

SEQ ID NO: 605285 - RNA, 19 nt, Artificial Sequence
  Synthetic
gaaaccuuuccuaauacug

SEQ ID NO: 605286 - RNA, 20 nt, Artificial Sequence
  Synthetic
agaaaccuuuccuaauacug

SEQ ID NO: 605287 - RNA, 21 nt, Artificial Sequence
  Synthetic
aagaaaccuuuccuaauacug

SEQ ID NO: 605288 - RNA, 22 nt, Artificial Sequence
  Synthetic
aaagaaaccuuuccuaauacug

SEQ ID NO: 605289 - RNA, 23 nt, Artificial Sequence
  Synthetic
aaaagaaaccuuuccuaauacug

SEQ ID NO: 605290 - RNA, 24 nt, Artificial Sequence
  Synthetic
gaaaagaaaccuuuccuaauacug

SEQ ID NO: 605291 - RNA, 18 nt, Artificial Sequence
  Synthetic
guuauauacaacauacug

SEQ ID NO: 605292 - RNA, 19 nt, Artificial Sequence
  Synthetic
gguuauauacaacauacug

SEQ ID NO: 605293 - RNA, 20 nt, Artificial Sequence
  Synthetic
ggguuauauacaacauacug

SEQ ID NO: 605294 - RNA, 21 nt, Artificial Sequence
  Synthetic
uggguuauauacaacauacug

SEQ ID NO: 605295 - RNA, 22 nt, Artificial Sequence
  Synthetic
uuggguuauauacaacauacug

SEQ ID NO: 605296 - RNA, 23 nt, Artificial Sequence
  Synthetic
auuggguuauauacaacauacug

SEQ ID NO: 605297 - RNA, 24 nt, Artificial Sequence
  Synthetic
uauuggguuauauacaacauacug

SEQ ID NO: 605298 - RNA, 18 nt, Artificial Sequence
  Synthetic
acauugauucacauacug

SEQ ID NO: 605299 - RNA, 19 nt, Artificial Sequence
  Synthetic
uacauugauucacauacug

SEQ ID NO: 605300 - RNA, 20 nt, Artificial Sequence
  Synthetic
guacauugauucacauacug

SEQ ID NO: 605301 - RNA, 21 nt, Artificial Sequence
  Synthetic
aguacauugauucacauacug

SEQ ID NO: 605302 - RNA, 22 nt, Artificial Sequence
  Synthetic
aaguacauugauucacauacug

SEQ ID NO: 605303 - RNA, 23 nt, Artificial Sequence
  Synthetic
caaguacauugauucacauacug

SEQ ID NO: 605304 - RNA, 24 nt, Artificial Sequence
  Synthetic
acaaguacauugauucacauacug

SEQ ID NO: 605305 - RNA, 18 nt, Artificial Sequence
  Synthetic
uagcauuguuccauacug

SEQ ID NO: 605306 - RNA, 19 nt, Artificial Sequence
  Synthetic
uuagcauuguuccauacug

SEQ ID NO: 605307 - RNA, 20 nt, Artificial Sequence
  Synthetic
guuagcauuguuccauacug

SEQ ID NO: 605308 - RNA, 21 nt, Artificial Sequence
  Synthetic
aguuagcauuguuccauacug

SEQ ID NO: 605309 - RNA, 22 nt, Artificial Sequence
  Synthetic
uaguuagcauuguuccauacug

SEQ ID NO: 605310 - RNA, 23 nt, Artificial Sequence
  Synthetic
auaguuagcauuguuccauacug

SEQ ID NO: 605311 - RNA, 24 nt, Artificial Sequence
  Synthetic
cauaguuagcauuguuccauacug

SEQ ID NO: 605312 - RNA, 18 nt, Artificial Sequence
  Synthetic
uuauaacauagcauacug

SEQ ID NO: 605313 - RNA, 19 nt, Artificial Sequence
  Synthetic
uuuauaacauagcauacug

SEQ ID NO: 605314 - RNA, 20 nt, Artificial Sequence
  Synthetic
uuuuauaacauagcauacug

SEQ ID NO: 605315 - RNA, 21 nt, Artificial Sequence
  Synthetic
auuuuauaacauagcauacug

SEQ ID NO: 605316 - RNA, 22 nt, Artificial Sequence
  Synthetic
aauuuuauaacauagcauacug

SEQ ID NO: 605317 - RNA, 23 nt, Artificial Sequence
  Synthetic
aaauuuuauaacauagcauacug

SEQ ID NO: 605318 - RNA, 24 nt, Artificial Sequence
  Synthetic
caaauuuuauaacauagcauacug

SEQ ID NO: 605319 - RNA, 18 nt, Artificial Sequence
  Synthetic
aauuuugguaucauacug

SEQ ID NO: 605320 - RNA, 19 nt, Artificial Sequence
  Synthetic
uaauuuugguaucauacug

SEQ ID NO: 605321 - RNA, 20 nt, Artificial Sequence
  Synthetic
uuaauuuugguaucauacug

SEQ ID NO: 605322 - RNA, 21 nt, Artificial Sequence
  Synthetic
uuuaauuuugguaucauacug

SEQ ID NO: 605323 - RNA, 22 nt, Artificial Sequence
  Synthetic
cuuuaauuuugguaucauacug

SEQ ID NO: 605324 - RNA, 23 nt, Artificial Sequence
  Synthetic
ucuuuaauuuugguaucauacug

SEQ ID NO: 605325 - RNA, 24 nt, Artificial Sequence
  Synthetic
cucuuuaauuuugguaucauacug

SEQ ID NO: 605326 - RNA, 18 nt, Artificial Sequence
  Synthetic
gcauucugcuagauacug

SEQ ID NO: 605327 - RNA, 19 nt, Artificial Sequence
  Synthetic
ggcauucugcuagauacug

SEQ ID NO: 605328 - RNA, 20 nt, Artificial Sequence
  Synthetic
aggcauucugcuagauacug

SEQ ID NO: 605329 - RNA, 21 nt, Artificial Sequence
  Synthetic
aaggcauucugcuagauacug

SEQ ID NO: 605330 - RNA, 22 nt, Artificial Sequence
  Synthetic
aaaggcauucugcuagauacug

SEQ ID NO: 605331 - RNA, 23 nt, Artificial Sequence
  Synthetic
uaaaggcauucugcuagauacug

SEQ ID NO: 605332 - RNA, 24 nt, Artificial Sequence
  Synthetic
uuaaaggcauucugcuagauacug

SEQ ID NO: 605333 - RNA, 18 nt, Artificial Sequence
  Synthetic
gccuggcuuuggauacug

SEQ ID NO: 605334 - RNA, 19 nt, Artificial Sequence
  Synthetic
agccuggcuuuggauacug

SEQ ID NO: 605335 - RNA, 20 nt, Artificial Sequence
  Synthetic
aagccuggcuuuggauacug

SEQ ID NO: 605336 - RNA, 21 nt, Artificial Sequence
  Synthetic
caagccuggcuuuggauacug

SEQ ID NO: 605337 - RNA, 22 nt, Artificial Sequence
  Synthetic
ucaagccuggcuuuggauacug

SEQ ID NO: 605338 - RNA, 23 nt, Artificial Sequence
  Synthetic
aucaagccuggcuuuggauacug

SEQ ID NO: 605339 - RNA, 24 nt, Artificial Sequence
  Synthetic
uaucaagccuggcuuuggauacug

SEQ ID NO: 605340 - RNA, 18 nt, Artificial Sequence
  Synthetic
aaugaguuaaugauacug

SEQ ID NO: 605341 - RNA, 19 nt, Artificial Sequence
  Synthetic
aaaugaguuaaugauacug

SEQ ID NO: 605342 - RNA, 20 nt, Artificial Sequence
  Synthetic
aaaaugaguuaaugauacug

SEQ ID NO: 605343 - RNA, 21 nt, Artificial Sequence
  Synthetic
aaaaaugaguuaaugauacug

SEQ ID NO: 605344 - RNA, 22 nt, Artificial Sequence
  Synthetic
gaaaaaugaguuaaugauacug

SEQ ID NO: 605345 - RNA, 23 nt, Artificial Sequence
  Synthetic
agaaaaaugaguuaaugauacug

SEQ ID NO: 605346 - RNA, 24 nt, Artificial Sequence
  Synthetic
cagaaaaaugaguuaaugauacug

SEQ ID NO: 605347 - RNA, 18 nt, Artificial Sequence
  Synthetic
caguccccucauauacug

SEQ ID NO: 605348 - RNA, 19 nt, Artificial Sequence
  Synthetic
acaguccccucauauacug

SEQ ID NO: 605349 - RNA, 20 nt, Artificial Sequence
  Synthetic
uacaguccccucauauacug

SEQ ID NO: 605350 - RNA, 21 nt, Artificial Sequence
  Synthetic
auacaguccccucauauacug

SEQ ID NO: 605351 - RNA, 22 nt, Artificial Sequence
  Synthetic
aauacaguccccucauauacug

SEQ ID NO: 605352 - RNA, 23 nt, Artificial Sequence
  Synthetic
aaauacaguccccucauauacug

SEQ ID NO: 605353 - RNA, 24 nt, Artificial Sequence
  Synthetic
caaauacaguccccucauauacug

SEQ ID NO: 605354 - RNA, 18 nt, Artificial Sequence
  Synthetic
caaaauaccaagcuacug

SEQ ID NO: 605355 - RNA, 19 nt, Artificial Sequence
  Synthetic
ccaaaauaccaagcuacug

SEQ ID NO: 605356 - RNA, 20 nt, Artificial Sequence
  Synthetic
accaaaauaccaagcuacug

SEQ ID NO: 605357 - RNA, 21 nt, Artificial Sequence
  Synthetic
uaccaaaauaccaagcuacug

SEQ ID NO: 605358 - RNA, 22 nt, Artificial Sequence
  Synthetic
uuaccaaaauaccaagcuacug

SEQ ID NO: 605359 - RNA, 23 nt, Artificial Sequence
  Synthetic
guuaccaaaauaccaagcuacug

SEQ ID NO: 605360 - RNA, 24 nt, Artificial Sequence
  Synthetic
aguuaccaaaauaccaagcuacug

SEQ ID NO: 605361 - RNA, 18 nt, Artificial Sequence
  Synthetic
gggacaguacagcuacug

SEQ ID NO: 605362 - RNA, 19 nt, Artificial Sequence
  Synthetic
agggacaguacagcuacug

SEQ ID NO: 605363 - RNA, 20 nt, Artificial Sequence
  Synthetic
aagggacaguacagcuacug

SEQ ID NO: 605364 - RNA, 21 nt, Artificial Sequence
  Synthetic
gaagggacaguacagcuacug

SEQ ID NO: 605365 - RNA, 22 nt, Artificial Sequence
  Synthetic
ggaagggacaguacagcuacug

SEQ ID NO: 605366 - RNA, 23 nt, Artificial Sequence
  Synthetic
uggaagggacaguacagcuacug

SEQ ID NO: 605367 - RNA, 24 nt, Artificial Sequence
  Synthetic
uuggaagggacaguacagcuacug

SEQ ID NO: 605368 - RNA, 18 nt, Artificial Sequence
  Synthetic
ugauuuucaaggcuacug

SEQ ID NO: 605369 - RNA, 19 nt, Artificial Sequence
  Synthetic
cugauuuucaaggcuacug

SEQ ID NO: 605370 - RNA, 20 nt, Artificial Sequence
  Synthetic
acugauuuucaaggcuacug

SEQ ID NO: 605371 - RNA, 21 nt, Artificial Sequence
  Synthetic
uacugauuuucaaggcuacug

SEQ ID NO: 605372 - RNA, 22 nt, Artificial Sequence
  Synthetic
cuacugauuuucaaggcuacug

SEQ ID NO: 605373 - RNA, 23 nt, Artificial Sequence
  Synthetic
gcuacugauuuucaaggcuacug

SEQ ID NO: 605374 - RNA, 24 nt, Artificial Sequence
  Synthetic
ggcuacugauuuucaaggcuacug

SEQ ID NO: 605375 - RNA, 18 nt, Artificial Sequence
  Synthetic
auguguauucugcuacug

SEQ ID NO: 605376 - RNA, 19 nt, Artificial Sequence
  Synthetic
aauguguauucugcuacug

SEQ ID NO: 605377 - RNA, 20 nt, Artificial Sequence
  Synthetic
uaauguguauucugcuacug

SEQ ID NO: 605378 - RNA, 21 nt, Artificial Sequence
  Synthetic
guaauguguauucugcuacug

SEQ ID NO: 605379 - RNA, 22 nt, Artificial Sequence
  Synthetic
aguaauguguauucugcuacug

SEQ ID NO: 605380 - RNA, 23 nt, Artificial Sequence
  Synthetic
aaguaauguguauucugcuacug

SEQ ID NO: 605381 - RNA, 24 nt, Artificial Sequence
  Synthetic
aaaguaauguguauucugcuacug

SEQ ID NO: 605382 - RNA, 18 nt, Artificial Sequence
  Synthetic
acaguacaugugcuacug

SEQ ID NO: 605383 - RNA, 19 nt, Artificial Sequence
  Synthetic
cacaguacaugugcuacug

SEQ ID NO: 605384 - RNA, 20 nt, Artificial Sequence
  Synthetic
ucacaguacaugugcuacug

SEQ ID NO: 605385 - RNA, 21 nt, Artificial Sequence
  Synthetic
cucacaguacaugugcuacug

SEQ ID NO: 605386 - RNA, 22 nt, Artificial Sequence
  Synthetic
acucacaguacaugugcuacug

SEQ ID NO: 605387 - RNA, 23 nt, Artificial Sequence
  Synthetic
aacucacaguacaugugcuacug

SEQ ID NO: 605388 - RNA, 24 nt, Artificial Sequence
  Synthetic
aaacucacaguacaugugcuacug

SEQ ID NO: 605389 - RNA, 18 nt, Artificial Sequence
  Synthetic
acaagcaagaaucuacug

SEQ ID NO: 605390 - RNA, 19 nt, Artificial Sequence
  Synthetic
uacaagcaagaaucuacug

SEQ ID NO: 605391 - RNA, 20 nt, Artificial Sequence
  Synthetic
uuacaagcaagaaucuacug

SEQ ID NO: 605392 - RNA, 21 nt, Artificial Sequence
  Synthetic
guuacaagcaagaaucuacug

SEQ ID NO: 605393 - RNA, 22 nt, Artificial Sequence
  Synthetic
aguuacaagcaagaaucuacug

SEQ ID NO: 605394 - RNA, 23 nt, Artificial Sequence
  Synthetic
caguuacaagcaagaaucuacug

SEQ ID NO: 605395 - RNA, 24 nt, Artificial Sequence
  Synthetic
ucaguuacaagcaagaaucuacug

SEQ ID NO: 605396 - RNA, 18 nt, Artificial Sequence
  Synthetic
auauauucaauuguacug

SEQ ID NO: 605397 - RNA, 19 nt, Artificial Sequence
  Synthetic
uauauauucaauuguacug

SEQ ID NO: 605398 - RNA, 20 nt, Artificial Sequence
  Synthetic
uuauauauucaauuguacug

SEQ ID NO: 605399 - RNA, 21 nt, Artificial Sequence
  Synthetic
uuuauauauucaauuguacug

SEQ ID NO: 605400 - RNA, 22 nt, Artificial Sequence
  Synthetic
auuuauauauucaauuguacug

SEQ ID NO: 605401 - RNA, 23 nt, Artificial Sequence
  Synthetic
gauuuauauauucaauuguacug

SEQ ID NO: 605402 - RNA, 24 nt, Artificial Sequence
  Synthetic
ggauuuauauauucaauuguacug

SEQ ID NO: 605403 - RNA, 18 nt, Artificial Sequence
  Synthetic
uuauuauugaaauuacug

SEQ ID NO: 605404 - RNA, 19 nt, Artificial Sequence
  Synthetic
uuuauuauugaaauuacug

SEQ ID NO: 605405 - RNA, 20 nt, Artificial Sequence
  Synthetic
uuuuauuauugaaauuacug

SEQ ID NO: 605406 - RNA, 21 nt, Artificial Sequence
  Synthetic
auuuuauuauugaaauuacug

SEQ ID NO: 605407 - RNA, 22 nt, Artificial Sequence
  Synthetic
aauuuuauuauugaaauuacug

SEQ ID NO: 605408 - RNA, 23 nt, Artificial Sequence
  Synthetic
uaauuuuauuauugaaauuacug

SEQ ID NO: 605409 - RNA, 24 nt, Artificial Sequence
  Synthetic
uuaauuuuauuauugaaauuacug

SEQ ID NO: 605410 - RNA, 18 nt, Artificial Sequence
  Synthetic
uaauaauacuaauuacug

SEQ ID NO: 605411 - RNA, 19 nt, Artificial Sequence
  Synthetic
auaauaauacuaauuacug

SEQ ID NO: 605412 - RNA, 20 nt, Artificial Sequence
  Synthetic
aauaauaauacuaauuacug

SEQ ID NO: 605413 - RNA, 21 nt, Artificial Sequence
  Synthetic
uaauaauaauacuaauuacug

SEQ ID NO: 605414 - RNA, 22 nt, Artificial Sequence
  Synthetic
auaauaauaauacuaauuacug

SEQ ID NO: 605415 - RNA, 23 nt, Artificial Sequence
  Synthetic
aauaauaauaauacuaauuacug

SEQ ID NO: 605416 - RNA, 24 nt, Artificial Sequence
  Synthetic
uaauaauaauaauacuaauuacug

SEQ ID NO: 605417 - RNA, 18 nt, Artificial Sequence
  Synthetic
cacauucacguauuacug

SEQ ID NO: 605418 - RNA, 19 nt, Artificial Sequence
  Synthetic
gcacauucacguauuacug

SEQ ID NO: 605419 - RNA, 20 nt, Artificial Sequence
  Synthetic
agcacauucacguauuacug

SEQ ID NO: 605420 - RNA, 21 nt, Artificial Sequence
  Synthetic
uagcacauucacguauuacug

SEQ ID NO: 605421 - RNA, 22 nt, Artificial Sequence
  Synthetic
cuagcacauucacguauuacug

SEQ ID NO: 605422 - RNA, 23 nt, Artificial Sequence
  Synthetic
acuagcacauucacguauuacug

SEQ ID NO: 605423 - RNA, 24 nt, Artificial Sequence
  Synthetic
aacuagcacauucacguauuacug

SEQ ID NO: 605424 - RNA, 18 nt, Artificial Sequence
  Synthetic
uaugaaauuuuauuacug

SEQ ID NO: 605425 - RNA, 19 nt, Artificial Sequence
  Synthetic
uuaugaaauuuuauuacug

SEQ ID NO: 605426 - RNA, 20 nt, Artificial Sequence
  Synthetic
cuuaugaaauuuuauuacug

SEQ ID NO: 605427 - RNA, 21 nt, Artificial Sequence
  Synthetic
ucuuaugaaauuuuauuacug

SEQ ID NO: 605428 - RNA, 22 nt, Artificial Sequence
  Synthetic
aucuuaugaaauuuuauuacug

SEQ ID NO: 605429 - RNA, 23 nt, Artificial Sequence
  Synthetic
aaucuuaugaaauuuuauuacug

SEQ ID NO: 605430 - RNA, 24 nt, Artificial Sequence
  Synthetic
aaaucuuaugaaauuuuauuacug

SEQ ID NO: 605431 - RNA, 18 nt, Artificial Sequence
  Synthetic
gaaauauuaaacuuacug

SEQ ID NO: 605432 - RNA, 19 nt, Artificial Sequence
  Synthetic
ggaaauauuaaacuuacug

SEQ ID NO: 605433 - RNA, 20 nt, Artificial Sequence
  Synthetic
uggaaauauuaaacuuacug

SEQ ID NO: 605434 - RNA, 21 nt, Artificial Sequence
  Synthetic
cuggaaauauuaaacuuacug

SEQ ID NO: 605435 - RNA, 22 nt, Artificial Sequence
  Synthetic
ccuggaaauauuaaacuuacug

SEQ ID NO: 605436 - RNA, 23 nt, Artificial Sequence
  Synthetic
uccuggaaauauuaaacuuacug

SEQ ID NO: 605437 - RNA, 24 nt, Artificial Sequence
  Synthetic
auccuggaaauauuaaacuuacug

SEQ ID NO: 605438 - RNA, 18 nt, Artificial Sequence
  Synthetic
aaucuuuacaacuuacug

SEQ ID NO: 605439 - RNA, 19 nt, Artificial Sequence
  Synthetic
aaaucuuuacaacuuacug

SEQ ID NO: 605440 - RNA, 20 nt, Artificial Sequence
  Synthetic
caaaucuuuacaacuuacug

SEQ ID NO: 605441 - RNA, 21 nt, Artificial Sequence
  Synthetic
gcaaaucuuuacaacuuacug

SEQ ID NO: 605442 - RNA, 22 nt, Artificial Sequence
  Synthetic
ggcaaaucuuuacaacuuacug

SEQ ID NO: 605443 - RNA, 23 nt, Artificial Sequence
  Synthetic
cggcaaaucuuuacaacuuacug

SEQ ID NO: 605444 - RNA, 24 nt, Artificial Sequence
  Synthetic
acggcaaaucuuuacaacuuacug

SEQ ID NO: 605445 - RNA, 18 nt, Artificial Sequence
  Synthetic
cuuccuaaguccuuacug

SEQ ID NO: 605446 - RNA, 19 nt, Artificial Sequence
  Synthetic
ccuuccuaaguccuuacug

SEQ ID NO: 605447 - RNA, 20 nt, Artificial Sequence
  Synthetic
gccuuccuaaguccuuacug

SEQ ID NO: 605448 - RNA, 21 nt, Artificial Sequence
  Synthetic
ugccuuccuaaguccuuacug

SEQ ID NO: 605449 - RNA, 22 nt, Artificial Sequence
  Synthetic
cugccuuccuaaguccuuacug

SEQ ID NO: 605450 - RNA, 23 nt, Artificial Sequence
  Synthetic
gcugccuuccuaaguccuuacug

SEQ ID NO: 605451 - RNA, 24 nt, Artificial Sequence
  Synthetic
ugcugccuuccuaaguccuuacug

SEQ ID NO: 605452 - RNA, 18 nt, Artificial Sequence
  Synthetic
gugguagaaaucuuacug

SEQ ID NO: 605453 - RNA, 19 nt, Artificial Sequence
  Synthetic
agugguagaaaucuuacug

SEQ ID NO: 605454 - RNA, 20 nt, Artificial Sequence
  Synthetic
cagugguagaaaucuuacug

SEQ ID NO: 605455 - RNA, 21 nt, Artificial Sequence
  Synthetic
gcagugguagaaaucuuacug

SEQ ID NO: 605456 - RNA, 22 nt, Artificial Sequence
  Synthetic
ugcagugguagaaaucuuacug

SEQ ID NO: 605457 - RNA, 23 nt, Artificial Sequence
  Synthetic
gugcagugguagaaaucuuacug

SEQ ID NO: 605458 - RNA, 24 nt, Artificial Sequence
  Synthetic
agugcagugguagaaaucuuacug

SEQ ID NO: 605459 - RNA, 18 nt, Artificial Sequence
  Synthetic
uuuaugaaccauuuacug

SEQ ID NO: 605460 - RNA, 19 nt, Artificial Sequence
  Synthetic
cuuuaugaaccauuuacug

SEQ ID NO: 605461 - RNA, 20 nt, Artificial Sequence
  Synthetic
ccuuuaugaaccauuuacug

SEQ ID NO: 605462 - RNA, 21 nt, Artificial Sequence
  Synthetic
uccuuuaugaaccauuuacug

SEQ ID NO: 605463 - RNA, 22 nt, Artificial Sequence
  Synthetic
uuccuuuaugaaccauuuacug

SEQ ID NO: 605464 - RNA, 23 nt, Artificial Sequence
  Synthetic
cuuccuuuaugaaccauuuacug

SEQ ID NO: 605465 - RNA, 24 nt, Artificial Sequence
  Synthetic
ccuuccuuuaugaaccauuuacug

SEQ ID NO: 605466 - RNA, 18 nt, Artificial Sequence
  Synthetic
accgaaaggguuuuacug

SEQ ID NO: 605467 - RNA, 19 nt, Artificial Sequence
  Synthetic
uaccgaaaggguuuuacug

SEQ ID NO: 605468 - RNA, 20 nt, Artificial Sequence
  Synthetic
uuaccgaaaggguuuuacug

SEQ ID NO: 605469 - RNA, 21 nt, Artificial Sequence
  Synthetic
guuaccgaaaggguuuuacug

SEQ ID NO: 605470 - RNA, 22 nt, Artificial Sequence
  Synthetic
aguuaccgaaaggguuuuacug

SEQ ID NO: 605471 - RNA, 23 nt, Artificial Sequence
  Synthetic
uaguuaccgaaaggguuuuacug

SEQ ID NO: 605472 - RNA, 24 nt, Artificial Sequence
  Synthetic
cuaguuaccgaaaggguuuuacug

SEQ ID NO: 605473 - RNA, 18 nt, Artificial Sequence
  Synthetic
gacaauguuuuuuuacug

SEQ ID NO: 605474 - RNA, 19 nt, Artificial Sequence
  Synthetic
agacaauguuuuuuuacug

SEQ ID NO: 605475 - RNA, 20 nt, Artificial Sequence
  Synthetic
aagacaauguuuuuuuacug

SEQ ID NO: 605476 - RNA, 21 nt, Artificial Sequence
  Synthetic
aaagacaauguuuuuuuacug

SEQ ID NO: 605477 - RNA, 22 nt, Artificial Sequence
  Synthetic
aaaagacaauguuuuuuuacug

SEQ ID NO: 605478 - RNA, 23 nt, Artificial Sequence
  Synthetic
gaaaagacaauguuuuuuuacug

SEQ ID NO: 605479 - RNA, 24 nt, Artificial Sequence
  Synthetic
agaaaagacaauguuuuuuuacug

SEQ ID NO: 605480 - RNA, 18 nt, Artificial Sequence
  Synthetic
cuucuccucaaaaaccug

SEQ ID NO: 605481 - RNA, 19 nt, Artificial Sequence
  Synthetic
ucuucuccucaaaaaccug

SEQ ID NO: 605482 - RNA, 20 nt, Artificial Sequence
  Synthetic
aucuucuccucaaaaaccug

SEQ ID NO: 605483 - RNA, 21 nt, Artificial Sequence
  Synthetic
gaucuucuccucaaaaaccug

SEQ ID NO: 605484 - RNA, 22 nt, Artificial Sequence
  Synthetic
ggaucuucuccucaaaaaccug

SEQ ID NO: 605485 - RNA, 23 nt, Artificial Sequence
  Synthetic
uggaucuucuccucaaaaaccug

SEQ ID NO: 605486 - RNA, 24 nt, Artificial Sequence
  Synthetic
auggaucuucuccucaaaaaccug

SEQ ID NO: 605487 - RNA, 18 nt, Artificial Sequence
  Synthetic
guggugcuacaaaaccug

SEQ ID NO: 605488 - RNA, 19 nt, Artificial Sequence
  Synthetic
aguggugcuacaaaaccug

SEQ ID NO: 605489 - RNA, 20 nt, Artificial Sequence
  Synthetic
aaguggugcuacaaaaccug

SEQ ID NO: 605490 - RNA, 21 nt, Artificial Sequence
  Synthetic
uaaguggugcuacaaaaccug

SEQ ID NO: 605491 - RNA, 22 nt, Artificial Sequence
  Synthetic
cuaaguggugcuacaaaaccug

SEQ ID NO: 605492 - RNA, 23 nt, Artificial Sequence
  Synthetic
gcuaaguggugcuacaaaaccug

SEQ ID NO: 605493 - RNA, 24 nt, Artificial Sequence
  Synthetic
agcuaaguggugcuacaaaaccug

SEQ ID NO: 605494 - RNA, 18 nt, Artificial Sequence
  Synthetic
aggucaggugaaaaccug

SEQ ID NO: 605495 - RNA, 19 nt, Artificial Sequence
  Synthetic
caggucaggugaaaaccug

SEQ ID NO: 605496 - RNA, 20 nt, Artificial Sequence
  Synthetic
acaggucaggugaaaaccug

SEQ ID NO: 605497 - RNA, 21 nt, Artificial Sequence
  Synthetic
gacaggucaggugaaaaccug

SEQ ID NO: 605498 - RNA, 22 nt, Artificial Sequence
  Synthetic
agacaggucaggugaaaaccug

SEQ ID NO: 605499 - RNA, 23 nt, Artificial Sequence
  Synthetic
gagacaggucaggugaaaaccug

SEQ ID NO: 605500 - RNA, 24 nt, Artificial Sequence
  Synthetic
ggagacaggucaggugaaaaccug

SEQ ID NO: 605501 - RNA, 18 nt, Artificial Sequence
  Synthetic
uucaacaacagaaaccug

SEQ ID NO: 605502 - RNA, 19 nt, Artificial Sequence
  Synthetic
cuucaacaacagaaaccug

SEQ ID NO: 605503 - RNA, 20 nt, Artificial Sequence
  Synthetic
ccuucaacaacagaaaccug

SEQ ID NO: 605504 - RNA, 21 nt, Artificial Sequence
  Synthetic
uccuucaacaacagaaaccug

SEQ ID NO: 605505 - RNA, 22 nt, Artificial Sequence
  Synthetic
guccuucaacaacagaaaccug

SEQ ID NO: 605506 - RNA, 23 nt, Artificial Sequence
  Synthetic
aguccuucaacaacagaaaccug

SEQ ID NO: 605507 - RNA, 24 nt, Artificial Sequence
  Synthetic
uaguccuucaacaacagaaaccug

SEQ ID NO: 605508 - RNA, 18 nt, Artificial Sequence
  Synthetic
uacuccugcugaaaccug

SEQ ID NO: 605509 - RNA, 19 nt, Artificial Sequence
  Synthetic
auacuccugcugaaaccug

SEQ ID NO: 605510 - RNA, 20 nt, Artificial Sequence
  Synthetic
cauacuccugcugaaaccug

SEQ ID NO: 605511 - RNA, 21 nt, Artificial Sequence
  Synthetic
ccauacuccugcugaaaccug

SEQ ID NO: 605512 - RNA, 22 nt, Artificial Sequence
  Synthetic
cccauacuccugcugaaaccug

SEQ ID NO: 605513 - RNA, 23 nt, Artificial Sequence
  Synthetic
gcccauacuccugcugaaaccug

SEQ ID NO: 605514 - RNA, 24 nt, Artificial Sequence
  Synthetic
ggcccauacuccugcugaaaccug

SEQ ID NO: 605515 - RNA, 18 nt, Artificial Sequence
  Synthetic
ggcacaugucuaaaccug

SEQ ID NO: 605516 - RNA, 19 nt, Artificial Sequence
  Synthetic
aggcacaugucuaaaccug

SEQ ID NO: 605517 - RNA, 20 nt, Artificial Sequence
  Synthetic
aaggcacaugucuaaaccug

SEQ ID NO: 605518 - RNA, 21 nt, Artificial Sequence
  Synthetic
gaaggcacaugucuaaaccug

SEQ ID NO: 605519 - RNA, 22 nt, Artificial Sequence
  Synthetic
ggaaggcacaugucuaaaccug

SEQ ID NO: 605520 - RNA, 23 nt, Artificial Sequence
  Synthetic
cggaaggcacaugucuaaaccug

SEQ ID NO: 605521 - RNA, 24 nt, Artificial Sequence
  Synthetic
ccggaaggcacaugucuaaaccug

SEQ ID NO: 605522 - RNA, 18 nt, Artificial Sequence
  Synthetic
ccgugguauguaaaccug

SEQ ID NO: 605523 - RNA, 19 nt, Artificial Sequence
  Synthetic
uccgugguauguaaaccug

SEQ ID NO: 605524 - RNA, 20 nt, Artificial Sequence
  Synthetic
guccgugguauguaaaccug

SEQ ID NO: 605525 - RNA, 21 nt, Artificial Sequence
  Synthetic
uguccgugguauguaaaccug

SEQ ID NO: 605526 - RNA, 22 nt, Artificial Sequence
  Synthetic
guguccgugguauguaaaccug

SEQ ID NO: 605527 - RNA, 23 nt, Artificial Sequence
  Synthetic
gguguccgugguauguaaaccug

SEQ ID NO: 605528 - RNA, 24 nt, Artificial Sequence
  Synthetic
ugguguccgugguauguaaaccug

SEQ ID NO: 605529 - RNA, 18 nt, Artificial Sequence
  Synthetic
cacccucacaacaaccug

SEQ ID NO: 605530 - RNA, 19 nt, Artificial Sequence
  Synthetic
ucacccucacaacaaccug

SEQ ID NO: 605531 - RNA, 20 nt, Artificial Sequence
  Synthetic
aucacccucacaacaaccug

SEQ ID NO: 605532 - RNA, 21 nt, Artificial Sequence
  Synthetic
caucacccucacaacaaccug

SEQ ID NO: 605533 - RNA, 22 nt, Artificial Sequence
  Synthetic
gcaucacccucacaacaaccug

SEQ ID NO: 605534 - RNA, 23 nt, Artificial Sequence
  Synthetic
cgcaucacccucacaacaaccug

SEQ ID NO: 605535 - RNA, 24 nt, Artificial Sequence
  Synthetic
ucgcaucacccucacaacaaccug

SEQ ID NO: 605536 - RNA, 18 nt, Artificial Sequence
  Synthetic
aauuuucaccacaaccug

SEQ ID NO: 605537 - RNA, 19 nt, Artificial Sequence
  Synthetic
gaauuuucaccacaaccug

SEQ ID NO: 605538 - RNA, 20 nt, Artificial Sequence
  Synthetic
ugaauuuucaccacaaccug

SEQ ID NO: 605539 - RNA, 21 nt, Artificial Sequence
  Synthetic
uugaauuuucaccacaaccug

SEQ ID NO: 605540 - RNA, 22 nt, Artificial Sequence
  Synthetic
auugaauuuucaccacaaccug

SEQ ID NO: 605541 - RNA, 23 nt, Artificial Sequence
  Synthetic
cauugaauuuucaccacaaccug

SEQ ID NO: 605542 - RNA, 24 nt, Artificial Sequence
  Synthetic
ucauugaauuuucaccacaaccug

SEQ ID NO: 605543 - RNA, 18 nt, Artificial Sequence
  Synthetic
accagccuggccaaccug

SEQ ID NO: 605544 - RNA, 19 nt, Artificial Sequence
  Synthetic
gaccagccuggccaaccug

SEQ ID NO: 605545 - RNA, 20 nt, Artificial Sequence
  Synthetic
cgaccagccuggccaaccug

SEQ ID NO: 605546 - RNA, 21 nt, Artificial Sequence
  Synthetic
gcgaccagccuggccaaccug

SEQ ID NO: 605547 - RNA, 22 nt, Artificial Sequence
  Synthetic
ugcgaccagccuggccaaccug

SEQ ID NO: 605548 - RNA, 23 nt, Artificial Sequence
  Synthetic
uugcgaccagccuggccaaccug

SEQ ID NO: 605549 - RNA, 24 nt, Artificial Sequence
  Synthetic
uuugcgaccagccuggccaaccug

SEQ ID NO: 605550 - RNA, 18 nt, Artificial Sequence
  Synthetic
uagauauugcagaaccug

SEQ ID NO: 605551 - RNA, 19 nt, Artificial Sequence
  Synthetic
guagauauugcagaaccug

SEQ ID NO: 605552 - RNA, 20 nt, Artificial Sequence
  Synthetic
aguagauauugcagaaccug

SEQ ID NO: 605553 - RNA, 21 nt, Artificial Sequence
  Synthetic
aaguagauauugcagaaccug

SEQ ID NO: 605554 - RNA, 22 nt, Artificial Sequence
  Synthetic
aaaguagauauugcagaaccug

SEQ ID NO: 605555 - RNA, 23 nt, Artificial Sequence
  Synthetic
caaaguagauauugcagaaccug

SEQ ID NO: 605556 - RNA, 24 nt, Artificial Sequence
  Synthetic
ucaaaguagauauugcagaaccug

SEQ ID NO: 605557 - RNA, 18 nt, Artificial Sequence
  Synthetic
gggaaucacucgaaccug

SEQ ID NO: 605558 - RNA, 19 nt, Artificial Sequence
  Synthetic
ggggaaucacucgaaccug

SEQ ID NO: 605559 - RNA, 20 nt, Artificial Sequence
  Synthetic
aggggaaucacucgaaccug

SEQ ID NO: 605560 - RNA, 21 nt, Artificial Sequence
  Synthetic
caggggaaucacucgaaccug

SEQ ID NO: 605561 - RNA, 22 nt, Artificial Sequence
  Synthetic
gcaggggaaucacucgaaccug

SEQ ID NO: 605562 - RNA, 23 nt, Artificial Sequence
  Synthetic
ggcaggggaaucacucgaaccug

SEQ ID NO: 605563 - RNA, 24 nt, Artificial Sequence
  Synthetic
aggcaggggaaucacucgaaccug

SEQ ID NO: 605564 - RNA, 18 nt, Artificial Sequence
  Synthetic
guaauccgggggaaccug

SEQ ID NO: 605565 - RNA, 19 nt, Artificial Sequence
  Synthetic
uguaauccgggggaaccug

SEQ ID NO: 605566 - RNA, 20 nt, Artificial Sequence
  Synthetic
cuguaauccgggggaaccug

SEQ ID NO: 605567 - RNA, 21 nt, Artificial Sequence
  Synthetic
acuguaauccgggggaaccug

SEQ ID NO: 605568 - RNA, 22 nt, Artificial Sequence
  Synthetic
aacuguaauccgggggaaccug

SEQ ID NO: 605569 - RNA, 23 nt, Artificial Sequence
  Synthetic
gaacuguaauccgggggaaccug

SEQ ID NO: 605570 - RNA, 24 nt, Artificial Sequence
  Synthetic
agaacuguaauccgggggaaccug

SEQ ID NO: 605571 - RNA, 18 nt, Artificial Sequence
  Synthetic
cagucaucuuggaaccug

SEQ ID NO: 605572 - RNA, 19 nt, Artificial Sequence
  Synthetic
gcagucaucuuggaaccug

SEQ ID NO: 605573 - RNA, 20 nt, Artificial Sequence
  Synthetic
ggcagucaucuuggaaccug

SEQ ID NO: 605574 - RNA, 21 nt, Artificial Sequence
  Synthetic
uggcagucaucuuggaaccug

SEQ ID NO: 605575 - RNA, 22 nt, Artificial Sequence
  Synthetic
cuggcagucaucuuggaaccug

SEQ ID NO: 605576 - RNA, 23 nt, Artificial Sequence
  Synthetic
gcuggcagucaucuuggaaccug

SEQ ID NO: 605577 - RNA, 24 nt, Artificial Sequence
  Synthetic
ugcuggcagucaucuuggaaccug

SEQ ID NO: 605578 - RNA, 18 nt, Artificial Sequence
  Synthetic
uagaucuagcauaaccug

SEQ ID NO: 605579 - RNA, 19 nt, Artificial Sequence
  Synthetic
cuagaucuagcauaaccug

SEQ ID NO: 605580 - RNA, 20 nt, Artificial Sequence
  Synthetic
acuagaucuagcauaaccug

SEQ ID NO: 605581 - RNA, 21 nt, Artificial Sequence
  Synthetic
gacuagaucuagcauaaccug

SEQ ID NO: 605582 - RNA, 22 nt, Artificial Sequence
  Synthetic
agacuagaucuagcauaaccug

SEQ ID NO: 605583 - RNA, 23 nt, Artificial Sequence
  Synthetic
cagacuagaucuagcauaaccug

SEQ ID NO: 605584 - RNA, 24 nt, Artificial Sequence
  Synthetic
gcagacuagaucuagcauaaccug

SEQ ID NO: 605585 - RNA, 18 nt, Artificial Sequence
  Synthetic
aaaauaaucauuaaccug

SEQ ID NO: 605586 - RNA, 19 nt, Artificial Sequence
  Synthetic
aaaaauaaucauuaaccug

SEQ ID NO: 605587 - RNA, 20 nt, Artificial Sequence
  Synthetic
uaaaaauaaucauuaaccug

SEQ ID NO: 605588 - RNA, 21 nt, Artificial Sequence
  Synthetic
uuaaaaauaaucauuaaccug

SEQ ID NO: 605589 - RNA, 22 nt, Artificial Sequence
  Synthetic
uuuaaaaauaaucauuaaccug

SEQ ID NO: 605590 - RNA, 23 nt, Artificial Sequence
  Synthetic
uuuuaaaaauaaucauuaaccug

SEQ ID NO: 605591 - RNA, 24 nt, Artificial Sequence
  Synthetic
uuuuuaaaaauaaucauuaaccug

SEQ ID NO: 605592 - RNA, 18 nt, Artificial Sequence
  Synthetic
aucauguaugaacaccug

SEQ ID NO: 605593 - RNA, 19 nt, Artificial Sequence
  Synthetic
gaucauguaugaacaccug

SEQ ID NO: 605594 - RNA, 20 nt, Artificial Sequence
  Synthetic
ggaucauguaugaacaccug

SEQ ID NO: 605595 - RNA, 21 nt, Artificial Sequence
  Synthetic
aggaucauguaugaacaccug

SEQ ID NO: 605596 - RNA, 22 nt, Artificial Sequence
  Synthetic
gaggaucauguaugaacaccug

SEQ ID NO: 605597 - RNA, 23 nt, Artificial Sequence
  Synthetic
ugaggaucauguaugaacaccug

SEQ ID NO: 605598 - RNA, 24 nt, Artificial Sequence
  Synthetic
augaggaucauguaugaacaccug

SEQ ID NO: 605599 - RNA, 18 nt, Artificial Sequence
  Synthetic
uaccuaacaucacaccug

SEQ ID NO: 605600 - RNA, 19 nt, Artificial Sequence
  Synthetic
cuaccuaacaucacaccug

SEQ ID NO: 605601 - RNA, 20 nt, Artificial Sequence
  Synthetic
acuaccuaacaucacaccug

SEQ ID NO: 605602 - RNA, 21 nt, Artificial Sequence
  Synthetic
gacuaccuaacaucacaccug

SEQ ID NO: 605603 - RNA, 22 nt, Artificial Sequence
  Synthetic
ugacuaccuaacaucacaccug

SEQ ID NO: 605604 - RNA, 23 nt, Artificial Sequence
  Synthetic
cugacuaccuaacaucacaccug

SEQ ID NO: 605605 - RNA, 24 nt, Artificial Sequence
  Synthetic
ucugacuaccuaacaucacaccug

SEQ ID NO: 605606 - RNA, 18 nt, Artificial Sequence
  Synthetic
uccagcaugcaccaccug

SEQ ID NO: 605607 - RNA, 19 nt, Artificial Sequence
  Synthetic
cuccagcaugcaccaccug

SEQ ID NO: 605608 - RNA, 20 nt, Artificial Sequence
  Synthetic
ucuccagcaugcaccaccug

SEQ ID NO: 605609 - RNA, 21 nt, Artificial Sequence
  Synthetic
uucuccagcaugcaccaccug

SEQ ID NO: 605610 - RNA, 22 nt, Artificial Sequence
  Synthetic
cuucuccagcaugcaccaccug

SEQ ID NO: 605611 - RNA, 23 nt, Artificial Sequence
  Synthetic
ucuucuccagcaugcaccaccug

SEQ ID NO: 605612 - RNA, 24 nt, Artificial Sequence
  Synthetic
cucuucuccagcaugcaccaccug

SEQ ID NO: 605613 - RNA, 18 nt, Artificial Sequence
  Synthetic
ucgaaggcaggccaccug

SEQ ID NO: 605614 - RNA, 19 nt, Artificial Sequence
  Synthetic
gucgaaggcaggccaccug

SEQ ID NO: 605615 - RNA, 20 nt, Artificial Sequence
  Synthetic
ugucgaaggcaggccaccug

SEQ ID NO: 605616 - RNA, 21 nt, Artificial Sequence
  Synthetic
uugucgaaggcaggccaccug

SEQ ID NO: 605617 - RNA, 22 nt, Artificial Sequence
  Synthetic
guugucgaaggcaggccaccug

SEQ ID NO: 605618 - RNA, 23 nt, Artificial Sequence
  Synthetic
gguugucgaaggcaggccaccug

SEQ ID NO: 605619 - RNA, 24 nt, Artificial Sequence
  Synthetic
agguugucgaaggcaggccaccug

SEQ ID NO: 605620 - RNA, 18 nt, Artificial Sequence
  Synthetic
agugcguccugccaccug

SEQ ID NO: 605621 - RNA, 19 nt, Artificial Sequence
  Synthetic
aagugcguccugccaccug

SEQ ID NO: 605622 - RNA, 20 nt, Artificial Sequence
  Synthetic
uaagugcguccugccaccug

SEQ ID NO: 605623 - RNA, 21 nt, Artificial Sequence
  Synthetic
cuaagugcguccugccaccug

SEQ ID NO: 605624 - RNA, 22 nt, Artificial Sequence
  Synthetic
ccuaagugcguccugccaccug

SEQ ID NO: 605625 - RNA, 23 nt, Artificial Sequence
  Synthetic
accuaagugcguccugccaccug

SEQ ID NO: 605626 - RNA, 24 nt, Artificial Sequence
  Synthetic
caccuaagugcguccugccaccug

SEQ ID NO: 605627 - RNA, 18 nt, Artificial Sequence
  Synthetic
uuaagcuugaagcaccug

SEQ ID NO: 605628 - RNA, 19 nt, Artificial Sequence
  Synthetic
uuuaagcuugaagcaccug

SEQ ID NO: 605629 - RNA, 20 nt, Artificial Sequence
  Synthetic
uuuuaagcuugaagcaccug

SEQ ID NO: 605630 - RNA, 21 nt, Artificial Sequence
  Synthetic
auuuuaagcuugaagcaccug

SEQ ID NO: 605631 - RNA, 22 nt, Artificial Sequence
  Synthetic
uauuuuaagcuugaagcaccug

SEQ ID NO: 605632 - RNA, 23 nt, Artificial Sequence
  Synthetic
guauuuuaagcuugaagcaccug

SEQ ID NO: 605633 - RNA, 24 nt, Artificial Sequence
  Synthetic
aguauuuuaagcuugaagcaccug

SEQ ID NO: 605634 - RNA, 18 nt, Artificial Sequence
  Synthetic
aggaagcccauucaccug

SEQ ID NO: 605635 - RNA, 19 nt, Artificial Sequence
  Synthetic
uaggaagcccauucaccug

SEQ ID NO: 605636 - RNA, 20 nt, Artificial Sequence
  Synthetic
guaggaagcccauucaccug

SEQ ID NO: 605637 - RNA, 21 nt, Artificial Sequence
  Synthetic
gguaggaagcccauucaccug

SEQ ID NO: 605638 - RNA, 22 nt, Artificial Sequence
  Synthetic
agguaggaagcccauucaccug

SEQ ID NO: 605639 - RNA, 23 nt, Artificial Sequence
  Synthetic
aagguaggaagcccauucaccug

SEQ ID NO: 605640 - RNA, 24 nt, Artificial Sequence
  Synthetic
gaagguaggaagcccauucaccug

SEQ ID NO: 605641 - RNA, 18 nt, Artificial Sequence
  Synthetic
ccagagaagaaagaccug

SEQ ID NO: 605642 - RNA, 19 nt, Artificial Sequence
  Synthetic
uccagagaagaaagaccug

SEQ ID NO: 605643 - RNA, 20 nt, Artificial Sequence
  Synthetic
auccagagaagaaagaccug

SEQ ID NO: 605644 - RNA, 21 nt, Artificial Sequence
  Synthetic
cauccagagaagaaagaccug

SEQ ID NO: 605645 - RNA, 22 nt, Artificial Sequence
  Synthetic
acauccagagaagaaagaccug

SEQ ID NO: 605646 - RNA, 23 nt, Artificial Sequence
  Synthetic
uacauccagagaagaaagaccug

SEQ ID NO: 605647 - RNA, 24 nt, Artificial Sequence
  Synthetic
auacauccagagaagaaagaccug

SEQ ID NO: 605648 - RNA, 18 nt, Artificial Sequence
  Synthetic
ugggugugucaagaccug

SEQ ID NO: 605649 - RNA, 19 nt, Artificial Sequence
  Synthetic
uugggugugucaagaccug

SEQ ID NO: 605650 - RNA, 20 nt, Artificial Sequence
  Synthetic
auugggugugucaagaccug

SEQ ID NO: 605651 - RNA, 21 nt, Artificial Sequence
  Synthetic
uauugggugugucaagaccug

SEQ ID NO: 605652 - RNA, 22 nt, Artificial Sequence
  Synthetic
auauugggugugucaagaccug

SEQ ID NO: 605653 - RNA, 23 nt, Artificial Sequence
  Synthetic
cauauugggugugucaagaccug

SEQ ID NO: 605654 - RNA, 24 nt, Artificial Sequence
  Synthetic
gcauauugggugugucaagaccug

SEQ ID NO: 605655 - RNA, 18 nt, Artificial Sequence
  Synthetic
caucugaagugagaccug

SEQ ID NO: 605656 - RNA, 19 nt, Artificial Sequence
  Synthetic
acaucugaagugagaccug

SEQ ID NO: 605657 - RNA, 20 nt, Artificial Sequence
  Synthetic
aacaucugaagugagaccug

SEQ ID NO: 605658 - RNA, 21 nt, Artificial Sequence
  Synthetic
caacaucugaagugagaccug

SEQ ID NO: 605659 - RNA, 22 nt, Artificial Sequence
  Synthetic
acaacaucugaagugagaccug

SEQ ID NO: 605660 - RNA, 23 nt, Artificial Sequence
  Synthetic
gacaacaucugaagugagaccug

SEQ ID NO: 605661 - RNA, 24 nt, Artificial Sequence
  Synthetic
agacaacaucugaagugagaccug

SEQ ID NO: 605662 - RNA, 18 nt, Artificial Sequence
  Synthetic
uuucucuguuuggaccug

SEQ ID NO: 605663 - RNA, 19 nt, Artificial Sequence
  Synthetic
guuucucuguuuggaccug

SEQ ID NO: 605664 - RNA, 20 nt, Artificial Sequence
  Synthetic
aguuucucuguuuggaccug

SEQ ID NO: 605665 - RNA, 21 nt, Artificial Sequence
  Synthetic
uaguuucucuguuuggaccug

SEQ ID NO: 605666 - RNA, 22 nt, Artificial Sequence
  Synthetic
cuaguuucucuguuuggaccug

SEQ ID NO: 605667 - RNA, 23 nt, Artificial Sequence
  Synthetic
ccuaguuucucuguuuggaccug

SEQ ID NO: 605668 - RNA, 24 nt, Artificial Sequence
  Synthetic
gccuaguuucucuguuuggaccug

SEQ ID NO: 605669 - RNA, 18 nt, Artificial Sequence
  Synthetic
cagcauccuaaugaccug

SEQ ID NO: 605670 - RNA, 19 nt, Artificial Sequence
  Synthetic
ucagcauccuaaugaccug

SEQ ID NO: 605671 - RNA, 20 nt, Artificial Sequence
  Synthetic
cucagcauccuaaugaccug

SEQ ID NO: 605672 - RNA, 21 nt, Artificial Sequence
  Synthetic
ccucagcauccuaaugaccug

SEQ ID NO: 605673 - RNA, 22 nt, Artificial Sequence
  Synthetic
cccucagcauccuaaugaccug

SEQ ID NO: 605674 - RNA, 23 nt, Artificial Sequence
  Synthetic
acccucagcauccuaaugaccug

SEQ ID NO: 605675 - RNA, 24 nt, Artificial Sequence
  Synthetic
cacccucagcauccuaaugaccug

SEQ ID NO: 605676 - RNA, 18 nt, Artificial Sequence
  Synthetic
ucuuugccacaugaccug

SEQ ID NO: 605677 - RNA, 19 nt, Artificial Sequence
  Synthetic
cucuuugccacaugaccug

SEQ ID NO: 605678 - RNA, 20 nt, Artificial Sequence
  Synthetic
acucuuugccacaugaccug

SEQ ID NO: 605679 - RNA, 21 nt, Artificial Sequence
  Synthetic
uacucuuugccacaugaccug

SEQ ID NO: 605680 - RNA, 22 nt, Artificial Sequence
  Synthetic
auacucuuugccacaugaccug

SEQ ID NO: 605681 - RNA, 23 nt, Artificial Sequence
  Synthetic
cauacucuuugccacaugaccug

SEQ ID NO: 605682 - RNA, 24 nt, Artificial Sequence
  Synthetic
ucauacucuuugccacaugaccug

SEQ ID NO: 605683 - RNA, 18 nt, Artificial Sequence
  Synthetic
cagagacuacaugaccug

SEQ ID NO: 605684 - RNA, 19 nt, Artificial Sequence
  Synthetic
acagagacuacaugaccug

SEQ ID NO: 605685 - RNA, 20 nt, Artificial Sequence
  Synthetic
gacagagacuacaugaccug

SEQ ID NO: 605686 - RNA, 21 nt, Artificial Sequence
  Synthetic
ugacagagacuacaugaccug

SEQ ID NO: 605687 - RNA, 22 nt, Artificial Sequence
  Synthetic
gugacagagacuacaugaccug

SEQ ID NO: 605688 - RNA, 23 nt, Artificial Sequence
  Synthetic
ugugacagagacuacaugaccug

SEQ ID NO: 605689 - RNA, 24 nt, Artificial Sequence
  Synthetic
uugugacagagacuacaugaccug

SEQ ID NO: 605690 - RNA, 18 nt, Artificial Sequence
  Synthetic
ugucaugggagugaccug

SEQ ID NO: 605691 - RNA, 19 nt, Artificial Sequence
  Synthetic
gugucaugggagugaccug

SEQ ID NO: 605692 - RNA, 20 nt, Artificial Sequence
  Synthetic
ugugucaugggagugaccug

SEQ ID NO: 605693 - RNA, 21 nt, Artificial Sequence
  Synthetic
augugucaugggagugaccug

SEQ ID NO: 605694 - RNA, 22 nt, Artificial Sequence
  Synthetic
caugugucaugggagugaccug

SEQ ID NO: 605695 - RNA, 23 nt, Artificial Sequence
  Synthetic
ccaugugucaugggagugaccug

SEQ ID NO: 605696 - RNA, 24 nt, Artificial Sequence
  Synthetic
cccaugugucaugggagugaccug

SEQ ID NO: 605697 - RNA, 18 nt, Artificial Sequence
  Synthetic
uucuuuauccuugaccug

SEQ ID NO: 605698 - RNA, 19 nt, Artificial Sequence
  Synthetic
uuucuuuauccuugaccug

SEQ ID NO: 605699 - RNA, 20 nt, Artificial Sequence
  Synthetic
cuuucuuuauccuugaccug

SEQ ID NO: 605700 - RNA, 21 nt, Artificial Sequence
  Synthetic
ucuuucuuuauccuugaccug

SEQ ID NO: 605701 - RNA, 22 nt, Artificial Sequence
  Synthetic
uucuuucuuuauccuugaccug

SEQ ID NO: 605702 - RNA, 23 nt, Artificial Sequence
  Synthetic
auucuuucuuuauccuugaccug

SEQ ID NO: 605703 - RNA, 24 nt, Artificial Sequence
  Synthetic
gauucuuucuuuauccuugaccug

SEQ ID NO: 605704 - RNA, 18 nt, Artificial Sequence
  Synthetic
aaccuccuccuugaccug

SEQ ID NO: 605705 - RNA, 19 nt, Artificial Sequence
  Synthetic
caaccuccuccuugaccug

SEQ ID NO: 605706 - RNA, 20 nt, Artificial Sequence
  Synthetic
gcaaccuccuccuugaccug

SEQ ID NO: 605707 - RNA, 21 nt, Artificial Sequence
  Synthetic
ugcaaccuccuccuugaccug

SEQ ID NO: 605708 - RNA, 22 nt, Artificial Sequence
  Synthetic
uugcaaccuccuccuugaccug

SEQ ID NO: 605709 - RNA, 23 nt, Artificial Sequence
  Synthetic
uuugcaaccuccuccuugaccug

SEQ ID NO: 605710 - RNA, 24 nt, Artificial Sequence
  Synthetic
cuuugcaaccuccuccuugaccug

SEQ ID NO: 605711 - RNA, 18 nt, Artificial Sequence
  Synthetic
cugaguuagaaauaccug

SEQ ID NO: 605712 - RNA, 19 nt, Artificial Sequence
  Synthetic
ccugaguuagaaauaccug

SEQ ID NO: 605713 - RNA, 20 nt, Artificial Sequence
  Synthetic
uccugaguuagaaauaccug

SEQ ID NO: 605714 - RNA, 21 nt, Artificial Sequence
  Synthetic
auccugaguuagaaauaccug

SEQ ID NO: 605715 - RNA, 22 nt, Artificial Sequence
  Synthetic
uauccugaguuagaaauaccug

SEQ ID NO: 605716 - RNA, 23 nt, Artificial Sequence
  Synthetic
auauccugaguuagaaauaccug

SEQ ID NO: 605717 - RNA, 24 nt, Artificial Sequence
  Synthetic
cauauccugaguuagaaauaccug

SEQ ID NO: 605718 - RNA, 18 nt, Artificial Sequence
  Synthetic
auaucaauacaauaccug

SEQ ID NO: 605719 - RNA, 19 nt, Artificial Sequence
  Synthetic
uauaucaauacaauaccug

SEQ ID NO: 605720 - RNA, 20 nt, Artificial Sequence
  Synthetic
auauaucaauacaauaccug

SEQ ID NO: 605721 - RNA, 21 nt, Artificial Sequence
  Synthetic
aauauaucaauacaauaccug

SEQ ID NO: 605722 - RNA, 22 nt, Artificial Sequence
  Synthetic
uaauauaucaauacaauaccug

SEQ ID NO: 605723 - RNA, 23 nt, Artificial Sequence
  Synthetic
guaauauaucaauacaauaccug

SEQ ID NO: 605724 - RNA, 24 nt, Artificial Sequence
  Synthetic
uguaauauaucaauacaauaccug

SEQ ID NO: 605725 - RNA, 18 nt, Artificial Sequence
  Synthetic
ccugcagguucauaccug

SEQ ID NO: 605726 - RNA, 19 nt, Artificial Sequence
  Synthetic
uccugcagguucauaccug

SEQ ID NO: 605727 - RNA, 20 nt, Artificial Sequence
  Synthetic
auccugcagguucauaccug

SEQ ID NO: 605728 - RNA, 21 nt, Artificial Sequence
  Synthetic
aauccugcagguucauaccug

SEQ ID NO: 605729 - RNA, 22 nt, Artificial Sequence
  Synthetic
gaauccugcagguucauaccug

SEQ ID NO: 605730 - RNA, 23 nt, Artificial Sequence
  Synthetic
ggaauccugcagguucauaccug

SEQ ID NO: 605731 - RNA, 24 nt, Artificial Sequence
  Synthetic
aggaauccugcagguucauaccug

SEQ ID NO: 605732 - RNA, 18 nt, Artificial Sequence
  Synthetic
auuuguaaaauauaccug

SEQ ID NO: 605733 - RNA, 19 nt, Artificial Sequence
  Synthetic
aauuuguaaaauauaccug

SEQ ID NO: 605734 - RNA, 20 nt, Artificial Sequence
  Synthetic
uaauuuguaaaauauaccug

SEQ ID NO: 605735 - RNA, 21 nt, Artificial Sequence
  Synthetic
uuaauuuguaaaauauaccug

SEQ ID NO: 605736 - RNA, 22 nt, Artificial Sequence
  Synthetic
auuaauuuguaaaauauaccug

SEQ ID NO: 605737 - RNA, 23 nt, Artificial Sequence
  Synthetic
aauuaauuuguaaaauauaccug

SEQ ID NO: 605738 - RNA, 24 nt, Artificial Sequence
  Synthetic
uaauuaauuuguaaaauauaccug

SEQ ID NO: 605739 - RNA, 18 nt, Artificial Sequence
  Synthetic
cacagucugcauuaccug

SEQ ID NO: 605740 - RNA, 19 nt, Artificial Sequence
  Synthetic
acacagucugcauuaccug

SEQ ID NO: 605741 - RNA, 20 nt, Artificial Sequence
  Synthetic
cacacagucugcauuaccug

SEQ ID NO: 605742 - RNA, 21 nt, Artificial Sequence
  Synthetic
acacacagucugcauuaccug

SEQ ID NO: 605743 - RNA, 22 nt, Artificial Sequence
  Synthetic
cacacacagucugcauuaccug

SEQ ID NO: 605744 - RNA, 23 nt, Artificial Sequence
  Synthetic
ccacacacagucugcauuaccug

SEQ ID NO: 605745 - RNA, 24 nt, Artificial Sequence
  Synthetic
uccacacacagucugcauuaccug

SEQ ID NO: 605746 - RNA, 18 nt, Artificial Sequence
  Synthetic
uaauauaauaguuaccug

SEQ ID NO: 605747 - RNA, 19 nt, Artificial Sequence
  Synthetic
auaauauaauaguuaccug

SEQ ID NO: 605748 - RNA, 20 nt, Artificial Sequence
  Synthetic
uauaauauaauaguuaccug

SEQ ID NO: 605749 - RNA, 21 nt, Artificial Sequence
  Synthetic
auauaauauaauaguuaccug

SEQ ID NO: 605750 - RNA, 22 nt, Artificial Sequence
  Synthetic
uauauaauauaauaguuaccug

SEQ ID NO: 605751 - RNA, 23 nt, Artificial Sequence
  Synthetic
uuauauaauauaauaguuaccug

SEQ ID NO: 605752 - RNA, 24 nt, Artificial Sequence
  Synthetic
uuuauauaauauaauaguuaccug

SEQ ID NO: 605753 - RNA, 18 nt, Artificial Sequence
  Synthetic
aaaaaucaacuuuaccug

SEQ ID NO: 605754 - RNA, 19 nt, Artificial Sequence
  Synthetic
uaaaaaucaacuuuaccug

SEQ ID NO: 605755 - RNA, 20 nt, Artificial Sequence
  Synthetic
auaaaaaucaacuuuaccug

SEQ ID NO: 605756 - RNA, 21 nt, Artificial Sequence
  Synthetic
aauaaaaaucaacuuuaccug

SEQ ID NO: 605757 - RNA, 22 nt, Artificial Sequence
  Synthetic
aaauaaaaaucaacuuuaccug

SEQ ID NO: 605758 - RNA, 23 nt, Artificial Sequence
  Synthetic
aaaauaaaaaucaacuuuaccug

SEQ ID NO: 605759 - RNA, 24 nt, Artificial Sequence
  Synthetic
uaaaauaaaaaucaacuuuaccug

SEQ ID NO: 605760 - RNA, 18 nt, Artificial Sequence
  Synthetic
ucccaagaguagacccug

SEQ ID NO: 605761 - RNA, 19 nt, Artificial Sequence
  Synthetic
gucccaagaguagacccug

SEQ ID NO: 605762 - RNA, 20 nt, Artificial Sequence
  Synthetic
agucccaagaguagacccug

SEQ ID NO: 605763 - RNA, 21 nt, Artificial Sequence
  Synthetic
uagucccaagaguagacccug

SEQ ID NO: 605764 - RNA, 22 nt, Artificial Sequence
  Synthetic
guagucccaagaguagacccug

SEQ ID NO: 605765 - RNA, 23 nt, Artificial Sequence
  Synthetic
aguagucccaagaguagacccug

SEQ ID NO: 605766 - RNA, 24 nt, Artificial Sequence
  Synthetic
uaguagucccaagaguagacccug

SEQ ID NO: 605767 - RNA, 18 nt, Artificial Sequence
  Synthetic
ggugucugucaaccccug

SEQ ID NO: 605768 - RNA, 19 nt, Artificial Sequence
  Synthetic
gggugucugucaaccccug

SEQ ID NO: 605769 - RNA, 20 nt, Artificial Sequence
  Synthetic
agggugucugucaaccccug

SEQ ID NO: 605770 - RNA, 21 nt, Artificial Sequence
  Synthetic
gagggugucugucaaccccug

SEQ ID NO: 605771 - RNA, 22 nt, Artificial Sequence
  Synthetic
ugagggugucugucaaccccug

SEQ ID NO: 605772 - RNA, 23 nt, Artificial Sequence
  Synthetic
augagggugucugucaaccccug

SEQ ID NO: 605773 - RNA, 24 nt, Artificial Sequence
  Synthetic
uaugagggugucugucaaccccug

SEQ ID NO: 605774 - RNA, 18 nt, Artificial Sequence
  Synthetic
gagugucagaacccccug

SEQ ID NO: 605775 - RNA, 19 nt, Artificial Sequence
  Synthetic
ggagugucagaacccccug

SEQ ID NO: 605776 - RNA, 20 nt, Artificial Sequence
  Synthetic
uggagugucagaacccccug

SEQ ID NO: 605777 - RNA, 21 nt, Artificial Sequence
  Synthetic
uuggagugucagaacccccug

SEQ ID NO: 605778 - RNA, 22 nt, Artificial Sequence
  Synthetic
uuuggagugucagaacccccug

SEQ ID NO: 605779 - RNA, 23 nt, Artificial Sequence
  Synthetic
auuuggagugucagaacccccug

SEQ ID NO: 605780 - RNA, 24 nt, Artificial Sequence
  Synthetic
cauuuggagugucagaacccccug

SEQ ID NO: 605781 - RNA, 18 nt, Artificial Sequence
  Synthetic
ccccaccugcguccccug

SEQ ID NO: 605782 - RNA, 19 nt, Artificial Sequence
  Synthetic
accccaccugcguccccug

SEQ ID NO: 605783 - RNA, 20 nt, Artificial Sequence
  Synthetic
caccccaccugcguccccug

SEQ ID NO: 605784 - RNA, 21 nt, Artificial Sequence
  Synthetic
acaccccaccugcguccccug

SEQ ID NO: 605785 - RNA, 22 nt, Artificial Sequence
  Synthetic
uacaccccaccugcguccccug

SEQ ID NO: 605786 - RNA, 23 nt, Artificial Sequence
  Synthetic
cuacaccccaccugcguccccug

SEQ ID NO: 605787 - RNA, 24 nt, Artificial Sequence
  Synthetic
ccuacaccccaccugcguccccug

SEQ ID NO: 605788 - RNA, 18 nt, Artificial Sequence
  Synthetic
aaaggcagauguccccug

SEQ ID NO: 605789 - RNA, 19 nt, Artificial Sequence
  Synthetic
caaaggcagauguccccug

SEQ ID NO: 605790 - RNA, 20 nt, Artificial Sequence
  Synthetic
gcaaaggcagauguccccug

SEQ ID NO: 605791 - RNA, 21 nt, Artificial Sequence
  Synthetic
agcaaaggcagauguccccug

SEQ ID NO: 605792 - RNA, 22 nt, Artificial Sequence
  Synthetic
uagcaaaggcagauguccccug

SEQ ID NO: 605793 - RNA, 23 nt, Artificial Sequence
  Synthetic
guagcaaaggcagauguccccug

SEQ ID NO: 605794 - RNA, 24 nt, Artificial Sequence
  Synthetic
aguagcaaaggcagauguccccug

SEQ ID NO: 605795 - RNA, 18 nt, Artificial Sequence
  Synthetic
agcacaugcauuccccug

SEQ ID NO: 605796 - RNA, 19 nt, Artificial Sequence
  Synthetic
aagcacaugcauuccccug

SEQ ID NO: 605797 - RNA, 20 nt, Artificial Sequence
  Synthetic
gaagcacaugcauuccccug

SEQ ID NO: 605798 - RNA, 21 nt, Artificial Sequence
  Synthetic
agaagcacaugcauuccccug

SEQ ID NO: 605799 - RNA, 22 nt, Artificial Sequence
  Synthetic
gagaagcacaugcauuccccug

SEQ ID NO: 605800 - RNA, 23 nt, Artificial Sequence
  Synthetic
agagaagcacaugcauuccccug

SEQ ID NO: 605801 - RNA, 24 nt, Artificial Sequence
  Synthetic
gagagaagcacaugcauuccccug

SEQ ID NO: 605802 - RNA, 18 nt, Artificial Sequence
  Synthetic
gaaauauuuuuuccccug

SEQ ID NO: 605803 - RNA, 19 nt, Artificial Sequence
  Synthetic
agaaauauuuuuuccccug

SEQ ID NO: 605804 - RNA, 20 nt, Artificial Sequence
  Synthetic
aagaaauauuuuuuccccug

SEQ ID NO: 605805 - RNA, 21 nt, Artificial Sequence
  Synthetic
uaagaaauauuuuuuccccug

SEQ ID NO: 605806 - RNA, 22 nt, Artificial Sequence
  Synthetic
auaagaaauauuuuuuccccug

SEQ ID NO: 605807 - RNA, 23 nt, Artificial Sequence
  Synthetic
gauaagaaauauuuuuuccccug

SEQ ID NO: 605808 - RNA, 24 nt, Artificial Sequence
  Synthetic
ugauaagaaauauuuuuuccccug

SEQ ID NO: 605809 - RNA, 18 nt, Artificial Sequence
  Synthetic
aacuggaacacagcccug

SEQ ID NO: 605810 - RNA, 19 nt, Artificial Sequence
  Synthetic
aaacuggaacacagcccug

SEQ ID NO: 605811 - RNA, 20 nt, Artificial Sequence
  Synthetic
uaaacuggaacacagcccug

SEQ ID NO: 605812 - RNA, 21 nt, Artificial Sequence
  Synthetic
uuaaacuggaacacagcccug

SEQ ID NO: 605813 - RNA, 22 nt, Artificial Sequence
  Synthetic
guuaaacuggaacacagcccug

SEQ ID NO: 605814 - RNA, 23 nt, Artificial Sequence
  Synthetic
uguuaaacuggaacacagcccug

SEQ ID NO: 605815 - RNA, 24 nt, Artificial Sequence
  Synthetic
auguuaaacuggaacacagcccug

SEQ ID NO: 605816 - RNA, 18 nt, Artificial Sequence
  Synthetic
guuuuguaguuagcccug

SEQ ID NO: 605817 - RNA, 19 nt, Artificial Sequence
  Synthetic
uguuuuguaguuagcccug

SEQ ID NO: 605818 - RNA, 20 nt, Artificial Sequence
  Synthetic
guguuuuguaguuagcccug

SEQ ID NO: 605819 - RNA, 21 nt, Artificial Sequence
  Synthetic
aguguuuuguaguuagcccug

SEQ ID NO: 605820 - RNA, 22 nt, Artificial Sequence
  Synthetic
caguguuuuguaguuagcccug

SEQ ID NO: 605821 - RNA, 23 nt, Artificial Sequence
  Synthetic
gcaguguuuuguaguuagcccug

SEQ ID NO: 605822 - RNA, 24 nt, Artificial Sequence
  Synthetic
agcaguguuuuguaguuagcccug

SEQ ID NO: 605823 - RNA, 18 nt, Artificial Sequence
  Synthetic
acacauuuuaaggcccug

SEQ ID NO: 605824 - RNA, 19 nt, Artificial Sequence
  Synthetic
gacacauuuuaaggcccug

SEQ ID NO: 605825 - RNA, 20 nt, Artificial Sequence
  Synthetic
ugacacauuuuaaggcccug

SEQ ID NO: 605826 - RNA, 21 nt, Artificial Sequence
  Synthetic
augacacauuuuaaggcccug

SEQ ID NO: 605827 - RNA, 22 nt, Artificial Sequence
  Synthetic
aaugacacauuuuaaggcccug

SEQ ID NO: 605828 - RNA, 23 nt, Artificial Sequence
  Synthetic
aaaugacacauuuuaaggcccug

SEQ ID NO: 605829 - RNA, 24 nt, Artificial Sequence
  Synthetic
gaaaugacacauuuuaaggcccug

SEQ ID NO: 605830 - RNA, 18 nt, Artificial Sequence
  Synthetic
aucaaacuacaggcccug

SEQ ID NO: 605831 - RNA, 19 nt, Artificial Sequence
  Synthetic
uaucaaacuacaggcccug

SEQ ID NO: 605832 - RNA, 20 nt, Artificial Sequence
  Synthetic
uuaucaaacuacaggcccug

SEQ ID NO: 605833 - RNA, 21 nt, Artificial Sequence
  Synthetic
guuaucaaacuacaggcccug

SEQ ID NO: 605834 - RNA, 22 nt, Artificial Sequence
  Synthetic
aguuaucaaacuacaggcccug

SEQ ID NO: 605835 - RNA, 23 nt, Artificial Sequence
  Synthetic
aaguuaucaaacuacaggcccug

SEQ ID NO: 605836 - RNA, 24 nt, Artificial Sequence
  Synthetic
caaguuaucaaacuacaggcccug

SEQ ID NO: 605837 - RNA, 18 nt, Artificial Sequence
  Synthetic
auauaagaguaugcccug

SEQ ID NO: 605838 - RNA, 19 nt, Artificial Sequence
  Synthetic
aauauaagaguaugcccug

SEQ ID NO: 605839 - RNA, 20 nt, Artificial Sequence
  Synthetic
gaauauaagaguaugcccug

SEQ ID NO: 605840 - RNA, 21 nt, Artificial Sequence
  Synthetic
ggaauauaagaguaugcccug

SEQ ID NO: 605841 - RNA, 22 nt, Artificial Sequence
  Synthetic
uggaauauaagaguaugcccug

SEQ ID NO: 605842 - RNA, 23 nt, Artificial Sequence
  Synthetic
guggaauauaagaguaugcccug

SEQ ID NO: 605843 - RNA, 24 nt, Artificial Sequence
  Synthetic
uguggaauauaagaguaugcccug

SEQ ID NO: 605844 - RNA, 18 nt, Artificial Sequence
  Synthetic
caaagggcuucugcccug

SEQ ID NO: 605845 - RNA, 19 nt, Artificial Sequence
  Synthetic
ucaaagggcuucugcccug

SEQ ID NO: 605846 - RNA, 20 nt, Artificial Sequence
  Synthetic
uucaaagggcuucugcccug

SEQ ID NO: 605847 - RNA, 21 nt, Artificial Sequence
  Synthetic
cuucaaagggcuucugcccug

SEQ ID NO: 605848 - RNA, 22 nt, Artificial Sequence
  Synthetic
ucuucaaagggcuucugcccug

SEQ ID NO: 605849 - RNA, 23 nt, Artificial Sequence
  Synthetic
aucuucaaagggcuucugcccug

SEQ ID NO: 605850 - RNA, 24 nt, Artificial Sequence
  Synthetic
gaucuucaaagggcuucugcccug

SEQ ID NO: 605851 - RNA, 18 nt, Artificial Sequence
  Synthetic
acaauggagaaaucccug

SEQ ID NO: 605852 - RNA, 19 nt, Artificial Sequence
  Synthetic
aacaauggagaaaucccug

SEQ ID NO: 605853 - RNA, 20 nt, Artificial Sequence
  Synthetic
gaacaauggagaaaucccug

SEQ ID NO: 605854 - RNA, 21 nt, Artificial Sequence
  Synthetic
ugaacaauggagaaaucccug

SEQ ID NO: 605855 - RNA, 22 nt, Artificial Sequence
  Synthetic
cugaacaauggagaaaucccug

SEQ ID NO: 605856 - RNA, 23 nt, Artificial Sequence
  Synthetic
acugaacaauggagaaaucccug

SEQ ID NO: 605857 - RNA, 24 nt, Artificial Sequence
  Synthetic
aacugaacaauggagaaaucccug

SEQ ID NO: 605858 - RNA, 18 nt, Artificial Sequence
  Synthetic
aauaagcaguaaucccug

SEQ ID NO: 605859 - RNA, 19 nt, Artificial Sequence
  Synthetic
aaauaagcaguaaucccug

SEQ ID NO: 605860 - RNA, 20 nt, Artificial Sequence
  Synthetic
aaaauaagcaguaaucccug

SEQ ID NO: 605861 - RNA, 21 nt, Artificial Sequence
  Synthetic
aaaaauaagcaguaaucccug

SEQ ID NO: 605862 - RNA, 22 nt, Artificial Sequence
  Synthetic
uaaaaauaagcaguaaucccug

SEQ ID NO: 605863 - RNA, 23 nt, Artificial Sequence
  Synthetic
uuaaaaauaagcaguaaucccug

SEQ ID NO: 605864 - RNA, 24 nt, Artificial Sequence
  Synthetic
uuuaaaaauaagcaguaaucccug

SEQ ID NO: 605865 - RNA, 18 nt, Artificial Sequence
  Synthetic
uaaagucugacaucccug

SEQ ID NO: 605866 - RNA, 19 nt, Artificial Sequence
  Synthetic
auaaagucugacaucccug

SEQ ID NO: 605867 - RNA, 20 nt, Artificial Sequence
  Synthetic
cauaaagucugacaucccug

SEQ ID NO: 605868 - RNA, 21 nt, Artificial Sequence
  Synthetic
gcauaaagucugacaucccug

SEQ ID NO: 605869 - RNA, 22 nt, Artificial Sequence
  Synthetic
ugcauaaagucugacaucccug

SEQ ID NO: 605870 - RNA, 23 nt, Artificial Sequence
  Synthetic
uugcauaaagucugacaucccug

SEQ ID NO: 605871 - RNA, 24 nt, Artificial Sequence
  Synthetic
cuugcauaaagucugacaucccug

SEQ ID NO: 605872 - RNA, 18 nt, Artificial Sequence
  Synthetic
cagaucacaucaucccug

SEQ ID NO: 605873 - RNA, 19 nt, Artificial Sequence
  Synthetic
ucagaucacaucaucccug

SEQ ID NO: 605874 - RNA, 20 nt, Artificial Sequence
  Synthetic
aucagaucacaucaucccug

SEQ ID NO: 605875 - RNA, 21 nt, Artificial Sequence
  Synthetic
aaucagaucacaucaucccug

SEQ ID NO: 605876 - RNA, 22 nt, Artificial Sequence
  Synthetic
aaaucagaucacaucaucccug

SEQ ID NO: 605877 - RNA, 23 nt, Artificial Sequence
  Synthetic
uaaaucagaucacaucaucccug

SEQ ID NO: 605878 - RNA, 24 nt, Artificial Sequence
  Synthetic
auaaaucagaucacaucaucccug

SEQ ID NO: 605879 - RNA, 18 nt, Artificial Sequence
  Synthetic
uuuagacaaauaucccug

SEQ ID NO: 605880 - RNA, 19 nt, Artificial Sequence
  Synthetic
uuuuagacaaauaucccug

SEQ ID NO: 605881 - RNA, 20 nt, Artificial Sequence
  Synthetic
auuuuagacaaauaucccug

SEQ ID NO: 605882 - RNA, 21 nt, Artificial Sequence
  Synthetic
aauuuuagacaaauaucccug

SEQ ID NO: 605883 - RNA, 22 nt, Artificial Sequence
  Synthetic
gaauuuuagacaaauaucccug

SEQ ID NO: 605884 - RNA, 23 nt, Artificial Sequence
  Synthetic
agaauuuuagacaaauaucccug

SEQ ID NO: 605885 - RNA, 24 nt, Artificial Sequence
  Synthetic
gagaauuuuagacaaauaucccug

SEQ ID NO: 605886 - RNA, 18 nt, Artificial Sequence
  Synthetic
gccacuaguuuaucccug

SEQ ID NO: 605887 - RNA, 19 nt, Artificial Sequence
  Synthetic
ugccacuaguuuaucccug

SEQ ID NO: 605888 - RNA, 20 nt, Artificial Sequence
  Synthetic
cugccacuaguuuaucccug

SEQ ID NO: 605889 - RNA, 21 nt, Artificial Sequence
  Synthetic
ucugccacuaguuuaucccug

SEQ ID NO: 605890 - RNA, 22 nt, Artificial Sequence
  Synthetic
cucugccacuaguuuaucccug

SEQ ID NO: 605891 - RNA, 23 nt, Artificial Sequence
  Synthetic
ucucugccacuaguuuaucccug

SEQ ID NO: 605892 - RNA, 24 nt, Artificial Sequence
  Synthetic
aucucugccacuaguuuaucccug

SEQ ID NO: 605893 - RNA, 18 nt, Artificial Sequence
  Synthetic
auaaacugugacucccug

SEQ ID NO: 605894 - RNA, 19 nt, Artificial Sequence
  Synthetic
aauaaacugugacucccug

SEQ ID NO: 605895 - RNA, 20 nt, Artificial Sequence
  Synthetic
uaauaaacugugacucccug

SEQ ID NO: 605896 - RNA, 21 nt, Artificial Sequence
  Synthetic
auaauaaacugugacucccug

SEQ ID NO: 605897 - RNA, 22 nt, Artificial Sequence
  Synthetic
aauaauaaacugugacucccug

SEQ ID NO: 605898 - RNA, 23 nt, Artificial Sequence
  Synthetic
uaauaauaaacugugacucccug

SEQ ID NO: 605899 - RNA, 24 nt, Artificial Sequence
  Synthetic
auaauaauaaacugugacucccug

SEQ ID NO: 605900 - RNA, 18 nt, Artificial Sequence
  Synthetic
uuucauuacuucucccug

SEQ ID NO: 605901 - RNA, 19 nt, Artificial Sequence
  Synthetic
uuuucauuacuucucccug

SEQ ID NO: 605902 - RNA, 20 nt, Artificial Sequence
  Synthetic
cuuuucauuacuucucccug

SEQ ID NO: 605903 - RNA, 21 nt, Artificial Sequence
  Synthetic
ucuuuucauuacuucucccug

SEQ ID NO: 605904 - RNA, 22 nt, Artificial Sequence
  Synthetic
aucuuuucauuacuucucccug

SEQ ID NO: 605905 - RNA, 23 nt, Artificial Sequence
  Synthetic
aaucuuuucauuacuucucccug

SEQ ID NO: 605906 - RNA, 24 nt, Artificial Sequence
  Synthetic
gaaucuuuucauuacuucucccug

SEQ ID NO: 605907 - RNA, 18 nt, Artificial Sequence
  Synthetic
uaccagugugugucccug

SEQ ID NO: 605908 - RNA, 19 nt, Artificial Sequence
  Synthetic
auaccagugugugucccug

SEQ ID NO: 605909 - RNA, 20 nt, Artificial Sequence
  Synthetic
aauaccagugugugucccug

SEQ ID NO: 605910 - RNA, 21 nt, Artificial Sequence
  Synthetic
caauaccagugugugucccug

SEQ ID NO: 605911 - RNA, 22 nt, Artificial Sequence
  Synthetic
ucaauaccagugugugucccug

SEQ ID NO: 605912 - RNA, 23 nt, Artificial Sequence
  Synthetic
uucaauaccagugugugucccug

SEQ ID NO: 605913 - RNA, 24 nt, Artificial Sequence
  Synthetic
auucaauaccagugugugucccug

SEQ ID NO: 605914 - RNA, 18 nt, Artificial Sequence
  Synthetic
aguacagccucuucccug

SEQ ID NO: 605915 - RNA, 19 nt, Artificial Sequence
  Synthetic
uaguacagccucuucccug

SEQ ID NO: 605916 - RNA, 20 nt, Artificial Sequence
  Synthetic
auaguacagccucuucccug

SEQ ID NO: 605917 - RNA, 21 nt, Artificial Sequence
  Synthetic
uauaguacagccucuucccug

SEQ ID NO: 605918 - RNA, 22 nt, Artificial Sequence
  Synthetic
auauaguacagccucuucccug

SEQ ID NO: 605919 - RNA, 23 nt, Artificial Sequence
  Synthetic
uauauaguacagccucuucccug

SEQ ID NO: 605920 - RNA, 24 nt, Artificial Sequence
  Synthetic
guauauaguacagccucuucccug

SEQ ID NO: 605921 - RNA, 18 nt, Artificial Sequence
  Synthetic
aaacucuauuguucccug

SEQ ID NO: 605922 - RNA, 19 nt, Artificial Sequence
  Synthetic
uaaacucuauuguucccug

SEQ ID NO: 605923 - RNA, 20 nt, Artificial Sequence
  Synthetic
uuaaacucuauuguucccug

SEQ ID NO: 605924 - RNA, 21 nt, Artificial Sequence
  Synthetic
guuaaacucuauuguucccug

SEQ ID NO: 605925 - RNA, 22 nt, Artificial Sequence
  Synthetic
uguuaaacucuauuguucccug

SEQ ID NO: 605926 - RNA, 23 nt, Artificial Sequence
  Synthetic
cuguuaaacucuauuguucccug

SEQ ID NO: 605927 - RNA, 24 nt, Artificial Sequence
  Synthetic
acuguuaaacucuauuguucccug

SEQ ID NO: 605928 - RNA, 18 nt, Artificial Sequence
  Synthetic
acucaguuuauuucccug

SEQ ID NO: 605929 - RNA, 19 nt, Artificial Sequence
  Synthetic
cacucaguuuauuucccug

SEQ ID NO: 605930 - RNA, 20 nt, Artificial Sequence
  Synthetic
acacucaguuuauuucccug

SEQ ID NO: 605931 - RNA, 21 nt, Artificial Sequence
  Synthetic
uacacucaguuuauuucccug

SEQ ID NO: 605932 - RNA, 22 nt, Artificial Sequence
  Synthetic
uuacacucaguuuauuucccug

SEQ ID NO: 605933 - RNA, 23 nt, Artificial Sequence
  Synthetic
auuacacucaguuuauuucccug

SEQ ID NO: 605934 - RNA, 24 nt, Artificial Sequence
  Synthetic
uauuacacucaguuuauuucccug

SEQ ID NO: 605935 - RNA, 18 nt, Artificial Sequence
  Synthetic
cuggcuuaguuuucccug

SEQ ID NO: 605936 - RNA, 19 nt, Artificial Sequence
  Synthetic
ccuggcuuaguuuucccug

SEQ ID NO: 605937 - RNA, 20 nt, Artificial Sequence
  Synthetic
uccuggcuuaguuuucccug

SEQ ID NO: 605938 - RNA, 21 nt, Artificial Sequence
  Synthetic
cuccuggcuuaguuuucccug

SEQ ID NO: 605939 - RNA, 22 nt, Artificial Sequence
  Synthetic
ucuccuggcuuaguuuucccug

SEQ ID NO: 605940 - RNA, 23 nt, Artificial Sequence
  Synthetic
cucuccuggcuuaguuuucccug

SEQ ID NO: 605941 - RNA, 24 nt, Artificial Sequence
  Synthetic
ucucuccuggcuuaguuuucccug

SEQ ID NO: 605942 - RNA, 18 nt, Artificial Sequence
  Synthetic
uuucauuguaaaagccug

SEQ ID NO: 605943 - RNA, 19 nt, Artificial Sequence
  Synthetic
uuuucauuguaaaagccug

SEQ ID NO: 605944 - RNA, 20 nt, Artificial Sequence
  Synthetic
cuuuucauuguaaaagccug

SEQ ID NO: 605945 - RNA, 21 nt, Artificial Sequence
  Synthetic
ucuuuucauuguaaaagccug

SEQ ID NO: 605946 - RNA, 22 nt, Artificial Sequence
  Synthetic
uucuuuucauuguaaaagccug

SEQ ID NO: 605947 - RNA, 23 nt, Artificial Sequence
  Synthetic
cuucuuuucauuguaaaagccug

SEQ ID NO: 605948 - RNA, 24 nt, Artificial Sequence
  Synthetic
acuucuuuucauuguaaaagccug

SEQ ID NO: 605949 - RNA, 18 nt, Artificial Sequence
  Synthetic
cuuuaugaugaaagccug

SEQ ID NO: 605950 - RNA, 19 nt, Artificial Sequence
  Synthetic
acuuuaugaugaaagccug

SEQ ID NO: 605951 - RNA, 20 nt, Artificial Sequence
  Synthetic
uacuuuaugaugaaagccug

SEQ ID NO: 605952 - RNA, 21 nt, Artificial Sequence
  Synthetic
cuacuuuaugaugaaagccug

SEQ ID NO: 605953 - RNA, 22 nt, Artificial Sequence
  Synthetic
ucuacuuuaugaugaaagccug

SEQ ID NO: 605954 - RNA, 23 nt, Artificial Sequence
  Synthetic
cucuacuuuaugaugaaagccug

SEQ ID NO: 605955 - RNA, 24 nt, Artificial Sequence
  Synthetic
gcucuacuuuaugaugaaagccug

SEQ ID NO: 605956 - RNA, 18 nt, Artificial Sequence
  Synthetic
cucacuugugacagccug

SEQ ID NO: 605957 - RNA, 19 nt, Artificial Sequence
  Synthetic
acucacuugugacagccug

SEQ ID NO: 605958 - RNA, 20 nt, Artificial Sequence
  Synthetic
cacucacuugugacagccug

SEQ ID NO: 605959 - RNA, 21 nt, Artificial Sequence
  Synthetic
ccacucacuugugacagccug

SEQ ID NO: 605960 - RNA, 22 nt, Artificial Sequence
  Synthetic
uccacucacuugugacagccug

SEQ ID NO: 605961 - RNA, 23 nt, Artificial Sequence
  Synthetic
cuccacucacuugugacagccug

SEQ ID NO: 605962 - RNA, 24 nt, Artificial Sequence
  Synthetic
ccuccacucacuugugacagccug

SEQ ID NO: 605963 - RNA, 18 nt, Artificial Sequence
  Synthetic
gcgucaggcuacagccug

SEQ ID NO: 605964 - RNA, 19 nt, Artificial Sequence
  Synthetic
agcgucaggcuacagccug

SEQ ID NO: 605965 - RNA, 20 nt, Artificial Sequence
  Synthetic
uagcgucaggcuacagccug

SEQ ID NO: 605966 - RNA, 21 nt, Artificial Sequence
  Synthetic
auagcgucaggcuacagccug

SEQ ID NO: 605967 - RNA, 22 nt, Artificial Sequence
  Synthetic
cauagcgucaggcuacagccug

SEQ ID NO: 605968 - RNA, 23 nt, Artificial Sequence
  Synthetic
ccauagcgucaggcuacagccug

SEQ ID NO: 605969 - RNA, 24 nt, Artificial Sequence
  Synthetic
gccauagcgucaggcuacagccug

SEQ ID NO: 605970 - RNA, 18 nt, Artificial Sequence
  Synthetic
ugcuuccgguacagccug

SEQ ID NO: 605971 - RNA, 19 nt, Artificial Sequence
  Synthetic
augcuuccgguacagccug

SEQ ID NO: 605972 - RNA, 20 nt, Artificial Sequence
  Synthetic
uaugcuuccgguacagccug

SEQ ID NO: 605973 - RNA, 21 nt, Artificial Sequence
  Synthetic
cuaugcuuccgguacagccug

SEQ ID NO: 605974 - RNA, 22 nt, Artificial Sequence
  Synthetic
gcuaugcuuccgguacagccug

SEQ ID NO: 605975 - RNA, 23 nt, Artificial Sequence
  Synthetic
ugcuaugcuuccgguacagccug

SEQ ID NO: 605976 - RNA, 24 nt, Artificial Sequence
  Synthetic
cugcuaugcuuccgguacagccug

SEQ ID NO: 605977 - RNA, 18 nt, Artificial Sequence
  Synthetic
cacuuccuguacagccug

SEQ ID NO: 605978 - RNA, 19 nt, Artificial Sequence
  Synthetic
acacuuccuguacagccug

SEQ ID NO: 605979 - RNA, 20 nt, Artificial Sequence
  Synthetic
cacacuuccuguacagccug

SEQ ID NO: 605980 - RNA, 21 nt, Artificial Sequence
  Synthetic
ccacacuuccuguacagccug

SEQ ID NO: 605981 - RNA, 22 nt, Artificial Sequence
  Synthetic
gccacacuuccuguacagccug

SEQ ID NO: 605982 - RNA, 23 nt, Artificial Sequence
  Synthetic
ugccacacuuccuguacagccug

SEQ ID NO: 605983 - RNA, 24 nt, Artificial Sequence
  Synthetic
gugccacacuuccuguacagccug

SEQ ID NO: 605984 - RNA, 18 nt, Artificial Sequence
  Synthetic
gcuuuuuuguacagccug

SEQ ID NO: 605985 - RNA, 19 nt, Artificial Sequence
  Synthetic
ugcuuuuuuguacagccug

SEQ ID NO: 605986 - RNA, 20 nt, Artificial Sequence
  Synthetic
augcuuuuuuguacagccug

SEQ ID NO: 605987 - RNA, 21 nt, Artificial Sequence
  Synthetic
caugcuuuuuuguacagccug

SEQ ID NO: 605988 - RNA, 22 nt, Artificial Sequence
  Synthetic
ccaugcuuuuuuguacagccug

SEQ ID NO: 605989 - RNA, 23 nt, Artificial Sequence
  Synthetic
gccaugcuuuuuuguacagccug

SEQ ID NO: 605990 - RNA, 24 nt, Artificial Sequence
  Synthetic
ugccaugcuuuuuuguacagccug

SEQ ID NO: 605991 - RNA, 18 nt, Artificial Sequence
  Synthetic
ccauugcacuccagccug

SEQ ID NO: 605992 - RNA, 19 nt, Artificial Sequence
  Synthetic
gccauugcacuccagccug

SEQ ID NO: 605993 - RNA, 20 nt, Artificial Sequence
  Synthetic
cgccauugcacuccagccug

SEQ ID NO: 605994 - RNA, 21 nt, Artificial Sequence
  Synthetic
gcgccauugcacuccagccug

SEQ ID NO: 605995 - RNA, 22 nt, Artificial Sequence
  Synthetic
ugcgccauugcacuccagccug

SEQ ID NO: 605996 - RNA, 23 nt, Artificial Sequence
  Synthetic
uugcgccauugcacuccagccug

SEQ ID NO: 605997 - RNA, 24 nt, Artificial Sequence
  Synthetic
auugcgccauugcacuccagccug

SEQ ID NO: 605998 - RNA, 18 nt, Artificial Sequence
  Synthetic
acagcuuaacucagccug

SEQ ID NO: 605999 - RNA, 19 nt, Artificial Sequence
  Synthetic
aacagcuuaacucagccug

SEQ ID NO: 606000 - RNA, 20 nt, Artificial Sequence
  Synthetic
gaacagcuuaacucagccug

SEQ ID NO: 606001 - RNA, 21 nt, Artificial Sequence
  Synthetic
ggaacagcuuaacucagccug

SEQ ID NO: 606002 - RNA, 22 nt, Artificial Sequence
  Synthetic
gggaacagcuuaacucagccug

SEQ ID NO: 606003 - RNA, 23 nt, Artificial Sequence
  Synthetic
ggggaacagcuuaacucagccug

SEQ ID NO: 606004 - RNA, 24 nt, Artificial Sequence
  Synthetic
gggggaacagcuuaacucagccug

SEQ ID NO: 606005 - RNA, 18 nt, Artificial Sequence
  Synthetic
ucacccauauucagccug

SEQ ID NO: 606006 - RNA, 19 nt, Artificial Sequence
  Synthetic
aucacccauauucagccug

SEQ ID NO: 606007 - RNA, 20 nt, Artificial Sequence
  Synthetic
caucacccauauucagccug

SEQ ID NO: 606008 - RNA, 21 nt, Artificial Sequence
  Synthetic
ucaucacccauauucagccug

SEQ ID NO: 606009 - RNA, 22 nt, Artificial Sequence
  Synthetic
aucaucacccauauucagccug

SEQ ID NO: 606010 - RNA, 23 nt, Artificial Sequence
  Synthetic
uaucaucacccauauucagccug

SEQ ID NO: 606011 - RNA, 24 nt, Artificial Sequence
  Synthetic
auaucaucacccauauucagccug

SEQ ID NO: 606012 - RNA, 18 nt, Artificial Sequence
  Synthetic
auaauaaggaugagccug

SEQ ID NO: 606013 - RNA, 19 nt, Artificial Sequence
  Synthetic
aauaauaaggaugagccug

SEQ ID NO: 606014 - RNA, 20 nt, Artificial Sequence
  Synthetic
gaauaauaaggaugagccug

SEQ ID NO: 606015 - RNA, 21 nt, Artificial Sequence
  Synthetic
ggaauaauaaggaugagccug

SEQ ID NO: 606016 - RNA, 22 nt, Artificial Sequence
  Synthetic
uggaauaauaaggaugagccug

SEQ ID NO: 606017 - RNA, 23 nt, Artificial Sequence
  Synthetic
uuggaauaauaaggaugagccug

SEQ ID NO: 606018 - RNA, 24 nt, Artificial Sequence
  Synthetic
uuuggaauaauaaggaugagccug

SEQ ID NO: 606019 - RNA, 18 nt, Artificial Sequence
  Synthetic
aacaaucaucugagccug

SEQ ID NO: 606020 - RNA, 19 nt, Artificial Sequence
  Synthetic
uaacaaucaucugagccug

SEQ ID NO: 606021 - RNA, 20 nt, Artificial Sequence
  Synthetic
guaacaaucaucugagccug

SEQ ID NO: 606022 - RNA, 21 nt, Artificial Sequence
  Synthetic
gguaacaaucaucugagccug

SEQ ID NO: 606023 - RNA, 22 nt, Artificial Sequence
  Synthetic
ugguaacaaucaucugagccug

SEQ ID NO: 606024 - RNA, 23 nt, Artificial Sequence
  Synthetic
augguaacaaucaucugagccug

SEQ ID NO: 606025 - RNA, 24 nt, Artificial Sequence
  Synthetic
aaugguaacaaucaucugagccug

SEQ ID NO: 606026 - RNA, 18 nt, Artificial Sequence
  Synthetic
ugagccucagauagccug

SEQ ID NO: 606027 - RNA, 19 nt, Artificial Sequence
  Synthetic
cugagccucagauagccug

SEQ ID NO: 606028 - RNA, 20 nt, Artificial Sequence
  Synthetic
gcugagccucagauagccug

SEQ ID NO: 606029 - RNA, 21 nt, Artificial Sequence
  Synthetic
ggcugagccucagauagccug

SEQ ID NO: 606030 - RNA, 22 nt, Artificial Sequence
  Synthetic
uggcugagccucagauagccug

SEQ ID NO: 606031 - RNA, 23 nt, Artificial Sequence
  Synthetic
cuggcugagccucagauagccug

SEQ ID NO: 606032 - RNA, 24 nt, Artificial Sequence
  Synthetic
acuggcugagccucagauagccug

SEQ ID NO: 606033 - RNA, 18 nt, Artificial Sequence
  Synthetic
uuuuguucuucuagccug

SEQ ID NO: 606034 - RNA, 19 nt, Artificial Sequence
  Synthetic
cuuuuguucuucuagccug

SEQ ID NO: 606035 - RNA, 20 nt, Artificial Sequence
  Synthetic
ucuuuuguucuucuagccug

SEQ ID NO: 606036 - RNA, 21 nt, Artificial Sequence
  Synthetic
uucuuuuguucuucuagccug

SEQ ID NO: 606037 - RNA, 22 nt, Artificial Sequence
  Synthetic
auucuuuuguucuucuagccug

SEQ ID NO: 606038 - RNA, 23 nt, Artificial Sequence
  Synthetic
uauucuuuuguucuucuagccug

SEQ ID NO: 606039 - RNA, 24 nt, Artificial Sequence
  Synthetic
auauucuuuuguucuucuagccug

SEQ ID NO: 606040 - RNA, 18 nt, Artificial Sequence
  Synthetic
aucaucuuagguagccug

SEQ ID NO: 606041 - RNA, 19 nt, Artificial Sequence
  Synthetic
gaucaucuuagguagccug

SEQ ID NO: 606042 - RNA, 20 nt, Artificial Sequence
  Synthetic
ugaucaucuuagguagccug

SEQ ID NO: 606043 - RNA, 21 nt, Artificial Sequence
  Synthetic
uugaucaucuuagguagccug

SEQ ID NO: 606044 - RNA, 22 nt, Artificial Sequence
  Synthetic
uuugaucaucuuagguagccug

SEQ ID NO: 606045 - RNA, 23 nt, Artificial Sequence
  Synthetic
uuuugaucaucuuagguagccug

SEQ ID NO: 606046 - RNA, 24 nt, Artificial Sequence
  Synthetic
uuuuugaucaucuuagguagccug

SEQ ID NO: 606047 - RNA, 18 nt, Artificial Sequence
  Synthetic
cucgggcugguuagccug

SEQ ID NO: 606048 - RNA, 19 nt, Artificial Sequence
  Synthetic
gcucgggcugguuagccug

SEQ ID NO: 606049 - RNA, 20 nt, Artificial Sequence
  Synthetic
ugcucgggcugguuagccug

SEQ ID NO: 606050 - RNA, 21 nt, Artificial Sequence
  Synthetic
uugcucgggcugguuagccug

SEQ ID NO: 606051 - RNA, 22 nt, Artificial Sequence
  Synthetic
cuugcucgggcugguuagccug

SEQ ID NO: 606052 - RNA, 23 nt, Artificial Sequence
  Synthetic
acuugcucgggcugguuagccug

SEQ ID NO: 606053 - RNA, 24 nt, Artificial Sequence
  Synthetic
gacuugcucgggcugguuagccug

SEQ ID NO: 606054 - RNA, 18 nt, Artificial Sequence
  Synthetic
gccaccgugccgggccug

SEQ ID NO: 606055 - RNA, 19 nt, Artificial Sequence
  Synthetic
agccaccgugccgggccug

SEQ ID NO: 606056 - RNA, 20 nt, Artificial Sequence
  Synthetic
gagccaccgugccgggccug

SEQ ID NO: 606057 - RNA, 21 nt, Artificial Sequence
  Synthetic
ugagccaccgugccgggccug

SEQ ID NO: 606058 - RNA, 22 nt, Artificial Sequence
  Synthetic
cugagccaccgugccgggccug

SEQ ID NO: 606059 - RNA, 23 nt, Artificial Sequence
  Synthetic
ccugagccaccgugccgggccug

SEQ ID NO: 606060 - RNA, 24 nt, Artificial Sequence
  Synthetic
gccugagccaccgugccgggccug

SEQ ID NO: 606061 - RNA, 18 nt, Artificial Sequence
  Synthetic
uguuggagguggggccug

SEQ ID NO: 606062 - RNA, 19 nt, Artificial Sequence
  Synthetic
auguuggagguggggccug

SEQ ID NO: 606063 - RNA, 20 nt, Artificial Sequence
  Synthetic
aauguuggagguggggccug

SEQ ID NO: 606064 - RNA, 21 nt, Artificial Sequence
  Synthetic
caauguuggagguggggccug

SEQ ID NO: 606065 - RNA, 22 nt, Artificial Sequence
  Synthetic
ccaauguuggagguggggccug

SEQ ID NO: 606066 - RNA, 23 nt, Artificial Sequence
  Synthetic
cccaauguuggagguggggccug

SEQ ID NO: 606067 - RNA, 24 nt, Artificial Sequence
  Synthetic
ccccaauguuggagguggggccug

SEQ ID NO: 606068 - RNA, 19 nt, Artificial Sequence
  Synthetic
guguuggagguggggccug

SEQ ID NO: 606069 - RNA, 20 nt, Artificial Sequence
  Synthetic
aguguuggagguggggccug

SEQ ID NO: 606070 - RNA, 21 nt, Artificial Sequence
  Synthetic
caguguuggagguggggccug

SEQ ID NO: 606071 - RNA, 22 nt, Artificial Sequence
  Synthetic
ccaguguuggagguggggccug

SEQ ID NO: 606072 - RNA, 23 nt, Artificial Sequence
  Synthetic
cccaguguuggagguggggccug

SEQ ID NO: 606073 - RNA, 24 nt, Artificial Sequence
  Synthetic
ucccaguguuggagguggggccug

SEQ ID NO: 606074 - RNA, 18 nt, Artificial Sequence
  Synthetic
uguuggugguggggccug

SEQ ID NO: 606075 - RNA, 19 nt, Artificial Sequence
  Synthetic
auguuggugguggggccug

SEQ ID NO: 606076 - RNA, 20 nt, Artificial Sequence
  Synthetic
aauguuggugguggggccug

SEQ ID NO: 606077 - RNA, 21 nt, Artificial Sequence
  Synthetic
caauguuggugguggggccug

SEQ ID NO: 606078 - RNA, 22 nt, Artificial Sequence
  Synthetic
ccaauguuggugguggggccug

SEQ ID NO: 606079 - RNA, 23 nt, Artificial Sequence
  Synthetic
cccaauguuggugguggggccug

SEQ ID NO: 606080 - RNA, 24 nt, Artificial Sequence
  Synthetic
ucccaauguuggugguggggccug

SEQ ID NO: 606081 - RNA, 18 nt, Artificial Sequence
  Synthetic
agcaguaucccuggccug

SEQ ID NO: 606082 - RNA, 19 nt, Artificial Sequence
  Synthetic
uagcaguaucccuggccug

SEQ ID NO: 606083 - RNA, 20 nt, Artificial Sequence
  Synthetic
uuagcaguaucccuggccug

SEQ ID NO: 606084 - RNA, 21 nt, Artificial Sequence
  Synthetic
uuuagcaguaucccuggccug

SEQ ID NO: 606085 - RNA, 22 nt, Artificial Sequence
  Synthetic
auuuagcaguaucccuggccug

SEQ ID NO: 606086 - RNA, 23 nt, Artificial Sequence
  Synthetic
uauuuagcaguaucccuggccug

SEQ ID NO: 606087 - RNA, 24 nt, Artificial Sequence
  Synthetic
guauuuagcaguaucccuggccug

SEQ ID NO: 606088 - RNA, 18 nt, Artificial Sequence
  Synthetic
ugugagccaccaugccug

SEQ ID NO: 606089 - RNA, 19 nt, Artificial Sequence
  Synthetic
gugugagccaccaugccug

SEQ ID NO: 606090 - RNA, 20 nt, Artificial Sequence
  Synthetic
ggugugagccaccaugccug

SEQ ID NO: 606091 - RNA, 21 nt, Artificial Sequence
  Synthetic
aggugugagccaccaugccug

SEQ ID NO: 606092 - RNA, 22 nt, Artificial Sequence
  Synthetic
caggugugagccaccaugccug

SEQ ID NO: 606093 - RNA, 23 nt, Artificial Sequence
  Synthetic
acaggugugagccaccaugccug

SEQ ID NO: 606094 - RNA, 24 nt, Artificial Sequence
  Synthetic
uacaggugugagccaccaugccug

SEQ ID NO: 606095 - RNA, 18 nt, Artificial Sequence
  Synthetic
cagccaggggccugccug

SEQ ID NO: 606096 - RNA, 19 nt, Artificial Sequence
  Synthetic
ucagccaggggccugccug

SEQ ID NO: 606097 - RNA, 20 nt, Artificial Sequence
  Synthetic
uucagccaggggccugccug

SEQ ID NO: 606098 - RNA, 21 nt, Artificial Sequence
  Synthetic
auucagccaggggccugccug

SEQ ID NO: 606099 - RNA, 22 nt, Artificial Sequence
  Synthetic
cauucagccaggggccugccug

SEQ ID NO: 606100 - RNA, 23 nt, Artificial Sequence
  Synthetic
gcauucagccaggggccugccug

SEQ ID NO: 606101 - RNA, 24 nt, Artificial Sequence
  Synthetic
ugcauucagccaggggccugccug

SEQ ID NO: 606102 - RNA, 18 nt, Artificial Sequence
  Synthetic
auacucagugccugccug

SEQ ID NO: 606103 - RNA, 19 nt, Artificial Sequence
  Synthetic
aauacucagugccugccug

SEQ ID NO: 606104 - RNA, 20 nt, Artificial Sequence
  Synthetic
gaauacucagugccugccug

SEQ ID NO: 606105 - RNA, 21 nt, Artificial Sequence
  Synthetic
ugaauacucagugccugccug

SEQ ID NO: 606106 - RNA, 22 nt, Artificial Sequence
  Synthetic
cugaauacucagugccugccug

SEQ ID NO: 606107 - RNA, 23 nt, Artificial Sequence
  Synthetic
acugaauacucagugccugccug

SEQ ID NO: 606108 - RNA, 24 nt, Artificial Sequence
  Synthetic
uacugaauacucagugccugccug

SEQ ID NO: 606109 - RNA, 18 nt, Artificial Sequence
  Synthetic
cauuuuaaaagcugccug

SEQ ID NO: 606110 - RNA, 19 nt, Artificial Sequence
  Synthetic
gcauuuuaaaagcugccug

SEQ ID NO: 606111 - RNA, 20 nt, Artificial Sequence
  Synthetic
ggcauuuuaaaagcugccug

SEQ ID NO: 606112 - RNA, 21 nt, Artificial Sequence
  Synthetic
aggcauuuuaaaagcugccug

SEQ ID NO: 606113 - RNA, 22 nt, Artificial Sequence
  Synthetic
uaggcauuuuaaaagcugccug

SEQ ID NO: 606114 - RNA, 23 nt, Artificial Sequence
  Synthetic
guaggcauuuuaaaagcugccug

SEQ ID NO: 606115 - RNA, 24 nt, Artificial Sequence
  Synthetic
aguaggcauuuuaaaagcugccug

SEQ ID NO: 606116 - RNA, 18 nt, Artificial Sequence
  Synthetic
ucaguaaauaucugccug

SEQ ID NO: 606117 - RNA, 19 nt, Artificial Sequence
  Synthetic
cucaguaaauaucugccug

SEQ ID NO: 606118 - RNA, 20 nt, Artificial Sequence
  Synthetic
ucucaguaaauaucugccug

SEQ ID NO: 606119 - RNA, 21 nt, Artificial Sequence
  Synthetic
uucucaguaaauaucugccug

SEQ ID NO: 606120 - RNA, 22 nt, Artificial Sequence
  Synthetic
guucucaguaaauaucugccug

SEQ ID NO: 606121 - RNA, 23 nt, Artificial Sequence
  Synthetic
aguucucaguaaauaucugccug

SEQ ID NO: 606122 - RNA, 24 nt, Artificial Sequence
  Synthetic
aaguucucaguaaauaucugccug

SEQ ID NO: 606123 - RNA, 18 nt, Artificial Sequence
  Synthetic
gaguuuagaaagugccug

SEQ ID NO: 606124 - RNA, 19 nt, Artificial Sequence
  Synthetic
agaguuuagaaagugccug

SEQ ID NO: 606125 - RNA, 20 nt, Artificial Sequence
  Synthetic
gagaguuuagaaagugccug

SEQ ID NO: 606126 - RNA, 21 nt, Artificial Sequence
  Synthetic
ggagaguuuagaaagugccug

SEQ ID NO: 606127 - RNA, 22 nt, Artificial Sequence
  Synthetic
uggagaguuuagaaagugccug

SEQ ID NO: 606128 - RNA, 23 nt, Artificial Sequence
  Synthetic
guggagaguuuagaaagugccug

SEQ ID NO: 606129 - RNA, 24 nt, Artificial Sequence
  Synthetic
uguggagaguuuagaaagugccug

SEQ ID NO: 606130 - RNA, 18 nt, Artificial Sequence
  Synthetic
aacacacacuggugccug

SEQ ID NO: 606131 - RNA, 19 nt, Artificial Sequence
  Synthetic
caacacacacuggugccug

SEQ ID NO: 606132 - RNA, 20 nt, Artificial Sequence
  Synthetic
acaacacacacuggugccug

SEQ ID NO: 606133 - RNA, 21 nt, Artificial Sequence
  Synthetic
aacaacacacacuggugccug

SEQ ID NO: 606134 - RNA, 22 nt, Artificial Sequence
  Synthetic
gaacaacacacacuggugccug

SEQ ID NO: 606135 - RNA, 23 nt, Artificial Sequence
  Synthetic
ggaacaacacacacuggugccug

SEQ ID NO: 606136 - RNA, 24 nt, Artificial Sequence
  Synthetic
gggaacaacacacacuggugccug

SEQ ID NO: 606137 - RNA, 18 nt, Artificial Sequence
  Synthetic
gacacuggaaugugccug

SEQ ID NO: 606138 - RNA, 19 nt, Artificial Sequence
  Synthetic
ugacacuggaaugugccug

SEQ ID NO: 606139 - RNA, 20 nt, Artificial Sequence
  Synthetic
cugacacuggaaugugccug

SEQ ID NO: 606140 - RNA, 21 nt, Artificial Sequence
  Synthetic
ccugacacuggaaugugccug

SEQ ID NO: 606141 - RNA, 22 nt, Artificial Sequence
  Synthetic
cccugacacuggaaugugccug

SEQ ID NO: 606142 - RNA, 23 nt, Artificial Sequence
  Synthetic
gcccugacacuggaaugugccug

SEQ ID NO: 606143 - RNA, 24 nt, Artificial Sequence
  Synthetic
ggcccugacacuggaaugugccug

SEQ ID NO: 606144 - RNA, 18 nt, Artificial Sequence
  Synthetic
uuugucuuucugugccug

SEQ ID NO: 606145 - RNA, 19 nt, Artificial Sequence
  Synthetic
auuugucuuucugugccug

SEQ ID NO: 606146 - RNA, 20 nt, Artificial Sequence
  Synthetic
uauuugucuuucugugccug

SEQ ID NO: 606147 - RNA, 21 nt, Artificial Sequence
  Synthetic
guauuugucuuucugugccug

SEQ ID NO: 606148 - RNA, 22 nt, Artificial Sequence
  Synthetic
gguauuugucuuucugugccug

SEQ ID NO: 606149 - RNA, 23 nt, Artificial Sequence
  Synthetic
ugguauuugucuuucugugccug

SEQ ID NO: 606150 - RNA, 24 nt, Artificial Sequence
  Synthetic
gugguauuugucuuucugugccug

SEQ ID NO: 606151 - RNA, 18 nt, Artificial Sequence
  Synthetic
gguguguaaucuugccug

SEQ ID NO: 606152 - RNA, 19 nt, Artificial Sequence
  Synthetic
agguguguaaucuugccug

SEQ ID NO: 606153 - RNA, 20 nt, Artificial Sequence
  Synthetic
cagguguguaaucuugccug

SEQ ID NO: 606154 - RNA, 21 nt, Artificial Sequence
  Synthetic
acagguguguaaucuugccug

SEQ ID NO: 606155 - RNA, 22 nt, Artificial Sequence
  Synthetic
cacagguguguaaucuugccug

SEQ ID NO: 606156 - RNA, 23 nt, Artificial Sequence
  Synthetic
ucacagguguguaaucuugccug

SEQ ID NO: 606157 - RNA, 24 nt, Artificial Sequence
  Synthetic
aucacagguguguaaucuugccug

SEQ ID NO: 606158 - RNA, 18 nt, Artificial Sequence
  Synthetic
gaaaagcaguuuugccug

SEQ ID NO: 606159 - RNA, 19 nt, Artificial Sequence
  Synthetic
ggaaaagcaguuuugccug

SEQ ID NO: 606160 - RNA, 20 nt, Artificial Sequence
  Synthetic
aggaaaagcaguuuugccug

SEQ ID NO: 606161 - RNA, 21 nt, Artificial Sequence
  Synthetic
aaggaaaagcaguuuugccug

SEQ ID NO: 606162 - RNA, 22 nt, Artificial Sequence
  Synthetic
uaaggaaaagcaguuuugccug

SEQ ID NO: 606163 - RNA, 23 nt, Artificial Sequence
  Synthetic
uuaaggaaaagcaguuuugccug

SEQ ID NO: 606164 - RNA, 24 nt, Artificial Sequence
  Synthetic
uuuaaggaaaagcaguuuugccug

SEQ ID NO: 606165 - RNA, 18 nt, Artificial Sequence
  Synthetic
agugauauaaaaauccug

SEQ ID NO: 606166 - RNA, 19 nt, Artificial Sequence
  Synthetic
aagugauauaaaaauccug

SEQ ID NO: 606167 - RNA, 20 nt, Artificial Sequence
  Synthetic
uaagugauauaaaaauccug

SEQ ID NO: 606168 - RNA, 21 nt, Artificial Sequence
  Synthetic
uuaagugauauaaaaauccug

SEQ ID NO: 606169 - RNA, 22 nt, Artificial Sequence
  Synthetic
uuuaagugauauaaaaauccug

SEQ ID NO: 606170 - RNA, 23 nt, Artificial Sequence
  Synthetic
auuuaagugauauaaaaauccug

SEQ ID NO: 606171 - RNA, 24 nt, Artificial Sequence
  Synthetic
aauuuaagugauauaaaaauccug

SEQ ID NO: 606172 - RNA, 18 nt, Artificial Sequence
  Synthetic
guauaccagagaauccug

SEQ ID NO: 606173 - RNA, 19 nt, Artificial Sequence
  Synthetic
uguauaccagagaauccug

SEQ ID NO: 606174 - RNA, 20 nt, Artificial Sequence
  Synthetic
guguauaccagagaauccug

SEQ ID NO: 606175 - RNA, 21 nt, Artificial Sequence
  Synthetic
aguguauaccagagaauccug

SEQ ID NO: 606176 - RNA, 22 nt, Artificial Sequence
  Synthetic
aaguguauaccagagaauccug

SEQ ID NO: 606177 - RNA, 23 nt, Artificial Sequence
  Synthetic
caaguguauaccagagaauccug

SEQ ID NO: 606178 - RNA, 24 nt, Artificial Sequence
  Synthetic
gcaaguguauaccagagaauccug

SEQ ID NO: 606179 - RNA, 18 nt, Artificial Sequence
  Synthetic
ggcaauaaacaacuccug

SEQ ID NO: 606180 - RNA, 19 nt, Artificial Sequence
  Synthetic
aggcaauaaacaacuccug

SEQ ID NO: 606181 - RNA, 20 nt, Artificial Sequence
  Synthetic
caggcaauaaacaacuccug

SEQ ID NO: 606182 - RNA, 21 nt, Artificial Sequence
  Synthetic
ccaggcaauaaacaacuccug

SEQ ID NO: 606183 - RNA, 22 nt, Artificial Sequence
  Synthetic
accaggcaauaaacaacuccug

SEQ ID NO: 606184 - RNA, 23 nt, Artificial Sequence
  Synthetic
aaccaggcaauaaacaacuccug

SEQ ID NO: 606185 - RNA, 24 nt, Artificial Sequence
  Synthetic
aaaccaggcaauaaacaacuccug

SEQ ID NO: 606186 - RNA, 18 nt, Artificial Sequence
  Synthetic
agcuaauagacacuccug

SEQ ID NO: 606187 - RNA, 19 nt, Artificial Sequence
  Synthetic
gagcuaauagacacuccug

SEQ ID NO: 606188 - RNA, 20 nt, Artificial Sequence
  Synthetic
ggagcuaauagacacuccug

SEQ ID NO: 606189 - RNA, 21 nt, Artificial Sequence
  Synthetic
gggagcuaauagacacuccug

SEQ ID NO: 606190 - RNA, 22 nt, Artificial Sequence
  Synthetic
ugggagcuaauagacacuccug

SEQ ID NO: 606191 - RNA, 23 nt, Artificial Sequence
  Synthetic
augggagcuaauagacacuccug

SEQ ID NO: 606192 - RNA, 24 nt, Artificial Sequence
  Synthetic
aaugggagcuaauagacacuccug

SEQ ID NO: 606193 - RNA, 18 nt, Artificial Sequence
  Synthetic
aaaauguaggcacuccug

SEQ ID NO: 606194 - RNA, 19 nt, Artificial Sequence
  Synthetic
uaaaauguaggcacuccug

SEQ ID NO: 606195 - RNA, 20 nt, Artificial Sequence
  Synthetic
auaaaauguaggcacuccug

SEQ ID NO: 606196 - RNA, 21 nt, Artificial Sequence
  Synthetic
uauaaaauguaggcacuccug

SEQ ID NO: 606197 - RNA, 22 nt, Artificial Sequence
  Synthetic
uuauaaaauguaggcacuccug

SEQ ID NO: 606198 - RNA, 23 nt, Artificial Sequence
  Synthetic
guuauaaaauguaggcacuccug

SEQ ID NO: 606199 - RNA, 24 nt, Artificial Sequence
  Synthetic
aguuauaaaauguaggcacuccug

SEQ ID NO: 606200 - RNA, 18 nt, Artificial Sequence
  Synthetic
agcaggcccauacuccug

SEQ ID NO: 606201 - RNA, 19 nt, Artificial Sequence
  Synthetic
cagcaggcccauacuccug

SEQ ID NO: 606202 - RNA, 20 nt, Artificial Sequence
  Synthetic
ccagcaggcccauacuccug

SEQ ID NO: 606203 - RNA, 21 nt, Artificial Sequence
  Synthetic
uccagcaggcccauacuccug

SEQ ID NO: 606204 - RNA, 22 nt, Artificial Sequence
  Synthetic
uuccagcaggcccauacuccug

SEQ ID NO: 606205 - RNA, 23 nt, Artificial Sequence
  Synthetic
auuccagcaggcccauacuccug

SEQ ID NO: 606206 - RNA, 24 nt, Artificial Sequence
  Synthetic
gauuccagcaggcccauacuccug

SEQ ID NO: 606207 - RNA, 18 nt, Artificial Sequence
  Synthetic
agacagaaucuacuccug

SEQ ID NO: 606208 - RNA, 19 nt, Artificial Sequence
  Synthetic
gagacagaaucuacuccug

SEQ ID NO: 606209 - RNA, 20 nt, Artificial Sequence
  Synthetic
ugagacagaaucuacuccug

SEQ ID NO: 606210 - RNA, 21 nt, Artificial Sequence
  Synthetic
augagacagaaucuacuccug

SEQ ID NO: 606211 - RNA, 22 nt, Artificial Sequence
  Synthetic
caugagacagaaucuacuccug

SEQ ID NO: 606212 - RNA, 23 nt, Artificial Sequence
  Synthetic
ucaugagacagaaucuacuccug

SEQ ID NO: 606213 - RNA, 24 nt, Artificial Sequence
  Synthetic
uucaugagacagaaucuacuccug

SEQ ID NO: 606214 - RNA, 18 nt, Artificial Sequence
  Synthetic
acuucagagauccuccug

SEQ ID NO: 606215 - RNA, 19 nt, Artificial Sequence
  Synthetic
gacuucagagauccuccug

SEQ ID NO: 606216 - RNA, 20 nt, Artificial Sequence
  Synthetic
agacuucagagauccuccug

SEQ ID NO: 606217 - RNA, 21 nt, Artificial Sequence
  Synthetic
cagacuucagagauccuccug

SEQ ID NO: 606218 - RNA, 22 nt, Artificial Sequence
  Synthetic
ucagacuucagagauccuccug

SEQ ID NO: 606219 - RNA, 23 nt, Artificial Sequence
  Synthetic
uucagacuucagagauccuccug

SEQ ID NO: 606220 - RNA, 24 nt, Artificial Sequence
  Synthetic
cuucagacuucagagauccuccug

SEQ ID NO: 606221 - RNA, 18 nt, Artificial Sequence
  Synthetic
gcccuaaaagagcuccug

SEQ ID NO: 606222 - RNA, 19 nt, Artificial Sequence
  Synthetic
ugcccuaaaagagcuccug

SEQ ID NO: 606223 - RNA, 20 nt, Artificial Sequence
  Synthetic
cugcccuaaaagagcuccug

SEQ ID NO: 606224 - RNA, 21 nt, Artificial Sequence
  Synthetic
ccugcccuaaaagagcuccug

SEQ ID NO: 606225 - RNA, 22 nt, Artificial Sequence
  Synthetic
gccugcccuaaaagagcuccug

SEQ ID NO: 606226 - RNA, 23 nt, Artificial Sequence
  Synthetic
ggccugcccuaaaagagcuccug

SEQ ID NO: 606227 - RNA, 24 nt, Artificial Sequence
  Synthetic
aggccugcccuaaaagagcuccug

SEQ ID NO: 606228 - RNA, 18 nt, Artificial Sequence
  Synthetic
uacaggugguggcuccug

SEQ ID NO: 606229 - RNA, 19 nt, Artificial Sequence
  Synthetic
auacaggugguggcuccug

SEQ ID NO: 606230 - RNA, 20 nt, Artificial Sequence
  Synthetic
aauacaggugguggcuccug

SEQ ID NO: 606231 - RNA, 21 nt, Artificial Sequence
  Synthetic
aaauacaggugguggcuccug

SEQ ID NO: 606232 - RNA, 22 nt, Artificial Sequence
  Synthetic
gaaauacaggugguggcuccug

SEQ ID NO: 606233 - RNA, 23 nt, Artificial Sequence
  Synthetic
ggaaauacaggugguggcuccug

SEQ ID NO: 606234 - RNA, 24 nt, Artificial Sequence
  Synthetic
gggaaauacaggugguggcuccug

SEQ ID NO: 606235 - RNA, 18 nt, Artificial Sequence
  Synthetic
cggaaugaagugcuccug

SEQ ID NO: 606236 - RNA, 19 nt, Artificial Sequence
  Synthetic
ucggaaugaagugcuccug

SEQ ID NO: 606237 - RNA, 20 nt, Artificial Sequence
  Synthetic
gucggaaugaagugcuccug

SEQ ID NO: 606238 - RNA, 21 nt, Artificial Sequence
  Synthetic
ugucggaaugaagugcuccug

SEQ ID NO: 606239 - RNA, 22 nt, Artificial Sequence
  Synthetic
uugucggaaugaagugcuccug

SEQ ID NO: 606240 - RNA, 23 nt, Artificial Sequence
  Synthetic
cuugucggaaugaagugcuccug

SEQ ID NO: 606241 - RNA, 24 nt, Artificial Sequence
  Synthetic
ucuugucggaaugaagugcuccug

SEQ ID NO: 606242 - RNA, 18 nt, Artificial Sequence
  Synthetic
acauaugacucucuccug

SEQ ID NO: 606243 - RNA, 19 nt, Artificial Sequence
  Synthetic
uacauaugacucucuccug

SEQ ID NO: 606244 - RNA, 20 nt, Artificial Sequence
  Synthetic
auacauaugacucucuccug

SEQ ID NO: 606245 - RNA, 21 nt, Artificial Sequence
  Synthetic
uauacauaugacucucuccug

SEQ ID NO: 606246 - RNA, 22 nt, Artificial Sequence
  Synthetic
cuauacauaugacucucuccug

SEQ ID NO: 606247 - RNA, 23 nt, Artificial Sequence
  Synthetic
acuauacauaugacucucuccug

SEQ ID NO: 606248 - RNA, 24 nt, Artificial Sequence
  Synthetic
aacuauacauaugacucucuccug

SEQ ID NO: 606249 - RNA, 18 nt, Artificial Sequence
  Synthetic
auuaccaaaugucuccug

SEQ ID NO: 606250 - RNA, 19 nt, Artificial Sequence
  Synthetic
cauuaccaaaugucuccug

SEQ ID NO: 606251 - RNA, 20 nt, Artificial Sequence
  Synthetic
acauuaccaaaugucuccug

SEQ ID NO: 606252 - RNA, 21 nt, Artificial Sequence
  Synthetic
gacauuaccaaaugucuccug

SEQ ID NO: 606253 - RNA, 22 nt, Artificial Sequence
  Synthetic
ugacauuaccaaaugucuccug

SEQ ID NO: 606254 - RNA, 23 nt, Artificial Sequence
  Synthetic
cugacauuaccaaaugucuccug

SEQ ID NO: 606255 - RNA, 24 nt, Artificial Sequence
  Synthetic
ccugacauuaccaaaugucuccug

SEQ ID NO: 606256 - RNA, 18 nt, Artificial Sequence
  Synthetic
gagggccucugucuccug

SEQ ID NO: 606257 - RNA, 19 nt, Artificial Sequence
  Synthetic
ggagggccucugucuccug

SEQ ID NO: 606258 - RNA, 20 nt, Artificial Sequence
  Synthetic
uggagggccucugucuccug

SEQ ID NO: 606259 - RNA, 21 nt, Artificial Sequence
  Synthetic
cuggagggccucugucuccug

SEQ ID NO: 606260 - RNA, 22 nt, Artificial Sequence
  Synthetic
ucuggagggccucugucuccug

SEQ ID NO: 606261 - RNA, 23 nt, Artificial Sequence
  Synthetic
gucuggagggccucugucuccug

SEQ ID NO: 606262 - RNA, 24 nt, Artificial Sequence
  Synthetic
agucuggagggccucugucuccug

SEQ ID NO: 606263 - RNA, 18 nt, Artificial Sequence
  Synthetic
auuuccugcuuucuccug

SEQ ID NO: 606264 - RNA, 19 nt, Artificial Sequence
  Synthetic
uauuuccugcuuucuccug

SEQ ID NO: 606265 - RNA, 20 nt, Artificial Sequence
  Synthetic
auauuuccugcuuucuccug

SEQ ID NO: 606266 - RNA, 21 nt, Artificial Sequence
  Synthetic
gauauuuccugcuuucuccug

SEQ ID NO: 606267 - RNA, 22 nt, Artificial Sequence
  Synthetic
agauauuuccugcuuucuccug

SEQ ID NO: 606268 - RNA, 23 nt, Artificial Sequence
  Synthetic
uagauauuuccugcuuucuccug

SEQ ID NO: 606269 - RNA, 24 nt, Artificial Sequence
  Synthetic
uuagauauuuccugcuuucuccug

SEQ ID NO: 606270 - RNA, 18 nt, Artificial Sequence
  Synthetic
cugugguugcagguccug

SEQ ID NO: 606271 - RNA, 19 nt, Artificial Sequence
  Synthetic
ccugugguugcagguccug

SEQ ID NO: 606272 - RNA, 20 nt, Artificial Sequence
  Synthetic
uccugugguugcagguccug

SEQ ID NO: 606273 - RNA, 21 nt, Artificial Sequence
  Synthetic
cuccugugguugcagguccug

SEQ ID NO: 606274 - RNA, 22 nt, Artificial Sequence
  Synthetic
ccuccugugguugcagguccug

SEQ ID NO: 606275 - RNA, 23 nt, Artificial Sequence
  Synthetic
uccuccugugguugcagguccug

SEQ ID NO: 606276 - RNA, 24 nt, Artificial Sequence
  Synthetic
cuccuccugugguugcagguccug

SEQ ID NO: 606277 - RNA, 18 nt, Artificial Sequence
  Synthetic
caccuugggauuguccug

SEQ ID NO: 606278 - RNA, 19 nt, Artificial Sequence
  Synthetic
ucaccuugggauuguccug

SEQ ID NO: 606279 - RNA, 20 nt, Artificial Sequence
  Synthetic
uucaccuugggauuguccug

SEQ ID NO: 606280 - RNA, 21 nt, Artificial Sequence
  Synthetic
uuucaccuugggauuguccug

SEQ ID NO: 606281 - RNA, 22 nt, Artificial Sequence
  Synthetic
uuuucaccuugggauuguccug

SEQ ID NO: 606282 - RNA, 23 nt, Artificial Sequence
  Synthetic
cuuuucaccuugggauuguccug

SEQ ID NO: 606283 - RNA, 24 nt, Artificial Sequence
  Synthetic
ccuuuucaccuugggauuguccug

SEQ ID NO: 606284 - RNA, 18 nt, Artificial Sequence
  Synthetic
agcacaaucaaauuccug

SEQ ID NO: 606285 - RNA, 19 nt, Artificial Sequence
  Synthetic
aagcacaaucaaauuccug

SEQ ID NO: 606286 - RNA, 20 nt, Artificial Sequence
  Synthetic
gaagcacaaucaaauuccug

SEQ ID NO: 606287 - RNA, 21 nt, Artificial Sequence
  Synthetic
ugaagcacaaucaaauuccug

SEQ ID NO: 606288 - RNA, 22 nt, Artificial Sequence
  Synthetic
augaagcacaaucaaauuccug

SEQ ID NO: 606289 - RNA, 23 nt, Artificial Sequence
  Synthetic
aaugaagcacaaucaaauuccug

SEQ ID NO: 606290 - RNA, 24 nt, Artificial Sequence
  Synthetic
caaugaagcacaaucaaauuccug

SEQ ID NO: 606291 - RNA, 18 nt, Artificial Sequence
  Synthetic
gcauaucggccauuccug

SEQ ID NO: 606292 - RNA, 19 nt, Artificial Sequence
  Synthetic
agcauaucggccauuccug

SEQ ID NO: 606293 - RNA, 20 nt, Artificial Sequence
  Synthetic
aagcauaucggccauuccug

SEQ ID NO: 606294 - RNA, 21 nt, Artificial Sequence
  Synthetic
caagcauaucggccauuccug

SEQ ID NO: 606295 - RNA, 22 nt, Artificial Sequence
  Synthetic
acaagcauaucggccauuccug

SEQ ID NO: 606296 - RNA, 23 nt, Artificial Sequence
  Synthetic
uacaagcauaucggccauuccug

SEQ ID NO: 606297 - RNA, 24 nt, Artificial Sequence
  Synthetic
cuacaagcauaucggccauuccug

SEQ ID NO: 606298 - RNA, 18 nt, Artificial Sequence
  Synthetic
ugaguugggaccuuccug

SEQ ID NO: 606299 - RNA, 19 nt, Artificial Sequence
  Synthetic
augaguugggaccuuccug

SEQ ID NO: 606300 - RNA, 20 nt, Artificial Sequence
  Synthetic
aaugaguugggaccuuccug

SEQ ID NO: 606301 - RNA, 21 nt, Artificial Sequence
  Synthetic
gaaugaguugggaccuuccug

SEQ ID NO: 606302 - RNA, 22 nt, Artificial Sequence
  Synthetic
agaaugaguugggaccuuccug

SEQ ID NO: 606303 - RNA, 23 nt, Artificial Sequence
  Synthetic
cagaaugaguugggaccuuccug

SEQ ID NO: 606304 - RNA, 24 nt, Artificial Sequence
  Synthetic
ucagaaugaguugggaccuuccug

SEQ ID NO: 606305 - RNA, 18 nt, Artificial Sequence
  Synthetic
auguugcuaugcuuccug

SEQ ID NO: 606306 - RNA, 19 nt, Artificial Sequence
  Synthetic
gauguugcuaugcuuccug

SEQ ID NO: 606307 - RNA, 20 nt, Artificial Sequence
  Synthetic
agauguugcuaugcuuccug

SEQ ID NO: 606308 - RNA, 21 nt, Artificial Sequence
  Synthetic
cagauguugcuaugcuuccug

SEQ ID NO: 606309 - RNA, 22 nt, Artificial Sequence
  Synthetic
acagauguugcuaugcuuccug

SEQ ID NO: 606310 - RNA, 23 nt, Artificial Sequence
  Synthetic
aacagauguugcuaugcuuccug

SEQ ID NO: 606311 - RNA, 24 nt, Artificial Sequence
  Synthetic
aaacagauguugcuaugcuuccug

SEQ ID NO: 606312 - RNA, 18 nt, Artificial Sequence
  Synthetic
cugaaaugcugcuuccug

SEQ ID NO: 606313 - RNA, 19 nt, Artificial Sequence
  Synthetic
acugaaaugcugcuuccug

SEQ ID NO: 606314 - RNA, 20 nt, Artificial Sequence
  Synthetic
aacugaaaugcugcuuccug

SEQ ID NO: 606315 - RNA, 21 nt, Artificial Sequence
  Synthetic
caacugaaaugcugcuuccug

SEQ ID NO: 606316 - RNA, 22 nt, Artificial Sequence
  Synthetic
gcaacugaaaugcugcuuccug

SEQ ID NO: 606317 - RNA, 23 nt, Artificial Sequence
  Synthetic
agcaacugaaaugcugcuuccug

SEQ ID NO: 606318 - RNA, 24 nt, Artificial Sequence
  Synthetic
gagcaacugaaaugcugcuuccug

SEQ ID NO: 606319 - RNA, 18 nt, Artificial Sequence
  Synthetic
auucagucuuucuuccug

SEQ ID NO: 606320 - RNA, 19 nt, Artificial Sequence
  Synthetic
cauucagucuuucuuccug

SEQ ID NO: 606321 - RNA, 20 nt, Artificial Sequence
  Synthetic
gcauucagucuuucuuccug

SEQ ID NO: 606322 - RNA, 21 nt, Artificial Sequence
  Synthetic
ugcauucagucuuucuuccug

SEQ ID NO: 606323 - RNA, 22 nt, Artificial Sequence
  Synthetic
cugcauucagucuuucuuccug

SEQ ID NO: 606324 - RNA, 23 nt, Artificial Sequence
  Synthetic
ucugcauucagucuuucuuccug

SEQ ID NO: 606325 - RNA, 24 nt, Artificial Sequence
  Synthetic
uucugcauucagucuuucuuccug

SEQ ID NO: 606326 - RNA, 18 nt, Artificial Sequence
  Synthetic
uucaaugugaaguuccug

SEQ ID NO: 606327 - RNA, 19 nt, Artificial Sequence
  Synthetic
cuucaaugugaaguuccug

SEQ ID NO: 606328 - RNA, 20 nt, Artificial Sequence
  Synthetic
ucuucaaugugaaguuccug

SEQ ID NO: 606329 - RNA, 21 nt, Artificial Sequence
  Synthetic
cucuucaaugugaaguuccug

SEQ ID NO: 606330 - RNA, 22 nt, Artificial Sequence
  Synthetic
ccucuucaaugugaaguuccug

SEQ ID NO: 606331 - RNA, 23 nt, Artificial Sequence
  Synthetic
accucuucaaugugaaguuccug

SEQ ID NO: 606332 - RNA, 24 nt, Artificial Sequence
  Synthetic
gaccucuucaaugugaaguuccug

SEQ ID NO: 606333 - RNA, 18 nt, Artificial Sequence
  Synthetic
agagaaccguauuuccug

SEQ ID NO: 606334 - RNA, 19 nt, Artificial Sequence
  Synthetic
cagagaaccguauuuccug

SEQ ID NO: 606335 - RNA, 20 nt, Artificial Sequence
  Synthetic
gcagagaaccguauuuccug

SEQ ID NO: 606336 - RNA, 21 nt, Artificial Sequence
  Synthetic
agcagagaaccguauuuccug

SEQ ID NO: 606337 - RNA, 22 nt, Artificial Sequence
  Synthetic
cagcagagaaccguauuuccug

SEQ ID NO: 606338 - RNA, 23 nt, Artificial Sequence
  Synthetic
ucagcagagaaccguauuuccug

SEQ ID NO: 606339 - RNA, 24 nt, Artificial Sequence
  Synthetic
gucagcagagaaccguauuuccug

SEQ ID NO: 606340 - RNA, 18 nt, Artificial Sequence
  Synthetic
aaccauauuuauuuccug

SEQ ID NO: 606341 - RNA, 19 nt, Artificial Sequence
  Synthetic
uaaccauauuuauuuccug

SEQ ID NO: 606342 - RNA, 20 nt, Artificial Sequence
  Synthetic
uuaaccauauuuauuuccug

SEQ ID NO: 606343 - RNA, 21 nt, Artificial Sequence
  Synthetic
uuuaaccauauuuauuuccug

SEQ ID NO: 606344 - RNA, 22 nt, Artificial Sequence
  Synthetic
uuuuaaccauauuuauuuccug

SEQ ID NO: 606345 - RNA, 23 nt, Artificial Sequence
  Synthetic
uuuuuaaccauauuuauuuccug

SEQ ID NO: 606346 - RNA, 24 nt, Artificial Sequence
  Synthetic
auuuuuaaccauauuuauuuccug

SEQ ID NO: 606347 - RNA, 18 nt, Artificial Sequence
  Synthetic
ugcuauuucaguuuccug

SEQ ID NO: 606348 - RNA, 19 nt, Artificial Sequence
  Synthetic
cugcuauuucaguuuccug

SEQ ID NO: 606349 - RNA, 20 nt, Artificial Sequence
  Synthetic
acugcuauuucaguuuccug

SEQ ID NO: 606350 - RNA, 21 nt, Artificial Sequence
  Synthetic
aacugcuauuucaguuuccug

SEQ ID NO: 606351 - RNA, 22 nt, Artificial Sequence
  Synthetic
gaacugcuauuucaguuuccug

SEQ ID NO: 606352 - RNA, 23 nt, Artificial Sequence
  Synthetic
ugaacugcuauuucaguuuccug

SEQ ID NO: 606353 - RNA, 24 nt, Artificial Sequence
  Synthetic
uugaacugcuauuucaguuuccug

SEQ ID NO: 606354 - RNA, 18 nt, Artificial Sequence
  Synthetic
uugagauuauuuuuccug

SEQ ID NO: 606355 - RNA, 19 nt, Artificial Sequence
  Synthetic
cuugagauuauuuuuccug

SEQ ID NO: 606356 - RNA, 20 nt, Artificial Sequence
  Synthetic
ucuugagauuauuuuuccug

SEQ ID NO: 606357 - RNA, 21 nt, Artificial Sequence
  Synthetic
uucuugagauuauuuuuccug

SEQ ID NO: 606358 - RNA, 22 nt, Artificial Sequence
  Synthetic
guucuugagauuauuuuuccug

SEQ ID NO: 606359 - RNA, 23 nt, Artificial Sequence
  Synthetic
uguucuugagauuauuuuuccug

SEQ ID NO: 606360 - RNA, 24 nt, Artificial Sequence
  Synthetic
auguucuugagauuauuuuuccug

SEQ ID NO: 606361 - RNA, 18 nt, Artificial Sequence
  Synthetic
uuuuuuuugcaaaagcug

SEQ ID NO: 606362 - RNA, 19 nt, Artificial Sequence
  Synthetic
uuuuuuuuugcaaaagcug

SEQ ID NO: 606363 - RNA, 20 nt, Artificial Sequence
  Synthetic
uuuuuuuuuugcaaaagcug

SEQ ID NO: 606364 - RNA, 21 nt, Artificial Sequence
  Synthetic
uuuuuuuuuuugcaaaagcug

SEQ ID NO: 606365 - RNA, 22 nt, Artificial Sequence
  Synthetic
uuuuuuuuuuuugcaaaagcug

SEQ ID NO: 606366 - RNA, 23 nt, Artificial Sequence
  Synthetic
uuuuuuuuuuuuugcaaaagcug

SEQ ID NO: 606367 - RNA, 24 nt, Artificial Sequence
  Synthetic
guuuuuuuuuuuuugcaaaagcug

SEQ ID NO: 606368 - RNA, 18 nt, Artificial Sequence
  Synthetic
gcagggguagaaaagcug

SEQ ID NO: 606369 - RNA, 19 nt, Artificial Sequence
  Synthetic
ggcagggguagaaaagcug

SEQ ID NO: 606370 - RNA, 20 nt, Artificial Sequence
  Synthetic
aggcagggguagaaaagcug

SEQ ID NO: 606371 - RNA, 21 nt, Artificial Sequence
  Synthetic
aaggcagggguagaaaagcug

SEQ ID NO: 606372 - RNA, 22 nt, Artificial Sequence
  Synthetic
uaaggcagggguagaaaagcug

SEQ ID NO: 606373 - RNA, 23 nt, Artificial Sequence
  Synthetic
cuaaggcagggguagaaaagcug

SEQ ID NO: 606374 - RNA, 24 nt, Artificial Sequence
  Synthetic
ucuaaggcagggguagaaaagcug

SEQ ID NO: 606375 - RNA, 18 nt, Artificial Sequence
  Synthetic
aagugcauguaaaagcug

SEQ ID NO: 606376 - RNA, 19 nt, Artificial Sequence
  Synthetic
uaagugcauguaaaagcug

SEQ ID NO: 606377 - RNA, 20 nt, Artificial Sequence
  Synthetic
auaagugcauguaaaagcug

SEQ ID NO: 606378 - RNA, 21 nt, Artificial Sequence
  Synthetic
gauaagugcauguaaaagcug

SEQ ID NO: 606379 - RNA, 22 nt, Artificial Sequence
  Synthetic
agauaagugcauguaaaagcug

SEQ ID NO: 606380 - RNA, 23 nt, Artificial Sequence
  Synthetic
cagauaagugcauguaaaagcug

SEQ ID NO: 606381 - RNA, 24 nt, Artificial Sequence
  Synthetic
acagauaagugcauguaaaagcug

SEQ ID NO: 606382 - RNA, 18 nt, Artificial Sequence
  Synthetic
cugucacuaacaaagcug

SEQ ID NO: 606383 - RNA, 19 nt, Artificial Sequence
  Synthetic
ccugucacuaacaaagcug

SEQ ID NO: 606384 - RNA, 20 nt, Artificial Sequence
  Synthetic
cccugucacuaacaaagcug

SEQ ID NO: 606385 - RNA, 21 nt, Artificial Sequence
  Synthetic
ucccugucacuaacaaagcug

SEQ ID NO: 606386 - RNA, 22 nt, Artificial Sequence
  Synthetic
aucccugucacuaacaaagcug

SEQ ID NO: 606387 - RNA, 23 nt, Artificial Sequence
  Synthetic
aaucccugucacuaacaaagcug

SEQ ID NO: 606388 - RNA, 24 nt, Artificial Sequence
  Synthetic
aaaucccugucacuaacaaagcug

SEQ ID NO: 606389 - RNA, 18 nt, Artificial Sequence
  Synthetic
auuuucuucacaaagcug

SEQ ID NO: 606390 - RNA, 19 nt, Artificial Sequence
  Synthetic
uauuuucuucacaaagcug

SEQ ID NO: 606391 - RNA, 20 nt, Artificial Sequence
  Synthetic
cuauuuucuucacaaagcug

SEQ ID NO: 606392 - RNA, 21 nt, Artificial Sequence
  Synthetic
ucuauuuucuucacaaagcug

SEQ ID NO: 606393 - RNA, 22 nt, Artificial Sequence
  Synthetic
gucuauuuucuucacaaagcug

SEQ ID NO: 606394 - RNA, 23 nt, Artificial Sequence
  Synthetic
agucuauuuucuucacaaagcug

SEQ ID NO: 606395 - RNA, 24 nt, Artificial Sequence
  Synthetic
uagucuauuuucuucacaaagcug

SEQ ID NO: 606396 - RNA, 18 nt, Artificial Sequence
  Synthetic
uuaauaauaugaaagcug

SEQ ID NO: 606397 - RNA, 19 nt, Artificial Sequence
  Synthetic
uuuaauaauaugaaagcug

SEQ ID NO: 606398 - RNA, 20 nt, Artificial Sequence
  Synthetic
guuuaauaauaugaaagcug

SEQ ID NO: 606399 - RNA, 21 nt, Artificial Sequence
  Synthetic
aguuuaauaauaugaaagcug

SEQ ID NO: 606400 - RNA, 22 nt, Artificial Sequence
  Synthetic
aaguuuaauaauaugaaagcug

SEQ ID NO: 606401 - RNA, 23 nt, Artificial Sequence
  Synthetic
aaaguuuaauaauaugaaagcug

SEQ ID NO: 606402 - RNA, 24 nt, Artificial Sequence
  Synthetic
caaaguuuaauaauaugaaagcug

SEQ ID NO: 606403 - RNA, 18 nt, Artificial Sequence
  Synthetic
caugguaagguaaagcug

SEQ ID NO: 606404 - RNA, 19 nt, Artificial Sequence
  Synthetic
ccaugguaagguaaagcug

SEQ ID NO: 606405 - RNA, 20 nt, Artificial Sequence
  Synthetic
accaugguaagguaaagcug

SEQ ID NO: 606406 - RNA, 21 nt, Artificial Sequence
  Synthetic
aaccaugguaagguaaagcug

SEQ ID NO: 606407 - RNA, 22 nt, Artificial Sequence
  Synthetic
uaaccaugguaagguaaagcug

SEQ ID NO: 606408 - RNA, 23 nt, Artificial Sequence
  Synthetic
auaaccaugguaagguaaagcug

SEQ ID NO: 606409 - RNA, 24 nt, Artificial Sequence
  Synthetic
aauaaccaugguaagguaaagcug

SEQ ID NO: 606410 - RNA, 18 nt, Artificial Sequence
  Synthetic
gugauuuaaaacaagcug

SEQ ID NO: 606411 - RNA, 19 nt, Artificial Sequence
  Synthetic
agugauuuaaaacaagcug

SEQ ID NO: 606412 - RNA, 20 nt, Artificial Sequence
  Synthetic
cagugauuuaaaacaagcug

SEQ ID NO: 606413 - RNA, 21 nt, Artificial Sequence
  Synthetic
ucagugauuuaaaacaagcug

SEQ ID NO: 606414 - RNA, 22 nt, Artificial Sequence
  Synthetic
cucagugauuuaaaacaagcug

SEQ ID NO: 606415 - RNA, 23 nt, Artificial Sequence
  Synthetic
ccucagugauuuaaaacaagcug

SEQ ID NO: 606416 - RNA, 24 nt, Artificial Sequence
  Synthetic
cccucagugauuuaaaacaagcug

SEQ ID NO: 606417 - RNA, 18 nt, Artificial Sequence
  Synthetic
agcauucaccacaagcug

SEQ ID NO: 606418 - RNA, 19 nt, Artificial Sequence
  Synthetic
cagcauucaccacaagcug

SEQ ID NO: 606419 - RNA, 20 nt, Artificial Sequence
  Synthetic
ucagcauucaccacaagcug

SEQ ID NO: 606420 - RNA, 21 nt, Artificial Sequence
  Synthetic
cucagcauucaccacaagcug

SEQ ID NO: 606421 - RNA, 22 nt, Artificial Sequence
  Synthetic
ucucagcauucaccacaagcug

SEQ ID NO: 606422 - RNA, 23 nt, Artificial Sequence
  Synthetic
cucucagcauucaccacaagcug

SEQ ID NO: 606423 - RNA, 24 nt, Artificial Sequence
  Synthetic
ucucucagcauucaccacaagcug

SEQ ID NO: 606424 - RNA, 18 nt, Artificial Sequence
  Synthetic
cccaccaaaaccaagcug

SEQ ID NO: 606425 - RNA, 19 nt, Artificial Sequence
  Synthetic
acccaccaaaaccaagcug

SEQ ID NO: 606426 - RNA, 20 nt, Artificial Sequence
  Synthetic
aacccaccaaaaccaagcug

SEQ ID NO: 606427 - RNA, 21 nt, Artificial Sequence
  Synthetic
aaacccaccaaaaccaagcug

SEQ ID NO: 606428 - RNA, 22 nt, Artificial Sequence
  Synthetic
aaaacccaccaaaaccaagcug

SEQ ID NO: 606429 - RNA, 23 nt, Artificial Sequence
  Synthetic
caaaacccaccaaaaccaagcug

SEQ ID NO: 606430 - RNA, 24 nt, Artificial Sequence
  Synthetic
ucaaaacccaccaaaaccaagcug

SEQ ID NO: 606431 - RNA, 18 nt, Artificial Sequence
  Synthetic
aacucaaccaccaagcug

SEQ ID NO: 606432 - RNA, 19 nt, Artificial Sequence
  Synthetic
gaacucaaccaccaagcug

SEQ ID NO: 606433 - RNA, 20 nt, Artificial Sequence
  Synthetic
agaacucaaccaccaagcug

SEQ ID NO: 606434 - RNA, 21 nt, Artificial Sequence
  Synthetic
cagaacucaaccaccaagcug

SEQ ID NO: 606435 - RNA, 22 nt, Artificial Sequence
  Synthetic
acagaacucaaccaccaagcug

SEQ ID NO: 606436 - RNA, 23 nt, Artificial Sequence
  Synthetic
cacagaacucaaccaccaagcug

SEQ ID NO: 606437 - RNA, 24 nt, Artificial Sequence
  Synthetic
ucacagaacucaaccaccaagcug

SEQ ID NO: 606438 - RNA, 18 nt, Artificial Sequence
  Synthetic
aaucuauaggccaagcug

SEQ ID NO: 606439 - RNA, 19 nt, Artificial Sequence
  Synthetic
gaaucuauaggccaagcug

SEQ ID NO: 606440 - RNA, 20 nt, Artificial Sequence
  Synthetic
cgaaucuauaggccaagcug

SEQ ID NO: 606441 - RNA, 21 nt, Artificial Sequence
  Synthetic
ucgaaucuauaggccaagcug

SEQ ID NO: 606442 - RNA, 22 nt, Artificial Sequence
  Synthetic
uucgaaucuauaggccaagcug

SEQ ID NO: 606443 - RNA, 23 nt, Artificial Sequence
  Synthetic
cuucgaaucuauaggccaagcug

SEQ ID NO: 606444 - RNA, 24 nt, Artificial Sequence
  Synthetic
ccuucgaaucuauaggccaagcug

SEQ ID NO: 606445 - RNA, 18 nt, Artificial Sequence
  Synthetic
ucucacuaucucaagcug

SEQ ID NO: 606446 - RNA, 19 nt, Artificial Sequence
  Synthetic
uucucacuaucucaagcug

SEQ ID NO: 606447 - RNA, 20 nt, Artificial Sequence
  Synthetic
uuucucacuaucucaagcug

SEQ ID NO: 606448 - RNA, 21 nt, Artificial Sequence
  Synthetic
uuuucucacuaucucaagcug

SEQ ID NO: 606449 - RNA, 22 nt, Artificial Sequence
  Synthetic
uuuuucucacuaucucaagcug

SEQ ID NO: 606450 - RNA, 23 nt, Artificial Sequence
  Synthetic
guuuuucucacuaucucaagcug

SEQ ID NO: 606451 - RNA, 24 nt, Artificial Sequence
  Synthetic
uguuuuucucacuaucucaagcug

SEQ ID NO: 606452 - RNA, 18 nt, Artificial Sequence
  Synthetic
ucacuucuauucaagcug

SEQ ID NO: 606453 - RNA, 19 nt, Artificial Sequence
  Synthetic
uucacuucuauucaagcug

SEQ ID NO: 606454 - RNA, 20 nt, Artificial Sequence
  Synthetic
cuucacuucuauucaagcug

SEQ ID NO: 606455 - RNA, 21 nt, Artificial Sequence
  Synthetic
acuucacuucuauucaagcug

SEQ ID NO: 606456 - RNA, 22 nt, Artificial Sequence
  Synthetic
gacuucacuucuauucaagcug

SEQ ID NO: 606457 - RNA, 23 nt, Artificial Sequence
  Synthetic
agacuucacuucuauucaagcug

SEQ ID NO: 606458 - RNA, 24 nt, Artificial Sequence
  Synthetic
uagacuucacuucuauucaagcug

SEQ ID NO: 606459 - RNA, 18 nt, Artificial Sequence
  Synthetic
uaucaccagcagaagcug

SEQ ID NO: 606460 - RNA, 19 nt, Artificial Sequence
  Synthetic
guaucaccagcagaagcug

SEQ ID NO: 606461 - RNA, 20 nt, Artificial Sequence
  Synthetic
aguaucaccagcagaagcug

SEQ ID NO: 606462 - RNA, 21 nt, Artificial Sequence
  Synthetic
gaguaucaccagcagaagcug

SEQ ID NO: 606463 - RNA, 22 nt, Artificial Sequence
  Synthetic
ugaguaucaccagcagaagcug

SEQ ID NO: 606464 - RNA, 23 nt, Artificial Sequence
  Synthetic
cugaguaucaccagcagaagcug

SEQ ID NO: 606465 - RNA, 24 nt, Artificial Sequence
  Synthetic
ccugaguaucaccagcagaagcug

SEQ ID NO: 606466 - RNA, 18 nt, Artificial Sequence
  Synthetic
cagugcuuugggaagcug

SEQ ID NO: 606467 - RNA, 19 nt, Artificial Sequence
  Synthetic
ccagugcuuugggaagcug

SEQ ID NO: 606468 - RNA, 20 nt, Artificial Sequence
  Synthetic
uccagugcuuugggaagcug

SEQ ID NO: 606469 - RNA, 21 nt, Artificial Sequence
  Synthetic
uuccagugcuuugggaagcug

SEQ ID NO: 606470 - RNA, 22 nt, Artificial Sequence
  Synthetic
auuccagugcuuugggaagcug

SEQ ID NO: 606471 - RNA, 23 nt, Artificial Sequence
  Synthetic
aauuccagugcuuugggaagcug

SEQ ID NO: 606472 - RNA, 24 nt, Artificial Sequence
  Synthetic
gaauuccagugcuuugggaagcug

SEQ ID NO: 606473 - RNA, 18 nt, Artificial Sequence
  Synthetic
gugcagaaauugaagcug

SEQ ID NO: 606474 - RNA, 19 nt, Artificial Sequence
  Synthetic
ugugcagaaauugaagcug

SEQ ID NO: 606475 - RNA, 20 nt, Artificial Sequence
  Synthetic
uugugcagaaauugaagcug

SEQ ID NO: 606476 - RNA, 21 nt, Artificial Sequence
  Synthetic
auugugcagaaauugaagcug

SEQ ID NO: 606477 - RNA, 22 nt, Artificial Sequence
  Synthetic
aauugugcagaaauugaagcug

SEQ ID NO: 606478 - RNA, 23 nt, Artificial Sequence
  Synthetic
gaauugugcagaaauugaagcug

SEQ ID NO: 606479 - RNA, 24 nt, Artificial Sequence
  Synthetic
agaauugugcagaaauugaagcug

SEQ ID NO: 606480 - RNA, 18 nt, Artificial Sequence
  Synthetic
uaugcagaagauaagcug

SEQ ID NO: 606481 - RNA, 19 nt, Artificial Sequence
  Synthetic
auaugcagaagauaagcug

SEQ ID NO: 606482 - RNA, 20 nt, Artificial Sequence
  Synthetic
aauaugcagaagauaagcug

SEQ ID NO: 606483 - RNA, 21 nt, Artificial Sequence
  Synthetic
gaauaugcagaagauaagcug

SEQ ID NO: 606484 - RNA, 22 nt, Artificial Sequence
  Synthetic
ggaauaugcagaagauaagcug

SEQ ID NO: 606485 - RNA, 23 nt, Artificial Sequence
  Synthetic
aggaauaugcagaagauaagcug

SEQ ID NO: 606486 - RNA, 24 nt, Artificial Sequence
  Synthetic
uaggaauaugcagaagauaagcug

SEQ ID NO: 606487 - RNA, 18 nt, Artificial Sequence
  Synthetic
cccaagucauauaagcug

SEQ ID NO: 606488 - RNA, 19 nt, Artificial Sequence
  Synthetic
ucccaagucauauaagcug

SEQ ID NO: 606489 - RNA, 20 nt, Artificial Sequence
  Synthetic
aucccaagucauauaagcug

SEQ ID NO: 606490 - RNA, 21 nt, Artificial Sequence
  Synthetic
aaucccaagucauauaagcug

SEQ ID NO: 606491 - RNA, 22 nt, Artificial Sequence
  Synthetic
aaaucccaagucauauaagcug

SEQ ID NO: 606492 - RNA, 23 nt, Artificial Sequence
  Synthetic
uaaaucccaagucauauaagcug

SEQ ID NO: 606493 - RNA, 24 nt, Artificial Sequence
  Synthetic
auaaaucccaagucauauaagcug

SEQ ID NO: 606494 - RNA, 18 nt, Artificial Sequence
  Synthetic
ugagcaagaacuaagcug

SEQ ID NO: 606495 - RNA, 19 nt, Artificial Sequence
  Synthetic
uugagcaagaacuaagcug

SEQ ID NO: 606496 - RNA, 20 nt, Artificial Sequence
  Synthetic
cuugagcaagaacuaagcug

SEQ ID NO: 606497 - RNA, 21 nt, Artificial Sequence
  Synthetic
ccuugagcaagaacuaagcug

SEQ ID NO: 606498 - RNA, 22 nt, Artificial Sequence
  Synthetic
gccuugagcaagaacuaagcug

SEQ ID NO: 606499 - RNA, 23 nt, Artificial Sequence
  Synthetic
ugccuugagcaagaacuaagcug

SEQ ID NO: 606500 - RNA, 24 nt, Artificial Sequence
  Synthetic
uugccuugagcaagaacuaagcug

SEQ ID NO: 606501 - RNA, 18 nt, Artificial Sequence
  Synthetic
ucuuaagaguuuaagcug

SEQ ID NO: 606502 - RNA, 19 nt, Artificial Sequence
  Synthetic
cucuuaagaguuuaagcug

SEQ ID NO: 606503 - RNA, 20 nt, Artificial Sequence
  Synthetic
ucucuuaagaguuuaagcug

SEQ ID NO: 606504 - RNA, 21 nt, Artificial Sequence
  Synthetic
cucucuuaagaguuuaagcug

SEQ ID NO: 606505 - RNA, 22 nt, Artificial Sequence
  Synthetic
ccucucuuaagaguuuaagcug

SEQ ID NO: 606506 - RNA, 23 nt, Artificial Sequence
  Synthetic
accucucuuaagaguuuaagcug

SEQ ID NO: 606507 - RNA, 24 nt, Artificial Sequence
  Synthetic
gaccucucuuaagaguuuaagcug

SEQ ID NO: 606508 - RNA, 18 nt, Artificial Sequence
  Synthetic
aaagguauaaaacagcug

SEQ ID NO: 606509 - RNA, 19 nt, Artificial Sequence
  Synthetic
caaagguauaaaacagcug

SEQ ID NO: 606510 - RNA, 20 nt, Artificial Sequence
  Synthetic
gcaaagguauaaaacagcug

SEQ ID NO: 606511 - RNA, 21 nt, Artificial Sequence
  Synthetic
ugcaaagguauaaaacagcug

SEQ ID NO: 606512 - RNA, 22 nt, Artificial Sequence
  Synthetic
uugcaaagguauaaaacagcug

SEQ ID NO: 606513 - RNA, 23 nt, Artificial Sequence
  Synthetic
auugcaaagguauaaaacagcug

SEQ ID NO: 606514 - RNA, 24 nt, Artificial Sequence
  Synthetic
gauugcaaagguauaaaacagcug

SEQ ID NO: 606515 - RNA, 18 nt, Artificial Sequence
  Synthetic
ugccuaucgggacagcug

SEQ ID NO: 606516 - RNA, 19 nt, Artificial Sequence
  Synthetic
gugccuaucgggacagcug

SEQ ID NO: 606517 - RNA, 20 nt, Artificial Sequence
  Synthetic
ugugccuaucgggacagcug

SEQ ID NO: 606518 - RNA, 21 nt, Artificial Sequence
  Synthetic
gugugccuaucgggacagcug

SEQ ID NO: 606519 - RNA, 22 nt, Artificial Sequence
  Synthetic
ugugugccuaucgggacagcug

SEQ ID NO: 606520 - RNA, 23 nt, Artificial Sequence
  Synthetic
gugugugccuaucgggacagcug

SEQ ID NO: 606521 - RNA, 24 nt, Artificial Sequence
  Synthetic
ggugugugccuaucgggacagcug

SEQ ID NO: 606522 - RNA, 18 nt, Artificial Sequence
  Synthetic
uauuccccuuuacagcug

SEQ ID NO: 606523 - RNA, 19 nt, Artificial Sequence
  Synthetic
uuauuccccuuuacagcug

SEQ ID NO: 606524 - RNA, 20 nt, Artificial Sequence
  Synthetic
uuuauuccccuuuacagcug

SEQ ID NO: 606525 - RNA, 21 nt, Artificial Sequence
  Synthetic
auuuauuccccuuuacagcug

SEQ ID NO: 606526 - RNA, 22 nt, Artificial Sequence
  Synthetic
uauuuauuccccuuuacagcug

SEQ ID NO: 606527 - RNA, 23 nt, Artificial Sequence
  Synthetic
uuauuuauuccccuuuacagcug

SEQ ID NO: 606528 - RNA, 24 nt, Artificial Sequence
  Synthetic
uuuauuuauuccccuuuacagcug

SEQ ID NO: 606529 - RNA, 18 nt, Artificial Sequence
  Synthetic
ugugauucuuuacagcug

SEQ ID NO: 606530 - RNA, 19 nt, Artificial Sequence
  Synthetic
uugugauucuuuacagcug

SEQ ID NO: 606531 - RNA, 20 nt, Artificial Sequence
  Synthetic
auugugauucuuuacagcug

SEQ ID NO: 606532 - RNA, 21 nt, Artificial Sequence
  Synthetic
uauugugauucuuuacagcug

SEQ ID NO: 606533 - RNA, 22 nt, Artificial Sequence
  Synthetic
auauugugauucuuuacagcug

SEQ ID NO: 606534 - RNA, 23 nt, Artificial Sequence
  Synthetic
cauauugugauucuuuacagcug

SEQ ID NO: 606535 - RNA, 24 nt, Artificial Sequence
  Synthetic
ccauauugugauucuuuacagcug

SEQ ID NO: 606536 - RNA, 18 nt, Artificial Sequence
  Synthetic
aaacucagcagccagcug

SEQ ID NO: 606537 - RNA, 19 nt, Artificial Sequence
  Synthetic
caaacucagcagccagcug

SEQ ID NO: 606538 - RNA, 20 nt, Artificial Sequence
  Synthetic
ucaaacucagcagccagcug

SEQ ID NO: 606539 - RNA, 21 nt, Artificial Sequence
  Synthetic
gucaaacucagcagccagcug

SEQ ID NO: 606540 - RNA, 22 nt, Artificial Sequence
  Synthetic
cgucaaacucagcagccagcug

SEQ ID NO: 606541 - RNA, 23 nt, Artificial Sequence
  Synthetic
ccgucaaacucagcagccagcug

SEQ ID NO: 606542 - RNA, 24 nt, Artificial Sequence
  Synthetic
gccgucaaacucagcagccagcug

SEQ ID NO: 606543 - RNA, 18 nt, Artificial Sequence
  Synthetic
uggcuuccccuccagcug

SEQ ID NO: 606544 - RNA, 19 nt, Artificial Sequence
  Synthetic
auggcuuccccuccagcug

SEQ ID NO: 606545 - RNA, 20 nt, Artificial Sequence
  Synthetic
aauggcuuccccuccagcug

SEQ ID NO: 606546 - RNA, 21 nt, Artificial Sequence
  Synthetic
aaauggcuuccccuccagcug

SEQ ID NO: 606547 - RNA, 22 nt, Artificial Sequence
  Synthetic
gaaauggcuuccccuccagcug

SEQ ID NO: 606548 - RNA, 23 nt, Artificial Sequence
  Synthetic
ggaaauggcuuccccuccagcug

SEQ ID NO: 606549 - RNA, 24 nt, Artificial Sequence
  Synthetic
gggaaauggcuuccccuccagcug

SEQ ID NO: 606550 - RNA, 18 nt, Artificial Sequence
  Synthetic
agauauaaccugcagcug

SEQ ID NO: 606551 - RNA, 19 nt, Artificial Sequence
  Synthetic
cagauauaaccugcagcug

SEQ ID NO: 606552 - RNA, 20 nt, Artificial Sequence
  Synthetic
gcagauauaaccugcagcug

SEQ ID NO: 606553 - RNA, 21 nt, Artificial Sequence
  Synthetic
ggcagauauaaccugcagcug

SEQ ID NO: 606554 - RNA, 22 nt, Artificial Sequence
  Synthetic
aggcagauauaaccugcagcug

SEQ ID NO: 606555 - RNA, 23 nt, Artificial Sequence
  Synthetic
aaggcagauauaaccugcagcug

SEQ ID NO: 606556 - RNA, 24 nt, Artificial Sequence
  Synthetic
caaggcagauauaaccugcagcug

SEQ ID NO: 606557 - RNA, 18 nt, Artificial Sequence
  Synthetic
gaguucucccugcagcug

SEQ ID NO: 606558 - RNA, 19 nt, Artificial Sequence
  Synthetic
ggaguucucccugcagcug

SEQ ID NO: 606559 - RNA, 20 nt, Artificial Sequence
  Synthetic
gggaguucucccugcagcug

SEQ ID NO: 606560 - RNA, 21 nt, Artificial Sequence
  Synthetic
ggggaguucucccugcagcug

SEQ ID NO: 606561 - RNA, 22 nt, Artificial Sequence
  Synthetic
uggggaguucucccugcagcug

SEQ ID NO: 606562 - RNA, 23 nt, Artificial Sequence
  Synthetic
guggggaguucucccugcagcug

SEQ ID NO: 606563 - RNA, 24 nt, Artificial Sequence
  Synthetic
uguggggaguucucccugcagcug

SEQ ID NO: 606564 - RNA, 18 nt, Artificial Sequence
  Synthetic
uaaauuuguauucagcug

SEQ ID NO: 606565 - RNA, 19 nt, Artificial Sequence
  Synthetic
auaaauuuguauucagcug

SEQ ID NO: 606566 - RNA, 20 nt, Artificial Sequence
  Synthetic
aauaaauuuguauucagcug

SEQ ID NO: 606567 - RNA, 21 nt, Artificial Sequence
  Synthetic
uaauaaauuuguauucagcug

SEQ ID NO: 606568 - RNA, 22 nt, Artificial Sequence
  Synthetic
uuaauaaauuuguauucagcug

SEQ ID NO: 606569 - RNA, 23 nt, Artificial Sequence
  Synthetic
cuuaauaaauuuguauucagcug

SEQ ID NO: 606570 - RNA, 24 nt, Artificial Sequence
  Synthetic
gcuuaauaaauuuguauucagcug

SEQ ID NO: 606571 - RNA, 18 nt, Artificial Sequence
  Synthetic
gaagggcuacuucagcug

SEQ ID NO: 606572 - RNA, 19 nt, Artificial Sequence
  Synthetic
ugaagggcuacuucagcug

SEQ ID NO: 606573 - RNA, 20 nt, Artificial Sequence
  Synthetic
uugaagggcuacuucagcug

SEQ ID NO: 606574 - RNA, 21 nt, Artificial Sequence
  Synthetic
uuugaagggcuacuucagcug

SEQ ID NO: 606575 - RNA, 22 nt, Artificial Sequence
  Synthetic
guuugaagggcuacuucagcug

SEQ ID NO: 606576 - RNA, 23 nt, Artificial Sequence
  Synthetic
aguuugaagggcuacuucagcug

SEQ ID NO: 606577 - RNA, 24 nt, Artificial Sequence
  Synthetic
aaguuugaagggcuacuucagcug

SEQ ID NO: 606578 - RNA, 18 nt, Artificial Sequence
  Synthetic
uuucuugucuuucagcug

SEQ ID NO: 606579 - RNA, 19 nt, Artificial Sequence
  Synthetic
uuuucuugucuuucagcug

SEQ ID NO: 606580 - RNA, 20 nt, Artificial Sequence
  Synthetic
uuuuucuugucuuucagcug

SEQ ID NO: 606581 - RNA, 21 nt, Artificial Sequence
  Synthetic
guuuuucuugucuuucagcug

SEQ ID NO: 606582 - RNA, 22 nt, Artificial Sequence
  Synthetic
aguuuuucuugucuuucagcug

SEQ ID NO: 606583 - RNA, 23 nt, Artificial Sequence
  Synthetic
aaguuuuucuugucuuucagcug

SEQ ID NO: 606584 - RNA, 24 nt, Artificial Sequence
  Synthetic
caaguuuuucuugucuuucagcug

SEQ ID NO: 606585 - RNA, 18 nt, Artificial Sequence
  Synthetic
ugugaagagaaagagcug

SEQ ID NO: 606586 - RNA, 19 nt, Artificial Sequence
  Synthetic
gugugaagagaaagagcug

SEQ ID NO: 606587 - RNA, 20 nt, Artificial Sequence
  Synthetic
agugugaagagaaagagcug

SEQ ID NO: 606588 - RNA, 21 nt, Artificial Sequence
  Synthetic
uagugugaagagaaagagcug

SEQ ID NO: 606589 - RNA, 22 nt, Artificial Sequence
  Synthetic
cuagugugaagagaaagagcug

SEQ ID NO: 606590 - RNA, 23 nt, Artificial Sequence
  Synthetic
gcuagugugaagagaaagagcug

SEQ ID NO: 606591 - RNA, 24 nt, Artificial Sequence
  Synthetic
ugcuagugugaagagaaagagcug

SEQ ID NO: 606592 - RNA, 18 nt, Artificial Sequence
  Synthetic
ggcggacugccagagcug

SEQ ID NO: 606593 - RNA, 19 nt, Artificial Sequence
  Synthetic
gggcggacugccagagcug

SEQ ID NO: 606594 - RNA, 20 nt, Artificial Sequence
  Synthetic
cgggcggacugccagagcug

SEQ ID NO: 606595 - RNA, 21 nt, Artificial Sequence
  Synthetic
gcgggcggacugccagagcug

SEQ ID NO: 606596 - RNA, 22 nt, Artificial Sequence
  Synthetic
ggcgggcggacugccagagcug

SEQ ID NO: 606597 - RNA, 23 nt, Artificial Sequence
  Synthetic
aggcgggcggacugccagagcug

SEQ ID NO: 606598 - RNA, 24 nt, Artificial Sequence
  Synthetic
aaggcgggcggacugccagagcug

SEQ ID NO: 606599 - RNA, 18 nt, Artificial Sequence
  Synthetic
cagcuaaagggagagcug

SEQ ID NO: 606600 - RNA, 19 nt, Artificial Sequence
  Synthetic
gcagcuaaagggagagcug

SEQ ID NO: 606601 - RNA, 20 nt, Artificial Sequence
  Synthetic
agcagcuaaagggagagcug

SEQ ID NO: 606602 - RNA, 21 nt, Artificial Sequence
  Synthetic
gagcagcuaaagggagagcug

SEQ ID NO: 606603 - RNA, 22 nt, Artificial Sequence
  Synthetic
agagcagcuaaagggagagcug

SEQ ID NO: 606604 - RNA, 23 nt, Artificial Sequence
  Synthetic
aagagcagcuaaagggagagcug

SEQ ID NO: 606605 - RNA, 24 nt, Artificial Sequence
  Synthetic
gaagagcagcuaaagggagagcug

SEQ ID NO: 606606 - RNA, 18 nt, Artificial Sequence
  Synthetic
gaagagaagauagagcug

SEQ ID NO: 606607 - RNA, 19 nt, Artificial Sequence
  Synthetic
agaagagaagauagagcug

SEQ ID NO: 606608 - RNA, 20 nt, Artificial Sequence
  Synthetic
uagaagagaagauagagcug

SEQ ID NO: 606609 - RNA, 21 nt, Artificial Sequence
  Synthetic
guagaagagaagauagagcug

SEQ ID NO: 606610 - RNA, 22 nt, Artificial Sequence
  Synthetic
gguagaagagaagauagagcug

SEQ ID NO: 606611 - RNA, 23 nt, Artificial Sequence
  Synthetic
ugguagaagagaagauagagcug

SEQ ID NO: 606612 - RNA, 24 nt, Artificial Sequence
  Synthetic
augguagaagagaagauagagcug

SEQ ID NO: 606613 - RNA, 18 nt, Artificial Sequence
  Synthetic
aagugcuuaaaggagcug

SEQ ID NO: 606614 - RNA, 19 nt, Artificial Sequence
  Synthetic
gaagugcuuaaaggagcug

SEQ ID NO: 606615 - RNA, 20 nt, Artificial Sequence
  Synthetic
agaagugcuuaaaggagcug

SEQ ID NO: 606616 - RNA, 21 nt, Artificial Sequence
  Synthetic
gagaagugcuuaaaggagcug

SEQ ID NO: 606617 - RNA, 22 nt, Artificial Sequence
  Synthetic
agagaagugcuuaaaggagcug

SEQ ID NO: 606618 - RNA, 23 nt, Artificial Sequence
  Synthetic
cagagaagugcuuaaaggagcug

SEQ ID NO: 606619 - RNA, 24 nt, Artificial Sequence
  Synthetic
acagagaagugcuuaaaggagcug

SEQ ID NO: 606620 - RNA, 18 nt, Artificial Sequence
  Synthetic
cucaugguugaggagcug

SEQ ID NO: 606621 - RNA, 19 nt, Artificial Sequence
  Synthetic
gcucaugguugaggagcug

SEQ ID NO: 606622 - RNA, 20 nt, Artificial Sequence
  Synthetic
agcucaugguugaggagcug

SEQ ID NO: 606623 - RNA, 21 nt, Artificial Sequence
  Synthetic
cagcucaugguugaggagcug

SEQ ID NO: 606624 - RNA, 22 nt, Artificial Sequence
  Synthetic
acagcucaugguugaggagcug

SEQ ID NO: 606625 - RNA, 23 nt, Artificial Sequence
  Synthetic
aacagcucaugguugaggagcug

SEQ ID NO: 606626 - RNA, 24 nt, Artificial Sequence
  Synthetic
gaacagcucaugguugaggagcug

SEQ ID NO: 606627 - RNA, 18 nt, Artificial Sequence
  Synthetic
uuuugugugggggagcug

SEQ ID NO: 606628 - RNA, 19 nt, Artificial Sequence
  Synthetic
uuuuugugugggggagcug

SEQ ID NO: 606629 - RNA, 20 nt, Artificial Sequence
  Synthetic
cuuuuugugugggggagcug

SEQ ID NO: 606630 - RNA, 21 nt, Artificial Sequence
  Synthetic
ucuuuuugugugggggagcug

SEQ ID NO: 606631 - RNA, 22 nt, Artificial Sequence
  Synthetic
uucuuuuugugugggggagcug

SEQ ID NO: 606632 - RNA, 23 nt, Artificial Sequence
  Synthetic
auucuuuuugugugggggagcug

SEQ ID NO: 606633 - RNA, 24 nt, Artificial Sequence
  Synthetic
cauucuuuuugugugggggagcug

SEQ ID NO: 606634 - RNA, 18 nt, Artificial Sequence
  Synthetic
cagggacugccugagcug

SEQ ID NO: 606635 - RNA, 19 nt, Artificial Sequence
  Synthetic
ucagggacugccugagcug

SEQ ID NO: 606636 - RNA, 20 nt, Artificial Sequence
  Synthetic
uucagggacugccugagcug

SEQ ID NO: 606637 - RNA, 21 nt, Artificial Sequence
  Synthetic
cuucagggacugccugagcug

SEQ ID NO: 606638 - RNA, 22 nt, Artificial Sequence
  Synthetic
ccuucagggacugccugagcug

SEQ ID NO: 606639 - RNA, 23 nt, Artificial Sequence
  Synthetic
cccuucagggacugccugagcug

SEQ ID NO: 606640 - RNA, 24 nt, Artificial Sequence
  Synthetic
ucccuucagggacugccugagcug

SEQ ID NO: 606641 - RNA, 18 nt, Artificial Sequence
  Synthetic
aaaaggcccgcugagcug

SEQ ID NO: 606642 - RNA, 19 nt, Artificial Sequence
  Synthetic
aaaaaggcccgcugagcug

SEQ ID NO: 606643 - RNA, 20 nt, Artificial Sequence
  Synthetic
gaaaaaggcccgcugagcug

SEQ ID NO: 606644 - RNA, 21 nt, Artificial Sequence
  Synthetic
agaaaaaggcccgcugagcug

SEQ ID NO: 606645 - RNA, 22 nt, Artificial Sequence
  Synthetic
gagaaaaaggcccgcugagcug

SEQ ID NO: 606646 - RNA, 23 nt, Artificial Sequence
  Synthetic
ggagaaaaaggcccgcugagcug

SEQ ID NO: 606647 - RNA, 24 nt, Artificial Sequence
  Synthetic
gggagaaaaaggcccgcugagcug

SEQ ID NO: 606648 - RNA, 18 nt, Artificial Sequence
  Synthetic
cagauuuuuaaauagcug

SEQ ID NO: 606649 - RNA, 19 nt, Artificial Sequence
  Synthetic
acagauuuuuaaauagcug

SEQ ID NO: 606650 - RNA, 20 nt, Artificial Sequence
  Synthetic
aacagauuuuuaaauagcug

SEQ ID NO: 606651 - RNA, 21 nt, Artificial Sequence
  Synthetic
aaacagauuuuuaaauagcug

SEQ ID NO: 606652 - RNA, 22 nt, Artificial Sequence
  Synthetic
aaaacagauuuuuaaauagcug

SEQ ID NO: 606653 - RNA, 23 nt, Artificial Sequence
  Synthetic
caaaacagauuuuuaaauagcug

SEQ ID NO: 606654 - RNA, 24 nt, Artificial Sequence
  Synthetic
acaaaacagauuuuuaaauagcug

SEQ ID NO: 606655 - RNA, 18 nt, Artificial Sequence
  Synthetic
uggucaucucaauagcug

SEQ ID NO: 606656 - RNA, 19 nt, Artificial Sequence
  Synthetic
auggucaucucaauagcug

SEQ ID NO: 606657 - RNA, 20 nt, Artificial Sequence
  Synthetic
uauggucaucucaauagcug

SEQ ID NO: 606658 - RNA, 21 nt, Artificial Sequence
  Synthetic
cuauggucaucucaauagcug

SEQ ID NO: 606659 - RNA, 22 nt, Artificial Sequence
  Synthetic
ucuauggucaucucaauagcug

SEQ ID NO: 606660 - RNA, 23 nt, Artificial Sequence
  Synthetic
aucuauggucaucucaauagcug

SEQ ID NO: 606661 - RNA, 24 nt, Artificial Sequence
  Synthetic
aaucuauggucaucucaauagcug

SEQ ID NO: 606662 - RNA, 18 nt, Artificial Sequence
  Synthetic
aaaggagaaacauagcug

SEQ ID NO: 606663 - RNA, 19 nt, Artificial Sequence
  Synthetic
gaaaggagaaacauagcug

SEQ ID NO: 606664 - RNA, 20 nt, Artificial Sequence
  Synthetic
agaaaggagaaacauagcug

SEQ ID NO: 606665 - RNA, 21 nt, Artificial Sequence
  Synthetic
aagaaaggagaaacauagcug

SEQ ID NO: 606666 - RNA, 22 nt, Artificial Sequence
  Synthetic
gaagaaaggagaaacauagcug

SEQ ID NO: 606667 - RNA, 23 nt, Artificial Sequence
  Synthetic
ugaagaaaggagaaacauagcug

SEQ ID NO: 606668 - RNA, 24 nt, Artificial Sequence
  Synthetic
uugaagaaaggagaaacauagcug

SEQ ID NO: 606669 - RNA, 18 nt, Artificial Sequence
  Synthetic
aagacguguggauagcug

SEQ ID NO: 606670 - RNA, 19 nt, Artificial Sequence
  Synthetic
uaagacguguggauagcug

SEQ ID NO: 606671 - RNA, 20 nt, Artificial Sequence
  Synthetic
guaagacguguggauagcug

SEQ ID NO: 606672 - RNA, 21 nt, Artificial Sequence
  Synthetic
gguaagacguguggauagcug

SEQ ID NO: 606673 - RNA, 22 nt, Artificial Sequence
  Synthetic
ggguaagacguguggauagcug

SEQ ID NO: 606674 - RNA, 23 nt, Artificial Sequence
  Synthetic
aggguaagacguguggauagcug

SEQ ID NO: 606675 - RNA, 24 nt, Artificial Sequence
  Synthetic
gaggguaagacguguggauagcug

SEQ ID NO: 606676 - RNA, 18 nt, Artificial Sequence
  Synthetic
uaacacuaaugauagcug

SEQ ID NO: 606677 - RNA, 19 nt, Artificial Sequence
  Synthetic
cuaacacuaaugauagcug

SEQ ID NO: 606678 - RNA, 20 nt, Artificial Sequence
  Synthetic
acuaacacuaaugauagcug

SEQ ID NO: 606679 - RNA, 21 nt, Artificial Sequence
  Synthetic
cacuaacacuaaugauagcug

SEQ ID NO: 606680 - RNA, 22 nt, Artificial Sequence
  Synthetic
acacuaacacuaaugauagcug

SEQ ID NO: 606681 - RNA, 23 nt, Artificial Sequence
  Synthetic
uacacuaacacuaaugauagcug

SEQ ID NO: 606682 - RNA, 24 nt, Artificial Sequence
  Synthetic
auacacuaacacuaaugauagcug

SEQ ID NO: 606683 - RNA, 18 nt, Artificial Sequence
  Synthetic
auuucuaacuucuagcug

SEQ ID NO: 606684 - RNA, 19 nt, Artificial Sequence
  Synthetic
cauuucuaacuucuagcug

SEQ ID NO: 606685 - RNA, 20 nt, Artificial Sequence
  Synthetic
acauuucuaacuucuagcug

SEQ ID NO: 606686 - RNA, 21 nt, Artificial Sequence
  Synthetic
aacauuucuaacuucuagcug

SEQ ID NO: 606687 - RNA, 22 nt, Artificial Sequence
  Synthetic
uaacauuucuaacuucuagcug

SEQ ID NO: 606688 - RNA, 23 nt, Artificial Sequence
  Synthetic
uuaacauuucuaacuucuagcug

SEQ ID NO: 606689 - RNA, 24 nt, Artificial Sequence
  Synthetic
cuuaacauuucuaacuucuagcug

SEQ ID NO: 606690 - RNA, 18 nt, Artificial Sequence
  Synthetic
gacagcauuuaguagcug

SEQ ID NO: 606691 - RNA, 19 nt, Artificial Sequence
  Synthetic
ggacagcauuuaguagcug

SEQ ID NO: 606692 - RNA, 20 nt, Artificial Sequence
  Synthetic
uggacagcauuuaguagcug

SEQ ID NO: 606693 - RNA, 21 nt, Artificial Sequence
  Synthetic
guggacagcauuuaguagcug

SEQ ID NO: 606694 - RNA, 22 nt, Artificial Sequence
  Synthetic
aguggacagcauuuaguagcug

SEQ ID NO: 606695 - RNA, 23 nt, Artificial Sequence
  Synthetic
gaguggacagcauuuaguagcug

SEQ ID NO: 606696 - RNA, 24 nt, Artificial Sequence
  Synthetic
ugaguggacagcauuuaguagcug

SEQ ID NO: 606697 - RNA, 18 nt, Artificial Sequence
  Synthetic
ucuagcagcuuguagcug

SEQ ID NO: 606698 - RNA, 19 nt, Artificial Sequence
  Synthetic
gucuagcagcuuguagcug

SEQ ID NO: 606699 - RNA, 20 nt, Artificial Sequence
  Synthetic
ugucuagcagcuuguagcug

SEQ ID NO: 606700 - RNA, 21 nt, Artificial Sequence
  Synthetic
cugucuagcagcuuguagcug

SEQ ID NO: 606701 - RNA, 22 nt, Artificial Sequence
  Synthetic
ccugucuagcagcuuguagcug

SEQ ID NO: 606702 - RNA, 23 nt, Artificial Sequence
  Synthetic
gccugucuagcagcuuguagcug

SEQ ID NO: 606703 - RNA, 24 nt, Artificial Sequence
  Synthetic
ugccugucuagcagcuuguagcug

SEQ ID NO: 606704 - RNA, 18 nt, Artificial Sequence
  Synthetic
ucaauuccuuuguagcug

SEQ ID NO: 606705 - RNA, 19 nt, Artificial Sequence
  Synthetic
cucaauuccuuuguagcug

SEQ ID NO: 606706 - RNA, 20 nt, Artificial Sequence
  Synthetic
acucaauuccuuuguagcug

SEQ ID NO: 606707 - RNA, 21 nt, Artificial Sequence
  Synthetic
aacucaauuccuuuguagcug

SEQ ID NO: 606708 - RNA, 22 nt, Artificial Sequence
  Synthetic
uaacucaauuccuuuguagcug

SEQ ID NO: 606709 - RNA, 23 nt, Artificial Sequence
  Synthetic
cuaacucaauuccuuuguagcug

SEQ ID NO: 606710 - RNA, 24 nt, Artificial Sequence
  Synthetic
ccuaacucaauuccuuuguagcug

SEQ ID NO: 606711 - RNA, 18 nt, Artificial Sequence
  Synthetic
uuuacaagacauuagcug

SEQ ID NO: 606712 - RNA, 19 nt, Artificial Sequence
  Synthetic
uuuuacaagacauuagcug

SEQ ID NO: 606713 - RNA, 20 nt, Artificial Sequence
  Synthetic
cuuuuacaagacauuagcug

SEQ ID NO: 606714 - RNA, 21 nt, Artificial Sequence
  Synthetic
acuuuuacaagacauuagcug

SEQ ID NO: 606715 - RNA, 22 nt, Artificial Sequence
  Synthetic
uacuuuuacaagacauuagcug

SEQ ID NO: 606716 - RNA, 23 nt, Artificial Sequence
  Synthetic
uuacuuuuacaagacauuagcug

SEQ ID NO: 606717 - RNA, 24 nt, Artificial Sequence
  Synthetic
uuuacuuuuacaagacauuagcug

SEQ ID NO: 606718 - RNA, 18 nt, Artificial Sequence
  Synthetic
aaauuuauucauuagcug

SEQ ID NO: 606719 - RNA, 19 nt, Artificial Sequence
  Synthetic
aaaauuuauucauuagcug

SEQ ID NO: 606720 - RNA, 20 nt, Artificial Sequence
  Synthetic
uaaaauuuauucauuagcug

SEQ ID NO: 606721 - RNA, 21 nt, Artificial Sequence
  Synthetic
uuaaaauuuauucauuagcug

SEQ ID NO: 606722 - RNA, 22 nt, Artificial Sequence
  Synthetic
uuuaaaauuuauucauuagcug

SEQ ID NO: 606723 - RNA, 23 nt, Artificial Sequence
  Synthetic
uuuuaaaauuuauucauuagcug

SEQ ID NO: 606724 - RNA, 24 nt, Artificial Sequence
  Synthetic
auuuuaaaauuuauucauuagcug

SEQ ID NO: 606725 - RNA, 18 nt, Artificial Sequence
  Synthetic
gacuguauagcuuagcug

SEQ ID NO: 606726 - RNA, 19 nt, Artificial Sequence
  Synthetic
ugacuguauagcuuagcug

SEQ ID NO: 606727 - RNA, 20 nt, Artificial Sequence
  Synthetic
cugacuguauagcuuagcug

SEQ ID NO: 606728 - RNA, 21 nt, Artificial Sequence
  Synthetic
acugacuguauagcuuagcug

SEQ ID NO: 606729 - RNA, 22 nt, Artificial Sequence
  Synthetic
gacugacuguauagcuuagcug

SEQ ID NO: 606730 - RNA, 23 nt, Artificial Sequence
  Synthetic
agacugacuguauagcuuagcug

SEQ ID NO: 606731 - RNA, 24 nt, Artificial Sequence
  Synthetic
cagacugacuguauagcuuagcug

SEQ ID NO: 606732 - RNA, 18 nt, Artificial Sequence
  Synthetic
gcauauuagaguuagcug

SEQ ID NO: 606733 - RNA, 19 nt, Artificial Sequence
  Synthetic
agcauauuagaguuagcug

SEQ ID NO: 606734 - RNA, 20 nt, Artificial Sequence
  Synthetic
cagcauauuagaguuagcug

SEQ ID NO: 606735 - RNA, 21 nt, Artificial Sequence
  Synthetic
gcagcauauuagaguuagcug

SEQ ID NO: 606736 - RNA, 22 nt, Artificial Sequence
  Synthetic
ugcagcauauuagaguuagcug

SEQ ID NO: 606737 - RNA, 23 nt, Artificial Sequence
  Synthetic
augcagcauauuagaguuagcug

SEQ ID NO: 606738 - RNA, 24 nt, Artificial Sequence
  Synthetic
aaugcagcauauuagaguuagcug

SEQ ID NO: 606739 - RNA, 18 nt, Artificial Sequence
  Synthetic
uuuagagucuguuagcug

SEQ ID NO: 606740 - RNA, 19 nt, Artificial Sequence
  Synthetic
uuuuagagucuguuagcug

SEQ ID NO: 606741 - RNA, 20 nt, Artificial Sequence
  Synthetic
guuuuagagucuguuagcug

SEQ ID NO: 606742 - RNA, 21 nt, Artificial Sequence
  Synthetic
aguuuuagagucuguuagcug

SEQ ID NO: 606743 - RNA, 22 nt, Artificial Sequence
  Synthetic
aaguuuuagagucuguuagcug

SEQ ID NO: 606744 - RNA, 23 nt, Artificial Sequence
  Synthetic
aaaguuuuagagucuguuagcug

SEQ ID NO: 606745 - RNA, 24 nt, Artificial Sequence
  Synthetic
aaaaguuuuagagucuguuagcug

SEQ ID NO: 606746 - RNA, 18 nt, Artificial Sequence
  Synthetic
uuuaaugacuuuuagcug

SEQ ID NO: 606747 - RNA, 19 nt, Artificial Sequence
  Synthetic
auuuaaugacuuuuagcug

SEQ ID NO: 606748 - RNA, 20 nt, Artificial Sequence
  Synthetic
gauuuaaugacuuuuagcug

SEQ ID NO: 606749 - RNA, 21 nt, Artificial Sequence
  Synthetic
agauuuaaugacuuuuagcug

SEQ ID NO: 606750 - RNA, 22 nt, Artificial Sequence
  Synthetic
gagauuuaaugacuuuuagcug

SEQ ID NO: 606751 - RNA, 23 nt, Artificial Sequence
  Synthetic
ugagauuuaaugacuuuuagcug

SEQ ID NO: 606752 - RNA, 24 nt, Artificial Sequence
  Synthetic
uugagauuuaaugacuuuuagcug

SEQ ID NO: 606753 - RNA, 18 nt, Artificial Sequence
  Synthetic
cuacugugauggacgcug

SEQ ID NO: 606754 - RNA, 19 nt, Artificial Sequence
  Synthetic
acuacugugauggacgcug

SEQ ID NO: 606755 - RNA, 20 nt, Artificial Sequence
  Synthetic
gacuacugugauggacgcug

SEQ ID NO: 606756 - RNA, 21 nt, Artificial Sequence
  Synthetic
ugacuacugugauggacgcug

SEQ ID NO: 606757 - RNA, 22 nt, Artificial Sequence
  Synthetic
uugacuacugugauggacgcug

SEQ ID NO: 606758 - RNA, 23 nt, Artificial Sequence
  Synthetic
cuugacuacugugauggacgcug

SEQ ID NO: 606759 - RNA, 24 nt, Artificial Sequence
  Synthetic
gcuugacuacugugauggacgcug

SEQ ID NO: 606760 - RNA, 18 nt, Artificial Sequence
  Synthetic
cagaugcugcugacgcug

SEQ ID NO: 606761 - RNA, 19 nt, Artificial Sequence
  Synthetic
acagaugcugcugacgcug

SEQ ID NO: 606762 - RNA, 20 nt, Artificial Sequence
  Synthetic
gacagaugcugcugacgcug

SEQ ID NO: 606763 - RNA, 21 nt, Artificial Sequence
  Synthetic
ugacagaugcugcugacgcug

SEQ ID NO: 606764 - RNA, 22 nt, Artificial Sequence
  Synthetic
augacagaugcugcugacgcug

SEQ ID NO: 606765 - RNA, 23 nt, Artificial Sequence
  Synthetic
aaugacagaugcugcugacgcug

SEQ ID NO: 606766 - RNA, 24 nt, Artificial Sequence
  Synthetic
aaaugacagaugcugcugacgcug

SEQ ID NO: 606767 - RNA, 18 nt, Artificial Sequence
  Synthetic
gagaaucuaauaccgcug

SEQ ID NO: 606768 - RNA, 19 nt, Artificial Sequence
  Synthetic
ugagaaucuaauaccgcug

SEQ ID NO: 606769 - RNA, 20 nt, Artificial Sequence
  Synthetic
augagaaucuaauaccgcug

SEQ ID NO: 606770 - RNA, 21 nt, Artificial Sequence
  Synthetic
uaugagaaucuaauaccgcug

SEQ ID NO: 606771 - RNA, 22 nt, Artificial Sequence
  Synthetic
cuaugagaaucuaauaccgcug

SEQ ID NO: 606772 - RNA, 23 nt, Artificial Sequence
  Synthetic
ccuaugagaaucuaauaccgcug

SEQ ID NO: 606773 - RNA, 24 nt, Artificial Sequence
  Synthetic
uccuaugagaaucuaauaccgcug

SEQ ID NO: 606774 - RNA, 18 nt, Artificial Sequence
  Synthetic
aacuaugcauaugcgcug

SEQ ID NO: 606775 - RNA, 19 nt, Artificial Sequence
  Synthetic
aaacuaugcauaugcgcug

SEQ ID NO: 606776 - RNA, 20 nt, Artificial Sequence
  Synthetic
caaacuaugcauaugcgcug

SEQ ID NO: 606777 - RNA, 21 nt, Artificial Sequence
  Synthetic
acaaacuaugcauaugcgcug

SEQ ID NO: 606778 - RNA, 22 nt, Artificial Sequence
  Synthetic
aacaaacuaugcauaugcgcug

SEQ ID NO: 606779 - RNA, 23 nt, Artificial Sequence
  Synthetic
gaacaaacuaugcauaugcgcug

SEQ ID NO: 606780 - RNA, 24 nt, Artificial Sequence
  Synthetic
ggaacaaacuaugcauaugcgcug

SEQ ID NO: 606781 - RNA, 18 nt, Artificial Sequence
  Synthetic
uauccccucucuucgcug

SEQ ID NO: 606782 - RNA, 19 nt, Artificial Sequence
  Synthetic
uuauccccucucuucgcug

SEQ ID NO: 606783 - RNA, 20 nt, Artificial Sequence
  Synthetic
uuuauccccucucuucgcug

SEQ ID NO: 606784 - RNA, 21 nt, Artificial Sequence
  Synthetic
cuuuauccccucucuucgcug

SEQ ID NO: 606785 - RNA, 22 nt, Artificial Sequence
  Synthetic
ccuuuauccccucucuucgcug

SEQ ID NO: 606786 - RNA, 23 nt, Artificial Sequence
  Synthetic
gccuuuauccccucucuucgcug

SEQ ID NO: 606787 - RNA, 24 nt, Artificial Sequence
  Synthetic
ugccuuuauccccucucuucgcug

SEQ ID NO: 606788 - RNA, 18 nt, Artificial Sequence
  Synthetic
uggagcuacccaaggcug

SEQ ID NO: 606789 - RNA, 19 nt, Artificial Sequence
  Synthetic
guggagcuacccaaggcug

SEQ ID NO: 606790 - RNA, 20 nt, Artificial Sequence
  Synthetic
aguggagcuacccaaggcug

SEQ ID NO: 606791 - RNA, 21 nt, Artificial Sequence
  Synthetic
gaguggagcuacccaaggcug

SEQ ID NO: 606792 - RNA, 22 nt, Artificial Sequence
  Synthetic
ggaguggagcuacccaaggcug

SEQ ID NO: 606793 - RNA, 23 nt, Artificial Sequence
  Synthetic
aggaguggagcuacccaaggcug

SEQ ID NO: 606794 - RNA, 24 nt, Artificial Sequence
  Synthetic
aaggaguggagcuacccaaggcug

SEQ ID NO: 606795 - RNA, 18 nt, Artificial Sequence
  Synthetic
acuaugcugccaaggcug

SEQ ID NO: 606796 - RNA, 19 nt, Artificial Sequence
  Synthetic
cacuaugcugccaaggcug

SEQ ID NO: 606797 - RNA, 20 nt, Artificial Sequence
  Synthetic
acacuaugcugccaaggcug

SEQ ID NO: 606798 - RNA, 21 nt, Artificial Sequence
  Synthetic
uacacuaugcugccaaggcug

SEQ ID NO: 606799 - RNA, 22 nt, Artificial Sequence
  Synthetic
guacacuaugcugccaaggcug

SEQ ID NO: 606800 - RNA, 23 nt, Artificial Sequence
  Synthetic
gguacacuaugcugccaaggcug

SEQ ID NO: 606801 - RNA, 24 nt, Artificial Sequence
  Synthetic
agguacacuaugcugccaaggcug

SEQ ID NO: 606802 - RNA, 18 nt, Artificial Sequence
  Synthetic
agaagcgggggaaggcug

SEQ ID NO: 606803 - RNA, 19 nt, Artificial Sequence
  Synthetic
gagaagcgggggaaggcug

SEQ ID NO: 606804 - RNA, 20 nt, Artificial Sequence
  Synthetic
agagaagcgggggaaggcug

SEQ ID NO: 606805 - RNA, 21 nt, Artificial Sequence
  Synthetic
gagagaagcgggggaaggcug

SEQ ID NO: 606806 - RNA, 22 nt, Artificial Sequence
  Synthetic
agagagaagcgggggaaggcug

SEQ ID NO: 606807 - RNA, 23 nt, Artificial Sequence
  Synthetic
gagagagaagcgggggaaggcug

SEQ ID NO: 606808 - RNA, 24 nt, Artificial Sequence
  Synthetic
agagagagaagcgggggaaggcug

SEQ ID NO: 606809 - RNA, 18 nt, Artificial Sequence
  Synthetic
uuuggggagugaaggcug

SEQ ID NO: 606810 - RNA, 19 nt, Artificial Sequence
  Synthetic
uuuuggggagugaaggcug

SEQ ID NO: 606811 - RNA, 20 nt, Artificial Sequence
  Synthetic
cuuuuggggagugaaggcug

SEQ ID NO: 606812 - RNA, 21 nt, Artificial Sequence
  Synthetic
ucuuuuggggagugaaggcug

SEQ ID NO: 606813 - RNA, 22 nt, Artificial Sequence
  Synthetic
aucuuuuggggagugaaggcug

SEQ ID NO: 606814 - RNA, 23 nt, Artificial Sequence
  Synthetic
uaucuuuuggggagugaaggcug

SEQ ID NO: 606815 - RNA, 24 nt, Artificial Sequence
  Synthetic
uuaucuuuuggggagugaaggcug

SEQ ID NO: 606816 - RNA, 18 nt, Artificial Sequence
  Synthetic
aaaacaaaacacaggcug

SEQ ID NO: 606817 - RNA, 19 nt, Artificial Sequence
  Synthetic
caaaacaaaacacaggcug

SEQ ID NO: 606818 - RNA, 20 nt, Artificial Sequence
  Synthetic
acaaaacaaaacacaggcug

SEQ ID NO: 606819 - RNA, 21 nt, Artificial Sequence
  Synthetic
cacaaaacaaaacacaggcug

SEQ ID NO: 606820 - RNA, 22 nt, Artificial Sequence
  Synthetic
ccacaaaacaaaacacaggcug

SEQ ID NO: 606821 - RNA, 23 nt, Artificial Sequence
  Synthetic
gccacaaaacaaaacacaggcug

SEQ ID NO: 606822 - RNA, 24 nt, Artificial Sequence
  Synthetic
agccacaaaacaaaacacaggcug

SEQ ID NO: 606823 - RNA, 18 nt, Artificial Sequence
  Synthetic
ucauuaaaacacaggcug

SEQ ID NO: 606824 - RNA, 19 nt, Artificial Sequence
  Synthetic
cucauuaaaacacaggcug

SEQ ID NO: 606825 - RNA, 20 nt, Artificial Sequence
  Synthetic
gcucauuaaaacacaggcug

SEQ ID NO: 606826 - RNA, 21 nt, Artificial Sequence
  Synthetic
ggcucauuaaaacacaggcug

SEQ ID NO: 606827 - RNA, 22 nt, Artificial Sequence
  Synthetic
gggcucauuaaaacacaggcug

SEQ ID NO: 606828 - RNA, 23 nt, Artificial Sequence
  Synthetic
agggcucauuaaaacacaggcug

SEQ ID NO: 606829 - RNA, 24 nt, Artificial Sequence
  Synthetic
gagggcucauuaaaacacaggcug

SEQ ID NO: 606830 - RNA, 18 nt, Artificial Sequence
  Synthetic
gcucuguugcccaggcug

SEQ ID NO: 606831 - RNA, 19 nt, Artificial Sequence
  Synthetic
ugcucuguugcccaggcug

SEQ ID NO: 606832 - RNA, 20 nt, Artificial Sequence
  Synthetic
uugcucuguugcccaggcug

SEQ ID NO: 606833 - RNA, 21 nt, Artificial Sequence
  Synthetic
cuugcucuguugcccaggcug

SEQ ID NO: 606834 - RNA, 22 nt, Artificial Sequence
  Synthetic
ucuugcucuguugcccaggcug

SEQ ID NO: 606835 - RNA, 23 nt, Artificial Sequence
  Synthetic
gucuugcucuguugcccaggcug

SEQ ID NO: 606836 - RNA, 24 nt, Artificial Sequence
  Synthetic
agucuugcucuguugcccaggcug

SEQ ID NO: 606837 - RNA, 18 nt, Artificial Sequence
  Synthetic
cuuaucugcagcaggcug

SEQ ID NO: 606838 - RNA, 19 nt, Artificial Sequence
  Synthetic
ucuuaucugcagcaggcug

SEQ ID NO: 606839 - RNA, 20 nt, Artificial Sequence
  Synthetic
uucuuaucugcagcaggcug

SEQ ID NO: 606840 - RNA, 21 nt, Artificial Sequence
  Synthetic
auucuuaucugcagcaggcug

SEQ ID NO: 606841 - RNA, 22 nt, Artificial Sequence
  Synthetic
cauucuuaucugcagcaggcug

SEQ ID NO: 606842 - RNA, 23 nt, Artificial Sequence
  Synthetic
ucauucuuaucugcagcaggcug

SEQ ID NO: 606843 - RNA, 24 nt, Artificial Sequence
  Synthetic
cucauucuuaucugcagcaggcug

SEQ ID NO: 606844 - RNA, 18 nt, Artificial Sequence
  Synthetic
uuaaguagcaucaggcug

SEQ ID NO: 606845 - RNA, 19 nt, Artificial Sequence
  Synthetic
uuuaaguagcaucaggcug

SEQ ID NO: 606846 - RNA, 20 nt, Artificial Sequence
  Synthetic
uuuuaaguagcaucaggcug

SEQ ID NO: 606847 - RNA, 21 nt, Artificial Sequence
  Synthetic
cuuuuaaguagcaucaggcug

SEQ ID NO: 606848 - RNA, 22 nt, Artificial Sequence
  Synthetic
ucuuuuaaguagcaucaggcug

SEQ ID NO: 606849 - RNA, 23 nt, Artificial Sequence
  Synthetic
aucuuuuaaguagcaucaggcug

SEQ ID NO: 606850 - RNA, 24 nt, Artificial Sequence
  Synthetic
uaucuuuuaaguagcaucaggcug

SEQ ID NO: 606851 - RNA, 18 nt, Artificial Sequence
  Synthetic
cuguguggacagaggcug

SEQ ID NO: 606852 - RNA, 19 nt, Artificial Sequence
  Synthetic
acuguguggacagaggcug

SEQ ID NO: 606853 - RNA, 20 nt, Artificial Sequence
  Synthetic
aacuguguggacagaggcug

SEQ ID NO: 606854 - RNA, 21 nt, Artificial Sequence
  Synthetic
aaacuguguggacagaggcug

SEQ ID NO: 606855 - RNA, 22 nt, Artificial Sequence
  Synthetic
caaacuguguggacagaggcug

SEQ ID NO: 606856 - RNA, 23 nt, Artificial Sequence
  Synthetic
ccaaacuguguggacagaggcug

SEQ ID NO: 606857 - RNA, 24 nt, Artificial Sequence
  Synthetic
accaaacuguguggacagaggcug

SEQ ID NO: 606858 - RNA, 18 nt, Artificial Sequence
  Synthetic
ugcauguugcggaggcug

SEQ ID NO: 606859 - RNA, 19 nt, Artificial Sequence
  Synthetic
cugcauguugcggaggcug

SEQ ID NO: 606860 - RNA, 20 nt, Artificial Sequence
  Synthetic
ucugcauguugcggaggcug

SEQ ID NO: 606861 - RNA, 21 nt, Artificial Sequence
  Synthetic
gucugcauguugcggaggcug

SEQ ID NO: 606862 - RNA, 22 nt, Artificial Sequence
  Synthetic
ggucugcauguugcggaggcug

SEQ ID NO: 606863 - RNA, 23 nt, Artificial Sequence
  Synthetic
uggucugcauguugcggaggcug

SEQ ID NO: 606864 - RNA, 24 nt, Artificial Sequence
  Synthetic
cuggucugcauguugcggaggcug

SEQ ID NO: 606865 - RNA, 18 nt, Artificial Sequence
  Synthetic
uauaucauacauaggcug

SEQ ID NO: 606866 - RNA, 19 nt, Artificial Sequence
  Synthetic
uuauaucauacauaggcug

SEQ ID NO: 606867 - RNA, 20 nt, Artificial Sequence
  Synthetic
guuauaucauacauaggcug

SEQ ID NO: 606868 - RNA, 21 nt, Artificial Sequence
  Synthetic
gguuauaucauacauaggcug

SEQ ID NO: 606869 - RNA, 22 nt, Artificial Sequence
  Synthetic
ugguuauaucauacauaggcug

SEQ ID NO: 606870 - RNA, 23 nt, Artificial Sequence
  Synthetic
cugguuauaucauacauaggcug

SEQ ID NO: 606871 - RNA, 24 nt, Artificial Sequence
  Synthetic
ucugguuauaucauacauaggcug

SEQ ID NO: 606872 - RNA, 18 nt, Artificial Sequence
  Synthetic
uggcuacucaguaggcug

SEQ ID NO: 606873 - RNA, 19 nt, Artificial Sequence
  Synthetic
cuggcuacucaguaggcug

SEQ ID NO: 606874 - RNA, 20 nt, Artificial Sequence
  Synthetic
ccuggcuacucaguaggcug

SEQ ID NO: 606875 - RNA, 21 nt, Artificial Sequence
  Synthetic
uccuggcuacucaguaggcug

SEQ ID NO: 606876 - RNA, 22 nt, Artificial Sequence
  Synthetic
auccuggcuacucaguaggcug

SEQ ID NO: 606877 - RNA, 23 nt, Artificial Sequence
  Synthetic
aauccuggcuacucaguaggcug

SEQ ID NO: 606878 - RNA, 24 nt, Artificial Sequence
  Synthetic
uaauccuggcuacucaguaggcug

SEQ ID NO: 606879 - RNA, 18 nt, Artificial Sequence
  Synthetic
ggugguugcuaagggcug

SEQ ID NO: 606880 - RNA, 19 nt, Artificial Sequence
  Synthetic
uggugguugcuaagggcug

SEQ ID NO: 606881 - RNA, 20 nt, Artificial Sequence
  Synthetic
auggugguugcuaagggcug

SEQ ID NO: 606882 - RNA, 21 nt, Artificial Sequence
  Synthetic
aauggugguugcuaagggcug

SEQ ID NO: 606883 - RNA, 22 nt, Artificial Sequence
  Synthetic
caauggugguugcuaagggcug

SEQ ID NO: 606884 - RNA, 23 nt, Artificial Sequence
  Synthetic
acaauggugguugcuaagggcug

SEQ ID NO: 606885 - RNA, 24 nt, Artificial Sequence
  Synthetic
uacaauggugguugcuaagggcug

SEQ ID NO: 606886 - RNA, 18 nt, Artificial Sequence
  Synthetic
ugaaauagaugagggcug

SEQ ID NO: 606887 - RNA, 19 nt, Artificial Sequence
  Synthetic
gugaaauagaugagggcug

SEQ ID NO: 606888 - RNA, 20 nt, Artificial Sequence
  Synthetic
ugugaaauagaugagggcug

SEQ ID NO: 606889 - RNA, 21 nt, Artificial Sequence
  Synthetic
cugugaaauagaugagggcug

SEQ ID NO: 606890 - RNA, 22 nt, Artificial Sequence
  Synthetic
acugugaaauagaugagggcug

SEQ ID NO: 606891 - RNA, 23 nt, Artificial Sequence
  Synthetic
uacugugaaauagaugagggcug

SEQ ID NO: 606892 - RNA, 24 nt, Artificial Sequence
  Synthetic
cuacugugaaauagaugagggcug

SEQ ID NO: 606893 - RNA, 18 nt, Artificial Sequence
  Synthetic
gcugguccuugagggcug

SEQ ID NO: 606894 - RNA, 19 nt, Artificial Sequence
  Synthetic
ggcugguccuugagggcug

SEQ ID NO: 606895 - RNA, 20 nt, Artificial Sequence
  Synthetic
uggcugguccuugagggcug

SEQ ID NO: 606896 - RNA, 21 nt, Artificial Sequence
  Synthetic
uuggcugguccuugagggcug

SEQ ID NO: 606897 - RNA, 22 nt, Artificial Sequence
  Synthetic
uuuggcugguccuugagggcug

SEQ ID NO: 606898 - RNA, 23 nt, Artificial Sequence
  Synthetic
uuuuggcugguccuugagggcug

SEQ ID NO: 606899 - RNA, 24 nt, Artificial Sequence
  Synthetic
auuuuggcugguccuugagggcug

SEQ ID NO: 606900 - RNA, 18 nt, Artificial Sequence
  Synthetic
ggaugaaggguagggcug

SEQ ID NO: 606901 - RNA, 19 nt, Artificial Sequence
  Synthetic
uggaugaaggguagggcug

SEQ ID NO: 606902 - RNA, 20 nt, Artificial Sequence
  Synthetic
uuggaugaaggguagggcug

SEQ ID NO: 606903 - RNA, 21 nt, Artificial Sequence
  Synthetic
uuuggaugaaggguagggcug

SEQ ID NO: 606904 - RNA, 22 nt, Artificial Sequence
  Synthetic
cuuuggaugaaggguagggcug

SEQ ID NO: 606905 - RNA, 23 nt, Artificial Sequence
  Synthetic
ccuuuggaugaaggguagggcug

SEQ ID NO: 606906 - RNA, 24 nt, Artificial Sequence
  Synthetic
accuuuggaugaaggguagggcug

SEQ ID NO: 606907 - RNA, 18 nt, Artificial Sequence
  Synthetic
gguuucauuuuagggcug

SEQ ID NO: 606908 - RNA, 19 nt, Artificial Sequence
  Synthetic
ugguuucauuuuagggcug

SEQ ID NO: 606909 - RNA, 20 nt, Artificial Sequence
  Synthetic
cugguuucauuuuagggcug

SEQ ID NO: 606910 - RNA, 21 nt, Artificial Sequence
  Synthetic
gcugguuucauuuuagggcug

SEQ ID NO: 606911 - RNA, 22 nt, Artificial Sequence
  Synthetic
ugcugguuucauuuuagggcug

SEQ ID NO: 606912 - RNA, 23 nt, Artificial Sequence
  Synthetic
uugcugguuucauuuuagggcug

SEQ ID NO: 606913 - RNA, 24 nt, Artificial Sequence
  Synthetic
uuugcugguuucauuuuagggcug

SEQ ID NO: 606914 - RNA, 18 nt, Artificial Sequence
  Synthetic
agaagacacaaggggcug

SEQ ID NO: 606915 - RNA, 19 nt, Artificial Sequence
  Synthetic
cagaagacacaaggggcug

SEQ ID NO: 606916 - RNA, 20 nt, Artificial Sequence
  Synthetic
ucagaagacacaaggggcug

SEQ ID NO: 606917 - RNA, 21 nt, Artificial Sequence
  Synthetic
uucagaagacacaaggggcug

SEQ ID NO: 606918 - RNA, 22 nt, Artificial Sequence
  Synthetic
uuucagaagacacaaggggcug

SEQ ID NO: 606919 - RNA, 23 nt, Artificial Sequence
  Synthetic
uuuucagaagacacaaggggcug

SEQ ID NO: 606920 - RNA, 24 nt, Artificial Sequence
  Synthetic
uuuuucagaagacacaaggggcug

SEQ ID NO: 606921 - RNA, 18 nt, Artificial Sequence
  Synthetic
uuuaaggauaaggggcug

SEQ ID NO: 606922 - RNA, 19 nt, Artificial Sequence
  Synthetic
uuuuaaggauaaggggcug

SEQ ID NO: 606923 - RNA, 20 nt, Artificial Sequence
  Synthetic
auuuuaaggauaaggggcug

SEQ ID NO: 606924 - RNA, 21 nt, Artificial Sequence
  Synthetic
gauuuuaaggauaaggggcug

SEQ ID NO: 606925 - RNA, 22 nt, Artificial Sequence
  Synthetic
agauuuuaaggauaaggggcug

SEQ ID NO: 606926 - RNA, 23 nt, Artificial Sequence
  Synthetic
aagauuuuaaggauaaggggcug

SEQ ID NO: 606927 - RNA, 24 nt, Artificial Sequence
  Synthetic
caagauuuuaaggauaaggggcug

SEQ ID NO: 606928 - RNA, 18 nt, Artificial Sequence
  Synthetic
ucgugggguggggggcug

SEQ ID NO: 606929 - RNA, 19 nt, Artificial Sequence
  Synthetic
gucgugggguggggggcug

SEQ ID NO: 606930 - RNA, 20 nt, Artificial Sequence
  Synthetic
ugucgugggguggggggcug

SEQ ID NO: 606931 - RNA, 21 nt, Artificial Sequence
  Synthetic
cugucgugggguggggggcug

SEQ ID NO: 606932 - RNA, 22 nt, Artificial Sequence
  Synthetic
ccugucgugggguggggggcug

SEQ ID NO: 606933 - RNA, 23 nt, Artificial Sequence
  Synthetic
gccugucgugggguggggggcug

SEQ ID NO: 606934 - RNA, 24 nt, Artificial Sequence
  Synthetic
ggccugucgugggguggggggcug

SEQ ID NO: 606935 - RNA, 18 nt, Artificial Sequence
  Synthetic
aacuaauauacugggcug

SEQ ID NO: 606936 - RNA, 19 nt, Artificial Sequence
  Synthetic
caacuaauauacugggcug

SEQ ID NO: 606937 - RNA, 20 nt, Artificial Sequence
  Synthetic
ucaacuaauauacugggcug

SEQ ID NO: 606938 - RNA, 21 nt, Artificial Sequence
  Synthetic
uucaacuaauauacugggcug

SEQ ID NO: 606939 - RNA, 22 nt, Artificial Sequence
  Synthetic
uuucaacuaauauacugggcug

SEQ ID NO: 606940 - RNA, 23 nt, Artificial Sequence
  Synthetic
auuucaacuaauauacugggcug

SEQ ID NO: 606941 - RNA, 24 nt, Artificial Sequence
  Synthetic
uauuucaacuaauauacugggcug

SEQ ID NO: 606942 - RNA, 18 nt, Artificial Sequence
  Synthetic
uugagaagaccugggcug

SEQ ID NO: 606943 - RNA, 19 nt, Artificial Sequence
  Synthetic
auugagaagaccugggcug

SEQ ID NO: 606944 - RNA, 20 nt, Artificial Sequence
  Synthetic
aauugagaagaccugggcug

SEQ ID NO: 606945 - RNA, 21 nt, Artificial Sequence
  Synthetic
gaauugagaagaccugggcug

SEQ ID NO: 606946 - RNA, 22 nt, Artificial Sequence
  Synthetic
agaauugagaagaccugggcug

SEQ ID NO: 606947 - RNA, 23 nt, Artificial Sequence
  Synthetic
gagaauugagaagaccugggcug

SEQ ID NO: 606948 - RNA, 24 nt, Artificial Sequence
  Synthetic
cgagaauugagaagaccugggcug

SEQ ID NO: 606949 - RNA, 18 nt, Artificial Sequence
  Synthetic
gucuuugugccugggcug

SEQ ID NO: 606950 - RNA, 19 nt, Artificial Sequence
  Synthetic
ugucuuugugccugggcug

SEQ ID NO: 606951 - RNA, 20 nt, Artificial Sequence
  Synthetic
cugucuuugugccugggcug

SEQ ID NO: 606952 - RNA, 21 nt, Artificial Sequence
  Synthetic
gcugucuuugugccugggcug

SEQ ID NO: 606953 - RNA, 22 nt, Artificial Sequence
  Synthetic
ugcugucuuugugccugggcug

SEQ ID NO: 606954 - RNA, 23 nt, Artificial Sequence
  Synthetic
cugcugucuuugugccugggcug

SEQ ID NO: 606955 - RNA, 24 nt, Artificial Sequence
  Synthetic
acugcugucuuugugccugggcug

SEQ ID NO: 606956 - RNA, 18 nt, Artificial Sequence
  Synthetic
aaugccuagggugggcug

SEQ ID NO: 606957 - RNA, 19 nt, Artificial Sequence
  Synthetic
aaaugccuagggugggcug

SEQ ID NO: 606958 - RNA, 20 nt, Artificial Sequence
  Synthetic
caaaugccuagggugggcug

SEQ ID NO: 606959 - RNA, 21 nt, Artificial Sequence
  Synthetic
acaaaugccuagggugggcug

SEQ ID NO: 606960 - RNA, 22 nt, Artificial Sequence
  Synthetic
aacaaaugccuagggugggcug

SEQ ID NO: 606961 - RNA, 23 nt, Artificial Sequence
  Synthetic
uaacaaaugccuagggugggcug

SEQ ID NO: 606962 - RNA, 24 nt, Artificial Sequence
  Synthetic
guaacaaaugccuagggugggcug

SEQ ID NO: 606963 - RNA, 18 nt, Artificial Sequence
  Synthetic
ugcaacugaaaauggcug

SEQ ID NO: 606964 - RNA, 19 nt, Artificial Sequence
  Synthetic
augcaacugaaaauggcug

SEQ ID NO: 606965 - RNA, 20 nt, Artificial Sequence
  Synthetic
aaugcaacugaaaauggcug

SEQ ID NO: 606966 - RNA, 21 nt, Artificial Sequence
  Synthetic
aaaugcaacugaaaauggcug

SEQ ID NO: 606967 - RNA, 22 nt, Artificial Sequence
  Synthetic
aaaaugcaacugaaaauggcug

SEQ ID NO: 606968 - RNA, 23 nt, Artificial Sequence
  Synthetic
aaaaaugcaacugaaaauggcug

SEQ ID NO: 606969 - RNA, 24 nt, Artificial Sequence
  Synthetic
uaaaaaugcaacugaaaauggcug

SEQ ID NO: 606970 - RNA, 19 nt, Artificial Sequence
  Synthetic
acacaguucagcauggcug

SEQ ID NO: 606971 - RNA, 20 nt, Artificial Sequence
  Synthetic
cacacaguucagcauggcug

SEQ ID NO: 606972 - RNA, 21 nt, Artificial Sequence
  Synthetic
acacacaguucagcauggcug

SEQ ID NO: 606973 - RNA, 22 nt, Artificial Sequence
  Synthetic
gacacacaguucagcauggcug

SEQ ID NO: 606974 - RNA, 23 nt, Artificial Sequence
  Synthetic
ugacacacaguucagcauggcug

SEQ ID NO: 606975 - RNA, 24 nt, Artificial Sequence
  Synthetic
uugacacacaguucagcauggcug

SEQ ID NO: 606976 - RNA, 18 nt, Artificial Sequence
  Synthetic
cauaguucagcauggcug

SEQ ID NO: 606977 - RNA, 19 nt, Artificial Sequence
  Synthetic
ucauaguucagcauggcug

SEQ ID NO: 606978 - RNA, 20 nt, Artificial Sequence
  Synthetic
cucauaguucagcauggcug

SEQ ID NO: 606979 - RNA, 21 nt, Artificial Sequence
  Synthetic
acucauaguucagcauggcug

SEQ ID NO: 606980 - RNA, 22 nt, Artificial Sequence
  Synthetic
gacucauaguucagcauggcug

SEQ ID NO: 606981 - RNA, 23 nt, Artificial Sequence
  Synthetic
ugacucauaguucagcauggcug

SEQ ID NO: 606982 - RNA, 24 nt, Artificial Sequence
  Synthetic
uugacucauaguucagcauggcug

SEQ ID NO: 606983 - RNA, 18 nt, Artificial Sequence
  Synthetic
caccauucugcauggcug

SEQ ID NO: 606984 - RNA, 19 nt, Artificial Sequence
  Synthetic
ucaccauucugcauggcug

SEQ ID NO: 606985 - RNA, 20 nt, Artificial Sequence
  Synthetic
uucaccauucugcauggcug

SEQ ID NO: 606986 - RNA, 21 nt, Artificial Sequence
  Synthetic
auucaccauucugcauggcug

SEQ ID NO: 606987 - RNA, 22 nt, Artificial Sequence
  Synthetic
gauucaccauucugcauggcug

SEQ ID NO: 606988 - RNA, 23 nt, Artificial Sequence
  Synthetic
ugauucaccauucugcauggcug

SEQ ID NO: 606989 - RNA, 24 nt, Artificial Sequence
  Synthetic
uugauucaccauucugcauggcug

SEQ ID NO: 606990 - RNA, 18 nt, Artificial Sequence
  Synthetic
cagcaacaaugauggcug

SEQ ID NO: 606991 - RNA, 19 nt, Artificial Sequence
  Synthetic
ucagcaacaaugauggcug

SEQ ID NO: 606992 - RNA, 20 nt, Artificial Sequence
  Synthetic
uucagcaacaaugauggcug

SEQ ID NO: 606993 - RNA, 21 nt, Artificial Sequence
  Synthetic
cuucagcaacaaugauggcug

SEQ ID NO: 606994 - RNA, 22 nt, Artificial Sequence
  Synthetic
gcuucagcaacaaugauggcug

SEQ ID NO: 606995 - RNA, 23 nt, Artificial Sequence
  Synthetic
ggcuucagcaacaaugauggcug

SEQ ID NO: 606996 - RNA, 24 nt, Artificial Sequence
  Synthetic
uggcuucagcaacaaugauggcug

SEQ ID NO: 606997 - RNA, 18 nt, Artificial Sequence
  Synthetic
ucuccagcuuccuggcug

SEQ ID NO: 606998 - RNA, 19 nt, Artificial Sequence
  Synthetic
uucuccagcuuccuggcug

SEQ ID NO: 606999 - RNA, 20 nt, Artificial Sequence
  Synthetic
uuucuccagcuuccuggcug

SEQ ID NO: 607000 - RNA, 21 nt, Artificial Sequence
  Synthetic
cuuucuccagcuuccuggcug

SEQ ID NO: 607001 - RNA, 22 nt, Artificial Sequence
  Synthetic
ucuuucuccagcuuccuggcug

SEQ ID NO: 607002 - RNA, 23 nt, Artificial Sequence
  Synthetic
uucuuucuccagcuuccuggcug

SEQ ID NO: 607003 - RNA, 24 nt, Artificial Sequence
  Synthetic
guucuuucuccagcuuccuggcug

SEQ ID NO: 607004 - RNA, 18 nt, Artificial Sequence
  Synthetic
uucuggagaggcuggcug

SEQ ID NO: 607005 - RNA, 19 nt, Artificial Sequence
  Synthetic
uuucuggagaggcuggcug

SEQ ID NO: 607006 - RNA, 20 nt, Artificial Sequence
  Synthetic
uuuucuggagaggcuggcug

SEQ ID NO: 607007 - RNA, 21 nt, Artificial Sequence
  Synthetic
auuuucuggagaggcuggcug

SEQ ID NO: 607008 - RNA, 22 nt, Artificial Sequence
  Synthetic
cauuuucuggagaggcuggcug

SEQ ID NO: 607009 - RNA, 23 nt, Artificial Sequence
  Synthetic
ccauuuucuggagaggcuggcug

SEQ ID NO: 607010 - RNA, 24 nt, Artificial Sequence
  Synthetic
cccauuuucuggagaggcuggcug

SEQ ID NO: 607011 - RNA, 18 nt, Artificial Sequence
  Synthetic
agaagauaacucuggcug

SEQ ID NO: 607012 - RNA, 19 nt, Artificial Sequence
  Synthetic
cagaagauaacucuggcug

SEQ ID NO: 607013 - RNA, 20 nt, Artificial Sequence
  Synthetic
ucagaagauaacucuggcug

SEQ ID NO: 607014 - RNA, 21 nt, Artificial Sequence
  Synthetic
gucagaagauaacucuggcug

SEQ ID NO: 607015 - RNA, 22 nt, Artificial Sequence
  Synthetic
ugucagaagauaacucuggcug

SEQ ID NO: 607016 - RNA, 23 nt, Artificial Sequence
  Synthetic
augucagaagauaacucuggcug

SEQ ID NO: 607017 - RNA, 24 nt, Artificial Sequence
  Synthetic
caugucagaagauaacucuggcug

SEQ ID NO: 607018 - RNA, 18 nt, Artificial Sequence
  Synthetic
gcucugucauucuggcug

SEQ ID NO: 607019 - RNA, 19 nt, Artificial Sequence
  Synthetic
ugcucugucauucuggcug

SEQ ID NO: 607020 - RNA, 20 nt, Artificial Sequence
  Synthetic
uugcucugucauucuggcug

SEQ ID NO: 607021 - RNA, 21 nt, Artificial Sequence
  Synthetic
cuugcucugucauucuggcug

SEQ ID NO: 607022 - RNA, 22 nt, Artificial Sequence
  Synthetic
ucuugcucugucauucuggcug

SEQ ID NO: 607023 - RNA, 23 nt, Artificial Sequence
  Synthetic
gucuugcucugucauucuggcug

SEQ ID NO: 607024 - RNA, 24 nt, Artificial Sequence
  Synthetic
ggucuugcucugucauucuggcug

SEQ ID NO: 607025 - RNA, 18 nt, Artificial Sequence
  Synthetic
gaaucugagaaguggcug

SEQ ID NO: 607026 - RNA, 19 nt, Artificial Sequence
  Synthetic
agaaucugagaaguggcug

SEQ ID NO: 607027 - RNA, 20 nt, Artificial Sequence
  Synthetic
uagaaucugagaaguggcug

SEQ ID NO: 607028 - RNA, 21 nt, Artificial Sequence
  Synthetic
guagaaucugagaaguggcug

SEQ ID NO: 607029 - RNA, 22 nt, Artificial Sequence
  Synthetic
aguagaaucugagaaguggcug

SEQ ID NO: 607030 - RNA, 23 nt, Artificial Sequence
  Synthetic
uaguagaaucugagaaguggcug

SEQ ID NO: 607031 - RNA, 24 nt, Artificial Sequence
  Synthetic
uuaguagaaucugagaaguggcug

SEQ ID NO: 607032 - RNA, 18 nt, Artificial Sequence
  Synthetic
gacucuucuacguggcug

SEQ ID NO: 607033 - RNA, 19 nt, Artificial Sequence
  Synthetic
agacucuucuacguggcug

SEQ ID NO: 607034 - RNA, 20 nt, Artificial Sequence
  Synthetic
cagacucuucuacguggcug

SEQ ID NO: 607035 - RNA, 21 nt, Artificial Sequence
  Synthetic
gcagacucuucuacguggcug

SEQ ID NO: 607036 - RNA, 22 nt, Artificial Sequence
  Synthetic
ugcagacucuucuacguggcug

SEQ ID NO: 607037 - RNA, 23 nt, Artificial Sequence
  Synthetic
augcagacucuucuacguggcug

SEQ ID NO: 607038 - RNA, 24 nt, Artificial Sequence
  Synthetic
aaugcagacucuucuacguggcug

SEQ ID NO: 607039 - RNA, 18 nt, Artificial Sequence
  Synthetic
aguugagggggguggcug

SEQ ID NO: 607040 - RNA, 19 nt, Artificial Sequence
  Synthetic
aaguugagggggguggcug

SEQ ID NO: 607041 - RNA, 20 nt, Artificial Sequence
  Synthetic
gaaguugagggggguggcug

SEQ ID NO: 607042 - RNA, 21 nt, Artificial Sequence
  Synthetic
agaaguugagggggguggcug

SEQ ID NO: 607043 - RNA, 22 nt, Artificial Sequence
  Synthetic
aagaaguugagggggguggcug

SEQ ID NO: 607044 - RNA, 23 nt, Artificial Sequence
  Synthetic
uaagaaguugagggggguggcug

SEQ ID NO: 607045 - RNA, 24 nt, Artificial Sequence
  Synthetic
guaagaaguugagggggguggcug

SEQ ID NO: 607046 - RNA, 18 nt, Artificial Sequence
  Synthetic
agccaaacaaauuggcug

SEQ ID NO: 607047 - RNA, 19 nt, Artificial Sequence
  Synthetic
gagccaaacaaauuggcug

SEQ ID NO: 607048 - RNA, 20 nt, Artificial Sequence
  Synthetic
ggagccaaacaaauuggcug

SEQ ID NO: 607049 - RNA, 21 nt, Artificial Sequence
  Synthetic
aggagccaaacaaauuggcug

SEQ ID NO: 607050 - RNA, 22 nt, Artificial Sequence
  Synthetic
gaggagccaaacaaauuggcug

SEQ ID NO: 607051 - RNA, 23 nt, Artificial Sequence
  Synthetic
agaggagccaaacaaauuggcug

SEQ ID NO: 607052 - RNA, 24 nt, Artificial Sequence
  Synthetic
cagaggagccaaacaaauuggcug

SEQ ID NO: 607053 - RNA, 18 nt, Artificial Sequence
  Synthetic
cauaagacuucuuggcug

SEQ ID NO: 607054 - RNA, 19 nt, Artificial Sequence
  Synthetic
ccauaagacuucuuggcug

SEQ ID NO: 607055 - RNA, 20 nt, Artificial Sequence
  Synthetic
accauaagacuucuuggcug

SEQ ID NO: 607056 - RNA, 21 nt, Artificial Sequence
  Synthetic
caccauaagacuucuuggcug

SEQ ID NO: 607057 - RNA, 22 nt, Artificial Sequence
  Synthetic
ccaccauaagacuucuuggcug

SEQ ID NO: 607058 - RNA, 23 nt, Artificial Sequence
  Synthetic
accaccauaagacuucuuggcug

SEQ ID NO: 607059 - RNA, 24 nt, Artificial Sequence
  Synthetic
caccaccauaagacuucuuggcug

SEQ ID NO: 607060 - RNA, 18 nt, Artificial Sequence
  Synthetic
guggcuuccuuuuggcug

SEQ ID NO: 607061 - RNA, 19 nt, Artificial Sequence
  Synthetic
gguggcuuccuuuuggcug

SEQ ID NO: 607062 - RNA, 20 nt, Artificial Sequence
  Synthetic
agguggcuuccuuuuggcug

SEQ ID NO: 607063 - RNA, 21 nt, Artificial Sequence
  Synthetic
aagguggcuuccuuuuggcug

SEQ ID NO: 607064 - RNA, 22 nt, Artificial Sequence
  Synthetic
caagguggcuuccuuuuggcug

SEQ ID NO: 607065 - RNA, 23 nt, Artificial Sequence
  Synthetic
ucaagguggcuuccuuuuggcug

SEQ ID NO: 607066 - RNA, 24 nt, Artificial Sequence
  Synthetic
gucaagguggcuuccuuuuggcug

SEQ ID NO: 607067 - RNA, 18 nt, Artificial Sequence
  Synthetic
ugucuagggaaaaugcug

SEQ ID NO: 607068 - RNA, 19 nt, Artificial Sequence
  Synthetic
uugucuagggaaaaugcug

SEQ ID NO: 607069 - RNA, 20 nt, Artificial Sequence
  Synthetic
auugucuagggaaaaugcug

SEQ ID NO: 607070 - RNA, 21 nt, Artificial Sequence
  Synthetic
gauugucuagggaaaaugcug

SEQ ID NO: 607071 - RNA, 22 nt, Artificial Sequence
  Synthetic
agauugucuagggaaaaugcug

SEQ ID NO: 607072 - RNA, 23 nt, Artificial Sequence
  Synthetic
aagauugucuagggaaaaugcug

SEQ ID NO: 607073 - RNA, 24 nt, Artificial Sequence
  Synthetic
aaagauugucuagggaaaaugcug

SEQ ID NO: 607074 - RNA, 18 nt, Artificial Sequence
  Synthetic
aggcaauuacaaaugcug

SEQ ID NO: 607075 - RNA, 19 nt, Artificial Sequence
  Synthetic
caggcaauuacaaaugcug

SEQ ID NO: 607076 - RNA, 20 nt, Artificial Sequence
  Synthetic
acaggcaauuacaaaugcug

SEQ ID NO: 607077 - RNA, 21 nt, Artificial Sequence
  Synthetic
gacaggcaauuacaaaugcug

SEQ ID NO: 607078 - RNA, 22 nt, Artificial Sequence
  Synthetic
agacaggcaauuacaaaugcug

SEQ ID NO: 607079 - RNA, 23 nt, Artificial Sequence
  Synthetic
aagacaggcaauuacaaaugcug

SEQ ID NO: 607080 - RNA, 24 nt, Artificial Sequence
  Synthetic
aaagacaggcaauuacaaaugcug

SEQ ID NO: 607081 - RNA, 18 nt, Artificial Sequence
  Synthetic
ugagcuacucaaaugcug

SEQ ID NO: 607082 - RNA, 19 nt, Artificial Sequence
  Synthetic
augagcuacucaaaugcug

SEQ ID NO: 607083 - RNA, 20 nt, Artificial Sequence
  Synthetic
aaugagcuacucaaaugcug

SEQ ID NO: 607084 - RNA, 21 nt, Artificial Sequence
  Synthetic
gaaugagcuacucaaaugcug

SEQ ID NO: 607085 - RNA, 22 nt, Artificial Sequence
  Synthetic
ggaaugagcuacucaaaugcug

SEQ ID NO: 607086 - RNA, 23 nt, Artificial Sequence
  Synthetic
cggaaugagcuacucaaaugcug

SEQ ID NO: 607087 - RNA, 24 nt, Artificial Sequence
  Synthetic
gcggaaugagcuacucaaaugcug

SEQ ID NO: 607088 - RNA, 18 nt, Artificial Sequence
  Synthetic
auugauaaagaaaugcug

SEQ ID NO: 607089 - RNA, 19 nt, Artificial Sequence
  Synthetic
aauugauaaagaaaugcug

SEQ ID NO: 607090 - RNA, 20 nt, Artificial Sequence
  Synthetic
caauugauaaagaaaugcug

SEQ ID NO: 607091 - RNA, 21 nt, Artificial Sequence
  Synthetic
acaauugauaaagaaaugcug

SEQ ID NO: 607092 - RNA, 22 nt, Artificial Sequence
  Synthetic
gacaauugauaaagaaaugcug

SEQ ID NO: 607093 - RNA, 23 nt, Artificial Sequence
  Synthetic
ugacaauugauaaagaaaugcug

SEQ ID NO: 607094 - RNA, 24 nt, Artificial Sequence
  Synthetic
uugacaauugauaaagaaaugcug

SEQ ID NO: 607095 - RNA, 18 nt, Artificial Sequence
  Synthetic
uauuucuaguaaaugcug

SEQ ID NO: 607096 - RNA, 19 nt, Artificial Sequence
  Synthetic
uuauuucuaguaaaugcug

SEQ ID NO: 607097 - RNA, 20 nt, Artificial Sequence
  Synthetic
cuuauuucuaguaaaugcug

SEQ ID NO: 607098 - RNA, 21 nt, Artificial Sequence
  Synthetic
ccuuauuucuaguaaaugcug

SEQ ID NO: 607099 - RNA, 22 nt, Artificial Sequence
  Synthetic
accuuauuucuaguaaaugcug

SEQ ID NO: 607100 - RNA, 23 nt, Artificial Sequence
  Synthetic
gaccuuauuucuaguaaaugcug

SEQ ID NO: 607101 - RNA, 24 nt, Artificial Sequence
  Synthetic
agaccuuauuucuaguaaaugcug

SEQ ID NO: 607102 - RNA, 18 nt, Artificial Sequence
  Synthetic
uuuuaaucaacaaugcug

SEQ ID NO: 607103 - RNA, 19 nt, Artificial Sequence
  Synthetic
auuuuaaucaacaaugcug

SEQ ID NO: 607104 - RNA, 20 nt, Artificial Sequence
  Synthetic
aauuuuaaucaacaaugcug

SEQ ID NO: 607105 - RNA, 21 nt, Artificial Sequence
  Synthetic
aaauuuuaaucaacaaugcug

SEQ ID NO: 607106 - RNA, 22 nt, Artificial Sequence
  Synthetic
caaauuuuaaucaacaaugcug

SEQ ID NO: 607107 - RNA, 23 nt, Artificial Sequence
  Synthetic
ucaaauuuuaaucaacaaugcug

SEQ ID NO: 607108 - RNA, 24 nt, Artificial Sequence
  Synthetic
gucaaauuuuaaucaacaaugcug

SEQ ID NO: 607109 - RNA, 18 nt, Artificial Sequence
  Synthetic
ugagccaacccaaugcug

SEQ ID NO: 607110 - RNA, 19 nt, Artificial Sequence
  Synthetic
gugagccaacccaaugcug

SEQ ID NO: 607111 - RNA, 20 nt, Artificial Sequence
  Synthetic
ggugagccaacccaaugcug

SEQ ID NO: 607112 - RNA, 21 nt, Artificial Sequence
  Synthetic
aggugagccaacccaaugcug

SEQ ID NO: 607113 - RNA, 22 nt, Artificial Sequence
  Synthetic
uaggugagccaacccaaugcug

SEQ ID NO: 607114 - RNA, 23 nt, Artificial Sequence
  Synthetic
cuaggugagccaacccaaugcug

SEQ ID NO: 607115 - RNA, 24 nt, Artificial Sequence
  Synthetic
ucuaggugagccaacccaaugcug

SEQ ID NO: 607116 - RNA, 18 nt, Artificial Sequence
  Synthetic
cggguuaacucaaugcug

SEQ ID NO: 607117 - RNA, 19 nt, Artificial Sequence
  Synthetic
gcggguuaacucaaugcug

SEQ ID NO: 607118 - RNA, 20 nt, Artificial Sequence
  Synthetic
ugcggguuaacucaaugcug

SEQ ID NO: 607119 - RNA, 21 nt, Artificial Sequence
  Synthetic
augcggguuaacucaaugcug

SEQ ID NO: 607120 - RNA, 22 nt, Artificial Sequence
  Synthetic
aaugcggguuaacucaaugcug

SEQ ID NO: 607121 - RNA, 23 nt, Artificial Sequence
  Synthetic
aaaugcggguuaacucaaugcug

SEQ ID NO: 607122 - RNA, 24 nt, Artificial Sequence
  Synthetic
aaaaugcggguuaacucaaugcug

SEQ ID NO: 607123 - RNA, 18 nt, Artificial Sequence
  Synthetic
aacuggggcucaaugcug

SEQ ID NO: 607124 - RNA, 19 nt, Artificial Sequence
  Synthetic
gaacuggggcucaaugcug

SEQ ID NO: 607125 - RNA, 20 nt, Artificial Sequence
  Synthetic
ggaacuggggcucaaugcug

SEQ ID NO: 607126 - RNA, 21 nt, Artificial Sequence
  Synthetic
gggaacuggggcucaaugcug

SEQ ID NO: 607127 - RNA, 22 nt, Artificial Sequence
  Synthetic
ggggaacuggggcucaaugcug

SEQ ID NO: 607128 - RNA, 23 nt, Artificial Sequence
  Synthetic
uggggaacuggggcucaaugcug

SEQ ID NO: 607129 - RNA, 24 nt, Artificial Sequence
  Synthetic
cuggggaacuggggcucaaugcug

SEQ ID NO: 607130 - RNA, 18 nt, Artificial Sequence
  Synthetic
agauauauaagaaugcug

SEQ ID NO: 607131 - RNA, 19 nt, Artificial Sequence
  Synthetic
gagauauauaagaaugcug

SEQ ID NO: 607132 - RNA, 20 nt, Artificial Sequence
  Synthetic
ugagauauauaagaaugcug

SEQ ID NO: 607133 - RNA, 21 nt, Artificial Sequence
  Synthetic
uugagauauauaagaaugcug

SEQ ID NO: 607134 - RNA, 22 nt, Artificial Sequence
  Synthetic
guugagauauauaagaaugcug

SEQ ID NO: 607135 - RNA, 23 nt, Artificial Sequence
  Synthetic
aguugagauauauaagaaugcug

SEQ ID NO: 607136 - RNA, 24 nt, Artificial Sequence
  Synthetic
aaguugagauauauaagaaugcug

SEQ ID NO: 607137 - RNA, 18 nt, Artificial Sequence
  Synthetic
acaaugcuuugaaugcug

SEQ ID NO: 607138 - RNA, 19 nt, Artificial Sequence
  Synthetic
uacaaugcuuugaaugcug

SEQ ID NO: 607139 - RNA, 20 nt, Artificial Sequence
  Synthetic
cuacaaugcuuugaaugcug

SEQ ID NO: 607140 - RNA, 21 nt, Artificial Sequence
  Synthetic
ucuacaaugcuuugaaugcug

SEQ ID NO: 607141 - RNA, 22 nt, Artificial Sequence
  Synthetic
gucuacaaugcuuugaaugcug

SEQ ID NO: 607142 - RNA, 23 nt, Artificial Sequence
  Synthetic
ggucuacaaugcuuugaaugcug

SEQ ID NO: 607143 - RNA, 24 nt, Artificial Sequence
  Synthetic
aggucuacaaugcuuugaaugcug

SEQ ID NO: 607144 - RNA, 18 nt, Artificial Sequence
  Synthetic
auaaggagcauaaugcug

SEQ ID NO: 607145 - RNA, 19 nt, Artificial Sequence
  Synthetic
aauaaggagcauaaugcug

SEQ ID NO: 607146 - RNA, 20 nt, Artificial Sequence
  Synthetic
aaauaaggagcauaaugcug

SEQ ID NO: 607147 - RNA, 21 nt, Artificial Sequence
  Synthetic
uaaauaaggagcauaaugcug

SEQ ID NO: 607148 - RNA, 22 nt, Artificial Sequence
  Synthetic
uuaaauaaggagcauaaugcug

SEQ ID NO: 607149 - RNA, 23 nt, Artificial Sequence
  Synthetic
cuuaaauaaggagcauaaugcug

SEQ ID NO: 607150 - RNA, 24 nt, Artificial Sequence
  Synthetic
acuuaaauaaggagcauaaugcug

SEQ ID NO: 607151 - RNA, 18 nt, Artificial Sequence
  Synthetic
cacaaaagauuaaugcug

SEQ ID NO: 607152 - RNA, 19 nt, Artificial Sequence
  Synthetic
acacaaaagauuaaugcug

SEQ ID NO: 607153 - RNA, 20 nt, Artificial Sequence
  Synthetic
aacacaaaagauuaaugcug

SEQ ID NO: 607154 - RNA, 21 nt, Artificial Sequence
  Synthetic
uaacacaaaagauuaaugcug

SEQ ID NO: 607155 - RNA, 22 nt, Artificial Sequence
  Synthetic
guaacacaaaagauuaaugcug

SEQ ID NO: 607156 - RNA, 23 nt, Artificial Sequence
  Synthetic
uguaacacaaaagauuaaugcug

SEQ ID NO: 607157 - RNA, 24 nt, Artificial Sequence
  Synthetic
uuguaacacaaaagauuaaugcug

SEQ ID NO: 607158 - RNA, 18 nt, Artificial Sequence
  Synthetic
ccaccaucgaacaugcug

SEQ ID NO: 607159 - RNA, 19 nt, Artificial Sequence
  Synthetic
gccaccaucgaacaugcug

SEQ ID NO: 607160 - RNA, 20 nt, Artificial Sequence
  Synthetic
agccaccaucgaacaugcug

SEQ ID NO: 607161 - RNA, 21 nt, Artificial Sequence
  Synthetic
aagccaccaucgaacaugcug

SEQ ID NO: 607162 - RNA, 22 nt, Artificial Sequence
  Synthetic
uaagccaccaucgaacaugcug

SEQ ID NO: 607163 - RNA, 23 nt, Artificial Sequence
  Synthetic
uuaagccaccaucgaacaugcug

SEQ ID NO: 607164 - RNA, 24 nt, Artificial Sequence
  Synthetic
uuuaagccaccaucgaacaugcug

SEQ ID NO: 607165 - RNA, 18 nt, Artificial Sequence
  Synthetic
uaaagcgagcacaugcug

SEQ ID NO: 607166 - RNA, 19 nt, Artificial Sequence
  Synthetic
guaaagcgagcacaugcug

SEQ ID NO: 607167 - RNA, 20 nt, Artificial Sequence
  Synthetic
cguaaagcgagcacaugcug

SEQ ID NO: 607168 - RNA, 21 nt, Artificial Sequence
  Synthetic
acguaaagcgagcacaugcug

SEQ ID NO: 607169 - RNA, 22 nt, Artificial Sequence
  Synthetic
gacguaaagcgagcacaugcug

SEQ ID NO: 607170 - RNA, 23 nt, Artificial Sequence
  Synthetic
agacguaaagcgagcacaugcug

SEQ ID NO: 607171 - RNA, 24 nt, Artificial Sequence
  Synthetic
gagacguaaagcgagcacaugcug

SEQ ID NO: 607172 - RNA, 18 nt, Artificial Sequence
  Synthetic
agcauacugggcaugcug

SEQ ID NO: 607173 - RNA, 19 nt, Artificial Sequence
  Synthetic
cagcauacugggcaugcug

SEQ ID NO: 607174 - RNA, 20 nt, Artificial Sequence
  Synthetic
gcagcauacugggcaugcug

SEQ ID NO: 607175 - RNA, 21 nt, Artificial Sequence
  Synthetic
ugcagcauacugggcaugcug

SEQ ID NO: 607176 - RNA, 22 nt, Artificial Sequence
  Synthetic
uugcagcauacugggcaugcug

SEQ ID NO: 607177 - RNA, 23 nt, Artificial Sequence
  Synthetic
cuugcagcauacugggcaugcug

SEQ ID NO: 607178 - RNA, 24 nt, Artificial Sequence
  Synthetic
ucuugcagcauacugggcaugcug

SEQ ID NO: 607179 - RNA, 18 nt, Artificial Sequence
  Synthetic
gugcagagaaagaugcug

SEQ ID NO: 607180 - RNA, 19 nt, Artificial Sequence
  Synthetic
ggugcagagaaagaugcug

SEQ ID NO: 607181 - RNA, 20 nt, Artificial Sequence
  Synthetic
aggugcagagaaagaugcug

SEQ ID NO: 607182 - RNA, 21 nt, Artificial Sequence
  Synthetic
aaggugcagagaaagaugcug

SEQ ID NO: 607183 - RNA, 22 nt, Artificial Sequence
  Synthetic
gaaggugcagagaaagaugcug

SEQ ID NO: 607184 - RNA, 23 nt, Artificial Sequence
  Synthetic
ggaaggugcagagaaagaugcug

SEQ ID NO: 607185 - RNA, 24 nt, Artificial Sequence
  Synthetic
uggaaggugcagagaaagaugcug

SEQ ID NO: 607186 - RNA, 21 nt, Artificial Sequence
  Synthetic
gucaggaaacaacagaugcug

SEQ ID NO: 607187 - RNA, 22 nt, Artificial Sequence
  Synthetic
agucaggaaacaacagaugcug

SEQ ID NO: 607188 - RNA, 23 nt, Artificial Sequence
  Synthetic
aagucaggaaacaacagaugcug

SEQ ID NO: 607189 - RNA, 24 nt, Artificial Sequence
  Synthetic
aaagucaggaaacaacagaugcug

SEQ ID NO: 607190 - RNA, 18 nt, Artificial Sequence
  Synthetic
aggcaacaacagaugcug

SEQ ID NO: 607191 - RNA, 19 nt, Artificial Sequence
  Synthetic
caggcaacaacagaugcug

SEQ ID NO: 607192 - RNA, 20 nt, Artificial Sequence
  Synthetic
ucaggcaacaacagaugcug

SEQ ID NO: 607193 - RNA, 21 nt, Artificial Sequence
  Synthetic
gucaggcaacaacagaugcug

SEQ ID NO: 607194 - RNA, 22 nt, Artificial Sequence
  Synthetic
agucaggcaacaacagaugcug

SEQ ID NO: 607195 - RNA, 23 nt, Artificial Sequence
  Synthetic
aagucaggcaacaacagaugcug

SEQ ID NO: 607196 - RNA, 24 nt, Artificial Sequence
  Synthetic
aaagucaggcaacaacagaugcug

SEQ ID NO: 607197 - RNA, 18 nt, Artificial Sequence
  Synthetic
aaaaaauaccagaugcug

SEQ ID NO: 607198 - RNA, 19 nt, Artificial Sequence
  Synthetic
caaaaaauaccagaugcug

SEQ ID NO: 607199 - RNA, 20 nt, Artificial Sequence
  Synthetic
ucaaaaaauaccagaugcug

SEQ ID NO: 607200 - RNA, 21 nt, Artificial Sequence
  Synthetic
gucaaaaaauaccagaugcug

SEQ ID NO: 607201 - RNA, 22 nt, Artificial Sequence
  Synthetic
agucaaaaaauaccagaugcug

SEQ ID NO: 607202 - RNA, 23 nt, Artificial Sequence
  Synthetic
aagucaaaaaauaccagaugcug

SEQ ID NO: 607203 - RNA, 24 nt, Artificial Sequence
  Synthetic
aaagucaaaaaauaccagaugcug

SEQ ID NO: 607204 - RNA, 18 nt, Artificial Sequence
  Synthetic
gugacugaauagaugcug

SEQ ID NO: 607205 - RNA, 19 nt, Artificial Sequence
  Synthetic
ggugacugaauagaugcug

SEQ ID NO: 607206 - RNA, 20 nt, Artificial Sequence
  Synthetic
uggugacugaauagaugcug

SEQ ID NO: 607207 - RNA, 21 nt, Artificial Sequence
  Synthetic
uuggugacugaauagaugcug

SEQ ID NO: 607208 - RNA, 22 nt, Artificial Sequence
  Synthetic
uuuggugacugaauagaugcug

SEQ ID NO: 607209 - RNA, 23 nt, Artificial Sequence
  Synthetic
auuuggugacugaauagaugcug

SEQ ID NO: 607210 - RNA, 24 nt, Artificial Sequence
  Synthetic
aauuuggugacugaauagaugcug

SEQ ID NO: 607211 - RNA, 18 nt, Artificial Sequence
  Synthetic
aggaaacaacugaugcug

SEQ ID NO: 607212 - RNA, 19 nt, Artificial Sequence
  Synthetic
caggaaacaacugaugcug

SEQ ID NO: 607213 - RNA, 20 nt, Artificial Sequence
  Synthetic
ucaggaaacaacugaugcug

SEQ ID NO: 607214 - RNA, 21 nt, Artificial Sequence
  Synthetic
gucaggaaacaacugaugcug

SEQ ID NO: 607215 - RNA, 22 nt, Artificial Sequence
  Synthetic
agucaggaaacaacugaugcug

SEQ ID NO: 607216 - RNA, 23 nt, Artificial Sequence
  Synthetic
aagucaggaaacaacugaugcug

SEQ ID NO: 607217 - RNA, 24 nt, Artificial Sequence
  Synthetic
aaagucaggaaacaacugaugcug

SEQ ID NO: 607218 - RNA, 18 nt, Artificial Sequence
  Synthetic
cuugaaaauauuaugcug

SEQ ID NO: 607219 - RNA, 19 nt, Artificial Sequence
  Synthetic
ccuugaaaauauuaugcug

SEQ ID NO: 607220 - RNA, 20 nt, Artificial Sequence
  Synthetic
accuugaaaauauuaugcug

SEQ ID NO: 607221 - RNA, 21 nt, Artificial Sequence
  Synthetic
aaccuugaaaauauuaugcug

SEQ ID NO: 607222 - RNA, 22 nt, Artificial Sequence
  Synthetic
gaaccuugaaaauauuaugcug

SEQ ID NO: 607223 - RNA, 23 nt, Artificial Sequence
  Synthetic
ugaaccuugaaaauauuaugcug

SEQ ID NO: 607224 - RNA, 24 nt, Artificial Sequence
  Synthetic
augaaccuugaaaauauuaugcug

SEQ ID NO: 607225 - RNA, 18 nt, Artificial Sequence
  Synthetic
accccgcucaaacugcug

SEQ ID NO: 607226 - RNA, 19 nt, Artificial Sequence
  Synthetic
caccccgcucaaacugcug

SEQ ID NO: 607227 - RNA, 20 nt, Artificial Sequence
  Synthetic
ccaccccgcucaaacugcug

SEQ ID NO: 607228 - RNA, 21 nt, Artificial Sequence
  Synthetic
cccaccccgcucaaacugcug

SEQ ID NO: 607229 - RNA, 22 nt, Artificial Sequence
  Synthetic
ccccaccccgcucaaacugcug

SEQ ID NO: 607230 - RNA, 23 nt, Artificial Sequence
  Synthetic
uccccaccccgcucaaacugcug

SEQ ID NO: 607231 - RNA, 24 nt, Artificial Sequence
  Synthetic
cuccccaccccgcucaaacugcug

SEQ ID NO: 607232 - RNA, 18 nt, Artificial Sequence
  Synthetic
agcauagauucacugcug

SEQ ID NO: 607233 - RNA, 19 nt, Artificial Sequence
  Synthetic
gagcauagauucacugcug

SEQ ID NO: 607234 - RNA, 20 nt, Artificial Sequence
  Synthetic
ggagcauagauucacugcug

SEQ ID NO: 607235 - RNA, 21 nt, Artificial Sequence
  Synthetic
gggagcauagauucacugcug

SEQ ID NO: 607236 - RNA, 22 nt, Artificial Sequence
  Synthetic
ugggagcauagauucacugcug

SEQ ID NO: 607237 - RNA, 23 nt, Artificial Sequence
  Synthetic
uugggagcauagauucacugcug

SEQ ID NO: 607238 - RNA, 24 nt, Artificial Sequence
  Synthetic
guugggagcauagauucacugcug

SEQ ID NO: 607239 - RNA, 18 nt, Artificial Sequence
  Synthetic
uggagauguagacugcug

SEQ ID NO: 607240 - RNA, 19 nt, Artificial Sequence
  Synthetic
uuggagauguagacugcug

SEQ ID NO: 607241 - RNA, 20 nt, Artificial Sequence
  Synthetic
auuggagauguagacugcug

SEQ ID NO: 607242 - RNA, 21 nt, Artificial Sequence
  Synthetic
aauuggagauguagacugcug

SEQ ID NO: 607243 - RNA, 22 nt, Artificial Sequence
  Synthetic
aaauuggagauguagacugcug

SEQ ID NO: 607244 - RNA, 23 nt, Artificial Sequence
  Synthetic
aaaauuggagauguagacugcug

SEQ ID NO: 607245 - RNA, 24 nt, Artificial Sequence
  Synthetic
gaaaauuggagauguagacugcug

SEQ ID NO: 607246 - RNA, 18 nt, Artificial Sequence
  Synthetic
aagucuuauauacugcug

SEQ ID NO: 607247 - RNA, 19 nt, Artificial Sequence
  Synthetic
gaagucuuauauacugcug

SEQ ID NO: 607248 - RNA, 20 nt, Artificial Sequence
  Synthetic
agaagucuuauauacugcug

SEQ ID NO: 607249 - RNA, 21 nt, Artificial Sequence
  Synthetic
uagaagucuuauauacugcug

SEQ ID NO: 607250 - RNA, 22 nt, Artificial Sequence
  Synthetic
cuagaagucuuauauacugcug

SEQ ID NO: 607251 - RNA, 23 nt, Artificial Sequence
  Synthetic
acuagaagucuuauauacugcug

SEQ ID NO: 607252 - RNA, 24 nt, Artificial Sequence
  Synthetic
aacuagaagucuuauauacugcug

SEQ ID NO: 607253 - RNA, 18 nt, Artificial Sequence
  Synthetic
gaaauuuuauuacugcug

SEQ ID NO: 607254 - RNA, 19 nt, Artificial Sequence
  Synthetic
ugaaauuuuauuacugcug

SEQ ID NO: 607255 - RNA, 20 nt, Artificial Sequence
  Synthetic
augaaauuuuauuacugcug

SEQ ID NO: 607256 - RNA, 21 nt, Artificial Sequence
  Synthetic
uaugaaauuuuauuacugcug

SEQ ID NO: 607257 - RNA, 22 nt, Artificial Sequence
  Synthetic
uuaugaaauuuuauuacugcug

SEQ ID NO: 607258 - RNA, 23 nt, Artificial Sequence
  Synthetic
cuuaugaaauuuuauuacugcug

SEQ ID NO: 607259 - RNA, 24 nt, Artificial Sequence
  Synthetic
ucuuaugaaauuuuauuacugcug

SEQ ID NO: 607260 - RNA, 18 nt, Artificial Sequence
  Synthetic
agugucauuagccugcug

SEQ ID NO: 607261 - RNA, 19 nt, Artificial Sequence
  Synthetic
cagugucauuagccugcug

SEQ ID NO: 607262 - RNA, 20 nt, Artificial Sequence
  Synthetic
gcagugucauuagccugcug

SEQ ID NO: 607263 - RNA, 21 nt, Artificial Sequence
  Synthetic
ggcagugucauuagccugcug

SEQ ID NO: 607264 - RNA, 22 nt, Artificial Sequence
  Synthetic
aggcagugucauuagccugcug

SEQ ID NO: 607265 - RNA, 23 nt, Artificial Sequence
  Synthetic
uaggcagugucauuagccugcug

SEQ ID NO: 607266 - RNA, 24 nt, Artificial Sequence
  Synthetic
auaggcagugucauuagccugcug

SEQ ID NO: 607267 - RNA, 18 nt, Artificial Sequence
  Synthetic
gggcugguuagccugcug

SEQ ID NO: 607268 - RNA, 19 nt, Artificial Sequence
  Synthetic
cgggcugguuagccugcug

SEQ ID NO: 607269 - RNA, 20 nt, Artificial Sequence
  Synthetic
ucgggcugguuagccugcug

SEQ ID NO: 607270 - RNA, 21 nt, Artificial Sequence
  Synthetic
cucgggcugguuagccugcug

SEQ ID NO: 607271 - RNA, 22 nt, Artificial Sequence
  Synthetic
gcucgggcugguuagccugcug

SEQ ID NO: 607272 - RNA, 23 nt, Artificial Sequence
  Synthetic
ugcucgggcugguuagccugcug

SEQ ID NO: 607273 - RNA, 24 nt, Artificial Sequence
  Synthetic
uugcucgggcugguuagccugcug

SEQ ID NO: 607274 - RNA, 18 nt, Artificial Sequence
  Synthetic
aaguaaaacuugcugcug

SEQ ID NO: 607275 - RNA, 19 nt, Artificial Sequence
  Synthetic
aaaguaaaacuugcugcug

SEQ ID NO: 607276 - RNA, 20 nt, Artificial Sequence
  Synthetic
aaaaguaaaacuugcugcug

SEQ ID NO: 607277 - RNA, 21 nt, Artificial Sequence
  Synthetic
aaaaaguaaaacuugcugcug

SEQ ID NO: 607278 - RNA, 22 nt, Artificial Sequence
  Synthetic
aaaaaaguaaaacuugcugcug

SEQ ID NO: 607279 - RNA, 23 nt, Artificial Sequence
  Synthetic
gaaaaaaguaaaacuugcugcug

SEQ ID NO: 607280 - RNA, 24 nt, Artificial Sequence
  Synthetic
agaaaaaaguaaaacuugcugcug

SEQ ID NO: 607281 - RNA, 18 nt, Artificial Sequence
  Synthetic
gguaccaacuugcugcug

SEQ ID NO: 607282 - RNA, 19 nt, Artificial Sequence
  Synthetic
ugguaccaacuugcugcug

SEQ ID NO: 607283 - RNA, 20 nt, Artificial Sequence
  Synthetic
cugguaccaacuugcugcug

SEQ ID NO: 607284 - RNA, 21 nt, Artificial Sequence
  Synthetic
ucugguaccaacuugcugcug

SEQ ID NO: 607285 - RNA, 22 nt, Artificial Sequence
  Synthetic
uucugguaccaacuugcugcug

SEQ ID NO: 607286 - RNA, 23 nt, Artificial Sequence
  Synthetic
uuucugguaccaacuugcugcug

SEQ ID NO: 607287 - RNA, 24 nt, Artificial Sequence
  Synthetic
uuuucugguaccaacuugcugcug

SEQ ID NO: 607288 - RNA, 18 nt, Artificial Sequence
  Synthetic
ugccacuucuugcugcug

SEQ ID NO: 607289 - RNA, 19 nt, Artificial Sequence
  Synthetic
cugccacuucuugcugcug

SEQ ID NO: 607290 - RNA, 20 nt, Artificial Sequence
  Synthetic
ccugccacuucuugcugcug

SEQ ID NO: 607291 - RNA, 21 nt, Artificial Sequence
  Synthetic
uccugccacuucuugcugcug

SEQ ID NO: 607292 - RNA, 22 nt, Artificial Sequence
  Synthetic
uuccugccacuucuugcugcug

SEQ ID NO: 607293 - RNA, 23 nt, Artificial Sequence
  Synthetic
auuccugccacuucuugcugcug

SEQ ID NO: 607294 - RNA, 24 nt, Artificial Sequence
  Synthetic
aauuccugccacuucuugcugcug

SEQ ID NO: 607295 - RNA, 18 nt, Artificial Sequence
  Synthetic
auuacaauuacucugcug

SEQ ID NO: 607296 - RNA, 19 nt, Artificial Sequence
  Synthetic
cauuacaauuacucugcug

SEQ ID NO: 607297 - RNA, 20 nt, Artificial Sequence
  Synthetic
ccauuacaauuacucugcug

SEQ ID NO: 607298 - RNA, 21 nt, Artificial Sequence
  Synthetic
cccauuacaauuacucugcug

SEQ ID NO: 607299 - RNA, 22 nt, Artificial Sequence
  Synthetic
ucccauuacaauuacucugcug

SEQ ID NO: 607300 - RNA, 23 nt, Artificial Sequence
  Synthetic
aucccauuacaauuacucugcug

SEQ ID NO: 607301 - RNA, 24 nt, Artificial Sequence
  Synthetic
uaucccauuacaauuacucugcug

SEQ ID NO: 607302 - RNA, 18 nt, Artificial Sequence
  Synthetic
ccaggcagaagucugcug

SEQ ID NO: 607303 - RNA, 19 nt, Artificial Sequence
  Synthetic
uccaggcagaagucugcug

SEQ ID NO: 607304 - RNA, 20 nt, Artificial Sequence
  Synthetic
guccaggcagaagucugcug

SEQ ID NO: 607305 - RNA, 21 nt, Artificial Sequence
  Synthetic
uguccaggcagaagucugcug

SEQ ID NO: 607306 - RNA, 22 nt, Artificial Sequence
  Synthetic
auguccaggcagaagucugcug

SEQ ID NO: 607307 - RNA, 23 nt, Artificial Sequence
  Synthetic
gauguccaggcagaagucugcug

SEQ ID NO: 607308 - RNA, 24 nt, Artificial Sequence
  Synthetic
ggauguccaggcagaagucugcug

SEQ ID NO: 607309 - RNA, 18 nt, Artificial Sequence
  Synthetic
agcccauuccuucugcug

SEQ ID NO: 607310 - RNA, 19 nt, Artificial Sequence
  Synthetic
cagcccauuccuucugcug

SEQ ID NO: 607311 - RNA, 20 nt, Artificial Sequence
  Synthetic
gcagcccauuccuucugcug

SEQ ID NO: 607312 - RNA, 21 nt, Artificial Sequence
  Synthetic
ggcagcccauuccuucugcug

SEQ ID NO: 607313 - RNA, 22 nt, Artificial Sequence
  Synthetic
uggcagcccauuccuucugcug

SEQ ID NO: 607314 - RNA, 23 nt, Artificial Sequence
  Synthetic
cuggcagcccauuccuucugcug

SEQ ID NO: 607315 - RNA, 24 nt, Artificial Sequence
  Synthetic
gcuggcagcccauuccuucugcug

SEQ ID NO: 607316 - RNA, 18 nt, Artificial Sequence
  Synthetic
auugugguauuucugcug

SEQ ID NO: 607317 - RNA, 19 nt, Artificial Sequence
  Synthetic
aauugugguauuucugcug

SEQ ID NO: 607318 - RNA, 20 nt, Artificial Sequence
  Synthetic
caauugugguauuucugcug

SEQ ID NO: 607319 - RNA, 21 nt, Artificial Sequence
  Synthetic
gcaauugugguauuucugcug

SEQ ID NO: 607320 - RNA, 22 nt, Artificial Sequence
  Synthetic
ugcaauugugguauuucugcug

SEQ ID NO: 607321 - RNA, 23 nt, Artificial Sequence
  Synthetic
augcaauugugguauuucugcug

SEQ ID NO: 607322 - RNA, 24 nt, Artificial Sequence
  Synthetic
gaugcaauugugguauuucugcug

SEQ ID NO: 607323 - RNA, 18 nt, Artificial Sequence
  Synthetic
guggagcaacaagugcug

SEQ ID NO: 607324 - RNA, 19 nt, Artificial Sequence
  Synthetic
gguggagcaacaagugcug

SEQ ID NO: 607325 - RNA, 20 nt, Artificial Sequence
  Synthetic
agguggagcaacaagugcug

SEQ ID NO: 607326 - RNA, 21 nt, Artificial Sequence
  Synthetic
aagguggagcaacaagugcug

SEQ ID NO: 607327 - RNA, 22 nt, Artificial Sequence
  Synthetic
aaagguggagcaacaagugcug

SEQ ID NO: 607328 - RNA, 23 nt, Artificial Sequence
  Synthetic
gaaagguggagcaacaagugcug

SEQ ID NO: 607329 - RNA, 24 nt, Artificial Sequence
  Synthetic
ugaaagguggagcaacaagugcug

SEQ ID NO: 607330 - RNA, 18 nt, Artificial Sequence
  Synthetic
gauagugguuaagugcug

SEQ ID NO: 607331 - RNA, 19 nt, Artificial Sequence
  Synthetic
agauagugguuaagugcug

SEQ ID NO: 607332 - RNA, 20 nt, Artificial Sequence
  Synthetic
uagauagugguuaagugcug

SEQ ID NO: 607333 - RNA, 21 nt, Artificial Sequence
  Synthetic
uuagauagugguuaagugcug

SEQ ID NO: 607334 - RNA, 22 nt, Artificial Sequence
  Synthetic
guuagauagugguuaagugcug

SEQ ID NO: 607335 - RNA, 23 nt, Artificial Sequence
  Synthetic
aguuagauagugguuaagugcug

SEQ ID NO: 607336 - RNA, 24 nt, Artificial Sequence
  Synthetic
caguuagauagugguuaagugcug

SEQ ID NO: 607337 - RNA, 18 nt, Artificial Sequence
  Synthetic
auuaugaaaacagugcug

SEQ ID NO: 607338 - RNA, 19 nt, Artificial Sequence
  Synthetic
gauuaugaaaacagugcug

SEQ ID NO: 607339 - RNA, 20 nt, Artificial Sequence
  Synthetic
ggauuaugaaaacagugcug

SEQ ID NO: 607340 - RNA, 21 nt, Artificial Sequence
  Synthetic
gggauuaugaaaacagugcug

SEQ ID NO: 607341 - RNA, 22 nt, Artificial Sequence
  Synthetic
ggggauuaugaaaacagugcug

SEQ ID NO: 607342 - RNA, 23 nt, Artificial Sequence
  Synthetic
uggggauuaugaaaacagugcug

SEQ ID NO: 607343 - RNA, 24 nt, Artificial Sequence
  Synthetic
auggggauuaugaaaacagugcug

SEQ ID NO: 607344 - RNA, 18 nt, Artificial Sequence
  Synthetic
acagcaaaagcagugcug

SEQ ID NO: 607345 - RNA, 19 nt, Artificial Sequence
  Synthetic
cacagcaaaagcagugcug

SEQ ID NO: 607346 - RNA, 20 nt, Artificial Sequence
  Synthetic
ccacagcaaaagcagugcug

SEQ ID NO: 607347 - RNA, 21 nt, Artificial Sequence
  Synthetic
accacagcaaaagcagugcug

SEQ ID NO: 607348 - RNA, 22 nt, Artificial Sequence
  Synthetic
gaccacagcaaaagcagugcug

SEQ ID NO: 607349 - RNA, 23 nt, Artificial Sequence
  Synthetic
ugaccacagcaaaagcagugcug

SEQ ID NO: 607350 - RNA, 24 nt, Artificial Sequence
  Synthetic
uugaccacagcaaaagcagugcug

SEQ ID NO: 607351 - RNA, 18 nt, Artificial Sequence
  Synthetic
gcuaguugagcagugcug

SEQ ID NO: 607352 - RNA, 19 nt, Artificial Sequence
  Synthetic
agcuaguugagcagugcug

SEQ ID NO: 607353 - RNA, 20 nt, Artificial Sequence
  Synthetic
aagcuaguugagcagugcug

SEQ ID NO: 607354 - RNA, 21 nt, Artificial Sequence
  Synthetic
caagcuaguugagcagugcug

SEQ ID NO: 607355 - RNA, 22 nt, Artificial Sequence
  Synthetic
gcaagcuaguugagcagugcug

SEQ ID NO: 607356 - RNA, 23 nt, Artificial Sequence
  Synthetic
agcaagcuaguugagcagugcug

SEQ ID NO: 607357 - RNA, 24 nt, Artificial Sequence
  Synthetic
cagcaagcuaguugagcagugcug

SEQ ID NO: 607358 - RNA, 18 nt, Artificial Sequence
  Synthetic
cuauauauuugggugcug

SEQ ID NO: 607359 - RNA, 19 nt, Artificial Sequence
  Synthetic
ccuauauauuugggugcug

SEQ ID NO: 607360 - RNA, 20 nt, Artificial Sequence
  Synthetic
cccuauauauuugggugcug

SEQ ID NO: 607361 - RNA, 21 nt, Artificial Sequence
  Synthetic
ccccuauauauuugggugcug

SEQ ID NO: 607362 - RNA, 22 nt, Artificial Sequence
  Synthetic
uccccuauauauuugggugcug

SEQ ID NO: 607363 - RNA, 23 nt, Artificial Sequence
  Synthetic
guccccuauauauuugggugcug

SEQ ID NO: 607364 - RNA, 24 nt, Artificial Sequence
  Synthetic
aguccccuauauauuugggugcug

SEQ ID NO: 607365 - RNA, 18 nt, Artificial Sequence
  Synthetic
cauaaagugguggugcug

SEQ ID NO: 607366 - RNA, 19 nt, Artificial Sequence
  Synthetic
ucauaaagugguggugcug

SEQ ID NO: 607367 - RNA, 20 nt, Artificial Sequence
  Synthetic
uucauaaagugguggugcug

SEQ ID NO: 607368 - RNA, 21 nt, Artificial Sequence
  Synthetic
uuucauaaagugguggugcug

SEQ ID NO: 607369 - RNA, 22 nt, Artificial Sequence
  Synthetic
uuuucauaaagugguggugcug

SEQ ID NO: 607370 - RNA, 23 nt, Artificial Sequence
  Synthetic
guuuucauaaagugguggugcug

SEQ ID NO: 607371 - RNA, 24 nt, Artificial Sequence
  Synthetic
uguuuucauaaagugguggugcug

SEQ ID NO: 607372 - RNA, 18 nt, Artificial Sequence
  Synthetic
ggggaugguucugugcug

SEQ ID NO: 607373 - RNA, 19 nt, Artificial Sequence
  Synthetic
cggggaugguucugugcug

SEQ ID NO: 607374 - RNA, 20 nt, Artificial Sequence
  Synthetic
acggggaugguucugugcug

SEQ ID NO: 607375 - RNA, 21 nt, Artificial Sequence
  Synthetic
cacggggaugguucugugcug

SEQ ID NO: 607376 - RNA, 22 nt, Artificial Sequence
  Synthetic
ucacggggaugguucugugcug

SEQ ID NO: 607377 - RNA, 23 nt, Artificial Sequence
  Synthetic
aucacggggaugguucugugcug

SEQ ID NO: 607378 - RNA, 24 nt, Artificial Sequence
  Synthetic
aaucacggggaugguucugugcug

SEQ ID NO: 607379 - RNA, 18 nt, Artificial Sequence
  Synthetic
aguuuuguucccuugcug

SEQ ID NO: 607380 - RNA, 19 nt, Artificial Sequence
  Synthetic
caguuuuguucccuugcug

SEQ ID NO: 607381 - RNA, 20 nt, Artificial Sequence
  Synthetic
ccaguuuuguucccuugcug

SEQ ID NO: 607382 - RNA, 21 nt, Artificial Sequence
  Synthetic
uccaguuuuguucccuugcug

SEQ ID NO: 607383 - RNA, 22 nt, Artificial Sequence
  Synthetic
auccaguuuuguucccuugcug

SEQ ID NO: 607384 - RNA, 23 nt, Artificial Sequence
  Synthetic
cauccaguuuuguucccuugcug

SEQ ID NO: 607385 - RNA, 24 nt, Artificial Sequence
  Synthetic
ccauccaguuuuguucccuugcug

SEQ ID NO: 607386 - RNA, 18 nt, Artificial Sequence
  Synthetic
gcauaccguagcuugcug

SEQ ID NO: 607387 - RNA, 19 nt, Artificial Sequence
  Synthetic
agcauaccguagcuugcug

SEQ ID NO: 607388 - RNA, 20 nt, Artificial Sequence
  Synthetic
uagcauaccguagcuugcug

SEQ ID NO: 607389 - RNA, 21 nt, Artificial Sequence
  Synthetic
auagcauaccguagcuugcug

SEQ ID NO: 607390 - RNA, 22 nt, Artificial Sequence
  Synthetic
cauagcauaccguagcuugcug

SEQ ID NO: 607391 - RNA, 23 nt, Artificial Sequence
  Synthetic
ccauagcauaccguagcuugcug

SEQ ID NO: 607392 - RNA, 24 nt, Artificial Sequence
  Synthetic
gccauagcauaccguagcuugcug

SEQ ID NO: 607393 - RNA, 18 nt, Artificial Sequence
  Synthetic
aagcuuuuaaucuugcug

SEQ ID NO: 607394 - RNA, 19 nt, Artificial Sequence
  Synthetic
gaagcuuuuaaucuugcug

SEQ ID NO: 607395 - RNA, 20 nt, Artificial Sequence
  Synthetic
ugaagcuuuuaaucuugcug

SEQ ID NO: 607396 - RNA, 21 nt, Artificial Sequence
  Synthetic
augaagcuuuuaaucuugcug

SEQ ID NO: 607397 - RNA, 22 nt, Artificial Sequence
  Synthetic
caugaagcuuuuaaucuugcug

SEQ ID NO: 607398 - RNA, 23 nt, Artificial Sequence
  Synthetic
ucaugaagcuuuuaaucuugcug

SEQ ID NO: 607399 - RNA, 24 nt, Artificial Sequence
  Synthetic
cucaugaagcuuuuaaucuugcug

SEQ ID NO: 607400 - RNA, 18 nt, Artificial Sequence
  Synthetic
aaaaaauaaagguugcug

SEQ ID NO: 607401 - RNA, 19 nt, Artificial Sequence
  Synthetic
uaaaaaauaaagguugcug

SEQ ID NO: 607402 - RNA, 20 nt, Artificial Sequence
  Synthetic
cuaaaaaauaaagguugcug

SEQ ID NO: 607403 - RNA, 21 nt, Artificial Sequence
  Synthetic
ucuaaaaaauaaagguugcug

SEQ ID NO: 607404 - RNA, 22 nt, Artificial Sequence
  Synthetic
gucuaaaaaauaaagguugcug

SEQ ID NO: 607405 - RNA, 23 nt, Artificial Sequence
  Synthetic
agucuaaaaaauaaagguugcug

SEQ ID NO: 607406 - RNA, 24 nt, Artificial Sequence
  Synthetic
uagucuaaaaaauaaagguugcug

SEQ ID NO: 607407 - RNA, 20 nt, Artificial Sequence
  Synthetic
auccaggcagaaguuugcug

SEQ ID NO: 607408 - RNA, 21 nt, Artificial Sequence
  Synthetic
uauccaggcagaaguuugcug

SEQ ID NO: 607409 - RNA, 22 nt, Artificial Sequence
  Synthetic
auauccaggcagaaguuugcug

SEQ ID NO: 607410 - RNA, 23 nt, Artificial Sequence
  Synthetic
gauauccaggcagaaguuugcug

SEQ ID NO: 607411 - RNA, 24 nt, Artificial Sequence
  Synthetic
agauauccaggcagaaguuugcug

SEQ ID NO: 607412 - RNA, 18 nt, Artificial Sequence
  Synthetic
auugguugagguuugcug

SEQ ID NO: 607413 - RNA, 19 nt, Artificial Sequence
  Synthetic
uauugguugagguuugcug

SEQ ID NO: 607414 - RNA, 20 nt, Artificial Sequence
  Synthetic
uuauugguugagguuugcug

SEQ ID NO: 607415 - RNA, 21 nt, Artificial Sequence
  Synthetic
guuauugguugagguuugcug

SEQ ID NO: 607416 - RNA, 22 nt, Artificial Sequence
  Synthetic
uguuauugguugagguuugcug

SEQ ID NO: 607417 - RNA, 23 nt, Artificial Sequence
  Synthetic
uuguuauugguugagguuugcug

SEQ ID NO: 607418 - RNA, 24 nt, Artificial Sequence
  Synthetic
uuuguuauugguugagguuugcug

SEQ ID NO: 607419 - RNA, 18 nt, Artificial Sequence
  Synthetic
guuaaaagugguuugcug

SEQ ID NO: 607420 - RNA, 19 nt, Artificial Sequence
  Synthetic
uguuaaaagugguuugcug

SEQ ID NO: 607421 - RNA, 20 nt, Artificial Sequence
  Synthetic
auguuaaaagugguuugcug

SEQ ID NO: 607422 - RNA, 21 nt, Artificial Sequence
  Synthetic
aauguuaaaagugguuugcug

SEQ ID NO: 607423 - RNA, 22 nt, Artificial Sequence
  Synthetic
aaauguuaaaagugguuugcug

SEQ ID NO: 607424 - RNA, 23 nt, Artificial Sequence
  Synthetic
aaaauguuaaaagugguuugcug

SEQ ID NO: 607425 - RNA, 24 nt, Artificial Sequence
  Synthetic
caaaauguuaaaagugguuugcug

SEQ ID NO: 607426 - RNA, 18 nt, Artificial Sequence
  Synthetic
ccuugacaaauuuugcug

SEQ ID NO: 607427 - RNA, 19 nt, Artificial Sequence
  Synthetic
accuugacaaauuuugcug

SEQ ID NO: 607428 - RNA, 20 nt, Artificial Sequence
  Synthetic
uaccuugacaaauuuugcug

SEQ ID NO: 607429 - RNA, 21 nt, Artificial Sequence
  Synthetic
cuaccuugacaaauuuugcug

SEQ ID NO: 607430 - RNA, 22 nt, Artificial Sequence
  Synthetic
acuaccuugacaaauuuugcug

SEQ ID NO: 607431 - RNA, 23 nt, Artificial Sequence
  Synthetic
aacuaccuugacaaauuuugcug

SEQ ID NO: 607432 - RNA, 24 nt, Artificial Sequence
  Synthetic
aaacuaccuugacaaauuuugcug

SEQ ID NO: 607433 - RNA, 18 nt, Artificial Sequence
  Synthetic
aacuuuaucaaaaaucug

SEQ ID NO: 607434 - RNA, 19 nt, Artificial Sequence
  Synthetic
caacuuuaucaaaaaucug

SEQ ID NO: 607435 - RNA, 20 nt, Artificial Sequence
  Synthetic
gcaacuuuaucaaaaaucug

SEQ ID NO: 607436 - RNA, 21 nt, Artificial Sequence
  Synthetic
ugcaacuuuaucaaaaaucug

SEQ ID NO: 607437 - RNA, 22 nt, Artificial Sequence
  Synthetic
uugcaacuuuaucaaaaaucug

SEQ ID NO: 607438 - RNA, 23 nt, Artificial Sequence
  Synthetic
uuugcaacuuuaucaaaaaucug

SEQ ID NO: 607439 - RNA, 24 nt, Artificial Sequence
  Synthetic
uuuugcaacuuuaucaaaaaucug

SEQ ID NO: 607440 - RNA, 18 nt, Artificial Sequence
  Synthetic
agugcccucaaaaaucug

SEQ ID NO: 607441 - RNA, 19 nt, Artificial Sequence
  Synthetic
uagugcccucaaaaaucug

SEQ ID NO: 607442 - RNA, 20 nt, Artificial Sequence
  Synthetic
uuagugcccucaaaaaucug

SEQ ID NO: 607443 - RNA, 21 nt, Artificial Sequence
  Synthetic
uuuagugcccucaaaaaucug

SEQ ID NO: 607444 - RNA, 22 nt, Artificial Sequence
  Synthetic
auuuagugcccucaaaaaucug

SEQ ID NO: 607445 - RNA, 23 nt, Artificial Sequence
  Synthetic
gauuuagugcccucaaaaaucug

SEQ ID NO: 607446 - RNA, 24 nt, Artificial Sequence
  Synthetic
ugauuuagugcccucaaaaaucug

SEQ ID NO: 607447 - RNA, 18 nt, Artificial Sequence
  Synthetic
ugcggaagagaaaaucug

SEQ ID NO: 607448 - RNA, 19 nt, Artificial Sequence
  Synthetic
augcggaagagaaaaucug

SEQ ID NO: 607449 - RNA, 20 nt, Artificial Sequence
  Synthetic
aaugcggaagagaaaaucug

SEQ ID NO: 607450 - RNA, 21 nt, Artificial Sequence
  Synthetic
aaaugcggaagagaaaaucug

SEQ ID NO: 607451 - RNA, 22 nt, Artificial Sequence
  Synthetic
uaaaugcggaagagaaaaucug

SEQ ID NO: 607452 - RNA, 23 nt, Artificial Sequence
  Synthetic
uuaaaugcggaagagaaaaucug

SEQ ID NO: 607453 - RNA, 24 nt, Artificial Sequence
  Synthetic
uuuaaaugcggaagagaaaaucug

SEQ ID NO: 607454 - RNA, 18 nt, Artificial Sequence
  Synthetic
aacuccccugaaaaucug

SEQ ID NO: 607455 - RNA, 19 nt, Artificial Sequence
  Synthetic
gaacuccccugaaaaucug

SEQ ID NO: 607456 - RNA, 20 nt, Artificial Sequence
  Synthetic
agaacuccccugaaaaucug

SEQ ID NO: 607457 - RNA, 21 nt, Artificial Sequence
  Synthetic
cagaacuccccugaaaaucug

SEQ ID NO: 607458 - RNA, 22 nt, Artificial Sequence
  Synthetic
ccagaacuccccugaaaaucug

SEQ ID NO: 607459 - RNA, 23 nt, Artificial Sequence
  Synthetic
uccagaacuccccugaaaaucug

SEQ ID NO: 607460 - RNA, 24 nt, Artificial Sequence
  Synthetic
uuccagaacuccccugaaaaucug

SEQ ID NO: 607461 - RNA, 18 nt, Artificial Sequence
  Synthetic
uuuucagaauaaaaucug

SEQ ID NO: 607462 - RNA, 19 nt, Artificial Sequence
  Synthetic
uuuuucagaauaaaaucug

SEQ ID NO: 607463 - RNA, 20 nt, Artificial Sequence
  Synthetic
guuuuucagaauaaaaucug

SEQ ID NO: 607464 - RNA, 21 nt, Artificial Sequence
  Synthetic
uguuuuucagaauaaaaucug

SEQ ID NO: 607465 - RNA, 22 nt, Artificial Sequence
  Synthetic
guguuuuucagaauaaaaucug

SEQ ID NO: 607466 - RNA, 23 nt, Artificial Sequence
  Synthetic
uguguuuuucagaauaaaaucug

SEQ ID NO: 607467 - RNA, 24 nt, Artificial Sequence
  Synthetic
uuguguuuuucagaauaaaaucug

SEQ ID NO: 607468 - RNA, 18 nt, Artificial Sequence
  Synthetic
gacuucuuuggcaaucug

SEQ ID NO: 607469 - RNA, 19 nt, Artificial Sequence
  Synthetic
ggacuucuuuggcaaucug

SEQ ID NO: 607470 - RNA, 20 nt, Artificial Sequence
  Synthetic
uggacuucuuuggcaaucug

SEQ ID NO: 607471 - RNA, 21 nt, Artificial Sequence
  Synthetic
uuggacuucuuuggcaaucug

SEQ ID NO: 607472 - RNA, 22 nt, Artificial Sequence
  Synthetic
cuuggacuucuuuggcaaucug

SEQ ID NO: 607473 - RNA, 23 nt, Artificial Sequence
  Synthetic
ccuuggacuucuuuggcaaucug

SEQ ID NO: 607474 - RNA, 24 nt, Artificial Sequence
  Synthetic
gccuuggacuucuuuggcaaucug

SEQ ID NO: 607475 - RNA, 18 nt, Artificial Sequence
  Synthetic
aggcaaggacagaaucug

SEQ ID NO: 607476 - RNA, 19 nt, Artificial Sequence
  Synthetic
aaggcaaggacagaaucug

SEQ ID NO: 607477 - RNA, 20 nt, Artificial Sequence
  Synthetic
aaaggcaaggacagaaucug

SEQ ID NO: 607478 - RNA, 21 nt, Artificial Sequence
  Synthetic
caaaggcaaggacagaaucug

SEQ ID NO: 607479 - RNA, 22 nt, Artificial Sequence
  Synthetic
ucaaaggcaaggacagaaucug

SEQ ID NO: 607480 - RNA, 23 nt, Artificial Sequence
  Synthetic
cucaaaggcaaggacagaaucug

SEQ ID NO: 607481 - RNA, 24 nt, Artificial Sequence
  Synthetic
ccucaaaggcaaggacagaaucug

SEQ ID NO: 607482 - RNA, 18 nt, Artificial Sequence
  Synthetic
uggcucauuacgaaucug

SEQ ID NO: 607483 - RNA, 19 nt, Artificial Sequence
  Synthetic
uuggcucauuacgaaucug

SEQ ID NO: 607484 - RNA, 20 nt, Artificial Sequence
  Synthetic
auuggcucauuacgaaucug

SEQ ID NO: 607485 - RNA, 21 nt, Artificial Sequence
  Synthetic
aauuggcucauuacgaaucug

SEQ ID NO: 607486 - RNA, 22 nt, Artificial Sequence
  Synthetic
aaauuggcucauuacgaaucug

SEQ ID NO: 607487 - RNA, 23 nt, Artificial Sequence
  Synthetic
uaaauuggcucauuacgaaucug

SEQ ID NO: 607488 - RNA, 24 nt, Artificial Sequence
  Synthetic
auaaauuggcucauuacgaaucug

SEQ ID NO: 607489 - RNA, 18 nt, Artificial Sequence
  Synthetic
aaauacaaauggaaucug

SEQ ID NO: 607490 - RNA, 19 nt, Artificial Sequence
  Synthetic
caaauacaaauggaaucug

SEQ ID NO: 607491 - RNA, 20 nt, Artificial Sequence
  Synthetic
ccaaauacaaauggaaucug

SEQ ID NO: 607492 - RNA, 21 nt, Artificial Sequence
  Synthetic
cccaaauacaaauggaaucug

SEQ ID NO: 607493 - RNA, 22 nt, Artificial Sequence
  Synthetic
ccccaaauacaaauggaaucug

SEQ ID NO: 607494 - RNA, 23 nt, Artificial Sequence
  Synthetic
uccccaaauacaaauggaaucug

SEQ ID NO: 607495 - RNA, 24 nt, Artificial Sequence
  Synthetic
auccccaaauacaaauggaaucug

SEQ ID NO: 607496 - RNA, 18 nt, Artificial Sequence
  Synthetic
ggaaauugagugaaucug

SEQ ID NO: 607497 - RNA, 19 nt, Artificial Sequence
  Synthetic
aggaaauugagugaaucug

SEQ ID NO: 607498 - RNA, 20 nt, Artificial Sequence
  Synthetic
aaggaaauugagugaaucug

SEQ ID NO: 607499 - RNA, 21 nt, Artificial Sequence
  Synthetic
gaaggaaauugagugaaucug

SEQ ID NO: 607500 - RNA, 22 nt, Artificial Sequence
  Synthetic
ggaaggaaauugagugaaucug

SEQ ID NO: 607501 - RNA, 23 nt, Artificial Sequence
  Synthetic
aggaaggaaauugagugaaucug

SEQ ID NO: 607502 - RNA, 24 nt, Artificial Sequence
  Synthetic
gaggaaggaaauugagugaaucug

SEQ ID NO: 607503 - RNA, 18 nt, Artificial Sequence
  Synthetic
gaguagauuacuaaucug

SEQ ID NO: 607504 - RNA, 19 nt, Artificial Sequence
  Synthetic
ugaguagauuacuaaucug

SEQ ID NO: 607505 - RNA, 20 nt, Artificial Sequence
  Synthetic
uugaguagauuacuaaucug

SEQ ID NO: 607506 - RNA, 21 nt, Artificial Sequence
  Synthetic
auugaguagauuacuaaucug

SEQ ID NO: 607507 - RNA, 22 nt, Artificial Sequence
  Synthetic
uauugaguagauuacuaaucug

SEQ ID NO: 607508 - RNA, 23 nt, Artificial Sequence
  Synthetic
uuauugaguagauuacuaaucug

SEQ ID NO: 607509 - RNA, 24 nt, Artificial Sequence
  Synthetic
uuuauugaguagauuacuaaucug

SEQ ID NO: 607510 - RNA, 18 nt, Artificial Sequence
  Synthetic
uucuauauuugacaucug

SEQ ID NO: 607511 - RNA, 19 nt, Artificial Sequence
  Synthetic
cuucuauauuugacaucug

SEQ ID NO: 607512 - RNA, 20 nt, Artificial Sequence
  Synthetic
ucuucuauauuugacaucug

SEQ ID NO: 607513 - RNA, 21 nt, Artificial Sequence
  Synthetic
uucuucuauauuugacaucug

SEQ ID NO: 607514 - RNA, 22 nt, Artificial Sequence
  Synthetic
guucuucuauauuugacaucug

SEQ ID NO: 607515 - RNA, 23 nt, Artificial Sequence
  Synthetic
uguucuucuauauuugacaucug

SEQ ID NO: 607516 - RNA, 24 nt, Artificial Sequence
  Synthetic
cuguucuucuauauuugacaucug

SEQ ID NO: 607517 - RNA, 18 nt, Artificial Sequence
  Synthetic
ugcauaguauuccaucug

SEQ ID NO: 607518 - RNA, 19 nt, Artificial Sequence
  Synthetic
augcauaguauuccaucug

SEQ ID NO: 607519 - RNA, 20 nt, Artificial Sequence
  Synthetic
uaugcauaguauuccaucug

SEQ ID NO: 607520 - RNA, 21 nt, Artificial Sequence
  Synthetic
uuaugcauaguauuccaucug

SEQ ID NO: 607521 - RNA, 22 nt, Artificial Sequence
  Synthetic
uuuaugcauaguauuccaucug

SEQ ID NO: 607522 - RNA, 23 nt, Artificial Sequence
  Synthetic
cuuuaugcauaguauuccaucug

SEQ ID NO: 607523 - RNA, 24 nt, Artificial Sequence
  Synthetic
ccuuuaugcauaguauuccaucug

SEQ ID NO: 607524 - RNA, 18 nt, Artificial Sequence
  Synthetic
gaugauuuagggcaucug

SEQ ID NO: 607525 - RNA, 19 nt, Artificial Sequence
  Synthetic
agaugauuuagggcaucug

SEQ ID NO: 607526 - RNA, 20 nt, Artificial Sequence
  Synthetic
gagaugauuuagggcaucug

SEQ ID NO: 607527 - RNA, 21 nt, Artificial Sequence
  Synthetic
agagaugauuuagggcaucug

SEQ ID NO: 607528 - RNA, 22 nt, Artificial Sequence
  Synthetic
gagagaugauuuagggcaucug

SEQ ID NO: 607529 - RNA, 23 nt, Artificial Sequence
  Synthetic
agagagaugauuuagggcaucug

SEQ ID NO: 607530 - RNA, 24 nt, Artificial Sequence
  Synthetic
gagagagaugauuuagggcaucug

SEQ ID NO: 607531 - RNA, 18 nt, Artificial Sequence
  Synthetic
aaaguggugaaucaucug

SEQ ID NO: 607532 - RNA, 19 nt, Artificial Sequence
  Synthetic
gaaaguggugaaucaucug

SEQ ID NO: 607533 - RNA, 20 nt, Artificial Sequence
  Synthetic
agaaaguggugaaucaucug

SEQ ID NO: 607534 - RNA, 21 nt, Artificial Sequence
  Synthetic
aagaaaguggugaaucaucug

SEQ ID NO: 607535 - RNA, 22 nt, Artificial Sequence
  Synthetic
aaagaaaguggugaaucaucug

SEQ ID NO: 607536 - RNA, 23 nt, Artificial Sequence
  Synthetic
caaagaaaguggugaaucaucug

SEQ ID NO: 607537 - RNA, 24 nt, Artificial Sequence
  Synthetic
acaaagaaaguggugaaucaucug

SEQ ID NO: 607538 - RNA, 18 nt, Artificial Sequence
  Synthetic
cuucaguuucuucaucug

SEQ ID NO: 607539 - RNA, 19 nt, Artificial Sequence
  Synthetic
gcuucaguuucuucaucug

SEQ ID NO: 607540 - RNA, 20 nt, Artificial Sequence
  Synthetic
ugcuucaguuucuucaucug

SEQ ID NO: 607541 - RNA, 21 nt, Artificial Sequence
  Synthetic
gugcuucaguuucuucaucug

SEQ ID NO: 607542 - RNA, 22 nt, Artificial Sequence
  Synthetic
ugugcuucaguuucuucaucug

SEQ ID NO: 607543 - RNA, 23 nt, Artificial Sequence
  Synthetic
cugugcuucaguuucuucaucug

SEQ ID NO: 607544 - RNA, 24 nt, Artificial Sequence
  Synthetic
ucugugcuucaguuucuucaucug

SEQ ID NO: 607545 - RNA, 18 nt, Artificial Sequence
  Synthetic
uauuuaaauaaagaucug

SEQ ID NO: 607546 - RNA, 19 nt, Artificial Sequence
  Synthetic
guauuuaaauaaagaucug

SEQ ID NO: 607547 - RNA, 20 nt, Artificial Sequence
  Synthetic
gguauuuaaauaaagaucug

SEQ ID NO: 607548 - RNA, 21 nt, Artificial Sequence
  Synthetic
ugguauuuaaauaaagaucug

SEQ ID NO: 607549 - RNA, 22 nt, Artificial Sequence
  Synthetic
gugguauuuaaauaaagaucug

SEQ ID NO: 607550 - RNA, 23 nt, Artificial Sequence
  Synthetic
ggugguauuuaaauaaagaucug

SEQ ID NO: 607551 - RNA, 24 nt, Artificial Sequence
  Synthetic
aggugguauuuaaauaaagaucug

SEQ ID NO: 607552 - RNA, 18 nt, Artificial Sequence
  Synthetic
uuuuuaaguaaagaucug

SEQ ID NO: 607553 - RNA, 19 nt, Artificial Sequence
  Synthetic
guuuuuaaguaaagaucug

SEQ ID NO: 607554 - RNA, 20 nt, Artificial Sequence
  Synthetic
aguuuuuaaguaaagaucug

SEQ ID NO: 607555 - RNA, 21 nt, Artificial Sequence
  Synthetic
caguuuuuaaguaaagaucug

SEQ ID NO: 607556 - RNA, 22 nt, Artificial Sequence
  Synthetic
gcaguuuuuaaguaaagaucug

SEQ ID NO: 607557 - RNA, 23 nt, Artificial Sequence
  Synthetic
ggcaguuuuuaaguaaagaucug

SEQ ID NO: 607558 - RNA, 24 nt, Artificial Sequence
  Synthetic
aggcaguuuuuaaguaaagaucug

SEQ ID NO: 607559 - RNA, 18 nt, Artificial Sequence
  Synthetic
ucuagacaggcagaucug

SEQ ID NO: 607560 - RNA, 19 nt, Artificial Sequence
  Synthetic
cucuagacaggcagaucug

SEQ ID NO: 607561 - RNA, 20 nt, Artificial Sequence
  Synthetic
ucucuagacaggcagaucug

SEQ ID NO: 607562 - RNA, 21 nt, Artificial Sequence
  Synthetic
aucucuagacaggcagaucug

SEQ ID NO: 607563 - RNA, 22 nt, Artificial Sequence
  Synthetic
aaucucuagacaggcagaucug

SEQ ID NO: 607564 - RNA, 23 nt, Artificial Sequence
  Synthetic
aaaucucuagacaggcagaucug

SEQ ID NO: 607565 - RNA, 24 nt, Artificial Sequence
  Synthetic
uaaaucucuagacaggcagaucug

SEQ ID NO: 607566 - RNA, 18 nt, Artificial Sequence
  Synthetic
cccugaccuagagaucug

SEQ ID NO: 607567 - RNA, 19 nt, Artificial Sequence
  Synthetic
acccugaccuagagaucug

SEQ ID NO: 607568 - RNA, 20 nt, Artificial Sequence
  Synthetic
gacccugaccuagagaucug

SEQ ID NO: 607569 - RNA, 21 nt, Artificial Sequence
  Synthetic
ugacccugaccuagagaucug

SEQ ID NO: 607570 - RNA, 22 nt, Artificial Sequence
  Synthetic
uugacccugaccuagagaucug

SEQ ID NO: 607571 - RNA, 23 nt, Artificial Sequence
  Synthetic
uuugacccugaccuagagaucug

SEQ ID NO: 607572 - RNA, 24 nt, Artificial Sequence
  Synthetic
uuuugacccugaccuagagaucug

SEQ ID NO: 607573 - RNA, 18 nt, Artificial Sequence
  Synthetic
uuggaguuauuagaucug

SEQ ID NO: 607574 - RNA, 19 nt, Artificial Sequence
  Synthetic
cuuggaguuauuagaucug

SEQ ID NO: 607575 - RNA, 20 nt, Artificial Sequence
  Synthetic
gcuuggaguuauuagaucug

SEQ ID NO: 607576 - RNA, 21 nt, Artificial Sequence
  Synthetic
agcuuggaguuauuagaucug

SEQ ID NO: 607577 - RNA, 22 nt, Artificial Sequence
  Synthetic
aagcuuggaguuauuagaucug

SEQ ID NO: 607578 - RNA, 23 nt, Artificial Sequence
  Synthetic
uaagcuuggaguuauuagaucug

SEQ ID NO: 607579 - RNA, 24 nt, Artificial Sequence
  Synthetic
uuaagcuuggaguuauuagaucug

SEQ ID NO: 607580 - RNA, 18 nt, Artificial Sequence
  Synthetic
ugcugaggguaggaucug

SEQ ID NO: 607581 - RNA, 19 nt, Artificial Sequence
  Synthetic
gugcugaggguaggaucug

SEQ ID NO: 607582 - RNA, 20 nt, Artificial Sequence
  Synthetic
agugcugaggguaggaucug

SEQ ID NO: 607583 - RNA, 21 nt, Artificial Sequence
  Synthetic
aagugcugaggguaggaucug

SEQ ID NO: 607584 - RNA, 22 nt, Artificial Sequence
  Synthetic
gaagugcugaggguaggaucug

SEQ ID NO: 607585 - RNA, 23 nt, Artificial Sequence
  Synthetic
agaagugcugaggguaggaucug

SEQ ID NO: 607586 - RNA, 24 nt, Artificial Sequence
  Synthetic
aagaagugcugaggguaggaucug

SEQ ID NO: 607587 - RNA, 18 nt, Artificial Sequence
  Synthetic
caaacauuaagggaucug

SEQ ID NO: 607588 - RNA, 19 nt, Artificial Sequence
  Synthetic
gcaaacauuaagggaucug

SEQ ID NO: 607589 - RNA, 20 nt, Artificial Sequence
  Synthetic
agcaaacauuaagggaucug

SEQ ID NO: 607590 - RNA, 21 nt, Artificial Sequence
  Synthetic
aagcaaacauuaagggaucug

SEQ ID NO: 607591 - RNA, 22 nt, Artificial Sequence
  Synthetic
aaagcaaacauuaagggaucug

SEQ ID NO: 607592 - RNA, 23 nt, Artificial Sequence
  Synthetic
uaaagcaaacauuaagggaucug

SEQ ID NO: 607593 - RNA, 24 nt, Artificial Sequence
  Synthetic
auaaagcaaacauuaagggaucug

SEQ ID NO: 607594 - RNA, 18 nt, Artificial Sequence
  Synthetic
uauauguggaaugaucug

SEQ ID NO: 607595 - RNA, 19 nt, Artificial Sequence
  Synthetic
auauauguggaaugaucug

SEQ ID NO: 607596 - RNA, 20 nt, Artificial Sequence
  Synthetic
uauauauguggaaugaucug

SEQ ID NO: 607597 - RNA, 21 nt, Artificial Sequence
  Synthetic
guauauauguggaaugaucug

SEQ ID NO: 607598 - RNA, 22 nt, Artificial Sequence
  Synthetic
aguauauauguggaaugaucug

SEQ ID NO: 607599 - RNA, 23 nt, Artificial Sequence
  Synthetic
aaguauauauguggaaugaucug

SEQ ID NO: 607600 - RNA, 24 nt, Artificial Sequence
  Synthetic
caaguauauauguggaaugaucug

SEQ ID NO: 607601 - RNA, 18 nt, Artificial Sequence
  Synthetic
gaaccauaucuugaucug

SEQ ID NO: 607602 - RNA, 19 nt, Artificial Sequence
  Synthetic
ggaaccauaucuugaucug

SEQ ID NO: 607603 - RNA, 20 nt, Artificial Sequence
  Synthetic
aggaaccauaucuugaucug

SEQ ID NO: 607604 - RNA, 21 nt, Artificial Sequence
  Synthetic
gaggaaccauaucuugaucug

SEQ ID NO: 607605 - RNA, 22 nt, Artificial Sequence
  Synthetic
ugaggaaccauaucuugaucug

SEQ ID NO: 607606 - RNA, 23 nt, Artificial Sequence
  Synthetic
augaggaaccauaucuugaucug

SEQ ID NO: 607607 - RNA, 24 nt, Artificial Sequence
  Synthetic
caugaggaaccauaucuugaucug

SEQ ID NO: 607608 - RNA, 18 nt, Artificial Sequence
  Synthetic
uuuugcaguucauaucug

SEQ ID NO: 607609 - RNA, 19 nt, Artificial Sequence
  Synthetic
auuuugcaguucauaucug

SEQ ID NO: 607610 - RNA, 20 nt, Artificial Sequence
  Synthetic
cauuuugcaguucauaucug

SEQ ID NO: 607611 - RNA, 21 nt, Artificial Sequence
  Synthetic
ucauuuugcaguucauaucug

SEQ ID NO: 607612 - RNA, 22 nt, Artificial Sequence
  Synthetic
gucauuuugcaguucauaucug

SEQ ID NO: 607613 - RNA, 23 nt, Artificial Sequence
  Synthetic
ugucauuuugcaguucauaucug

SEQ ID NO: 607614 - RNA, 24 nt, Artificial Sequence
  Synthetic
cugucauuuugcaguucauaucug

SEQ ID NO: 607615 - RNA, 18 nt, Artificial Sequence
  Synthetic
auguauuaucuauaucug

SEQ ID NO: 607616 - RNA, 19 nt, Artificial Sequence
  Synthetic
aauguauuaucuauaucug

SEQ ID NO: 607617 - RNA, 20 nt, Artificial Sequence
  Synthetic
aaauguauuaucuauaucug

SEQ ID NO: 607618 - RNA, 21 nt, Artificial Sequence
  Synthetic
aaaauguauuaucuauaucug

SEQ ID NO: 607619 - RNA, 22 nt, Artificial Sequence
  Synthetic
gaaaauguauuaucuauaucug

SEQ ID NO: 607620 - RNA, 23 nt, Artificial Sequence
  Synthetic
ggaaaauguauuaucuauaucug

SEQ ID NO: 607621 - RNA, 24 nt, Artificial Sequence
  Synthetic
gggaaaauguauuaucuauaucug

SEQ ID NO: 607622 - RNA, 18 nt, Artificial Sequence
  Synthetic
aagcaauacugcuaucug

SEQ ID NO: 607623 - RNA, 19 nt, Artificial Sequence
  Synthetic
caagcaauacugcuaucug

SEQ ID NO: 607624 - RNA, 20 nt, Artificial Sequence
  Synthetic
ccaagcaauacugcuaucug

SEQ ID NO: 607625 - RNA, 21 nt, Artificial Sequence
  Synthetic
gccaagcaauacugcuaucug

SEQ ID NO: 607626 - RNA, 22 nt, Artificial Sequence
  Synthetic
ggccaagcaauacugcuaucug

SEQ ID NO: 607627 - RNA, 23 nt, Artificial Sequence
  Synthetic
uggccaagcaauacugcuaucug

SEQ ID NO: 607628 - RNA, 24 nt, Artificial Sequence
  Synthetic
auggccaagcaauacugcuaucug

SEQ ID NO: 607629 - RNA, 18 nt, Artificial Sequence
  Synthetic
uguuuauuacucuaucug

SEQ ID NO: 607630 - RNA, 19 nt, Artificial Sequence
  Synthetic
guguuuauuacucuaucug

SEQ ID NO: 607631 - RNA, 20 nt, Artificial Sequence
  Synthetic
uguguuuauuacucuaucug

SEQ ID NO: 607632 - RNA, 21 nt, Artificial Sequence
  Synthetic
uuguguuuauuacucuaucug

SEQ ID NO: 607633 - RNA, 22 nt, Artificial Sequence
  Synthetic
guuguguuuauuacucuaucug

SEQ ID NO: 607634 - RNA, 23 nt, Artificial Sequence
  Synthetic
aguuguguuuauuacucuaucug

SEQ ID NO: 607635 - RNA, 24 nt, Artificial Sequence
  Synthetic
gaguuguguuuauuacucuaucug

SEQ ID NO: 607636 - RNA, 18 nt, Artificial Sequence
  Synthetic
uucucauaugucuaucug

SEQ ID NO: 607637 - RNA, 19 nt, Artificial Sequence
  Synthetic
guucucauaugucuaucug

SEQ ID NO: 607638 - RNA, 20 nt, Artificial Sequence
  Synthetic
uguucucauaugucuaucug

SEQ ID NO: 607639 - RNA, 21 nt, Artificial Sequence
  Synthetic
guguucucauaugucuaucug

SEQ ID NO: 607640 - RNA, 22 nt, Artificial Sequence
  Synthetic
gguguucucauaugucuaucug

SEQ ID NO: 607641 - RNA, 23 nt, Artificial Sequence
  Synthetic
agguguucucauaugucuaucug

SEQ ID NO: 607642 - RNA, 24 nt, Artificial Sequence
  Synthetic
uagguguucucauaugucuaucug

SEQ ID NO: 607643 - RNA, 18 nt, Artificial Sequence
  Synthetic
gacuucugauucuaucug

SEQ ID NO: 607644 - RNA, 19 nt, Artificial Sequence
  Synthetic
ggacuucugauucuaucug

SEQ ID NO: 607645 - RNA, 20 nt, Artificial Sequence
  Synthetic
gggacuucugauucuaucug

SEQ ID NO: 607646 - RNA, 21 nt, Artificial Sequence
  Synthetic
ggggacuucugauucuaucug

SEQ ID NO: 607647 - RNA, 22 nt, Artificial Sequence
  Synthetic
aggggacuucugauucuaucug

SEQ ID NO: 607648 - RNA, 23 nt, Artificial Sequence
  Synthetic
gaggggacuucugauucuaucug

SEQ ID NO: 607649 - RNA, 24 nt, Artificial Sequence
  Synthetic
agaggggacuucugauucuaucug

SEQ ID NO: 607650 - RNA, 18 nt, Artificial Sequence
  Synthetic
cucauucucuucuaucug

SEQ ID NO: 607651 - RNA, 19 nt, Artificial Sequence
  Synthetic
ccucauucucuucuaucug

SEQ ID NO: 607652 - RNA, 20 nt, Artificial Sequence
  Synthetic
uccucauucucuucuaucug

SEQ ID NO: 607653 - RNA, 21 nt, Artificial Sequence
  Synthetic
auccucauucucuucuaucug

SEQ ID NO: 607654 - RNA, 22 nt, Artificial Sequence
  Synthetic
aauccucauucucuucuaucug

SEQ ID NO: 607655 - RNA, 23 nt, Artificial Sequence
  Synthetic
uaauccucauucucuucuaucug

SEQ ID NO: 607656 - RNA, 24 nt, Artificial Sequence
  Synthetic
uuaauccucauucucuucuaucug

SEQ ID NO: 607657 - RNA, 18 nt, Artificial Sequence
  Synthetic
uuuugaaucauguaucug

SEQ ID NO: 607658 - RNA, 19 nt, Artificial Sequence
  Synthetic
auuuugaaucauguaucug

SEQ ID NO: 607659 - RNA, 20 nt, Artificial Sequence
  Synthetic
cauuuugaaucauguaucug

SEQ ID NO: 607660 - RNA, 21 nt, Artificial Sequence
  Synthetic
acauuuugaaucauguaucug

SEQ ID NO: 607661 - RNA, 22 nt, Artificial Sequence
  Synthetic
uacauuuugaaucauguaucug

SEQ ID NO: 607662 - RNA, 23 nt, Artificial Sequence
  Synthetic
auacauuuugaaucauguaucug

SEQ ID NO: 607663 - RNA, 24 nt, Artificial Sequence
  Synthetic
uauacauuuugaaucauguaucug

SEQ ID NO: 607664 - RNA, 18 nt, Artificial Sequence
  Synthetic
aaugcagaaguguaucug

SEQ ID NO: 607665 - RNA, 19 nt, Artificial Sequence
  Synthetic
gaaugcagaaguguaucug

SEQ ID NO: 607666 - RNA, 20 nt, Artificial Sequence
  Synthetic
agaaugcagaaguguaucug

SEQ ID NO: 607667 - RNA, 21 nt, Artificial Sequence
  Synthetic
cagaaugcagaaguguaucug

SEQ ID NO: 607668 - RNA, 22 nt, Artificial Sequence
  Synthetic
ucagaaugcagaaguguaucug

SEQ ID NO: 607669 - RNA, 23 nt, Artificial Sequence
  Synthetic
uucagaaugcagaaguguaucug

SEQ ID NO: 607670 - RNA, 24 nt, Artificial Sequence
  Synthetic
auucagaaugcagaaguguaucug

SEQ ID NO: 607671 - RNA, 18 nt, Artificial Sequence
  Synthetic
ugagaauuuacuuaucug

SEQ ID NO: 607672 - RNA, 19 nt, Artificial Sequence
  Synthetic
cugagaauuuacuuaucug

SEQ ID NO: 607673 - RNA, 20 nt, Artificial Sequence
  Synthetic
ucugagaauuuacuuaucug

SEQ ID NO: 607674 - RNA, 21 nt, Artificial Sequence
  Synthetic
aucugagaauuuacuuaucug

SEQ ID NO: 607675 - RNA, 22 nt, Artificial Sequence
  Synthetic
aaucugagaauuuacuuaucug

SEQ ID NO: 607676 - RNA, 23 nt, Artificial Sequence
  Synthetic
caaucugagaauuuacuuaucug

SEQ ID NO: 607677 - RNA, 24 nt, Artificial Sequence
  Synthetic
acaaucugagaauuuacuuaucug

SEQ ID NO: 607678 - RNA, 18 nt, Artificial Sequence
  Synthetic
ugguuuaccccuuaucug

SEQ ID NO: 607679 - RNA, 19 nt, Artificial Sequence
  Synthetic
gugguuuaccccuuaucug

SEQ ID NO: 607680 - RNA, 20 nt, Artificial Sequence
  Synthetic
agugguuuaccccuuaucug

SEQ ID NO: 607681 - RNA, 21 nt, Artificial Sequence
  Synthetic
cagugguuuaccccuuaucug

SEQ ID NO: 607682 - RNA, 22 nt, Artificial Sequence
  Synthetic
acagugguuuaccccuuaucug

SEQ ID NO: 607683 - RNA, 23 nt, Artificial Sequence
  Synthetic
uacagugguuuaccccuuaucug

SEQ ID NO: 607684 - RNA, 24 nt, Artificial Sequence
  Synthetic
auacagugguuuaccccuuaucug

SEQ ID NO: 607685 - RNA, 18 nt, Artificial Sequence
  Synthetic
uagucaauuucuuaucug

SEQ ID NO: 607686 - RNA, 19 nt, Artificial Sequence
  Synthetic
cuagucaauuucuuaucug

SEQ ID NO: 607687 - RNA, 20 nt, Artificial Sequence
  Synthetic
ucuagucaauuucuuaucug

SEQ ID NO: 607688 - RNA, 21 nt, Artificial Sequence
  Synthetic
aucuagucaauuucuuaucug

SEQ ID NO: 607689 - RNA, 22 nt, Artificial Sequence
  Synthetic
uaucuagucaauuucuuaucug

SEQ ID NO: 607690 - RNA, 23 nt, Artificial Sequence
  Synthetic
auaucuagucaauuucuuaucug

SEQ ID NO: 607691 - RNA, 24 nt, Artificial Sequence
  Synthetic
uauaucuagucaauuucuuaucug

SEQ ID NO: 607692 - RNA, 18 nt, Artificial Sequence
  Synthetic
cagggauguuguuaucug

SEQ ID NO: 607693 - RNA, 19 nt, Artificial Sequence
  Synthetic
acagggauguuguuaucug

SEQ ID NO: 607694 - RNA, 20 nt, Artificial Sequence
  Synthetic
uacagggauguuguuaucug

SEQ ID NO: 607695 - RNA, 21 nt, Artificial Sequence
  Synthetic
cuacagggauguuguuaucug

SEQ ID NO: 607696 - RNA, 22 nt, Artificial Sequence
  Synthetic
acuacagggauguuguuaucug

SEQ ID NO: 607697 - RNA, 23 nt, Artificial Sequence
  Synthetic
gacuacagggauguuguuaucug

SEQ ID NO: 607698 - RNA, 24 nt, Artificial Sequence
  Synthetic
ugacuacagggauguuguuaucug

SEQ ID NO: 607699 - RNA, 18 nt, Artificial Sequence
  Synthetic
uuugaaucaggaacucug

SEQ ID NO: 607700 - RNA, 19 nt, Artificial Sequence
  Synthetic
uuuugaaucaggaacucug

SEQ ID NO: 607701 - RNA, 20 nt, Artificial Sequence
  Synthetic
auuuugaaucaggaacucug

SEQ ID NO: 607702 - RNA, 21 nt, Artificial Sequence
  Synthetic
cauuuugaaucaggaacucug

SEQ ID NO: 607703 - RNA, 22 nt, Artificial Sequence
  Synthetic
acauuuugaaucaggaacucug

SEQ ID NO: 607704 - RNA, 23 nt, Artificial Sequence
  Synthetic
gacauuuugaaucaggaacucug

SEQ ID NO: 607705 - RNA, 24 nt, Artificial Sequence
  Synthetic
agacauuuugaaucaggaacucug

SEQ ID NO: 607706 - RNA, 18 nt, Artificial Sequence
  Synthetic
caccucaauuuaacucug

SEQ ID NO: 607707 - RNA, 19 nt, Artificial Sequence
  Synthetic
gcaccucaauuuaacucug

SEQ ID NO: 607708 - RNA, 20 nt, Artificial Sequence
  Synthetic
cgcaccucaauuuaacucug

SEQ ID NO: 607709 - RNA, 21 nt, Artificial Sequence
  Synthetic
ucgcaccucaauuuaacucug

SEQ ID NO: 607710 - RNA, 22 nt, Artificial Sequence
  Synthetic
uucgcaccucaauuuaacucug

SEQ ID NO: 607711 - RNA, 23 nt, Artificial Sequence
  Synthetic
uuucgcaccucaauuuaacucug

SEQ ID NO: 607712 - RNA, 24 nt, Artificial Sequence
  Synthetic
guuucgcaccucaauuuaacucug

SEQ ID NO: 607713 - RNA, 18 nt, Artificial Sequence
  Synthetic
aaagcaguuuccacucug

SEQ ID NO: 607714 - RNA, 19 nt, Artificial Sequence
  Synthetic
caaagcaguuuccacucug

SEQ ID NO: 607715 - RNA, 20 nt, Artificial Sequence
  Synthetic
ccaaagcaguuuccacucug

SEQ ID NO: 607716 - RNA, 21 nt, Artificial Sequence
  Synthetic
cccaaagcaguuuccacucug

SEQ ID NO: 607717 - RNA, 22 nt, Artificial Sequence
  Synthetic
ccccaaagcaguuuccacucug

SEQ ID NO: 607718 - RNA, 23 nt, Artificial Sequence
  Synthetic
accccaaagcaguuuccacucug

SEQ ID NO: 607719 - RNA, 24 nt, Artificial Sequence
  Synthetic
aaccccaaagcaguuuccacucug

SEQ ID NO: 607720 - RNA, 18 nt, Artificial Sequence
  Synthetic
auugugauaaucacucug

SEQ ID NO: 607721 - RNA, 19 nt, Artificial Sequence
  Synthetic
cauugugauaaucacucug

SEQ ID NO: 607722 - RNA, 20 nt, Artificial Sequence
  Synthetic
acauugugauaaucacucug

SEQ ID NO: 607723 - RNA, 21 nt, Artificial Sequence
  Synthetic
aacauugugauaaucacucug

SEQ ID NO: 607724 - RNA, 22 nt, Artificial Sequence
  Synthetic
aaacauugugauaaucacucug

SEQ ID NO: 607725 - RNA, 23 nt, Artificial Sequence
  Synthetic
aaaacauugugauaaucacucug

SEQ ID NO: 607726 - RNA, 24 nt, Artificial Sequence
  Synthetic
caaaacauugugauaaucacucug

SEQ ID NO: 607727 - RNA, 18 nt, Artificial Sequence
  Synthetic
uucaauuaugucacucug

SEQ ID NO: 607728 - RNA, 19 nt, Artificial Sequence
  Synthetic
guucaauuaugucacucug

SEQ ID NO: 607729 - RNA, 20 nt, Artificial Sequence
  Synthetic
uguucaauuaugucacucug

SEQ ID NO: 607730 - RNA, 21 nt, Artificial Sequence
  Synthetic
auguucaauuaugucacucug

SEQ ID NO: 607731 - RNA, 22 nt, Artificial Sequence
  Synthetic
aauguucaauuaugucacucug

SEQ ID NO: 607732 - RNA, 23 nt, Artificial Sequence
  Synthetic
gaauguucaauuaugucacucug

SEQ ID NO: 607733 - RNA, 24 nt, Artificial Sequence
  Synthetic
agaauguucaauuaugucacucug

SEQ ID NO: 607734 - RNA, 18 nt, Artificial Sequence
  Synthetic
uguaaacaggaaccucug

SEQ ID NO: 607735 - RNA, 19 nt, Artificial Sequence
  Synthetic
cuguaaacaggaaccucug

SEQ ID NO: 607736 - RNA, 20 nt, Artificial Sequence
  Synthetic
acuguaaacaggaaccucug

SEQ ID NO: 607737 - RNA, 21 nt, Artificial Sequence
  Synthetic
aacuguaaacaggaaccucug

SEQ ID NO: 607738 - RNA, 22 nt, Artificial Sequence
  Synthetic
aaacuguaaacaggaaccucug

SEQ ID NO: 607739 - RNA, 23 nt, Artificial Sequence
  Synthetic
gaaacuguaaacaggaaccucug

SEQ ID NO: 607740 - RNA, 24 nt, Artificial Sequence
  Synthetic
ggaaacuguaaacaggaaccucug

SEQ ID NO: 607741 - RNA, 18 nt, Artificial Sequence
  Synthetic
aaaacauuuuaaccucug

SEQ ID NO: 607742 - RNA, 19 nt, Artificial Sequence
  Synthetic
aaaaacauuuuaaccucug

SEQ ID NO: 607743 - RNA, 20 nt, Artificial Sequence
  Synthetic
caaaaacauuuuaaccucug

SEQ ID NO: 607744 - RNA, 21 nt, Artificial Sequence
  Synthetic
gcaaaaacauuuuaaccucug

SEQ ID NO: 607745 - RNA, 22 nt, Artificial Sequence
  Synthetic
ugcaaaaacauuuuaaccucug

SEQ ID NO: 607746 - RNA, 23 nt, Artificial Sequence
  Synthetic
uugcaaaaacauuuuaaccucug

SEQ ID NO: 607747 - RNA, 24 nt, Artificial Sequence
  Synthetic
guugcaaaaacauuuuaaccucug

SEQ ID NO: 607748 - RNA, 18 nt, Artificial Sequence
  Synthetic
auaguauugcagccucug

SEQ ID NO: 607749 - RNA, 19 nt, Artificial Sequence
  Synthetic
aauaguauugcagccucug

SEQ ID NO: 607750 - RNA, 20 nt, Artificial Sequence
  Synthetic
aaauaguauugcagccucug

SEQ ID NO: 607751 - RNA, 21 nt, Artificial Sequence
  Synthetic
aaaauaguauugcagccucug

SEQ ID NO: 607752 - RNA, 22 nt, Artificial Sequence
  Synthetic
aaaaauaguauugcagccucug

SEQ ID NO: 607753 - RNA, 23 nt, Artificial Sequence
  Synthetic
caaaaauaguauugcagccucug

SEQ ID NO: 607754 - RNA, 24 nt, Artificial Sequence
  Synthetic
ucaaaaauaguauugcagccucug

SEQ ID NO: 607755 - RNA, 18 nt, Artificial Sequence
  Synthetic
auugucaaacguccucug

SEQ ID NO: 607756 - RNA, 19 nt, Artificial Sequence
  Synthetic
cauugucaaacguccucug

SEQ ID NO: 607757 - RNA, 20 nt, Artificial Sequence
  Synthetic
acauugucaaacguccucug

SEQ ID NO: 607758 - RNA, 21 nt, Artificial Sequence
  Synthetic
uacauugucaaacguccucug

SEQ ID NO: 607759 - RNA, 22 nt, Artificial Sequence
  Synthetic
guacauugucaaacguccucug

SEQ ID NO: 607760 - RNA, 23 nt, Artificial Sequence
  Synthetic
cguacauugucaaacguccucug

SEQ ID NO: 607761 - RNA, 24 nt, Artificial Sequence
  Synthetic
ccguacauugucaaacguccucug

SEQ ID NO: 607762 - RNA, 18 nt, Artificial Sequence
  Synthetic
ggagaauuuguuccucug

SEQ ID NO: 607763 - RNA, 19 nt, Artificial Sequence
  Synthetic
uggagaauuuguuccucug

SEQ ID NO: 607764 - RNA, 20 nt, Artificial Sequence
  Synthetic
auggagaauuuguuccucug

SEQ ID NO: 607765 - RNA, 21 nt, Artificial Sequence
  Synthetic
aauggagaauuuguuccucug

SEQ ID NO: 607766 - RNA, 22 nt, Artificial Sequence
  Synthetic
aaauggagaauuuguuccucug

SEQ ID NO: 607767 - RNA, 23 nt, Artificial Sequence
  Synthetic
gaaauggagaauuuguuccucug

SEQ ID NO: 607768 - RNA, 24 nt, Artificial Sequence
  Synthetic
agaaauggagaauuuguuccucug

SEQ ID NO: 607769 - RNA, 18 nt, Artificial Sequence
  Synthetic
gaacacugaacagcucug

SEQ ID NO: 607770 - RNA, 19 nt, Artificial Sequence
  Synthetic
ggaacacugaacagcucug

SEQ ID NO: 607771 - RNA, 20 nt, Artificial Sequence
  Synthetic
aggaacacugaacagcucug

SEQ ID NO: 607772 - RNA, 21 nt, Artificial Sequence
  Synthetic
caggaacacugaacagcucug

SEQ ID NO: 607773 - RNA, 22 nt, Artificial Sequence
  Synthetic
ccaggaacacugaacagcucug

SEQ ID NO: 607774 - RNA, 23 nt, Artificial Sequence
  Synthetic
uccaggaacacugaacagcucug

SEQ ID NO: 607775 - RNA, 24 nt, Artificial Sequence
  Synthetic
auccaggaacacugaacagcucug

SEQ ID NO: 607776 - RNA, 18 nt, Artificial Sequence
  Synthetic
auuuuauuuauagcucug

SEQ ID NO: 607777 - RNA, 19 nt, Artificial Sequence
  Synthetic
cauuuuauuuauagcucug

SEQ ID NO: 607778 - RNA, 20 nt, Artificial Sequence
  Synthetic
ucauuuuauuuauagcucug

SEQ ID NO: 607779 - RNA, 21 nt, Artificial Sequence
  Synthetic
uucauuuuauuuauagcucug

SEQ ID NO: 607780 - RNA, 22 nt, Artificial Sequence
  Synthetic
uuucauuuuauuuauagcucug

SEQ ID NO: 607781 - RNA, 23 nt, Artificial Sequence
  Synthetic
auuucauuuuauuuauagcucug

SEQ ID NO: 607782 - RNA, 24 nt, Artificial Sequence
  Synthetic
uauuucauuuuauuuauagcucug

SEQ ID NO: 607783 - RNA, 18 nt, Artificial Sequence
  Synthetic
gcugggucuuacgcucug

SEQ ID NO: 607784 - RNA, 19 nt, Artificial Sequence
  Synthetic
agcugggucuuacgcucug

SEQ ID NO: 607785 - RNA, 20 nt, Artificial Sequence
  Synthetic
aagcugggucuuacgcucug

SEQ ID NO: 607786 - RNA, 21 nt, Artificial Sequence
  Synthetic
gaagcugggucuuacgcucug

SEQ ID NO: 607787 - RNA, 22 nt, Artificial Sequence
  Synthetic
ugaagcugggucuuacgcucug

SEQ ID NO: 607788 - RNA, 23 nt, Artificial Sequence
  Synthetic
gugaagcugggucuuacgcucug

SEQ ID NO: 607789 - RNA, 24 nt, Artificial Sequence
  Synthetic
cgugaagcugggucuuacgcucug

SEQ ID NO: 607790 - RNA, 18 nt, Artificial Sequence
  Synthetic
caucuugguuaggcucug

SEQ ID NO: 607791 - RNA, 19 nt, Artificial Sequence
  Synthetic
ucaucuugguuaggcucug

SEQ ID NO: 607792 - RNA, 20 nt, Artificial Sequence
  Synthetic
uucaucuugguuaggcucug

SEQ ID NO: 607793 - RNA, 21 nt, Artificial Sequence
  Synthetic
cuucaucuugguuaggcucug

SEQ ID NO: 607794 - RNA, 22 nt, Artificial Sequence
  Synthetic
ccuucaucuugguuaggcucug

SEQ ID NO: 607795 - RNA, 23 nt, Artificial Sequence
  Synthetic
cccuucaucuugguuaggcucug

SEQ ID NO: 607796 - RNA, 24 nt, Artificial Sequence
  Synthetic
ucccuucaucuugguuaggcucug

SEQ ID NO: 607797 - RNA, 18 nt, Artificial Sequence
  Synthetic
uccagaugacgggcucug

SEQ ID NO: 607798 - RNA, 19 nt, Artificial Sequence
  Synthetic
uuccagaugacgggcucug

SEQ ID NO: 607799 - RNA, 20 nt, Artificial Sequence
  Synthetic
uuuccagaugacgggcucug

SEQ ID NO: 607800 - RNA, 21 nt, Artificial Sequence
  Synthetic
cuuuccagaugacgggcucug

SEQ ID NO: 607801 - RNA, 22 nt, Artificial Sequence
  Synthetic
gcuuuccagaugacgggcucug

SEQ ID NO: 607802 - RNA, 23 nt, Artificial Sequence
  Synthetic
agcuuuccagaugacgggcucug

SEQ ID NO: 607803 - RNA, 24 nt, Artificial Sequence
  Synthetic
cagcuuuccagaugacgggcucug

SEQ ID NO: 607804 - RNA, 18 nt, Artificial Sequence
  Synthetic
cuagugaucauggcucug

SEQ ID NO: 607805 - RNA, 19 nt, Artificial Sequence
  Synthetic
acuagugaucauggcucug

SEQ ID NO: 607806 - RNA, 20 nt, Artificial Sequence
  Synthetic
uacuagugaucauggcucug

SEQ ID NO: 607807 - RNA, 21 nt, Artificial Sequence
  Synthetic
guacuagugaucauggcucug

SEQ ID NO: 607808 - RNA, 22 nt, Artificial Sequence
  Synthetic
uguacuagugaucauggcucug

SEQ ID NO: 607809 - RNA, 23 nt, Artificial Sequence
  Synthetic
uuguacuagugaucauggcucug

SEQ ID NO: 607810 - RNA, 24 nt, Artificial Sequence
  Synthetic
auuguacuagugaucauggcucug

SEQ ID NO: 607811 - RNA, 18 nt, Artificial Sequence
  Synthetic
ugguuacuuuuggcucug

SEQ ID NO: 607812 - RNA, 19 nt, Artificial Sequence
  Synthetic
augguuacuuuuggcucug

SEQ ID NO: 607813 - RNA, 20 nt, Artificial Sequence
  Synthetic
aaugguuacuuuuggcucug

SEQ ID NO: 607814 - RNA, 21 nt, Artificial Sequence
  Synthetic
uaaugguuacuuuuggcucug

SEQ ID NO: 607815 - RNA, 22 nt, Artificial Sequence
  Synthetic
auaaugguuacuuuuggcucug

SEQ ID NO: 607816 - RNA, 23 nt, Artificial Sequence
  Synthetic
gauaaugguuacuuuuggcucug

SEQ ID NO: 607817 - RNA, 24 nt, Artificial Sequence
  Synthetic
agauaaugguuacuuuuggcucug

SEQ ID NO: 607818 - RNA, 18 nt, Artificial Sequence
  Synthetic
augugugaagaugcucug

SEQ ID NO: 607819 - RNA, 19 nt, Artificial Sequence
  Synthetic
gaugugugaagaugcucug

SEQ ID NO: 607820 - RNA, 20 nt, Artificial Sequence
  Synthetic
ugaugugugaagaugcucug

SEQ ID NO: 607821 - RNA, 21 nt, Artificial Sequence
  Synthetic
cugaugugugaagaugcucug

SEQ ID NO: 607822 - RNA, 22 nt, Artificial Sequence
  Synthetic
acugaugugugaagaugcucug

SEQ ID NO: 607823 - RNA, 23 nt, Artificial Sequence
  Synthetic
cacugaugugugaagaugcucug

SEQ ID NO: 607824 - RNA, 24 nt, Artificial Sequence
  Synthetic
acacugaugugugaagaugcucug

SEQ ID NO: 607825 - RNA, 18 nt, Artificial Sequence
  Synthetic
guuuagugcauugcucug

SEQ ID NO: 607826 - RNA, 19 nt, Artificial Sequence
  Synthetic
aguuuagugcauugcucug

SEQ ID NO: 607827 - RNA, 20 nt, Artificial Sequence
  Synthetic
gaguuuagugcauugcucug

SEQ ID NO: 607828 - RNA, 21 nt, Artificial Sequence
  Synthetic
ggaguuuagugcauugcucug

SEQ ID NO: 607829 - RNA, 22 nt, Artificial Sequence
  Synthetic
uggaguuuagugcauugcucug

SEQ ID NO: 607830 - RNA, 23 nt, Artificial Sequence
  Synthetic
uuggaguuuagugcauugcucug

SEQ ID NO: 607831 - RNA, 24 nt, Artificial Sequence
  Synthetic
cuuggaguuuagugcauugcucug

SEQ ID NO: 607832 - RNA, 18 nt, Artificial Sequence
  Synthetic
uuucaauugcuugcucug

SEQ ID NO: 607833 - RNA, 19 nt, Artificial Sequence
  Synthetic
uuuucaauugcuugcucug

SEQ ID NO: 607834 - RNA, 20 nt, Artificial Sequence
  Synthetic
cuuuucaauugcuugcucug

SEQ ID NO: 607835 - RNA, 21 nt, Artificial Sequence
  Synthetic
gcuuuucaauugcuugcucug

SEQ ID NO: 607836 - RNA, 22 nt, Artificial Sequence
  Synthetic
ugcuuuucaauugcuugcucug

SEQ ID NO: 607837 - RNA, 23 nt, Artificial Sequence
  Synthetic
uugcuuuucaauugcuugcucug

SEQ ID NO: 607838 - RNA, 24 nt, Artificial Sequence
  Synthetic
uuugcuuuucaauugcuugcucug

SEQ ID NO: 607839 - RNA, 18 nt, Artificial Sequence
  Synthetic
ucaguagauaaaucucug

SEQ ID NO: 607840 - RNA, 19 nt, Artificial Sequence
  Synthetic
cucaguagauaaaucucug

SEQ ID NO: 607841 - RNA, 20 nt, Artificial Sequence
  Synthetic
ccucaguagauaaaucucug

SEQ ID NO: 607842 - RNA, 21 nt, Artificial Sequence
  Synthetic
cccucaguagauaaaucucug

SEQ ID NO: 607843 - RNA, 22 nt, Artificial Sequence
  Synthetic
ccccucaguagauaaaucucug

SEQ ID NO: 607844 - RNA, 23 nt, Artificial Sequence
  Synthetic
cccccucaguagauaaaucucug

SEQ ID NO: 607845 - RNA, 24 nt, Artificial Sequence
  Synthetic
acccccucaguagauaaaucucug

SEQ ID NO: 607846 - RNA, 18 nt, Artificial Sequence
  Synthetic
uucugaggagaaucucug

SEQ ID NO: 607847 - RNA, 19 nt, Artificial Sequence
  Synthetic
uuucugaggagaaucucug

SEQ ID NO: 607848 - RNA, 20 nt, Artificial Sequence
  Synthetic
auuucugaggagaaucucug

SEQ ID NO: 607849 - RNA, 21 nt, Artificial Sequence
  Synthetic
cauuucugaggagaaucucug

SEQ ID NO: 607850 - RNA, 22 nt, Artificial Sequence
  Synthetic
ucauuucugaggagaaucucug

SEQ ID NO: 607851 - RNA, 23 nt, Artificial Sequence
  Synthetic
cucauuucugaggagaaucucug

SEQ ID NO: 607852 - RNA, 24 nt, Artificial Sequence
  Synthetic
ccucauuucugaggagaaucucug

SEQ ID NO: 607853 - RNA, 18 nt, Artificial Sequence
  Synthetic
aaaaugacaacaucucug

SEQ ID NO: 607854 - RNA, 19 nt, Artificial Sequence
  Synthetic
aaaaaugacaacaucucug

SEQ ID NO: 607855 - RNA, 20 nt, Artificial Sequence
  Synthetic
caaaaaugacaacaucucug

SEQ ID NO: 607856 - RNA, 21 nt, Artificial Sequence
  Synthetic
acaaaaaugacaacaucucug

SEQ ID NO: 607857 - RNA, 22 nt, Artificial Sequence
  Synthetic
gacaaaaaugacaacaucucug

SEQ ID NO: 607858 - RNA, 23 nt, Artificial Sequence
  Synthetic
ugacaaaaaugacaacaucucug

SEQ ID NO: 607859 - RNA, 24 nt, Artificial Sequence
  Synthetic
gugacaaaaaugacaacaucucug

SEQ ID NO: 607860 - RNA, 18 nt, Artificial Sequence
  Synthetic
uuuuauccacuaucucug

SEQ ID NO: 607861 - RNA, 19 nt, Artificial Sequence
  Synthetic
cuuuuauccacuaucucug

SEQ ID NO: 607862 - RNA, 20 nt, Artificial Sequence
  Synthetic
acuuuuauccacuaucucug

SEQ ID NO: 607863 - RNA, 21 nt, Artificial Sequence
  Synthetic
cacuuuuauccacuaucucug

SEQ ID NO: 607864 - RNA, 22 nt, Artificial Sequence
  Synthetic
acacuuuuauccacuaucucug

SEQ ID NO: 607865 - RNA, 23 nt, Artificial Sequence
  Synthetic
gacacuuuuauccacuaucucug

SEQ ID NO: 607866 - RNA, 24 nt, Artificial Sequence
  Synthetic
ugacacuuuuauccacuaucucug

SEQ ID NO: 607867 - RNA, 18 nt, Artificial Sequence
  Synthetic
agcacagauuuaucucug

SEQ ID NO: 607868 - RNA, 19 nt, Artificial Sequence
  Synthetic
gagcacagauuuaucucug

SEQ ID NO: 607869 - RNA, 20 nt, Artificial Sequence
  Synthetic
agagcacagauuuaucucug

SEQ ID NO: 607870 - RNA, 21 nt, Artificial Sequence
  Synthetic
aagagcacagauuuaucucug

SEQ ID NO: 607871 - RNA, 22 nt, Artificial Sequence
  Synthetic
gaagagcacagauuuaucucug

SEQ ID NO: 607872 - RNA, 23 nt, Artificial Sequence
  Synthetic
ugaagagcacagauuuaucucug

SEQ ID NO: 607873 - RNA, 24 nt, Artificial Sequence
  Synthetic
gugaagagcacagauuuaucucug

SEQ ID NO: 607874 - RNA, 18 nt, Artificial Sequence
  Synthetic
caacuucuugccucucug

SEQ ID NO: 607875 - RNA, 19 nt, Artificial Sequence
  Synthetic
ccaacuucuugccucucug

SEQ ID NO: 607876 - RNA, 20 nt, Artificial Sequence
  Synthetic
uccaacuucuugccucucug

SEQ ID NO: 607877 - RNA, 21 nt, Artificial Sequence
  Synthetic
uuccaacuucuugccucucug

SEQ ID NO: 607878 - RNA, 22 nt, Artificial Sequence
  Synthetic
guuccaacuucuugccucucug

SEQ ID NO: 607879 - RNA, 23 nt, Artificial Sequence
  Synthetic
uguuccaacuucuugccucucug

SEQ ID NO: 607880 - RNA, 24 nt, Artificial Sequence
  Synthetic
guguuccaacuucuugccucucug

SEQ ID NO: 607881 - RNA, 18 nt, Artificial Sequence
  Synthetic
caugcuagugucucucug

SEQ ID NO: 607882 - RNA, 19 nt, Artificial Sequence
  Synthetic
ccaugcuagugucucucug

SEQ ID NO: 607883 - RNA, 20 nt, Artificial Sequence
  Synthetic
gccaugcuagugucucucug

SEQ ID NO: 607884 - RNA, 21 nt, Artificial Sequence
  Synthetic
agccaugcuagugucucucug

SEQ ID NO: 607885 - RNA, 22 nt, Artificial Sequence
  Synthetic
gagccaugcuagugucucucug

SEQ ID NO: 607886 - RNA, 23 nt, Artificial Sequence
  Synthetic
ugagccaugcuagugucucucug

SEQ ID NO: 607887 - RNA, 24 nt, Artificial Sequence
  Synthetic
cugagccaugcuagugucucucug

SEQ ID NO: 607888 - RNA, 18 nt, Artificial Sequence
  Synthetic
uaacuuuuucagucucug

SEQ ID NO: 607889 - RNA, 19 nt, Artificial Sequence
  Synthetic
uuaacuuuuucagucucug

SEQ ID NO: 607890 - RNA, 20 nt, Artificial Sequence
  Synthetic
uuuaacuuuuucagucucug

SEQ ID NO: 607891 - RNA, 21 nt, Artificial Sequence
  Synthetic
auuuaacuuuuucagucucug

SEQ ID NO: 607892 - RNA, 22 nt, Artificial Sequence
  Synthetic
cauuuaacuuuuucagucucug

SEQ ID NO: 607893 - RNA, 23 nt, Artificial Sequence
  Synthetic
gcauuuaacuuuuucagucucug

SEQ ID NO: 607894 - RNA, 24 nt, Artificial Sequence
  Synthetic
ugcauuuaacuuuuucagucucug

SEQ ID NO: 607895 - RNA, 18 nt, Artificial Sequence
  Synthetic
uuuuaaucugagucucug

SEQ ID NO: 607896 - RNA, 19 nt, Artificial Sequence
  Synthetic
auuuuaaucugagucucug

SEQ ID NO: 607897 - RNA, 20 nt, Artificial Sequence
  Synthetic
gauuuuaaucugagucucug

SEQ ID NO: 607898 - RNA, 21 nt, Artificial Sequence
  Synthetic
ugauuuuaaucugagucucug

SEQ ID NO: 607899 - RNA, 22 nt, Artificial Sequence
  Synthetic
cugauuuuaaucugagucucug

SEQ ID NO: 607900 - RNA, 23 nt, Artificial Sequence
  Synthetic
ccugauuuuaaucugagucucug

SEQ ID NO: 607901 - RNA, 24 nt, Artificial Sequence
  Synthetic
uccugauuuuaaucugagucucug

SEQ ID NO: 607902 - RNA, 18 nt, Artificial Sequence
  Synthetic
ucagugguagggucucug

SEQ ID NO: 607903 - RNA, 19 nt, Artificial Sequence
  Synthetic
uucagugguagggucucug

SEQ ID NO: 607904 - RNA, 20 nt, Artificial Sequence
  Synthetic
uuucagugguagggucucug

SEQ ID NO: 607905 - RNA, 21 nt, Artificial Sequence
  Synthetic
guuucagugguagggucucug

SEQ ID NO: 607906 - RNA, 22 nt, Artificial Sequence
  Synthetic
gguuucagugguagggucucug

SEQ ID NO: 607907 - RNA, 23 nt, Artificial Sequence
  Synthetic
ggguuucagugguagggucucug

SEQ ID NO: 607908 - RNA, 24 nt, Artificial Sequence
  Synthetic
aggguuucagugguagggucucug

SEQ ID NO: 607909 - RNA, 18 nt, Artificial Sequence
  Synthetic
cuuaaauguaauucucug

SEQ ID NO: 607910 - RNA, 19 nt, Artificial Sequence
  Synthetic
acuuaaauguaauucucug

SEQ ID NO: 607911 - RNA, 20 nt, Artificial Sequence
  Synthetic
aacuuaaauguaauucucug

SEQ ID NO: 607912 - RNA, 21 nt, Artificial Sequence
  Synthetic
caacuuaaauguaauucucug

SEQ ID NO: 607913 - RNA, 22 nt, Artificial Sequence
  Synthetic
acaacuuaaauguaauucucug

SEQ ID NO: 607914 - RNA, 23 nt, Artificial Sequence
  Synthetic
aacaacuuaaauguaauucucug

SEQ ID NO: 607915 - RNA, 24 nt, Artificial Sequence
  Synthetic
aaacaacuuaaauguaauucucug

SEQ ID NO: 607916 - RNA, 18 nt, Artificial Sequence
  Synthetic
ucauuuuuacauucucug

SEQ ID NO: 607917 - RNA, 19 nt, Artificial Sequence
  Synthetic
uucauuuuuacauucucug

SEQ ID NO: 607918 - RNA, 20 nt, Artificial Sequence
  Synthetic
auucauuuuuacauucucug

SEQ ID NO: 607919 - RNA, 21 nt, Artificial Sequence
  Synthetic
aauucauuuuuacauucucug

SEQ ID NO: 607920 - RNA, 22 nt, Artificial Sequence
  Synthetic
caauucauuuuuacauucucug

SEQ ID NO: 607921 - RNA, 23 nt, Artificial Sequence
  Synthetic
ucaauucauuuuuacauucucug

SEQ ID NO: 607922 - RNA, 24 nt, Artificial Sequence
  Synthetic
uucaauucauuuuuacauucucug

SEQ ID NO: 607923 - RNA, 18 nt, Artificial Sequence
  Synthetic
gcuagucaucauucucug

SEQ ID NO: 607924 - RNA, 19 nt, Artificial Sequence
  Synthetic
ugcuagucaucauucucug

SEQ ID NO: 607925 - RNA, 20 nt, Artificial Sequence
  Synthetic
gugcuagucaucauucucug

SEQ ID NO: 607926 - RNA, 21 nt, Artificial Sequence
  Synthetic
ggugcuagucaucauucucug

SEQ ID NO: 607927 - RNA, 22 nt, Artificial Sequence
  Synthetic
aggugcuagucaucauucucug

SEQ ID NO: 607928 - RNA, 23 nt, Artificial Sequence
  Synthetic
aaggugcuagucaucauucucug

SEQ ID NO: 607929 - RNA, 24 nt, Artificial Sequence
  Synthetic
gaaggugcuagucaucauucucug

SEQ ID NO: 607930 - RNA, 18 nt, Artificial Sequence
  Synthetic
ucugucuccuguucucug

SEQ ID NO: 607931 - RNA, 19 nt, Artificial Sequence
  Synthetic
cucugucuccuguucucug

SEQ ID NO: 607932 - RNA, 20 nt, Artificial Sequence
  Synthetic
ccucugucuccuguucucug

SEQ ID NO: 607933 - RNA, 21 nt, Artificial Sequence
  Synthetic
uccucugucuccuguucucug

SEQ ID NO: 607934 - RNA, 22 nt, Artificial Sequence
  Synthetic
guccucugucuccuguucucug

SEQ ID NO: 607935 - RNA, 23 nt, Artificial Sequence
  Synthetic
aguccucugucuccuguucucug

SEQ ID NO: 607936 - RNA, 24 nt, Artificial Sequence
  Synthetic
aaguccucugucuccuguucucug

SEQ ID NO: 607937 - RNA, 18 nt, Artificial Sequence
  Synthetic
ucaguuuucauuucucug

SEQ ID NO: 607938 - RNA, 19 nt, Artificial Sequence
  Synthetic
cucaguuuucauuucucug

SEQ ID NO: 607939 - RNA, 20 nt, Artificial Sequence
  Synthetic
ucucaguuuucauuucucug

SEQ ID NO: 607940 - RNA, 21 nt, Artificial Sequence
  Synthetic
uucucaguuuucauuucucug

SEQ ID NO: 607941 - RNA, 22 nt, Artificial Sequence
  Synthetic
uuucucaguuuucauuucucug

SEQ ID NO: 607942 - RNA, 23 nt, Artificial Sequence
  Synthetic
guuucucaguuuucauuucucug

SEQ ID NO: 607943 - RNA, 24 nt, Artificial Sequence
  Synthetic
gguuucucaguuuucauuucucug

SEQ ID NO: 607944 - RNA, 18 nt, Artificial Sequence
  Synthetic
aaauaauauaacagucug

SEQ ID NO: 607945 - RNA, 19 nt, Artificial Sequence
  Synthetic
aaaauaauauaacagucug

SEQ ID NO: 607946 - RNA, 20 nt, Artificial Sequence
  Synthetic
uaaaauaauauaacagucug

SEQ ID NO: 607947 - RNA, 21 nt, Artificial Sequence
  Synthetic
auaaaauaauauaacagucug

SEQ ID NO: 607948 - RNA, 22 nt, Artificial Sequence
  Synthetic
uauaaaauaauauaacagucug

SEQ ID NO: 607949 - RNA, 23 nt, Artificial Sequence
  Synthetic
cuauaaaauaauauaacagucug

SEQ ID NO: 607950 - RNA, 24 nt, Artificial Sequence
  Synthetic
gcuauaaaauaauauaacagucug

SEQ ID NO: 607951 - RNA, 18 nt, Artificial Sequence
  Synthetic
cauccuagaagcagucug

SEQ ID NO: 607952 - RNA, 19 nt, Artificial Sequence
  Synthetic
ucauccuagaagcagucug

SEQ ID NO: 607953 - RNA, 20 nt, Artificial Sequence
  Synthetic
cucauccuagaagcagucug

SEQ ID NO: 607954 - RNA, 21 nt, Artificial Sequence
  Synthetic
acucauccuagaagcagucug

SEQ ID NO: 607955 - RNA, 22 nt, Artificial Sequence
  Synthetic
cacucauccuagaagcagucug

SEQ ID NO: 607956 - RNA, 23 nt, Artificial Sequence
  Synthetic
ccacucauccuagaagcagucug

SEQ ID NO: 607957 - RNA, 24 nt, Artificial Sequence
  Synthetic
gccacucauccuagaagcagucug

SEQ ID NO: 607958 - RNA, 18 nt, Artificial Sequence
  Synthetic
uugcuuuucuucagucug

SEQ ID NO: 607959 - RNA, 19 nt, Artificial Sequence
  Synthetic
uuugcuuuucuucagucug

SEQ ID NO: 607960 - RNA, 20 nt, Artificial Sequence
  Synthetic
auuugcuuuucuucagucug

SEQ ID NO: 607961 - RNA, 21 nt, Artificial Sequence
  Synthetic
uauuugcuuuucuucagucug

SEQ ID NO: 607962 - RNA, 22 nt, Artificial Sequence
  Synthetic
uuauuugcuuuucuucagucug

SEQ ID NO: 607963 - RNA, 23 nt, Artificial Sequence
  Synthetic
auuauuugcuuuucuucagucug

SEQ ID NO: 607964 - RNA, 24 nt, Artificial Sequence
  Synthetic
uauuauuugcuuuucuucagucug

SEQ ID NO: 607965 - RNA, 18 nt, Artificial Sequence
  Synthetic
gcucugauuaggagucug

SEQ ID NO: 607966 - RNA, 19 nt, Artificial Sequence
  Synthetic
agcucugauuaggagucug

SEQ ID NO: 607967 - RNA, 20 nt, Artificial Sequence
  Synthetic
aagcucugauuaggagucug

SEQ ID NO: 607968 - RNA, 21 nt, Artificial Sequence
  Synthetic
aaagcucugauuaggagucug

SEQ ID NO: 607969 - RNA, 22 nt, Artificial Sequence
  Synthetic
caaagcucugauuaggagucug

SEQ ID NO: 607970 - RNA, 23 nt, Artificial Sequence
  Synthetic
gcaaagcucugauuaggagucug

SEQ ID NO: 607971 - RNA, 24 nt, Artificial Sequence
  Synthetic
ggcaaagcucugauuaggagucug

SEQ ID NO: 607972 - RNA, 18 nt, Artificial Sequence
  Synthetic
acaaagucauggagucug

SEQ ID NO: 607973 - RNA, 19 nt, Artificial Sequence
  Synthetic
uacaaagucauggagucug

SEQ ID NO: 607974 - RNA, 20 nt, Artificial Sequence
  Synthetic
cuacaaagucauggagucug

SEQ ID NO: 607975 - RNA, 21 nt, Artificial Sequence
  Synthetic
acuacaaagucauggagucug

SEQ ID NO: 607976 - RNA, 22 nt, Artificial Sequence
  Synthetic
cacuacaaagucauggagucug

SEQ ID NO: 607977 - RNA, 23 nt, Artificial Sequence
  Synthetic
acacuacaaagucauggagucug

SEQ ID NO: 607978 - RNA, 24 nt, Artificial Sequence
  Synthetic
uacacuacaaagucauggagucug

SEQ ID NO: 607979 - RNA, 18 nt, Artificial Sequence
  Synthetic
guaguaaaugcuagucug

SEQ ID NO: 607980 - RNA, 19 nt, Artificial Sequence
  Synthetic
aguaguaaaugcuagucug

SEQ ID NO: 607981 - RNA, 20 nt, Artificial Sequence
  Synthetic
uaguaguaaaugcuagucug

SEQ ID NO: 607982 - RNA, 21 nt, Artificial Sequence
  Synthetic
auaguaguaaaugcuagucug

SEQ ID NO: 607983 - RNA, 22 nt, Artificial Sequence
  Synthetic
uauaguaguaaaugcuagucug

SEQ ID NO: 607984 - RNA, 23 nt, Artificial Sequence
  Synthetic
auauaguaguaaaugcuagucug

SEQ ID NO: 607985 - RNA, 24 nt, Artificial Sequence
  Synthetic
uauauaguaguaaaugcuagucug

SEQ ID NO: 607986 - RNA, 18 nt, Artificial Sequence
  Synthetic
uuauuucauaguagucug

SEQ ID NO: 607987 - RNA, 19 nt, Artificial Sequence
  Synthetic
auuauuucauaguagucug

SEQ ID NO: 607988 - RNA, 20 nt, Artificial Sequence
  Synthetic
cauuauuucauaguagucug

SEQ ID NO: 607989 - RNA, 21 nt, Artificial Sequence
  Synthetic
acauuauuucauaguagucug

SEQ ID NO: 607990 - RNA, 22 nt, Artificial Sequence
  Synthetic
aacauuauuucauaguagucug

SEQ ID NO: 607991 - RNA, 23 nt, Artificial Sequence
  Synthetic
uaacauuauuucauaguagucug

SEQ ID NO: 607992 - RNA, 24 nt, Artificial Sequence
  Synthetic
auaacauuauuucauaguagucug

SEQ ID NO: 607993 - RNA, 18 nt, Artificial Sequence
  Synthetic
ugauccacuguuagucug

SEQ ID NO: 607994 - RNA, 19 nt, Artificial Sequence
  Synthetic
gugauccacuguuagucug

SEQ ID NO: 607995 - RNA, 20 nt, Artificial Sequence
  Synthetic
agugauccacuguuagucug

SEQ ID NO: 607996 - RNA, 21 nt, Artificial Sequence
  Synthetic
gagugauccacuguuagucug

SEQ ID NO: 607997 - RNA, 22 nt, Artificial Sequence
  Synthetic
agagugauccacuguuagucug

SEQ ID NO: 607998 - RNA, 23 nt, Artificial Sequence
  Synthetic
cagagugauccacuguuagucug

SEQ ID NO: 607999 - RNA, 24 nt, Artificial Sequence
  Synthetic
gcagagugauccacuguuagucug

SEQ ID NO: 608000 - RNA, 18 nt, Artificial Sequence
  Synthetic
ugauccgcuguuagucug

SEQ ID NO: 608001 - RNA, 19 nt, Artificial Sequence
  Synthetic
augauccgcuguuagucug

SEQ ID NO: 608002 - RNA, 20 nt, Artificial Sequence
  Synthetic
aaugauccgcuguuagucug

SEQ ID NO: 608003 - RNA, 21 nt, Artificial Sequence
  Synthetic
aaaugauccgcuguuagucug

SEQ ID NO: 608004 - RNA, 22 nt, Artificial Sequence
  Synthetic
caaaugauccgcuguuagucug

SEQ ID NO: 608005 - RNA, 23 nt, Artificial Sequence
  Synthetic
ccaaaugauccgcuguuagucug

SEQ ID NO: 608006 - RNA, 24 nt, Artificial Sequence
  Synthetic
gccaaaugauccgcuguuagucug

SEQ ID NO: 608007 - RNA, 18 nt, Artificial Sequence
  Synthetic
accacucacucacgucug

SEQ ID NO: 608008 - RNA, 19 nt, Artificial Sequence
  Synthetic
aaccacucacucacgucug

SEQ ID NO: 608009 - RNA, 20 nt, Artificial Sequence
  Synthetic
aaaccacucacucacgucug

SEQ ID NO: 608010 - RNA, 21 nt, Artificial Sequence
  Synthetic
caaaccacucacucacgucug

SEQ ID NO: 608011 - RNA, 22 nt, Artificial Sequence
  Synthetic
gcaaaccacucacucacgucug

SEQ ID NO: 608012 - RNA, 23 nt, Artificial Sequence
  Synthetic
agcaaaccacucacucacgucug

SEQ ID NO: 608013 - RNA, 24 nt, Artificial Sequence
  Synthetic
aagcaaaccacucacucacgucug

SEQ ID NO: 608014 - RNA, 18 nt, Artificial Sequence
  Synthetic
aauaccugccaccgucug

SEQ ID NO: 608015 - RNA, 19 nt, Artificial Sequence
  Synthetic
gaauaccugccaccgucug

SEQ ID NO: 608016 - RNA, 20 nt, Artificial Sequence
  Synthetic
ugaauaccugccaccgucug

SEQ ID NO: 608017 - RNA, 21 nt, Artificial Sequence
  Synthetic
uugaauaccugccaccgucug

SEQ ID NO: 608018 - RNA, 22 nt, Artificial Sequence
  Synthetic
cuugaauaccugccaccgucug

SEQ ID NO: 608019 - RNA, 23 nt, Artificial Sequence
  Synthetic
gcuugaauaccugccaccgucug

SEQ ID NO: 608020 - RNA, 24 nt, Artificial Sequence
  Synthetic
ugcuugaauaccugccaccgucug

SEQ ID NO: 608021 - RNA, 18 nt, Artificial Sequence
  Synthetic
cccucugcugcaggucug

SEQ ID NO: 608022 - RNA, 19 nt, Artificial Sequence
  Synthetic
acccucugcugcaggucug

SEQ ID NO: 608023 - RNA, 20 nt, Artificial Sequence
  Synthetic
aacccucugcugcaggucug

SEQ ID NO: 608024 - RNA, 21 nt, Artificial Sequence
  Synthetic
gaacccucugcugcaggucug

SEQ ID NO: 608025 - RNA, 22 nt, Artificial Sequence
  Synthetic
ggaacccucugcugcaggucug

SEQ ID NO: 608026 - RNA, 23 nt, Artificial Sequence
  Synthetic
aggaacccucugcugcaggucug

SEQ ID NO: 608027 - RNA, 24 nt, Artificial Sequence
  Synthetic
caggaacccucugcugcaggucug

SEQ ID NO: 608028 - RNA, 18 nt, Artificial Sequence
  Synthetic
ggucagccaagaggucug

SEQ ID NO: 608029 - RNA, 19 nt, Artificial Sequence
  Synthetic
uggucagccaagaggucug

SEQ ID NO: 608030 - RNA, 20 nt, Artificial Sequence
  Synthetic
cuggucagccaagaggucug

SEQ ID NO: 608031 - RNA, 21 nt, Artificial Sequence
  Synthetic
ccuggucagccaagaggucug

SEQ ID NO: 608032 - RNA, 22 nt, Artificial Sequence
  Synthetic
accuggucagccaagaggucug

SEQ ID NO: 608033 - RNA, 23 nt, Artificial Sequence
  Synthetic
caccuggucagccaagaggucug

SEQ ID NO: 608034 - RNA, 24 nt, Artificial Sequence
  Synthetic
gcaccuggucagccaagaggucug

SEQ ID NO: 608035 - RNA, 18 nt, Artificial Sequence
  Synthetic
cucuuuuuauuaggucug

SEQ ID NO: 608036 - RNA, 19 nt, Artificial Sequence
  Synthetic
ucucuuuuuauuaggucug

SEQ ID NO: 608037 - RNA, 20 nt, Artificial Sequence
  Synthetic
aucucuuuuuauuaggucug

SEQ ID NO: 608038 - RNA, 21 nt, Artificial Sequence
  Synthetic
aaucucuuuuuauuaggucug

SEQ ID NO: 608039 - RNA, 22 nt, Artificial Sequence
  Synthetic
uaaucucuuuuuauuaggucug

SEQ ID NO: 608040 - RNA, 23 nt, Artificial Sequence
  Synthetic
auaaucucuuuuuauuaggucug

SEQ ID NO: 608041 - RNA, 24 nt, Artificial Sequence
  Synthetic
gauaaucucuuuuuauuaggucug

SEQ ID NO: 608042 - RNA, 18 nt, Artificial Sequence
  Synthetic
agccuugggaauggucug

SEQ ID NO: 608043 - RNA, 19 nt, Artificial Sequence
  Synthetic
aagccuugggaauggucug

SEQ ID NO: 608044 - RNA, 20 nt, Artificial Sequence
  Synthetic
aaagccuugggaauggucug

SEQ ID NO: 608045 - RNA, 21 nt, Artificial Sequence
  Synthetic
caaagccuugggaauggucug

SEQ ID NO: 608046 - RNA, 22 nt, Artificial Sequence
  Synthetic
gcaaagccuugggaauggucug

SEQ ID NO: 608047 - RNA, 23 nt, Artificial Sequence
  Synthetic
ggcaaagccuugggaauggucug

SEQ ID NO: 608048 - RNA, 24 nt, Artificial Sequence
  Synthetic
gggcaaagccuugggaauggucug

SEQ ID NO: 608049 - RNA, 18 nt, Artificial Sequence
  Synthetic
ucauuaacuucuggucug

SEQ ID NO: 608050 - RNA, 19 nt, Artificial Sequence
  Synthetic
uucauuaacuucuggucug

SEQ ID NO: 608051 - RNA, 20 nt, Artificial Sequence
  Synthetic
uuucauuaacuucuggucug

SEQ ID NO: 608052 - RNA, 21 nt, Artificial Sequence
  Synthetic
uuuucauuaacuucuggucug

SEQ ID NO: 608053 - RNA, 22 nt, Artificial Sequence
  Synthetic
uuuuucauuaacuucuggucug

SEQ ID NO: 608054 - RNA, 23 nt, Artificial Sequence
  Synthetic
auuuuucauuaacuucuggucug

SEQ ID NO: 608055 - RNA, 24 nt, Artificial Sequence
  Synthetic
uauuuuucauuaacuucuggucug

SEQ ID NO: 608056 - RNA, 18 nt, Artificial Sequence
  Synthetic
auuaauuccuaaugucug

SEQ ID NO: 608057 - RNA, 19 nt, Artificial Sequence
  Synthetic
aauuaauuccuaaugucug

SEQ ID NO: 608058 - RNA, 20 nt, Artificial Sequence
  Synthetic
uaauuaauuccuaaugucug

SEQ ID NO: 608059 - RNA, 21 nt, Artificial Sequence
  Synthetic
auaauuaauuccuaaugucug

SEQ ID NO: 608060 - RNA, 22 nt, Artificial Sequence
  Synthetic
uauaauuaauuccuaaugucug

SEQ ID NO: 608061 - RNA, 23 nt, Artificial Sequence
  Synthetic
uuauaauuaauuccuaaugucug

SEQ ID NO: 608062 - RNA, 24 nt, Artificial Sequence
  Synthetic
uuuauaauuaauuccuaaugucug

SEQ ID NO: 608063 - RNA, 18 nt, Artificial Sequence
  Synthetic
ucuuugcaaagaugucug

SEQ ID NO: 608064 - RNA, 19 nt, Artificial Sequence
  Synthetic
uucuuugcaaagaugucug

SEQ ID NO: 608065 - RNA, 20 nt, Artificial Sequence
  Synthetic
auucuuugcaaagaugucug

SEQ ID NO: 608066 - RNA, 21 nt, Artificial Sequence
  Synthetic
aauucuuugcaaagaugucug

SEQ ID NO: 608067 - RNA, 22 nt, Artificial Sequence
  Synthetic
caauucuuugcaaagaugucug

SEQ ID NO: 608068 - RNA, 23 nt, Artificial Sequence
  Synthetic
ucaauucuuugcaaagaugucug

SEQ ID NO: 608069 - RNA, 24 nt, Artificial Sequence
  Synthetic
cucaauucuuugcaaagaugucug

SEQ ID NO: 608070 - RNA, 18 nt, Artificial Sequence
  Synthetic
uuucucgauugaugucug

SEQ ID NO: 608071 - RNA, 19 nt, Artificial Sequence
  Synthetic
uuuucucgauugaugucug

SEQ ID NO: 608072 - RNA, 20 nt, Artificial Sequence
  Synthetic
uuuuucucgauugaugucug

SEQ ID NO: 608073 - RNA, 21 nt, Artificial Sequence
  Synthetic
uuuuuucucgauugaugucug

SEQ ID NO: 608074 - RNA, 22 nt, Artificial Sequence
  Synthetic
auuuuuucucgauugaugucug

SEQ ID NO: 608075 - RNA, 23 nt, Artificial Sequence
  Synthetic
gauuuuuucucgauugaugucug

SEQ ID NO: 608076 - RNA, 24 nt, Artificial Sequence
  Synthetic
ugauuuuuucucgauugaugucug

SEQ ID NO: 608077 - RNA, 18 nt, Artificial Sequence
  Synthetic
acacaaaggaagugucug

SEQ ID NO: 608078 - RNA, 19 nt, Artificial Sequence
  Synthetic
aacacaaaggaagugucug

SEQ ID NO: 608079 - RNA, 20 nt, Artificial Sequence
  Synthetic
gaacacaaaggaagugucug

SEQ ID NO: 608080 - RNA, 21 nt, Artificial Sequence
  Synthetic
ugaacacaaaggaagugucug

SEQ ID NO: 608081 - RNA, 22 nt, Artificial Sequence
  Synthetic
uugaacacaaaggaagugucug

SEQ ID NO: 608082 - RNA, 23 nt, Artificial Sequence
  Synthetic
auugaacacaaaggaagugucug

SEQ ID NO: 608083 - RNA, 24 nt, Artificial Sequence
  Synthetic
uauugaacacaaaggaagugucug

SEQ ID NO: 608084 - RNA, 18 nt, Artificial Sequence
  Synthetic
ucuggcauuuggugucug

SEQ ID NO: 608085 - RNA, 19 nt, Artificial Sequence
  Synthetic
cucuggcauuuggugucug

SEQ ID NO: 608086 - RNA, 20 nt, Artificial Sequence
  Synthetic
gcucuggcauuuggugucug

SEQ ID NO: 608087 - RNA, 21 nt, Artificial Sequence
  Synthetic
ggcucuggcauuuggugucug

SEQ ID NO: 608088 - RNA, 22 nt, Artificial Sequence
  Synthetic
aggcucuggcauuuggugucug

SEQ ID NO: 608089 - RNA, 23 nt, Artificial Sequence
  Synthetic
aaggcucuggcauuuggugucug

SEQ ID NO: 608090 - RNA, 24 nt, Artificial Sequence
  Synthetic
aaaggcucuggcauuuggugucug

SEQ ID NO: 608091 - RNA, 18 nt, Artificial Sequence
  Synthetic
aaguuuaaugugugucug

SEQ ID NO: 608092 - RNA, 19 nt, Artificial Sequence
  Synthetic
aaaguuuaaugugugucug

SEQ ID NO: 608093 - RNA, 20 nt, Artificial Sequence
  Synthetic
gaaaguuuaaugugugucug

SEQ ID NO: 608094 - RNA, 21 nt, Artificial Sequence
  Synthetic
ggaaaguuuaaugugugucug

SEQ ID NO: 608095 - RNA, 22 nt, Artificial Sequence
  Synthetic
aggaaaguuuaaugugugucug

SEQ ID NO: 608096 - RNA, 23 nt, Artificial Sequence
  Synthetic
uaggaaaguuuaaugugugucug

SEQ ID NO: 608097 - RNA, 24 nt, Artificial Sequence
  Synthetic
guaggaaaguuuaaugugugucug

SEQ ID NO: 608098 - RNA, 18 nt, Artificial Sequence
  Synthetic
cagcagauucauugucug

SEQ ID NO: 608099 - RNA, 19 nt, Artificial Sequence
  Synthetic
ucagcagauucauugucug

SEQ ID NO: 608100 - RNA, 20 nt, Artificial Sequence
  Synthetic
aucagcagauucauugucug

SEQ ID NO: 608101 - RNA, 21 nt, Artificial Sequence
  Synthetic
caucagcagauucauugucug

SEQ ID NO: 608102 - RNA, 22 nt, Artificial Sequence
  Synthetic
acaucagcagauucauugucug

SEQ ID NO: 608103 - RNA, 23 nt, Artificial Sequence
  Synthetic
gacaucagcagauucauugucug

SEQ ID NO: 608104 - RNA, 24 nt, Artificial Sequence
  Synthetic
agacaucagcagauucauugucug

SEQ ID NO: 608105 - RNA, 18 nt, Artificial Sequence
  Synthetic
cauuucugccaaauucug

SEQ ID NO: 608106 - RNA, 19 nt, Artificial Sequence
  Synthetic
ucauuucugccaaauucug

SEQ ID NO: 608107 - RNA, 20 nt, Artificial Sequence
  Synthetic
cucauuucugccaaauucug

SEQ ID NO: 608108 - RNA, 21 nt, Artificial Sequence
  Synthetic
ccucauuucugccaaauucug

SEQ ID NO: 608109 - RNA, 22 nt, Artificial Sequence
  Synthetic
cccucauuucugccaaauucug

SEQ ID NO: 608110 - RNA, 23 nt, Artificial Sequence
  Synthetic
ucccucauuucugccaaauucug

SEQ ID NO: 608111 - RNA, 24 nt, Artificial Sequence
  Synthetic
gucccucauuucugccaaauucug

SEQ ID NO: 608112 - RNA, 18 nt, Artificial Sequence
  Synthetic
aacauguuagaaauucug

SEQ ID NO: 608113 - RNA, 19 nt, Artificial Sequence
  Synthetic
uaacauguuagaaauucug

SEQ ID NO: 608114 - RNA, 20 nt, Artificial Sequence
  Synthetic
auaacauguuagaaauucug

SEQ ID NO: 608115 - RNA, 21 nt, Artificial Sequence
  Synthetic
aauaacauguuagaaauucug

SEQ ID NO: 608116 - RNA, 22 nt, Artificial Sequence
  Synthetic
aaauaacauguuagaaauucug

SEQ ID NO: 608117 - RNA, 23 nt, Artificial Sequence
  Synthetic
gaaauaacauguuagaaauucug

SEQ ID NO: 608118 - RNA, 24 nt, Artificial Sequence
  Synthetic
agaaauaacauguuagaaauucug

SEQ ID NO: 608119 - RNA, 18 nt, Artificial Sequence
  Synthetic
cacauaauguaaauucug

SEQ ID NO: 608120 - RNA, 19 nt, Artificial Sequence
  Synthetic
ucacauaauguaaauucug

SEQ ID NO: 608121 - RNA, 20 nt, Artificial Sequence
  Synthetic
cucacauaauguaaauucug

SEQ ID NO: 608122 - RNA, 21 nt, Artificial Sequence
  Synthetic
ucucacauaauguaaauucug

SEQ ID NO: 608123 - RNA, 22 nt, Artificial Sequence
  Synthetic
aucucacauaauguaaauucug

SEQ ID NO: 608124 - RNA, 23 nt, Artificial Sequence
  Synthetic
aaucucacauaauguaaauucug

SEQ ID NO: 608125 - RNA, 24 nt, Artificial Sequence
  Synthetic
aaaucucacauaauguaaauucug

SEQ ID NO: 608126 - RNA, 18 nt, Artificial Sequence
  Synthetic
caacucaggacaauucug

SEQ ID NO: 608127 - RNA, 19 nt, Artificial Sequence
  Synthetic
gcaacucaggacaauucug

SEQ ID NO: 608128 - RNA, 20 nt, Artificial Sequence
  Synthetic
ugcaacucaggacaauucug

SEQ ID NO: 608129 - RNA, 21 nt, Artificial Sequence
  Synthetic
cugcaacucaggacaauucug

SEQ ID NO: 608130 - RNA, 22 nt, Artificial Sequence
  Synthetic
gcugcaacucaggacaauucug

SEQ ID NO: 608131 - RNA, 23 nt, Artificial Sequence
  Synthetic
ugcugcaacucaggacaauucug

SEQ ID NO: 608132 - RNA, 24 nt, Artificial Sequence
  Synthetic
uugcugcaacucaggacaauucug

SEQ ID NO: 608133 - RNA, 18 nt, Artificial Sequence
  Synthetic
uuacucagcauaauucug

SEQ ID NO: 608134 - RNA, 19 nt, Artificial Sequence
  Synthetic
uuuacucagcauaauucug

SEQ ID NO: 608135 - RNA, 20 nt, Artificial Sequence
  Synthetic
uuuuacucagcauaauucug

SEQ ID NO: 608136 - RNA, 21 nt, Artificial Sequence
  Synthetic
uuuuuacucagcauaauucug

SEQ ID NO: 608137 - RNA, 22 nt, Artificial Sequence
  Synthetic
guuuuuacucagcauaauucug

SEQ ID NO: 608138 - RNA, 23 nt, Artificial Sequence
  Synthetic
uguuuuuacucagcauaauucug

SEQ ID NO: 608139 - RNA, 24 nt, Artificial Sequence
  Synthetic
cuguuuuuacucagcauaauucug

SEQ ID NO: 608140 - RNA, 18 nt, Artificial Sequence
  Synthetic
cuuccaucacuaauucug

SEQ ID NO: 608141 - RNA, 19 nt, Artificial Sequence
  Synthetic
ucuuccaucacuaauucug

SEQ ID NO: 608142 - RNA, 20 nt, Artificial Sequence
  Synthetic
cucuuccaucacuaauucug

SEQ ID NO: 608143 - RNA, 21 nt, Artificial Sequence
  Synthetic
ucucuuccaucacuaauucug

SEQ ID NO: 608144 - RNA, 22 nt, Artificial Sequence
  Synthetic
uucucuuccaucacuaauucug

SEQ ID NO: 608145 - RNA, 23 nt, Artificial Sequence
  Synthetic
cuucucuuccaucacuaauucug

SEQ ID NO: 608146 - RNA, 24 nt, Artificial Sequence
  Synthetic
ucuucucuuccaucacuaauucug

SEQ ID NO: 608147 - RNA, 18 nt, Artificial Sequence
  Synthetic
uacuauaauagcauucug

SEQ ID NO: 608148 - RNA, 19 nt, Artificial Sequence
  Synthetic
uuacuauaauagcauucug

SEQ ID NO: 608149 - RNA, 20 nt, Artificial Sequence
  Synthetic
guuacuauaauagcauucug

SEQ ID NO: 608150 - RNA, 21 nt, Artificial Sequence
  Synthetic
uguuacuauaauagcauucug

SEQ ID NO: 608151 - RNA, 22 nt, Artificial Sequence
  Synthetic
guguuacuauaauagcauucug

SEQ ID NO: 608152 - RNA, 23 nt, Artificial Sequence
  Synthetic
aguguuacuauaauagcauucug

SEQ ID NO: 608153 - RNA, 24 nt, Artificial Sequence
  Synthetic
gaguguuacuauaauagcauucug

SEQ ID NO: 608154 - RNA, 18 nt, Artificial Sequence
  Synthetic
ccaggaguucagauucug

SEQ ID NO: 608155 - RNA, 19 nt, Artificial Sequence
  Synthetic
gccaggaguucagauucug

SEQ ID NO: 608156 - RNA, 20 nt, Artificial Sequence
  Synthetic
agccaggaguucagauucug

SEQ ID NO: 608157 - RNA, 21 nt, Artificial Sequence
  Synthetic
uagccaggaguucagauucug

SEQ ID NO: 608158 - RNA, 22 nt, Artificial Sequence
  Synthetic
guagccaggaguucagauucug

SEQ ID NO: 608159 - RNA, 23 nt, Artificial Sequence
  Synthetic
aguagccaggaguucagauucug

SEQ ID NO: 608160 - RNA, 24 nt, Artificial Sequence
  Synthetic
caguagccaggaguucagauucug

SEQ ID NO: 608161 - RNA, 18 nt, Artificial Sequence
  Synthetic
gcucccuaggagauucug

SEQ ID NO: 608162 - RNA, 19 nt, Artificial Sequence
  Synthetic
agcucccuaggagauucug

SEQ ID NO: 608163 - RNA, 20 nt, Artificial Sequence
  Synthetic
aagcucccuaggagauucug

SEQ ID NO: 608164 - RNA, 21 nt, Artificial Sequence
  Synthetic
caagcucccuaggagauucug

SEQ ID NO: 608165 - RNA, 22 nt, Artificial Sequence
  Synthetic
acaagcucccuaggagauucug

SEQ ID NO: 608166 - RNA, 23 nt, Artificial Sequence
  Synthetic
aacaagcucccuaggagauucug

SEQ ID NO: 608167 - RNA, 24 nt, Artificial Sequence
  Synthetic
uaacaagcucccuaggagauucug

SEQ ID NO: 608168 - RNA, 18 nt, Artificial Sequence
  Synthetic
agucuguagaauauucug

SEQ ID NO: 608169 - RNA, 19 nt, Artificial Sequence
  Synthetic
gagucuguagaauauucug

SEQ ID NO: 608170 - RNA, 20 nt, Artificial Sequence
  Synthetic
ggagucuguagaauauucug

SEQ ID NO: 608171 - RNA, 21 nt, Artificial Sequence
  Synthetic
aggagucuguagaauauucug

SEQ ID NO: 608172 - RNA, 22 nt, Artificial Sequence
  Synthetic
aaggagucuguagaauauucug

SEQ ID NO: 608173 - RNA, 23 nt, Artificial Sequence
  Synthetic
gaaggagucuguagaauauucug

SEQ ID NO: 608174 - RNA, 24 nt, Artificial Sequence
  Synthetic
ugaaggagucuguagaauauucug

SEQ ID NO: 608175 - RNA, 18 nt, Artificial Sequence
  Synthetic
gagacaugaccuauucug

SEQ ID NO: 608176 - RNA, 19 nt, Artificial Sequence
  Synthetic
ggagacaugaccuauucug

SEQ ID NO: 608177 - RNA, 20 nt, Artificial Sequence
  Synthetic
aggagacaugaccuauucug

SEQ ID NO: 608178 - RNA, 21 nt, Artificial Sequence
  Synthetic
caggagacaugaccuauucug

SEQ ID NO: 608179 - RNA, 22 nt, Artificial Sequence
  Synthetic
ucaggagacaugaccuauucug

SEQ ID NO: 608180 - RNA, 23 nt, Artificial Sequence
  Synthetic
uucaggagacaugaccuauucug

SEQ ID NO: 608181 - RNA, 24 nt, Artificial Sequence
  Synthetic
uuucaggagacaugaccuauucug

SEQ ID NO: 608182 - RNA, 18 nt, Artificial Sequence
  Synthetic
guuuguaaagcuauucug

SEQ ID NO: 608183 - RNA, 19 nt, Artificial Sequence
  Synthetic
uguuuguaaagcuauucug

SEQ ID NO: 608184 - RNA, 20 nt, Artificial Sequence
  Synthetic
guguuuguaaagcuauucug

SEQ ID NO: 608185 - RNA, 21 nt, Artificial Sequence
  Synthetic
uguguuuguaaagcuauucug

SEQ ID NO: 608186 - RNA, 22 nt, Artificial Sequence
  Synthetic
cuguguuuguaaagcuauucug

SEQ ID NO: 608187 - RNA, 23 nt, Artificial Sequence
  Synthetic
gcuguguuuguaaagcuauucug

SEQ ID NO: 608188 - RNA, 24 nt, Artificial Sequence
  Synthetic
cgcuguguuuguaaagcuauucug

SEQ ID NO: 608189 - RNA, 18 nt, Artificial Sequence
  Synthetic
cccaguuaauuuauucug

SEQ ID NO: 608190 - RNA, 19 nt, Artificial Sequence
  Synthetic
ccccaguuaauuuauucug

SEQ ID NO: 608191 - RNA, 20 nt, Artificial Sequence
  Synthetic
uccccaguuaauuuauucug

SEQ ID NO: 608192 - RNA, 21 nt, Artificial Sequence
  Synthetic
uuccccaguuaauuuauucug

SEQ ID NO: 608193 - RNA, 22 nt, Artificial Sequence
  Synthetic
uuuccccaguuaauuuauucug

SEQ ID NO: 608194 - RNA, 23 nt, Artificial Sequence
  Synthetic
cuuuccccaguuaauuuauucug

SEQ ID NO: 608195 - RNA, 24 nt, Artificial Sequence
  Synthetic
acuuuccccaguuaauuuauucug

SEQ ID NO: 608196 - RNA, 18 nt, Artificial Sequence
  Synthetic
aauucaagagaacuucug

SEQ ID NO: 608197 - RNA, 19 nt, Artificial Sequence
  Synthetic
gaauucaagagaacuucug

SEQ ID NO: 608198 - RNA, 20 nt, Artificial Sequence
  Synthetic
agaauucaagagaacuucug

SEQ ID NO: 608199 - RNA, 21 nt, Artificial Sequence
  Synthetic
aagaauucaagagaacuucug

SEQ ID NO: 608200 - RNA, 22 nt, Artificial Sequence
  Synthetic
uaagaauucaagagaacuucug

SEQ ID NO: 608201 - RNA, 23 nt, Artificial Sequence
  Synthetic
guaagaauucaagagaacuucug

SEQ ID NO: 608202 - RNA, 24 nt, Artificial Sequence
  Synthetic
cguaagaauucaagagaacuucug

SEQ ID NO: 608203 - RNA, 18 nt, Artificial Sequence
  Synthetic
auuaucugguaacuucug

SEQ ID NO: 608204 - RNA, 19 nt, Artificial Sequence
  Synthetic
uauuaucugguaacuucug

SEQ ID NO: 608205 - RNA, 20 nt, Artificial Sequence
  Synthetic
cuauuaucugguaacuucug

SEQ ID NO: 608206 - RNA, 21 nt, Artificial Sequence
  Synthetic
ucuauuaucugguaacuucug

SEQ ID NO: 608207 - RNA, 22 nt, Artificial Sequence
  Synthetic
aucuauuaucugguaacuucug

SEQ ID NO: 608208 - RNA, 23 nt, Artificial Sequence
  Synthetic
aaucuauuaucugguaacuucug

SEQ ID NO: 608209 - RNA, 24 nt, Artificial Sequence
  Synthetic
caaucuauuaucugguaacuucug

SEQ ID NO: 608210 - RNA, 18 nt, Artificial Sequence
  Synthetic
gcucacugagcacuucug

SEQ ID NO: 608211 - RNA, 19 nt, Artificial Sequence
  Synthetic
agcucacugagcacuucug

SEQ ID NO: 608212 - RNA, 20 nt, Artificial Sequence
  Synthetic
cagcucacugagcacuucug

SEQ ID NO: 608213 - RNA, 21 nt, Artificial Sequence
  Synthetic
gcagcucacugagcacuucug

SEQ ID NO: 608214 - RNA, 22 nt, Artificial Sequence
  Synthetic
ggcagcucacugagcacuucug

SEQ ID NO: 608215 - RNA, 23 nt, Artificial Sequence
  Synthetic
uggcagcucacugagcacuucug

SEQ ID NO: 608216 - RNA, 24 nt, Artificial Sequence
  Synthetic
auggcagcucacugagcacuucug

SEQ ID NO: 608217 - RNA, 18 nt, Artificial Sequence
  Synthetic
auugacauaugacuucug

SEQ ID NO: 608218 - RNA, 19 nt, Artificial Sequence
  Synthetic
gauugacauaugacuucug

SEQ ID NO: 608219 - RNA, 20 nt, Artificial Sequence
  Synthetic
ugauugacauaugacuucug

SEQ ID NO: 608220 - RNA, 21 nt, Artificial Sequence
  Synthetic
cugauugacauaugacuucug

SEQ ID NO: 608221 - RNA, 22 nt, Artificial Sequence
  Synthetic
acugauugacauaugacuucug

SEQ ID NO: 608222 - RNA, 23 nt, Artificial Sequence
  Synthetic
uacugauugacauaugacuucug

SEQ ID NO: 608223 - RNA, 24 nt, Artificial Sequence
  Synthetic
uuacugauugacauaugacuucug

SEQ ID NO: 608224 - RNA, 18 nt, Artificial Sequence
  Synthetic
acuuuguggugacuucug

SEQ ID NO: 608225 - RNA, 19 nt, Artificial Sequence
  Synthetic
cacuuuguggugacuucug

SEQ ID NO: 608226 - RNA, 20 nt, Artificial Sequence
  Synthetic
ucacuuuguggugacuucug

SEQ ID NO: 608227 - RNA, 21 nt, Artificial Sequence
  Synthetic
cucacuuuguggugacuucug

SEQ ID NO: 608228 - RNA, 22 nt, Artificial Sequence
  Synthetic
ucucacuuuguggugacuucug

SEQ ID NO: 608229 - RNA, 23 nt, Artificial Sequence
  Synthetic
cucucacuuuguggugacuucug

SEQ ID NO: 608230 - RNA, 24 nt, Artificial Sequence
  Synthetic
ucucucacuuuguggugacuucug

SEQ ID NO: 608231 - RNA, 18 nt, Artificial Sequence
  Synthetic
cacuggcaucuacuucug

SEQ ID NO: 608232 - RNA, 19 nt, Artificial Sequence
  Synthetic
ucacuggcaucuacuucug

SEQ ID NO: 608233 - RNA, 20 nt, Artificial Sequence
  Synthetic
gucacuggcaucuacuucug

SEQ ID NO: 608234 - RNA, 21 nt, Artificial Sequence
  Synthetic
ugucacuggcaucuacuucug

SEQ ID NO: 608235 - RNA, 22 nt, Artificial Sequence
  Synthetic
augucacuggcaucuacuucug

SEQ ID NO: 608236 - RNA, 23 nt, Artificial Sequence
  Synthetic
caugucacuggcaucuacuucug

SEQ ID NO: 608237 - RNA, 24 nt, Artificial Sequence
  Synthetic
gcaugucacuggcaucuacuucug

SEQ ID NO: 608238 - RNA, 18 nt, Artificial Sequence
  Synthetic
aauaacagaguacuucug

SEQ ID NO: 608239 - RNA, 19 nt, Artificial Sequence
  Synthetic
caauaacagaguacuucug

SEQ ID NO: 608240 - RNA, 20 nt, Artificial Sequence
  Synthetic
ccaauaacagaguacuucug

SEQ ID NO: 608241 - RNA, 21 nt, Artificial Sequence
  Synthetic
accaauaacagaguacuucug

SEQ ID NO: 608242 - RNA, 22 nt, Artificial Sequence
  Synthetic
aaccaauaacagaguacuucug

SEQ ID NO: 608243 - RNA, 23 nt, Artificial Sequence
  Synthetic
aaaccaauaacagaguacuucug

SEQ ID NO: 608244 - RNA, 24 nt, Artificial Sequence
  Synthetic
uaaaccaauaacagaguacuucug

SEQ ID NO: 608245 - RNA, 18 nt, Artificial Sequence
  Synthetic
uauuugaaagcccuucug

SEQ ID NO: 608246 - RNA, 19 nt, Artificial Sequence
  Synthetic
cuauuugaaagcccuucug

SEQ ID NO: 608247 - RNA, 20 nt, Artificial Sequence
  Synthetic
acuauuugaaagcccuucug

SEQ ID NO: 608248 - RNA, 21 nt, Artificial Sequence
  Synthetic
cacuauuugaaagcccuucug

SEQ ID NO: 608249 - RNA, 22 nt, Artificial Sequence
  Synthetic
gcacuauuugaaagcccuucug

SEQ ID NO: 608250 - RNA, 23 nt, Artificial Sequence
  Synthetic
cgcacuauuugaaagcccuucug

SEQ ID NO: 608251 - RNA, 24 nt, Artificial Sequence
  Synthetic
ucgcacuauuugaaagcccuucug

SEQ ID NO: 608252 - RNA, 18 nt, Artificial Sequence
  Synthetic
agucaaacaggccuucug

SEQ ID NO: 608253 - RNA, 19 nt, Artificial Sequence
  Synthetic
gagucaaacaggccuucug

SEQ ID NO: 608254 - RNA, 20 nt, Artificial Sequence
  Synthetic
ugagucaaacaggccuucug

SEQ ID NO: 608255 - RNA, 21 nt, Artificial Sequence
  Synthetic
augagucaaacaggccuucug

SEQ ID NO: 608256 - RNA, 22 nt, Artificial Sequence
  Synthetic
aaugagucaaacaggccuucug

SEQ ID NO: 608257 - RNA, 23 nt, Artificial Sequence
  Synthetic
uaaugagucaaacaggccuucug

SEQ ID NO: 608258 - RNA, 24 nt, Artificial Sequence
  Synthetic
uuaaugagucaaacaggccuucug

SEQ ID NO: 608259 - RNA, 18 nt, Artificial Sequence
  Synthetic
gguaaauaaauccuucug

SEQ ID NO: 608260 - RNA, 19 nt, Artificial Sequence
  Synthetic
agguaaauaaauccuucug

SEQ ID NO: 608261 - RNA, 20 nt, Artificial Sequence
  Synthetic
uagguaaauaaauccuucug

SEQ ID NO: 608262 - RNA, 21 nt, Artificial Sequence
  Synthetic
uuagguaaauaaauccuucug

SEQ ID NO: 608263 - RNA, 22 nt, Artificial Sequence
  Synthetic
cuuagguaaauaaauccuucug

SEQ ID NO: 608264 - RNA, 23 nt, Artificial Sequence
  Synthetic
ccuuagguaaauaaauccuucug

SEQ ID NO: 608265 - RNA, 24 nt, Artificial Sequence
  Synthetic
accuuagguaaauaaauccuucug

SEQ ID NO: 608266 - RNA, 18 nt, Artificial Sequence
  Synthetic
agggcuauacuccuucug

SEQ ID NO: 608267 - RNA, 19 nt, Artificial Sequence
  Synthetic
cagggcuauacuccuucug

SEQ ID NO: 608268 - RNA, 20 nt, Artificial Sequence
  Synthetic
gcagggcuauacuccuucug

SEQ ID NO: 608269 - RNA, 21 nt, Artificial Sequence
  Synthetic
ggcagggcuauacuccuucug

SEQ ID NO: 608270 - RNA, 22 nt, Artificial Sequence
  Synthetic
uggcagggcuauacuccuucug

SEQ ID NO: 608271 - RNA, 23 nt, Artificial Sequence
  Synthetic
uuggcagggcuauacuccuucug

SEQ ID NO: 608272 - RNA, 24 nt, Artificial Sequence
  Synthetic
guuggcagggcuauacuccuucug

SEQ ID NO: 608273 - RNA, 18 nt, Artificial Sequence
  Synthetic
uugaaaauaaugcuucug

SEQ ID NO: 608274 - RNA, 19 nt, Artificial Sequence
  Synthetic
auugaaaauaaugcuucug

SEQ ID NO: 608275 - RNA, 20 nt, Artificial Sequence
  Synthetic
aauugaaaauaaugcuucug

SEQ ID NO: 608276 - RNA, 21 nt, Artificial Sequence
  Synthetic
aaauugaaaauaaugcuucug

SEQ ID NO: 608277 - RNA, 22 nt, Artificial Sequence
  Synthetic
gaaauugaaaauaaugcuucug

SEQ ID NO: 608278 - RNA, 23 nt, Artificial Sequence
  Synthetic
agaaauugaaaauaaugcuucug

SEQ ID NO: 608279 - RNA, 24 nt, Artificial Sequence
  Synthetic
aagaaauugaaaauaaugcuucug

SEQ ID NO: 608280 - RNA, 18 nt, Artificial Sequence
  Synthetic
gaagacauuuugcuucug

SEQ ID NO: 608281 - RNA, 19 nt, Artificial Sequence
  Synthetic
agaagacauuuugcuucug

SEQ ID NO: 608282 - RNA, 20 nt, Artificial Sequence
  Synthetic
cagaagacauuuugcuucug

SEQ ID NO: 608283 - RNA, 21 nt, Artificial Sequence
  Synthetic
acagaagacauuuugcuucug

SEQ ID NO: 608284 - RNA, 22 nt, Artificial Sequence
  Synthetic
gacagaagacauuuugcuucug

SEQ ID NO: 608285 - RNA, 23 nt, Artificial Sequence
  Synthetic
ggacagaagacauuuugcuucug

SEQ ID NO: 608286 - RNA, 24 nt, Artificial Sequence
  Synthetic
cggacagaagacauuuugcuucug

SEQ ID NO: 608287 - RNA, 18 nt, Artificial Sequence
  Synthetic
caaucugcuagucuucug

SEQ ID NO: 608288 - RNA, 19 nt, Artificial Sequence
  Synthetic
ccaaucugcuagucuucug

SEQ ID NO: 608289 - RNA, 20 nt, Artificial Sequence
  Synthetic
cccaaucugcuagucuucug

SEQ ID NO: 608290 - RNA, 21 nt, Artificial Sequence
  Synthetic
ccccaaucugcuagucuucug

SEQ ID NO: 608291 - RNA, 22 nt, Artificial Sequence
  Synthetic
gccccaaucugcuagucuucug

SEQ ID NO: 608292 - RNA, 23 nt, Artificial Sequence
  Synthetic
ugccccaaucugcuagucuucug

SEQ ID NO: 608293 - RNA, 24 nt, Artificial Sequence
  Synthetic
gugccccaaucugcuagucuucug

SEQ ID NO: 608294 - RNA, 18 nt, Artificial Sequence
  Synthetic
gccaaagacugucuucug

SEQ ID NO: 608295 - RNA, 19 nt, Artificial Sequence
  Synthetic
ggccaaagacugucuucug

SEQ ID NO: 608296 - RNA, 20 nt, Artificial Sequence
  Synthetic
aggccaaagacugucuucug

SEQ ID NO: 608297 - RNA, 21 nt, Artificial Sequence
  Synthetic
aaggccaaagacugucuucug

SEQ ID NO: 608298 - RNA, 22 nt, Artificial Sequence
  Synthetic
aaaggccaaagacugucuucug

SEQ ID NO: 608299 - RNA, 23 nt, Artificial Sequence
  Synthetic
uaaaggccaaagacugucuucug

SEQ ID NO: 608300 - RNA, 24 nt, Artificial Sequence
  Synthetic
auaaaggccaaagacugucuucug

SEQ ID NO: 608301 - RNA, 18 nt, Artificial Sequence
  Synthetic
gucgaauucuuucuucug

SEQ ID NO: 608302 - RNA, 19 nt, Artificial Sequence
  Synthetic
ggucgaauucuuucuucug

SEQ ID NO: 608303 - RNA, 20 nt, Artificial Sequence
  Synthetic
uggucgaauucuuucuucug

SEQ ID NO: 608304 - RNA, 21 nt, Artificial Sequence
  Synthetic
uuggucgaauucuuucuucug

SEQ ID NO: 608305 - RNA, 22 nt, Artificial Sequence
  Synthetic
cuuggucgaauucuuucuucug

SEQ ID NO: 608306 - RNA, 23 nt, Artificial Sequence
  Synthetic
ccuuggucgaauucuuucuucug

SEQ ID NO: 608307 - RNA, 24 nt, Artificial Sequence
  Synthetic
uccuuggucgaauucuuucuucug

SEQ ID NO: 608308 - RNA, 18 nt, Artificial Sequence
  Synthetic
ucaugguguuuucuucug

SEQ ID NO: 608309 - RNA, 19 nt, Artificial Sequence
  Synthetic
cucaugguguuuucuucug

SEQ ID NO: 608310 - RNA, 20 nt, Artificial Sequence
  Synthetic
acucaugguguuuucuucug

SEQ ID NO: 608311 - RNA, 21 nt, Artificial Sequence
  Synthetic
aacucaugguguuuucuucug

SEQ ID NO: 608312 - RNA, 22 nt, Artificial Sequence
  Synthetic
gaacucaugguguuuucuucug

SEQ ID NO: 608313 - RNA, 23 nt, Artificial Sequence
  Synthetic
agaacucaugguguuuucuucug

SEQ ID NO: 608314 - RNA, 24 nt, Artificial Sequence
  Synthetic
cagaacucaugguguuuucuucug

SEQ ID NO: 608315 - RNA, 18 nt, Artificial Sequence
  Synthetic
ggaaccucagaaguucug

SEQ ID NO: 608316 - RNA, 19 nt, Artificial Sequence
  Synthetic
cggaaccucagaaguucug

SEQ ID NO: 608317 - RNA, 20 nt, Artificial Sequence
  Synthetic
acggaaccucagaaguucug

SEQ ID NO: 608318 - RNA, 21 nt, Artificial Sequence
  Synthetic
aacggaaccucagaaguucug

SEQ ID NO: 608319 - RNA, 22 nt, Artificial Sequence
  Synthetic
aaacggaaccucagaaguucug

SEQ ID NO: 608320 - RNA, 23 nt, Artificial Sequence
  Synthetic
uaaacggaaccucagaaguucug

SEQ ID NO: 608321 - RNA, 24 nt, Artificial Sequence
  Synthetic
auaaacggaaccucagaaguucug

SEQ ID NO: 608322 - RNA, 18 nt, Artificial Sequence
  Synthetic
ccaaaggaccuaguucug

SEQ ID NO: 608323 - RNA, 19 nt, Artificial Sequence
  Synthetic
cccaaaggaccuaguucug

SEQ ID NO: 608324 - RNA, 20 nt, Artificial Sequence
  Synthetic
acccaaaggaccuaguucug

SEQ ID NO: 608325 - RNA, 21 nt, Artificial Sequence
  Synthetic
cacccaaaggaccuaguucug

SEQ ID NO: 608326 - RNA, 22 nt, Artificial Sequence
  Synthetic
acacccaaaggaccuaguucug

SEQ ID NO: 608327 - RNA, 23 nt, Artificial Sequence
  Synthetic
aacacccaaaggaccuaguucug

SEQ ID NO: 608328 - RNA, 24 nt, Artificial Sequence
  Synthetic
aaacacccaaaggaccuaguucug

SEQ ID NO: 608329 - RNA, 18 nt, Artificial Sequence
  Synthetic
gcuugaacauuaguucug

SEQ ID NO: 608330 - RNA, 19 nt, Artificial Sequence
  Synthetic
ugcuugaacauuaguucug

SEQ ID NO: 608331 - RNA, 20 nt, Artificial Sequence
  Synthetic
uugcuugaacauuaguucug

SEQ ID NO: 608332 - RNA, 21 nt, Artificial Sequence
  Synthetic
auugcuugaacauuaguucug

SEQ ID NO: 608333 - RNA, 22 nt, Artificial Sequence
  Synthetic
aauugcuugaacauuaguucug

SEQ ID NO: 608334 - RNA, 23 nt, Artificial Sequence
  Synthetic
aaauugcuugaacauuaguucug

SEQ ID NO: 608335 - RNA, 24 nt, Artificial Sequence
  Synthetic
uaaauugcuugaacauuaguucug

SEQ ID NO: 608336 - RNA, 18 nt, Artificial Sequence
  Synthetic
gucugcgacaacguucug

SEQ ID NO: 608337 - RNA, 19 nt, Artificial Sequence
  Synthetic
ugucugcgacaacguucug

SEQ ID NO: 608338 - RNA, 20 nt, Artificial Sequence
  Synthetic
augucugcgacaacguucug

SEQ ID NO: 608339 - RNA, 21 nt, Artificial Sequence
  Synthetic
uaugucugcgacaacguucug

SEQ ID NO: 608340 - RNA, 22 nt, Artificial Sequence
  Synthetic
guaugucugcgacaacguucug

SEQ ID NO: 608341 - RNA, 23 nt, Artificial Sequence
  Synthetic
uguaugucugcgacaacguucug

SEQ ID NO: 608342 - RNA, 24 nt, Artificial Sequence
  Synthetic
uuguaugucugcgacaacguucug

SEQ ID NO: 608343 - RNA, 18 nt, Artificial Sequence
  Synthetic
gccuguuaauacguucug

SEQ ID NO: 608344 - RNA, 19 nt, Artificial Sequence
  Synthetic
ugccuguuaauacguucug

SEQ ID NO: 608345 - RNA, 20 nt, Artificial Sequence
  Synthetic
augccuguuaauacguucug

SEQ ID NO: 608346 - RNA, 21 nt, Artificial Sequence
  Synthetic
caugccuguuaauacguucug

SEQ ID NO: 608347 - RNA, 22 nt, Artificial Sequence
  Synthetic
gcaugccuguuaauacguucug

SEQ ID NO: 608348 - RNA, 23 nt, Artificial Sequence
  Synthetic
ugcaugccuguuaauacguucug

SEQ ID NO: 608349 - RNA, 24 nt, Artificial Sequence
  Synthetic
augcaugccuguuaauacguucug

SEQ ID NO: 608350 - RNA, 18 nt, Artificial Sequence
  Synthetic
caaaaauaacagguucug

SEQ ID NO: 608351 - RNA, 19 nt, Artificial Sequence
  Synthetic
ucaaaaauaacagguucug

SEQ ID NO: 608352 - RNA, 20 nt, Artificial Sequence
  Synthetic
gucaaaaauaacagguucug

SEQ ID NO: 608353 - RNA, 21 nt, Artificial Sequence
  Synthetic
agucaaaaauaacagguucug

SEQ ID NO: 608354 - RNA, 22 nt, Artificial Sequence
  Synthetic
uagucaaaaauaacagguucug

SEQ ID NO: 608355 - RNA, 23 nt, Artificial Sequence
  Synthetic
auagucaaaaauaacagguucug

SEQ ID NO: 608356 - RNA, 24 nt, Artificial Sequence
  Synthetic
aauagucaaaaauaacagguucug

SEQ ID NO: 608357 - RNA, 18 nt, Artificial Sequence
  Synthetic
gggacacaggagguucug

SEQ ID NO: 608358 - RNA, 19 nt, Artificial Sequence
  Synthetic
agggacacaggagguucug

SEQ ID NO: 608359 - RNA, 20 nt, Artificial Sequence
  Synthetic
cagggacacaggagguucug

SEQ ID NO: 608360 - RNA, 21 nt, Artificial Sequence
  Synthetic
acagggacacaggagguucug

SEQ ID NO: 608361 - RNA, 22 nt, Artificial Sequence
  Synthetic
cacagggacacaggagguucug

SEQ ID NO: 608362 - RNA, 23 nt, Artificial Sequence
  Synthetic
acacagggacacaggagguucug

SEQ ID NO: 608363 - RNA, 24 nt, Artificial Sequence
  Synthetic
aacacagggacacaggagguucug

SEQ ID NO: 608364 - RNA, 18 nt, Artificial Sequence
  Synthetic
cauuuaaacaggguucug

SEQ ID NO: 608365 - RNA, 19 nt, Artificial Sequence
  Synthetic
gcauuuaaacaggguucug

SEQ ID NO: 608366 - RNA, 20 nt, Artificial Sequence
  Synthetic
ggcauuuaaacaggguucug

SEQ ID NO: 608367 - RNA, 21 nt, Artificial Sequence
  Synthetic
aggcauuuaaacaggguucug

SEQ ID NO: 608368 - RNA, 22 nt, Artificial Sequence
  Synthetic
aaggcauuuaaacaggguucug

SEQ ID NO: 608369 - RNA, 23 nt, Artificial Sequence
  Synthetic
caaggcauuuaaacaggguucug

SEQ ID NO: 608370 - RNA, 24 nt, Artificial Sequence
  Synthetic
acaaggcauuuaaacaggguucug

SEQ ID NO: 608371 - RNA, 18 nt, Artificial Sequence
  Synthetic
uuaaugcagaauguucug

SEQ ID NO: 608372 - RNA, 19 nt, Artificial Sequence
  Synthetic
auuaaugcagaauguucug

SEQ ID NO: 608373 - RNA, 20 nt, Artificial Sequence
  Synthetic
aauuaaugcagaauguucug

SEQ ID NO: 608374 - RNA, 21 nt, Artificial Sequence
  Synthetic
aaauuaaugcagaauguucug

SEQ ID NO: 608375 - RNA, 22 nt, Artificial Sequence
  Synthetic
gaaauuaaugcagaauguucug

SEQ ID NO: 608376 - RNA, 23 nt, Artificial Sequence
  Synthetic
ugaaauuaaugcagaauguucug

SEQ ID NO: 608377 - RNA, 24 nt, Artificial Sequence
  Synthetic
cugaaauuaaugcagaauguucug

SEQ ID NO: 608378 - RNA, 18 nt, Artificial Sequence
  Synthetic
ugccuguuuacuguucug

SEQ ID NO: 608379 - RNA, 19 nt, Artificial Sequence
  Synthetic
augccuguuuacuguucug

SEQ ID NO: 608380 - RNA, 20 nt, Artificial Sequence
  Synthetic
caugccuguuuacuguucug

SEQ ID NO: 608381 - RNA, 21 nt, Artificial Sequence
  Synthetic
ucaugccuguuuacuguucug

SEQ ID NO: 608382 - RNA, 22 nt, Artificial Sequence
  Synthetic
uucaugccuguuuacuguucug

SEQ ID NO: 608383 - RNA, 23 nt, Artificial Sequence
  Synthetic
uuucaugccuguuuacuguucug

SEQ ID NO: 608384 - RNA, 24 nt, Artificial Sequence
  Synthetic
uuuucaugccuguuuacuguucug

SEQ ID NO: 608385 - RNA, 18 nt, Artificial Sequence
  Synthetic
agggauguccaauuucug

SEQ ID NO: 608386 - RNA, 19 nt, Artificial Sequence
  Synthetic
uagggauguccaauuucug

SEQ ID NO: 608387 - RNA, 20 nt, Artificial Sequence
  Synthetic
cuagggauguccaauuucug

SEQ ID NO: 608388 - RNA, 21 nt, Artificial Sequence
  Synthetic
ucuagggauguccaauuucug

SEQ ID NO: 608389 - RNA, 22 nt, Artificial Sequence
  Synthetic
cucuagggauguccaauuucug

SEQ ID NO: 608390 - RNA, 23 nt, Artificial Sequence
  Synthetic
acucuagggauguccaauuucug

SEQ ID NO: 608391 - RNA, 24 nt, Artificial Sequence
  Synthetic
cacucuagggauguccaauuucug

SEQ ID NO: 608392 - RNA, 18 nt, Artificial Sequence
  Synthetic
uuauugccucaauuucug

SEQ ID NO: 608393 - RNA, 19 nt, Artificial Sequence
  Synthetic
cuuauugccucaauuucug

SEQ ID NO: 608394 - RNA, 20 nt, Artificial Sequence
  Synthetic
ucuuauugccucaauuucug

SEQ ID NO: 608395 - RNA, 21 nt, Artificial Sequence
  Synthetic
aucuuauugccucaauuucug

SEQ ID NO: 608396 - RNA, 22 nt, Artificial Sequence
  Synthetic
caucuuauugccucaauuucug

SEQ ID NO: 608397 - RNA, 23 nt, Artificial Sequence
  Synthetic
acaucuuauugccucaauuucug

SEQ ID NO: 608398 - RNA, 24 nt, Artificial Sequence
  Synthetic
gacaucuuauugccucaauuucug

SEQ ID NO: 608399 - RNA, 18 nt, Artificial Sequence
  Synthetic
ugaaguguauaauuucug

SEQ ID NO: 608400 - RNA, 19 nt, Artificial Sequence
  Synthetic
augaaguguauaauuucug

SEQ ID NO: 608401 - RNA, 20 nt, Artificial Sequence
  Synthetic
aaugaaguguauaauuucug

SEQ ID NO: 608402 - RNA, 21 nt, Artificial Sequence
  Synthetic
gaaugaaguguauaauuucug

SEQ ID NO: 608403 - RNA, 22 nt, Artificial Sequence
  Synthetic
ugaaugaaguguauaauuucug

SEQ ID NO: 608404 - RNA, 23 nt, Artificial Sequence
  Synthetic
gugaaugaaguguauaauuucug

SEQ ID NO: 608405 - RNA, 24 nt, Artificial Sequence
  Synthetic
ugugaaugaaguguauaauuucug

SEQ ID NO: 608406 - RNA, 18 nt, Artificial Sequence
  Synthetic
acuuggaccucauuucug

SEQ ID NO: 608407 - RNA, 19 nt, Artificial Sequence
  Synthetic
gacuuggaccucauuucug

SEQ ID NO: 608408 - RNA, 20 nt, Artificial Sequence
  Synthetic
ugacuuggaccucauuucug

SEQ ID NO: 608409 - RNA, 21 nt, Artificial Sequence
  Synthetic
cugacuuggaccucauuucug

SEQ ID NO: 608410 - RNA, 22 nt, Artificial Sequence
  Synthetic
gcugacuuggaccucauuucug

SEQ ID NO: 608411 - RNA, 23 nt, Artificial Sequence
  Synthetic
agcugacuuggaccucauuucug

SEQ ID NO: 608412 - RNA, 24 nt, Artificial Sequence
  Synthetic
gagcugacuuggaccucauuucug

SEQ ID NO: 608413 - RNA, 18 nt, Artificial Sequence
  Synthetic
uuugaaaauagauuucug

SEQ ID NO: 608414 - RNA, 19 nt, Artificial Sequence
  Synthetic
uuuugaaaauagauuucug

SEQ ID NO: 608415 - RNA, 20 nt, Artificial Sequence
  Synthetic
uuuuugaaaauagauuucug

SEQ ID NO: 608416 - RNA, 21 nt, Artificial Sequence
  Synthetic
auuuuugaaaauagauuucug

SEQ ID NO: 608417 - RNA, 22 nt, Artificial Sequence
  Synthetic
uauuuuugaaaauagauuucug

SEQ ID NO: 608418 - RNA, 23 nt, Artificial Sequence
  Synthetic
auauuuuugaaaauagauuucug

SEQ ID NO: 608419 - RNA, 24 nt, Artificial Sequence
  Synthetic
uauauuuuugaaaauagauuucug

SEQ ID NO: 608420 - RNA, 18 nt, Artificial Sequence
  Synthetic
gccuugucucucuuucug

SEQ ID NO: 608421 - RNA, 19 nt, Artificial Sequence
  Synthetic
ugccuugucucucuuucug

SEQ ID NO: 608422 - RNA, 20 nt, Artificial Sequence
  Synthetic
augccuugucucucuuucug

SEQ ID NO: 608423 - RNA, 21 nt, Artificial Sequence
  Synthetic
uaugccuugucucucuuucug

SEQ ID NO: 608424 - RNA, 22 nt, Artificial Sequence
  Synthetic
cuaugccuugucucucuuucug

SEQ ID NO: 608425 - RNA, 23 nt, Artificial Sequence
  Synthetic
ucuaugccuugucucucuuucug

SEQ ID NO: 608426 - RNA, 24 nt, Artificial Sequence
  Synthetic
gucuaugccuugucucucuuucug

SEQ ID NO: 608427 - RNA, 18 nt, Artificial Sequence
  Synthetic
agggcuagcugguuucug

SEQ ID NO: 608428 - RNA, 19 nt, Artificial Sequence
  Synthetic
cagggcuagcugguuucug

SEQ ID NO: 608429 - RNA, 20 nt, Artificial Sequence
  Synthetic
acagggcuagcugguuucug

SEQ ID NO: 608430 - RNA, 21 nt, Artificial Sequence
  Synthetic
cacagggcuagcugguuucug

SEQ ID NO: 608431 - RNA, 22 nt, Artificial Sequence
  Synthetic
acacagggcuagcugguuucug

SEQ ID NO: 608432 - RNA, 23 nt, Artificial Sequence
  Synthetic
cacacagggcuagcugguuucug

SEQ ID NO: 608433 - RNA, 24 nt, Artificial Sequence
  Synthetic
acacacagggcuagcugguuucug

SEQ ID NO: 608434 - RNA, 18 nt, Artificial Sequence
  Synthetic
aaaggugcucuguuucug

SEQ ID NO: 608435 - RNA, 19 nt, Artificial Sequence
  Synthetic
aaaaggugcucuguuucug

SEQ ID NO: 608436 - RNA, 20 nt, Artificial Sequence
  Synthetic
aaaaaggugcucuguuucug

SEQ ID NO: 608437 - RNA, 21 nt, Artificial Sequence
  Synthetic
gaaaaaggugcucuguuucug

SEQ ID NO: 608438 - RNA, 22 nt, Artificial Sequence
  Synthetic
ggaaaaaggugcucuguuucug

SEQ ID NO: 608439 - RNA, 23 nt, Artificial Sequence
  Synthetic
aggaaaaaggugcucuguuucug

SEQ ID NO: 608440 - RNA, 24 nt, Artificial Sequence
  Synthetic
caggaaaaaggugcucuguuucug

SEQ ID NO: 608441 - RNA, 18 nt, Artificial Sequence
  Synthetic
cuuaaugaacauuuucug

SEQ ID NO: 608442 - RNA, 19 nt, Artificial Sequence
  Synthetic
ucuuaaugaacauuuucug

SEQ ID NO: 608443 - RNA, 20 nt, Artificial Sequence
  Synthetic
cucuuaaugaacauuuucug

SEQ ID NO: 608444 - RNA, 21 nt, Artificial Sequence
  Synthetic
acucuuaaugaacauuuucug

SEQ ID NO: 608445 - RNA, 22 nt, Artificial Sequence
  Synthetic
aacucuuaaugaacauuuucug

SEQ ID NO: 608446 - RNA, 23 nt, Artificial Sequence
  Synthetic
uaacucuuaaugaacauuuucug

SEQ ID NO: 608447 - RNA, 24 nt, Artificial Sequence
  Synthetic
uuaacucuuaaugaacauuuucug

SEQ ID NO: 608448 - RNA, 18 nt, Artificial Sequence
  Synthetic
agaaaaacccauuuucug

SEQ ID NO: 608449 - RNA, 19 nt, Artificial Sequence
  Synthetic
aagaaaaacccauuuucug

SEQ ID NO: 608450 - RNA, 20 nt, Artificial Sequence
  Synthetic
aaagaaaaacccauuuucug

SEQ ID NO: 608451 - RNA, 21 nt, Artificial Sequence
  Synthetic
aaaagaaaaacccauuuucug

SEQ ID NO: 608452 - RNA, 22 nt, Artificial Sequence
  Synthetic
gaaaagaaaaacccauuuucug

SEQ ID NO: 608453 - RNA, 23 nt, Artificial Sequence
  Synthetic
agaaaagaaaaacccauuuucug

SEQ ID NO: 608454 - RNA, 24 nt, Artificial Sequence
  Synthetic
uagaaaagaaaaacccauuuucug

SEQ ID NO: 608455 - RNA, 18 nt, Artificial Sequence
  Synthetic
agaaaaacucauuuucug

SEQ ID NO: 608456 - RNA, 19 nt, Artificial Sequence
  Synthetic
aagaaaaacucauuuucug

SEQ ID NO: 608457 - RNA, 20 nt, Artificial Sequence
  Synthetic
aaagaaaaacucauuuucug

SEQ ID NO: 608458 - RNA, 21 nt, Artificial Sequence
  Synthetic
aaaagaaaaacucauuuucug

SEQ ID NO: 608459 - RNA, 22 nt, Artificial Sequence
  Synthetic
gaaaagaaaaacucauuuucug

SEQ ID NO: 608460 - RNA, 23 nt, Artificial Sequence
  Synthetic
agaaaagaaaaacucauuuucug

SEQ ID NO: 608461 - RNA, 24 nt, Artificial Sequence
  Synthetic
uagaaaagaaaaacucauuuucug

SEQ ID NO: 608462 - RNA, 18 nt, Artificial Sequence
  Synthetic
aacccugcagcuuuucug

SEQ ID NO: 608463 - RNA, 19 nt, Artificial Sequence
  Synthetic
caacccugcagcuuuucug

SEQ ID NO: 608464 - RNA, 20 nt, Artificial Sequence
  Synthetic
acaacccugcagcuuuucug

SEQ ID NO: 608465 - RNA, 21 nt, Artificial Sequence
  Synthetic
aacaacccugcagcuuuucug

SEQ ID NO: 608466 - RNA, 22 nt, Artificial Sequence
  Synthetic
caacaacccugcagcuuuucug

SEQ ID NO: 608467 - RNA, 23 nt, Artificial Sequence
  Synthetic
ccaacaacccugcagcuuuucug

SEQ ID NO: 608468 - RNA, 24 nt, Artificial Sequence
  Synthetic
cccaacaacccugcagcuuuucug

SEQ ID NO: 608469 - RNA, 18 nt, Artificial Sequence
  Synthetic
gaugaaccugguuuucug

SEQ ID NO: 608470 - RNA, 19 nt, Artificial Sequence
  Synthetic
ugaugaaccugguuuucug

SEQ ID NO: 608471 - RNA, 20 nt, Artificial Sequence
  Synthetic
cugaugaaccugguuuucug

SEQ ID NO: 608472 - RNA, 21 nt, Artificial Sequence
  Synthetic
ccugaugaaccugguuuucug

SEQ ID NO: 608473 - RNA, 22 nt, Artificial Sequence
  Synthetic
accugaugaaccugguuuucug

SEQ ID NO: 608474 - RNA, 23 nt, Artificial Sequence
  Synthetic
caccugaugaaccugguuuucug

SEQ ID NO: 608475 - RNA, 24 nt, Artificial Sequence
  Synthetic
acaccugaugaaccugguuuucug

SEQ ID NO: 608476 - RNA, 18 nt, Artificial Sequence
  Synthetic
gggagauccuguuuucug

SEQ ID NO: 608477 - RNA, 19 nt, Artificial Sequence
  Synthetic
ggggagauccuguuuucug

SEQ ID NO: 608478 - RNA, 20 nt, Artificial Sequence
  Synthetic
aggggagauccuguuuucug

SEQ ID NO: 608479 - RNA, 21 nt, Artificial Sequence
  Synthetic
uaggggagauccuguuuucug

SEQ ID NO: 608480 - RNA, 22 nt, Artificial Sequence
  Synthetic
guaggggagauccuguuuucug

SEQ ID NO: 608481 - RNA, 23 nt, Artificial Sequence
  Synthetic
aguaggggagauccuguuuucug

SEQ ID NO: 608482 - RNA, 24 nt, Artificial Sequence
  Synthetic
gaguaggggagauccuguuuucug

SEQ ID NO: 608483 - RNA, 18 nt, Artificial Sequence
  Synthetic
uuggguuuuuuuuuucug

SEQ ID NO: 608484 - RNA, 19 nt, Artificial Sequence
  Synthetic
uuuggguuuuuuuuuucug

SEQ ID NO: 608485 - RNA, 20 nt, Artificial Sequence
  Synthetic
uuuuggguuuuuuuuuucug

SEQ ID NO: 608486 - RNA, 21 nt, Artificial Sequence
  Synthetic
auuuuggguuuuuuuuuucug

SEQ ID NO: 608487 - RNA, 22 nt, Artificial Sequence
  Synthetic
aauuuuggguuuuuuuuuucug

SEQ ID NO: 608488 - RNA, 23 nt, Artificial Sequence
  Synthetic
gaauuuuggguuuuuuuuuucug

SEQ ID NO: 608489 - RNA, 24 nt, Artificial Sequence
  Synthetic
ugaauuuuggguuuuuuuuuucug

SEQ ID NO: 608490 - RNA, 18 nt, Artificial Sequence
  Synthetic
gaaacuuacuuaaaagug

SEQ ID NO: 608491 - RNA, 19 nt, Artificial Sequence
  Synthetic
ugaaacuuacuuaaaagug

SEQ ID NO: 608492 - RNA, 20 nt, Artificial Sequence
  Synthetic
uugaaacuuacuuaaaagug

SEQ ID NO: 608493 - RNA, 21 nt, Artificial Sequence
  Synthetic
auugaaacuuacuuaaaagug

SEQ ID NO: 608494 - RNA, 22 nt, Artificial Sequence
  Synthetic
uauugaaacuuacuuaaaagug

SEQ ID NO: 608495 - RNA, 23 nt, Artificial Sequence
  Synthetic
auauugaaacuuacuuaaaagug

SEQ ID NO: 608496 - RNA, 24 nt, Artificial Sequence
  Synthetic
aauauugaaacuuacuuaaaagug

SEQ ID NO: 608497 - RNA, 18 nt, Artificial Sequence
  Synthetic
gggacagaagacaaagug

SEQ ID NO: 608498 - RNA, 19 nt, Artificial Sequence
  Synthetic
agggacagaagacaaagug

SEQ ID NO: 608499 - RNA, 20 nt, Artificial Sequence
  Synthetic
uagggacagaagacaaagug

SEQ ID NO: 608500 - RNA, 21 nt, Artificial Sequence
  Synthetic
cuagggacagaagacaaagug

SEQ ID NO: 608501 - RNA, 22 nt, Artificial Sequence
  Synthetic
ccuagggacagaagacaaagug

SEQ ID NO: 608502 - RNA, 23 nt, Artificial Sequence
  Synthetic
accuagggacagaagacaaagug

SEQ ID NO: 608503 - RNA, 24 nt, Artificial Sequence
  Synthetic
uaccuagggacagaagacaaagug

SEQ ID NO: 608504 - RNA, 18 nt, Artificial Sequence
  Synthetic
uuucagccacccaaagug

SEQ ID NO: 608505 - RNA, 19 nt, Artificial Sequence
  Synthetic
guuucagccacccaaagug

SEQ ID NO: 608506 - RNA, 20 nt, Artificial Sequence
  Synthetic
uguuucagccacccaaagug

SEQ ID NO: 608507 - RNA, 21 nt, Artificial Sequence
  Synthetic
cuguuucagccacccaaagug

SEQ ID NO: 608508 - RNA, 22 nt, Artificial Sequence
  Synthetic
ccuguuucagccacccaaagug

SEQ ID NO: 608509 - RNA, 23 nt, Artificial Sequence
  Synthetic
gccuguuucagccacccaaagug

SEQ ID NO: 608510 - RNA, 24 nt, Artificial Sequence
  Synthetic
ugccuguuucagccacccaaagug

SEQ ID NO: 608511 - RNA, 18 nt, Artificial Sequence
  Synthetic
ccucggccccccaaagug

SEQ ID NO: 608512 - RNA, 19 nt, Artificial Sequence
  Synthetic
accucggccccccaaagug

SEQ ID NO: 608513 - RNA, 20 nt, Artificial Sequence
  Synthetic
caccucggccccccaaagug

SEQ ID NO: 608514 - RNA, 21 nt, Artificial Sequence
  Synthetic
ccaccucggccccccaaagug

SEQ ID NO: 608515 - RNA, 22 nt, Artificial Sequence
  Synthetic
cccaccucggccccccaaagug

SEQ ID NO: 608516 - RNA, 23 nt, Artificial Sequence
  Synthetic
acccaccucggccccccaaagug

SEQ ID NO: 608517 - RNA, 24 nt, Artificial Sequence
  Synthetic
cacccaccucggccccccaaagug

SEQ ID NO: 608518 - RNA, 18 nt, Artificial Sequence
  Synthetic
uuacagaagcccaaagug

SEQ ID NO: 608519 - RNA, 19 nt, Artificial Sequence
  Synthetic
guuacagaagcccaaagug

SEQ ID NO: 608520 - RNA, 20 nt, Artificial Sequence
  Synthetic
uguuacagaagcccaaagug

SEQ ID NO: 608521 - RNA, 21 nt, Artificial Sequence
  Synthetic
guguuacagaagcccaaagug

SEQ ID NO: 608522 - RNA, 22 nt, Artificial Sequence
  Synthetic
aguguuacagaagcccaaagug

SEQ ID NO: 608523 - RNA, 23 nt, Artificial Sequence
  Synthetic
uaguguuacagaagcccaaagug

SEQ ID NO: 608524 - RNA, 24 nt, Artificial Sequence
  Synthetic
cuaguguuacagaagcccaaagug

SEQ ID NO: 608525 - RNA, 18 nt, Artificial Sequence
  Synthetic
augucucugcccaaagug

SEQ ID NO: 608526 - RNA, 19 nt, Artificial Sequence
  Synthetic
aaugucucugcccaaagug

SEQ ID NO: 608527 - RNA, 20 nt, Artificial Sequence
  Synthetic
aaaugucucugcccaaagug

SEQ ID NO: 608528 - RNA, 21 nt, Artificial Sequence
  Synthetic
caaaugucucugcccaaagug

SEQ ID NO: 608529 - RNA, 22 nt, Artificial Sequence
  Synthetic
ucaaaugucucugcccaaagug

SEQ ID NO: 608530 - RNA, 23 nt, Artificial Sequence
  Synthetic
uucaaaugucucugcccaaagug

SEQ ID NO: 608531 - RNA, 24 nt, Artificial Sequence
  Synthetic
uuucaaaugucucugcccaaagug

SEQ ID NO: 608532 - RNA, 18 nt, Artificial Sequence
  Synthetic
ccucagcaucccaaagug

SEQ ID NO: 608533 - RNA, 19 nt, Artificial Sequence
  Synthetic
gccucagcaucccaaagug

SEQ ID NO: 608534 - RNA, 20 nt, Artificial Sequence
  Synthetic
ugccucagcaucccaaagug

SEQ ID NO: 608535 - RNA, 21 nt, Artificial Sequence
  Synthetic
cugccucagcaucccaaagug

SEQ ID NO: 608536 - RNA, 22 nt, Artificial Sequence
  Synthetic
ccugccucagcaucccaaagug

SEQ ID NO: 608537 - RNA, 23 nt, Artificial Sequence
  Synthetic
gccugccucagcaucccaaagug

SEQ ID NO: 608538 - RNA, 24 nt, Artificial Sequence
  Synthetic
cgccugccucagcaucccaaagug

SEQ ID NO: 608539 - RNA, 18 nt, Artificial Sequence
  Synthetic
ccucagacucccaaagug

SEQ ID NO: 608540 - RNA, 19 nt, Artificial Sequence
  Synthetic
accucagacucccaaagug

SEQ ID NO: 608541 - RNA, 20 nt, Artificial Sequence
  Synthetic
caccucagacucccaaagug

SEQ ID NO: 608542 - RNA, 21 nt, Artificial Sequence
  Synthetic
ccaccucagacucccaaagug

SEQ ID NO: 608543 - RNA, 22 nt, Artificial Sequence
  Synthetic
cccaccucagacucccaaagug

SEQ ID NO: 608544 - RNA, 23 nt, Artificial Sequence
  Synthetic
acccaccucagacucccaaagug

SEQ ID NO: 608545 - RNA, 24 nt, Artificial Sequence
  Synthetic
cacccaccucagacucccaaagug

SEQ ID NO: 608546 - RNA, 18 nt, Artificial Sequence
  Synthetic
ccuuggacucccaaagug

SEQ ID NO: 608547 - RNA, 19 nt, Artificial Sequence
  Synthetic
gccuuggacucccaaagug

SEQ ID NO: 608548 - RNA, 20 nt, Artificial Sequence
  Synthetic
cgccuuggacucccaaagug

SEQ ID NO: 608549 - RNA, 21 nt, Artificial Sequence
  Synthetic
ccgccuuggacucccaaagug

SEQ ID NO: 608550 - RNA, 22 nt, Artificial Sequence
  Synthetic
cccgccuuggacucccaaagug

SEQ ID NO: 608551 - RNA, 23 nt, Artificial Sequence
  Synthetic
gcccgccuuggacucccaaagug

SEQ ID NO: 608552 - RNA, 24 nt, Artificial Sequence
  Synthetic
ugcccgccuuggacucccaaagug

SEQ ID NO: 608553 - RNA, 18 nt, Artificial Sequence
  Synthetic
cuucagccucccaaagug

SEQ ID NO: 608554 - RNA, 19 nt, Artificial Sequence
  Synthetic
gcuucagccucccaaagug

SEQ ID NO: 608555 - RNA, 20 nt, Artificial Sequence
  Synthetic
cgcuucagccucccaaagug

SEQ ID NO: 608556 - RNA, 21 nt, Artificial Sequence
  Synthetic
ucgcuucagccucccaaagug

SEQ ID NO: 608557 - RNA, 22 nt, Artificial Sequence
  Synthetic
aucgcuucagccucccaaagug

SEQ ID NO: 608558 - RNA, 23 nt, Artificial Sequence
  Synthetic
caucgcuucagccucccaaagug

SEQ ID NO: 608559 - RNA, 24 nt, Artificial Sequence
  Synthetic
ccaucgcuucagccucccaaagug

SEQ ID NO: 608560 - RNA, 20 nt, Artificial Sequence
  Synthetic
ugcuucagccucccaaagug

SEQ ID NO: 608561 - RNA, 21 nt, Artificial Sequence
  Synthetic
cugcuucagccucccaaagug

SEQ ID NO: 608562 - RNA, 22 nt, Artificial Sequence
  Synthetic
ccugcuucagccucccaaagug

SEQ ID NO: 608563 - RNA, 23 nt, Artificial Sequence
  Synthetic
accugcuucagccucccaaagug

SEQ ID NO: 608564 - RNA, 24 nt, Artificial Sequence
  Synthetic
caccugcuucagccucccaaagug

SEQ ID NO: 608565 - RNA, 18 nt, Artificial Sequence
  Synthetic
cguaggccucccaaagug

SEQ ID NO: 608566 - RNA, 19 nt, Artificial Sequence
  Synthetic
acguaggccucccaaagug

SEQ ID NO: 608567 - RNA, 20 nt, Artificial Sequence
  Synthetic
cacguaggccucccaaagug

SEQ ID NO: 608568 - RNA, 21 nt, Artificial Sequence
  Synthetic
ccacguaggccucccaaagug

SEQ ID NO: 608569 - RNA, 22 nt, Artificial Sequence
  Synthetic
cccacguaggccucccaaagug

SEQ ID NO: 608570 - RNA, 23 nt, Artificial Sequence
  Synthetic
acccacguaggccucccaaagug

SEQ ID NO: 608571 - RNA, 24 nt, Artificial Sequence
  Synthetic
cacccacguaggccucccaaagug

SEQ ID NO: 608572 - RNA, 21 nt, Artificial Sequence
  Synthetic
ccaccucggccucccaaagug

SEQ ID NO: 608573 - RNA, 22 nt, Artificial Sequence
  Synthetic
cccaccucggccucccaaagug

SEQ ID NO: 608574 - RNA, 23 nt, Artificial Sequence
  Synthetic
acccaccucggccucccaaagug

SEQ ID NO: 608575 - RNA, 24 nt, Artificial Sequence
  Synthetic
cacccaccucggccucccaaagug

SEQ ID NO: 608576 - RNA, 23 nt, Artificial Sequence
  Synthetic
ccccaccucggccucccaaagug

SEQ ID NO: 608577 - RNA, 24 nt, Artificial Sequence
  Synthetic
cccccaccucggccucccaaagug

SEQ ID NO: 608578 - RNA, 23 nt, Artificial Sequence
  Synthetic
gcccaccucggccucccaaagug

SEQ ID NO: 608579 - RNA, 24 nt, Artificial Sequence
  Synthetic
ugcccaccucggccucccaaagug

SEQ ID NO: 608580 - RNA, 21 nt, Artificial Sequence
  Synthetic
ccgccucggccucccaaagug

SEQ ID NO: 608581 - RNA, 22 nt, Artificial Sequence
  Synthetic
cccgccucggccucccaaagug

SEQ ID NO: 608582 - RNA, 23 nt, Artificial Sequence
  Synthetic
gcccgccucggccucccaaagug

SEQ ID NO: 608583 - RNA, 24 nt, Artificial Sequence
  Synthetic
agcccgccucggccucccaaagug

SEQ ID NO: 608584 - RNA, 24 nt, Artificial Sequence
  Synthetic
cgcccgccucggccucccaaagug

SEQ ID NO: 608585 - RNA, 21 nt, Artificial Sequence
  Synthetic
cugccucggccucccaaagug

SEQ ID NO: 608586 - RNA, 22 nt, Artificial Sequence
  Synthetic
acugccucggccucccaaagug

SEQ ID NO: 608587 - RNA, 23 nt, Artificial Sequence
  Synthetic
aacugccucggccucccaaagug

SEQ ID NO: 608588 - RNA, 24 nt, Artificial Sequence
  Synthetic
caacugccucggccucccaaagug

SEQ ID NO: 608589 - RNA, 22 nt, Artificial Sequence
  Synthetic
ccugccucggccucccaaagug

SEQ ID NO: 608590 - RNA, 23 nt, Artificial Sequence
  Synthetic
accugccucggccucccaaagug

SEQ ID NO: 608591 - RNA, 24 nt, Artificial Sequence
  Synthetic
caccugccucggccucccaaagug

SEQ ID NO: 608592 - RNA, 23 nt, Artificial Sequence
  Synthetic
gccugccucggccucccaaagug

SEQ ID NO: 608593 - RNA, 24 nt, Artificial Sequence
  Synthetic
cgccugccucggccucccaaagug

SEQ ID NO: 608594 - RNA, 24 nt, Artificial Sequence
  Synthetic
ugccugccucggccucccaaagug

SEQ ID NO: 608595 - RNA, 22 nt, Artificial Sequence
  Synthetic
ucugccucggccucccaaagug

SEQ ID NO: 608596 - RNA, 23 nt, Artificial Sequence
  Synthetic
uucugccucggccucccaaagug

SEQ ID NO: 608597 - RNA, 24 nt, Artificial Sequence
  Synthetic
cuucugccucggccucccaaagug

SEQ ID NO: 608598 - RNA, 19 nt, Artificial Sequence
  Synthetic
aucucggccucccaaagug

SEQ ID NO: 608599 - RNA, 20 nt, Artificial Sequence
  Synthetic
caucucggccucccaaagug

SEQ ID NO: 608600 - RNA, 21 nt, Artificial Sequence
  Synthetic
ccaucucggccucccaaagug

SEQ ID NO: 608601 - RNA, 22 nt, Artificial Sequence
  Synthetic
cccaucucggccucccaaagug

SEQ ID NO: 608602 - RNA, 23 nt, Artificial Sequence
  Synthetic
acccaucucggccucccaaagug

SEQ ID NO: 608603 - RNA, 24 nt, Artificial Sequence
  Synthetic
cacccaucucggccucccaaagug

SEQ ID NO: 608604 - RNA, 23 nt, Artificial Sequence
  Synthetic
ucccacuucggccucccaaagug

SEQ ID NO: 608605 - RNA, 24 nt, Artificial Sequence
  Synthetic
cucccacuucggccucccaaagug

SEQ ID NO: 608606 - RNA, 18 nt, Artificial Sequence
  Synthetic
ccugggccucccaaagug

SEQ ID NO: 608607 - RNA, 19 nt, Artificial Sequence
  Synthetic
gccugggccucccaaagug

SEQ ID NO: 608608 - RNA, 20 nt, Artificial Sequence
  Synthetic
cgccugggccucccaaagug

SEQ ID NO: 608609 - RNA, 21 nt, Artificial Sequence
  Synthetic
ccgccugggccucccaaagug

SEQ ID NO: 608610 - RNA, 22 nt, Artificial Sequence
  Synthetic
cccgccugggccucccaaagug

SEQ ID NO: 608611 - RNA, 23 nt, Artificial Sequence
  Synthetic
gcccgccugggccucccaaagug

SEQ ID NO: 608612 - RNA, 24 nt, Artificial Sequence
  Synthetic
ugcccgccugggccucccaaagug

SEQ ID NO: 608613 - RNA, 18 nt, Artificial Sequence
  Synthetic
uccuggccucccaaagug

SEQ ID NO: 608614 - RNA, 19 nt, Artificial Sequence
  Synthetic
auccuggccucccaaagug

SEQ ID NO: 608615 - RNA, 20 nt, Artificial Sequence
  Synthetic
uauccuggccucccaaagug

SEQ ID NO: 608616 - RNA, 21 nt, Artificial Sequence
  Synthetic
cuauccuggccucccaaagug

SEQ ID NO: 608617 - RNA, 22 nt, Artificial Sequence
  Synthetic
ccuauccuggccucccaaagug

SEQ ID NO: 608618 - RNA, 23 nt, Artificial Sequence
  Synthetic
uccuauccuggccucccaaagug

SEQ ID NO: 608619 - RNA, 24 nt, Artificial Sequence
  Synthetic
cuccuauccuggccucccaaagug

SEQ ID NO: 608620 - RNA, 18 nt, Artificial Sequence
  Synthetic
ccuuggccucccaaagug

SEQ ID NO: 608621 - RNA, 21 nt, Artificial Sequence
  Synthetic
ccaccuuggccucccaaagug

SEQ ID NO: 608622 - RNA, 22 nt, Artificial Sequence
  Synthetic
cccaccuuggccucccaaagug

SEQ ID NO: 608623 - RNA, 23 nt, Artificial Sequence
  Synthetic
gcccaccuuggccucccaaagug

SEQ ID NO: 608624 - RNA, 24 nt, Artificial Sequence
  Synthetic
cgcccaccuuggccucccaaagug

SEQ ID NO: 608625 - RNA, 24 nt, Artificial Sequence
  Synthetic
ugcccaccuuggccucccaaagug

SEQ ID NO: 608626 - RNA, 19 nt, Artificial Sequence
  Synthetic
gccuuggccucccaaagug

SEQ ID NO: 608627 - RNA, 20 nt, Artificial Sequence
  Synthetic
cgccuuggccucccaaagug

SEQ ID NO: 608628 - RNA, 21 nt, Artificial Sequence
  Synthetic
ccgccuuggccucccaaagug

SEQ ID NO: 608629 - RNA, 22 nt, Artificial Sequence
  Synthetic
cccgccuuggccucccaaagug

SEQ ID NO: 608630 - RNA, 23 nt, Artificial Sequence
  Synthetic
acccgccuuggccucccaaagug

SEQ ID NO: 608631 - RNA, 24 nt, Artificial Sequence
  Synthetic
cacccgccuuggccucccaaagug

SEQ ID NO: 608632 - RNA, 23 nt, Artificial Sequence
  Synthetic
gcccgccuuggccucccaaagug

SEQ ID NO: 608633 - RNA, 24 nt, Artificial Sequence
  Synthetic
cgcccgccuuggccucccaaagug

SEQ ID NO: 608634 - RNA, 24 nt, Artificial Sequence
  Synthetic
ugcccgccuuggccucccaaagug

SEQ ID NO: 608635 - RNA, 21 nt, Artificial Sequence
  Synthetic
cugccuuggccucccaaagug

SEQ ID NO: 608636 - RNA, 22 nt, Artificial Sequence
  Synthetic
ccugccuuggccucccaaagug

SEQ ID NO: 608637 - RNA, 23 nt, Artificial Sequence
  Synthetic
gccugccuuggccucccaaagug

SEQ ID NO: 608638 - RNA, 24 nt, Artificial Sequence
  Synthetic
cgccugccuuggccucccaaagug

SEQ ID NO: 608639 - RNA, 19 nt, Artificial Sequence
  Synthetic
uccuuggccucccaaagug

SEQ ID NO: 608640 - RNA, 20 nt, Artificial Sequence
  Synthetic
cuccuuggccucccaaagug

SEQ ID NO: 608641 - RNA, 21 nt, Artificial Sequence
  Synthetic
ccuccuuggccucccaaagug

SEQ ID NO: 608642 - RNA, 22 nt, Artificial Sequence
  Synthetic
cccuccuuggccucccaaagug

SEQ ID NO: 608643 - RNA, 23 nt, Artificial Sequence
  Synthetic
gcccuccuuggccucccaaagug

SEQ ID NO: 608644 - RNA, 24 nt, Artificial Sequence
  Synthetic
ugcccuccuuggccucccaaagug

SEQ ID NO: 608645 - RNA, 18 nt, Artificial Sequence
  Synthetic
ccucugccucccaaagug

SEQ ID NO: 608646 - RNA, 19 nt, Artificial Sequence
  Synthetic
gccucugccucccaaagug

SEQ ID NO: 608647 - RNA, 20 nt, Artificial Sequence
  Synthetic
cgccucugccucccaaagug

SEQ ID NO: 608648 - RNA, 21 nt, Artificial Sequence
  Synthetic
ccgccucugccucccaaagug

SEQ ID NO: 608649 - RNA, 22 nt, Artificial Sequence
  Synthetic
cccgccucugccucccaaagug

SEQ ID NO: 608650 - RNA, 23 nt, Artificial Sequence
  Synthetic
gcccgccucugccucccaaagug

SEQ ID NO: 608651 - RNA, 24 nt, Artificial Sequence
  Synthetic
cgcccgccucugccucccaaagug

SEQ ID NO: 608652 - RNA, 18 nt, Artificial Sequence
  Synthetic
ccucauccucccaaagug

SEQ ID NO: 608653 - RNA, 19 nt, Artificial Sequence
  Synthetic
gccucauccucccaaagug

SEQ ID NO: 608654 - RNA, 20 nt, Artificial Sequence
  Synthetic
cgccucauccucccaaagug

SEQ ID NO: 608655 - RNA, 21 nt, Artificial Sequence
  Synthetic
ccgccucauccucccaaagug

SEQ ID NO: 608656 - RNA, 22 nt, Artificial Sequence
  Synthetic
cccgccucauccucccaaagug

SEQ ID NO: 608657 - RNA, 23 nt, Artificial Sequence
  Synthetic
gcccgccucauccucccaaagug

SEQ ID NO: 608658 - RNA, 24 nt, Artificial Sequence
  Synthetic
cgcccgccucauccucccaaagug

SEQ ID NO: 608659 - RNA, 18 nt, Artificial Sequence
  Synthetic
ccucaggcucccaaagug

SEQ ID NO: 608660 - RNA, 19 nt, Artificial Sequence
  Synthetic
gccucaggcucccaaagug

SEQ ID NO: 608661 - RNA, 20 nt, Artificial Sequence
  Synthetic
cgccucaggcucccaaagug

SEQ ID NO: 608662 - RNA, 21 nt, Artificial Sequence
  Synthetic
ccgccucaggcucccaaagug

SEQ ID NO: 608663 - RNA, 22 nt, Artificial Sequence
  Synthetic
cccgccucaggcucccaaagug

SEQ ID NO: 608664 - RNA, 23 nt, Artificial Sequence
  Synthetic
gcccgccucaggcucccaaagug

SEQ ID NO: 608665 - RNA, 24 nt, Artificial Sequence
  Synthetic
cgcccgccucaggcucccaaagug

SEQ ID NO: 608666 - RNA, 18 nt, Artificial Sequence
  Synthetic
ccccagcuucccaaagug

SEQ ID NO: 608667 - RNA, 19 nt, Artificial Sequence
  Synthetic
gccccagcuucccaaagug

SEQ ID NO: 608668 - RNA, 20 nt, Artificial Sequence
  Synthetic
cgccccagcuucccaaagug

SEQ ID NO: 608669 - RNA, 21 nt, Artificial Sequence
  Synthetic
ucgccccagcuucccaaagug

SEQ ID NO: 608670 - RNA, 22 nt, Artificial Sequence
  Synthetic
cucgccccagcuucccaaagug

SEQ ID NO: 608671 - RNA, 23 nt, Artificial Sequence
  Synthetic
ucucgccccagcuucccaaagug

SEQ ID NO: 608672 - RNA, 24 nt, Artificial Sequence
  Synthetic
cucucgccccagcuucccaaagug

SEQ ID NO: 608673 - RNA, 18 nt, Artificial Sequence
  Synthetic
ccucagcuucccaaagug

SEQ ID NO: 608674 - RNA, 19 nt, Artificial Sequence
  Synthetic
gccucagcuucccaaagug

SEQ ID NO: 608675 - RNA, 20 nt, Artificial Sequence
  Synthetic
ugccucagcuucccaaagug

SEQ ID NO: 608676 - RNA, 21 nt, Artificial Sequence
  Synthetic
cugccucagcuucccaaagug

SEQ ID NO: 608677 - RNA, 22 nt, Artificial Sequence
  Synthetic
ccugccucagcuucccaaagug

SEQ ID NO: 608678 - RNA, 23 nt, Artificial Sequence
  Synthetic
accugccucagcuucccaaagug

SEQ ID NO: 608679 - RNA, 24 nt, Artificial Sequence
  Synthetic
caccugccucagcuucccaaagug

SEQ ID NO: 608680 - RNA, 18 nt, Artificial Sequence
  Synthetic
ccucggccucgcaaagug

SEQ ID NO: 608681 - RNA, 19 nt, Artificial Sequence
  Synthetic
gccucggccucgcaaagug

SEQ ID NO: 608682 - RNA, 20 nt, Artificial Sequence
  Synthetic
ugccucggccucgcaaagug

SEQ ID NO: 608683 - RNA, 21 nt, Artificial Sequence
  Synthetic
cugccucggccucgcaaagug

SEQ ID NO: 608684 - RNA, 22 nt, Artificial Sequence
  Synthetic
ccugccucggccucgcaaagug

SEQ ID NO: 608685 - RNA, 23 nt, Artificial Sequence
  Synthetic
gccugccucggccucgcaaagug

SEQ ID NO: 608686 - RNA, 24 nt, Artificial Sequence
  Synthetic
cgccugccucggccucgcaaagug

SEQ ID NO: 608687 - RNA, 21 nt, Artificial Sequence
  Synthetic
uugccucggccucgcaaagug

SEQ ID NO: 608688 - RNA, 22 nt, Artificial Sequence
  Synthetic
uuugccucggccucgcaaagug

SEQ ID NO: 608689 - RNA, 23 nt, Artificial Sequence
  Synthetic
guuugccucggccucgcaaagug

SEQ ID NO: 608690 - RNA, 24 nt, Artificial Sequence
  Synthetic
cguuugccucggccucgcaaagug

SEQ ID NO: 608691 - RNA, 18 nt, Artificial Sequence
  Synthetic
uuucggccucucaaagug

SEQ ID NO: 608692 - RNA, 19 nt, Artificial Sequence
  Synthetic
auuucggccucucaaagug

SEQ ID NO: 608693 - RNA, 20 nt, Artificial Sequence
  Synthetic
cauuucggccucucaaagug

SEQ ID NO: 608694 - RNA, 21 nt, Artificial Sequence
  Synthetic
ccauuucggccucucaaagug

SEQ ID NO: 608695 - RNA, 22 nt, Artificial Sequence
  Synthetic
cccauuucggccucucaaagug

SEQ ID NO: 608696 - RNA, 23 nt, Artificial Sequence
  Synthetic
acccauuucggccucucaaagug

SEQ ID NO: 608697 - RNA, 24 nt, Artificial Sequence
  Synthetic
cacccauuucggccucucaaagug

SEQ ID NO: 608698 - RNA, 18 nt, Artificial Sequence
  Synthetic
ccuuggucucucaaagug

SEQ ID NO: 608699 - RNA, 19 nt, Artificial Sequence
  Synthetic
accuuggucucucaaagug

SEQ ID NO: 608700 - RNA, 20 nt, Artificial Sequence
  Synthetic
caccuuggucucucaaagug

SEQ ID NO: 608701 - RNA, 21 nt, Artificial Sequence
  Synthetic
ccaccuuggucucucaaagug

SEQ ID NO: 608702 - RNA, 22 nt, Artificial Sequence
  Synthetic
cccaccuuggucucucaaagug

SEQ ID NO: 608703 - RNA, 23 nt, Artificial Sequence
  Synthetic
gcccaccuuggucucucaaagug

SEQ ID NO: 608704 - RNA, 24 nt, Artificial Sequence
  Synthetic
cgcccaccuuggucucucaaagug

SEQ ID NO: 608705 - RNA, 18 nt, Artificial Sequence
  Synthetic
uggagcugggagaaagug

SEQ ID NO: 608706 - RNA, 19 nt, Artificial Sequence
  Synthetic
guggagcugggagaaagug

SEQ ID NO: 608707 - RNA, 20 nt, Artificial Sequence
  Synthetic
uguggagcugggagaaagug

SEQ ID NO: 608708 - RNA, 21 nt, Artificial Sequence
  Synthetic
cuguggagcugggagaaagug

SEQ ID NO: 608709 - RNA, 22 nt, Artificial Sequence
  Synthetic
acuguggagcugggagaaagug

SEQ ID NO: 608710 - RNA, 23 nt, Artificial Sequence
  Synthetic
uacuguggagcugggagaaagug

SEQ ID NO: 608711 - RNA, 24 nt, Artificial Sequence
  Synthetic
cuacuguggagcugggagaaagug

SEQ ID NO: 608712 - RNA, 18 nt, Artificial Sequence
  Synthetic
ccccacagauagaaagug

SEQ ID NO: 608713 - RNA, 19 nt, Artificial Sequence
  Synthetic
gccccacagauagaaagug

SEQ ID NO: 608714 - RNA, 20 nt, Artificial Sequence
  Synthetic
ugccccacagauagaaagug

SEQ ID NO: 608715 - RNA, 21 nt, Artificial Sequence
  Synthetic
augccccacagauagaaagug

SEQ ID NO: 608716 - RNA, 22 nt, Artificial Sequence
  Synthetic
aaugccccacagauagaaagug

SEQ ID NO: 608717 - RNA, 23 nt, Artificial Sequence
  Synthetic
caaugccccacagauagaaagug

SEQ ID NO: 608718 - RNA, 24 nt, Artificial Sequence
  Synthetic
ccaaugccccacagauagaaagug

SEQ ID NO: 608719 - RNA, 18 nt, Artificial Sequence
  Synthetic
gagauguuuuagaaagug

SEQ ID NO: 608720 - RNA, 19 nt, Artificial Sequence
  Synthetic
ugagauguuuuagaaagug

SEQ ID NO: 608721 - RNA, 20 nt, Artificial Sequence
  Synthetic
cugagauguuuuagaaagug

SEQ ID NO: 608722 - RNA, 21 nt, Artificial Sequence
  Synthetic
ccugagauguuuuagaaagug

SEQ ID NO: 608723 - RNA, 22 nt, Artificial Sequence
  Synthetic
cccugagauguuuuagaaagug

SEQ ID NO: 608724 - RNA, 23 nt, Artificial Sequence
  Synthetic
gcccugagauguuuuagaaagug

SEQ ID NO: 608725 - RNA, 24 nt, Artificial Sequence
  Synthetic
ggcccugagauguuuuagaaagug

SEQ ID NO: 608726 - RNA, 18 nt, Artificial Sequence
  Synthetic
cuggaaagugggaaagug

SEQ ID NO: 608727 - RNA, 19 nt, Artificial Sequence
  Synthetic
ccuggaaagugggaaagug

SEQ ID NO: 608728 - RNA, 20 nt, Artificial Sequence
  Synthetic
uccuggaaagugggaaagug

SEQ ID NO: 608729 - RNA, 21 nt, Artificial Sequence
  Synthetic
auccuggaaagugggaaagug

SEQ ID NO: 608730 - RNA, 22 nt, Artificial Sequence
  Synthetic
aauccuggaaagugggaaagug

SEQ ID NO: 608731 - RNA, 23 nt, Artificial Sequence
  Synthetic
gaauccuggaaagugggaaagug

SEQ ID NO: 608732 - RNA, 24 nt, Artificial Sequence
  Synthetic
ugaauccuggaaagugggaaagug

SEQ ID NO: 608733 - RNA, 18 nt, Artificial Sequence
  Synthetic
gauguggcauggaaagug

SEQ ID NO: 608734 - RNA, 19 nt, Artificial Sequence
  Synthetic
agauguggcauggaaagug

SEQ ID NO: 608735 - RNA, 20 nt, Artificial Sequence
  Synthetic
gagauguggcauggaaagug

SEQ ID NO: 608736 - RNA, 21 nt, Artificial Sequence
  Synthetic
agagauguggcauggaaagug

SEQ ID NO: 608737 - RNA, 22 nt, Artificial Sequence
  Synthetic
aagagauguggcauggaaagug

SEQ ID NO: 608738 - RNA, 23 nt, Artificial Sequence
  Synthetic
gaagagauguggcauggaaagug

SEQ ID NO: 608739 - RNA, 24 nt, Artificial Sequence
  Synthetic
agaagagauguggcauggaaagug

SEQ ID NO: 608740 - RNA, 18 nt, Artificial Sequence
  Synthetic
cugguccuauggaaagug

SEQ ID NO: 608741 - RNA, 19 nt, Artificial Sequence
  Synthetic
ucugguccuauggaaagug

SEQ ID NO: 608742 - RNA, 20 nt, Artificial Sequence
  Synthetic
uucugguccuauggaaagug

SEQ ID NO: 608743 - RNA, 21 nt, Artificial Sequence
  Synthetic
uuucugguccuauggaaagug

SEQ ID NO: 608744 - RNA, 22 nt, Artificial Sequence
  Synthetic
cuuucugguccuauggaaagug

SEQ ID NO: 608745 - RNA, 23 nt, Artificial Sequence
  Synthetic
ccuuucugguccuauggaaagug

SEQ ID NO: 608746 - RNA, 24 nt, Artificial Sequence
  Synthetic
gccuuucugguccuauggaaagug

SEQ ID NO: 608747 - RNA, 18 nt, Artificial Sequence
  Synthetic
uaaugggaaaugaaagug

SEQ ID NO: 608748 - RNA, 19 nt, Artificial Sequence
  Synthetic
guaaugggaaaugaaagug

SEQ ID NO: 608749 - RNA, 20 nt, Artificial Sequence
  Synthetic
gguaaugggaaaugaaagug

SEQ ID NO: 608750 - RNA, 21 nt, Artificial Sequence
  Synthetic
ugguaaugggaaaugaaagug

SEQ ID NO: 608751 - RNA, 22 nt, Artificial Sequence
  Synthetic
uugguaaugggaaaugaaagug

SEQ ID NO: 608752 - RNA, 23 nt, Artificial Sequence
  Synthetic
uuugguaaugggaaaugaaagug

SEQ ID NO: 608753 - RNA, 24 nt, Artificial Sequence
  Synthetic
uuuugguaaugggaaaugaaagug

SEQ ID NO: 608754 - RNA, 18 nt, Artificial Sequence
  Synthetic
auauuagccaugaaagug

SEQ ID NO: 608755 - RNA, 19 nt, Artificial Sequence
  Synthetic
uauauuagccaugaaagug

SEQ ID NO: 608756 - RNA, 20 nt, Artificial Sequence
  Synthetic
uuauauuagccaugaaagug

SEQ ID NO: 608757 - RNA, 21 nt, Artificial Sequence
  Synthetic
uuuauauuagccaugaaagug

SEQ ID NO: 608758 - RNA, 22 nt, Artificial Sequence
  Synthetic
uuuuauauuagccaugaaagug

SEQ ID NO: 608759 - RNA, 23 nt, Artificial Sequence
  Synthetic
auuuuauauuagccaugaaagug

SEQ ID NO: 608760 - RNA, 24 nt, Artificial Sequence
  Synthetic
aauuuuauauuagccaugaaagug

SEQ ID NO: 608761 - RNA, 18 nt, Artificial Sequence
  Synthetic
uuuuuuaagcugaaagug

SEQ ID NO: 608762 - RNA, 19 nt, Artificial Sequence
  Synthetic
guuuuuuaagcugaaagug

SEQ ID NO: 608763 - RNA, 20 nt, Artificial Sequence
  Synthetic
gguuuuuuaagcugaaagug

SEQ ID NO: 608764 - RNA, 21 nt, Artificial Sequence
  Synthetic
cgguuuuuuaagcugaaagug

SEQ ID NO: 608765 - RNA, 22 nt, Artificial Sequence
  Synthetic
ccgguuuuuuaagcugaaagug

SEQ ID NO: 608766 - RNA, 23 nt, Artificial Sequence
  Synthetic
cccgguuuuuuaagcugaaagug

SEQ ID NO: 608767 - RNA, 24 nt, Artificial Sequence
  Synthetic
ucccgguuuuuuaagcugaaagug

SEQ ID NO: 608768 - RNA, 18 nt, Artificial Sequence
  Synthetic
gaaacaaucaauaaagug

SEQ ID NO: 608769 - RNA, 19 nt, Artificial Sequence
  Synthetic
ugaaacaaucaauaaagug

SEQ ID NO: 608770 - RNA, 20 nt, Artificial Sequence
  Synthetic
gugaaacaaucaauaaagug

SEQ ID NO: 608771 - RNA, 21 nt, Artificial Sequence
  Synthetic
agugaaacaaucaauaaagug

SEQ ID NO: 608772 - RNA, 22 nt, Artificial Sequence
  Synthetic
cagugaaacaaucaauaaagug

SEQ ID NO: 608773 - RNA, 23 nt, Artificial Sequence
  Synthetic
gcagugaaacaaucaauaaagug

SEQ ID NO: 608774 - RNA, 24 nt, Artificial Sequence
  Synthetic
cgcagugaaacaaucaauaaagug

SEQ ID NO: 608775 - RNA, 18 nt, Artificial Sequence
  Synthetic
agcuuuaaaacuaaagug

SEQ ID NO: 608776 - RNA, 19 nt, Artificial Sequence
  Synthetic
uagcuuuaaaacuaaagug

SEQ ID NO: 608777 - RNA, 20 nt, Artificial Sequence
  Synthetic
guagcuuuaaaacuaaagug

SEQ ID NO: 608778 - RNA, 21 nt, Artificial Sequence
  Synthetic
aguagcuuuaaaacuaaagug

SEQ ID NO: 608779 - RNA, 22 nt, Artificial Sequence
  Synthetic
gaguagcuuuaaaacuaaagug

SEQ ID NO: 608780 - RNA, 23 nt, Artificial Sequence
  Synthetic
ggaguagcuuuaaaacuaaagug

SEQ ID NO: 608781 - RNA, 24 nt, Artificial Sequence
  Synthetic
aggaguagcuuuaaaacuaaagug

SEQ ID NO: 608782 - RNA, 18 nt, Artificial Sequence
  Synthetic
acaguguuaccuaaagug

SEQ ID NO: 608783 - RNA, 19 nt, Artificial Sequence
  Synthetic
uacaguguuaccuaaagug

SEQ ID NO: 608784 - RNA, 20 nt, Artificial Sequence
  Synthetic
auacaguguuaccuaaagug

SEQ ID NO: 608785 - RNA, 21 nt, Artificial Sequence
  Synthetic
aauacaguguuaccuaaagug

SEQ ID NO: 608786 - RNA, 22 nt, Artificial Sequence
  Synthetic
caauacaguguuaccuaaagug

SEQ ID NO: 608787 - RNA, 23 nt, Artificial Sequence
  Synthetic
ucaauacaguguuaccuaaagug

SEQ ID NO: 608788 - RNA, 24 nt, Artificial Sequence
  Synthetic
uucaauacaguguuaccuaaagug

SEQ ID NO: 608789 - RNA, 18 nt, Artificial Sequence
  Synthetic
aaauauucaauuaaagug

SEQ ID NO: 608790 - RNA, 19 nt, Artificial Sequence
  Synthetic
aaaauauucaauuaaagug

SEQ ID NO: 608791 - RNA, 20 nt, Artificial Sequence
  Synthetic
caaaauauucaauuaaagug

SEQ ID NO: 608792 - RNA, 21 nt, Artificial Sequence
  Synthetic
gcaaaauauucaauuaaagug

SEQ ID NO: 608793 - RNA, 22 nt, Artificial Sequence
  Synthetic
ggcaaaauauucaauuaaagug

SEQ ID NO: 608794 - RNA, 23 nt, Artificial Sequence
  Synthetic
uggcaaaauauucaauuaaagug

SEQ ID NO: 608795 - RNA, 24 nt, Artificial Sequence
  Synthetic
auggcaaaauauucaauuaaagug

SEQ ID NO: 608796 - RNA, 18 nt, Artificial Sequence
  Synthetic
aucaugguaguuaaagug

SEQ ID NO: 608797 - RNA, 19 nt, Artificial Sequence
  Synthetic
uaucaugguaguuaaagug

SEQ ID NO: 608798 - RNA, 20 nt, Artificial Sequence
  Synthetic
auaucaugguaguuaaagug

SEQ ID NO: 608799 - RNA, 21 nt, Artificial Sequence
  Synthetic
gauaucaugguaguuaaagug

SEQ ID NO: 608800 - RNA, 22 nt, Artificial Sequence
  Synthetic
agauaucaugguaguuaaagug

SEQ ID NO: 608801 - RNA, 23 nt, Artificial Sequence
  Synthetic
gagauaucaugguaguuaaagug

SEQ ID NO: 608802 - RNA, 24 nt, Artificial Sequence
  Synthetic
ggagauaucaugguaguuaaagug

SEQ ID NO: 608803 - RNA, 18 nt, Artificial Sequence
  Synthetic
uaaacgucauuuaaagug

SEQ ID NO: 608804 - RNA, 19 nt, Artificial Sequence
  Synthetic
cuaaacgucauuuaaagug

SEQ ID NO: 608805 - RNA, 20 nt, Artificial Sequence
  Synthetic
acuaaacgucauuuaaagug

SEQ ID NO: 608806 - RNA, 21 nt, Artificial Sequence
  Synthetic
uacuaaacgucauuuaaagug

SEQ ID NO: 608807 - RNA, 22 nt, Artificial Sequence
  Synthetic
guacuaaacgucauuuaaagug

SEQ ID NO: 608808 - RNA, 23 nt, Artificial Sequence
  Synthetic
aguacuaaacgucauuuaaagug

SEQ ID NO: 608809 - RNA, 24 nt, Artificial Sequence
  Synthetic
aaguacuaaacgucauuuaaagug

SEQ ID NO: 608810 - RNA, 18 nt, Artificial Sequence
  Synthetic
uggaguuugaaacaagug

SEQ ID NO: 608811 - RNA, 19 nt, Artificial Sequence
  Synthetic
uuggaguuugaaacaagug

SEQ ID NO: 608812 - RNA, 20 nt, Artificial Sequence
  Synthetic
cuuggaguuugaaacaagug

SEQ ID NO: 608813 - RNA, 21 nt, Artificial Sequence
  Synthetic
gcuuggaguuugaaacaagug

SEQ ID NO: 608814 - RNA, 22 nt, Artificial Sequence
  Synthetic
ggcuuggaguuugaaacaagug

SEQ ID NO: 608815 - RNA, 23 nt, Artificial Sequence
  Synthetic
aggcuuggaguuugaaacaagug

SEQ ID NO: 608816 - RNA, 24 nt, Artificial Sequence
  Synthetic
aaggcuuggaguuugaaacaagug

SEQ ID NO: 608817 - RNA, 18 nt, Artificial Sequence
  Synthetic
uggugaucuccacaagug

SEQ ID NO: 608818 - RNA, 19 nt, Artificial Sequence
  Synthetic
cuggugaucuccacaagug

SEQ ID NO: 608819 - RNA, 20 nt, Artificial Sequence
  Synthetic
ccuggugaucuccacaagug

SEQ ID NO: 608820 - RNA, 21 nt, Artificial Sequence
  Synthetic
uccuggugaucuccacaagug

SEQ ID NO: 608821 - RNA, 22 nt, Artificial Sequence
  Synthetic
uuccuggugaucuccacaagug

SEQ ID NO: 608822 - RNA, 23 nt, Artificial Sequence
  Synthetic
cuuccuggugaucuccacaagug

SEQ ID NO: 608823 - RNA, 24 nt, Artificial Sequence
  Synthetic
ccuuccuggugaucuccacaagug

SEQ ID NO: 608824 - RNA, 18 nt, Artificial Sequence
  Synthetic
aauauaggagaccaagug

SEQ ID NO: 608825 - RNA, 19 nt, Artificial Sequence
  Synthetic
gaauauaggagaccaagug

SEQ ID NO: 608826 - RNA, 20 nt, Artificial Sequence
  Synthetic
ggaauauaggagaccaagug

SEQ ID NO: 608827 - RNA, 21 nt, Artificial Sequence
  Synthetic
aggaauauaggagaccaagug

SEQ ID NO: 608828 - RNA, 22 nt, Artificial Sequence
  Synthetic
gaggaauauaggagaccaagug

SEQ ID NO: 608829 - RNA, 23 nt, Artificial Sequence
  Synthetic
ggaggaauauaggagaccaagug

SEQ ID NO: 608830 - RNA, 24 nt, Artificial Sequence
  Synthetic
uggaggaauauaggagaccaagug

SEQ ID NO: 608831 - RNA, 18 nt, Artificial Sequence
  Synthetic
ccucggccuccccaagug

SEQ ID NO: 608832 - RNA, 19 nt, Artificial Sequence
  Synthetic
gccucggccuccccaagug

SEQ ID NO: 608833 - RNA, 20 nt, Artificial Sequence
  Synthetic
cgccucggccuccccaagug

SEQ ID NO: 608834 - RNA, 21 nt, Artificial Sequence
  Synthetic
ccgccucggccuccccaagug

SEQ ID NO: 608835 - RNA, 22 nt, Artificial Sequence
  Synthetic
cccgccucggccuccccaagug

SEQ ID NO: 608836 - RNA, 23 nt, Artificial Sequence
  Synthetic
gcccgccucggccuccccaagug

SEQ ID NO: 608837 - RNA, 24 nt, Artificial Sequence
  Synthetic
cgcccgccucggccuccccaagug

SEQ ID NO: 608838 - RNA, 18 nt, Artificial Sequence
  Synthetic
gaaauauaaugccaagug

SEQ ID NO: 608839 - RNA, 19 nt, Artificial Sequence
  Synthetic
ugaaauauaaugccaagug

SEQ ID NO: 608840 - RNA, 20 nt, Artificial Sequence
  Synthetic
uugaaauauaaugccaagug

SEQ ID NO: 608841 - RNA, 21 nt, Artificial Sequence
  Synthetic
guugaaauauaaugccaagug

SEQ ID NO: 608842 - RNA, 22 nt, Artificial Sequence
  Synthetic
uguugaaauauaaugccaagug

SEQ ID NO: 608843 - RNA, 23 nt, Artificial Sequence
  Synthetic
uuguugaaauauaaugccaagug

SEQ ID NO: 608844 - RNA, 24 nt, Artificial Sequence
  Synthetic
cuuguugaaauauaaugccaagug

SEQ ID NO: 608845 - RNA, 18 nt, Artificial Sequence
  Synthetic
cggcaucauaagcaagug

SEQ ID NO: 608846 - RNA, 19 nt, Artificial Sequence
  Synthetic
gcggcaucauaagcaagug

SEQ ID NO: 608847 - RNA, 20 nt, Artificial Sequence
  Synthetic
ugcggcaucauaagcaagug

SEQ ID NO: 608848 - RNA, 21 nt, Artificial Sequence
  Synthetic
augcggcaucauaagcaagug

SEQ ID NO: 608849 - RNA, 22 nt, Artificial Sequence
  Synthetic
aaugcggcaucauaagcaagug

SEQ ID NO: 608850 - RNA, 23 nt, Artificial Sequence
  Synthetic
caaugcggcaucauaagcaagug

SEQ ID NO: 608851 - RNA, 24 nt, Artificial Sequence
  Synthetic
ccaaugcggcaucauaagcaagug

SEQ ID NO: 608852 - RNA, 18 nt, Artificial Sequence
  Synthetic
cugggaaaugggcaagug

SEQ ID NO: 608853 - RNA, 19 nt, Artificial Sequence
  Synthetic
ccugggaaaugggcaagug

SEQ ID NO: 608854 - RNA, 20 nt, Artificial Sequence
  Synthetic
accugggaaaugggcaagug

SEQ ID NO: 608855 - RNA, 21 nt, Artificial Sequence
  Synthetic
aaccugggaaaugggcaagug

SEQ ID NO: 608856 - RNA, 22 nt, Artificial Sequence
  Synthetic
aaaccugggaaaugggcaagug

SEQ ID NO: 608857 - RNA, 23 nt, Artificial Sequence
  Synthetic
aaaaccugggaaaugggcaagug

SEQ ID NO: 608858 - RNA, 24 nt, Artificial Sequence
  Synthetic
gaaaaccugggaaaugggcaagug

SEQ ID NO: 608859 - RNA, 18 nt, Artificial Sequence
  Synthetic
uaaacauuucugcaagug

SEQ ID NO: 608860 - RNA, 19 nt, Artificial Sequence
  Synthetic
uuaaacauuucugcaagug

SEQ ID NO: 608861 - RNA, 20 nt, Artificial Sequence
  Synthetic
auuaaacauuucugcaagug

SEQ ID NO: 608862 - RNA, 21 nt, Artificial Sequence
  Synthetic
uauuaaacauuucugcaagug

SEQ ID NO: 608863 - RNA, 22 nt, Artificial Sequence
  Synthetic
cuauuaaacauuucugcaagug

SEQ ID NO: 608864 - RNA, 23 nt, Artificial Sequence
  Synthetic
ucuauuaaacauuucugcaagug

SEQ ID NO: 608865 - RNA, 24 nt, Artificial Sequence
  Synthetic
uucuauuaaacauuucugcaagug

SEQ ID NO: 608866 - RNA, 18 nt, Artificial Sequence
  Synthetic
uauugcaaauugcaagug

SEQ ID NO: 608867 - RNA, 19 nt, Artificial Sequence
  Synthetic
guauugcaaauugcaagug

SEQ ID NO: 608868 - RNA, 20 nt, Artificial Sequence
  Synthetic
aguauugcaaauugcaagug

SEQ ID NO: 608869 - RNA, 21 nt, Artificial Sequence
  Synthetic
aaguauugcaaauugcaagug

SEQ ID NO: 608870 - RNA, 22 nt, Artificial Sequence
  Synthetic
uaaguauugcaaauugcaagug

SEQ ID NO: 608871 - RNA, 23 nt, Artificial Sequence
  Synthetic
uuaaguauugcaaauugcaagug

SEQ ID NO: 608872 - RNA, 24 nt, Artificial Sequence
  Synthetic
uuuaaguauugcaaauugcaagug

SEQ ID NO: 608873 - RNA, 18 nt, Artificial Sequence
  Synthetic
auaauaccucaucaagug

SEQ ID NO: 608874 - RNA, 19 nt, Artificial Sequence
  Synthetic
aauaauaccucaucaagug

SEQ ID NO: 608875 - RNA, 20 nt, Artificial Sequence
  Synthetic
uaauaauaccucaucaagug

SEQ ID NO: 608876 - RNA, 21 nt, Artificial Sequence
  Synthetic
uuaauaauaccucaucaagug

SEQ ID NO: 608877 - RNA, 22 nt, Artificial Sequence
  Synthetic
auuaauaauaccucaucaagug

SEQ ID NO: 608878 - RNA, 23 nt, Artificial Sequence
  Synthetic
aauuaauaauaccucaucaagug

SEQ ID NO: 608879 - RNA, 24 nt, Artificial Sequence
  Synthetic
gaauuaauaauaccucaucaagug

SEQ ID NO: 608880 - RNA, 18 nt, Artificial Sequence
  Synthetic
gaucaugccauucaagug

SEQ ID NO: 608881 - RNA, 19 nt, Artificial Sequence
  Synthetic
agaucaugccauucaagug

SEQ ID NO: 608882 - RNA, 20 nt, Artificial Sequence
  Synthetic
gagaucaugccauucaagug

SEQ ID NO: 608883 - RNA, 21 nt, Artificial Sequence
  Synthetic
agagaucaugccauucaagug

SEQ ID NO: 608884 - RNA, 22 nt, Artificial Sequence
  Synthetic
uagagaucaugccauucaagug

SEQ ID NO: 608885 - RNA, 23 nt, Artificial Sequence
  Synthetic
auagagaucaugccauucaagug

SEQ ID NO: 608886 - RNA, 24 nt, Artificial Sequence
  Synthetic
uauagagaucaugccauucaagug

SEQ ID NO: 608887 - RNA, 18 nt, Artificial Sequence
  Synthetic
auggaaagugaagaagug

SEQ ID NO: 608888 - RNA, 19 nt, Artificial Sequence
  Synthetic
cauggaaagugaagaagug

SEQ ID NO: 608889 - RNA, 20 nt, Artificial Sequence
  Synthetic
gcauggaaagugaagaagug

SEQ ID NO: 608890 - RNA, 21 nt, Artificial Sequence
  Synthetic
ggcauggaaagugaagaagug

SEQ ID NO: 608891 - RNA, 22 nt, Artificial Sequence
  Synthetic
uggcauggaaagugaagaagug

SEQ ID NO: 608892 - RNA, 23 nt, Artificial Sequence
  Synthetic
guggcauggaaagugaagaagug

SEQ ID NO: 608893 - RNA, 24 nt, Artificial Sequence
  Synthetic
uguggcauggaaagugaagaagug

SEQ ID NO: 608894 - RNA, 18 nt, Artificial Sequence
  Synthetic
gugcgcuggccagaagug

SEQ ID NO: 608895 - RNA, 19 nt, Artificial Sequence
  Synthetic
ggugcgcuggccagaagug

SEQ ID NO: 608896 - RNA, 20 nt, Artificial Sequence
  Synthetic
aggugcgcuggccagaagug

SEQ ID NO: 608897 - RNA, 21 nt, Artificial Sequence
  Synthetic
uaggugcgcuggccagaagug

SEQ ID NO: 608898 - RNA, 22 nt, Artificial Sequence
  Synthetic
cuaggugcgcuggccagaagug

SEQ ID NO: 608899 - RNA, 23 nt, Artificial Sequence
  Synthetic
gcuaggugcgcuggccagaagug

SEQ ID NO: 608900 - RNA, 24 nt, Artificial Sequence
  Synthetic
ugcuaggugcgcuggccagaagug

SEQ ID NO: 608901 - RNA, 18 nt, Artificial Sequence
  Synthetic
uauggagucagagaagug

SEQ ID NO: 608902 - RNA, 19 nt, Artificial Sequence
  Synthetic
guauggagucagagaagug

SEQ ID NO: 608903 - RNA, 20 nt, Artificial Sequence
  Synthetic
gguauggagucagagaagug

SEQ ID NO: 608904 - RNA, 21 nt, Artificial Sequence
  Synthetic
ugguauggagucagagaagug

SEQ ID NO: 608905 - RNA, 22 nt, Artificial Sequence
  Synthetic
uugguauggagucagagaagug

SEQ ID NO: 608906 - RNA, 23 nt, Artificial Sequence
  Synthetic
auugguauggagucagagaagug

SEQ ID NO: 608907 - RNA, 24 nt, Artificial Sequence
  Synthetic
uauugguauggagucagagaagug

SEQ ID NO: 608908 - RNA, 18 nt, Artificial Sequence
  Synthetic
ggaagguagagagaagug

SEQ ID NO: 608909 - RNA, 19 nt, Artificial Sequence
  Synthetic
aggaagguagagagaagug

SEQ ID NO: 608910 - RNA, 20 nt, Artificial Sequence
  Synthetic
aaggaagguagagagaagug

SEQ ID NO: 608911 - RNA, 21 nt, Artificial Sequence
  Synthetic
gaaggaagguagagagaagug

SEQ ID NO: 608912 - RNA, 22 nt, Artificial Sequence
  Synthetic
ggaaggaagguagagagaagug

SEQ ID NO: 608913 - RNA, 23 nt, Artificial Sequence
  Synthetic
gggaaggaagguagagagaagug

SEQ ID NO: 608914 - RNA, 24 nt, Artificial Sequence
  Synthetic
agggaaggaagguagagagaagug

SEQ ID NO: 608915 - RNA, 18 nt, Artificial Sequence
  Synthetic
ugaugagugugagaagug

SEQ ID NO: 608916 - RNA, 19 nt, Artificial Sequence
  Synthetic
cugaugagugugagaagug

SEQ ID NO: 608917 - RNA, 20 nt, Artificial Sequence
  Synthetic
ucugaugagugugagaagug

SEQ ID NO: 608918 - RNA, 21 nt, Artificial Sequence
  Synthetic
uucugaugagugugagaagug

SEQ ID NO: 608919 - RNA, 22 nt, Artificial Sequence
  Synthetic
cuucugaugagugugagaagug

SEQ ID NO: 608920 - RNA, 23 nt, Artificial Sequence
  Synthetic
ccuucugaugagugugagaagug

SEQ ID NO: 608921 - RNA, 24 nt, Artificial Sequence
  Synthetic
uccuucugaugagugugagaagug

SEQ ID NO: 608922 - RNA, 18 nt, Artificial Sequence
  Synthetic
aaacccaaaauagaagug

SEQ ID NO: 608923 - RNA, 19 nt, Artificial Sequence
  Synthetic
aaaacccaaaauagaagug

SEQ ID NO: 608924 - RNA, 20 nt, Artificial Sequence
  Synthetic
aaaaacccaaaauagaagug

SEQ ID NO: 608925 - RNA, 21 nt, Artificial Sequence
  Synthetic
uaaaaacccaaaauagaagug

SEQ ID NO: 608926 - RNA, 22 nt, Artificial Sequence
  Synthetic
guaaaaacccaaaauagaagug

SEQ ID NO: 608927 - RNA, 23 nt, Artificial Sequence
  Synthetic
uguaaaaacccaaaauagaagug

SEQ ID NO: 608928 - RNA, 24 nt, Artificial Sequence
  Synthetic
auguaaaaacccaaaauagaagug

SEQ ID NO: 608929 - RNA, 18 nt, Artificial Sequence
  Synthetic
caauacugaauagaagug

SEQ ID NO: 608930 - RNA, 19 nt, Artificial Sequence
  Synthetic
acaauacugaauagaagug

SEQ ID NO: 608931 - RNA, 20 nt, Artificial Sequence
  Synthetic
uacaauacugaauagaagug

SEQ ID NO: 608932 - RNA, 21 nt, Artificial Sequence
  Synthetic
guacaauacugaauagaagug

SEQ ID NO: 608933 - RNA, 22 nt, Artificial Sequence
  Synthetic
aguacaauacugaauagaagug

SEQ ID NO: 608934 - RNA, 23 nt, Artificial Sequence
  Synthetic
caguacaauacugaauagaagug

SEQ ID NO: 608935 - RNA, 24 nt, Artificial Sequence
  Synthetic
ccaguacaauacugaauagaagug

SEQ ID NO: 608936 - RNA, 18 nt, Artificial Sequence
  Synthetic
aaagaaguugacgaagug

SEQ ID NO: 608937 - RNA, 19 nt, Artificial Sequence
  Synthetic
uaaagaaguugacgaagug

SEQ ID NO: 608938 - RNA, 20 nt, Artificial Sequence
  Synthetic
uuaaagaaguugacgaagug

SEQ ID NO: 608939 - RNA, 21 nt, Artificial Sequence
  Synthetic
cuuaaagaaguugacgaagug

SEQ ID NO: 608940 - RNA, 22 nt, Artificial Sequence
  Synthetic
ucuuaaagaaguugacgaagug

SEQ ID NO: 608941 - RNA, 23 nt, Artificial Sequence
  Synthetic
aucuuaaagaaguugacgaagug

SEQ ID NO: 608942 - RNA, 24 nt, Artificial Sequence
  Synthetic
aaucuuaaagaaguugacgaagug

SEQ ID NO: 608943 - RNA, 18 nt, Artificial Sequence
  Synthetic
ccuuggccucccgaagug

SEQ ID NO: 608944 - RNA, 19 nt, Artificial Sequence
  Synthetic
accuuggccucccgaagug

SEQ ID NO: 608945 - RNA, 20 nt, Artificial Sequence
  Synthetic
caccuuggccucccgaagug

SEQ ID NO: 608946 - RNA, 21 nt, Artificial Sequence
  Synthetic
ccaccuuggccucccgaagug

SEQ ID NO: 608947 - RNA, 22 nt, Artificial Sequence
  Synthetic
cccaccuuggccucccgaagug

SEQ ID NO: 608948 - RNA, 23 nt, Artificial Sequence
  Synthetic
acccaccuuggccucccgaagug

SEQ ID NO: 608949 - RNA, 24 nt, Artificial Sequence
  Synthetic
cacccaccuuggccucccgaagug

SEQ ID NO: 608950 - RNA, 18 nt, Artificial Sequence
  Synthetic
aaagaucugaaggaagug

SEQ ID NO: 608951 - RNA, 19 nt, Artificial Sequence
  Synthetic
uaaagaucugaaggaagug

SEQ ID NO: 608952 - RNA, 20 nt, Artificial Sequence
  Synthetic
auaaagaucugaaggaagug

SEQ ID NO: 608953 - RNA, 21 nt, Artificial Sequence
  Synthetic
aauaaagaucugaaggaagug

SEQ ID NO: 608954 - RNA, 22 nt, Artificial Sequence
  Synthetic
aaauaaagaucugaaggaagug

SEQ ID NO: 608955 - RNA, 23 nt, Artificial Sequence
  Synthetic
uaaauaaagaucugaaggaagug

SEQ ID NO: 608956 - RNA, 24 nt, Artificial Sequence
  Synthetic
uuaaauaaagaucugaaggaagug

SEQ ID NO: 608957 - RNA, 18 nt, Artificial Sequence
  Synthetic
cuaugaauaagggaagug

SEQ ID NO: 608958 - RNA, 19 nt, Artificial Sequence
  Synthetic
ucuaugaauaagggaagug

SEQ ID NO: 608959 - RNA, 20 nt, Artificial Sequence
  Synthetic
aucuaugaauaagggaagug

SEQ ID NO: 608960 - RNA, 21 nt, Artificial Sequence
  Synthetic
aaucuaugaauaagggaagug

SEQ ID NO: 608961 - RNA, 22 nt, Artificial Sequence
  Synthetic
gaaucuaugaauaagggaagug

SEQ ID NO: 608962 - RNA, 23 nt, Artificial Sequence
  Synthetic
ugaaucuaugaauaagggaagug

SEQ ID NO: 608963 - RNA, 24 nt, Artificial Sequence
  Synthetic
augaaucuaugaauaagggaagug

SEQ ID NO: 608964 - RNA, 18 nt, Artificial Sequence
  Synthetic
aggaaauggaaugaagug

SEQ ID NO: 608965 - RNA, 19 nt, Artificial Sequence
  Synthetic
caggaaauggaaugaagug

SEQ ID NO: 608966 - RNA, 20 nt, Artificial Sequence
  Synthetic
ucaggaaauggaaugaagug

SEQ ID NO: 608967 - RNA, 21 nt, Artificial Sequence
  Synthetic
uucaggaaauggaaugaagug

SEQ ID NO: 608968 - RNA, 22 nt, Artificial Sequence
  Synthetic
cuucaggaaauggaaugaagug

SEQ ID NO: 608969 - RNA, 23 nt, Artificial Sequence
  Synthetic
ucuucaggaaauggaaugaagug

SEQ ID NO: 608970 - RNA, 24 nt, Artificial Sequence
  Synthetic
cucuucaggaaauggaaugaagug

SEQ ID NO: 608971 - RNA, 18 nt, Artificial Sequence
  Synthetic
gggaggcaggcugaagug

SEQ ID NO: 608972 - RNA, 19 nt, Artificial Sequence
  Synthetic
ugggaggcaggcugaagug

SEQ ID NO: 608973 - RNA, 20 nt, Artificial Sequence
  Synthetic
cugggaggcaggcugaagug

SEQ ID NO: 608974 - RNA, 21 nt, Artificial Sequence
  Synthetic
ccugggaggcaggcugaagug

SEQ ID NO: 608975 - RNA, 22 nt, Artificial Sequence
  Synthetic
uccugggaggcaggcugaagug

SEQ ID NO: 608976 - RNA, 23 nt, Artificial Sequence
  Synthetic
auccugggaggcaggcugaagug

SEQ ID NO: 608977 - RNA, 24 nt, Artificial Sequence
  Synthetic
cauccugggaggcaggcugaagug

SEQ ID NO: 608978 - RNA, 18 nt, Artificial Sequence
  Synthetic
uaaguagaggcugaagug

SEQ ID NO: 608979 - RNA, 19 nt, Artificial Sequence
  Synthetic
uuaaguagaggcugaagug

SEQ ID NO: 608980 - RNA, 20 nt, Artificial Sequence
  Synthetic
uuuaaguagaggcugaagug

SEQ ID NO: 608981 - RNA, 21 nt, Artificial Sequence
  Synthetic
cuuuaaguagaggcugaagug

SEQ ID NO: 608982 - RNA, 22 nt, Artificial Sequence
  Synthetic
ccuuuaaguagaggcugaagug

SEQ ID NO: 608983 - RNA, 23 nt, Artificial Sequence
  Synthetic
gccuuuaaguagaggcugaagug

SEQ ID NO: 608984 - RNA, 24 nt, Artificial Sequence
  Synthetic
ugccuuuaaguagaggcugaagug

SEQ ID NO: 608985 - RNA, 18 nt, Artificial Sequence
  Synthetic
uugagagauucugaagug

SEQ ID NO: 608986 - RNA, 19 nt, Artificial Sequence
  Synthetic
auugagagauucugaagug

SEQ ID NO: 608987 - RNA, 20 nt, Artificial Sequence
  Synthetic
gauugagagauucugaagug

SEQ ID NO: 608988 - RNA, 21 nt, Artificial Sequence
  Synthetic
ggauugagagauucugaagug

SEQ ID NO: 608989 - RNA, 22 nt, Artificial Sequence
  Synthetic
aggauugagagauucugaagug

SEQ ID NO: 608990 - RNA, 23 nt, Artificial Sequence
  Synthetic
aaggauugagagauucugaagug

SEQ ID NO: 608991 - RNA, 24 nt, Artificial Sequence
  Synthetic
aaaggauugagagauucugaagug

SEQ ID NO: 608992 - RNA, 18 nt, Artificial Sequence
  Synthetic
uagaugggaagugaagug

SEQ ID NO: 608993 - RNA, 19 nt, Artificial Sequence
  Synthetic
guagaugggaagugaagug

SEQ ID NO: 608994 - RNA, 20 nt, Artificial Sequence
  Synthetic
uguagaugggaagugaagug

SEQ ID NO: 608995 - RNA, 21 nt, Artificial Sequence
  Synthetic
cuguagaugggaagugaagug

SEQ ID NO: 608996 - RNA, 22 nt, Artificial Sequence
  Synthetic
ccuguagaugggaagugaagug

SEQ ID NO: 608997 - RNA, 23 nt, Artificial Sequence
  Synthetic
accuguagaugggaagugaagug

SEQ ID NO: 608998 - RNA, 24 nt, Artificial Sequence
  Synthetic
uaccuguagaugggaagugaagug

SEQ ID NO: 608999 - RNA, 18 nt, Artificial Sequence
  Synthetic
uuaaagaccggugaagug

SEQ ID NO: 609000 - RNA, 19 nt, Artificial Sequence
  Synthetic
uuuaaagaccggugaagug

SEQ ID NO: 609001 - RNA, 20 nt, Artificial Sequence
  Synthetic
auuuaaagaccggugaagug

SEQ ID NO: 609002 - RNA, 21 nt, Artificial Sequence
  Synthetic
cauuuaaagaccggugaagug

SEQ ID NO: 609003 - RNA, 22 nt, Artificial Sequence
  Synthetic
ucauuuaaagaccggugaagug

SEQ ID NO: 609004 - RNA, 23 nt, Artificial Sequence
  Synthetic
aucauuuaaagaccggugaagug

SEQ ID NO: 609005 - RNA, 24 nt, Artificial Sequence
  Synthetic
aaucauuuaaagaccggugaagug

SEQ ID NO: 609006 - RNA, 18 nt, Artificial Sequence
  Synthetic
uuccacgcauuugaagug

SEQ ID NO: 609007 - RNA, 19 nt, Artificial Sequence
  Synthetic
uuuccacgcauuugaagug

SEQ ID NO: 609008 - RNA, 20 nt, Artificial Sequence
  Synthetic
auuuccacgcauuugaagug

SEQ ID NO: 609009 - RNA, 21 nt, Artificial Sequence
  Synthetic
aauuuccacgcauuugaagug

SEQ ID NO: 609010 - RNA, 22 nt, Artificial Sequence
  Synthetic
gaauuuccacgcauuugaagug

SEQ ID NO: 609011 - RNA, 23 nt, Artificial Sequence
  Synthetic
agaauuuccacgcauuugaagug

SEQ ID NO: 609012 - RNA, 24 nt, Artificial Sequence
  Synthetic
cagaauuuccacgcauuugaagug

SEQ ID NO: 609013 - RNA, 18 nt, Artificial Sequence
  Synthetic
cacaaggaaaaauaagug

SEQ ID NO: 609014 - RNA, 19 nt, Artificial Sequence
  Synthetic
ucacaaggaaaaauaagug

SEQ ID NO: 609015 - RNA, 20 nt, Artificial Sequence
  Synthetic
uucacaaggaaaaauaagug

SEQ ID NO: 609016 - RNA, 21 nt, Artificial Sequence
  Synthetic
uuucacaaggaaaaauaagug

SEQ ID NO: 609017 - RNA, 22 nt, Artificial Sequence
  Synthetic
uuuucacaaggaaaaauaagug

SEQ ID NO: 609018 - RNA, 23 nt, Artificial Sequence
  Synthetic
auuuucacaaggaaaaauaagug

SEQ ID NO: 609019 - RNA, 24 nt, Artificial Sequence
  Synthetic
gauuuucacaaggaaaaauaagug

SEQ ID NO: 609020 - RNA, 18 nt, Artificial Sequence
  Synthetic
aagccaggauaauaagug

SEQ ID NO: 609021 - RNA, 19 nt, Artificial Sequence
  Synthetic
uaagccaggauaauaagug

SEQ ID NO: 609022 - RNA, 20 nt, Artificial Sequence
  Synthetic
auaagccaggauaauaagug

SEQ ID NO: 609023 - RNA, 21 nt, Artificial Sequence
  Synthetic
aauaagccaggauaauaagug

SEQ ID NO: 609024 - RNA, 22 nt, Artificial Sequence
  Synthetic
uaauaagccaggauaauaagug

SEQ ID NO: 609025 - RNA, 23 nt, Artificial Sequence
  Synthetic
auaauaagccaggauaauaagug

SEQ ID NO: 609026 - RNA, 24 nt, Artificial Sequence
  Synthetic
gauaauaagccaggauaauaagug

SEQ ID NO: 609027 - RNA, 18 nt, Artificial Sequence
  Synthetic
aacuaagcuucauaagug

SEQ ID NO: 609028 - RNA, 19 nt, Artificial Sequence
  Synthetic
aaacuaagcuucauaagug

SEQ ID NO: 609029 - RNA, 20 nt, Artificial Sequence
  Synthetic
caaacuaagcuucauaagug

SEQ ID NO: 609030 - RNA, 21 nt, Artificial Sequence
  Synthetic
ccaaacuaagcuucauaagug

SEQ ID NO: 609031 - RNA, 22 nt, Artificial Sequence
  Synthetic
gccaaacuaagcuucauaagug

SEQ ID NO: 609032 - RNA, 23 nt, Artificial Sequence
  Synthetic
agccaaacuaagcuucauaagug

SEQ ID NO: 609033 - RNA, 24 nt, Artificial Sequence
  Synthetic
cagccaaacuaagcuucauaagug

SEQ ID NO: 609034 - RNA, 18 nt, Artificial Sequence
  Synthetic
auaaauaaccuauaagug

SEQ ID NO: 609035 - RNA, 19 nt, Artificial Sequence
  Synthetic
uauaaauaaccuauaagug

SEQ ID NO: 609036 - RNA, 20 nt, Artificial Sequence
  Synthetic
uuauaaauaaccuauaagug

SEQ ID NO: 609037 - RNA, 21 nt, Artificial Sequence
  Synthetic
cuuauaaauaaccuauaagug

SEQ ID NO: 609038 - RNA, 22 nt, Artificial Sequence
  Synthetic
acuuauaaauaaccuauaagug

SEQ ID NO: 609039 - RNA, 23 nt, Artificial Sequence
  Synthetic
aacuuauaaauaaccuauaagug

SEQ ID NO: 609040 - RNA, 24 nt, Artificial Sequence
  Synthetic
uaacuuauaaauaaccuauaagug

SEQ ID NO: 609041 - RNA, 18 nt, Artificial Sequence
  Synthetic
auauguacuagcuaagug

SEQ ID NO: 609042 - RNA, 19 nt, Artificial Sequence
  Synthetic
aauauguacuagcuaagug

SEQ ID NO: 609043 - RNA, 20 nt, Artificial Sequence
  Synthetic
caauauguacuagcuaagug

SEQ ID NO: 609044 - RNA, 21 nt, Artificial Sequence
  Synthetic
acaauauguacuagcuaagug

SEQ ID NO: 609045 - RNA, 22 nt, Artificial Sequence
  Synthetic
uacaauauguacuagcuaagug

SEQ ID NO: 609046 - RNA, 23 nt, Artificial Sequence
  Synthetic
guacaauauguacuagcuaagug

SEQ ID NO: 609047 - RNA, 24 nt, Artificial Sequence
  Synthetic
aguacaauauguacuagcuaagug

SEQ ID NO: 609048 - RNA, 18 nt, Artificial Sequence
  Synthetic
cuuuggggacucuaagug

SEQ ID NO: 609049 - RNA, 19 nt, Artificial Sequence
  Synthetic
acuuuggggacucuaagug

SEQ ID NO: 609050 - RNA, 20 nt, Artificial Sequence
  Synthetic
gacuuuggggacucuaagug

SEQ ID NO: 609051 - RNA, 21 nt, Artificial Sequence
  Synthetic
ggacuuuggggacucuaagug

SEQ ID NO: 609052 - RNA, 22 nt, Artificial Sequence
  Synthetic
uggacuuuggggacucuaagug

SEQ ID NO: 609053 - RNA, 23 nt, Artificial Sequence
  Synthetic
auggacuuuggggacucuaagug

SEQ ID NO: 609054 - RNA, 24 nt, Artificial Sequence
  Synthetic
aauggacuuuggggacucuaagug

SEQ ID NO: 609055 - RNA, 18 nt, Artificial Sequence
  Synthetic
agaaauaugguguaagug

SEQ ID NO: 609056 - RNA, 19 nt, Artificial Sequence
  Synthetic
gagaaauaugguguaagug

SEQ ID NO: 609057 - RNA, 20 nt, Artificial Sequence
  Synthetic
ggagaaauaugguguaagug

SEQ ID NO: 609058 - RNA, 21 nt, Artificial Sequence
  Synthetic
aggagaaauaugguguaagug

SEQ ID NO: 609059 - RNA, 22 nt, Artificial Sequence
  Synthetic
caggagaaauaugguguaagug

SEQ ID NO: 609060 - RNA, 23 nt, Artificial Sequence
  Synthetic
ccaggagaaauaugguguaagug

SEQ ID NO: 609061 - RNA, 24 nt, Artificial Sequence
  Synthetic
accaggagaaauaugguguaagug

SEQ ID NO: 609062 - RNA, 18 nt, Artificial Sequence
  Synthetic
uuagauagugguuaagug

SEQ ID NO: 609063 - RNA, 19 nt, Artificial Sequence
  Synthetic
guuagauagugguuaagug

SEQ ID NO: 609064 - RNA, 20 nt, Artificial Sequence
  Synthetic
aguuagauagugguuaagug

SEQ ID NO: 609065 - RNA, 21 nt, Artificial Sequence
  Synthetic
caguuagauagugguuaagug

SEQ ID NO: 609066 - RNA, 22 nt, Artificial Sequence
  Synthetic
ucaguuagauagugguuaagug

SEQ ID NO: 609067 - RNA, 23 nt, Artificial Sequence
  Synthetic
cucaguuagauagugguuaagug

SEQ ID NO: 609068 - RNA, 24 nt, Artificial Sequence
  Synthetic
acucaguuagauagugguuaagug

SEQ ID NO: 609069 - RNA, 18 nt, Artificial Sequence
  Synthetic
ugagguuggcaaacagug

SEQ ID NO: 609070 - RNA, 19 nt, Artificial Sequence
  Synthetic
augagguuggcaaacagug

SEQ ID NO: 609071 - RNA, 20 nt, Artificial Sequence
  Synthetic
aaugagguuggcaaacagug

SEQ ID NO: 609072 - RNA, 21 nt, Artificial Sequence
  Synthetic
uaaugagguuggcaaacagug

SEQ ID NO: 609073 - RNA, 22 nt, Artificial Sequence
  Synthetic
guaaugagguuggcaaacagug

SEQ ID NO: 609074 - RNA, 23 nt, Artificial Sequence
  Synthetic
uguaaugagguuggcaaacagug

SEQ ID NO: 609075 - RNA, 24 nt, Artificial Sequence
  Synthetic
auguaaugagguuggcaaacagug

SEQ ID NO: 609076 - RNA, 18 nt, Artificial Sequence
  Synthetic
agaacuguauaaacagug

SEQ ID NO: 609077 - RNA, 19 nt, Artificial Sequence
  Synthetic
uagaacuguauaaacagug

SEQ ID NO: 609078 - RNA, 20 nt, Artificial Sequence
  Synthetic
auagaacuguauaaacagug

SEQ ID NO: 609079 - RNA, 21 nt, Artificial Sequence
  Synthetic
uauagaacuguauaaacagug

SEQ ID NO: 609080 - RNA, 22 nt, Artificial Sequence
  Synthetic
auauagaacuguauaaacagug

SEQ ID NO: 609081 - RNA, 23 nt, Artificial Sequence
  Synthetic
aauauagaacuguauaaacagug

SEQ ID NO: 609082 - RNA, 24 nt, Artificial Sequence
  Synthetic
caauauagaacuguauaaacagug

SEQ ID NO: 609083 - RNA, 18 nt, Artificial Sequence
  Synthetic
acagucccaccaacagug

SEQ ID NO: 609084 - RNA, 19 nt, Artificial Sequence
  Synthetic
uacagucccaccaacagug

SEQ ID NO: 609085 - RNA, 20 nt, Artificial Sequence
  Synthetic
uuacagucccaccaacagug

SEQ ID NO: 609086 - RNA, 21 nt, Artificial Sequence
  Synthetic
uuuacagucccaccaacagug

SEQ ID NO: 609087 - RNA, 22 nt, Artificial Sequence
  Synthetic
guuuacagucccaccaacagug

SEQ ID NO: 609088 - RNA, 23 nt, Artificial Sequence
  Synthetic
aguuuacagucccaccaacagug

SEQ ID NO: 609089 - RNA, 24 nt, Artificial Sequence
  Synthetic
uaguuuacagucccaccaacagug

SEQ ID NO: 609090 - RNA, 18 nt, Artificial Sequence
  Synthetic
acaauagggugaacagug

SEQ ID NO: 609091 - RNA, 19 nt, Artificial Sequence
  Synthetic
uacaauagggugaacagug

SEQ ID NO: 609092 - RNA, 20 nt, Artificial Sequence
  Synthetic
auacaauagggugaacagug

SEQ ID NO: 609093 - RNA, 21 nt, Artificial Sequence
  Synthetic
uauacaauagggugaacagug

SEQ ID NO: 609094 - RNA, 22 nt, Artificial Sequence
  Synthetic
uuauacaauagggugaacagug

SEQ ID NO: 609095 - RNA, 23 nt, Artificial Sequence
  Synthetic
cuuauacaauagggugaacagug

SEQ ID NO: 609096 - RNA, 24 nt, Artificial Sequence
  Synthetic
ucuuauacaauagggugaacagug

SEQ ID NO: 609097 - RNA, 18 nt, Artificial Sequence
  Synthetic
cuaguaagaaacacagug

SEQ ID NO: 609098 - RNA, 19 nt, Artificial Sequence
  Synthetic
gcuaguaagaaacacagug

SEQ ID NO: 609099 - RNA, 20 nt, Artificial Sequence
  Synthetic
ggcuaguaagaaacacagug

SEQ ID NO: 609100 - RNA, 21 nt, Artificial Sequence
  Synthetic
uggcuaguaagaaacacagug

SEQ ID NO: 609101 - RNA, 22 nt, Artificial Sequence
  Synthetic
cuggcuaguaagaaacacagug

SEQ ID NO: 609102 - RNA, 23 nt, Artificial Sequence
  Synthetic
ccuggcuaguaagaaacacagug

SEQ ID NO: 609103 - RNA, 24 nt, Artificial Sequence
  Synthetic
gccuggcuaguaagaaacacagug

SEQ ID NO: 609104 - RNA, 18 nt, Artificial Sequence
  Synthetic
gaccagggucacacagug

SEQ ID NO: 609105 - RNA, 19 nt, Artificial Sequence
  Synthetic
ugaccagggucacacagug

SEQ ID NO: 609106 - RNA, 20 nt, Artificial Sequence
  Synthetic
uugaccagggucacacagug

SEQ ID NO: 609107 - RNA, 21 nt, Artificial Sequence
  Synthetic
auugaccagggucacacagug

SEQ ID NO: 609108 - RNA, 22 nt, Artificial Sequence
  Synthetic
aauugaccagggucacacagug

SEQ ID NO: 609109 - RNA, 23 nt, Artificial Sequence
  Synthetic
uaauugaccagggucacacagug

SEQ ID NO: 609110 - RNA, 24 nt, Artificial Sequence
  Synthetic
auaauugaccagggucacacagug

SEQ ID NO: 609111 - RNA, 18 nt, Artificial Sequence
  Synthetic
aauauuuuauucacagug

SEQ ID NO: 609112 - RNA, 19 nt, Artificial Sequence
  Synthetic
uaauauuuuauucacagug

SEQ ID NO: 609113 - RNA, 20 nt, Artificial Sequence
  Synthetic
cuaauauuuuauucacagug

SEQ ID NO: 609114 - RNA, 21 nt, Artificial Sequence
  Synthetic
ucuaauauuuuauucacagug

SEQ ID NO: 609115 - RNA, 22 nt, Artificial Sequence
  Synthetic
uucuaauauuuuauucacagug

SEQ ID NO: 609116 - RNA, 23 nt, Artificial Sequence
  Synthetic
uuucuaauauuuuauucacagug

SEQ ID NO: 609117 - RNA, 24 nt, Artificial Sequence
  Synthetic
auuucuaauauuuuauucacagug

SEQ ID NO: 609118 - RNA, 18 nt, Artificial Sequence
  Synthetic
aacacuacugagacagug

SEQ ID NO: 609119 - RNA, 19 nt, Artificial Sequence
  Synthetic
aaacacuacugagacagug

SEQ ID NO: 609120 - RNA, 20 nt, Artificial Sequence
  Synthetic
caaacacuacugagacagug

SEQ ID NO: 609121 - RNA, 21 nt, Artificial Sequence
  Synthetic
acaaacacuacugagacagug

SEQ ID NO: 609122 - RNA, 22 nt, Artificial Sequence
  Synthetic
uacaaacacuacugagacagug

SEQ ID NO: 609123 - RNA, 23 nt, Artificial Sequence
  Synthetic
cuacaaacacuacugagacagug

SEQ ID NO: 609124 - RNA, 24 nt, Artificial Sequence
  Synthetic
acuacaaacacuacugagacagug

SEQ ID NO: 609125 - RNA, 18 nt, Artificial Sequence
  Synthetic
accucggcuaggacagug

SEQ ID NO: 609126 - RNA, 19 nt, Artificial Sequence
  Synthetic
aaccucggcuaggacagug

SEQ ID NO: 609127 - RNA, 20 nt, Artificial Sequence
  Synthetic
gaaccucggcuaggacagug

SEQ ID NO: 609128 - RNA, 21 nt, Artificial Sequence
  Synthetic
agaaccucggcuaggacagug

SEQ ID NO: 609129 - RNA, 22 nt, Artificial Sequence
  Synthetic
gagaaccucggcuaggacagug

SEQ ID NO: 609130 - RNA, 23 nt, Artificial Sequence
  Synthetic
ggagaaccucggcuaggacagug

SEQ ID NO: 609131 - RNA, 24 nt, Artificial Sequence
  Synthetic
uggagaaccucggcuaggacagug

SEQ ID NO: 609132 - RNA, 18 nt, Artificial Sequence
  Synthetic
gguaguugacggacagug

SEQ ID NO: 609133 - RNA, 19 nt, Artificial Sequence
  Synthetic
ugguaguugacggacagug

SEQ ID NO: 609134 - RNA, 20 nt, Artificial Sequence
  Synthetic
augguaguugacggacagug

SEQ ID NO: 609135 - RNA, 21 nt, Artificial Sequence
  Synthetic
aaugguaguugacggacagug

SEQ ID NO: 609136 - RNA, 22 nt, Artificial Sequence
  Synthetic
uaaugguaguugacggacagug

SEQ ID NO: 609137 - RNA, 23 nt, Artificial Sequence
  Synthetic
auaaugguaguugacggacagug

SEQ ID NO: 609138 - RNA, 24 nt, Artificial Sequence
  Synthetic
aauaaugguaguugacggacagug

SEQ ID NO: 609139 - RNA, 18 nt, Artificial Sequence
  Synthetic
auguuacaauggacagug

SEQ ID NO: 609140 - RNA, 19 nt, Artificial Sequence
  Synthetic
aauguuacaauggacagug

SEQ ID NO: 609141 - RNA, 20 nt, Artificial Sequence
  Synthetic
uaauguuacaauggacagug

SEQ ID NO: 609142 - RNA, 21 nt, Artificial Sequence
  Synthetic
uuaauguuacaauggacagug

SEQ ID NO: 609143 - RNA, 22 nt, Artificial Sequence
  Synthetic
uuuaauguuacaauggacagug

SEQ ID NO: 609144 - RNA, 23 nt, Artificial Sequence
  Synthetic
uuuuaauguuacaauggacagug

SEQ ID NO: 609145 - RNA, 24 nt, Artificial Sequence
  Synthetic
auuuuaauguuacaauggacagug

SEQ ID NO: 609146 - RNA, 18 nt, Artificial Sequence
  Synthetic
ugccaugaaaauacagug

SEQ ID NO: 609147 - RNA, 19 nt, Artificial Sequence
  Synthetic
augccaugaaaauacagug

SEQ ID NO: 609148 - RNA, 20 nt, Artificial Sequence
  Synthetic
gaugccaugaaaauacagug

SEQ ID NO: 609149 - RNA, 21 nt, Artificial Sequence
  Synthetic
agaugccaugaaaauacagug

SEQ ID NO: 609150 - RNA, 22 nt, Artificial Sequence
  Synthetic
aagaugccaugaaaauacagug

SEQ ID NO: 609151 - RNA, 23 nt, Artificial Sequence
  Synthetic
aaagaugccaugaaaauacagug

SEQ ID NO: 609152 - RNA, 24 nt, Artificial Sequence
  Synthetic
caaagaugccaugaaaauacagug

SEQ ID NO: 609153 - RNA, 18 nt, Artificial Sequence
  Synthetic
ugccaagaacauacagug

SEQ ID NO: 609154 - RNA, 19 nt, Artificial Sequence
  Synthetic
gugccaagaacauacagug

SEQ ID NO: 609155 - RNA, 20 nt, Artificial Sequence
  Synthetic
ggugccaagaacauacagug

SEQ ID NO: 609156 - RNA, 21 nt, Artificial Sequence
  Synthetic
aggugccaagaacauacagug

SEQ ID NO: 609157 - RNA, 22 nt, Artificial Sequence
  Synthetic
aaggugccaagaacauacagug

SEQ ID NO: 609158 - RNA, 23 nt, Artificial Sequence
  Synthetic
aaaggugccaagaacauacagug

SEQ ID NO: 609159 - RNA, 24 nt, Artificial Sequence
  Synthetic
caaaggugccaagaacauacagug

SEQ ID NO: 609160 - RNA, 18 nt, Artificial Sequence
  Synthetic
ggaguucuagauacagug

SEQ ID NO: 609161 - RNA, 19 nt, Artificial Sequence
  Synthetic
aggaguucuagauacagug

SEQ ID NO: 609162 - RNA, 20 nt, Artificial Sequence
  Synthetic
uaggaguucuagauacagug

SEQ ID NO: 609163 - RNA, 21 nt, Artificial Sequence
  Synthetic
cuaggaguucuagauacagug

SEQ ID NO: 609164 - RNA, 22 nt, Artificial Sequence
  Synthetic
ucuaggaguucuagauacagug

SEQ ID NO: 609165 - RNA, 23 nt, Artificial Sequence
  Synthetic
uucuaggaguucuagauacagug

SEQ ID NO: 609166 - RNA, 24 nt, Artificial Sequence
  Synthetic
guucuaggaguucuagauacagug

SEQ ID NO: 609167 - RNA, 18 nt, Artificial Sequence
  Synthetic
ucauugugaaaaccagug

SEQ ID NO: 609168 - RNA, 19 nt, Artificial Sequence
  Synthetic
gucauugugaaaaccagug

SEQ ID NO: 609169 - RNA, 20 nt, Artificial Sequence
  Synthetic
agucauugugaaaaccagug

SEQ ID NO: 609170 - RNA, 21 nt, Artificial Sequence
  Synthetic
cagucauugugaaaaccagug

SEQ ID NO: 609171 - RNA, 22 nt, Artificial Sequence
  Synthetic
ucagucauugugaaaaccagug

SEQ ID NO: 609172 - RNA, 23 nt, Artificial Sequence
  Synthetic
uucagucauugugaaaaccagug

SEQ ID NO: 609173 - RNA, 24 nt, Artificial Sequence
  Synthetic
uuucagucauugugaaaaccagug

SEQ ID NO: 609174 - RNA, 18 nt, Artificial Sequence
  Synthetic
gaagccguggacccagug

SEQ ID NO: 609175 - RNA, 19 nt, Artificial Sequence
  Synthetic
agaagccguggacccagug

SEQ ID NO: 609176 - RNA, 20 nt, Artificial Sequence
  Synthetic
aagaagccguggacccagug

SEQ ID NO: 609177 - RNA, 21 nt, Artificial Sequence
  Synthetic
aaagaagccguggacccagug

SEQ ID NO: 609178 - RNA, 22 nt, Artificial Sequence
  Synthetic
aaaagaagccguggacccagug

SEQ ID NO: 609179 - RNA, 23 nt, Artificial Sequence
  Synthetic
aaaaagaagccguggacccagug

SEQ ID NO: 609180 - RNA, 24 nt, Artificial Sequence
  Synthetic
uaaaaagaagccguggacccagug

SEQ ID NO: 609181 - RNA, 18 nt, Artificial Sequence
  Synthetic
caccacagccccccagug

SEQ ID NO: 609182 - RNA, 19 nt, Artificial Sequence
  Synthetic
acaccacagccccccagug

SEQ ID NO: 609183 - RNA, 20 nt, Artificial Sequence
  Synthetic
uacaccacagccccccagug

SEQ ID NO: 609184 - RNA, 21 nt, Artificial Sequence
  Synthetic
uuacaccacagccccccagug

SEQ ID NO: 609185 - RNA, 22 nt, Artificial Sequence
  Synthetic
cuuacaccacagccccccagug

SEQ ID NO: 609186 - RNA, 23 nt, Artificial Sequence
  Synthetic
ccuuacaccacagccccccagug

SEQ ID NO: 609187 - RNA, 24 nt, Artificial Sequence
  Synthetic
uccuuacaccacagccccccagug

SEQ ID NO: 609188 - RNA, 18 nt, Artificial Sequence
  Synthetic
gaaguaggcagcccagug

SEQ ID NO: 609189 - RNA, 19 nt, Artificial Sequence
  Synthetic
agaaguaggcagcccagug

SEQ ID NO: 609190 - RNA, 20 nt, Artificial Sequence
  Synthetic
aagaaguaggcagcccagug

SEQ ID NO: 609191 - RNA, 21 nt, Artificial Sequence
  Synthetic
caagaaguaggcagcccagug

SEQ ID NO: 609192 - RNA, 22 nt, Artificial Sequence
  Synthetic
ccaagaaguaggcagcccagug

SEQ ID NO: 609193 - RNA, 23 nt, Artificial Sequence
  Synthetic
gccaagaaguaggcagcccagug

SEQ ID NO: 609194 - RNA, 24 nt, Artificial Sequence
  Synthetic
agccaagaaguaggcagcccagug

SEQ ID NO: 609195 - RNA, 18 nt, Artificial Sequence
  Synthetic
cucaaaauuaucccagug

SEQ ID NO: 609196 - RNA, 19 nt, Artificial Sequence
  Synthetic
ucucaaaauuaucccagug

SEQ ID NO: 609197 - RNA, 20 nt, Artificial Sequence
  Synthetic
aucucaaaauuaucccagug

SEQ ID NO: 609198 - RNA, 21 nt, Artificial Sequence
  Synthetic
uaucucaaaauuaucccagug

SEQ ID NO: 609199 - RNA, 22 nt, Artificial Sequence
  Synthetic
auaucucaaaauuaucccagug

SEQ ID NO: 609200 - RNA, 23 nt, Artificial Sequence
  Synthetic
uauaucucaaaauuaucccagug

SEQ ID NO: 609201 - RNA, 24 nt, Artificial Sequence
  Synthetic
auauaucucaaaauuaucccagug

SEQ ID NO: 609202 - RNA, 18 nt, Artificial Sequence
  Synthetic
aacguuagggucccagug

SEQ ID NO: 609203 - RNA, 19 nt, Artificial Sequence
  Synthetic
uaacguuagggucccagug

SEQ ID NO: 609204 - RNA, 20 nt, Artificial Sequence
  Synthetic
uuaacguuagggucccagug

SEQ ID NO: 609205 - RNA, 21 nt, Artificial Sequence
  Synthetic
cuuaacguuagggucccagug

SEQ ID NO: 609206 - RNA, 22 nt, Artificial Sequence
  Synthetic
ucuuaacguuagggucccagug

SEQ ID NO: 609207 - RNA, 23 nt, Artificial Sequence
  Synthetic
uucuuaacguuagggucccagug

SEQ ID NO: 609208 - RNA, 24 nt, Artificial Sequence
  Synthetic
auucuuaacguuagggucccagug

SEQ ID NO: 609209 - RNA, 18 nt, Artificial Sequence
  Synthetic
gaaauguaauucccagug

SEQ ID NO: 609210 - RNA, 19 nt, Artificial Sequence
  Synthetic
ugaaauguaauucccagug

SEQ ID NO: 609211 - RNA, 20 nt, Artificial Sequence
  Synthetic
uugaaauguaauucccagug

SEQ ID NO: 609212 - RNA, 21 nt, Artificial Sequence
  Synthetic
cuugaaauguaauucccagug

SEQ ID NO: 609213 - RNA, 22 nt, Artificial Sequence
  Synthetic
ucuugaaauguaauucccagug

SEQ ID NO: 609214 - RNA, 23 nt, Artificial Sequence
  Synthetic
aucuugaaauguaauucccagug

SEQ ID NO: 609215 - RNA, 24 nt, Artificial Sequence
  Synthetic
caucuugaaauguaauucccagug

SEQ ID NO: 609216 - RNA, 18 nt, Artificial Sequence
  Synthetic
agggagggagagccagug

SEQ ID NO: 609217 - RNA, 19 nt, Artificial Sequence
  Synthetic
gagggagggagagccagug

SEQ ID NO: 609218 - RNA, 20 nt, Artificial Sequence
  Synthetic
agagggagggagagccagug

SEQ ID NO: 609219 - RNA, 21 nt, Artificial Sequence
  Synthetic
gagagggagggagagccagug

SEQ ID NO: 609220 - RNA, 22 nt, Artificial Sequence
  Synthetic
ggagagggagggagagccagug

SEQ ID NO: 609221 - RNA, 23 nt, Artificial Sequence
  Synthetic
aggagagggagggagagccagug

SEQ ID NO: 609222 - RNA, 24 nt, Artificial Sequence
  Synthetic
caggagagggagggagagccagug

SEQ ID NO: 609223 - RNA, 18 nt, Artificial Sequence
  Synthetic
gaagaaaaagcgccagug

SEQ ID NO: 609224 - RNA, 19 nt, Artificial Sequence
  Synthetic
ugaagaaaaagcgccagug

SEQ ID NO: 609225 - RNA, 20 nt, Artificial Sequence
  Synthetic
cugaagaaaaagcgccagug

SEQ ID NO: 609226 - RNA, 21 nt, Artificial Sequence
  Synthetic
acugaagaaaaagcgccagug

SEQ ID NO: 609227 - RNA, 22 nt, Artificial Sequence
  Synthetic
aacugaagaaaaagcgccagug

SEQ ID NO: 609228 - RNA, 23 nt, Artificial Sequence
  Synthetic
aaacugaagaaaaagcgccagug

SEQ ID NO: 609229 - RNA, 24 nt, Artificial Sequence
  Synthetic
gaaacugaagaaaaagcgccagug

SEQ ID NO: 609230 - RNA, 18 nt, Artificial Sequence
  Synthetic
guggucauauugccagug

SEQ ID NO: 609231 - RNA, 19 nt, Artificial Sequence
  Synthetic
aguggucauauugccagug

SEQ ID NO: 609232 - RNA, 20 nt, Artificial Sequence
  Synthetic
gaguggucauauugccagug

SEQ ID NO: 609233 - RNA, 21 nt, Artificial Sequence
  Synthetic
agaguggucauauugccagug

SEQ ID NO: 609234 - RNA, 22 nt, Artificial Sequence
  Synthetic
uagaguggucauauugccagug

SEQ ID NO: 609235 - RNA, 23 nt, Artificial Sequence
  Synthetic
guagaguggucauauugccagug

SEQ ID NO: 609236 - RNA, 24 nt, Artificial Sequence
  Synthetic
aguagaguggucauauugccagug

SEQ ID NO: 609237 - RNA, 18 nt, Artificial Sequence
  Synthetic
aauacacaaucuccagug

SEQ ID NO: 609238 - RNA, 19 nt, Artificial Sequence
  Synthetic
aaauacacaaucuccagug

SEQ ID NO: 609239 - RNA, 20 nt, Artificial Sequence
  Synthetic
gaaauacacaaucuccagug

SEQ ID NO: 609240 - RNA, 21 nt, Artificial Sequence
  Synthetic
agaaauacacaaucuccagug

SEQ ID NO: 609241 - RNA, 22 nt, Artificial Sequence
  Synthetic
aagaaauacacaaucuccagug

SEQ ID NO: 609242 - RNA, 23 nt, Artificial Sequence
  Synthetic
uaagaaauacacaaucuccagug

SEQ ID NO: 609243 - RNA, 24 nt, Artificial Sequence
  Synthetic
uuaagaaauacacaaucuccagug

SEQ ID NO: 609244 - RNA, 18 nt, Artificial Sequence
  Synthetic
uaauuuucuucuccagug

SEQ ID NO: 609245 - RNA, 19 nt, Artificial Sequence
  Synthetic
guaauuuucuucuccagug

SEQ ID NO: 609246 - RNA, 20 nt, Artificial Sequence
  Synthetic
gguaauuuucuucuccagug

SEQ ID NO: 609247 - RNA, 21 nt, Artificial Sequence
  Synthetic
agguaauuuucuucuccagug

SEQ ID NO: 609248 - RNA, 22 nt, Artificial Sequence
  Synthetic
uagguaauuuucuucuccagug

SEQ ID NO: 609249 - RNA, 23 nt, Artificial Sequence
  Synthetic
auagguaauuuucuucuccagug

SEQ ID NO: 609250 - RNA, 24 nt, Artificial Sequence
  Synthetic
aauagguaauuuucuucuccagug

SEQ ID NO: 609251 - RNA, 18 nt, Artificial Sequence
  Synthetic
caugaagaccuuccagug

SEQ ID NO: 609252 - RNA, 19 nt, Artificial Sequence
  Synthetic
ccaugaagaccuuccagug

SEQ ID NO: 609253 - RNA, 20 nt, Artificial Sequence
  Synthetic
cccaugaagaccuuccagug

SEQ ID NO: 609254 - RNA, 21 nt, Artificial Sequence
  Synthetic
gcccaugaagaccuuccagug

SEQ ID NO: 609255 - RNA, 22 nt, Artificial Sequence
  Synthetic
ugcccaugaagaccuuccagug

SEQ ID NO: 609256 - RNA, 23 nt, Artificial Sequence
  Synthetic
uugcccaugaagaccuuccagug

SEQ ID NO: 609257 - RNA, 24 nt, Artificial Sequence
  Synthetic
auugcccaugaagaccuuccagug

SEQ ID NO: 609258 - RNA, 18 nt, Artificial Sequence
  Synthetic
accacagcaaaagcagug

SEQ ID NO: 609259 - RNA, 19 nt, Artificial Sequence
  Synthetic
gaccacagcaaaagcagug

SEQ ID NO: 609260 - RNA, 20 nt, Artificial Sequence
  Synthetic
ugaccacagcaaaagcagug

SEQ ID NO: 609261 - RNA, 21 nt, Artificial Sequence
  Synthetic
uugaccacagcaaaagcagug

SEQ ID NO: 609262 - RNA, 22 nt, Artificial Sequence
  Synthetic
guugaccacagcaaaagcagug

SEQ ID NO: 609263 - RNA, 23 nt, Artificial Sequence
  Synthetic
aguugaccacagcaaaagcagug

SEQ ID NO: 609264 - RNA, 24 nt, Artificial Sequence
  Synthetic
aaguugaccacagcaaaagcagug

SEQ ID NO: 609265 - RNA, 18 nt, Artificial Sequence
  Synthetic
cuuugugaaacagcagug

SEQ ID NO: 609266 - RNA, 19 nt, Artificial Sequence
  Synthetic
ucuuugugaaacagcagug

SEQ ID NO: 609267 - RNA, 20 nt, Artificial Sequence
  Synthetic
cucuuugugaaacagcagug

SEQ ID NO: 609268 - RNA, 21 nt, Artificial Sequence
  Synthetic
ucucuuugugaaacagcagug

SEQ ID NO: 609269 - RNA, 22 nt, Artificial Sequence
  Synthetic
uucucuuugugaaacagcagug

SEQ ID NO: 609270 - RNA, 23 nt, Artificial Sequence
  Synthetic
auucucuuugugaaacagcagug

SEQ ID NO: 609271 - RNA, 24 nt, Artificial Sequence
  Synthetic
cauucucuuugugaaacagcagug

SEQ ID NO: 609272 - RNA, 18 nt, Artificial Sequence
  Synthetic
auccauuagacagcagug

SEQ ID NO: 609273 - RNA, 19 nt, Artificial Sequence
  Synthetic
uauccauuagacagcagug

SEQ ID NO: 609274 - RNA, 20 nt, Artificial Sequence
  Synthetic
guauccauuagacagcagug

SEQ ID NO: 609275 - RNA, 21 nt, Artificial Sequence
  Synthetic
gguauccauuagacagcagug

SEQ ID NO: 609276 - RNA, 22 nt, Artificial Sequence
  Synthetic
agguauccauuagacagcagug

SEQ ID NO: 609277 - RNA, 23 nt, Artificial Sequence
  Synthetic
uagguauccauuagacagcagug

SEQ ID NO: 609278 - RNA, 24 nt, Artificial Sequence
  Synthetic
auagguauccauuagacagcagug

SEQ ID NO: 609279 - RNA, 18 nt, Artificial Sequence
  Synthetic
guaaacuggccagcagug

SEQ ID NO: 609280 - RNA, 19 nt, Artificial Sequence
  Synthetic
aguaaacuggccagcagug

SEQ ID NO: 609281 - RNA, 20 nt, Artificial Sequence
  Synthetic
uaguaaacuggccagcagug

SEQ ID NO: 609282 - RNA, 21 nt, Artificial Sequence
  Synthetic
uuaguaaacuggccagcagug

SEQ ID NO: 609283 - RNA, 22 nt, Artificial Sequence
  Synthetic
guuaguaaacuggccagcagug

SEQ ID NO: 609284 - RNA, 23 nt, Artificial Sequence
  Synthetic
uguuaguaaacuggccagcagug

SEQ ID NO: 609285 - RNA, 24 nt, Artificial Sequence
  Synthetic
uuguuaguaaacuggccagcagug

SEQ ID NO: 609286 - RNA, 18 nt, Artificial Sequence
  Synthetic
gcaggggcuguagcagug

SEQ ID NO: 609287 - RNA, 19 nt, Artificial Sequence
  Synthetic
ugcaggggcuguagcagug

SEQ ID NO: 609288 - RNA, 20 nt, Artificial Sequence
  Synthetic
gugcaggggcuguagcagug

SEQ ID NO: 609289 - RNA, 21 nt, Artificial Sequence
  Synthetic
ggugcaggggcuguagcagug

SEQ ID NO: 609290 - RNA, 22 nt, Artificial Sequence
  Synthetic
aggugcaggggcuguagcagug

SEQ ID NO: 609291 - RNA, 23 nt, Artificial Sequence
  Synthetic
uaggugcaggggcuguagcagug

SEQ ID NO: 609292 - RNA, 24 nt, Artificial Sequence
  Synthetic
cuaggugcaggggcuguagcagug

SEQ ID NO: 609293 - RNA, 18 nt, Artificial Sequence
  Synthetic
ucaagaucucuggcagug

SEQ ID NO: 609294 - RNA, 19 nt, Artificial Sequence
  Synthetic
uucaagaucucuggcagug

SEQ ID NO: 609295 - RNA, 20 nt, Artificial Sequence
  Synthetic
auucaagaucucuggcagug

SEQ ID NO: 609296 - RNA, 21 nt, Artificial Sequence
  Synthetic
uauucaagaucucuggcagug

SEQ ID NO: 609297 - RNA, 22 nt, Artificial Sequence
  Synthetic
cuauucaagaucucuggcagug

SEQ ID NO: 609298 - RNA, 23 nt, Artificial Sequence
  Synthetic
gcuauucaagaucucuggcagug

SEQ ID NO: 609299 - RNA, 24 nt, Artificial Sequence
  Synthetic
ggcuauucaagaucucuggcagug

SEQ ID NO: 609300 - RNA, 18 nt, Artificial Sequence
  Synthetic
ccuggcuggaaugcagug

SEQ ID NO: 609301 - RNA, 19 nt, Artificial Sequence
  Synthetic
cccuggcuggaaugcagug

SEQ ID NO: 609302 - RNA, 20 nt, Artificial Sequence
  Synthetic
gcccuggcuggaaugcagug

SEQ ID NO: 609303 - RNA, 21 nt, Artificial Sequence
  Synthetic
ugcccuggcuggaaugcagug

SEQ ID NO: 609304 - RNA, 22 nt, Artificial Sequence
  Synthetic
uugcccuggcuggaaugcagug

SEQ ID NO: 609305 - RNA, 23 nt, Artificial Sequence
  Synthetic
guugcccuggcuggaaugcagug

SEQ ID NO: 609306 - RNA, 24 nt, Artificial Sequence
  Synthetic
uguugcccuggcuggaaugcagug

SEQ ID NO: 609307 - RNA, 18 nt, Artificial Sequence
  Synthetic
ugucaauaagaugcagug

SEQ ID NO: 609308 - RNA, 19 nt, Artificial Sequence
  Synthetic
gugucaauaagaugcagug

SEQ ID NO: 609309 - RNA, 20 nt, Artificial Sequence
  Synthetic
agugucaauaagaugcagug

SEQ ID NO: 609310 - RNA, 21 nt, Artificial Sequence
  Synthetic
cagugucaauaagaugcagug

SEQ ID NO: 609311 - RNA, 22 nt, Artificial Sequence
  Synthetic
ccagugucaauaagaugcagug

SEQ ID NO: 609312 - RNA, 23 nt, Artificial Sequence
  Synthetic
cccagugucaauaagaugcagug

SEQ ID NO: 609313 - RNA, 24 nt, Artificial Sequence
  Synthetic
acccagugucaauaagaugcagug

SEQ ID NO: 609314 - RNA, 18 nt, Artificial Sequence
  Synthetic
acugagggagaugcagug

SEQ ID NO: 609315 - RNA, 19 nt, Artificial Sequence
  Synthetic
uacugagggagaugcagug

SEQ ID NO: 609316 - RNA, 20 nt, Artificial Sequence
  Synthetic
auacugagggagaugcagug

SEQ ID NO: 609317 - RNA, 21 nt, Artificial Sequence
  Synthetic
aauacugagggagaugcagug

SEQ ID NO: 609318 - RNA, 22 nt, Artificial Sequence
  Synthetic
aaauacugagggagaugcagug

SEQ ID NO: 609319 - RNA, 23 nt, Artificial Sequence
  Synthetic
caaauacugagggagaugcagug

SEQ ID NO: 609320 - RNA, 24 nt, Artificial Sequence
  Synthetic
acaaauacugagggagaugcagug

SEQ ID NO: 609321 - RNA, 18 nt, Artificial Sequence
  Synthetic
gcagcugcaacugcagug

SEQ ID NO: 609322 - RNA, 19 nt, Artificial Sequence
  Synthetic
ugcagcugcaacugcagug

SEQ ID NO: 609323 - RNA, 20 nt, Artificial Sequence
  Synthetic
cugcagcugcaacugcagug

SEQ ID NO: 609324 - RNA, 21 nt, Artificial Sequence
  Synthetic
acugcagcugcaacugcagug

SEQ ID NO: 609325 - RNA, 22 nt, Artificial Sequence
  Synthetic
cacugcagcugcaacugcagug

SEQ ID NO: 609326 - RNA, 23 nt, Artificial Sequence
  Synthetic
ccacugcagcugcaacugcagug

SEQ ID NO: 609327 - RNA, 24 nt, Artificial Sequence
  Synthetic
uccacugcagcugcaacugcagug

SEQ ID NO: 609328 - RNA, 18 nt, Artificial Sequence
  Synthetic
augcaguagagugcagug

SEQ ID NO: 609329 - RNA, 19 nt, Artificial Sequence
  Synthetic
gaugcaguagagugcagug

SEQ ID NO: 609330 - RNA, 20 nt, Artificial Sequence
  Synthetic
agaugcaguagagugcagug

SEQ ID NO: 609331 - RNA, 21 nt, Artificial Sequence
  Synthetic
gagaugcaguagagugcagug

SEQ ID NO: 609332 - RNA, 22 nt, Artificial Sequence
  Synthetic
agagaugcaguagagugcagug

SEQ ID NO: 609333 - RNA, 23 nt, Artificial Sequence
  Synthetic
aagagaugcaguagagugcagug

SEQ ID NO: 609334 - RNA, 24 nt, Artificial Sequence
  Synthetic
gaagagaugcaguagagugcagug

SEQ ID NO: 609335 - RNA, 18 nt, Artificial Sequence
  Synthetic
ccaagcuggagugcagug

SEQ ID NO: 609336 - RNA, 19 nt, Artificial Sequence
  Synthetic
cccaagcuggagugcagug

SEQ ID NO: 609337 - RNA, 20 nt, Artificial Sequence
  Synthetic
gcccaagcuggagugcagug

SEQ ID NO: 609338 - RNA, 21 nt, Artificial Sequence
  Synthetic
ugcccaagcuggagugcagug

SEQ ID NO: 609339 - RNA, 22 nt, Artificial Sequence
  Synthetic
cugcccaagcuggagugcagug

SEQ ID NO: 609340 - RNA, 23 nt, Artificial Sequence
  Synthetic
gcugcccaagcuggagugcagug

SEQ ID NO: 609341 - RNA, 24 nt, Artificial Sequence
  Synthetic
ugcugcccaagcuggagugcagug

SEQ ID NO: 609342 - RNA, 18 nt, Artificial Sequence
  Synthetic
agcacuggacgugcagug

SEQ ID NO: 609343 - RNA, 19 nt, Artificial Sequence
  Synthetic
cagcacuggacgugcagug

SEQ ID NO: 609344 - RNA, 20 nt, Artificial Sequence
  Synthetic
ccagcacuggacgugcagug

SEQ ID NO: 609345 - RNA, 21 nt, Artificial Sequence
  Synthetic
cccagcacuggacgugcagug

SEQ ID NO: 609346 - RNA, 22 nt, Artificial Sequence
  Synthetic
acccagcacuggacgugcagug

SEQ ID NO: 609347 - RNA, 23 nt, Artificial Sequence
  Synthetic
cacccagcacuggacgugcagug

SEQ ID NO: 609348 - RNA, 24 nt, Artificial Sequence
  Synthetic
ucacccagcacuggacgugcagug

SEQ ID NO: 609349 - RNA, 18 nt, Artificial Sequence
  Synthetic
uauugaaacaaaucagug

SEQ ID NO: 609350 - RNA, 19 nt, Artificial Sequence
  Synthetic
cuauugaaacaaaucagug

SEQ ID NO: 609351 - RNA, 20 nt, Artificial Sequence
  Synthetic
acuauugaaacaaaucagug

SEQ ID NO: 609352 - RNA, 21 nt, Artificial Sequence
  Synthetic
aacuauugaaacaaaucagug

SEQ ID NO: 609353 - RNA, 22 nt, Artificial Sequence
  Synthetic
caacuauugaaacaaaucagug

SEQ ID NO: 609354 - RNA, 23 nt, Artificial Sequence
  Synthetic
acaacuauugaaacaaaucagug

SEQ ID NO: 609355 - RNA, 24 nt, Artificial Sequence
  Synthetic
aacaacuauugaaacaaaucagug

SEQ ID NO: 609356 - RNA, 18 nt, Artificial Sequence
  Synthetic
uugcucuuaacaucagug

SEQ ID NO: 609357 - RNA, 19 nt, Artificial Sequence
  Synthetic
cuugcucuuaacaucagug

SEQ ID NO: 609358 - RNA, 20 nt, Artificial Sequence
  Synthetic
acuugcucuuaacaucagug

SEQ ID NO: 609359 - RNA, 21 nt, Artificial Sequence
  Synthetic
aacuugcucuuaacaucagug

SEQ ID NO: 609360 - RNA, 22 nt, Artificial Sequence
  Synthetic
caacuugcucuuaacaucagug

SEQ ID NO: 609361 - RNA, 23 nt, Artificial Sequence
  Synthetic
gcaacuugcucuuaacaucagug

SEQ ID NO: 609362 - RNA, 24 nt, Artificial Sequence
  Synthetic
ugcaacuugcucuuaacaucagug

SEQ ID NO: 609363 - RNA, 18 nt, Artificial Sequence
  Synthetic
aagagugacucaucagug

SEQ ID NO: 609364 - RNA, 19 nt, Artificial Sequence
  Synthetic
gaagagugacucaucagug

SEQ ID NO: 609365 - RNA, 20 nt, Artificial Sequence
  Synthetic
ugaagagugacucaucagug

SEQ ID NO: 609366 - RNA, 21 nt, Artificial Sequence
  Synthetic
gugaagagugacucaucagug

SEQ ID NO: 609367 - RNA, 22 nt, Artificial Sequence
  Synthetic
agugaagagugacucaucagug

SEQ ID NO: 609368 - RNA, 23 nt, Artificial Sequence
  Synthetic
cagugaagagugacucaucagug

SEQ ID NO: 609369 - RNA, 24 nt, Artificial Sequence
  Synthetic
gcagugaagagugacucaucagug

SEQ ID NO: 609370 - RNA, 18 nt, Artificial Sequence
  Synthetic
accucuacuaggucagug

SEQ ID NO: 609371 - RNA, 19 nt, Artificial Sequence
  Synthetic
aaccucuacuaggucagug

SEQ ID NO: 609372 - RNA, 20 nt, Artificial Sequence
  Synthetic
gaaccucuacuaggucagug

SEQ ID NO: 609373 - RNA, 21 nt, Artificial Sequence
  Synthetic
agaaccucuacuaggucagug

SEQ ID NO: 609374 - RNA, 22 nt, Artificial Sequence
  Synthetic
gagaaccucuacuaggucagug

SEQ ID NO: 609375 - RNA, 23 nt, Artificial Sequence
  Synthetic
agagaaccucuacuaggucagug

SEQ ID NO: 609376 - RNA, 24 nt, Artificial Sequence
  Synthetic
gagagaaccucuacuaggucagug

SEQ ID NO: 609377 - RNA, 18 nt, Artificial Sequence
  Synthetic
uuuuuuuuugcuucagug

SEQ ID NO: 609378 - RNA, 19 nt, Artificial Sequence
  Synthetic
cuuuuuuuuugcuucagug

SEQ ID NO: 609379 - RNA, 20 nt, Artificial Sequence
  Synthetic
acuuuuuuuuugcuucagug

SEQ ID NO: 609380 - RNA, 21 nt, Artificial Sequence
  Synthetic
gacuuuuuuuuugcuucagug

SEQ ID NO: 609381 - RNA, 22 nt, Artificial Sequence
  Synthetic
agacuuuuuuuuugcuucagug

SEQ ID NO: 609382 - RNA, 23 nt, Artificial Sequence
  Synthetic
uagacuuuuuuuuugcuucagug

SEQ ID NO: 609383 - RNA, 24 nt, Artificial Sequence
  Synthetic
guagacuuuuuuuuugcuucagug

SEQ ID NO: 609384 - RNA, 18 nt, Artificial Sequence
  Synthetic
cugagagcaauuucagug

SEQ ID NO: 609385 - RNA, 19 nt, Artificial Sequence
  Synthetic
gcugagagcaauuucagug

SEQ ID NO: 609386 - RNA, 20 nt, Artificial Sequence
  Synthetic
ugcugagagcaauuucagug

SEQ ID NO: 609387 - RNA, 21 nt, Artificial Sequence
  Synthetic
gugcugagagcaauuucagug

SEQ ID NO: 609388 - RNA, 22 nt, Artificial Sequence
  Synthetic
ugugcugagagcaauuucagug

SEQ ID NO: 609389 - RNA, 23 nt, Artificial Sequence
  Synthetic
augugcugagagcaauuucagug

SEQ ID NO: 609390 - RNA, 24 nt, Artificial Sequence
  Synthetic
gaugugcugagagcaauuucagug

SEQ ID NO: 609391 - RNA, 18 nt, Artificial Sequence
  Synthetic
auucagaacauuucagug

SEQ ID NO: 609392 - RNA, 19 nt, Artificial Sequence
  Synthetic
uauucagaacauuucagug

SEQ ID NO: 609393 - RNA, 20 nt, Artificial Sequence
  Synthetic
auauucagaacauuucagug

SEQ ID NO: 609394 - RNA, 21 nt, Artificial Sequence
  Synthetic
cauauucagaacauuucagug

SEQ ID NO: 609395 - RNA, 22 nt, Artificial Sequence
  Synthetic
ucauauucagaacauuucagug

SEQ ID NO: 609396 - RNA, 23 nt, Artificial Sequence
  Synthetic
cucauauucagaacauuucagug

SEQ ID NO: 609397 - RNA, 24 nt, Artificial Sequence
  Synthetic
ccucauauucagaacauuucagug

SEQ ID NO: 609398 - RNA, 18 nt, Artificial Sequence
  Synthetic
aaacucuucauuucagug

SEQ ID NO: 609399 - RNA, 19 nt, Artificial Sequence
  Synthetic
caaacucuucauuucagug

SEQ ID NO: 609400 - RNA, 20 nt, Artificial Sequence
  Synthetic
ucaaacucuucauuucagug

SEQ ID NO: 609401 - RNA, 21 nt, Artificial Sequence
  Synthetic
gucaaacucuucauuucagug

SEQ ID NO: 609402 - RNA, 22 nt, Artificial Sequence
  Synthetic
ggucaaacucuucauuucagug

SEQ ID NO: 609403 - RNA, 23 nt, Artificial Sequence
  Synthetic
uggucaaacucuucauuucagug

SEQ ID NO: 609404 - RNA, 24 nt, Artificial Sequence
  Synthetic
cuggucaaacucuucauuucagug

SEQ ID NO: 609405 - RNA, 18 nt, Artificial Sequence
  Synthetic
cugucccugaaaagagug

SEQ ID NO: 609406 - RNA, 19 nt, Artificial Sequence
  Synthetic
ccugucccugaaaagagug

SEQ ID NO: 609407 - RNA, 20 nt, Artificial Sequence
  Synthetic
uccugucccugaaaagagug

SEQ ID NO: 609408 - RNA, 21 nt, Artificial Sequence
  Synthetic
uuccugucccugaaaagagug

SEQ ID NO: 609409 - RNA, 22 nt, Artificial Sequence
  Synthetic
uuuccugucccugaaaagagug

SEQ ID NO: 609410 - RNA, 23 nt, Artificial Sequence
  Synthetic
uuuuccugucccugaaaagagug

SEQ ID NO: 609411 - RNA, 24 nt, Artificial Sequence
  Synthetic
uuuuuccugucccugaaaagagug

SEQ ID NO: 609412 - RNA, 18 nt, Artificial Sequence
  Synthetic
gauauuuguaaaagagug

SEQ ID NO: 609413 - RNA, 19 nt, Artificial Sequence
  Synthetic
ggauauuuguaaaagagug

SEQ ID NO: 609414 - RNA, 20 nt, Artificial Sequence
  Synthetic
gggauauuuguaaaagagug

SEQ ID NO: 609415 - RNA, 21 nt, Artificial Sequence
  Synthetic
agggauauuuguaaaagagug

SEQ ID NO: 609416 - RNA, 22 nt, Artificial Sequence
  Synthetic
uagggauauuuguaaaagagug

SEQ ID NO: 609417 - RNA, 23 nt, Artificial Sequence
  Synthetic
uuagggauauuuguaaaagagug

SEQ ID NO: 609418 - RNA, 24 nt, Artificial Sequence
  Synthetic
guuagggauauuuguaaaagagug

SEQ ID NO: 609419 - RNA, 18 nt, Artificial Sequence
  Synthetic
uaggagaagacaagagug

SEQ ID NO: 609420 - RNA, 19 nt, Artificial Sequence
  Synthetic
auaggagaagacaagagug

SEQ ID NO: 609421 - RNA, 20 nt, Artificial Sequence
  Synthetic
cauaggagaagacaagagug

SEQ ID NO: 609422 - RNA, 21 nt, Artificial Sequence
  Synthetic
acauaggagaagacaagagug

SEQ ID NO: 609423 - RNA, 22 nt, Artificial Sequence
  Synthetic
gacauaggagaagacaagagug

SEQ ID NO: 609424 - RNA, 23 nt, Artificial Sequence
  Synthetic
ggacauaggagaagacaagagug

SEQ ID NO: 609425 - RNA, 24 nt, Artificial Sequence
  Synthetic
aggacauaggagaagacaagagug

SEQ ID NO: 609426 - RNA, 18 nt, Artificial Sequence
  Synthetic
gucuaaauuagaagagug

SEQ ID NO: 609427 - RNA, 19 nt, Artificial Sequence
  Synthetic
cgucuaaauuagaagagug

SEQ ID NO: 609428 - RNA, 20 nt, Artificial Sequence
  Synthetic
acgucuaaauuagaagagug

SEQ ID NO: 609429 - RNA, 21 nt, Artificial Sequence
  Synthetic
cacgucuaaauuagaagagug

SEQ ID NO: 609430 - RNA, 22 nt, Artificial Sequence
  Synthetic
ucacgucuaaauuagaagagug

SEQ ID NO: 609431 - RNA, 23 nt, Artificial Sequence
  Synthetic
aucacgucuaaauuagaagagug

SEQ ID NO: 609432 - RNA, 24 nt, Artificial Sequence
  Synthetic
gaucacgucuaaauuagaagagug

SEQ ID NO: 609433 - RNA, 18 nt, Artificial Sequence
  Synthetic
ggacagugaggaagagug

SEQ ID NO: 609434 - RNA, 19 nt, Artificial Sequence
  Synthetic
cggacagugaggaagagug

SEQ ID NO: 609435 - RNA, 20 nt, Artificial Sequence
  Synthetic
acggacagugaggaagagug

SEQ ID NO: 609436 - RNA, 21 nt, Artificial Sequence
  Synthetic
gacggacagugaggaagagug

SEQ ID NO: 609437 - RNA, 22 nt, Artificial Sequence
  Synthetic
ugacggacagugaggaagagug

SEQ ID NO: 609438 - RNA, 23 nt, Artificial Sequence
  Synthetic
uugacggacagugaggaagagug

SEQ ID NO: 609439 - RNA, 24 nt, Artificial Sequence
  Synthetic
guugacggacagugaggaagagug

SEQ ID NO: 609440 - RNA, 18 nt, Artificial Sequence
  Synthetic
uugagugagugaagagug

SEQ ID NO: 609441 - RNA, 19 nt, Artificial Sequence
  Synthetic
uuugagugagugaagagug

SEQ ID NO: 609442 - RNA, 20 nt, Artificial Sequence
  Synthetic
auuugagugagugaagagug

SEQ ID NO: 609443 - RNA, 21 nt, Artificial Sequence
  Synthetic
cauuugagugagugaagagug

SEQ ID NO: 609444 - RNA, 22 nt, Artificial Sequence
  Synthetic
ucauuugagugagugaagagug

SEQ ID NO: 609445 - RNA, 23 nt, Artificial Sequence
  Synthetic
gucauuugagugagugaagagug

SEQ ID NO: 609446 - RNA, 24 nt, Artificial Sequence
  Synthetic
ggucauuugagugagugaagagug

SEQ ID NO: 609447 - RNA, 18 nt, Artificial Sequence
  Synthetic
gaaugauaaaacagagug

SEQ ID NO: 609448 - RNA, 19 nt, Artificial Sequence
  Synthetic
ggaaugauaaaacagagug

SEQ ID NO: 609449 - RNA, 20 nt, Artificial Sequence
  Synthetic
uggaaugauaaaacagagug

SEQ ID NO: 609450 - RNA, 21 nt, Artificial Sequence
  Synthetic
guggaaugauaaaacagagug

SEQ ID NO: 609451 - RNA, 22 nt, Artificial Sequence
  Synthetic
aguggaaugauaaaacagagug

SEQ ID NO: 609452 - RNA, 23 nt, Artificial Sequence
  Synthetic
uaguggaaugauaaaacagagug

SEQ ID NO: 609453 - RNA, 24 nt, Artificial Sequence
  Synthetic
auaguggaaugauaaaacagagug

SEQ ID NO: 609454 - RNA, 18 nt, Artificial Sequence
  Synthetic
guaacaagacccagagug

SEQ ID NO: 609455 - RNA, 19 nt, Artificial Sequence
  Synthetic
gguaacaagacccagagug

SEQ ID NO: 609456 - RNA, 20 nt, Artificial Sequence
  Synthetic
agguaacaagacccagagug

SEQ ID NO: 609457 - RNA, 21 nt, Artificial Sequence
  Synthetic
gagguaacaagacccagagug

SEQ ID NO: 609458 - RNA, 22 nt, Artificial Sequence
  Synthetic
agagguaacaagacccagagug

SEQ ID NO: 609459 - RNA, 23 nt, Artificial Sequence
  Synthetic
aagagguaacaagacccagagug

SEQ ID NO: 609460 - RNA, 24 nt, Artificial Sequence
  Synthetic
uaagagguaacaagacccagagug

SEQ ID NO: 609461 - RNA, 24 nt, Artificial Sequence
  Synthetic
cgcccgccucggccucccagagug

SEQ ID NO: 609462 - RNA, 18 nt, Artificial Sequence
  Synthetic
ggagagagggagagagug

SEQ ID NO: 609463 - RNA, 19 nt, Artificial Sequence
  Synthetic
gggagagagggagagagug

SEQ ID NO: 609464 - RNA, 20 nt, Artificial Sequence
  Synthetic
agggagagagggagagagug

SEQ ID NO: 609465 - RNA, 21 nt, Artificial Sequence
  Synthetic
gagggagagagggagagagug

SEQ ID NO: 609466 - RNA, 22 nt, Artificial Sequence
  Synthetic
agagggagagagggagagagug

SEQ ID NO: 609467 - RNA, 23 nt, Artificial Sequence
  Synthetic
gagagggagagagggagagagug

SEQ ID NO: 609468 - RNA, 24 nt, Artificial Sequence
  Synthetic
agagagggagagagggagagagug

SEQ ID NO: 609469 - RNA, 18 nt, Artificial Sequence
  Synthetic
uacucauaugggagagug

SEQ ID NO: 609470 - RNA, 19 nt, Artificial Sequence
  Synthetic
auacucauaugggagagug

SEQ ID NO: 609471 - RNA, 20 nt, Artificial Sequence
  Synthetic
cauacucauaugggagagug

SEQ ID NO: 609472 - RNA, 21 nt, Artificial Sequence
  Synthetic
acauacucauaugggagagug

SEQ ID NO: 609473 - RNA, 22 nt, Artificial Sequence
  Synthetic
uacauacucauaugggagagug

SEQ ID NO: 609474 - RNA, 23 nt, Artificial Sequence
  Synthetic
guacauacucauaugggagagug

SEQ ID NO: 609475 - RNA, 24 nt, Artificial Sequence
  Synthetic
gguacauacucauaugggagagug

SEQ ID NO: 609476 - RNA, 18 nt, Artificial Sequence
  Synthetic
caaucucuugggagagug

SEQ ID NO: 609477 - RNA, 19 nt, Artificial Sequence
  Synthetic
ccaaucucuugggagagug

SEQ ID NO: 609478 - RNA, 20 nt, Artificial Sequence
  Synthetic
gccaaucucuugggagagug

SEQ ID NO: 609479 - RNA, 21 nt, Artificial Sequence
  Synthetic
agccaaucucuugggagagug

SEQ ID NO: 609480 - RNA, 22 nt, Artificial Sequence
  Synthetic
cagccaaucucuugggagagug

SEQ ID NO: 609481 - RNA, 23 nt, Artificial Sequence
  Synthetic
ccagccaaucucuugggagagug

SEQ ID NO: 609482 - RNA, 24 nt, Artificial Sequence
  Synthetic
gccagccaaucucuugggagagug

SEQ ID NO: 609483 - RNA, 18 nt, Artificial Sequence
  Synthetic
agauaagauaugagagug

SEQ ID NO: 609484 - RNA, 19 nt, Artificial Sequence
  Synthetic
cagauaagauaugagagug

SEQ ID NO: 609485 - RNA, 20 nt, Artificial Sequence
  Synthetic
acagauaagauaugagagug

SEQ ID NO: 609486 - RNA, 21 nt, Artificial Sequence
  Synthetic
gacagauaagauaugagagug

SEQ ID NO: 609487 - RNA, 22 nt, Artificial Sequence
  Synthetic
ugacagauaagauaugagagug

SEQ ID NO: 609488 - RNA, 23 nt, Artificial Sequence
  Synthetic
augacagauaagauaugagagug

SEQ ID NO: 609489 - RNA, 24 nt, Artificial Sequence
  Synthetic
gaugacagauaagauaugagagug

SEQ ID NO: 609490 - RNA, 18 nt, Artificial Sequence
  Synthetic
uuggcccuuuugagagug

SEQ ID NO: 609491 - RNA, 19 nt, Artificial Sequence
  Synthetic
cuuggcccuuuugagagug

SEQ ID NO: 609492 - RNA, 20 nt, Artificial Sequence
  Synthetic
acuuggcccuuuugagagug

SEQ ID NO: 609493 - RNA, 21 nt, Artificial Sequence
  Synthetic
aacuuggcccuuuugagagug

SEQ ID NO: 609494 - RNA, 22 nt, Artificial Sequence
  Synthetic
aaacuuggcccuuuugagagug

SEQ ID NO: 609495 - RNA, 23 nt, Artificial Sequence
  Synthetic
aaaacuuggcccuuuugagagug

SEQ ID NO: 609496 - RNA, 24 nt, Artificial Sequence
  Synthetic
uaaaacuuggcccuuuugagagug

SEQ ID NO: 609497 - RNA, 18 nt, Artificial Sequence
  Synthetic
cuugcuggaaauagagug

SEQ ID NO: 609498 - RNA, 19 nt, Artificial Sequence
  Synthetic
acuugcuggaaauagagug

SEQ ID NO: 609499 - RNA, 20 nt, Artificial Sequence
  Synthetic
uacuugcuggaaauagagug

SEQ ID NO: 609500 - RNA, 21 nt, Artificial Sequence
  Synthetic
auacuugcuggaaauagagug

SEQ ID NO: 609501 - RNA, 22 nt, Artificial Sequence
  Synthetic
cauacuugcuggaaauagagug

SEQ ID NO: 609502 - RNA, 23 nt, Artificial Sequence
  Synthetic
ccauacuugcuggaaauagagug

SEQ ID NO: 609503 - RNA, 24 nt, Artificial Sequence
  Synthetic
gccauacuugcuggaaauagagug

SEQ ID NO: 609504 - RNA, 18 nt, Artificial Sequence
  Synthetic
cggaggacuacuagagug

SEQ ID NO: 609505 - RNA, 19 nt, Artificial Sequence
  Synthetic
acggaggacuacuagagug

SEQ ID NO: 609506 - RNA, 20 nt, Artificial Sequence
  Synthetic
aacggaggacuacuagagug

SEQ ID NO: 609507 - RNA, 21 nt, Artificial Sequence
  Synthetic
aaacggaggacuacuagagug

SEQ ID NO: 609508 - RNA, 22 nt, Artificial Sequence
  Synthetic
gaaacggaggacuacuagagug

SEQ ID NO: 609509 - RNA, 23 nt, Artificial Sequence
  Synthetic
agaaacggaggacuacuagagug

SEQ ID NO: 609510 - RNA, 24 nt, Artificial Sequence
  Synthetic
uagaaacggaggacuacuagagug

SEQ ID NO: 609511 - RNA, 18 nt, Artificial Sequence
  Synthetic
cuagggacuauuagagug

SEQ ID NO: 609512 - RNA, 19 nt, Artificial Sequence
  Synthetic
gcuagggacuauuagagug

SEQ ID NO: 609513 - RNA, 20 nt, Artificial Sequence
  Synthetic
ugcuagggacuauuagagug

SEQ ID NO: 609514 - RNA, 21 nt, Artificial Sequence
  Synthetic
augcuagggacuauuagagug

SEQ ID NO: 609515 - RNA, 22 nt, Artificial Sequence
  Synthetic
caugcuagggacuauuagagug

SEQ ID NO: 609516 - RNA, 23 nt, Artificial Sequence
  Synthetic
acaugcuagggacuauuagagug

SEQ ID NO: 609517 - RNA, 24 nt, Artificial Sequence
  Synthetic
cacaugcuagggacuauuagagug

SEQ ID NO: 609518 - RNA, 18 nt, Artificial Sequence
  Synthetic
ccaacaacacuuagagug

SEQ ID NO: 609519 - RNA, 19 nt, Artificial Sequence
  Synthetic
cccaacaacacuuagagug

SEQ ID NO: 609520 - RNA, 20 nt, Artificial Sequence
  Synthetic
acccaacaacacuuagagug

SEQ ID NO: 609521 - RNA, 21 nt, Artificial Sequence
  Synthetic
gacccaacaacacuuagagug

SEQ ID NO: 609522 - RNA, 22 nt, Artificial Sequence
  Synthetic
ugacccaacaacacuuagagug

SEQ ID NO: 609523 - RNA, 23 nt, Artificial Sequence
  Synthetic
augacccaacaacacuuagagug

SEQ ID NO: 609524 - RNA, 24 nt, Artificial Sequence
  Synthetic
aaugacccaacaacacuuagagug

SEQ ID NO: 609525 - RNA, 18 nt, Artificial Sequence
  Synthetic
uuauguugaauacgagug

SEQ ID NO: 609526 - RNA, 19 nt, Artificial Sequence
  Synthetic
auuauguugaauacgagug

SEQ ID NO: 609527 - RNA, 20 nt, Artificial Sequence
  Synthetic
uauuauguugaauacgagug

SEQ ID NO: 609528 - RNA, 21 nt, Artificial Sequence
  Synthetic
auauuauguugaauacgagug

SEQ ID NO: 609529 - RNA, 22 nt, Artificial Sequence
  Synthetic
aauauuauguugaauacgagug

SEQ ID NO: 609530 - RNA, 23 nt, Artificial Sequence
  Synthetic
caauauuauguugaauacgagug

SEQ ID NO: 609531 - RNA, 24 nt, Artificial Sequence
  Synthetic
ccaauauuauguugaauacgagug

SEQ ID NO: 609532 - RNA, 18 nt, Artificial Sequence
  Synthetic
cuuucugggcugcgagug

SEQ ID NO: 609533 - RNA, 19 nt, Artificial Sequence
  Synthetic
gcuuucugggcugcgagug

SEQ ID NO: 609534 - RNA, 20 nt, Artificial Sequence
  Synthetic
ggcuuucugggcugcgagug

SEQ ID NO: 609535 - RNA, 21 nt, Artificial Sequence
  Synthetic
gggcuuucugggcugcgagug

SEQ ID NO: 609536 - RNA, 22 nt, Artificial Sequence
  Synthetic
agggcuuucugggcugcgagug

SEQ ID NO: 609537 - RNA, 23 nt, Artificial Sequence
  Synthetic
aagggcuuucugggcugcgagug

SEQ ID NO: 609538 - RNA, 24 nt, Artificial Sequence
  Synthetic
uaagggcuuucugggcugcgagug

SEQ ID NO: 609539 - RNA, 18 nt, Artificial Sequence
  Synthetic
uaacucucccaaggagug

SEQ ID NO: 609540 - RNA, 19 nt, Artificial Sequence
  Synthetic
uuaacucucccaaggagug

SEQ ID NO: 609541 - RNA, 20 nt, Artificial Sequence
  Synthetic
uuuaacucucccaaggagug

SEQ ID NO: 609542 - RNA, 21 nt, Artificial Sequence
  Synthetic
cuuuaacucucccaaggagug

SEQ ID NO: 609543 - RNA, 22 nt, Artificial Sequence
  Synthetic
ucuuuaacucucccaaggagug

SEQ ID NO: 609544 - RNA, 23 nt, Artificial Sequence
  Synthetic
aucuuuaacucucccaaggagug

SEQ ID NO: 609545 - RNA, 24 nt, Artificial Sequence
  Synthetic
aaucuuuaacucucccaaggagug

SEQ ID NO: 609546 - RNA, 18 nt, Artificial Sequence
  Synthetic
acugaagagagaggagug

SEQ ID NO: 609547 - RNA, 19 nt, Artificial Sequence
  Synthetic
aacugaagagagaggagug

SEQ ID NO: 609548 - RNA, 20 nt, Artificial Sequence
  Synthetic
caacugaagagagaggagug

SEQ ID NO: 609549 - RNA, 21 nt, Artificial Sequence
  Synthetic
ucaacugaagagagaggagug

SEQ ID NO: 609550 - RNA, 22 nt, Artificial Sequence
  Synthetic
aucaacugaagagagaggagug

SEQ ID NO: 609551 - RNA, 23 nt, Artificial Sequence
  Synthetic
uaucaacugaagagagaggagug

SEQ ID NO: 609552 - RNA, 24 nt, Artificial Sequence
  Synthetic
cuaucaacugaagagagaggagug

SEQ ID NO: 609553 - RNA, 18 nt, Artificial Sequence
  Synthetic
uaggggaaaugaggagug

SEQ ID NO: 609554 - RNA, 19 nt, Artificial Sequence
  Synthetic
uuaggggaaaugaggagug

SEQ ID NO: 609555 - RNA, 20 nt, Artificial Sequence
  Synthetic
auuaggggaaaugaggagug

SEQ ID NO: 609556 - RNA, 21 nt, Artificial Sequence
  Synthetic
gauuaggggaaaugaggagug

SEQ ID NO: 609557 - RNA, 22 nt, Artificial Sequence
  Synthetic
agauuaggggaaaugaggagug

SEQ ID NO: 609558 - RNA, 23 nt, Artificial Sequence
  Synthetic
gagauuaggggaaaugaggagug

SEQ ID NO: 609559 - RNA, 24 nt, Artificial Sequence
  Synthetic
agagauuaggggaaaugaggagug

SEQ ID NO: 609560 - RNA, 18 nt, Artificial Sequence
  Synthetic
uacugaaggggcggagug

SEQ ID NO: 609561 - RNA, 19 nt, Artificial Sequence
  Synthetic
cuacugaaggggcggagug

SEQ ID NO: 609562 - RNA, 20 nt, Artificial Sequence
  Synthetic
ucuacugaaggggcggagug

SEQ ID NO: 609563 - RNA, 21 nt, Artificial Sequence
  Synthetic
aucuacugaaggggcggagug

SEQ ID NO: 609564 - RNA, 22 nt, Artificial Sequence
  Synthetic
aaucuacugaaggggcggagug

SEQ ID NO: 609565 - RNA, 23 nt, Artificial Sequence
  Synthetic
gaaucuacugaaggggcggagug

SEQ ID NO: 609566 - RNA, 24 nt, Artificial Sequence
  Synthetic
agaaucuacugaaggggcggagug

SEQ ID NO: 609567 - RNA, 18 nt, Artificial Sequence
  Synthetic
guucagggcuugggagug

SEQ ID NO: 609568 - RNA, 19 nt, Artificial Sequence
  Synthetic
aguucagggcuugggagug

SEQ ID NO: 609569 - RNA, 20 nt, Artificial Sequence
  Synthetic
gaguucagggcuugggagug

SEQ ID NO: 609570 - RNA, 21 nt, Artificial Sequence
  Synthetic
agaguucagggcuugggagug

SEQ ID NO: 609571 - RNA, 22 nt, Artificial Sequence
  Synthetic
cagaguucagggcuugggagug

SEQ ID NO: 609572 - RNA, 23 nt, Artificial Sequence
  Synthetic
ucagaguucagggcuugggagug

SEQ ID NO: 609573 - RNA, 24 nt, Artificial Sequence
  Synthetic
cucagaguucagggcuugggagug

SEQ ID NO: 609574 - RNA, 18 nt, Artificial Sequence
  Synthetic
ucaggcagaaauggagug

SEQ ID NO: 609575 - RNA, 19 nt, Artificial Sequence
  Synthetic
cucaggcagaaauggagug

SEQ ID NO: 609576 - RNA, 20 nt, Artificial Sequence
  Synthetic
gcucaggcagaaauggagug

SEQ ID NO: 609577 - RNA, 21 nt, Artificial Sequence
  Synthetic
agcucaggcagaaauggagug

SEQ ID NO: 609578 - RNA, 22 nt, Artificial Sequence
  Synthetic
gagcucaggcagaaauggagug

SEQ ID NO: 609579 - RNA, 23 nt, Artificial Sequence
  Synthetic
ggagcucaggcagaaauggagug

SEQ ID NO: 609580 - RNA, 24 nt, Artificial Sequence
  Synthetic
uggagcucaggcagaaauggagug

SEQ ID NO: 609581 - RNA, 18 nt, Artificial Sequence
  Synthetic
aaguucagaaauggagug

SEQ ID NO: 609582 - RNA, 19 nt, Artificial Sequence
  Synthetic
gaaguucagaaauggagug

SEQ ID NO: 609583 - RNA, 20 nt, Artificial Sequence
  Synthetic
agaaguucagaaauggagug

SEQ ID NO: 609584 - RNA, 21 nt, Artificial Sequence
  Synthetic
aagaaguucagaaauggagug

SEQ ID NO: 609585 - RNA, 22 nt, Artificial Sequence
  Synthetic
caagaaguucagaaauggagug

SEQ ID NO: 609586 - RNA, 23 nt, Artificial Sequence
  Synthetic
acaagaaguucagaaauggagug

SEQ ID NO: 609587 - RNA, 24 nt, Artificial Sequence
  Synthetic
aacaagaaguucagaaauggagug

SEQ ID NO: 609588 - RNA, 18 nt, Artificial Sequence
  Synthetic
uggaagccuacuggagug

SEQ ID NO: 609589 - RNA, 19 nt, Artificial Sequence
  Synthetic
guggaagccuacuggagug

SEQ ID NO: 609590 - RNA, 20 nt, Artificial Sequence
  Synthetic
cguggaagccuacuggagug

SEQ ID NO: 609591 - RNA, 21 nt, Artificial Sequence
  Synthetic
acguggaagccuacuggagug

SEQ ID NO: 609592 - RNA, 22 nt, Artificial Sequence
  Synthetic
gacguggaagccuacuggagug

SEQ ID NO: 609593 - RNA, 23 nt, Artificial Sequence
  Synthetic
agacguggaagccuacuggagug

SEQ ID NO: 609594 - RNA, 24 nt, Artificial Sequence
  Synthetic
cagacguggaagccuacuggagug

SEQ ID NO: 609595 - RNA, 18 nt, Artificial Sequence
  Synthetic
caagaaggagaaugagug

SEQ ID NO: 609596 - RNA, 19 nt, Artificial Sequence
  Synthetic
gcaagaaggagaaugagug

SEQ ID NO: 609597 - RNA, 20 nt, Artificial Sequence
  Synthetic
ggcaagaaggagaaugagug

SEQ ID NO: 609598 - RNA, 21 nt, Artificial Sequence
  Synthetic
uggcaagaaggagaaugagug

SEQ ID NO: 609599 - RNA, 22 nt, Artificial Sequence
  Synthetic
guggcaagaaggagaaugagug

SEQ ID NO: 609600 - RNA, 23 nt, Artificial Sequence
  Synthetic
gguggcaagaaggagaaugagug

SEQ ID NO: 609601 - RNA, 24 nt, Artificial Sequence
  Synthetic
agguggcaagaaggagaaugagug

SEQ ID NO: 609602 - RNA, 18 nt, Artificial Sequence
  Synthetic
ggugggcaggaaugagug

SEQ ID NO: 609603 - RNA, 19 nt, Artificial Sequence
  Synthetic
uggugggcaggaaugagug

SEQ ID NO: 609604 - RNA, 20 nt, Artificial Sequence
  Synthetic
cuggugggcaggaaugagug

SEQ ID NO: 609605 - RNA, 21 nt, Artificial Sequence
  Synthetic
acuggugggcaggaaugagug

SEQ ID NO: 609606 - RNA, 22 nt, Artificial Sequence
  Synthetic
cacuggugggcaggaaugagug

SEQ ID NO: 609607 - RNA, 23 nt, Artificial Sequence
  Synthetic
ccacuggugggcaggaaugagug

SEQ ID NO: 609608 - RNA, 24 nt, Artificial Sequence
  Synthetic
gccacuggugggcaggaaugagug

SEQ ID NO: 609609 - RNA, 18 nt, Artificial Sequence
  Synthetic
caaagucauugaugagug

SEQ ID NO: 609610 - RNA, 19 nt, Artificial Sequence
  Synthetic
ucaaagucauugaugagug

SEQ ID NO: 609611 - RNA, 20 nt, Artificial Sequence
  Synthetic
cucaaagucauugaugagug

SEQ ID NO: 609612 - RNA, 21 nt, Artificial Sequence
  Synthetic
ccucaaagucauugaugagug

SEQ ID NO: 609613 - RNA, 22 nt, Artificial Sequence
  Synthetic
cccucaaagucauugaugagug

SEQ ID NO: 609614 - RNA, 23 nt, Artificial Sequence
  Synthetic
acccucaaagucauugaugagug

SEQ ID NO: 609615 - RNA, 24 nt, Artificial Sequence
  Synthetic
gacccucaaagucauugaugagug

SEQ ID NO: 609616 - RNA, 18 nt, Artificial Sequence
  Synthetic
acuuuuacuugaugagug

SEQ ID NO: 609617 - RNA, 19 nt, Artificial Sequence
  Synthetic
aacuuuuacuugaugagug

SEQ ID NO: 609618 - RNA, 20 nt, Artificial Sequence
  Synthetic
caacuuuuacuugaugagug

SEQ ID NO: 609619 - RNA, 21 nt, Artificial Sequence
  Synthetic
ucaacuuuuacuugaugagug

SEQ ID NO: 609620 - RNA, 22 nt, Artificial Sequence
  Synthetic
uucaacuuuuacuugaugagug

SEQ ID NO: 609621 - RNA, 23 nt, Artificial Sequence
  Synthetic
cuucaacuuuuacuugaugagug

SEQ ID NO: 609622 - RNA, 24 nt, Artificial Sequence
  Synthetic
acuucaacuuuuacuugaugagug

SEQ ID NO: 609623 - RNA, 18 nt, Artificial Sequence
  Synthetic
guguguaugauaugagug

SEQ ID NO: 609624 - RNA, 19 nt, Artificial Sequence
  Synthetic
aguguguaugauaugagug

SEQ ID NO: 609625 - RNA, 20 nt, Artificial Sequence
  Synthetic
gaguguguaugauaugagug

SEQ ID NO: 609626 - RNA, 21 nt, Artificial Sequence
  Synthetic
ugaguguguaugauaugagug

SEQ ID NO: 609627 - RNA, 22 nt, Artificial Sequence
  Synthetic
cugaguguguaugauaugagug

SEQ ID NO: 609628 - RNA, 23 nt, Artificial Sequence
  Synthetic
gcugaguguguaugauaugagug

SEQ ID NO: 609629 - RNA, 24 nt, Artificial Sequence
  Synthetic
ggcugaguguguaugauaugagug

SEQ ID NO: 609630 - RNA, 18 nt, Artificial Sequence
  Synthetic
gaagcucuuaacugagug

SEQ ID NO: 609631 - RNA, 19 nt, Artificial Sequence
  Synthetic
agaagcucuuaacugagug

SEQ ID NO: 609632 - RNA, 20 nt, Artificial Sequence
  Synthetic
cagaagcucuuaacugagug

SEQ ID NO: 609633 - RNA, 21 nt, Artificial Sequence
  Synthetic
acagaagcucuuaacugagug

SEQ ID NO: 609634 - RNA, 22 nt, Artificial Sequence
  Synthetic
uacagaagcucuuaacugagug

SEQ ID NO: 609635 - RNA, 23 nt, Artificial Sequence
  Synthetic
uuacagaagcucuuaacugagug

SEQ ID NO: 609636 - RNA, 24 nt, Artificial Sequence
  Synthetic
auuacagaagcucuuaacugagug

SEQ ID NO: 609637 - RNA, 18 nt, Artificial Sequence
  Synthetic
uuaaagaaaaucugagug

SEQ ID NO: 609638 - RNA, 19 nt, Artificial Sequence
  Synthetic
auuaaagaaaaucugagug

SEQ ID NO: 609639 - RNA, 20 nt, Artificial Sequence
  Synthetic
cauuaaagaaaaucugagug

SEQ ID NO: 609640 - RNA, 21 nt, Artificial Sequence
  Synthetic
ucauuaaagaaaaucugagug

SEQ ID NO: 609641 - RNA, 22 nt, Artificial Sequence
  Synthetic
uucauuaaagaaaaucugagug

SEQ ID NO: 609642 - RNA, 23 nt, Artificial Sequence
  Synthetic
auucauuaaagaaaaucugagug

SEQ ID NO: 609643 - RNA, 24 nt, Artificial Sequence
  Synthetic
aauucauuaaagaaaaucugagug

SEQ ID NO: 609644 - RNA, 18 nt, Artificial Sequence
  Synthetic
guuaugaguuagugagug

SEQ ID NO: 609645 - RNA, 19 nt, Artificial Sequence
  Synthetic
aguuaugaguuagugagug

SEQ ID NO: 609646 - RNA, 20 nt, Artificial Sequence
  Synthetic
caguuaugaguuagugagug

SEQ ID NO: 609647 - RNA, 21 nt, Artificial Sequence
  Synthetic
acaguuaugaguuagugagug

SEQ ID NO: 609648 - RNA, 22 nt, Artificial Sequence
  Synthetic
cacaguuaugaguuagugagug

SEQ ID NO: 609649 - RNA, 23 nt, Artificial Sequence
  Synthetic
ccacaguuaugaguuagugagug

SEQ ID NO: 609650 - RNA, 24 nt, Artificial Sequence
  Synthetic
cccacaguuaugaguuagugagug

SEQ ID NO: 609651 - RNA, 18 nt, Artificial Sequence
  Synthetic
gguuaucagaggugagug

SEQ ID NO: 609652 - RNA, 19 nt, Artificial Sequence
  Synthetic
ggguuaucagaggugagug

SEQ ID NO: 609653 - RNA, 20 nt, Artificial Sequence
  Synthetic
uggguuaucagaggugagug

SEQ ID NO: 609654 - RNA, 21 nt, Artificial Sequence
  Synthetic
cuggguuaucagaggugagug

SEQ ID NO: 609655 - RNA, 22 nt, Artificial Sequence
  Synthetic
gcuggguuaucagaggugagug

SEQ ID NO: 609656 - RNA, 23 nt, Artificial Sequence
  Synthetic
agcuggguuaucagaggugagug

SEQ ID NO: 609657 - RNA, 24 nt, Artificial Sequence
  Synthetic
cagcuggguuaucagaggugagug

SEQ ID NO: 609658 - RNA, 18 nt, Artificial Sequence
  Synthetic
gacuggcuuucuugagug

SEQ ID NO: 609659 - RNA, 19 nt, Artificial Sequence
  Synthetic
agacuggcuuucuugagug

SEQ ID NO: 609660 - RNA, 20 nt, Artificial Sequence
  Synthetic
uagacuggcuuucuugagug

SEQ ID NO: 609661 - RNA, 21 nt, Artificial Sequence
  Synthetic
cuagacuggcuuucuugagug

SEQ ID NO: 609662 - RNA, 22 nt, Artificial Sequence
  Synthetic
acuagacuggcuuucuugagug

SEQ ID NO: 609663 - RNA, 23 nt, Artificial Sequence
  Synthetic
cacuagacuggcuuucuugagug

SEQ ID NO: 609664 - RNA, 24 nt, Artificial Sequence
  Synthetic
gcacuagacuggcuuucuugagug

SEQ ID NO: 609665 - RNA, 18 nt, Artificial Sequence
  Synthetic
uggcagccaaguugagug

SEQ ID NO: 609666 - RNA, 19 nt, Artificial Sequence
  Synthetic
guggcagccaaguugagug

SEQ ID NO: 609667 - RNA, 20 nt, Artificial Sequence
  Synthetic
uguggcagccaaguugagug

SEQ ID NO: 609668 - RNA, 21 nt, Artificial Sequence
  Synthetic
uuguggcagccaaguugagug

SEQ ID NO: 609669 - RNA, 22 nt, Artificial Sequence
  Synthetic
auuguggcagccaaguugagug

SEQ ID NO: 609670 - RNA, 23 nt, Artificial Sequence
  Synthetic
gauuguggcagccaaguugagug

SEQ ID NO: 609671 - RNA, 24 nt, Artificial Sequence
  Synthetic
ugauuguggcagccaaguugagug

SEQ ID NO: 609672 - RNA, 18 nt, Artificial Sequence
  Synthetic
aaaaacaguaaaauagug

SEQ ID NO: 609673 - RNA, 19 nt, Artificial Sequence
  Synthetic
caaaaacaguaaaauagug

SEQ ID NO: 609674 - RNA, 20 nt, Artificial Sequence
  Synthetic
ccaaaaacaguaaaauagug

SEQ ID NO: 609675 - RNA, 21 nt, Artificial Sequence
  Synthetic
accaaaaacaguaaaauagug

SEQ ID NO: 609676 - RNA, 22 nt, Artificial Sequence
  Synthetic
gaccaaaaacaguaaaauagug

SEQ ID NO: 609677 - RNA, 23 nt, Artificial Sequence
  Synthetic
ugaccaaaaacaguaaaauagug

SEQ ID NO: 609678 - RNA, 24 nt, Artificial Sequence
  Synthetic
uugaccaaaaacaguaaaauagug

SEQ ID NO: 609679 - RNA, 18 nt, Artificial Sequence
  Synthetic
uuucuauuuuaaauagug

SEQ ID NO: 609680 - RNA, 19 nt, Artificial Sequence
  Synthetic
auuucuauuuuaaauagug

SEQ ID NO: 609681 - RNA, 20 nt, Artificial Sequence
  Synthetic
uauuucuauuuuaaauagug

SEQ ID NO: 609682 - RNA, 21 nt, Artificial Sequence
  Synthetic
guauuucuauuuuaaauagug

SEQ ID NO: 609683 - RNA, 22 nt, Artificial Sequence
  Synthetic
gguauuucuauuuuaaauagug

SEQ ID NO: 609684 - RNA, 23 nt, Artificial Sequence
  Synthetic
ugguauuucuauuuuaaauagug

SEQ ID NO: 609685 - RNA, 24 nt, Artificial Sequence
  Synthetic
uugguauuucuauuuuaaauagug

SEQ ID NO: 609686 - RNA, 18 nt, Artificial Sequence
  Synthetic
aucuuaauaugaauagug

SEQ ID NO: 609687 - RNA, 19 nt, Artificial Sequence
  Synthetic
aaucuuaauaugaauagug

SEQ ID NO: 609688 - RNA, 20 nt, Artificial Sequence
  Synthetic
aaaucuuaauaugaauagug

SEQ ID NO: 609689 - RNA, 21 nt, Artificial Sequence
  Synthetic
uaaaucuuaauaugaauagug

SEQ ID NO: 609690 - RNA, 22 nt, Artificial Sequence
  Synthetic
auaaaucuuaauaugaauagug

SEQ ID NO: 609691 - RNA, 23 nt, Artificial Sequence
  Synthetic
aauaaaucuuaauaugaauagug

SEQ ID NO: 609692 - RNA, 24 nt, Artificial Sequence
  Synthetic
aaauaaaucuuaauaugaauagug

SEQ ID NO: 609693 - RNA, 18 nt, Artificial Sequence
  Synthetic
agcaaugcaauaauagug

SEQ ID NO: 609694 - RNA, 19 nt, Artificial Sequence
  Synthetic
cagcaaugcaauaauagug

SEQ ID NO: 609695 - RNA, 20 nt, Artificial Sequence
  Synthetic
acagcaaugcaauaauagug

SEQ ID NO: 609696 - RNA, 21 nt, Artificial Sequence
  Synthetic
gacagcaaugcaauaauagug

SEQ ID NO: 609697 - RNA, 22 nt, Artificial Sequence
  Synthetic
agacagcaaugcaauaauagug

SEQ ID NO: 609698 - RNA, 23 nt, Artificial Sequence
  Synthetic
uagacagcaaugcaauaauagug

SEQ ID NO: 609699 - RNA, 24 nt, Artificial Sequence
  Synthetic
auagacagcaaugcaauaauagug

SEQ ID NO: 609700 - RNA, 18 nt, Artificial Sequence
  Synthetic
cuauaugcaaacauagug

SEQ ID NO: 609701 - RNA, 19 nt, Artificial Sequence
  Synthetic
ccuauaugcaaacauagug

SEQ ID NO: 609702 - RNA, 20 nt, Artificial Sequence
  Synthetic
uccuauaugcaaacauagug

SEQ ID NO: 609703 - RNA, 21 nt, Artificial Sequence
  Synthetic
uuccuauaugcaaacauagug

SEQ ID NO: 609704 - RNA, 22 nt, Artificial Sequence
  Synthetic
cuuccuauaugcaaacauagug

SEQ ID NO: 609705 - RNA, 23 nt, Artificial Sequence
  Synthetic
gcuuccuauaugcaaacauagug

SEQ ID NO: 609706 - RNA, 24 nt, Artificial Sequence
  Synthetic
ugcuuccuauaugcaaacauagug

SEQ ID NO: 609707 - RNA, 21 nt, Artificial Sequence
  Synthetic
ccacuccuauucaacauagug

SEQ ID NO: 609708 - RNA, 22 nt, Artificial Sequence
  Synthetic
accacuccuauucaacauagug

SEQ ID NO: 609709 - RNA, 23 nt, Artificial Sequence
  Synthetic
caccacuccuauucaacauagug

SEQ ID NO: 609710 - RNA, 24 nt, Artificial Sequence
  Synthetic
ucaccacuccuauucaacauagug

SEQ ID NO: 609711 - RNA, 18 nt, Artificial Sequence
  Synthetic
aacaucauauacauagug

SEQ ID NO: 609712 - RNA, 19 nt, Artificial Sequence
  Synthetic
caacaucauauacauagug

SEQ ID NO: 609713 - RNA, 20 nt, Artificial Sequence
  Synthetic
ccaacaucauauacauagug

SEQ ID NO: 609714 - RNA, 21 nt, Artificial Sequence
  Synthetic
cccaacaucauauacauagug

SEQ ID NO: 609715 - RNA, 22 nt, Artificial Sequence
  Synthetic
acccaacaucauauacauagug

SEQ ID NO: 609716 - RNA, 23 nt, Artificial Sequence
  Synthetic
cacccaacaucauauacauagug

SEQ ID NO: 609717 - RNA, 24 nt, Artificial Sequence
  Synthetic
ccacccaacaucauauacauagug

SEQ ID NO: 609718 - RNA, 18 nt, Artificial Sequence
  Synthetic
uaaagaggaagcauagug

SEQ ID NO: 609719 - RNA, 19 nt, Artificial Sequence
  Synthetic
auaaagaggaagcauagug

SEQ ID NO: 609720 - RNA, 20 nt, Artificial Sequence
  Synthetic
gauaaagaggaagcauagug

SEQ ID NO: 609721 - RNA, 21 nt, Artificial Sequence
  Synthetic
ugauaaagaggaagcauagug

SEQ ID NO: 609722 - RNA, 22 nt, Artificial Sequence
  Synthetic
cugauaaagaggaagcauagug

SEQ ID NO: 609723 - RNA, 23 nt, Artificial Sequence
  Synthetic
acugauaaagaggaagcauagug

SEQ ID NO: 609724 - RNA, 24 nt, Artificial Sequence
  Synthetic
aacugauaaagaggaagcauagug

SEQ ID NO: 609725 - RNA, 18 nt, Artificial Sequence
  Synthetic
ucccaucggaucauagug

SEQ ID NO: 609726 - RNA, 19 nt, Artificial Sequence
  Synthetic
cucccaucggaucauagug

SEQ ID NO: 609727 - RNA, 20 nt, Artificial Sequence
  Synthetic
ucucccaucggaucauagug

SEQ ID NO: 609728 - RNA, 21 nt, Artificial Sequence
  Synthetic
aucucccaucggaucauagug

SEQ ID NO: 609729 - RNA, 22 nt, Artificial Sequence
  Synthetic
gaucucccaucggaucauagug

SEQ ID NO: 609730 - RNA, 23 nt, Artificial Sequence
  Synthetic
ugaucucccaucggaucauagug

SEQ ID NO: 609731 - RNA, 24 nt, Artificial Sequence
  Synthetic
cugaucucccaucggaucauagug

SEQ ID NO: 609732 - RNA, 18 nt, Artificial Sequence
  Synthetic
aggcugggaaggauagug

SEQ ID NO: 609733 - RNA, 19 nt, Artificial Sequence
  Synthetic
gaggcugggaaggauagug

SEQ ID NO: 609734 - RNA, 20 nt, Artificial Sequence
  Synthetic
agaggcugggaaggauagug

SEQ ID NO: 609735 - RNA, 21 nt, Artificial Sequence
  Synthetic
cagaggcugggaaggauagug

SEQ ID NO: 609736 - RNA, 22 nt, Artificial Sequence
  Synthetic
ccagaggcugggaaggauagug

SEQ ID NO: 609737 - RNA, 23 nt, Artificial Sequence
  Synthetic
gccagaggcugggaaggauagug

SEQ ID NO: 609738 - RNA, 24 nt, Artificial Sequence
  Synthetic
ugccagaggcugggaaggauagug

SEQ ID NO: 609739 - RNA, 18 nt, Artificial Sequence
  Synthetic
ugaguauguuggauagug

SEQ ID NO: 609740 - RNA, 19 nt, Artificial Sequence
  Synthetic
gugaguauguuggauagug

SEQ ID NO: 609741 - RNA, 20 nt, Artificial Sequence
  Synthetic
ugugaguauguuggauagug

SEQ ID NO: 609742 - RNA, 21 nt, Artificial Sequence
  Synthetic
augugaguauguuggauagug

SEQ ID NO: 609743 - RNA, 22 nt, Artificial Sequence
  Synthetic
uaugugaguauguuggauagug

SEQ ID NO: 609744 - RNA, 23 nt, Artificial Sequence
  Synthetic
uuaugugaguauguuggauagug

SEQ ID NO: 609745 - RNA, 24 nt, Artificial Sequence
  Synthetic
auuaugugaguauguuggauagug

SEQ ID NO: 609746 - RNA, 18 nt, Artificial Sequence
  Synthetic
cuagaggaggauauagug

SEQ ID NO: 609747 - RNA, 19 nt, Artificial Sequence
  Synthetic
ucuagaggaggauauagug

SEQ ID NO: 609748 - RNA, 20 nt, Artificial Sequence
  Synthetic
gucuagaggaggauauagug

SEQ ID NO: 609749 - RNA, 21 nt, Artificial Sequence
  Synthetic
ggucuagaggaggauauagug

SEQ ID NO: 609750 - RNA, 22 nt, Artificial Sequence
  Synthetic
aggucuagaggaggauauagug

SEQ ID NO: 609751 - RNA, 23 nt, Artificial Sequence
  Synthetic
gaggucuagaggaggauauagug

SEQ ID NO: 609752 - RNA, 24 nt, Artificial Sequence
  Synthetic
agaggucuagaggaggauauagug

SEQ ID NO: 609753 - RNA, 18 nt, Artificial Sequence
  Synthetic
uugccauuaacuauagug

SEQ ID NO: 609754 - RNA, 19 nt, Artificial Sequence
  Synthetic
guugccauuaacuauagug

SEQ ID NO: 609755 - RNA, 20 nt, Artificial Sequence
  Synthetic
aguugccauuaacuauagug

SEQ ID NO: 609756 - RNA, 21 nt, Artificial Sequence
  Synthetic
gaguugccauuaacuauagug

SEQ ID NO: 609757 - RNA, 22 nt, Artificial Sequence
  Synthetic
ggaguugccauuaacuauagug

SEQ ID NO: 609758 - RNA, 23 nt, Artificial Sequence
  Synthetic
uggaguugccauuaacuauagug

SEQ ID NO: 609759 - RNA, 24 nt, Artificial Sequence
  Synthetic
auggaguugccauuaacuauagug

SEQ ID NO: 609760 - RNA, 18 nt, Artificial Sequence
  Synthetic
gagacagaaaaacuagug

SEQ ID NO: 609761 - RNA, 19 nt, Artificial Sequence
  Synthetic
agagacagaaaaacuagug

SEQ ID NO: 609762 - RNA, 20 nt, Artificial Sequence
  Synthetic
gagagacagaaaaacuagug

SEQ ID NO: 609763 - RNA, 21 nt, Artificial Sequence
  Synthetic
ugagagacagaaaaacuagug

SEQ ID NO: 609764 - RNA, 22 nt, Artificial Sequence
  Synthetic
cugagagacagaaaaacuagug

SEQ ID NO: 609765 - RNA, 23 nt, Artificial Sequence
  Synthetic
gcugagagacagaaaaacuagug

SEQ ID NO: 609766 - RNA, 24 nt, Artificial Sequence
  Synthetic
agcugagagacagaaaaacuagug

SEQ ID NO: 609767 - RNA, 18 nt, Artificial Sequence
  Synthetic
ccuggagggcaacuagug

SEQ ID NO: 609768 - RNA, 19 nt, Artificial Sequence
  Synthetic
accuggagggcaacuagug

SEQ ID NO: 609769 - RNA, 20 nt, Artificial Sequence
  Synthetic
aaccuggagggcaacuagug

SEQ ID NO: 609770 - RNA, 21 nt, Artificial Sequence
  Synthetic
gaaccuggagggcaacuagug

SEQ ID NO: 609771 - RNA, 22 nt, Artificial Sequence
  Synthetic
ggaaccuggagggcaacuagug

SEQ ID NO: 609772 - RNA, 23 nt, Artificial Sequence
  Synthetic
uggaaccuggagggcaacuagug

SEQ ID NO: 609773 - RNA, 24 nt, Artificial Sequence
  Synthetic
uuggaaccuggagggcaacuagug

SEQ ID NO: 609774 - RNA, 18 nt, Artificial Sequence
  Synthetic
uauugggaagaccuagug

SEQ ID NO: 609775 - RNA, 19 nt, Artificial Sequence
  Synthetic
guauugggaagaccuagug

SEQ ID NO: 609776 - RNA, 20 nt, Artificial Sequence
  Synthetic
aguauugggaagaccuagug

SEQ ID NO: 609777 - RNA, 21 nt, Artificial Sequence
  Synthetic
uaguauugggaagaccuagug

SEQ ID NO: 609778 - RNA, 22 nt, Artificial Sequence
  Synthetic
auaguauugggaagaccuagug

SEQ ID NO: 609779 - RNA, 23 nt, Artificial Sequence
  Synthetic
aauaguauugggaagaccuagug

SEQ ID NO: 609780 - RNA, 24 nt, Artificial Sequence
  Synthetic
gaauaguauugggaagaccuagug

SEQ ID NO: 609781 - RNA, 18 nt, Artificial Sequence
  Synthetic
cacagguuugaaguagug

SEQ ID NO: 609782 - RNA, 19 nt, Artificial Sequence
  Synthetic
acacagguuugaaguagug

SEQ ID NO: 609783 - RNA, 20 nt, Artificial Sequence
  Synthetic
uacacagguuugaaguagug

SEQ ID NO: 609784 - RNA, 21 nt, Artificial Sequence
  Synthetic
guacacagguuugaaguagug

SEQ ID NO: 609785 - RNA, 22 nt, Artificial Sequence
  Synthetic
gguacacagguuugaaguagug

SEQ ID NO: 609786 - RNA, 23 nt, Artificial Sequence
  Synthetic
ggguacacagguuugaaguagug

SEQ ID NO: 609787 - RNA, 24 nt, Artificial Sequence
  Synthetic
gggguacacagguuugaaguagug

SEQ ID NO: 609788 - RNA, 18 nt, Artificial Sequence
  Synthetic
gguuuugccucaguagug

SEQ ID NO: 609789 - RNA, 19 nt, Artificial Sequence
  Synthetic
ggguuuugccucaguagug

SEQ ID NO: 609790 - RNA, 20 nt, Artificial Sequence
  Synthetic
aggguuuugccucaguagug

SEQ ID NO: 609791 - RNA, 21 nt, Artificial Sequence
  Synthetic
aaggguuuugccucaguagug

SEQ ID NO: 609792 - RNA, 22 nt, Artificial Sequence
  Synthetic
gaaggguuuugccucaguagug

SEQ ID NO: 609793 - RNA, 23 nt, Artificial Sequence
  Synthetic
agaaggguuuugccucaguagug

SEQ ID NO: 609794 - RNA, 24 nt, Artificial Sequence
  Synthetic
cagaaggguuuugccucaguagug

SEQ ID NO: 609795 - RNA, 18 nt, Artificial Sequence
  Synthetic
ccuucuaaaggaguagug

SEQ ID NO: 609796 - RNA, 19 nt, Artificial Sequence
  Synthetic
uccuucuaaaggaguagug

SEQ ID NO: 609797 - RNA, 20 nt, Artificial Sequence
  Synthetic
uuccuucuaaaggaguagug

SEQ ID NO: 609798 - RNA, 21 nt, Artificial Sequence
  Synthetic
uuuccuucuaaaggaguagug

SEQ ID NO: 609799 - RNA, 22 nt, Artificial Sequence
  Synthetic
auuuccuucuaaaggaguagug

SEQ ID NO: 609800 - RNA, 23 nt, Artificial Sequence
  Synthetic
aauuuccuucuaaaggaguagug

SEQ ID NO: 609801 - RNA, 24 nt, Artificial Sequence
  Synthetic
aaauuuccuucuaaaggaguagug

SEQ ID NO: 609802 - RNA, 18 nt, Artificial Sequence
  Synthetic
acuuuuugugagguagug

SEQ ID NO: 609803 - RNA, 19 nt, Artificial Sequence
  Synthetic
aacuuuuugugagguagug

SEQ ID NO: 609804 - RNA, 20 nt, Artificial Sequence
  Synthetic
caacuuuuugugagguagug

SEQ ID NO: 609805 - RNA, 21 nt, Artificial Sequence
  Synthetic
ucaacuuuuugugagguagug

SEQ ID NO: 609806 - RNA, 22 nt, Artificial Sequence
  Synthetic
aucaacuuuuugugagguagug

SEQ ID NO: 609807 - RNA, 23 nt, Artificial Sequence
  Synthetic
caucaacuuuuugugagguagug

SEQ ID NO: 609808 - RNA, 24 nt, Artificial Sequence
  Synthetic
gcaucaacuuuuugugagguagug

SEQ ID NO: 609809 - RNA, 18 nt, Artificial Sequence
  Synthetic
aggcuacaaaggguagug

SEQ ID NO: 609810 - RNA, 19 nt, Artificial Sequence
  Synthetic
gaggcuacaaaggguagug

SEQ ID NO: 609811 - RNA, 20 nt, Artificial Sequence
  Synthetic
agaggcuacaaaggguagug

SEQ ID NO: 609812 - RNA, 21 nt, Artificial Sequence
  Synthetic
cagaggcuacaaaggguagug

SEQ ID NO: 609813 - RNA, 22 nt, Artificial Sequence
  Synthetic
ccagaggcuacaaaggguagug

SEQ ID NO: 609814 - RNA, 23 nt, Artificial Sequence
  Synthetic
accagaggcuacaaaggguagug

SEQ ID NO: 609815 - RNA, 24 nt, Artificial Sequence
  Synthetic
uaccagaggcuacaaaggguagug

SEQ ID NO: 609816 - RNA, 18 nt, Artificial Sequence
  Synthetic
aggcugugaaggguagug

SEQ ID NO: 609817 - RNA, 19 nt, Artificial Sequence
  Synthetic
gaggcugugaaggguagug

SEQ ID NO: 609818 - RNA, 20 nt, Artificial Sequence
  Synthetic
agaggcugugaaggguagug

SEQ ID NO: 609819 - RNA, 21 nt, Artificial Sequence
  Synthetic
cagaggcugugaaggguagug

SEQ ID NO: 609820 - RNA, 22 nt, Artificial Sequence
  Synthetic
ccagaggcugugaaggguagug

SEQ ID NO: 609821 - RNA, 23 nt, Artificial Sequence
  Synthetic
accagaggcugugaaggguagug

SEQ ID NO: 609822 - RNA, 24 nt, Artificial Sequence
  Synthetic
uaccagaggcugugaaggguagug

SEQ ID NO: 609823 - RNA, 18 nt, Artificial Sequence
  Synthetic
agccccgaaaugguagug

SEQ ID NO: 609824 - RNA, 19 nt, Artificial Sequence
  Synthetic
uagccccgaaaugguagug

SEQ ID NO: 609825 - RNA, 20 nt, Artificial Sequence
  Synthetic
auagccccgaaaugguagug

SEQ ID NO: 609826 - RNA, 21 nt, Artificial Sequence
  Synthetic
uauagccccgaaaugguagug

SEQ ID NO: 609827 - RNA, 22 nt, Artificial Sequence
  Synthetic
guauagccccgaaaugguagug

SEQ ID NO: 609828 - RNA, 23 nt, Artificial Sequence
  Synthetic
uguauagccccgaaaugguagug

SEQ ID NO: 609829 - RNA, 24 nt, Artificial Sequence
  Synthetic
cuguauagccccgaaaugguagug

SEQ ID NO: 609830 - RNA, 18 nt, Artificial Sequence
  Synthetic
acccucagaacuguagug

SEQ ID NO: 609831 - RNA, 19 nt, Artificial Sequence
  Synthetic
cacccucagaacuguagug

SEQ ID NO: 609832 - RNA, 20 nt, Artificial Sequence
  Synthetic
ccacccucagaacuguagug

SEQ ID NO: 609833 - RNA, 21 nt, Artificial Sequence
  Synthetic
accacccucagaacuguagug

SEQ ID NO: 609834 - RNA, 22 nt, Artificial Sequence
  Synthetic
uaccacccucagaacuguagug

SEQ ID NO: 609835 - RNA, 23 nt, Artificial Sequence
  Synthetic
auaccacccucagaacuguagug

SEQ ID NO: 609836 - RNA, 24 nt, Artificial Sequence
  Synthetic
uauaccacccucagaacuguagug

SEQ ID NO: 609837 - RNA, 18 nt, Artificial Sequence
  Synthetic
aggcugcuuacuguagug

SEQ ID NO: 609838 - RNA, 19 nt, Artificial Sequence
  Synthetic
uaggcugcuuacuguagug

SEQ ID NO: 609839 - RNA, 20 nt, Artificial Sequence
  Synthetic
auaggcugcuuacuguagug

SEQ ID NO: 609840 - RNA, 21 nt, Artificial Sequence
  Synthetic
aauaggcugcuuacuguagug

SEQ ID NO: 609841 - RNA, 22 nt, Artificial Sequence
  Synthetic
aaauaggcugcuuacuguagug

SEQ ID NO: 609842 - RNA, 23 nt, Artificial Sequence
  Synthetic
aaaauaggcugcuuacuguagug

SEQ ID NO: 609843 - RNA, 24 nt, Artificial Sequence
  Synthetic
caaaauaggcugcuuacuguagug

SEQ ID NO: 609844 - RNA, 18 nt, Artificial Sequence
  Synthetic
cuugauaaggaauuagug

SEQ ID NO: 609845 - RNA, 19 nt, Artificial Sequence
  Synthetic
ucuugauaaggaauuagug

SEQ ID NO: 609846 - RNA, 20 nt, Artificial Sequence
  Synthetic
cucuugauaaggaauuagug

SEQ ID NO: 609847 - RNA, 21 nt, Artificial Sequence
  Synthetic
ccucuugauaaggaauuagug

SEQ ID NO: 609848 - RNA, 22 nt, Artificial Sequence
  Synthetic
uccucuugauaaggaauuagug

SEQ ID NO: 609849 - RNA, 23 nt, Artificial Sequence
  Synthetic
auccucuugauaaggaauuagug

SEQ ID NO: 609850 - RNA, 24 nt, Artificial Sequence
  Synthetic
uauccucuugauaaggaauuagug

SEQ ID NO: 609851 - RNA, 18 nt, Artificial Sequence
  Synthetic
cagggauggucauuagug

SEQ ID NO: 609852 - RNA, 19 nt, Artificial Sequence
  Synthetic
ucagggauggucauuagug

SEQ ID NO: 609853 - RNA, 20 nt, Artificial Sequence
  Synthetic
gucagggauggucauuagug

SEQ ID NO: 609854 - RNA, 21 nt, Artificial Sequence
  Synthetic
agucagggauggucauuagug

SEQ ID NO: 609855 - RNA, 22 nt, Artificial Sequence
  Synthetic
uagucagggauggucauuagug

SEQ ID NO: 609856 - RNA, 23 nt, Artificial Sequence
  Synthetic
uuagucagggauggucauuagug

SEQ ID NO: 609857 - RNA, 24 nt, Artificial Sequence
  Synthetic
cuuagucagggauggucauuagug

SEQ ID NO: 609858 - RNA, 18 nt, Artificial Sequence
  Synthetic
cagcauuguucauuagug

SEQ ID NO: 609859 - RNA, 19 nt, Artificial Sequence
  Synthetic
ucagcauuguucauuagug

SEQ ID NO: 609860 - RNA, 20 nt, Artificial Sequence
  Synthetic
uucagcauuguucauuagug

SEQ ID NO: 609861 - RNA, 21 nt, Artificial Sequence
  Synthetic
uuucagcauuguucauuagug

SEQ ID NO: 609862 - RNA, 22 nt, Artificial Sequence
  Synthetic
guuucagcauuguucauuagug

SEQ ID NO: 609863 - RNA, 23 nt, Artificial Sequence
  Synthetic
uguuucagcauuguucauuagug

SEQ ID NO: 609864 - RNA, 24 nt, Artificial Sequence
  Synthetic
uuguuucagcauuguucauuagug

SEQ ID NO: 609865 - RNA, 18 nt, Artificial Sequence
  Synthetic
gugaagcaaagauuagug

SEQ ID NO: 609866 - RNA, 19 nt, Artificial Sequence
  Synthetic
agugaagcaaagauuagug

SEQ ID NO: 609867 - RNA, 20 nt, Artificial Sequence
  Synthetic
cagugaagcaaagauuagug

SEQ ID NO: 609868 - RNA, 21 nt, Artificial Sequence
  Synthetic
gcagugaagcaaagauuagug

SEQ ID NO: 609869 - RNA, 22 nt, Artificial Sequence
  Synthetic
agcagugaagcaaagauuagug

SEQ ID NO: 609870 - RNA, 23 nt, Artificial Sequence
  Synthetic
aagcagugaagcaaagauuagug

SEQ ID NO: 609871 - RNA, 24 nt, Artificial Sequence
  Synthetic
caagcagugaagcaaagauuagug

SEQ ID NO: 609872 - RNA, 18 nt, Artificial Sequence
  Synthetic
cugcacuucauauuagug

SEQ ID NO: 609873 - RNA, 19 nt, Artificial Sequence
  Synthetic
ucugcacuucauauuagug

SEQ ID NO: 609874 - RNA, 20 nt, Artificial Sequence
  Synthetic
uucugcacuucauauuagug

SEQ ID NO: 609875 - RNA, 21 nt, Artificial Sequence
  Synthetic
guucugcacuucauauuagug

SEQ ID NO: 609876 - RNA, 22 nt, Artificial Sequence
  Synthetic
uguucugcacuucauauuagug

SEQ ID NO: 609877 - RNA, 23 nt, Artificial Sequence
  Synthetic
auguucugcacuucauauuagug

SEQ ID NO: 609878 - RNA, 24 nt, Artificial Sequence
  Synthetic
aauguucugcacuucauauuagug

SEQ ID NO: 609879 - RNA, 18 nt, Artificial Sequence
  Synthetic
ugaaaaagagccuuagug

SEQ ID NO: 609880 - RNA, 19 nt, Artificial Sequence
  Synthetic
cugaaaaagagccuuagug

SEQ ID NO: 609881 - RNA, 20 nt, Artificial Sequence
  Synthetic
ccugaaaaagagccuuagug

SEQ ID NO: 609882 - RNA, 21 nt, Artificial Sequence
  Synthetic
cccugaaaaagagccuuagug

SEQ ID NO: 609883 - RNA, 22 nt, Artificial Sequence
  Synthetic
acccugaaaaagagccuuagug

SEQ ID NO: 609884 - RNA, 23 nt, Artificial Sequence
  Synthetic
gacccugaaaaagagccuuagug

SEQ ID NO: 609885 - RNA, 24 nt, Artificial Sequence
  Synthetic
agacccugaaaaagagccuuagug

SEQ ID NO: 609886 - RNA, 18 nt, Artificial Sequence
  Synthetic
auuuccugaauguuagug

SEQ ID NO: 609887 - RNA, 19 nt, Artificial Sequence
  Synthetic
gauuuccugaauguuagug

SEQ ID NO: 609888 - RNA, 20 nt, Artificial Sequence
  Synthetic
ugauuuccugaauguuagug

SEQ ID NO: 609889 - RNA, 21 nt, Artificial Sequence
  Synthetic
augauuuccugaauguuagug

SEQ ID NO: 609890 - RNA, 22 nt, Artificial Sequence
  Synthetic
caugauuuccugaauguuagug

SEQ ID NO: 609891 - RNA, 23 nt, Artificial Sequence
  Synthetic
acaugauuuccugaauguuagug

SEQ ID NO: 609892 - RNA, 24 nt, Artificial Sequence
  Synthetic
gacaugauuuccugaauguuagug

SEQ ID NO: 609893 - RNA, 18 nt, Artificial Sequence
  Synthetic
aauuuuucauuuuuagug

SEQ ID NO: 609894 - RNA, 19 nt, Artificial Sequence
  Synthetic
caauuuuucauuuuuagug

SEQ ID NO: 609895 - RNA, 20 nt, Artificial Sequence
  Synthetic
ucaauuuuucauuuuuagug

SEQ ID NO: 609896 - RNA, 21 nt, Artificial Sequence
  Synthetic
cucaauuuuucauuuuuagug

SEQ ID NO: 609897 - RNA, 22 nt, Artificial Sequence
  Synthetic
acucaauuuuucauuuuuagug

SEQ ID NO: 609898 - RNA, 23 nt, Artificial Sequence
  Synthetic
cacucaauuuuucauuuuuagug

SEQ ID NO: 609899 - RNA, 24 nt, Artificial Sequence
  Synthetic
ucacucaauuuuucauuuuuagug

SEQ ID NO: 609900 - RNA, 18 nt, Artificial Sequence
  Synthetic
cacuggagauuuuuagug

SEQ ID NO: 609901 - RNA, 19 nt, Artificial Sequence
  Synthetic
ucacuggagauuuuuagug

SEQ ID NO: 609902 - RNA, 20 nt, Artificial Sequence
  Synthetic
uucacuggagauuuuuagug

SEQ ID NO: 609903 - RNA, 21 nt, Artificial Sequence
  Synthetic
auucacuggagauuuuuagug

SEQ ID NO: 609904 - RNA, 22 nt, Artificial Sequence
  Synthetic
aauucacuggagauuuuuagug

SEQ ID NO: 609905 - RNA, 23 nt, Artificial Sequence
  Synthetic
caauucacuggagauuuuuagug

SEQ ID NO: 609906 - RNA, 24 nt, Artificial Sequence
  Synthetic
ccaauucacuggagauuuuuagug

SEQ ID NO: 609907 - RNA, 18 nt, Artificial Sequence
  Synthetic
accagcuugaccaacgug

SEQ ID NO: 609908 - RNA, 19 nt, Artificial Sequence
  Synthetic
gaccagcuugaccaacgug

SEQ ID NO: 609909 - RNA, 20 nt, Artificial Sequence
  Synthetic
agaccagcuugaccaacgug

SEQ ID NO: 609910 - RNA, 21 nt, Artificial Sequence
  Synthetic
gagaccagcuugaccaacgug

SEQ ID NO: 609911 - RNA, 22 nt, Artificial Sequence
  Synthetic
cgagaccagcuugaccaacgug

SEQ ID NO: 609912 - RNA, 23 nt, Artificial Sequence
  Synthetic
ucgagaccagcuugaccaacgug

SEQ ID NO: 609913 - RNA, 24 nt, Artificial Sequence
  Synthetic
uucgagaccagcuugaccaacgug

SEQ ID NO: 609914 - RNA, 18 nt, Artificial Sequence
  Synthetic
accagccuggccaacgug

SEQ ID NO: 609915 - RNA, 19 nt, Artificial Sequence
  Synthetic
gaccagccuggccaacgug

SEQ ID NO: 609916 - RNA, 20 nt, Artificial Sequence
  Synthetic
agaccagccuggccaacgug

SEQ ID NO: 609917 - RNA, 21 nt, Artificial Sequence
  Synthetic
gagaccagccuggccaacgug

SEQ ID NO: 609918 - RNA, 22 nt, Artificial Sequence
  Synthetic
cgagaccagccuggccaacgug

SEQ ID NO: 609919 - RNA, 23 nt, Artificial Sequence
  Synthetic
ucgagaccagccuggccaacgug

SEQ ID NO: 609920 - RNA, 24 nt, Artificial Sequence
  Synthetic
uucgagaccagccuggccaacgug

SEQ ID NO: 609921 - RNA, 18 nt, Artificial Sequence
  Synthetic
accagccugaucaacgug

SEQ ID NO: 609922 - RNA, 19 nt, Artificial Sequence
  Synthetic
gaccagccugaucaacgug

SEQ ID NO: 609923 - RNA, 20 nt, Artificial Sequence
  Synthetic
agaccagccugaucaacgug

SEQ ID NO: 609924 - RNA, 21 nt, Artificial Sequence
  Synthetic
aagaccagccugaucaacgug

SEQ ID NO: 609925 - RNA, 22 nt, Artificial Sequence
  Synthetic
uaagaccagccugaucaacgug

SEQ ID NO: 609926 - RNA, 23 nt, Artificial Sequence
  Synthetic
uuaagaccagccugaucaacgug

SEQ ID NO: 609927 - RNA, 24 nt, Artificial Sequence
  Synthetic
uuuaagaccagccugaucaacgug

SEQ ID NO: 609928 - RNA, 18 nt, Artificial Sequence
  Synthetic
uugggcuacauacacgug

SEQ ID NO: 609929 - RNA, 19 nt, Artificial Sequence
  Synthetic
cuugggcuacauacacgug

SEQ ID NO: 609930 - RNA, 20 nt, Artificial Sequence
  Synthetic
ucuugggcuacauacacgug

SEQ ID NO: 609931 - RNA, 21 nt, Artificial Sequence
  Synthetic
uucuugggcuacauacacgug

SEQ ID NO: 609932 - RNA, 22 nt, Artificial Sequence
  Synthetic
auucuugggcuacauacacgug

SEQ ID NO: 609933 - RNA, 23 nt, Artificial Sequence
  Synthetic
uauucuugggcuacauacacgug

SEQ ID NO: 609934 - RNA, 24 nt, Artificial Sequence
  Synthetic
uuauucuugggcuacauacacgug

SEQ ID NO: 609935 - RNA, 18 nt, Artificial Sequence
  Synthetic
ggaaacccaucucacgug

SEQ ID NO: 609936 - RNA, 19 nt, Artificial Sequence
  Synthetic
aggaaacccaucucacgug

SEQ ID NO: 609937 - RNA, 20 nt, Artificial Sequence
  Synthetic
caggaaacccaucucacgug

SEQ ID NO: 609938 - RNA, 21 nt, Artificial Sequence
  Synthetic
ucaggaaacccaucucacgug

SEQ ID NO: 609939 - RNA, 22 nt, Artificial Sequence
  Synthetic
uucaggaaacccaucucacgug

SEQ ID NO: 609940 - RNA, 23 nt, Artificial Sequence
  Synthetic
auucaggaaacccaucucacgug

SEQ ID NO: 609941 - RNA, 24 nt, Artificial Sequence
  Synthetic
uauucaggaaacccaucucacgug

SEQ ID NO: 609942 - RNA, 18 nt, Artificial Sequence
  Synthetic
cagguuuggggggacgug

SEQ ID NO: 609943 - RNA, 19 nt, Artificial Sequence
  Synthetic
acagguuuggggggacgug

SEQ ID NO: 609944 - RNA, 20 nt, Artificial Sequence
  Synthetic
cacagguuuggggggacgug

SEQ ID NO: 609945 - RNA, 21 nt, Artificial Sequence
  Synthetic
gcacagguuuggggggacgug

SEQ ID NO: 609946 - RNA, 22 nt, Artificial Sequence
  Synthetic
agcacagguuuggggggacgug

SEQ ID NO: 609947 - RNA, 23 nt, Artificial Sequence
  Synthetic
cagcacagguuuggggggacgug

SEQ ID NO: 609948 - RNA, 24 nt, Artificial Sequence
  Synthetic
gcagcacagguuuggggggacgug

SEQ ID NO: 609949 - RNA, 18 nt, Artificial Sequence
  Synthetic
uugacuucaggugacgug

SEQ ID NO: 609950 - RNA, 19 nt, Artificial Sequence
  Synthetic
auugacuucaggugacgug

SEQ ID NO: 609951 - RNA, 20 nt, Artificial Sequence
  Synthetic
aauugacuucaggugacgug

SEQ ID NO: 609952 - RNA, 21 nt, Artificial Sequence
  Synthetic
gaauugacuucaggugacgug

SEQ ID NO: 609953 - RNA, 22 nt, Artificial Sequence
  Synthetic
ggaauugacuucaggugacgug

SEQ ID NO: 609954 - RNA, 23 nt, Artificial Sequence
  Synthetic
uggaauugacuucaggugacgug

SEQ ID NO: 609955 - RNA, 24 nt, Artificial Sequence
  Synthetic
cuggaauugacuucaggugacgug

SEQ ID NO: 609956 - RNA, 18 nt, Artificial Sequence
  Synthetic
caggccugagccaccgug

SEQ ID NO: 609957 - RNA, 19 nt, Artificial Sequence
  Synthetic
acaggccugagccaccgug

SEQ ID NO: 609958 - RNA, 20 nt, Artificial Sequence
  Synthetic
uacaggccugagccaccgug

SEQ ID NO: 609959 - RNA, 21 nt, Artificial Sequence
  Synthetic
uuacaggccugagccaccgug

SEQ ID NO: 609960 - RNA, 22 nt, Artificial Sequence
  Synthetic
auuacaggccugagccaccgug

SEQ ID NO: 609961 - RNA, 23 nt, Artificial Sequence
  Synthetic
gauuacaggccugagccaccgug

SEQ ID NO: 609962 - RNA, 24 nt, Artificial Sequence
  Synthetic
ggauuacaggccugagccaccgug

SEQ ID NO: 609963 - RNA, 18 nt, Artificial Sequence
  Synthetic
gcauaucuaacucccgug

SEQ ID NO: 609964 - RNA, 19 nt, Artificial Sequence
  Synthetic
ugcauaucuaacucccgug

SEQ ID NO: 609965 - RNA, 20 nt, Artificial Sequence
  Synthetic
gugcauaucuaacucccgug

SEQ ID NO: 609966 - RNA, 21 nt, Artificial Sequence
  Synthetic
agugcauaucuaacucccgug

SEQ ID NO: 609967 - RNA, 22 nt, Artificial Sequence
  Synthetic
aagugcauaucuaacucccgug

SEQ ID NO: 609968 - RNA, 23 nt, Artificial Sequence
  Synthetic
gaagugcauaucuaacucccgug

SEQ ID NO: 609969 - RNA, 24 nt, Artificial Sequence
  Synthetic
agaagugcauaucuaacucccgug

SEQ ID NO: 609970 - RNA, 18 nt, Artificial Sequence
  Synthetic
gcacuuugggaggccgug

SEQ ID NO: 609971 - RNA, 19 nt, Artificial Sequence
  Synthetic
agcacuuugggaggccgug

SEQ ID NO: 609972 - RNA, 20 nt, Artificial Sequence
  Synthetic
cagcacuuugggaggccgug

SEQ ID NO: 609973 - RNA, 21 nt, Artificial Sequence
  Synthetic
ccagcacuuugggaggccgug

SEQ ID NO: 609974 - RNA, 22 nt, Artificial Sequence
  Synthetic
cccagcacuuugggaggccgug

SEQ ID NO: 609975 - RNA, 23 nt, Artificial Sequence
  Synthetic
ucccagcacuuugggaggccgug

SEQ ID NO: 609976 - RNA, 24 nt, Artificial Sequence
  Synthetic
aucccagcacuuugggaggccgug

SEQ ID NO: 609977 - RNA, 18 nt, Artificial Sequence
  Synthetic
gaagggaaauaauccgug

SEQ ID NO: 609978 - RNA, 19 nt, Artificial Sequence
  Synthetic
ugaagggaaauaauccgug

SEQ ID NO: 609979 - RNA, 20 nt, Artificial Sequence
  Synthetic
gugaagggaaauaauccgug

SEQ ID NO: 609980 - RNA, 21 nt, Artificial Sequence
  Synthetic
ggugaagggaaauaauccgug

SEQ ID NO: 609981 - RNA, 22 nt, Artificial Sequence
  Synthetic
aggugaagggaaauaauccgug

SEQ ID NO: 609982 - RNA, 23 nt, Artificial Sequence
  Synthetic
caggugaagggaaauaauccgug

SEQ ID NO: 609983 - RNA, 24 nt, Artificial Sequence
  Synthetic
gcaggugaagggaaauaauccgug

SEQ ID NO: 609984 - RNA, 18 nt, Artificial Sequence
  Synthetic
guagguuaacacuccgug

SEQ ID NO: 609985 - RNA, 19 nt, Artificial Sequence
  Synthetic
aguagguuaacacuccgug

SEQ ID NO: 609986 - RNA, 20 nt, Artificial Sequence
  Synthetic
uaguagguuaacacuccgug

SEQ ID NO: 609987 - RNA, 21 nt, Artificial Sequence
  Synthetic
cuaguagguuaacacuccgug

SEQ ID NO: 609988 - RNA, 22 nt, Artificial Sequence
  Synthetic
ucuaguagguuaacacuccgug

SEQ ID NO: 609989 - RNA, 23 nt, Artificial Sequence
  Synthetic
uucuaguagguuaacacuccgug

SEQ ID NO: 609990 - RNA, 24 nt, Artificial Sequence
  Synthetic
uuucuaguagguuaacacuccgug

SEQ ID NO: 609991 - RNA, 18 nt, Artificial Sequence
  Synthetic
ucugaccauaaaagcgug

SEQ ID NO: 609992 - RNA, 19 nt, Artificial Sequence
  Synthetic
cucugaccauaaaagcgug

SEQ ID NO: 609993 - RNA, 20 nt, Artificial Sequence
  Synthetic
acucugaccauaaaagcgug

SEQ ID NO: 609994 - RNA, 21 nt, Artificial Sequence
  Synthetic
aacucugaccauaaaagcgug

SEQ ID NO: 609995 - RNA, 22 nt, Artificial Sequence
  Synthetic
uaacucugaccauaaaagcgug

SEQ ID NO: 609996 - RNA, 23 nt, Artificial Sequence
  Synthetic
uuaacucugaccauaaaagcgug

SEQ ID NO: 609997 - RNA, 24 nt, Artificial Sequence
  Synthetic
guuaacucugaccauaaaagcgug

SEQ ID NO: 609998 - RNA, 18 nt, Artificial Sequence
  Synthetic
gagaaauaguugggcgug

SEQ ID NO: 609999 - RNA, 19 nt, Artificial Sequence
  Synthetic
cgagaaauaguugggcgug

SEQ ID NO: 610000 - RNA, 20 nt, Artificial Sequence
  Synthetic
acgagaaauaguugggcgug

SEQ ID NO: 610001 - RNA, 21 nt, Artificial Sequence
  Synthetic
cacgagaaauaguugggcgug

SEQ ID NO: 610002 - RNA, 22 nt, Artificial Sequence
  Synthetic
acacgagaaauaguugggcgug

SEQ ID NO: 610003 - RNA, 23 nt, Artificial Sequence
  Synthetic
aacacgagaaauaguugggcgug

SEQ ID NO: 610004 - RNA, 24 nt, Artificial Sequence
  Synthetic
aaacacgagaaauaguugggcgug

SEQ ID NO: 610005 - RNA, 18 nt, Artificial Sequence
  Synthetic
gaauaaaauauuggcgug

SEQ ID NO: 610006 - RNA, 19 nt, Artificial Sequence
  Synthetic
ggaauaaaauauuggcgug

SEQ ID NO: 610007 - RNA, 20 nt, Artificial Sequence
  Synthetic
uggaauaaaauauuggcgug

SEQ ID NO: 610008 - RNA, 21 nt, Artificial Sequence
  Synthetic
cuggaauaaaauauuggcgug

SEQ ID NO: 610009 - RNA, 22 nt, Artificial Sequence
  Synthetic
acuggaauaaaauauuggcgug

SEQ ID NO: 610010 - RNA, 23 nt, Artificial Sequence
  Synthetic
aacuggaauaaaauauuggcgug

SEQ ID NO: 610011 - RNA, 24 nt, Artificial Sequence
  Synthetic
gaacuggaauaaaauauuggcgug

SEQ ID NO: 610012 - RNA, 18 nt, Artificial Sequence
  Synthetic
aagugaaagaucugcgug

SEQ ID NO: 610013 - RNA, 19 nt, Artificial Sequence
  Synthetic
aaagugaaagaucugcgug

SEQ ID NO: 610014 - RNA, 20 nt, Artificial Sequence
  Synthetic
gaaagugaaagaucugcgug

SEQ ID NO: 610015 - RNA, 21 nt, Artificial Sequence
  Synthetic
agaaagugaaagaucugcgug

SEQ ID NO: 610016 - RNA, 22 nt, Artificial Sequence
  Synthetic
aagaaagugaaagaucugcgug

SEQ ID NO: 610017 - RNA, 23 nt, Artificial Sequence
  Synthetic
caagaaagugaaagaucugcgug

SEQ ID NO: 610018 - RNA, 24 nt, Artificial Sequence
  Synthetic
ccaagaaagugaaagaucugcgug

SEQ ID NO: 610019 - RNA, 18 nt, Artificial Sequence
  Synthetic
uaaaaguagccaaucgug

SEQ ID NO: 610020 - RNA, 19 nt, Artificial Sequence
  Synthetic
cuaaaaguagccaaucgug

SEQ ID NO: 610021 - RNA, 20 nt, Artificial Sequence
  Synthetic
ucuaaaaguagccaaucgug

SEQ ID NO: 610022 - RNA, 21 nt, Artificial Sequence
  Synthetic
uucuaaaaguagccaaucgug

SEQ ID NO: 610023 - RNA, 22 nt, Artificial Sequence
  Synthetic
auucuaaaaguagccaaucgug

SEQ ID NO: 610024 - RNA, 23 nt, Artificial Sequence
  Synthetic
gauucuaaaaguagccaaucgug

SEQ ID NO: 610025 - RNA, 24 nt, Artificial Sequence
  Synthetic
ggauucuaaaaguagccaaucgug

SEQ ID NO: 610026 - RNA, 18 nt, Artificial Sequence
  Synthetic
cuccaagguuuucucgug

SEQ ID NO: 610027 - RNA, 19 nt, Artificial Sequence
  Synthetic
ucuccaagguuuucucgug

SEQ ID NO: 610028 - RNA, 20 nt, Artificial Sequence
  Synthetic
gucuccaagguuuucucgug

SEQ ID NO: 610029 - RNA, 21 nt, Artificial Sequence
  Synthetic
ugucuccaagguuuucucgug

SEQ ID NO: 610030 - RNA, 22 nt, Artificial Sequence
  Synthetic
augucuccaagguuuucucgug

SEQ ID NO: 610031 - RNA, 23 nt, Artificial Sequence
  Synthetic
aaugucuccaagguuuucucgug

SEQ ID NO: 610032 - RNA, 24 nt, Artificial Sequence
  Synthetic
aaaugucuccaagguuuucucgug

SEQ ID NO: 610033 - RNA, 18 nt, Artificial Sequence
  Synthetic
aggaugggaagggucgug

SEQ ID NO: 610034 - RNA, 19 nt, Artificial Sequence
  Synthetic
gaggaugggaagggucgug

SEQ ID NO: 610035 - RNA, 20 nt, Artificial Sequence
  Synthetic
ugaggaugggaagggucgug

SEQ ID NO: 610036 - RNA, 21 nt, Artificial Sequence
  Synthetic
cugaggaugggaagggucgug

SEQ ID NO: 610037 - RNA, 22 nt, Artificial Sequence
  Synthetic
ccugaggaugggaagggucgug

SEQ ID NO: 610038 - RNA, 23 nt, Artificial Sequence
  Synthetic
accugaggaugggaagggucgug

SEQ ID NO: 610039 - RNA, 24 nt, Artificial Sequence
  Synthetic
uaccugaggaugggaagggucgug

SEQ ID NO: 610040 - RNA, 18 nt, Artificial Sequence
  Synthetic
gggccuggcuuugucgug

SEQ ID NO: 610041 - RNA, 19 nt, Artificial Sequence
  Synthetic
ugggccuggcuuugucgug

SEQ ID NO: 610042 - RNA, 20 nt, Artificial Sequence
  Synthetic
uugggccuggcuuugucgug

SEQ ID NO: 610043 - RNA, 21 nt, Artificial Sequence
  Synthetic
guugggccuggcuuugucgug

SEQ ID NO: 610044 - RNA, 22 nt, Artificial Sequence
  Synthetic
uguugggccuggcuuugucgug

SEQ ID NO: 610045 - RNA, 23 nt, Artificial Sequence
  Synthetic
auguugggccuggcuuugucgug

SEQ ID NO: 610046 - RNA, 24 nt, Artificial Sequence
  Synthetic
aauguugggccuggcuuugucgug

SEQ ID NO: 610047 - RNA, 18 nt, Artificial Sequence
  Synthetic
cggagugccuaauucgug

SEQ ID NO: 610048 - RNA, 19 nt, Artificial Sequence
  Synthetic
ucggagugccuaauucgug

SEQ ID NO: 610049 - RNA, 20 nt, Artificial Sequence
  Synthetic
uucggagugccuaauucgug

SEQ ID NO: 610050 - RNA, 21 nt, Artificial Sequence
  Synthetic
uuucggagugccuaauucgug

SEQ ID NO: 610051 - RNA, 22 nt, Artificial Sequence
  Synthetic
cuuucggagugccuaauucgug

SEQ ID NO: 610052 - RNA, 23 nt, Artificial Sequence
  Synthetic
ccuuucggagugccuaauucgug

SEQ ID NO: 610053 - RNA, 24 nt, Artificial Sequence
  Synthetic
uccuuucggagugccuaauucgug

SEQ ID NO: 610054 - RNA, 18 nt, Artificial Sequence
  Synthetic
agauuucuagaguucgug

SEQ ID NO: 610055 - RNA, 19 nt, Artificial Sequence
  Synthetic
uagauuucuagaguucgug

SEQ ID NO: 610056 - RNA, 20 nt, Artificial Sequence
  Synthetic
uuagauuucuagaguucgug

SEQ ID NO: 610057 - RNA, 21 nt, Artificial Sequence
  Synthetic
guuagauuucuagaguucgug

SEQ ID NO: 610058 - RNA, 22 nt, Artificial Sequence
  Synthetic
gguuagauuucuagaguucgug

SEQ ID NO: 610059 - RNA, 23 nt, Artificial Sequence
  Synthetic
ugguuagauuucuagaguucgug

SEQ ID NO: 610060 - RNA, 24 nt, Artificial Sequence
  Synthetic
uugguuagauuucuagaguucgug

SEQ ID NO: 610061 - RNA, 18 nt, Artificial Sequence
  Synthetic
ggacacagggaaaaggug

SEQ ID NO: 610062 - RNA, 19 nt, Artificial Sequence
  Synthetic
uggacacagggaaaaggug

SEQ ID NO: 610063 - RNA, 20 nt, Artificial Sequence
  Synthetic
guggacacagggaaaaggug

SEQ ID NO: 610064 - RNA, 21 nt, Artificial Sequence
  Synthetic
uguggacacagggaaaaggug

SEQ ID NO: 610065 - RNA, 22 nt, Artificial Sequence
  Synthetic
auguggacacagggaaaaggug

SEQ ID NO: 610066 - RNA, 23 nt, Artificial Sequence
  Synthetic
aauguggacacagggaaaaggug

SEQ ID NO: 610067 - RNA, 24 nt, Artificial Sequence
  Synthetic
caauguggacacagggaaaaggug

SEQ ID NO: 610068 - RNA, 18 nt, Artificial Sequence
  Synthetic
ucaccaagcuaaaaggug

SEQ ID NO: 610069 - RNA, 19 nt, Artificial Sequence
  Synthetic
gucaccaagcuaaaaggug

SEQ ID NO: 610070 - RNA, 20 nt, Artificial Sequence
  Synthetic
ggucaccaagcuaaaaggug

SEQ ID NO: 610071 - RNA, 21 nt, Artificial Sequence
  Synthetic
aggucaccaagcuaaaaggug

SEQ ID NO: 610072 - RNA, 22 nt, Artificial Sequence
  Synthetic
aaggucaccaagcuaaaaggug

SEQ ID NO: 610073 - RNA, 23 nt, Artificial Sequence
  Synthetic
caaggucaccaagcuaaaaggug

SEQ ID NO: 610074 - RNA, 24 nt, Artificial Sequence
  Synthetic
ccaaggucaccaagcuaaaaggug

SEQ ID NO: 610075 - RNA, 18 nt, Artificial Sequence
  Synthetic
aauauauuugcaaaggug

SEQ ID NO: 610076 - RNA, 19 nt, Artificial Sequence
  Synthetic
uaauauauuugcaaaggug

SEQ ID NO: 610077 - RNA, 20 nt, Artificial Sequence
  Synthetic
auaauauauuugcaaaggug

SEQ ID NO: 610078 - RNA, 21 nt, Artificial Sequence
  Synthetic
aauaauauauuugcaaaggug

SEQ ID NO: 610079 - RNA, 22 nt, Artificial Sequence
  Synthetic
gaauaauauauuugcaaaggug

SEQ ID NO: 610080 - RNA, 23 nt, Artificial Sequence
  Synthetic
agaauaauauauuugcaaaggug

SEQ ID NO: 610081 - RNA, 24 nt, Artificial Sequence
  Synthetic
gagaauaauauauuugcaaaggug

SEQ ID NO: 610082 - RNA, 18 nt, Artificial Sequence
  Synthetic
ccuauuuuauuaaaggug

SEQ ID NO: 610083 - RNA, 19 nt, Artificial Sequence
  Synthetic
gccuauuuuauuaaaggug

SEQ ID NO: 610084 - RNA, 20 nt, Artificial Sequence
  Synthetic
agccuauuuuauuaaaggug

SEQ ID NO: 610085 - RNA, 21 nt, Artificial Sequence
  Synthetic
aagccuauuuuauuaaaggug

SEQ ID NO: 610086 - RNA, 22 nt, Artificial Sequence
  Synthetic
aaagccuauuuuauuaaaggug

SEQ ID NO: 610087 - RNA, 23 nt, Artificial Sequence
  Synthetic
caaagccuauuuuauuaaaggug

SEQ ID NO: 610088 - RNA, 24 nt, Artificial Sequence
  Synthetic
acaaagccuauuuuauuaaaggug

SEQ ID NO: 610089 - RNA, 18 nt, Artificial Sequence
  Synthetic
aaauaacuuagcaaggug

SEQ ID NO: 610090 - RNA, 19 nt, Artificial Sequence
  Synthetic
caaauaacuuagcaaggug

SEQ ID NO: 610091 - RNA, 20 nt, Artificial Sequence
  Synthetic
acaaauaacuuagcaaggug

SEQ ID NO: 610092 - RNA, 21 nt, Artificial Sequence
  Synthetic
uacaaauaacuuagcaaggug

SEQ ID NO: 610093 - RNA, 22 nt, Artificial Sequence
  Synthetic
uuacaaauaacuuagcaaggug

SEQ ID NO: 610094 - RNA, 23 nt, Artificial Sequence
  Synthetic
auuacaaauaacuuagcaaggug

SEQ ID NO: 610095 - RNA, 24 nt, Artificial Sequence
  Synthetic
uauuacaaauaacuuagcaaggug

SEQ ID NO: 610096 - RNA, 18 nt, Artificial Sequence
  Synthetic
uuaagagccaagaaggug

SEQ ID NO: 610097 - RNA, 19 nt, Artificial Sequence
  Synthetic
cuuaagagccaagaaggug

SEQ ID NO: 610098 - RNA, 20 nt, Artificial Sequence
  Synthetic
acuuaagagccaagaaggug

SEQ ID NO: 610099 - RNA, 21 nt, Artificial Sequence
  Synthetic
aacuuaagagccaagaaggug

SEQ ID NO: 610100 - RNA, 22 nt, Artificial Sequence
  Synthetic
aaacuuaagagccaagaaggug

SEQ ID NO: 610101 - RNA, 23 nt, Artificial Sequence
  Synthetic
gaaacuuaagagccaagaaggug

SEQ ID NO: 610102 - RNA, 24 nt, Artificial Sequence
  Synthetic
agaaacuuaagagccaagaaggug

SEQ ID NO: 610103 - RNA, 18 nt, Artificial Sequence
  Synthetic
uugugauugcagaaggug

SEQ ID NO: 610104 - RNA, 19 nt, Artificial Sequence
  Synthetic
guugugauugcagaaggug

SEQ ID NO: 610105 - RNA, 20 nt, Artificial Sequence
  Synthetic
gguugugauugcagaaggug

SEQ ID NO: 610106 - RNA, 21 nt, Artificial Sequence
  Synthetic
agguugugauugcagaaggug

SEQ ID NO: 610107 - RNA, 22 nt, Artificial Sequence
  Synthetic
aagguugugauugcagaaggug

SEQ ID NO: 610108 - RNA, 23 nt, Artificial Sequence
  Synthetic
uaagguugugauugcagaaggug

SEQ ID NO: 610109 - RNA, 24 nt, Artificial Sequence
  Synthetic
uuaagguugugauugcagaaggug

SEQ ID NO: 610110 - RNA, 18 nt, Artificial Sequence
  Synthetic
caaucauaguagaaggug

SEQ ID NO: 610111 - RNA, 19 nt, Artificial Sequence
  Synthetic
acaaucauaguagaaggug

SEQ ID NO: 610112 - RNA, 20 nt, Artificial Sequence
  Synthetic
uacaaucauaguagaaggug

SEQ ID NO: 610113 - RNA, 21 nt, Artificial Sequence
  Synthetic
uuacaaucauaguagaaggug

SEQ ID NO: 610114 - RNA, 22 nt, Artificial Sequence
  Synthetic
cuuacaaucauaguagaaggug

SEQ ID NO: 610115 - RNA, 23 nt, Artificial Sequence
  Synthetic
acuuacaaucauaguagaaggug

SEQ ID NO: 610116 - RNA, 24 nt, Artificial Sequence
  Synthetic
aacuuacaaucauaguagaaggug

SEQ ID NO: 610117 - RNA, 18 nt, Artificial Sequence
  Synthetic
auagggguuuggaaggug

SEQ ID NO: 610118 - RNA, 19 nt, Artificial Sequence
  Synthetic
cauagggguuuggaaggug

SEQ ID NO: 610119 - RNA, 20 nt, Artificial Sequence
  Synthetic
ucauagggguuuggaaggug

SEQ ID NO: 610120 - RNA, 21 nt, Artificial Sequence
  Synthetic
gucauagggguuuggaaggug

SEQ ID NO: 610121 - RNA, 22 nt, Artificial Sequence
  Synthetic
agucauagggguuuggaaggug

SEQ ID NO: 610122 - RNA, 23 nt, Artificial Sequence
  Synthetic
gagucauagggguuuggaaggug

SEQ ID NO: 610123 - RNA, 24 nt, Artificial Sequence
  Synthetic
ugagucauagggguuuggaaggug

SEQ ID NO: 610124 - RNA, 18 nt, Artificial Sequence
  Synthetic
cauguguuggugaaggug

SEQ ID NO: 610125 - RNA, 19 nt, Artificial Sequence
  Synthetic
acauguguuggugaaggug

SEQ ID NO: 610126 - RNA, 20 nt, Artificial Sequence
  Synthetic
uacauguguuggugaaggug

SEQ ID NO: 610127 - RNA, 21 nt, Artificial Sequence
  Synthetic
uuacauguguuggugaaggug

SEQ ID NO: 610128 - RNA, 22 nt, Artificial Sequence
  Synthetic
auuacauguguuggugaaggug

SEQ ID NO: 610129 - RNA, 23 nt, Artificial Sequence
  Synthetic
cauuacauguguuggugaaggug

SEQ ID NO: 610130 - RNA, 24 nt, Artificial Sequence
  Synthetic
ucauuacauguguuggugaaggug

SEQ ID NO: 610131 - RNA, 18 nt, Artificial Sequence
  Synthetic
aguagcacauugaaggug

SEQ ID NO: 610132 - RNA, 19 nt, Artificial Sequence
  Synthetic
aaguagcacauugaaggug

SEQ ID NO: 610133 - RNA, 20 nt, Artificial Sequence
  Synthetic
gaaguagcacauugaaggug

SEQ ID NO: 610134 - RNA, 21 nt, Artificial Sequence
  Synthetic
ugaaguagcacauugaaggug

SEQ ID NO: 610135 - RNA, 22 nt, Artificial Sequence
  Synthetic
cugaaguagcacauugaaggug

SEQ ID NO: 610136 - RNA, 23 nt, Artificial Sequence
  Synthetic
acugaaguagcacauugaaggug

SEQ ID NO: 610137 - RNA, 24 nt, Artificial Sequence
  Synthetic
uacugaaguagcacauugaaggug

SEQ ID NO: 610138 - RNA, 18 nt, Artificial Sequence
  Synthetic
augauuucagauaaggug

SEQ ID NO: 610139 - RNA, 19 nt, Artificial Sequence
  Synthetic
uaugauuucagauaaggug

SEQ ID NO: 610140 - RNA, 20 nt, Artificial Sequence
  Synthetic
auaugauuucagauaaggug

SEQ ID NO: 610141 - RNA, 21 nt, Artificial Sequence
  Synthetic
uauaugauuucagauaaggug

SEQ ID NO: 610142 - RNA, 22 nt, Artificial Sequence
  Synthetic
uuauaugauuucagauaaggug

SEQ ID NO: 610143 - RNA, 23 nt, Artificial Sequence
  Synthetic
uuuauaugauuucagauaaggug

SEQ ID NO: 610144 - RNA, 24 nt, Artificial Sequence
  Synthetic
cuuuauaugauuucagauaaggug

SEQ ID NO: 610145 - RNA, 18 nt, Artificial Sequence
  Synthetic
caaucccauccuaaggug

SEQ ID NO: 610146 - RNA, 19 nt, Artificial Sequence
  Synthetic
acaaucccauccuaaggug

SEQ ID NO: 610147 - RNA, 20 nt, Artificial Sequence
  Synthetic
cacaaucccauccuaaggug

SEQ ID NO: 610148 - RNA, 21 nt, Artificial Sequence
  Synthetic
acacaaucccauccuaaggug

SEQ ID NO: 610149 - RNA, 22 nt, Artificial Sequence
  Synthetic
gacacaaucccauccuaaggug

SEQ ID NO: 610150 - RNA, 23 nt, Artificial Sequence
  Synthetic
ggacacaaucccauccuaaggug

SEQ ID NO: 610151 - RNA, 24 nt, Artificial Sequence
  Synthetic
aggacacaaucccauccuaaggug

SEQ ID NO: 610152 - RNA, 18 nt, Artificial Sequence
  Synthetic
aagauacaaauacaggug

SEQ ID NO: 610153 - RNA, 19 nt, Artificial Sequence
  Synthetic
aaagauacaaauacaggug

SEQ ID NO: 610154 - RNA, 20 nt, Artificial Sequence
  Synthetic
uaaagauacaaauacaggug

SEQ ID NO: 610155 - RNA, 21 nt, Artificial Sequence
  Synthetic
uuaaagauacaaauacaggug

SEQ ID NO: 610156 - RNA, 22 nt, Artificial Sequence
  Synthetic
uuuaaagauacaaauacaggug

SEQ ID NO: 610157 - RNA, 23 nt, Artificial Sequence
  Synthetic
cuuuaaagauacaaauacaggug

SEQ ID NO: 610158 - RNA, 24 nt, Artificial Sequence
  Synthetic
ucuuuaaagauacaaauacaggug

SEQ ID NO: 610159 - RNA, 18 nt, Artificial Sequence
  Synthetic
ugacacuagguacaggug

SEQ ID NO: 610160 - RNA, 19 nt, Artificial Sequence
  Synthetic
uugacacuagguacaggug

SEQ ID NO: 610161 - RNA, 20 nt, Artificial Sequence
  Synthetic
auugacacuagguacaggug

SEQ ID NO: 610162 - RNA, 21 nt, Artificial Sequence
  Synthetic
aauugacacuagguacaggug

SEQ ID NO: 610163 - RNA, 22 nt, Artificial Sequence
  Synthetic
gaauugacacuagguacaggug

SEQ ID NO: 610164 - RNA, 23 nt, Artificial Sequence
  Synthetic
agaauugacacuagguacaggug

SEQ ID NO: 610165 - RNA, 24 nt, Artificial Sequence
  Synthetic
gagaauugacacuagguacaggug

SEQ ID NO: 610166 - RNA, 18 nt, Artificial Sequence
  Synthetic
uccuaauguuuacaggug

SEQ ID NO: 610167 - RNA, 19 nt, Artificial Sequence
  Synthetic
uuccuaauguuuacaggug

SEQ ID NO: 610168 - RNA, 20 nt, Artificial Sequence
  Synthetic
cuuccuaauguuuacaggug

SEQ ID NO: 610169 - RNA, 21 nt, Artificial Sequence
  Synthetic
gcuuccuaauguuuacaggug

SEQ ID NO: 610170 - RNA, 22 nt, Artificial Sequence
  Synthetic
agcuuccuaauguuuacaggug

SEQ ID NO: 610171 - RNA, 23 nt, Artificial Sequence
  Synthetic
aagcuuccuaauguuuacaggug

SEQ ID NO: 610172 - RNA, 24 nt, Artificial Sequence
  Synthetic
aaagcuuccuaauguuuacaggug

SEQ ID NO: 610173 - RNA, 18 nt, Artificial Sequence
  Synthetic
aauuuaccauaccaggug

SEQ ID NO: 610174 - RNA, 19 nt, Artificial Sequence
  Synthetic
caauuuaccauaccaggug

SEQ ID NO: 610175 - RNA, 20 nt, Artificial Sequence
  Synthetic
acaauuuaccauaccaggug

SEQ ID NO: 610176 - RNA, 21 nt, Artificial Sequence
  Synthetic
aacaauuuaccauaccaggug

SEQ ID NO: 610177 - RNA, 22 nt, Artificial Sequence
  Synthetic
caacaauuuaccauaccaggug

SEQ ID NO: 610178 - RNA, 23 nt, Artificial Sequence
  Synthetic
ucaacaauuuaccauaccaggug

SEQ ID NO: 610179 - RNA, 24 nt, Artificial Sequence
  Synthetic
aucaacaauuuaccauaccaggug

SEQ ID NO: 610180 - RNA, 18 nt, Artificial Sequence
  Synthetic
auuguggagagccaggug

SEQ ID NO: 610181 - RNA, 19 nt, Artificial Sequence
  Synthetic
aauuguggagagccaggug

SEQ ID NO: 610182 - RNA, 20 nt, Artificial Sequence
  Synthetic
caauuguggagagccaggug

SEQ ID NO: 610183 - RNA, 21 nt, Artificial Sequence
  Synthetic
gcaauuguggagagccaggug

SEQ ID NO: 610184 - RNA, 22 nt, Artificial Sequence
  Synthetic
ggcaauuguggagagccaggug

SEQ ID NO: 610185 - RNA, 23 nt, Artificial Sequence
  Synthetic
gggcaauuguggagagccaggug

SEQ ID NO: 610186 - RNA, 24 nt, Artificial Sequence
  Synthetic
ggggcaauuguggagagccaggug

SEQ ID NO: 610187 - RNA, 18 nt, Artificial Sequence
  Synthetic
acaaaaauuagccaggug

SEQ ID NO: 610188 - RNA, 19 nt, Artificial Sequence
  Synthetic
uacaaaaauuagccaggug

SEQ ID NO: 610189 - RNA, 20 nt, Artificial Sequence
  Synthetic
auacaaaaauuagccaggug

SEQ ID NO: 610190 - RNA, 21 nt, Artificial Sequence
  Synthetic
aauacaaaaauuagccaggug

SEQ ID NO: 610191 - RNA, 22 nt, Artificial Sequence
  Synthetic
aaauacaaaaauuagccaggug

SEQ ID NO: 610192 - RNA, 23 nt, Artificial Sequence
  Synthetic
aaaauacaaaaauuagccaggug

SEQ ID NO: 610193 - RNA, 24 nt, Artificial Sequence
  Synthetic
aaaaauacaaaaauuagccaggug

SEQ ID NO: 610194 - RNA, 18 nt, Artificial Sequence
  Synthetic
uucaaaugccagcaggug

SEQ ID NO: 610195 - RNA, 19 nt, Artificial Sequence
  Synthetic
uuucaaaugccagcaggug

SEQ ID NO: 610196 - RNA, 20 nt, Artificial Sequence
  Synthetic
uuuucaaaugccagcaggug

SEQ ID NO: 610197 - RNA, 21 nt, Artificial Sequence
  Synthetic
auuuucaaaugccagcaggug

SEQ ID NO: 610198 - RNA, 22 nt, Artificial Sequence
  Synthetic
cauuuucaaaugccagcaggug

SEQ ID NO: 610199 - RNA, 23 nt, Artificial Sequence
  Synthetic
gcauuuucaaaugccagcaggug

SEQ ID NO: 610200 - RNA, 24 nt, Artificial Sequence
  Synthetic
ugcauuuucaaaugccagcaggug

SEQ ID NO: 610201 - RNA, 18 nt, Artificial Sequence
  Synthetic
ggcaauuucuggcaggug

SEQ ID NO: 610202 - RNA, 19 nt, Artificial Sequence
  Synthetic
gggcaauuucuggcaggug

SEQ ID NO: 610203 - RNA, 20 nt, Artificial Sequence
  Synthetic
ggggcaauuucuggcaggug

SEQ ID NO: 610204 - RNA, 21 nt, Artificial Sequence
  Synthetic
uggggcaauuucuggcaggug

SEQ ID NO: 610205 - RNA, 22 nt, Artificial Sequence
  Synthetic
guggggcaauuucuggcaggug

SEQ ID NO: 610206 - RNA, 23 nt, Artificial Sequence
  Synthetic
aguggggcaauuucuggcaggug

SEQ ID NO: 610207 - RNA, 24 nt, Artificial Sequence
  Synthetic
gaguggggcaauuucuggcaggug

SEQ ID NO: 610208 - RNA, 18 nt, Artificial Sequence
  Synthetic
aaaaaaaaauugcaggug

SEQ ID NO: 610209 - RNA, 19 nt, Artificial Sequence
  Synthetic
gaaaaaaaaauugcaggug

SEQ ID NO: 610210 - RNA, 20 nt, Artificial Sequence
  Synthetic
ggaaaaaaaaauugcaggug

SEQ ID NO: 610211 - RNA, 21 nt, Artificial Sequence
  Synthetic
uggaaaaaaaaauugcaggug

SEQ ID NO: 610212 - RNA, 22 nt, Artificial Sequence
  Synthetic
auggaaaaaaaaauugcaggug

SEQ ID NO: 610213 - RNA, 23 nt, Artificial Sequence
  Synthetic
uauggaaaaaaaaauugcaggug

SEQ ID NO: 610214 - RNA, 24 nt, Artificial Sequence
  Synthetic
uuauggaaaaaaaaauugcaggug

SEQ ID NO: 610215 - RNA, 18 nt, Artificial Sequence
  Synthetic
cuguacacagaagaggug

SEQ ID NO: 610216 - RNA, 19 nt, Artificial Sequence
  Synthetic
ucuguacacagaagaggug

SEQ ID NO: 610217 - RNA, 20 nt, Artificial Sequence
  Synthetic
cucuguacacagaagaggug

SEQ ID NO: 610218 - RNA, 21 nt, Artificial Sequence
  Synthetic
gcucuguacacagaagaggug

SEQ ID NO: 610219 - RNA, 22 nt, Artificial Sequence
  Synthetic
ugcucuguacacagaagaggug

SEQ ID NO: 610220 - RNA, 23 nt, Artificial Sequence
  Synthetic
gugcucuguacacagaagaggug

SEQ ID NO: 610221 - RNA, 24 nt, Artificial Sequence
  Synthetic
agugcucuguacacagaagaggug

SEQ ID NO: 610222 - RNA, 18 nt, Artificial Sequence
  Synthetic
cgcuuuccagaagaggug

SEQ ID NO: 610223 - RNA, 19 nt, Artificial Sequence
  Synthetic
acgcuuuccagaagaggug

SEQ ID NO: 610224 - RNA, 20 nt, Artificial Sequence
  Synthetic
gacgcuuuccagaagaggug

SEQ ID NO: 610225 - RNA, 21 nt, Artificial Sequence
  Synthetic
ggacgcuuuccagaagaggug

SEQ ID NO: 610226 - RNA, 22 nt, Artificial Sequence
  Synthetic
gggacgcuuuccagaagaggug

SEQ ID NO: 610227 - RNA, 23 nt, Artificial Sequence
  Synthetic
ggggacgcuuuccagaagaggug

SEQ ID NO: 610228 - RNA, 24 nt, Artificial Sequence
  Synthetic
aggggacgcuuuccagaagaggug

SEQ ID NO: 610229 - RNA, 18 nt, Artificial Sequence
  Synthetic
cucucacaugaagaggug

SEQ ID NO: 610230 - RNA, 19 nt, Artificial Sequence
  Synthetic
gcucucacaugaagaggug

SEQ ID NO: 610231 - RNA, 20 nt, Artificial Sequence
  Synthetic
ugcucucacaugaagaggug

SEQ ID NO: 610232 - RNA, 21 nt, Artificial Sequence
  Synthetic
augcucucacaugaagaggug

SEQ ID NO: 610233 - RNA, 22 nt, Artificial Sequence
  Synthetic
gaugcucucacaugaagaggug

SEQ ID NO: 610234 - RNA, 23 nt, Artificial Sequence
  Synthetic
ugaugcucucacaugaagaggug

SEQ ID NO: 610235 - RNA, 24 nt, Artificial Sequence
  Synthetic
cugaugcucucacaugaagaggug

SEQ ID NO: 610236 - RNA, 18 nt, Artificial Sequence
  Synthetic
ugugcuacugaagaggug

SEQ ID NO: 610237 - RNA, 19 nt, Artificial Sequence
  Synthetic
augugcuacugaagaggug

SEQ ID NO: 610238 - RNA, 20 nt, Artificial Sequence
  Synthetic
caugugcuacugaagaggug

SEQ ID NO: 610239 - RNA, 21 nt, Artificial Sequence
  Synthetic
acaugugcuacugaagaggug

SEQ ID NO: 610240 - RNA, 22 nt, Artificial Sequence
  Synthetic
uacaugugcuacugaagaggug

SEQ ID NO: 610241 - RNA, 23 nt, Artificial Sequence
  Synthetic
guacaugugcuacugaagaggug

SEQ ID NO: 610242 - RNA, 24 nt, Artificial Sequence
  Synthetic
aguacaugugcuacugaagaggug

SEQ ID NO: 610243 - RNA, 18 nt, Artificial Sequence
  Synthetic
uuccuccuuccagaggug

SEQ ID NO: 610244 - RNA, 19 nt, Artificial Sequence
  Synthetic
auuccuccuuccagaggug

SEQ ID NO: 610245 - RNA, 20 nt, Artificial Sequence
  Synthetic
uauuccuccuuccagaggug

SEQ ID NO: 610246 - RNA, 21 nt, Artificial Sequence
  Synthetic
uuauuccuccuuccagaggug

SEQ ID NO: 610247 - RNA, 22 nt, Artificial Sequence
  Synthetic
auuauuccuccuuccagaggug

SEQ ID NO: 610248 - RNA, 23 nt, Artificial Sequence
  Synthetic
gauuauuccuccuuccagaggug

SEQ ID NO: 610249 - RNA, 24 nt, Artificial Sequence
  Synthetic
agauuauuccuccuuccagaggug

SEQ ID NO: 610250 - RNA, 18 nt, Artificial Sequence
  Synthetic
aucucaaguucagaggug

SEQ ID NO: 610251 - RNA, 19 nt, Artificial Sequence
  Synthetic
uaucucaaguucagaggug

SEQ ID NO: 610252 - RNA, 20 nt, Artificial Sequence
  Synthetic
auaucucaaguucagaggug

SEQ ID NO: 610253 - RNA, 21 nt, Artificial Sequence
  Synthetic
uauaucucaaguucagaggug

SEQ ID NO: 610254 - RNA, 22 nt, Artificial Sequence
  Synthetic
auauaucucaaguucagaggug

SEQ ID NO: 610255 - RNA, 23 nt, Artificial Sequence
  Synthetic
gauauaucucaaguucagaggug

SEQ ID NO: 610256 - RNA, 24 nt, Artificial Sequence
  Synthetic
cgauauaucucaaguucagaggug

SEQ ID NO: 610257 - RNA, 18 nt, Artificial Sequence
  Synthetic
ugaaugcugagagaggug

SEQ ID NO: 610258 - RNA, 19 nt, Artificial Sequence
  Synthetic
augaaugcugagagaggug

SEQ ID NO: 610259 - RNA, 20 nt, Artificial Sequence
  Synthetic
uaugaaugcugagagaggug

SEQ ID NO: 610260 - RNA, 21 nt, Artificial Sequence
  Synthetic
guaugaaugcugagagaggug

SEQ ID NO: 610261 - RNA, 22 nt, Artificial Sequence
  Synthetic
uguaugaaugcugagagaggug

SEQ ID NO: 610262 - RNA, 23 nt, Artificial Sequence
  Synthetic
uuguaugaaugcugagagaggug

SEQ ID NO: 610263 - RNA, 24 nt, Artificial Sequence
  Synthetic
guuguaugaaugcugagagaggug

SEQ ID NO: 610264 - RNA, 18 nt, Artificial Sequence
  Synthetic
gggggugugagggaggug

SEQ ID NO: 610265 - RNA, 19 nt, Artificial Sequence
  Synthetic
ugggggugugagggaggug

SEQ ID NO: 610266 - RNA, 20 nt, Artificial Sequence
  Synthetic
cugggggugugagggaggug

SEQ ID NO: 610267 - RNA, 21 nt, Artificial Sequence
  Synthetic
gcugggggugugagggaggug

SEQ ID NO: 610268 - RNA, 22 nt, Artificial Sequence
  Synthetic
ugcugggggugugagggaggug

SEQ ID NO: 610269 - RNA, 23 nt, Artificial Sequence
  Synthetic
augcugggggugugagggaggug

SEQ ID NO: 610270 - RNA, 24 nt, Artificial Sequence
  Synthetic
uaugcugggggugugagggaggug

SEQ ID NO: 610271 - RNA, 18 nt, Artificial Sequence
  Synthetic
gaauuuauagaugaggug

SEQ ID NO: 610272 - RNA, 19 nt, Artificial Sequence
  Synthetic
agaauuuauagaugaggug

SEQ ID NO: 610273 - RNA, 20 nt, Artificial Sequence
  Synthetic
cagaauuuauagaugaggug

SEQ ID NO: 610274 - RNA, 21 nt, Artificial Sequence
  Synthetic
gcagaauuuauagaugaggug

SEQ ID NO: 610275 - RNA, 22 nt, Artificial Sequence
  Synthetic
agcagaauuuauagaugaggug

SEQ ID NO: 610276 - RNA, 23 nt, Artificial Sequence
  Synthetic
aagcagaauuuauagaugaggug

SEQ ID NO: 610277 - RNA, 24 nt, Artificial Sequence
  Synthetic
gaagcagaauuuauagaugaggug

SEQ ID NO: 610278 - RNA, 18 nt, Artificial Sequence
  Synthetic
uuauuggccugugaggug

SEQ ID NO: 610279 - RNA, 19 nt, Artificial Sequence
  Synthetic
uuuauuggccugugaggug

SEQ ID NO: 610280 - RNA, 20 nt, Artificial Sequence
  Synthetic
uuuuauuggccugugaggug

SEQ ID NO: 610281 - RNA, 21 nt, Artificial Sequence
  Synthetic
auuuuauuggccugugaggug

SEQ ID NO: 610282 - RNA, 22 nt, Artificial Sequence
  Synthetic
uauuuuauuggccugugaggug

SEQ ID NO: 610283 - RNA, 23 nt, Artificial Sequence
  Synthetic
uuauuuuauuggccugugaggug

SEQ ID NO: 610284 - RNA, 24 nt, Artificial Sequence
  Synthetic
auuauuuuauuggccugugaggug

SEQ ID NO: 610285 - RNA, 18 nt, Artificial Sequence
  Synthetic
ugaagcccaaaauaggug

SEQ ID NO: 610286 - RNA, 19 nt, Artificial Sequence
  Synthetic
augaagcccaaaauaggug

SEQ ID NO: 610287 - RNA, 20 nt, Artificial Sequence
  Synthetic
aaugaagcccaaaauaggug

SEQ ID NO: 610288 - RNA, 21 nt, Artificial Sequence
  Synthetic
aaaugaagcccaaaauaggug

SEQ ID NO: 610289 - RNA, 22 nt, Artificial Sequence
  Synthetic
gaaaugaagcccaaaauaggug

SEQ ID NO: 610290 - RNA, 23 nt, Artificial Sequence
  Synthetic
ggaaaugaagcccaaaauaggug

SEQ ID NO: 610291 - RNA, 24 nt, Artificial Sequence
  Synthetic
gggaaaugaagcccaaaauaggug

SEQ ID NO: 610292 - RNA, 18 nt, Artificial Sequence
  Synthetic
uauuucugaaaauaggug

SEQ ID NO: 610293 - RNA, 19 nt, Artificial Sequence
  Synthetic
uuauuucugaaaauaggug

SEQ ID NO: 610294 - RNA, 20 nt, Artificial Sequence
  Synthetic
uuuauuucugaaaauaggug

SEQ ID NO: 610295 - RNA, 21 nt, Artificial Sequence
  Synthetic
cuuuauuucugaaaauaggug

SEQ ID NO: 610296 - RNA, 22 nt, Artificial Sequence
  Synthetic
ucuuuauuucugaaaauaggug

SEQ ID NO: 610297 - RNA, 23 nt, Artificial Sequence
  Synthetic
cucuuuauuucugaaaauaggug

SEQ ID NO: 610298 - RNA, 24 nt, Artificial Sequence
  Synthetic
acucuuuauuucugaaaauaggug

SEQ ID NO: 610299 - RNA, 18 nt, Artificial Sequence
  Synthetic
aaaaggaacaaauaggug

SEQ ID NO: 610300 - RNA, 19 nt, Artificial Sequence
  Synthetic
gaaaaggaacaaauaggug

SEQ ID NO: 610301 - RNA, 20 nt, Artificial Sequence
  Synthetic
agaaaaggaacaaauaggug

SEQ ID NO: 610302 - RNA, 21 nt, Artificial Sequence
  Synthetic
uagaaaaggaacaaauaggug

SEQ ID NO: 610303 - RNA, 22 nt, Artificial Sequence
  Synthetic
auagaaaaggaacaaauaggug

SEQ ID NO: 610304 - RNA, 23 nt, Artificial Sequence
  Synthetic
gauagaaaaggaacaaauaggug

SEQ ID NO: 610305 - RNA, 24 nt, Artificial Sequence
  Synthetic
agauagaaaaggaacaaauaggug

SEQ ID NO: 610306 - RNA, 18 nt, Artificial Sequence
  Synthetic
aaacauauauaauaggug

SEQ ID NO: 610307 - RNA, 19 nt, Artificial Sequence
  Synthetic
aaaacauauauaauaggug

SEQ ID NO: 610308 - RNA, 20 nt, Artificial Sequence
  Synthetic
caaaacauauauaauaggug

SEQ ID NO: 610309 - RNA, 21 nt, Artificial Sequence
  Synthetic
acaaaacauauauaauaggug

SEQ ID NO: 610310 - RNA, 22 nt, Artificial Sequence
  Synthetic
cacaaaacauauauaauaggug

SEQ ID NO: 610311 - RNA, 23 nt, Artificial Sequence
  Synthetic
acacaaaacauauauaauaggug

SEQ ID NO: 610312 - RNA, 24 nt, Artificial Sequence
  Synthetic
aacacaaaacauauauaauaggug

SEQ ID NO: 610313 - RNA, 18 nt, Artificial Sequence
  Synthetic
aucgcuugaaccuaggug

SEQ ID NO: 610314 - RNA, 19 nt, Artificial Sequence
  Synthetic
aaucgcuugaaccuaggug

SEQ ID NO: 610315 - RNA, 20 nt, Artificial Sequence
  Synthetic
gaaucgcuugaaccuaggug

SEQ ID NO: 610316 - RNA, 21 nt, Artificial Sequence
  Synthetic
agaaucgcuugaaccuaggug

SEQ ID NO: 610317 - RNA, 22 nt, Artificial Sequence
  Synthetic
gagaaucgcuugaaccuaggug

SEQ ID NO: 610318 - RNA, 23 nt, Artificial Sequence
  Synthetic
ggagaaucgcuugaaccuaggug

SEQ ID NO: 610319 - RNA, 24 nt, Artificial Sequence
  Synthetic
aggagaaucgcuugaaccuaggug

SEQ ID NO: 610320 - RNA, 18 nt, Artificial Sequence
  Synthetic
aggauuaauaccuaggug

SEQ ID NO: 610321 - RNA, 19 nt, Artificial Sequence
  Synthetic
caggauuaauaccuaggug

SEQ ID NO: 610322 - RNA, 20 nt, Artificial Sequence
  Synthetic
ccaggauuaauaccuaggug

SEQ ID NO: 610323 - RNA, 21 nt, Artificial Sequence
  Synthetic
accaggauuaauaccuaggug

SEQ ID NO: 610324 - RNA, 22 nt, Artificial Sequence
  Synthetic
uaccaggauuaauaccuaggug

SEQ ID NO: 610325 - RNA, 23 nt, Artificial Sequence
  Synthetic
guaccaggauuaauaccuaggug

SEQ ID NO: 610326 - RNA, 24 nt, Artificial Sequence
  Synthetic
gguaccaggauuaauaccuaggug

SEQ ID NO: 610327 - RNA, 18 nt, Artificial Sequence
  Synthetic
cacucauugagcuaggug

SEQ ID NO: 610328 - RNA, 19 nt, Artificial Sequence
  Synthetic
ucacucauugagcuaggug

SEQ ID NO: 610329 - RNA, 20 nt, Artificial Sequence
  Synthetic
gucacucauugagcuaggug

SEQ ID NO: 610330 - RNA, 21 nt, Artificial Sequence
  Synthetic
ugucacucauugagcuaggug

SEQ ID NO: 610331 - RNA, 22 nt, Artificial Sequence
  Synthetic
gugucacucauugagcuaggug

SEQ ID NO: 610332 - RNA, 23 nt, Artificial Sequence
  Synthetic
ugugucacucauugagcuaggug

SEQ ID NO: 610333 - RNA, 24 nt, Artificial Sequence
  Synthetic
uugugucacucauugagcuaggug

SEQ ID NO: 610334 - RNA, 18 nt, Artificial Sequence
  Synthetic
cauauugaaaaguaggug

SEQ ID NO: 610335 - RNA, 19 nt, Artificial Sequence
  Synthetic
acauauugaaaaguaggug

SEQ ID NO: 610336 - RNA, 20 nt, Artificial Sequence
  Synthetic
gacauauugaaaaguaggug

SEQ ID NO: 610337 - RNA, 21 nt, Artificial Sequence
  Synthetic
ggacauauugaaaaguaggug

SEQ ID NO: 610338 - RNA, 22 nt, Artificial Sequence
  Synthetic
aggacauauugaaaaguaggug

SEQ ID NO: 610339 - RNA, 23 nt, Artificial Sequence
  Synthetic
caggacauauugaaaaguaggug

SEQ ID NO: 610340 - RNA, 24 nt, Artificial Sequence
  Synthetic
gcaggacauauugaaaaguaggug

SEQ ID NO: 610341 - RNA, 18 nt, Artificial Sequence
  Synthetic
uaauuugcugauuaggug

SEQ ID NO: 610342 - RNA, 19 nt, Artificial Sequence
  Synthetic
cuaauuugcugauuaggug

SEQ ID NO: 610343 - RNA, 20 nt, Artificial Sequence
  Synthetic
acuaauuugcugauuaggug

SEQ ID NO: 610344 - RNA, 21 nt, Artificial Sequence
  Synthetic
uacuaauuugcugauuaggug

SEQ ID NO: 610345 - RNA, 22 nt, Artificial Sequence
  Synthetic
guacuaauuugcugauuaggug

SEQ ID NO: 610346 - RNA, 23 nt, Artificial Sequence
  Synthetic
aguacuaauuugcugauuaggug

SEQ ID NO: 610347 - RNA, 24 nt, Artificial Sequence
  Synthetic
caguacuaauuugcugauuaggug

SEQ ID NO: 610348 - RNA, 18 nt, Artificial Sequence
  Synthetic
uucaucuuugauuaggug

SEQ ID NO: 610349 - RNA, 19 nt, Artificial Sequence
  Synthetic
uuucaucuuugauuaggug

SEQ ID NO: 610350 - RNA, 20 nt, Artificial Sequence
  Synthetic
auuucaucuuugauuaggug

SEQ ID NO: 610351 - RNA, 21 nt, Artificial Sequence
  Synthetic
uauuucaucuuugauuaggug

SEQ ID NO: 610352 - RNA, 22 nt, Artificial Sequence
  Synthetic
auauuucaucuuugauuaggug

SEQ ID NO: 610353 - RNA, 23 nt, Artificial Sequence
  Synthetic
cauauuucaucuuugauuaggug

SEQ ID NO: 610354 - RNA, 24 nt, Artificial Sequence
  Synthetic
acauauuucaucuuugauuaggug

SEQ ID NO: 610355 - RNA, 18 nt, Artificial Sequence
  Synthetic
ccuauuuaauaaacggug

SEQ ID NO: 610356 - RNA, 19 nt, Artificial Sequence
  Synthetic
cccuauuuaauaaacggug

SEQ ID NO: 610357 - RNA, 20 nt, Artificial Sequence
  Synthetic
ucccuauuuaauaaacggug

SEQ ID NO: 610358 - RNA, 21 nt, Artificial Sequence
  Synthetic
uucccuauuuaauaaacggug

SEQ ID NO: 610359 - RNA, 22 nt, Artificial Sequence
  Synthetic
auucccuauuuaauaaacggug

SEQ ID NO: 610360 - RNA, 23 nt, Artificial Sequence
  Synthetic
gauucccuauuuaauaaacggug

SEQ ID NO: 610361 - RNA, 24 nt, Artificial Sequence
  Synthetic
ggauucccuauuuaauaaacggug

SEQ ID NO: 610362 - RNA, 18 nt, Artificial Sequence
  Synthetic
uggcuuaauaccucggug

SEQ ID NO: 610363 - RNA, 19 nt, Artificial Sequence
  Synthetic
uuggcuuaauaccucggug

SEQ ID NO: 610364 - RNA, 20 nt, Artificial Sequence
  Synthetic
guuggcuuaauaccucggug

SEQ ID NO: 610365 - RNA, 21 nt, Artificial Sequence
  Synthetic
aguuggcuuaauaccucggug

SEQ ID NO: 610366 - RNA, 22 nt, Artificial Sequence
  Synthetic
uaguuggcuuaauaccucggug

SEQ ID NO: 610367 - RNA, 23 nt, Artificial Sequence
  Synthetic
guaguuggcuuaauaccucggug

SEQ ID NO: 610368 - RNA, 24 nt, Artificial Sequence
  Synthetic
aguaguuggcuuaauaccucggug

SEQ ID NO: 610369 - RNA, 18 nt, Artificial Sequence
  Synthetic
aagaaagugccuucggug

SEQ ID NO: 610370 - RNA, 19 nt, Artificial Sequence
  Synthetic
uaagaaagugccuucggug

SEQ ID NO: 610371 - RNA, 20 nt, Artificial Sequence
  Synthetic
cuaagaaagugccuucggug

SEQ ID NO: 610372 - RNA, 21 nt, Artificial Sequence
  Synthetic
ucuaagaaagugccuucggug

SEQ ID NO: 610373 - RNA, 22 nt, Artificial Sequence
  Synthetic
aucuaagaaagugccuucggug

SEQ ID NO: 610374 - RNA, 23 nt, Artificial Sequence
  Synthetic
aaucuaagaaagugccuucggug

SEQ ID NO: 610375 - RNA, 24 nt, Artificial Sequence
  Synthetic
gaaucuaagaaagugccuucggug

SEQ ID NO: 610376 - RNA, 18 nt, Artificial Sequence
  Synthetic
ggcuuuaucagaagggug

SEQ ID NO: 610377 - RNA, 19 nt, Artificial Sequence
  Synthetic
aggcuuuaucagaagggug

SEQ ID NO: 610378 - RNA, 20 nt, Artificial Sequence
  Synthetic
gaggcuuuaucagaagggug

SEQ ID NO: 610379 - RNA, 21 nt, Artificial Sequence
  Synthetic
ggaggcuuuaucagaagggug

SEQ ID NO: 610380 - RNA, 22 nt, Artificial Sequence
  Synthetic
uggaggcuuuaucagaagggug

SEQ ID NO: 610381 - RNA, 23 nt, Artificial Sequence
  Synthetic
guggaggcuuuaucagaagggug

SEQ ID NO: 610382 - RNA, 24 nt, Artificial Sequence
  Synthetic
uguggaggcuuuaucagaagggug

SEQ ID NO: 610383 - RNA, 18 nt, Artificial Sequence
  Synthetic
uugacuugcagcagggug

SEQ ID NO: 610384 - RNA, 19 nt, Artificial Sequence
  Synthetic
uuugacuugcagcagggug

SEQ ID NO: 610385 - RNA, 20 nt, Artificial Sequence
  Synthetic
uuuugacuugcagcagggug

SEQ ID NO: 610386 - RNA, 21 nt, Artificial Sequence
  Synthetic
auuuugacuugcagcagggug

SEQ ID NO: 610387 - RNA, 22 nt, Artificial Sequence
  Synthetic
gauuuugacuugcagcagggug

SEQ ID NO: 610388 - RNA, 23 nt, Artificial Sequence
  Synthetic
ugauuuugacuugcagcagggug

SEQ ID NO: 610389 - RNA, 24 nt, Artificial Sequence
  Synthetic
uugauuuugacuugcagcagggug

SEQ ID NO: 610390 - RNA, 18 nt, Artificial Sequence
  Synthetic
ugacuaaaauucagggug

SEQ ID NO: 610391 - RNA, 19 nt, Artificial Sequence
  Synthetic
augacuaaaauucagggug

SEQ ID NO: 610392 - RNA, 20 nt, Artificial Sequence
  Synthetic
uaugacuaaaauucagggug

SEQ ID NO: 610393 - RNA, 21 nt, Artificial Sequence
  Synthetic
guaugacuaaaauucagggug

SEQ ID NO: 610394 - RNA, 22 nt, Artificial Sequence
  Synthetic
uguaugacuaaaauucagggug

SEQ ID NO: 610395 - RNA, 23 nt, Artificial Sequence
  Synthetic
auguaugacuaaaauucagggug

SEQ ID NO: 610396 - RNA, 24 nt, Artificial Sequence
  Synthetic
cauguaugacuaaaauucagggug

SEQ ID NO: 610397 - RNA, 18 nt, Artificial Sequence
  Synthetic
aagucaguugagagggug

SEQ ID NO: 610398 - RNA, 19 nt, Artificial Sequence
  Synthetic
aaagucaguugagagggug

SEQ ID NO: 610399 - RNA, 20 nt, Artificial Sequence
  Synthetic
aaaagucaguugagagggug

SEQ ID NO: 610400 - RNA, 21 nt, Artificial Sequence
  Synthetic
gaaaagucaguugagagggug

SEQ ID NO: 610401 - RNA, 22 nt, Artificial Sequence
  Synthetic
agaaaagucaguugagagggug

SEQ ID NO: 610402 - RNA, 23 nt, Artificial Sequence
  Synthetic
gagaaaagucaguugagagggug

SEQ ID NO: 610403 - RNA, 24 nt, Artificial Sequence
  Synthetic
ugagaaaagucaguugagagggug

SEQ ID NO: 610404 - RNA, 18 nt, Artificial Sequence
  Synthetic
ucacuuagugauagggug

SEQ ID NO: 610405 - RNA, 19 nt, Artificial Sequence
  Synthetic
gucacuuagugauagggug

SEQ ID NO: 610406 - RNA, 20 nt, Artificial Sequence
  Synthetic
ugucacuuagugauagggug

SEQ ID NO: 610407 - RNA, 21 nt, Artificial Sequence
  Synthetic
cugucacuuagugauagggug

SEQ ID NO: 610408 - RNA, 22 nt, Artificial Sequence
  Synthetic
ccugucacuuagugauagggug

SEQ ID NO: 610409 - RNA, 23 nt, Artificial Sequence
  Synthetic
gccugucacuuagugauagggug

SEQ ID NO: 610410 - RNA, 24 nt, Artificial Sequence
  Synthetic
agccugucacuuagugauagggug

SEQ ID NO: 610411 - RNA, 18 nt, Artificial Sequence
  Synthetic
auuccagagucuagggug

SEQ ID NO: 610412 - RNA, 19 nt, Artificial Sequence
  Synthetic
aauuccagagucuagggug

SEQ ID NO: 610413 - RNA, 20 nt, Artificial Sequence
  Synthetic
aaauuccagagucuagggug

SEQ ID NO: 610414 - RNA, 21 nt, Artificial Sequence
  Synthetic
gaaauuccagagucuagggug

SEQ ID NO: 610415 - RNA, 22 nt, Artificial Sequence
  Synthetic
ugaaauuccagagucuagggug

SEQ ID NO: 610416 - RNA, 23 nt, Artificial Sequence
  Synthetic
cugaaauuccagagucuagggug

SEQ ID NO: 610417 - RNA, 24 nt, Artificial Sequence
  Synthetic
acugaaauuccagagucuagggug

SEQ ID NO: 610418 - RNA, 18 nt, Artificial Sequence
  Synthetic
uuuuucaacuuuagggug

SEQ ID NO: 610419 - RNA, 19 nt, Artificial Sequence
  Synthetic
auuuuucaacuuuagggug

SEQ ID NO: 610420 - RNA, 20 nt, Artificial Sequence
  Synthetic
gauuuuucaacuuuagggug

SEQ ID NO: 610421 - RNA, 21 nt, Artificial Sequence
  Synthetic
ugauuuuucaacuuuagggug

SEQ ID NO: 610422 - RNA, 22 nt, Artificial Sequence
  Synthetic
gugauuuuucaacuuuagggug

SEQ ID NO: 610423 - RNA, 23 nt, Artificial Sequence
  Synthetic
agugauuuuucaacuuuagggug

SEQ ID NO: 610424 - RNA, 24 nt, Artificial Sequence
  Synthetic
uagugauuuuucaacuuuagggug

SEQ ID NO: 610425 - RNA, 18 nt, Artificial Sequence
  Synthetic
ggggccuguuggcgggug

SEQ ID NO: 610426 - RNA, 19 nt, Artificial Sequence
  Synthetic
aggggccuguuggcgggug

SEQ ID NO: 610427 - RNA, 20 nt, Artificial Sequence
  Synthetic
caggggccuguuggcgggug

SEQ ID NO: 610428 - RNA, 21 nt, Artificial Sequence
  Synthetic
gcaggggccuguuggcgggug

SEQ ID NO: 610429 - RNA, 22 nt, Artificial Sequence
  Synthetic
cgcaggggccuguuggcgggug

SEQ ID NO: 610430 - RNA, 23 nt, Artificial Sequence
  Synthetic
ccgcaggggccuguuggcgggug

SEQ ID NO: 610431 - RNA, 24 nt, Artificial Sequence
  Synthetic
gccgcaggggccuguuggcgggug

SEQ ID NO: 610432 - RNA, 18 nt, Artificial Sequence
  Synthetic
ggggguagaaaaggggug

SEQ ID NO: 610433 - RNA, 19 nt, Artificial Sequence
  Synthetic
gggggguagaaaaggggug

SEQ ID NO: 610434 - RNA, 20 nt, Artificial Sequence
  Synthetic
ugggggguagaaaaggggug

SEQ ID NO: 610435 - RNA, 21 nt, Artificial Sequence
  Synthetic
uugggggguagaaaaggggug

SEQ ID NO: 610436 - RNA, 22 nt, Artificial Sequence
  Synthetic
cuugggggguagaaaaggggug

SEQ ID NO: 610437 - RNA, 23 nt, Artificial Sequence
  Synthetic
acuugggggguagaaaaggggug

SEQ ID NO: 610438 - RNA, 24 nt, Artificial Sequence
  Synthetic
gacuugggggguagaaaaggggug

SEQ ID NO: 610439 - RNA, 18 nt, Artificial Sequence
  Synthetic
ggggccugucaaggggug

SEQ ID NO: 610440 - RNA, 19 nt, Artificial Sequence
  Synthetic
cggggccugucaaggggug

SEQ ID NO: 610441 - RNA, 20 nt, Artificial Sequence
  Synthetic
ccggggccugucaaggggug

SEQ ID NO: 610442 - RNA, 21 nt, Artificial Sequence
  Synthetic
accggggccugucaaggggug

SEQ ID NO: 610443 - RNA, 22 nt, Artificial Sequence
  Synthetic
caccggggccugucaaggggug

SEQ ID NO: 610444 - RNA, 23 nt, Artificial Sequence
  Synthetic
acaccggggccugucaaggggug

SEQ ID NO: 610445 - RNA, 24 nt, Artificial Sequence
  Synthetic
cacaccggggccugucaaggggug

SEQ ID NO: 610446 - RNA, 18 nt, Artificial Sequence
  Synthetic
gaagaagaagaaggggug

SEQ ID NO: 610447 - RNA, 19 nt, Artificial Sequence
  Synthetic
ggaagaagaagaaggggug

SEQ ID NO: 610448 - RNA, 20 nt, Artificial Sequence
  Synthetic
uggaagaagaagaaggggug

SEQ ID NO: 610449 - RNA, 21 nt, Artificial Sequence
  Synthetic
guggaagaagaagaaggggug

SEQ ID NO: 610450 - RNA, 22 nt, Artificial Sequence
  Synthetic
aguggaagaagaagaaggggug

SEQ ID NO: 610451 - RNA, 23 nt, Artificial Sequence
  Synthetic
gaguggaagaagaagaaggggug

SEQ ID NO: 610452 - RNA, 24 nt, Artificial Sequence
  Synthetic
ggaguggaagaagaagaaggggug

SEQ ID NO: 610453 - RNA, 18 nt, Artificial Sequence
  Synthetic
uagucacauggaggggug

SEQ ID NO: 610454 - RNA, 19 nt, Artificial Sequence
  Synthetic
auagucacauggaggggug

SEQ ID NO: 610455 - RNA, 20 nt, Artificial Sequence
  Synthetic
uauagucacauggaggggug

SEQ ID NO: 610456 - RNA, 21 nt, Artificial Sequence
  Synthetic
guauagucacauggaggggug

SEQ ID NO: 610457 - RNA, 22 nt, Artificial Sequence
  Synthetic
cguauagucacauggaggggug

SEQ ID NO: 610458 - RNA, 23 nt, Artificial Sequence
  Synthetic
acguauagucacauggaggggug

SEQ ID NO: 610459 - RNA, 24 nt, Artificial Sequence
  Synthetic
uacguauagucacauggaggggug

SEQ ID NO: 610460 - RNA, 18 nt, Artificial Sequence
  Synthetic
gguacagguggaggggug

SEQ ID NO: 610461 - RNA, 19 nt, Artificial Sequence
  Synthetic
agguacagguggaggggug

SEQ ID NO: 610462 - RNA, 20 nt, Artificial Sequence
  Synthetic
uagguacagguggaggggug

SEQ ID NO: 610463 - RNA, 21 nt, Artificial Sequence
  Synthetic
cuagguacagguggaggggug

SEQ ID NO: 610464 - RNA, 22 nt, Artificial Sequence
  Synthetic
acuagguacagguggaggggug

SEQ ID NO: 610465 - RNA, 23 nt, Artificial Sequence
  Synthetic
cacuagguacagguggaggggug

SEQ ID NO: 610466 - RNA, 24 nt, Artificial Sequence
  Synthetic
acacuagguacagguggaggggug

SEQ ID NO: 610467 - RNA, 18 nt, Artificial Sequence
  Synthetic
uauaacauccucggggug

SEQ ID NO: 610468 - RNA, 19 nt, Artificial Sequence
  Synthetic
cuauaacauccucggggug

SEQ ID NO: 610469 - RNA, 20 nt, Artificial Sequence
  Synthetic
gcuauaacauccucggggug

SEQ ID NO: 610470 - RNA, 21 nt, Artificial Sequence
  Synthetic
agcuauaacauccucggggug

SEQ ID NO: 610471 - RNA, 22 nt, Artificial Sequence
  Synthetic
aagcuauaacauccucggggug

SEQ ID NO: 610472 - RNA, 23 nt, Artificial Sequence
  Synthetic
uaagcuauaacauccucggggug

SEQ ID NO: 610473 - RNA, 24 nt, Artificial Sequence
  Synthetic
cuaagcuauaacauccucggggug

SEQ ID NO: 610474 - RNA, 18 nt, Artificial Sequence
  Synthetic
gcuauaaagaagggggug

SEQ ID NO: 610475 - RNA, 19 nt, Artificial Sequence
  Synthetic
agcuauaaagaagggggug

SEQ ID NO: 610476 - RNA, 20 nt, Artificial Sequence
  Synthetic
aagcuauaaagaagggggug

SEQ ID NO: 610477 - RNA, 21 nt, Artificial Sequence
  Synthetic
uaagcuauaaagaagggggug

SEQ ID NO: 610478 - RNA, 22 nt, Artificial Sequence
  Synthetic
guaagcuauaaagaagggggug

SEQ ID NO: 610479 - RNA, 23 nt, Artificial Sequence
  Synthetic
uguaagcuauaaagaagggggug

SEQ ID NO: 610480 - RNA, 24 nt, Artificial Sequence
  Synthetic
uuguaagcuauaaagaagggggug

SEQ ID NO: 610481 - RNA, 18 nt, Artificial Sequence
  Synthetic
ggggccugucagggggug

SEQ ID NO: 610482 - RNA, 19 nt, Artificial Sequence
  Synthetic
uggggccugucagggggug

SEQ ID NO: 610483 - RNA, 20 nt, Artificial Sequence
  Synthetic
cuggggccugucagggggug

SEQ ID NO: 610484 - RNA, 21 nt, Artificial Sequence
  Synthetic
acuggggccugucagggggug

SEQ ID NO: 610485 - RNA, 22 nt, Artificial Sequence
  Synthetic
cacuggggccugucagggggug

SEQ ID NO: 610486 - RNA, 23 nt, Artificial Sequence
  Synthetic
acacuggggccugucagggggug

SEQ ID NO: 610487 - RNA, 24 nt, Artificial Sequence
  Synthetic
cacacuggggccugucagggggug

SEQ ID NO: 610488 - RNA, 18 nt, Artificial Sequence
  Synthetic
ugggaaggguagggggug

SEQ ID NO: 610489 - RNA, 19 nt, Artificial Sequence
  Synthetic
cugggaaggguagggggug

SEQ ID NO: 610490 - RNA, 20 nt, Artificial Sequence
  Synthetic
gcugggaaggguagggggug

SEQ ID NO: 610491 - RNA, 21 nt, Artificial Sequence
  Synthetic
ugcugggaaggguagggggug

SEQ ID NO: 610492 - RNA, 22 nt, Artificial Sequence
  Synthetic
augcugggaaggguagggggug

SEQ ID NO: 610493 - RNA, 23 nt, Artificial Sequence
  Synthetic
gaugcugggaaggguagggggug

SEQ ID NO: 610494 - RNA, 24 nt, Artificial Sequence
  Synthetic
ugaugcugggaaggguagggggug

SEQ ID NO: 610495 - RNA, 18 nt, Artificial Sequence
  Synthetic
gcgugcgcuaggggggug

SEQ ID NO: 610496 - RNA, 19 nt, Artificial Sequence
  Synthetic
cgcgugcgcuaggggggug

SEQ ID NO: 610497 - RNA, 20 nt, Artificial Sequence
  Synthetic
gcgcgugcgcuaggggggug

SEQ ID NO: 610498 - RNA, 21 nt, Artificial Sequence
  Synthetic
cgcgcgugcgcuaggggggug

SEQ ID NO: 610499 - RNA, 22 nt, Artificial Sequence
  Synthetic
gcgcgcgugcgcuaggggggug

SEQ ID NO: 610500 - RNA, 23 nt, Artificial Sequence
  Synthetic
cgcgcgcgugcgcuaggggggug

SEQ ID NO: 610501 - RNA, 24 nt, Artificial Sequence
  Synthetic
gcgcgcgcgugcgcuaggggggug

SEQ ID NO: 610502 - RNA, 18 nt, Artificial Sequence
  Synthetic
ggucccaucuggggggug

SEQ ID NO: 610503 - RNA, 19 nt, Artificial Sequence
  Synthetic
uggucccaucuggggggug

SEQ ID NO: 610504 - RNA, 20 nt, Artificial Sequence
  Synthetic
auggucccaucuggggggug

SEQ ID NO: 610505 - RNA, 21 nt, Artificial Sequence
  Synthetic
gauggucccaucuggggggug

SEQ ID NO: 610506 - RNA, 22 nt, Artificial Sequence
  Synthetic
agauggucccaucuggggggug

SEQ ID NO: 610507 - RNA, 23 nt, Artificial Sequence
  Synthetic
uagauggucccaucuggggggug

SEQ ID NO: 610508 - RNA, 24 nt, Artificial Sequence
  Synthetic
cuagauggucccaucuggggggug

SEQ ID NO: 610509 - RNA, 18 nt, Artificial Sequence
  Synthetic
caagagugguggggggug

SEQ ID NO: 610510 - RNA, 19 nt, Artificial Sequence
  Synthetic
acaagagugguggggggug

SEQ ID NO: 610511 - RNA, 20 nt, Artificial Sequence
  Synthetic
gacaagagugguggggggug

SEQ ID NO: 610512 - RNA, 21 nt, Artificial Sequence
  Synthetic
agacaagagugguggggggug

SEQ ID NO: 610513 - RNA, 22 nt, Artificial Sequence
  Synthetic
aagacaagagugguggggggug

SEQ ID NO: 610514 - RNA, 23 nt, Artificial Sequence
  Synthetic
gaagacaagagugguggggggug

SEQ ID NO: 610515 - RNA, 24 nt, Artificial Sequence
  Synthetic
agaagacaagagugguggggggug

SEQ ID NO: 610516 - RNA, 18 nt, Artificial Sequence
  Synthetic
gugguggguaugggggug

SEQ ID NO: 610517 - RNA, 19 nt, Artificial Sequence
  Synthetic
agugguggguaugggggug

SEQ ID NO: 610518 - RNA, 20 nt, Artificial Sequence
  Synthetic
gagugguggguaugggggug

SEQ ID NO: 610519 - RNA, 21 nt, Artificial Sequence
  Synthetic
ggagugguggguaugggggug

SEQ ID NO: 610520 - RNA, 22 nt, Artificial Sequence
  Synthetic
uggagugguggguaugggggug

SEQ ID NO: 610521 - RNA, 23 nt, Artificial Sequence
  Synthetic
auggagugguggguaugggggug

SEQ ID NO: 610522 - RNA, 24 nt, Artificial Sequence
  Synthetic
aauggagugguggguaugggggug

SEQ ID NO: 610523 - RNA, 18 nt, Artificial Sequence
  Synthetic
uggugccuguugggggug

SEQ ID NO: 610524 - RNA, 19 nt, Artificial Sequence
  Synthetic
cuggugccuguugggggug

SEQ ID NO: 610525 - RNA, 20 nt, Artificial Sequence
  Synthetic
acuggugccuguugggggug

SEQ ID NO: 610526 - RNA, 21 nt, Artificial Sequence
  Synthetic
cacuggugccuguugggggug

SEQ ID NO: 610527 - RNA, 22 nt, Artificial Sequence
  Synthetic
acacuggugccuguugggggug

SEQ ID NO: 610528 - RNA, 23 nt, Artificial Sequence
  Synthetic
cacacuggugccuguugggggug

SEQ ID NO: 610529 - RNA, 24 nt, Artificial Sequence
  Synthetic
acacacuggugccuguugggggug

SEQ ID NO: 610530 - RNA, 18 nt, Artificial Sequence
  Synthetic
acuucucuuuugggggug

SEQ ID NO: 610531 - RNA, 19 nt, Artificial Sequence
  Synthetic
gacuucucuuuugggggug

SEQ ID NO: 610532 - RNA, 20 nt, Artificial Sequence
  Synthetic
ugacuucucuuuugggggug

SEQ ID NO: 610533 - RNA, 21 nt, Artificial Sequence
  Synthetic
augacuucucuuuugggggug

SEQ ID NO: 610534 - RNA, 22 nt, Artificial Sequence
  Synthetic
aaugacuucucuuuugggggug

SEQ ID NO: 610535 - RNA, 23 nt, Artificial Sequence
  Synthetic
uaaugacuucucuuuugggggug

SEQ ID NO: 610536 - RNA, 24 nt, Artificial Sequence
  Synthetic
auaaugacuucucuuuugggggug

SEQ ID NO: 610537 - RNA, 18 nt, Artificial Sequence
  Synthetic
gcugauguuacuggggug

SEQ ID NO: 610538 - RNA, 19 nt, Artificial Sequence
  Synthetic
ugcugauguuacuggggug

SEQ ID NO: 610539 - RNA, 20 nt, Artificial Sequence
  Synthetic
augcugauguuacuggggug

SEQ ID NO: 610540 - RNA, 21 nt, Artificial Sequence
  Synthetic
gaugcugauguuacuggggug

SEQ ID NO: 610541 - RNA, 22 nt, Artificial Sequence
  Synthetic
ugaugcugauguuacuggggug

SEQ ID NO: 610542 - RNA, 23 nt, Artificial Sequence
  Synthetic
cugaugcugauguuacuggggug

SEQ ID NO: 610543 - RNA, 24 nt, Artificial Sequence
  Synthetic
ucugaugcugauguuacuggggug

SEQ ID NO: 610544 - RNA, 18 nt, Artificial Sequence
  Synthetic
ggggccugucguggggug

SEQ ID NO: 610545 - RNA, 19 nt, Artificial Sequence
  Synthetic
cggggccugucguggggug

SEQ ID NO: 610546 - RNA, 20 nt, Artificial Sequence
  Synthetic
ccggggccugucguggggug

SEQ ID NO: 610547 - RNA, 21 nt, Artificial Sequence
  Synthetic
accggggccugucguggggug

SEQ ID NO: 610548 - RNA, 22 nt, Artificial Sequence
  Synthetic
caccggggccugucguggggug

SEQ ID NO: 610549 - RNA, 23 nt, Artificial Sequence
  Synthetic
acaccggggccugucguggggug

SEQ ID NO: 610550 - RNA, 24 nt, Artificial Sequence
  Synthetic
cacaccggggccugucguggggug

SEQ ID NO: 610551 - RNA, 19 nt, Artificial Sequence
  Synthetic
uggggccugucguggggug

SEQ ID NO: 610552 - RNA, 20 nt, Artificial Sequence
  Synthetic
cuggggccugucguggggug

SEQ ID NO: 610553 - RNA, 21 nt, Artificial Sequence
  Synthetic
acuggggccugucguggggug

SEQ ID NO: 610554 - RNA, 22 nt, Artificial Sequence
  Synthetic
cacuggggccugucguggggug

SEQ ID NO: 610555 - RNA, 23 nt, Artificial Sequence
  Synthetic
acacuggggccugucguggggug

SEQ ID NO: 610556 - RNA, 24 nt, Artificial Sequence
  Synthetic
cacacuggggccugucguggggug

SEQ ID NO: 610557 - RNA, 18 nt, Artificial Sequence
  Synthetic
ggggacugcuguggggug

SEQ ID NO: 610558 - RNA, 19 nt, Artificial Sequence
  Synthetic
uggggacugcuguggggug

SEQ ID NO: 610559 - RNA, 20 nt, Artificial Sequence
  Synthetic
cuggggacugcuguggggug

SEQ ID NO: 610560 - RNA, 21 nt, Artificial Sequence
  Synthetic
ucuggggacugcuguggggug

SEQ ID NO: 610561 - RNA, 22 nt, Artificial Sequence
  Synthetic
cucuggggacugcuguggggug

SEQ ID NO: 610562 - RNA, 23 nt, Artificial Sequence
  Synthetic
acucuggggacugcuguggggug

SEQ ID NO: 610563 - RNA, 24 nt, Artificial Sequence
  Synthetic
cacucuggggacugcuguggggug

SEQ ID NO: 610564 - RNA, 18 nt, Artificial Sequence
  Synthetic
ggggccugcuguggggug

SEQ ID NO: 610565 - RNA, 19 nt, Artificial Sequence
  Synthetic
uggggccugcuguggggug

SEQ ID NO: 610566 - RNA, 20 nt, Artificial Sequence
  Synthetic
cuggggccugcuguggggug

SEQ ID NO: 610567 - RNA, 21 nt, Artificial Sequence
  Synthetic
acuggggccugcuguggggug

SEQ ID NO: 610568 - RNA, 22 nt, Artificial Sequence
  Synthetic
cacuggggccugcuguggggug

SEQ ID NO: 610569 - RNA, 23 nt, Artificial Sequence
  Synthetic
acacuggggccugcuguggggug

SEQ ID NO: 610570 - RNA, 24 nt, Artificial Sequence
  Synthetic
cacacuggggccugcuguggggug

SEQ ID NO: 610571 - RNA, 18 nt, Artificial Sequence
  Synthetic
gggaacuguuguggggug

SEQ ID NO: 610572 - RNA, 19 nt, Artificial Sequence
  Synthetic
ugggaacuguuguggggug

SEQ ID NO: 610573 - RNA, 20 nt, Artificial Sequence
  Synthetic
cugggaacuguuguggggug

SEQ ID NO: 610574 - RNA, 21 nt, Artificial Sequence
  Synthetic
ccugggaacuguuguggggug

SEQ ID NO: 610575 - RNA, 22 nt, Artificial Sequence
  Synthetic
cccugggaacuguuguggggug

SEQ ID NO: 610576 - RNA, 23 nt, Artificial Sequence
  Synthetic
acccugggaacuguuguggggug

SEQ ID NO: 610577 - RNA, 24 nt, Artificial Sequence
  Synthetic
cacccugggaacuguuguggggug

SEQ ID NO: 610578 - RNA, 21 nt, Artificial Sequence
  Synthetic
ucuggggacuguuguggggug

SEQ ID NO: 610579 - RNA, 22 nt, Artificial Sequence
  Synthetic
cucuggggacuguuguggggug

SEQ ID NO: 610580 - RNA, 23 nt, Artificial Sequence
  Synthetic
acucuggggacuguuguggggug

SEQ ID NO: 610581 - RNA, 24 nt, Artificial Sequence
  Synthetic
cacucuggggacuguuguggggug

SEQ ID NO: 610582 - RNA, 21 nt, Artificial Sequence
  Synthetic
accggggccuguuguggggug

SEQ ID NO: 610583 - RNA, 22 nt, Artificial Sequence
  Synthetic
caccggggccuguuguggggug

SEQ ID NO: 610584 - RNA, 23 nt, Artificial Sequence
  Synthetic
acaccggggccuguuguggggug

SEQ ID NO: 610585 - RNA, 24 nt, Artificial Sequence
  Synthetic
cacaccggggccuguuguggggug

SEQ ID NO: 610586 - RNA, 18 nt, Artificial Sequence
  Synthetic
ugugggagaaaaugggug

SEQ ID NO: 610587 - RNA, 19 nt, Artificial Sequence
  Synthetic
gugugggagaaaaugggug

SEQ ID NO: 610588 - RNA, 20 nt, Artificial Sequence
  Synthetic
agugugggagaaaaugggug

SEQ ID NO: 610589 - RNA, 21 nt, Artificial Sequence
  Synthetic
gagugugggagaaaaugggug

SEQ ID NO: 610590 - RNA, 22 nt, Artificial Sequence
  Synthetic
agagugugggagaaaaugggug

SEQ ID NO: 610591 - RNA, 23 nt, Artificial Sequence
  Synthetic
gagagugugggagaaaaugggug

SEQ ID NO: 610592 - RNA, 24 nt, Artificial Sequence
  Synthetic
ugagagugugggagaaaaugggug

SEQ ID NO: 610593 - RNA, 18 nt, Artificial Sequence
  Synthetic
aggugggcggaaugggug

SEQ ID NO: 610594 - RNA, 19 nt, Artificial Sequence
  Synthetic
uaggugggcggaaugggug

SEQ ID NO: 610595 - RNA, 20 nt, Artificial Sequence
  Synthetic
guaggugggcggaaugggug

SEQ ID NO: 610596 - RNA, 21 nt, Artificial Sequence
  Synthetic
uguaggugggcggaaugggug

SEQ ID NO: 610597 - RNA, 22 nt, Artificial Sequence
  Synthetic
guguaggugggcggaaugggug

SEQ ID NO: 610598 - RNA, 23 nt, Artificial Sequence
  Synthetic
aguguaggugggcggaaugggug

SEQ ID NO: 610599 - RNA, 24 nt, Artificial Sequence
  Synthetic
gaguguaggugggcggaaugggug

SEQ ID NO: 610600 - RNA, 18 nt, Artificial Sequence
  Synthetic
augcucgcuaccugggug

SEQ ID NO: 610601 - RNA, 19 nt, Artificial Sequence
  Synthetic
caugcucgcuaccugggug

SEQ ID NO: 610602 - RNA, 20 nt, Artificial Sequence
  Synthetic
ccaugcucgcuaccugggug

SEQ ID NO: 610603 - RNA, 21 nt, Artificial Sequence
  Synthetic
accaugcucgcuaccugggug

SEQ ID NO: 610604 - RNA, 22 nt, Artificial Sequence
  Synthetic
uaccaugcucgcuaccugggug

SEQ ID NO: 610605 - RNA, 23 nt, Artificial Sequence
  Synthetic
uuaccaugcucgcuaccugggug

SEQ ID NO: 610606 - RNA, 24 nt, Artificial Sequence
  Synthetic
guuaccaugcucgcuaccugggug

SEQ ID NO: 610607 - RNA, 18 nt, Artificial Sequence
  Synthetic
ugcacuccagccugggug

SEQ ID NO: 610608 - RNA, 19 nt, Artificial Sequence
  Synthetic
cugcacuccagccugggug

SEQ ID NO: 610609 - RNA, 20 nt, Artificial Sequence
  Synthetic
acugcacuccagccugggug

SEQ ID NO: 610610 - RNA, 21 nt, Artificial Sequence
  Synthetic
cacugcacuccagccugggug

SEQ ID NO: 610611 - RNA, 22 nt, Artificial Sequence
  Synthetic
gcacugcacuccagccugggug

SEQ ID NO: 610612 - RNA, 23 nt, Artificial Sequence
  Synthetic
agcacugcacuccagccugggug

SEQ ID NO: 610613 - RNA, 24 nt, Artificial Sequence
  Synthetic
cagcacugcacuccagccugggug

SEQ ID NO: 610614 - RNA, 18 nt, Artificial Sequence
  Synthetic
augcucacugccugggug

SEQ ID NO: 610615 - RNA, 19 nt, Artificial Sequence
  Synthetic
uaugcucacugccugggug

SEQ ID NO: 610616 - RNA, 20 nt, Artificial Sequence
  Synthetic
cuaugcucacugccugggug

SEQ ID NO: 610617 - RNA, 21 nt, Artificial Sequence
  Synthetic
acuaugcucacugccugggug

SEQ ID NO: 610618 - RNA, 22 nt, Artificial Sequence
  Synthetic
uacuaugcucacugccugggug

SEQ ID NO: 610619 - RNA, 23 nt, Artificial Sequence
  Synthetic
auacuaugcucacugccugggug

SEQ ID NO: 610620 - RNA, 24 nt, Artificial Sequence
  Synthetic
gauacuaugcucacugccugggug

SEQ ID NO: 610621 - RNA, 18 nt, Artificial Sequence
  Synthetic
uagauaugggauugggug

SEQ ID NO: 610622 - RNA, 19 nt, Artificial Sequence
  Synthetic
cuagauaugggauugggug

SEQ ID NO: 610623 - RNA, 20 nt, Artificial Sequence
  Synthetic
ucuagauaugggauugggug

SEQ ID NO: 610624 - RNA, 21 nt, Artificial Sequence
  Synthetic
aucuagauaugggauugggug

SEQ ID NO: 610625 - RNA, 22 nt, Artificial Sequence
  Synthetic
aaucuagauaugggauugggug

SEQ ID NO: 610626 - RNA, 23 nt, Artificial Sequence
  Synthetic
aaaucuagauaugggauugggug

SEQ ID NO: 610627 - RNA, 24 nt, Artificial Sequence
  Synthetic
gaaaucuagauaugggauugggug

SEQ ID NO: 610628 - RNA, 18 nt, Artificial Sequence
  Synthetic
cuuaacaaugcuugggug

SEQ ID NO: 610629 - RNA, 19 nt, Artificial Sequence
  Synthetic
gcuuaacaaugcuugggug

SEQ ID NO: 610630 - RNA, 20 nt, Artificial Sequence
  Synthetic
ggcuuaacaaugcuugggug

SEQ ID NO: 610631 - RNA, 21 nt, Artificial Sequence
  Synthetic
aggcuuaacaaugcuugggug

SEQ ID NO: 610632 - RNA, 22 nt, Artificial Sequence
  Synthetic
gaggcuuaacaaugcuugggug

SEQ ID NO: 610633 - RNA, 23 nt, Artificial Sequence
  Synthetic
agaggcuuaacaaugcuugggug

SEQ ID NO: 610634 - RNA, 24 nt, Artificial Sequence
  Synthetic
cagaggcuuaacaaugcuugggug

SEQ ID NO: 610635 - RNA, 18 nt, Artificial Sequence
  Synthetic
gugacuguguguugggug

SEQ ID NO: 610636 - RNA, 19 nt, Artificial Sequence
  Synthetic
agugacuguguguugggug

SEQ ID NO: 610637 - RNA, 20 nt, Artificial Sequence
  Synthetic
cagugacuguguguugggug

SEQ ID NO: 610638 - RNA, 21 nt, Artificial Sequence
  Synthetic
ucagugacuguguguugggug

SEQ ID NO: 610639 - RNA, 22 nt, Artificial Sequence
  Synthetic
uucagugacuguguguugggug

SEQ ID NO: 610640 - RNA, 23 nt, Artificial Sequence
  Synthetic
auucagugacuguguguugggug

SEQ ID NO: 610641 - RNA, 24 nt, Artificial Sequence
  Synthetic
aauucagugacuguguguugggug

SEQ ID NO: 610642 - RNA, 18 nt, Artificial Sequence
  Synthetic
auccuuuguuguugggug

SEQ ID NO: 610643 - RNA, 19 nt, Artificial Sequence
  Synthetic
cauccuuuguuguugggug

SEQ ID NO: 610644 - RNA, 20 nt, Artificial Sequence
  Synthetic
ucauccuuuguuguugggug

SEQ ID NO: 610645 - RNA, 21 nt, Artificial Sequence
  Synthetic
uucauccuuuguuguugggug

SEQ ID NO: 610646 - RNA, 22 nt, Artificial Sequence
  Synthetic
auucauccuuuguuguugggug

SEQ ID NO: 610647 - RNA, 23 nt, Artificial Sequence
  Synthetic
cauucauccuuuguuguugggug

SEQ ID NO: 610648 - RNA, 24 nt, Artificial Sequence
  Synthetic
gcauucauccuuuguuguugggug

SEQ ID NO: 610649 - RNA, 18 nt, Artificial Sequence
  Synthetic
gaaacagugauuugggug

SEQ ID NO: 610650 - RNA, 19 nt, Artificial Sequence
  Synthetic
agaaacagugauuugggug

SEQ ID NO: 610651 - RNA, 20 nt, Artificial Sequence
  Synthetic
aagaaacagugauuugggug

SEQ ID NO: 610652 - RNA, 21 nt, Artificial Sequence
  Synthetic
aaagaaacagugauuugggug

SEQ ID NO: 610653 - RNA, 22 nt, Artificial Sequence
  Synthetic
aaaagaaacagugauuugggug

SEQ ID NO: 610654 - RNA, 23 nt, Artificial Sequence
  Synthetic
caaaagaaacagugauuugggug

SEQ ID NO: 610655 - RNA, 24 nt, Artificial Sequence
  Synthetic
ucaaaagaaacagugauuugggug

SEQ ID NO: 610656 - RNA, 18 nt, Artificial Sequence
  Synthetic
ccccuauauauuugggug

SEQ ID NO: 610657 - RNA, 19 nt, Artificial Sequence
  Synthetic
uccccuauauauuugggug

SEQ ID NO: 610658 - RNA, 20 nt, Artificial Sequence
  Synthetic
guccccuauauauuugggug

SEQ ID NO: 610659 - RNA, 21 nt, Artificial Sequence
  Synthetic
aguccccuauauauuugggug

SEQ ID NO: 610660 - RNA, 22 nt, Artificial Sequence
  Synthetic
aaguccccuauauauuugggug

SEQ ID NO: 610661 - RNA, 23 nt, Artificial Sequence
  Synthetic
uaaguccccuauauauuugggug

SEQ ID NO: 610662 - RNA, 24 nt, Artificial Sequence
  Synthetic
uuaaguccccuauauauuugggug

SEQ ID NO: 610663 - RNA, 18 nt, Artificial Sequence
  Synthetic
augcucacuguuugggug

SEQ ID NO: 610664 - RNA, 19 nt, Artificial Sequence
  Synthetic
uaugcucacuguuugggug

SEQ ID NO: 610665 - RNA, 20 nt, Artificial Sequence
  Synthetic
cuaugcucacuguuugggug

SEQ ID NO: 610666 - RNA, 21 nt, Artificial Sequence
  Synthetic
acuaugcucacuguuugggug

SEQ ID NO: 610667 - RNA, 22 nt, Artificial Sequence
  Synthetic
uacuaugcucacuguuugggug

SEQ ID NO: 610668 - RNA, 23 nt, Artificial Sequence
  Synthetic
guacuaugcucacuguuugggug

SEQ ID NO: 610669 - RNA, 24 nt, Artificial Sequence
  Synthetic
gguacuaugcucacuguuugggug

SEQ ID NO: 610670 - RNA, 18 nt, Artificial Sequence
  Synthetic
uagucacuguuuugggug

SEQ ID NO: 610671 - RNA, 19 nt, Artificial Sequence
  Synthetic
cuagucacuguuuugggug

SEQ ID NO: 610672 - RNA, 20 nt, Artificial Sequence
  Synthetic
ccuagucacuguuuugggug

SEQ ID NO: 610673 - RNA, 21 nt, Artificial Sequence
  Synthetic
accuagucacuguuuugggug

SEQ ID NO: 610674 - RNA, 22 nt, Artificial Sequence
  Synthetic
uaccuagucacuguuuugggug

SEQ ID NO: 610675 - RNA, 23 nt, Artificial Sequence
  Synthetic
guaccuagucacuguuuugggug

SEQ ID NO: 610676 - RNA, 24 nt, Artificial Sequence
  Synthetic
uguaccuagucacuguuuugggug

SEQ ID NO: 610677 - RNA, 18 nt, Artificial Sequence
  Synthetic
ucucuucaacaaauggug

SEQ ID NO: 610678 - RNA, 19 nt, Artificial Sequence
  Synthetic
gucucuucaacaaauggug

SEQ ID NO: 610679 - RNA, 20 nt, Artificial Sequence
  Synthetic
agucucuucaacaaauggug

SEQ ID NO: 610680 - RNA, 21 nt, Artificial Sequence
  Synthetic
cagucucuucaacaaauggug

SEQ ID NO: 610681 - RNA, 22 nt, Artificial Sequence
  Synthetic
acagucucuucaacaaauggug

SEQ ID NO: 610682 - RNA, 23 nt, Artificial Sequence
  Synthetic
gacagucucuucaacaaauggug

SEQ ID NO: 610683 - RNA, 24 nt, Artificial Sequence
  Synthetic
agacagucucuucaacaaauggug

SEQ ID NO: 610684 - RNA, 21 nt, Artificial Sequence
  Synthetic
uucccuauuuaauaaauggug

SEQ ID NO: 610685 - RNA, 22 nt, Artificial Sequence
  Synthetic
auucccuauuuaauaaauggug

SEQ ID NO: 610686 - RNA, 23 nt, Artificial Sequence
  Synthetic
gauucccuauuuaauaaauggug

SEQ ID NO: 610687 - RNA, 24 nt, Artificial Sequence
  Synthetic
agauucccuauuuaauaaauggug

SEQ ID NO: 610688 - RNA, 18 nt, Artificial Sequence
  Synthetic
gaaacaaacacaauggug

SEQ ID NO: 610689 - RNA, 19 nt, Artificial Sequence
  Synthetic
ggaaacaaacacaauggug

SEQ ID NO: 610690 - RNA, 20 nt, Artificial Sequence
  Synthetic
aggaaacaaacacaauggug

SEQ ID NO: 610691 - RNA, 21 nt, Artificial Sequence
  Synthetic
aaggaaacaaacacaauggug

SEQ ID NO: 610692 - RNA, 22 nt, Artificial Sequence
  Synthetic
uaaggaaacaaacacaauggug

SEQ ID NO: 610693 - RNA, 23 nt, Artificial Sequence
  Synthetic
guaaggaaacaaacacaauggug

SEQ ID NO: 610694 - RNA, 24 nt, Artificial Sequence
  Synthetic
aguaaggaaacaaacacaauggug

SEQ ID NO: 610695 - RNA, 18 nt, Artificial Sequence
  Synthetic
ccucuucaaccaauggug

SEQ ID NO: 610696 - RNA, 19 nt, Artificial Sequence
  Synthetic
uccucuucaaccaauggug

SEQ ID NO: 610697 - RNA, 20 nt, Artificial Sequence
  Synthetic
auccucuucaaccaauggug

SEQ ID NO: 610698 - RNA, 21 nt, Artificial Sequence
  Synthetic
uauccucuucaaccaauggug

SEQ ID NO: 610699 - RNA, 22 nt, Artificial Sequence
  Synthetic
auauccucuucaaccaauggug

SEQ ID NO: 610700 - RNA, 23 nt, Artificial Sequence
  Synthetic
gauauccucuucaaccaauggug

SEQ ID NO: 610701 - RNA, 24 nt, Artificial Sequence
  Synthetic
ggauauccucuucaaccaauggug

SEQ ID NO: 610702 - RNA, 22 nt, Artificial Sequence
  Synthetic
caaaaauuagccaggcauggug

SEQ ID NO: 610703 - RNA, 23 nt, Artificial Sequence
  Synthetic
acaaaaauuagccaggcauggug

SEQ ID NO: 610704 - RNA, 24 nt, Artificial Sequence
  Synthetic
cacaaaaauuagccaggcauggug

SEQ ID NO: 610705 - RNA, 18 nt, Artificial Sequence
  Synthetic
aauuagcagggcauggug

SEQ ID NO: 610706 - RNA, 19 nt, Artificial Sequence
  Synthetic
aaauuagcagggcauggug

SEQ ID NO: 610707 - RNA, 20 nt, Artificial Sequence
  Synthetic
aaaauuagcagggcauggug

SEQ ID NO: 610708 - RNA, 21 nt, Artificial Sequence
  Synthetic
aaaaauuagcagggcauggug

SEQ ID NO: 610709 - RNA, 22 nt, Artificial Sequence
  Synthetic
caaaaauuagcagggcauggug

SEQ ID NO: 610710 - RNA, 23 nt, Artificial Sequence
  Synthetic
acaaaaauuagcagggcauggug

SEQ ID NO: 610711 - RNA, 24 nt, Artificial Sequence
  Synthetic
uacaaaaauuagcagggcauggug

SEQ ID NO: 610712 - RNA, 21 nt, Artificial Sequence
  Synthetic
aaaaauuagccgggcauggug

SEQ ID NO: 610713 - RNA, 22 nt, Artificial Sequence
  Synthetic
aaaaaauuagccgggcauggug

SEQ ID NO: 610714 - RNA, 23 nt, Artificial Sequence
  Synthetic
caaaaaauuagccgggcauggug

SEQ ID NO: 610715 - RNA, 24 nt, Artificial Sequence
  Synthetic
acaaaaaauuagccgggcauggug

SEQ ID NO: 610716 - RNA, 18 nt, Artificial Sequence
  Synthetic
aaauagcugggcauggug

SEQ ID NO: 610717 - RNA, 19 nt, Artificial Sequence
  Synthetic
aaaauagcugggcauggug

SEQ ID NO: 610718 - RNA, 20 nt, Artificial Sequence
  Synthetic
aaaaauagcugggcauggug

SEQ ID NO: 610719 - RNA, 21 nt, Artificial Sequence
  Synthetic
aaaaaauagcugggcauggug

SEQ ID NO: 610720 - RNA, 22 nt, Artificial Sequence
  Synthetic
aaaaaaauagcugggcauggug

SEQ ID NO: 610721 - RNA, 23 nt, Artificial Sequence
  Synthetic
aaaaaaaauagcugggcauggug

SEQ ID NO: 610722 - RNA, 24 nt, Artificial Sequence
  Synthetic
aaaaaaaaauagcugggcauggug

SEQ ID NO: 610723 - RNA, 21 nt, Artificial Sequence
  Synthetic
caaaauuagcugggcauggug

SEQ ID NO: 610724 - RNA, 22 nt, Artificial Sequence
  Synthetic
acaaaauuagcugggcauggug

SEQ ID NO: 610725 - RNA, 23 nt, Artificial Sequence
  Synthetic
uacaaaauuagcugggcauggug

SEQ ID NO: 610726 - RNA, 24 nt, Artificial Sequence
  Synthetic
auacaaaauuagcugggcauggug

SEQ ID NO: 610727 - RNA, 18 nt, Artificial Sequence
  Synthetic
agcagaacccucauggug

SEQ ID NO: 610728 - RNA, 19 nt, Artificial Sequence
  Synthetic
aagcagaacccucauggug

SEQ ID NO: 610729 - RNA, 20 nt, Artificial Sequence
  Synthetic
caagcagaacccucauggug

SEQ ID NO: 610730 - RNA, 21 nt, Artificial Sequence
  Synthetic
ccaagcagaacccucauggug

SEQ ID NO: 610731 - RNA, 22 nt, Artificial Sequence
  Synthetic
gccaagcagaacccucauggug

SEQ ID NO: 610732 - RNA, 23 nt, Artificial Sequence
  Synthetic
ggccaagcagaacccucauggug

SEQ ID NO: 610733 - RNA, 24 nt, Artificial Sequence
  Synthetic
aggccaagcagaacccucauggug

SEQ ID NO: 610734 - RNA, 18 nt, Artificial Sequence
  Synthetic
uuuaagacuuggauggug

SEQ ID NO: 610735 - RNA, 19 nt, Artificial Sequence
  Synthetic
cuuuaagacuuggauggug

SEQ ID NO: 610736 - RNA, 20 nt, Artificial Sequence
  Synthetic
ccuuuaagacuuggauggug

SEQ ID NO: 610737 - RNA, 21 nt, Artificial Sequence
  Synthetic
gccuuuaagacuuggauggug

SEQ ID NO: 610738 - RNA, 22 nt, Artificial Sequence
  Synthetic
agccuuuaagacuuggauggug

SEQ ID NO: 610739 - RNA, 23 nt, Artificial Sequence
  Synthetic
aagccuuuaagacuuggauggug

SEQ ID NO: 610740 - RNA, 24 nt, Artificial Sequence
  Synthetic
gaagccuuuaagacuuggauggug

SEQ ID NO: 610741 - RNA, 18 nt, Artificial Sequence
  Synthetic
ucacuuggagugauggug

SEQ ID NO: 610742 - RNA, 19 nt, Artificial Sequence
  Synthetic
uucacuuggagugauggug

SEQ ID NO: 610743 - RNA, 20 nt, Artificial Sequence
  Synthetic
uuucacuuggagugauggug

SEQ ID NO: 610744 - RNA, 21 nt, Artificial Sequence
  Synthetic
guuucacuuggagugauggug

SEQ ID NO: 610745 - RNA, 22 nt, Artificial Sequence
  Synthetic
aguuucacuuggagugauggug

SEQ ID NO: 610746 - RNA, 23 nt, Artificial Sequence
  Synthetic
uaguuucacuuggagugauggug

SEQ ID NO: 610747 - RNA, 24 nt, Artificial Sequence
  Synthetic
guaguuucacuuggagugauggug

SEQ ID NO: 610748 - RNA, 18 nt, Artificial Sequence
  Synthetic
caagguuccaguauggug

SEQ ID NO: 610749 - RNA, 19 nt, Artificial Sequence
  Synthetic
ucaagguuccaguauggug

SEQ ID NO: 610750 - RNA, 20 nt, Artificial Sequence
  Synthetic
cucaagguuccaguauggug

SEQ ID NO: 610751 - RNA, 21 nt, Artificial Sequence
  Synthetic
ccucaagguuccaguauggug

SEQ ID NO: 610752 - RNA, 22 nt, Artificial Sequence
  Synthetic
cccucaagguuccaguauggug

SEQ ID NO: 610753 - RNA, 23 nt, Artificial Sequence
  Synthetic
acccucaagguuccaguauggug

SEQ ID NO: 610754 - RNA, 24 nt, Artificial Sequence
  Synthetic
aacccucaagguuccaguauggug

SEQ ID NO: 610755 - RNA, 18 nt, Artificial Sequence
  Synthetic
acuaguuuaucccuggug

SEQ ID NO: 610756 - RNA, 19 nt, Artificial Sequence
  Synthetic
cacuaguuuaucccuggug

SEQ ID NO: 610757 - RNA, 20 nt, Artificial Sequence
  Synthetic
ccacuaguuuaucccuggug

SEQ ID NO: 610758 - RNA, 21 nt, Artificial Sequence
  Synthetic
gccacuaguuuaucccuggug

SEQ ID NO: 610759 - RNA, 22 nt, Artificial Sequence
  Synthetic
ugccacuaguuuaucccuggug

SEQ ID NO: 610760 - RNA, 23 nt, Artificial Sequence
  Synthetic
cugccacuaguuuaucccuggug

SEQ ID NO: 610761 - RNA, 24 nt, Artificial Sequence
  Synthetic
ucugccacuaguuuaucccuggug

SEQ ID NO: 610762 - RNA, 18 nt, Artificial Sequence
  Synthetic
auguuggccaggcuggug

SEQ ID NO: 610763 - RNA, 19 nt, Artificial Sequence
  Synthetic
cauguuggccaggcuggug

SEQ ID NO: 610764 - RNA, 20 nt, Artificial Sequence
  Synthetic
ccauguuggccaggcuggug

SEQ ID NO: 610765 - RNA, 21 nt, Artificial Sequence
  Synthetic
accauguuggccaggcuggug

SEQ ID NO: 610766 - RNA, 22 nt, Artificial Sequence
  Synthetic
caccauguuggccaggcuggug

SEQ ID NO: 610767 - RNA, 23 nt, Artificial Sequence
  Synthetic
ucaccauguuggccaggcuggug

SEQ ID NO: 610768 - RNA, 24 nt, Artificial Sequence
  Synthetic
uucaccauguuggccaggcuggug

SEQ ID NO: 610769 - RNA, 18 nt, Artificial Sequence
  Synthetic
ugccuuuuaauucuggug

SEQ ID NO: 610770 - RNA, 19 nt, Artificial Sequence
  Synthetic
augccuuuuaauucuggug

SEQ ID NO: 610771 - RNA, 20 nt, Artificial Sequence
  Synthetic
caugccuuuuaauucuggug

SEQ ID NO: 610772 - RNA, 21 nt, Artificial Sequence
  Synthetic
gcaugccuuuuaauucuggug

SEQ ID NO: 610773 - RNA, 22 nt, Artificial Sequence
  Synthetic
ggcaugccuuuuaauucuggug

SEQ ID NO: 610774 - RNA, 23 nt, Artificial Sequence
  Synthetic
uggcaugccuuuuaauucuggug

SEQ ID NO: 610775 - RNA, 24 nt, Artificial Sequence
  Synthetic
auggcaugccuuuuaauucuggug

SEQ ID NO: 610776 - RNA, 18 nt, Artificial Sequence
  Synthetic
uguuaauacguucuggug

SEQ ID NO: 610777 - RNA, 19 nt, Artificial Sequence
  Synthetic
cuguuaauacguucuggug

SEQ ID NO: 610778 - RNA, 20 nt, Artificial Sequence
  Synthetic
ccuguuaauacguucuggug

SEQ ID NO: 610779 - RNA, 21 nt, Artificial Sequence
  Synthetic
gccuguuaauacguucuggug

SEQ ID NO: 610780 - RNA, 22 nt, Artificial Sequence
  Synthetic
ugccuguuaauacguucuggug

SEQ ID NO: 610781 - RNA, 23 nt, Artificial Sequence
  Synthetic
augccuguuaauacguucuggug

SEQ ID NO: 610782 - RNA, 24 nt, Artificial Sequence
  Synthetic
caugccuguuaauacguucuggug

SEQ ID NO: 610783 - RNA, 18 nt, Artificial Sequence
  Synthetic
acacuggugcaaguggug

SEQ ID NO: 610784 - RNA, 19 nt, Artificial Sequence
  Synthetic
cacacuggugcaaguggug

SEQ ID NO: 610785 - RNA, 20 nt, Artificial Sequence
  Synthetic
ccacacuggugcaaguggug

SEQ ID NO: 610786 - RNA, 21 nt, Artificial Sequence
  Synthetic
uccacacuggugcaaguggug

SEQ ID NO: 610787 - RNA, 22 nt, Artificial Sequence
  Synthetic
cuccacacuggugcaaguggug

SEQ ID NO: 610788 - RNA, 23 nt, Artificial Sequence
  Synthetic
acuccacacuggugcaaguggug

SEQ ID NO: 610789 - RNA, 24 nt, Artificial Sequence
  Synthetic
cacuccacacuggugcaaguggug

SEQ ID NO: 610790 - RNA, 18 nt, Artificial Sequence
  Synthetic
guucuagauacaguggug

SEQ ID NO: 610791 - RNA, 19 nt, Artificial Sequence
  Synthetic
aguucuagauacaguggug

SEQ ID NO: 610792 - RNA, 20 nt, Artificial Sequence
  Synthetic
gaguucuagauacaguggug

SEQ ID NO: 610793 - RNA, 21 nt, Artificial Sequence
  Synthetic
ggaguucuagauacaguggug

SEQ ID NO: 610794 - RNA, 22 nt, Artificial Sequence
  Synthetic
aggaguucuagauacaguggug

SEQ ID NO: 610795 - RNA, 23 nt, Artificial Sequence
  Synthetic
uaggaguucuagauacaguggug

SEQ ID NO: 610796 - RNA, 24 nt, Artificial Sequence
  Synthetic
cuaggaguucuagauacaguggug

SEQ ID NO: 610797 - RNA, 18 nt, Artificial Sequence
  Synthetic
gagggagagccaguggug

SEQ ID NO: 610798 - RNA, 19 nt, Artificial Sequence
  Synthetic
ggagggagagccaguggug

SEQ ID NO: 610799 - RNA, 20 nt, Artificial Sequence
  Synthetic
gggagggagagccaguggug

SEQ ID NO: 610800 - RNA, 21 nt, Artificial Sequence
  Synthetic
agggagggagagccaguggug

SEQ ID NO: 610801 - RNA, 22 nt, Artificial Sequence
  Synthetic
gagggagggagagccaguggug

SEQ ID NO: 610802 - RNA, 23 nt, Artificial Sequence
  Synthetic
agagggagggagagccaguggug

SEQ ID NO: 610803 - RNA, 24 nt, Artificial Sequence
  Synthetic
gagagggagggagagccaguggug

SEQ ID NO: 610804 - RNA, 18 nt, Artificial Sequence
  Synthetic
uaucagaggugaguggug

SEQ ID NO: 610805 - RNA, 19 nt, Artificial Sequence
  Synthetic
uuaucagaggugaguggug

SEQ ID NO: 610806 - RNA, 20 nt, Artificial Sequence
  Synthetic
guuaucagaggugaguggug

SEQ ID NO: 610807 - RNA, 21 nt, Artificial Sequence
  Synthetic
gguuaucagaggugaguggug

SEQ ID NO: 610808 - RNA, 22 nt, Artificial Sequence
  Synthetic
ggguuaucagaggugaguggug

SEQ ID NO: 610809 - RNA, 23 nt, Artificial Sequence
  Synthetic
uggguuaucagaggugaguggug

SEQ ID NO: 610810 - RNA, 24 nt, Artificial Sequence
  Synthetic
cuggguuaucagaggugaguggug

SEQ ID NO: 610811 - RNA, 18 nt, Artificial Sequence
  Synthetic
guuuggggggacguggug

SEQ ID NO: 610812 - RNA, 19 nt, Artificial Sequence
  Synthetic
gguuuggggggacguggug

SEQ ID NO: 610813 - RNA, 20 nt, Artificial Sequence
  Synthetic
agguuuggggggacguggug

SEQ ID NO: 610814 - RNA, 21 nt, Artificial Sequence
  Synthetic
cagguuuggggggacguggug

SEQ ID NO: 610815 - RNA, 22 nt, Artificial Sequence
  Synthetic
acagguuuggggggacguggug

SEQ ID NO: 610816 - RNA, 23 nt, Artificial Sequence
  Synthetic
cacagguuuggggggacguggug

SEQ ID NO: 610817 - RNA, 24 nt, Artificial Sequence
  Synthetic
gcacagguuuggggggacguggug

SEQ ID NO: 610818 - RNA, 21 nt, Artificial Sequence
  Synthetic
aaaaauuagccgggcguggug

SEQ ID NO: 610819 - RNA, 22 nt, Artificial Sequence
  Synthetic
aaaaaauuagccgggcguggug

SEQ ID NO: 610820 - RNA, 23 nt, Artificial Sequence
  Synthetic
aaaaaaauuagccgggcguggug

SEQ ID NO: 610821 - RNA, 24 nt, Artificial Sequence
  Synthetic
caaaaaaauuagccgggcguggug

SEQ ID NO: 610822 - RNA, 21 nt, Artificial Sequence
  Synthetic
caaaauuagccgggcguggug

SEQ ID NO: 610823 - RNA, 22 nt, Artificial Sequence
  Synthetic
acaaaauuagccgggcguggug

SEQ ID NO: 610824 - RNA, 23 nt, Artificial Sequence
  Synthetic
cacaaaauuagccgggcguggug

SEQ ID NO: 610825 - RNA, 24 nt, Artificial Sequence
  Synthetic
acacaaaauuagccgggcguggug

SEQ ID NO: 610826 - RNA, 22 nt, Artificial Sequence
  Synthetic
caaaaauuagcugggcguggug

SEQ ID NO: 610827 - RNA, 23 nt, Artificial Sequence
  Synthetic
acaaaaauuagcugggcguggug

SEQ ID NO: 610828 - RNA, 24 nt, Artificial Sequence
  Synthetic
uacaaaaauuagcugggcguggug

SEQ ID NO: 610829 - RNA, 18 nt, Artificial Sequence
  Synthetic
caaguaaaggagguggug

SEQ ID NO: 610830 - RNA, 19 nt, Artificial Sequence
  Synthetic
acaaguaaaggagguggug

SEQ ID NO: 610831 - RNA, 20 nt, Artificial Sequence
  Synthetic
aacaaguaaaggagguggug

SEQ ID NO: 610832 - RNA, 21 nt, Artificial Sequence
  Synthetic
caacaaguaaaggagguggug

SEQ ID NO: 610833 - RNA, 22 nt, Artificial Sequence
  Synthetic
ucaacaaguaaaggagguggug

SEQ ID NO: 610834 - RNA, 23 nt, Artificial Sequence
  Synthetic
cucaacaaguaaaggagguggug

SEQ ID NO: 610835 - RNA, 24 nt, Artificial Sequence
  Synthetic
ucucaacaaguaaaggagguggug

SEQ ID NO: 610836 - RNA, 18 nt, Artificial Sequence
  Synthetic
ucuccuuuugggguggug

SEQ ID NO: 610837 - RNA, 19 nt, Artificial Sequence
  Synthetic
cucuccuuuugggguggug

SEQ ID NO: 610838 - RNA, 20 nt, Artificial Sequence
  Synthetic
ucucuccuuuugggguggug

SEQ ID NO: 610839 - RNA, 21 nt, Artificial Sequence
  Synthetic
aucucuccuuuugggguggug

SEQ ID NO: 610840 - RNA, 22 nt, Artificial Sequence
  Synthetic
aaucucuccuuuugggguggug

SEQ ID NO: 610841 - RNA, 23 nt, Artificial Sequence
  Synthetic
aaaucucuccuuuugggguggug

SEQ ID NO: 610842 - RNA, 24 nt, Artificial Sequence
  Synthetic
uaaaucucuccuuuugggguggug

SEQ ID NO: 610843 - RNA, 18 nt, Artificial Sequence
  Synthetic
uuucauaaagugguggug

SEQ ID NO: 610844 - RNA, 19 nt, Artificial Sequence
  Synthetic
uuuucauaaagugguggug

SEQ ID NO: 610845 - RNA, 20 nt, Artificial Sequence
  Synthetic
guuuucauaaagugguggug

SEQ ID NO: 610846 - RNA, 21 nt, Artificial Sequence
  Synthetic
uguuuucauaaagugguggug

SEQ ID NO: 610847 - RNA, 22 nt, Artificial Sequence
  Synthetic
uuguuuucauaaagugguggug

SEQ ID NO: 610848 - RNA, 23 nt, Artificial Sequence
  Synthetic
cuuguuuucauaaagugguggug

SEQ ID NO: 610849 - RNA, 24 nt, Artificial Sequence
  Synthetic
ccuuguuuucauaaagugguggug

SEQ ID NO: 610850 - RNA, 18 nt, Artificial Sequence
  Synthetic
ccuuuuggggugguggug

SEQ ID NO: 610851 - RNA, 19 nt, Artificial Sequence
  Synthetic
uccuuuuggggugguggug

SEQ ID NO: 610852 - RNA, 20 nt, Artificial Sequence
  Synthetic
cuccuuuuggggugguggug

SEQ ID NO: 610853 - RNA, 21 nt, Artificial Sequence
  Synthetic
ucuccuuuuggggugguggug

SEQ ID NO: 610854 - RNA, 22 nt, Artificial Sequence
  Synthetic
cucuccuuuuggggugguggug

SEQ ID NO: 610855 - RNA, 23 nt, Artificial Sequence
  Synthetic
ucucuccuuuuggggugguggug

SEQ ID NO: 610856 - RNA, 24 nt, Artificial Sequence
  Synthetic
aucucuccuuuuggggugguggug

SEQ ID NO: 610857 - RNA, 18 nt, Artificial Sequence
  Synthetic
ggcagcuuccauguggug

SEQ ID NO: 610858 - RNA, 19 nt, Artificial Sequence
  Synthetic
uggcagcuuccauguggug

SEQ ID NO: 610859 - RNA, 20 nt, Artificial Sequence
  Synthetic
uuggcagcuuccauguggug

SEQ ID NO: 610860 - RNA, 21 nt, Artificial Sequence
  Synthetic
uuuggcagcuuccauguggug

SEQ ID NO: 610861 - RNA, 22 nt, Artificial Sequence
  Synthetic
auuuggcagcuuccauguggug

SEQ ID NO: 610862 - RNA, 23 nt, Artificial Sequence
  Synthetic
gauuuggcagcuuccauguggug

SEQ ID NO: 610863 - RNA, 24 nt, Artificial Sequence
  Synthetic
agauuuggcagcuuccauguggug

SEQ ID NO: 610864 - RNA, 18 nt, Artificial Sequence
  Synthetic
auaauauuggauguggug

SEQ ID NO: 610865 - RNA, 19 nt, Artificial Sequence
  Synthetic
uauaauauuggauguggug

SEQ ID NO: 610866 - RNA, 20 nt, Artificial Sequence
  Synthetic
uuauaauauuggauguggug

SEQ ID NO: 610867 - RNA, 21 nt, Artificial Sequence
  Synthetic
uuuauaauauuggauguggug

SEQ ID NO: 610868 - RNA, 22 nt, Artificial Sequence
  Synthetic
uuuuauaauauuggauguggug

SEQ ID NO: 610869 - RNA, 23 nt, Artificial Sequence
  Synthetic
cuuuuauaauauuggauguggug

SEQ ID NO: 610870 - RNA, 24 nt, Artificial Sequence
  Synthetic
ucuuuuauaauauuggauguggug

SEQ ID NO: 610871 - RNA, 18 nt, Artificial Sequence
  Synthetic
aauaagugugauguggug

SEQ ID NO: 610872 - RNA, 19 nt, Artificial Sequence
  Synthetic
uaauaagugugauguggug

SEQ ID NO: 610873 - RNA, 20 nt, Artificial Sequence
  Synthetic
auaauaagugugauguggug

SEQ ID NO: 610874 - RNA, 21 nt, Artificial Sequence
  Synthetic
uauaauaagugugauguggug

SEQ ID NO: 610875 - RNA, 22 nt, Artificial Sequence
  Synthetic
uuauaauaagugugauguggug

SEQ ID NO: 610876 - RNA, 23 nt, Artificial Sequence
  Synthetic
uuuauaauaagugugauguggug

SEQ ID NO: 610877 - RNA, 24 nt, Artificial Sequence
  Synthetic
uuuuauaauaagugugauguggug

SEQ ID NO: 610878 - RNA, 18 nt, Artificial Sequence
  Synthetic
auaacuacaccuguggug

SEQ ID NO: 610879 - RNA, 19 nt, Artificial Sequence
  Synthetic
cauaacuacaccuguggug

SEQ ID NO: 610880 - RNA, 20 nt, Artificial Sequence
  Synthetic
ccauaacuacaccuguggug

SEQ ID NO: 610881 - RNA, 21 nt, Artificial Sequence
  Synthetic
uccauaacuacaccuguggug

SEQ ID NO: 610882 - RNA, 22 nt, Artificial Sequence
  Synthetic
auccauaacuacaccuguggug

SEQ ID NO: 610883 - RNA, 23 nt, Artificial Sequence
  Synthetic
cauccauaacuacaccuguggug

SEQ ID NO: 610884 - RNA, 24 nt, Artificial Sequence
  Synthetic
acauccauaacuacaccuguggug

SEQ ID NO: 610885 - RNA, 18 nt, Artificial Sequence
  Synthetic
aaaucagucccuguggug

SEQ ID NO: 610886 - RNA, 19 nt, Artificial Sequence
  Synthetic
aaaaucagucccuguggug

SEQ ID NO: 610887 - RNA, 20 nt, Artificial Sequence
  Synthetic
uaaaaucagucccuguggug

SEQ ID NO: 610888 - RNA, 21 nt, Artificial Sequence
  Synthetic
auaaaaucagucccuguggug

SEQ ID NO: 610889 - RNA, 22 nt, Artificial Sequence
  Synthetic
aauaaaaucagucccuguggug

SEQ ID NO: 610890 - RNA, 23 nt, Artificial Sequence
  Synthetic
aaauaaaaucagucccuguggug

SEQ ID NO: 610891 - RNA, 24 nt, Artificial Sequence
  Synthetic
caaauaaaaucagucccuguggug

SEQ ID NO: 610892 - RNA, 18 nt, Artificial Sequence
  Synthetic
aauaucccuucuguggug

SEQ ID NO: 610893 - RNA, 19 nt, Artificial Sequence
  Synthetic
caauaucccuucuguggug

SEQ ID NO: 610894 - RNA, 20 nt, Artificial Sequence
  Synthetic
ccaauaucccuucuguggug

SEQ ID NO: 610895 - RNA, 21 nt, Artificial Sequence
  Synthetic
uccaauaucccuucuguggug

SEQ ID NO: 610896 - RNA, 22 nt, Artificial Sequence
  Synthetic
guccaauaucccuucuguggug

SEQ ID NO: 610897 - RNA, 23 nt, Artificial Sequence
  Synthetic
uguccaauaucccuucuguggug

SEQ ID NO: 610898 - RNA, 24 nt, Artificial Sequence
  Synthetic
cuguccaauaucccuucuguggug

SEQ ID NO: 610899 - RNA, 21 nt, Artificial Sequence
  Synthetic
aaaaauuagccggguguggug

SEQ ID NO: 610900 - RNA, 22 nt, Artificial Sequence
  Synthetic
caaaaauuagccggguguggug

SEQ ID NO: 610901 - RNA, 23 nt, Artificial Sequence
  Synthetic
acaaaaauuagccggguguggug

SEQ ID NO: 610902 - RNA, 24 nt, Artificial Sequence
  Synthetic
uacaaaaauuagccggguguggug

SEQ ID NO: 610903 - RNA, 18 nt, Artificial Sequence
  Synthetic
uuaaguuacuuuguggug

SEQ ID NO: 610904 - RNA, 19 nt, Artificial Sequence
  Synthetic
uuuaaguuacuuuguggug

SEQ ID NO: 610905 - RNA, 20 nt, Artificial Sequence
  Synthetic
cuuuaaguuacuuuguggug

SEQ ID NO: 610906 - RNA, 21 nt, Artificial Sequence
  Synthetic
ccuuuaaguuacuuuguggug

SEQ ID NO: 610907 - RNA, 22 nt, Artificial Sequence
  Synthetic
uccuuuaaguuacuuuguggug

SEQ ID NO: 610908 - RNA, 23 nt, Artificial Sequence
  Synthetic
auccuuuaaguuacuuuguggug

SEQ ID NO: 610909 - RNA, 24 nt, Artificial Sequence
  Synthetic
aauccuuuaaguuacuuuguggug

SEQ ID NO: 610910 - RNA, 18 nt, Artificial Sequence
  Synthetic
aaguaaaucaucuuggug

SEQ ID NO: 610911 - RNA, 19 nt, Artificial Sequence
  Synthetic
uaaguaaaucaucuuggug

SEQ ID NO: 610912 - RNA, 20 nt, Artificial Sequence
  Synthetic
cuaaguaaaucaucuuggug

SEQ ID NO: 610913 - RNA, 21 nt, Artificial Sequence
  Synthetic
acuaaguaaaucaucuuggug

SEQ ID NO: 610914 - RNA, 22 nt, Artificial Sequence
  Synthetic
gacuaaguaaaucaucuuggug

SEQ ID NO: 610915 - RNA, 23 nt, Artificial Sequence
  Synthetic
ugacuaaguaaaucaucuuggug

SEQ ID NO: 610916 - RNA, 24 nt, Artificial Sequence
  Synthetic
uugacuaaguaaaucaucuuggug

SEQ ID NO: 610917 - RNA, 18 nt, Artificial Sequence
  Synthetic
gagauagaaggguuggug

SEQ ID NO: 610918 - RNA, 19 nt, Artificial Sequence
  Synthetic
ugagauagaaggguuggug

SEQ ID NO: 610919 - RNA, 20 nt, Artificial Sequence
  Synthetic
augagauagaaggguuggug

SEQ ID NO: 610920 - RNA, 21 nt, Artificial Sequence
  Synthetic
aaugagauagaaggguuggug

SEQ ID NO: 610921 - RNA, 22 nt, Artificial Sequence
  Synthetic
uaaugagauagaaggguuggug

SEQ ID NO: 610922 - RNA, 23 nt, Artificial Sequence
  Synthetic
auaaugagauagaaggguuggug

SEQ ID NO: 610923 - RNA, 24 nt, Artificial Sequence
  Synthetic
aauaaugagauagaaggguuggug

SEQ ID NO: 610924 - RNA, 18 nt, Artificial Sequence
  Synthetic
caagauuggggguuggug

SEQ ID NO: 610925 - RNA, 19 nt, Artificial Sequence
  Synthetic
ucaagauuggggguuggug

SEQ ID NO: 610926 - RNA, 20 nt, Artificial Sequence
  Synthetic
uucaagauuggggguuggug

SEQ ID NO: 610927 - RNA, 21 nt, Artificial Sequence
  Synthetic
uuucaagauuggggguuggug

SEQ ID NO: 610928 - RNA, 22 nt, Artificial Sequence
  Synthetic
cuuucaagauuggggguuggug

SEQ ID NO: 610929 - RNA, 23 nt, Artificial Sequence
  Synthetic
gcuuucaagauuggggguuggug

SEQ ID NO: 610930 - RNA, 24 nt, Artificial Sequence
  Synthetic
ugcuuucaagauuggggguuggug

SEQ ID NO: 610931 - RNA, 18 nt, Artificial Sequence
  Synthetic
uaauucccaauguuggug

SEQ ID NO: 610932 - RNA, 19 nt, Artificial Sequence
  Synthetic
auaauucccaauguuggug

SEQ ID NO: 610933 - RNA, 20 nt, Artificial Sequence
  Synthetic
uauaauucccaauguuggug

SEQ ID NO: 610934 - RNA, 21 nt, Artificial Sequence
  Synthetic
auauaauucccaauguuggug

SEQ ID NO: 610935 - RNA, 22 nt, Artificial Sequence
  Synthetic
aauauaauucccaauguuggug

SEQ ID NO: 610936 - RNA, 23 nt, Artificial Sequence
  Synthetic
aaauauaauucccaauguuggug

SEQ ID NO: 610937 - RNA, 24 nt, Artificial Sequence
  Synthetic
gaaauauaauucccaauguuggug

SEQ ID NO: 610938 - RNA, 18 nt, Artificial Sequence
  Synthetic
cuacuaucuuauuuggug

SEQ ID NO: 610939 - RNA, 19 nt, Artificial Sequence
  Synthetic
acuacuaucuuauuuggug

SEQ ID NO: 610940 - RNA, 20 nt, Artificial Sequence
  Synthetic
uacuacuaucuuauuuggug

SEQ ID NO: 610941 - RNA, 21 nt, Artificial Sequence
  Synthetic
guacuacuaucuuauuuggug

SEQ ID NO: 610942 - RNA, 22 nt, Artificial Sequence
  Synthetic
aguacuacuaucuuauuuggug

SEQ ID NO: 610943 - RNA, 23 nt, Artificial Sequence
  Synthetic
uaguacuacuaucuuauuuggug

SEQ ID NO: 610944 - RNA, 24 nt, Artificial Sequence
  Synthetic
auaguacuacuaucuuauuuggug

SEQ ID NO: 610945 - RNA, 18 nt, Artificial Sequence
  Synthetic
cauggcaugauuuuggug

SEQ ID NO: 610946 - RNA, 19 nt, Artificial Sequence
  Synthetic
acauggcaugauuuuggug

SEQ ID NO: 610947 - RNA, 20 nt, Artificial Sequence
  Synthetic
cacauggcaugauuuuggug

SEQ ID NO: 610948 - RNA, 21 nt, Artificial Sequence
  Synthetic
ucacauggcaugauuuuggug

SEQ ID NO: 610949 - RNA, 22 nt, Artificial Sequence
  Synthetic
aucacauggcaugauuuuggug

SEQ ID NO: 610950 - RNA, 23 nt, Artificial Sequence
  Synthetic
aaucacauggcaugauuuuggug

SEQ ID NO: 610951 - RNA, 24 nt, Artificial Sequence
  Synthetic
aaaucacauggcaugauuuuggug

SEQ ID NO: 610952 - RNA, 18 nt, Artificial Sequence
  Synthetic
aaaauguagcuuuuggug

SEQ ID NO: 610953 - RNA, 19 nt, Artificial Sequence
  Synthetic
aaaaauguagcuuuuggug

SEQ ID NO: 610954 - RNA, 20 nt, Artificial Sequence
  Synthetic
caaaaauguagcuuuuggug

SEQ ID NO: 610955 - RNA, 21 nt, Artificial Sequence
  Synthetic
acaaaaauguagcuuuuggug

SEQ ID NO: 610956 - RNA, 22 nt, Artificial Sequence
  Synthetic
cacaaaaauguagcuuuuggug

SEQ ID NO: 610957 - RNA, 23 nt, Artificial Sequence
  Synthetic
gcacaaaaauguagcuuuuggug

SEQ ID NO: 610958 - RNA, 24 nt, Artificial Sequence
  Synthetic
ggcacaaaaauguagcuuuuggug

SEQ ID NO: 610959 - RNA, 18 nt, Artificial Sequence
  Synthetic
auggcaaaaaaaaaugug

SEQ ID NO: 610960 - RNA, 19 nt, Artificial Sequence
  Synthetic
cauggcaaaaaaaaaugug

SEQ ID NO: 610961 - RNA, 20 nt, Artificial Sequence
  Synthetic
ccauggcaaaaaaaaaugug

SEQ ID NO: 610962 - RNA, 21 nt, Artificial Sequence
  Synthetic
cccauggcaaaaaaaaaugug

SEQ ID NO: 610963 - RNA, 22 nt, Artificial Sequence
  Synthetic
ccccauggcaaaaaaaaaugug

SEQ ID NO: 610964 - RNA, 23 nt, Artificial Sequence
  Synthetic
uccccauggcaaaaaaaaaugug

SEQ ID NO: 610965 - RNA, 24 nt, Artificial Sequence
  Synthetic
uuccccauggcaaaaaaaaaugug

SEQ ID NO: 610966 - RNA, 18 nt, Artificial Sequence
  Synthetic
aaagcuacucaaaaugug

SEQ ID NO: 610967 - RNA, 19 nt, Artificial Sequence
  Synthetic
caaagcuacucaaaaugug

SEQ ID NO: 610968 - RNA, 20 nt, Artificial Sequence
  Synthetic
acaaagcuacucaaaaugug

SEQ ID NO: 610969 - RNA, 21 nt, Artificial Sequence
  Synthetic
gacaaagcuacucaaaaugug

SEQ ID NO: 610970 - RNA, 22 nt, Artificial Sequence
  Synthetic
agacaaagcuacucaaaaugug

SEQ ID NO: 610971 - RNA, 23 nt, Artificial Sequence
  Synthetic
cagacaaagcuacucaaaaugug

SEQ ID NO: 610972 - RNA, 24 nt, Artificial Sequence
  Synthetic
acagacaaagcuacucaaaaugug

SEQ ID NO: 610973 - RNA, 18 nt, Artificial Sequence
  Synthetic
guauugucauaaaaugug

SEQ ID NO: 610974 - RNA, 19 nt, Artificial Sequence
  Synthetic
aguauugucauaaaaugug

SEQ ID NO: 610975 - RNA, 20 nt, Artificial Sequence
  Synthetic
aaguauugucauaaaaugug

SEQ ID NO: 610976 - RNA, 21 nt, Artificial Sequence
  Synthetic
gaaguauugucauaaaaugug

SEQ ID NO: 610977 - RNA, 22 nt, Artificial Sequence
  Synthetic
agaaguauugucauaaaaugug

SEQ ID NO: 610978 - RNA, 23 nt, Artificial Sequence
  Synthetic
uagaaguauugucauaaaaugug

SEQ ID NO: 610979 - RNA, 24 nt, Artificial Sequence
  Synthetic
guagaaguauugucauaaaaugug

SEQ ID NO: 610980 - RNA, 18 nt, Artificial Sequence
  Synthetic
uuuaugcucacaaaugug

SEQ ID NO: 610981 - RNA, 19 nt, Artificial Sequence
  Synthetic
cuuuaugcucacaaaugug

SEQ ID NO: 610982 - RNA, 20 nt, Artificial Sequence
  Synthetic
acuuuaugcucacaaaugug

SEQ ID NO: 610983 - RNA, 21 nt, Artificial Sequence
  Synthetic
gacuuuaugcucacaaaugug

SEQ ID NO: 610984 - RNA, 22 nt, Artificial Sequence
  Synthetic
cgacuuuaugcucacaaaugug

SEQ ID NO: 610985 - RNA, 23 nt, Artificial Sequence
  Synthetic
ucgacuuuaugcucacaaaugug

SEQ ID NO: 610986 - RNA, 24 nt, Artificial Sequence
  Synthetic
uucgacuuuaugcucacaaaugug

SEQ ID NO: 610987 - RNA, 18 nt, Artificial Sequence
  Synthetic
aauguauucacaaaugug

SEQ ID NO: 610988 - RNA, 19 nt, Artificial Sequence
  Synthetic
gaauguauucacaaaugug

SEQ ID NO: 610989 - RNA, 20 nt, Artificial Sequence
  Synthetic
agaauguauucacaaaugug

SEQ ID NO: 610990 - RNA, 21 nt, Artificial Sequence
  Synthetic
aagaauguauucacaaaugug

SEQ ID NO: 610991 - RNA, 22 nt, Artificial Sequence
  Synthetic
caagaauguauucacaaaugug

SEQ ID NO: 610992 - RNA, 23 nt, Artificial Sequence
  Synthetic
ucaagaauguauucacaaaugug

SEQ ID NO: 610993 - RNA, 24 nt, Artificial Sequence
  Synthetic
uucaagaauguauucacaaaugug

SEQ ID NO: 610994 - RNA, 18 nt, Artificial Sequence
  Synthetic
agauuucauacaaaugug

SEQ ID NO: 610995 - RNA, 19 nt, Artificial Sequence
  Synthetic
gagauuucauacaaaugug

SEQ ID NO: 610996 - RNA, 20 nt, Artificial Sequence
  Synthetic
agagauuucauacaaaugug

SEQ ID NO: 610997 - RNA, 21 nt, Artificial Sequence
  Synthetic
cagagauuucauacaaaugug

SEQ ID NO: 610998 - RNA, 22 nt, Artificial Sequence
  Synthetic
acagagauuucauacaaaugug

SEQ ID NO: 610999 - RNA, 23 nt, Artificial Sequence
  Synthetic
aacagagauuucauacaaaugug

SEQ ID NO: 611000 - RNA, 24 nt, Artificial Sequence
  Synthetic
caacagagauuucauacaaaugug

SEQ ID NO: 611001 - RNA, 18 nt, Artificial Sequence
  Synthetic
auuagaaucagaaaugug

SEQ ID NO: 611002 - RNA, 19 nt, Artificial Sequence
  Synthetic
aauuagaaucagaaaugug

SEQ ID NO: 611003 - RNA, 20 nt, Artificial Sequence
  Synthetic
uaauuagaaucagaaaugug

SEQ ID NO: 611004 - RNA, 21 nt, Artificial Sequence
  Synthetic
guaauuagaaucagaaaugug

SEQ ID NO: 611005 - RNA, 22 nt, Artificial Sequence
  Synthetic
aguaauuagaaucagaaaugug

SEQ ID NO: 611006 - RNA, 23 nt, Artificial Sequence
  Synthetic
aaguaauuagaaucagaaaugug

SEQ ID NO: 611007 - RNA, 24 nt, Artificial Sequence
  Synthetic
caaguaauuagaaucagaaaugug

SEQ ID NO: 611008 - RNA, 18 nt, Artificial Sequence
  Synthetic
cuguuguccugaaaugug

SEQ ID NO: 611009 - RNA, 19 nt, Artificial Sequence
  Synthetic
ccuguuguccugaaaugug

SEQ ID NO: 611010 - RNA, 20 nt, Artificial Sequence
  Synthetic
uccuguuguccugaaaugug

SEQ ID NO: 611011 - RNA, 21 nt, Artificial Sequence
  Synthetic
uuccuguuguccugaaaugug

SEQ ID NO: 611012 - RNA, 22 nt, Artificial Sequence
  Synthetic
guuccuguuguccugaaaugug

SEQ ID NO: 611013 - RNA, 23 nt, Artificial Sequence
  Synthetic
uguuccuguuguccugaaaugug

SEQ ID NO: 611014 - RNA, 24 nt, Artificial Sequence
  Synthetic
cuguuccuguuguccugaaaugug

SEQ ID NO: 611015 - RNA, 18 nt, Artificial Sequence
  Synthetic
uauaaccaaauaaaugug

SEQ ID NO: 611016 - RNA, 19 nt, Artificial Sequence
  Synthetic
uuauaaccaaauaaaugug

SEQ ID NO: 611017 - RNA, 20 nt, Artificial Sequence
  Synthetic
uuuauaaccaaauaaaugug

SEQ ID NO: 611018 - RNA, 21 nt, Artificial Sequence
  Synthetic
auuuauaaccaaauaaaugug

SEQ ID NO: 611019 - RNA, 22 nt, Artificial Sequence
  Synthetic
uauuuauaaccaaauaaaugug

SEQ ID NO: 611020 - RNA, 23 nt, Artificial Sequence
  Synthetic
auauuuauaaccaaauaaaugug

SEQ ID NO: 611021 - RNA, 24 nt, Artificial Sequence
  Synthetic
uauauuuauaaccaaauaaaugug

SEQ ID NO: 611022 - RNA, 18 nt, Artificial Sequence
  Synthetic
auuauuuuuauaaaugug

SEQ ID NO: 611023 - RNA, 19 nt, Artificial Sequence
  Synthetic
cauuauuuuuauaaaugug

SEQ ID NO: 611024 - RNA, 20 nt, Artificial Sequence
  Synthetic
acauuauuuuuauaaaugug

SEQ ID NO: 611025 - RNA, 21 nt, Artificial Sequence
  Synthetic
cacauuauuuuuauaaaugug

SEQ ID NO: 611026 - RNA, 22 nt, Artificial Sequence
  Synthetic
ucacauuauuuuuauaaaugug

SEQ ID NO: 611027 - RNA, 23 nt, Artificial Sequence
  Synthetic
uucacauuauuuuuauaaaugug

SEQ ID NO: 611028 - RNA, 24 nt, Artificial Sequence
  Synthetic
uuucacauuauuuuuauaaaugug

SEQ ID NO: 611029 - RNA, 18 nt, Artificial Sequence
  Synthetic
ucuuggccucccaaugug

SEQ ID NO: 611030 - RNA, 19 nt, Artificial Sequence
  Synthetic
aucuuggccucccaaugug

SEQ ID NO: 611031 - RNA, 20 nt, Artificial Sequence
  Synthetic
caucuuggccucccaaugug

SEQ ID NO: 611032 - RNA, 21 nt, Artificial Sequence
  Synthetic
ccaucuuggccucccaaugug

SEQ ID NO: 611033 - RNA, 22 nt, Artificial Sequence
  Synthetic
cccaucuuggccucccaaugug

SEQ ID NO: 611034 - RNA, 23 nt, Artificial Sequence
  Synthetic
gcccaucuuggccucccaaugug

SEQ ID NO: 611035 - RNA, 24 nt, Artificial Sequence
  Synthetic
ugcccaucuuggccucccaaugug

SEQ ID NO: 611036 - RNA, 18 nt, Artificial Sequence
  Synthetic
cauacuggcagcaaugug

SEQ ID NO: 611037 - RNA, 19 nt, Artificial Sequence
  Synthetic
ccauacuggcagcaaugug

SEQ ID NO: 611038 - RNA, 20 nt, Artificial Sequence
  Synthetic
uccauacuggcagcaaugug

SEQ ID NO: 611039 - RNA, 21 nt, Artificial Sequence
  Synthetic
cuccauacuggcagcaaugug

SEQ ID NO: 611040 - RNA, 22 nt, Artificial Sequence
  Synthetic
ucuccauacuggcagcaaugug

SEQ ID NO: 611041 - RNA, 23 nt, Artificial Sequence
  Synthetic
cucuccauacuggcagcaaugug

SEQ ID NO: 611042 - RNA, 24 nt, Artificial Sequence
  Synthetic
acucuccauacuggcagcaaugug

SEQ ID NO: 611043 - RNA, 18 nt, Artificial Sequence
  Synthetic
accagcuuaggcaaugug

SEQ ID NO: 611044 - RNA, 19 nt, Artificial Sequence
  Synthetic
gaccagcuuaggcaaugug

SEQ ID NO: 611045 - RNA, 20 nt, Artificial Sequence
  Synthetic
agaccagcuuaggcaaugug

SEQ ID NO: 611046 - RNA, 21 nt, Artificial Sequence
  Synthetic
gagaccagcuuaggcaaugug

SEQ ID NO: 611047 - RNA, 22 nt, Artificial Sequence
  Synthetic
ugagaccagcuuaggcaaugug

SEQ ID NO: 611048 - RNA, 23 nt, Artificial Sequence
  Synthetic
cugagaccagcuuaggcaaugug

SEQ ID NO: 611049 - RNA, 24 nt, Artificial Sequence
  Synthetic
ucugagaccagcuuaggcaaugug

SEQ ID NO: 611050 - RNA, 18 nt, Artificial Sequence
  Synthetic
ucugcauccugcaaugug

SEQ ID NO: 611051 - RNA, 19 nt, Artificial Sequence
  Synthetic
cucugcauccugcaaugug

SEQ ID NO: 611052 - RNA, 20 nt, Artificial Sequence
  Synthetic
acucugcauccugcaaugug

SEQ ID NO: 611053 - RNA, 21 nt, Artificial Sequence
  Synthetic
cacucugcauccugcaaugug

SEQ ID NO: 611054 - RNA, 22 nt, Artificial Sequence
  Synthetic
ucacucugcauccugcaaugug

SEQ ID NO: 611055 - RNA, 23 nt, Artificial Sequence
  Synthetic
uucacucugcauccugcaaugug

SEQ ID NO: 611056 - RNA, 24 nt, Artificial Sequence
  Synthetic
guucacucugcauccugcaaugug

SEQ ID NO: 611057 - RNA, 18 nt, Artificial Sequence
  Synthetic
cuuagauuuuucaaugug

SEQ ID NO: 611058 - RNA, 19 nt, Artificial Sequence
  Synthetic
acuuagauuuuucaaugug

SEQ ID NO: 611059 - RNA, 20 nt, Artificial Sequence
  Synthetic
uacuuagauuuuucaaugug

SEQ ID NO: 611060 - RNA, 21 nt, Artificial Sequence
  Synthetic
cuacuuagauuuuucaaugug

SEQ ID NO: 611061 - RNA, 22 nt, Artificial Sequence
  Synthetic
ucuacuuagauuuuucaaugug

SEQ ID NO: 611062 - RNA, 23 nt, Artificial Sequence
  Synthetic
uucuacuuagauuuuucaaugug

SEQ ID NO: 611063 - RNA, 24 nt, Artificial Sequence
  Synthetic
guucuacuuagauuuuucaaugug

SEQ ID NO: 611064 - RNA, 18 nt, Artificial Sequence
  Synthetic
aguguuggccagaaugug

SEQ ID NO: 611065 - RNA, 19 nt, Artificial Sequence
  Synthetic
aaguguuggccagaaugug

SEQ ID NO: 611066 - RNA, 20 nt, Artificial Sequence
  Synthetic
aaaguguuggccagaaugug

SEQ ID NO: 611067 - RNA, 21 nt, Artificial Sequence
  Synthetic
aaaaguguuggccagaaugug

SEQ ID NO: 611068 - RNA, 22 nt, Artificial Sequence
  Synthetic
gaaaaguguuggccagaaugug

SEQ ID NO: 611069 - RNA, 23 nt, Artificial Sequence
  Synthetic
agaaaaguguuggccagaaugug

SEQ ID NO: 611070 - RNA, 24 nt, Artificial Sequence
  Synthetic
aagaaaaguguuggccagaaugug

SEQ ID NO: 611071 - RNA, 18 nt, Artificial Sequence
  Synthetic
agaugggaucagaaugug

SEQ ID NO: 611072 - RNA, 19 nt, Artificial Sequence
  Synthetic
aagaugggaucagaaugug

SEQ ID NO: 611073 - RNA, 20 nt, Artificial Sequence
  Synthetic
caagaugggaucagaaugug

SEQ ID NO: 611074 - RNA, 21 nt, Artificial Sequence
  Synthetic
ucaagaugggaucagaaugug

SEQ ID NO: 611075 - RNA, 22 nt, Artificial Sequence
  Synthetic
gucaagaugggaucagaaugug

SEQ ID NO: 611076 - RNA, 23 nt, Artificial Sequence
  Synthetic
ugucaagaugggaucagaaugug

SEQ ID NO: 611077 - RNA, 24 nt, Artificial Sequence
  Synthetic
gugucaagaugggaucagaaugug

SEQ ID NO: 611078 - RNA, 18 nt, Artificial Sequence
  Synthetic
ugggcuggagagaaugug

SEQ ID NO: 611079 - RNA, 19 nt, Artificial Sequence
  Synthetic
cugggcuggagagaaugug

SEQ ID NO: 611080 - RNA, 20 nt, Artificial Sequence
  Synthetic
ccugggcuggagagaaugug

SEQ ID NO: 611081 - RNA, 21 nt, Artificial Sequence
  Synthetic
gccugggcuggagagaaugug

SEQ ID NO: 611082 - RNA, 22 nt, Artificial Sequence
  Synthetic
ugccugggcuggagagaaugug

SEQ ID NO: 611083 - RNA, 23 nt, Artificial Sequence
  Synthetic
gugccugggcuggagagaaugug

SEQ ID NO: 611084 - RNA, 24 nt, Artificial Sequence
  Synthetic
ugugccugggcuggagagaaugug

SEQ ID NO: 611085 - RNA, 18 nt, Artificial Sequence
  Synthetic
uguccauaggugaaugug

SEQ ID NO: 611086 - RNA, 19 nt, Artificial Sequence
  Synthetic
auguccauaggugaaugug

SEQ ID NO: 611087 - RNA, 20 nt, Artificial Sequence
  Synthetic
cauguccauaggugaaugug

SEQ ID NO: 611088 - RNA, 21 nt, Artificial Sequence
  Synthetic
ucauguccauaggugaaugug

SEQ ID NO: 611089 - RNA, 22 nt, Artificial Sequence
  Synthetic
uucauguccauaggugaaugug

SEQ ID NO: 611090 - RNA, 23 nt, Artificial Sequence
  Synthetic
uuucauguccauaggugaaugug

SEQ ID NO: 611091 - RNA, 24 nt, Artificial Sequence
  Synthetic
cuuucauguccauaggugaaugug

SEQ ID NO: 611092 - RNA, 18 nt, Artificial Sequence
  Synthetic
uuccucuauuugaaugug

SEQ ID NO: 611093 - RNA, 19 nt, Artificial Sequence
  Synthetic
uuuccucuauuugaaugug

SEQ ID NO: 611094 - RNA, 20 nt, Artificial Sequence
  Synthetic
uuuuccucuauuugaaugug

SEQ ID NO: 611095 - RNA, 21 nt, Artificial Sequence
  Synthetic
guuuuccucuauuugaaugug

SEQ ID NO: 611096 - RNA, 22 nt, Artificial Sequence
  Synthetic
gguuuuccucuauuugaaugug

SEQ ID NO: 611097 - RNA, 23 nt, Artificial Sequence
  Synthetic
agguuuuccucuauuugaaugug

SEQ ID NO: 611098 - RNA, 24 nt, Artificial Sequence
  Synthetic
aagguuuuccucuauuugaaugug

SEQ ID NO: 611099 - RNA, 18 nt, Artificial Sequence
  Synthetic
uacaugugaauuaaugug

SEQ ID NO: 611100 - RNA, 19 nt, Artificial Sequence
  Synthetic
cuacaugugaauuaaugug

SEQ ID NO: 611101 - RNA, 20 nt, Artificial Sequence
  Synthetic
ccuacaugugaauuaaugug

SEQ ID NO: 611102 - RNA, 21 nt, Artificial Sequence
  Synthetic
uccuacaugugaauuaaugug

SEQ ID NO: 611103 - RNA, 22 nt, Artificial Sequence
  Synthetic
guccuacaugugaauuaaugug

SEQ ID NO: 611104 - RNA, 23 nt, Artificial Sequence
  Synthetic
uguccuacaugugaauuaaugug

SEQ ID NO: 611105 - RNA, 24 nt, Artificial Sequence
  Synthetic
cuguccuacaugugaauuaaugug

SEQ ID NO: 611106 - RNA, 18 nt, Artificial Sequence
  Synthetic
ggagguuacaaacaugug

SEQ ID NO: 611107 - RNA, 19 nt, Artificial Sequence
  Synthetic
gggagguuacaaacaugug

SEQ ID NO: 611108 - RNA, 20 nt, Artificial Sequence
  Synthetic
ggggagguuacaaacaugug

SEQ ID NO: 611109 - RNA, 21 nt, Artificial Sequence
  Synthetic
aggggagguuacaaacaugug

SEQ ID NO: 611110 - RNA, 22 nt, Artificial Sequence
  Synthetic
aaggggagguuacaaacaugug

SEQ ID NO: 611111 - RNA, 23 nt, Artificial Sequence
  Synthetic
aaaggggagguuacaaacaugug

SEQ ID NO: 611112 - RNA, 24 nt, Artificial Sequence
  Synthetic
gaaaggggagguuacaaacaugug

SEQ ID NO: 611113 - RNA, 18 nt, Artificial Sequence
  Synthetic
aguucugggaaacaugug

SEQ ID NO: 611114 - RNA, 19 nt, Artificial Sequence
  Synthetic
aaguucugggaaacaugug

SEQ ID NO: 611115 - RNA, 20 nt, Artificial Sequence
  Synthetic
uaaguucugggaaacaugug

SEQ ID NO: 611116 - RNA, 21 nt, Artificial Sequence
  Synthetic
uuaaguucugggaaacaugug

SEQ ID NO: 611117 - RNA, 22 nt, Artificial Sequence
  Synthetic
uuuaaguucugggaaacaugug

SEQ ID NO: 611118 - RNA, 23 nt, Artificial Sequence
  Synthetic
uuuuaaguucugggaaacaugug

SEQ ID NO: 611119 - RNA, 24 nt, Artificial Sequence
  Synthetic
auuuuaaguucugggaaacaugug

SEQ ID NO: 611120 - RNA, 18 nt, Artificial Sequence
  Synthetic
caacauuuaacacaugug

SEQ ID NO: 611121 - RNA, 19 nt, Artificial Sequence
  Synthetic
gcaacauuuaacacaugug

SEQ ID NO: 611122 - RNA, 20 nt, Artificial Sequence
  Synthetic
ugcaacauuuaacacaugug

SEQ ID NO: 611123 - RNA, 21 nt, Artificial Sequence
  Synthetic
uugcaacauuuaacacaugug

SEQ ID NO: 611124 - RNA, 22 nt, Artificial Sequence
  Synthetic
cuugcaacauuuaacacaugug

SEQ ID NO: 611125 - RNA, 23 nt, Artificial Sequence
  Synthetic
acuugcaacauuuaacacaugug

SEQ ID NO: 611126 - RNA, 24 nt, Artificial Sequence
  Synthetic
uacuugcaacauuuaacacaugug

SEQ ID NO: 611127 - RNA, 18 nt, Artificial Sequence
  Synthetic
cacaguuugggacaugug

SEQ ID NO: 611128 - RNA, 19 nt, Artificial Sequence
  Synthetic
gcacaguuugggacaugug

SEQ ID NO: 611129 - RNA, 20 nt, Artificial Sequence
  Synthetic
ugcacaguuugggacaugug

SEQ ID NO: 611130 - RNA, 21 nt, Artificial Sequence
  Synthetic
gugcacaguuugggacaugug

SEQ ID NO: 611131 - RNA, 22 nt, Artificial Sequence
  Synthetic
cgugcacaguuugggacaugug

SEQ ID NO: 611132 - RNA, 23 nt, Artificial Sequence
  Synthetic
acgugcacaguuugggacaugug

SEQ ID NO: 611133 - RNA, 24 nt, Artificial Sequence
  Synthetic
aacgugcacaguuugggacaugug

SEQ ID NO: 611134 - RNA, 18 nt, Artificial Sequence
  Synthetic
cugaugucuuaccaugug

SEQ ID NO: 611135 - RNA, 19 nt, Artificial Sequence
  Synthetic
acugaugucuuaccaugug

SEQ ID NO: 611136 - RNA, 20 nt, Artificial Sequence
  Synthetic
uacugaugucuuaccaugug

SEQ ID NO: 611137 - RNA, 21 nt, Artificial Sequence
  Synthetic
uuacugaugucuuaccaugug

SEQ ID NO: 611138 - RNA, 22 nt, Artificial Sequence
  Synthetic
cuuacugaugucuuaccaugug

SEQ ID NO: 611139 - RNA, 23 nt, Artificial Sequence
  Synthetic
acuuacugaugucuuaccaugug

SEQ ID NO: 611140 - RNA, 24 nt, Artificial Sequence
  Synthetic
uacuuacugaugucuuaccaugug

SEQ ID NO: 611141 - RNA, 18 nt, Artificial Sequence
  Synthetic
ccuuccugcugccaugug

SEQ ID NO: 611142 - RNA, 19 nt, Artificial Sequence
  Synthetic
uccuuccugcugccaugug

SEQ ID NO: 611143 - RNA, 20 nt, Artificial Sequence
  Synthetic
cuccuuccugcugccaugug

SEQ ID NO: 611144 - RNA, 21 nt, Artificial Sequence
  Synthetic
ccuccuuccugcugccaugug

SEQ ID NO: 611145 - RNA, 22 nt, Artificial Sequence
  Synthetic
uccuccuuccugcugccaugug

SEQ ID NO: 611146 - RNA, 23 nt, Artificial Sequence
  Synthetic
cuccuccuuccugcugccaugug

SEQ ID NO: 611147 - RNA, 24 nt, Artificial Sequence
  Synthetic
ucuccuccuuccugcugccaugug

SEQ ID NO: 611148 - RNA, 18 nt, Artificial Sequence
  Synthetic
aagagagagaggcaugug

SEQ ID NO: 611149 - RNA, 19 nt, Artificial Sequence
  Synthetic
aaagagagagaggcaugug

SEQ ID NO: 611150 - RNA, 20 nt, Artificial Sequence
  Synthetic
gaaagagagagaggcaugug

SEQ ID NO: 611151 - RNA, 21 nt, Artificial Sequence
  Synthetic
ggaaagagagagaggcaugug

SEQ ID NO: 611152 - RNA, 22 nt, Artificial Sequence
  Synthetic
aggaaagagagagaggcaugug

SEQ ID NO: 611153 - RNA, 23 nt, Artificial Sequence
  Synthetic
aaggaaagagagagaggcaugug

SEQ ID NO: 611154 - RNA, 24 nt, Artificial Sequence
  Synthetic
gaaggaaagagagagaggcaugug

SEQ ID NO: 611155 - RNA, 18 nt, Artificial Sequence
  Synthetic
acaaauaaauaucaugug

SEQ ID NO: 611156 - RNA, 19 nt, Artificial Sequence
  Synthetic
cacaaauaaauaucaugug

SEQ ID NO: 611157 - RNA, 20 nt, Artificial Sequence
  Synthetic
ccacaaauaaauaucaugug

SEQ ID NO: 611158 - RNA, 21 nt, Artificial Sequence
  Synthetic
gccacaaauaaauaucaugug

SEQ ID NO: 611159 - RNA, 22 nt, Artificial Sequence
  Synthetic
agccacaaauaaauaucaugug

SEQ ID NO: 611160 - RNA, 23 nt, Artificial Sequence
  Synthetic
uagccacaaauaaauaucaugug

SEQ ID NO: 611161 - RNA, 24 nt, Artificial Sequence
  Synthetic
guagccacaaauaaauaucaugug

SEQ ID NO: 611162 - RNA, 18 nt, Artificial Sequence
  Synthetic
uaagcaccuacucaugug

SEQ ID NO: 611163 - RNA, 19 nt, Artificial Sequence
  Synthetic
cuaagcaccuacucaugug

SEQ ID NO: 611164 - RNA, 20 nt, Artificial Sequence
  Synthetic
ucuaagcaccuacucaugug

SEQ ID NO: 611165 - RNA, 21 nt, Artificial Sequence
  Synthetic
uucuaagcaccuacucaugug

SEQ ID NO: 611166 - RNA, 22 nt, Artificial Sequence
  Synthetic
cuucuaagcaccuacucaugug

SEQ ID NO: 611167 - RNA, 23 nt, Artificial Sequence
  Synthetic
acuucuaagcaccuacucaugug

SEQ ID NO: 611168 - RNA, 24 nt, Artificial Sequence
  Synthetic
aacuucuaagcaccuacucaugug

SEQ ID NO: 611169 - RNA, 18 nt, Artificial Sequence
  Synthetic
auccccaugugucaugug

SEQ ID NO: 611170 - RNA, 19 nt, Artificial Sequence
  Synthetic
aauccccaugugucaugug

SEQ ID NO: 611171 - RNA, 20 nt, Artificial Sequence
  Synthetic
uaauccccaugugucaugug

SEQ ID NO: 611172 - RNA, 21 nt, Artificial Sequence
  Synthetic
guaauccccaugugucaugug

SEQ ID NO: 611173 - RNA, 22 nt, Artificial Sequence
  Synthetic
uguaauccccaugugucaugug

SEQ ID NO: 611174 - RNA, 23 nt, Artificial Sequence
  Synthetic
cuguaauccccaugugucaugug

SEQ ID NO: 611175 - RNA, 24 nt, Artificial Sequence
  Synthetic
ccuguaauccccaugugucaugug

SEQ ID NO: 611176 - RNA, 18 nt, Artificial Sequence
  Synthetic
ucccccaaauuucaugug

SEQ ID NO: 611177 - RNA, 19 nt, Artificial Sequence
  Synthetic
gucccccaaauuucaugug

SEQ ID NO: 611178 - RNA, 20 nt, Artificial Sequence
  Synthetic
ugucccccaaauuucaugug

SEQ ID NO: 611179 - RNA, 21 nt, Artificial Sequence
  Synthetic
gugucccccaaauuucaugug

SEQ ID NO: 611180 - RNA, 22 nt, Artificial Sequence
  Synthetic
ugugucccccaaauuucaugug

SEQ ID NO: 611181 - RNA, 23 nt, Artificial Sequence
  Synthetic
augugucccccaaauuucaugug

SEQ ID NO: 611182 - RNA, 24 nt, Artificial Sequence
  Synthetic
aaugugucccccaaauuucaugug

SEQ ID NO: 611183 - RNA, 18 nt, Artificial Sequence
  Synthetic
acaggagaaaaagaugug

SEQ ID NO: 611184 - RNA, 19 nt, Artificial Sequence
  Synthetic
aacaggagaaaaagaugug

SEQ ID NO: 611185 - RNA, 20 nt, Artificial Sequence
  Synthetic
aaacaggagaaaaagaugug

SEQ ID NO: 611186 - RNA, 21 nt, Artificial Sequence
  Synthetic
caaacaggagaaaaagaugug

SEQ ID NO: 611187 - RNA, 22 nt, Artificial Sequence
  Synthetic
gcaaacaggagaaaaagaugug

SEQ ID NO: 611188 - RNA, 23 nt, Artificial Sequence
  Synthetic
agcaaacaggagaaaaagaugug

SEQ ID NO: 611189 - RNA, 24 nt, Artificial Sequence
  Synthetic
aagcaaacaggagaaaaagaugug

SEQ ID NO: 611190 - RNA, 18 nt, Artificial Sequence
  Synthetic
aagaauggcaaagaugug

SEQ ID NO: 611191 - RNA, 19 nt, Artificial Sequence
  Synthetic
gaagaauggcaaagaugug

SEQ ID NO: 611192 - RNA, 20 nt, Artificial Sequence
  Synthetic
ggaagaauggcaaagaugug

SEQ ID NO: 611193 - RNA, 21 nt, Artificial Sequence
  Synthetic
aggaagaauggcaaagaugug

SEQ ID NO: 611194 - RNA, 22 nt, Artificial Sequence
  Synthetic
caggaagaauggcaaagaugug

SEQ ID NO: 611195 - RNA, 23 nt, Artificial Sequence
  Synthetic
ccaggaagaauggcaaagaugug

SEQ ID NO: 611196 - RNA, 24 nt, Artificial Sequence
  Synthetic
uccaggaagaauggcaaagaugug

SEQ ID NO: 611197 - RNA, 18 nt, Artificial Sequence
  Synthetic
gaugcuggagaagaugug

SEQ ID NO: 611198 - RNA, 19 nt, Artificial Sequence
  Synthetic
ugaugcuggagaagaugug

SEQ ID NO: 611199 - RNA, 20 nt, Artificial Sequence
  Synthetic
cugaugcuggagaagaugug

SEQ ID NO: 611200 - RNA, 21 nt, Artificial Sequence
  Synthetic
acugaugcuggagaagaugug

SEQ ID NO: 611201 - RNA, 22 nt, Artificial Sequence
  Synthetic
aacugaugcuggagaagaugug

SEQ ID NO: 611202 - RNA, 23 nt, Artificial Sequence
  Synthetic
caacugaugcuggagaagaugug

SEQ ID NO: 611203 - RNA, 24 nt, Artificial Sequence
  Synthetic
acaacugaugcuggagaagaugug

SEQ ID NO: 611204 - RNA, 18 nt, Artificial Sequence
  Synthetic
uggcauuuagaagaugug

SEQ ID NO: 611205 - RNA, 19 nt, Artificial Sequence
  Synthetic
cuggcauuuagaagaugug

SEQ ID NO: 611206 - RNA, 20 nt, Artificial Sequence
  Synthetic
gcuggcauuuagaagaugug

SEQ ID NO: 611207 - RNA, 21 nt, Artificial Sequence
  Synthetic
ugcuggcauuuagaagaugug

SEQ ID NO: 611208 - RNA, 22 nt, Artificial Sequence
  Synthetic
augcuggcauuuagaagaugug

SEQ ID NO: 611209 - RNA, 23 nt, Artificial Sequence
  Synthetic
aaugcuggcauuuagaagaugug

SEQ ID NO: 611210 - RNA, 24 nt, Artificial Sequence
  Synthetic
uaaugcuggcauuuagaagaugug

SEQ ID NO: 611211 - RNA, 18 nt, Artificial Sequence
  Synthetic
uuaaagaguccagaugug

SEQ ID NO: 611212 - RNA, 19 nt, Artificial Sequence
  Synthetic
guuaaagaguccagaugug

SEQ ID NO: 611213 - RNA, 20 nt, Artificial Sequence
  Synthetic
aguuaaagaguccagaugug

SEQ ID NO: 611214 - RNA, 21 nt, Artificial Sequence
  Synthetic
aaguuaaagaguccagaugug

SEQ ID NO: 611215 - RNA, 22 nt, Artificial Sequence
  Synthetic
gaaguuaaagaguccagaugug

SEQ ID NO: 611216 - RNA, 23 nt, Artificial Sequence
  Synthetic
agaaguuaaagaguccagaugug

SEQ ID NO: 611217 - RNA, 24 nt, Artificial Sequence
  Synthetic
aagaaguuaaagaguccagaugug

SEQ ID NO: 611218 - RNA, 18 nt, Artificial Sequence
  Synthetic
uaggguuauucagaugug

SEQ ID NO: 611219 - RNA, 19 nt, Artificial Sequence
  Synthetic
auaggguuauucagaugug

SEQ ID NO: 611220 - RNA, 20 nt, Artificial Sequence
  Synthetic
cauaggguuauucagaugug

SEQ ID NO: 611221 - RNA, 21 nt, Artificial Sequence
  Synthetic
gcauaggguuauucagaugug

SEQ ID NO: 611222 - RNA, 22 nt, Artificial Sequence
  Synthetic
ugcauaggguuauucagaugug

SEQ ID NO: 611223 - RNA, 23 nt, Artificial Sequence
  Synthetic
uugcauaggguuauucagaugug

SEQ ID NO: 611224 - RNA, 24 nt, Artificial Sequence
  Synthetic
uuugcauaggguuauucagaugug

SEQ ID NO: 611225 - RNA, 18 nt, Artificial Sequence
  Synthetic
gccauucugauagaugug

SEQ ID NO: 611226 - RNA, 19 nt, Artificial Sequence
  Synthetic
agccauucugauagaugug

SEQ ID NO: 611227 - RNA, 20 nt, Artificial Sequence
  Synthetic
uagccauucugauagaugug

SEQ ID NO: 611228 - RNA, 21 nt, Artificial Sequence
  Synthetic
uuagccauucugauagaugug

SEQ ID NO: 611229 - RNA, 22 nt, Artificial Sequence
  Synthetic
uuuagccauucugauagaugug

SEQ ID NO: 611230 - RNA, 23 nt, Artificial Sequence
  Synthetic
uuuuagccauucugauagaugug

SEQ ID NO: 611231 - RNA, 24 nt, Artificial Sequence
  Synthetic
guuuuagccauucugauagaugug

SEQ ID NO: 611232 - RNA, 18 nt, Artificial Sequence
  Synthetic
gaguguucacuagaugug

SEQ ID NO: 611233 - RNA, 19 nt, Artificial Sequence
  Synthetic
agaguguucacuagaugug

SEQ ID NO: 611234 - RNA, 20 nt, Artificial Sequence
  Synthetic
cagaguguucacuagaugug

SEQ ID NO: 611235 - RNA, 21 nt, Artificial Sequence
  Synthetic
gcagaguguucacuagaugug

SEQ ID NO: 611236 - RNA, 22 nt, Artificial Sequence
  Synthetic
ugcagaguguucacuagaugug

SEQ ID NO: 611237 - RNA, 23 nt, Artificial Sequence
  Synthetic
uugcagaguguucacuagaugug

SEQ ID NO: 611238 - RNA, 24 nt, Artificial Sequence
  Synthetic
auugcagaguguucacuagaugug

SEQ ID NO: 611239 - RNA, 18 nt, Artificial Sequence
  Synthetic
gcagagccuuuagaugug

SEQ ID NO: 611240 - RNA, 19 nt, Artificial Sequence
  Synthetic
cgcagagccuuuagaugug

SEQ ID NO: 611241 - RNA, 20 nt, Artificial Sequence
  Synthetic
acgcagagccuuuagaugug

SEQ ID NO: 611242 - RNA, 21 nt, Artificial Sequence
  Synthetic
aacgcagagccuuuagaugug

SEQ ID NO: 611243 - RNA, 22 nt, Artificial Sequence
  Synthetic
aaacgcagagccuuuagaugug

SEQ ID NO: 611244 - RNA, 23 nt, Artificial Sequence
  Synthetic
aaaacgcagagccuuuagaugug

SEQ ID NO: 611245 - RNA, 24 nt, Artificial Sequence
  Synthetic
uaaaacgcagagccuuuagaugug

SEQ ID NO: 611246 - RNA, 18 nt, Artificial Sequence
  Synthetic
caacuuacaagcgaugug

SEQ ID NO: 611247 - RNA, 19 nt, Artificial Sequence
  Synthetic
ccaacuuacaagcgaugug

SEQ ID NO: 611248 - RNA, 20 nt, Artificial Sequence
  Synthetic
uccaacuuacaagcgaugug

SEQ ID NO: 611249 - RNA, 21 nt, Artificial Sequence
  Synthetic
auccaacuuacaagcgaugug

SEQ ID NO: 611250 - RNA, 22 nt, Artificial Sequence
  Synthetic
aauccaacuuacaagcgaugug

SEQ ID NO: 611251 - RNA, 23 nt, Artificial Sequence
  Synthetic
gaauccaacuuacaagcgaugug

SEQ ID NO: 611252 - RNA, 24 nt, Artificial Sequence
  Synthetic
ggaauccaacuuacaagcgaugug

SEQ ID NO: 611253 - RNA, 18 nt, Artificial Sequence
  Synthetic
ugugcuggcaaggaugug

SEQ ID NO: 611254 - RNA, 19 nt, Artificial Sequence
  Synthetic
augugcuggcaaggaugug

SEQ ID NO: 611255 - RNA, 20 nt, Artificial Sequence
  Synthetic
caugugcuggcaaggaugug

SEQ ID NO: 611256 - RNA, 21 nt, Artificial Sequence
  Synthetic
acaugugcuggcaaggaugug

SEQ ID NO: 611257 - RNA, 22 nt, Artificial Sequence
  Synthetic
aacaugugcuggcaaggaugug

SEQ ID NO: 611258 - RNA, 23 nt, Artificial Sequence
  Synthetic
uaacaugugcuggcaaggaugug

SEQ ID NO: 611259 - RNA, 24 nt, Artificial Sequence
  Synthetic
auaacaugugcuggcaaggaugug

SEQ ID NO: 611260 - RNA, 21 nt, Artificial Sequence
  Synthetic
acagaugcuggagaggaugug

SEQ ID NO: 611261 - RNA, 22 nt, Artificial Sequence
  Synthetic
aacagaugcuggagaggaugug

SEQ ID NO: 611262 - RNA, 23 nt, Artificial Sequence
  Synthetic
caacagaugcuggagaggaugug

SEQ ID NO: 611263 - RNA, 24 nt, Artificial Sequence
  Synthetic
acaacagaugcuggagaggaugug

SEQ ID NO: 611264 - RNA, 21 nt, Artificial Sequence
  Synthetic
acaggugcuggagaggaugug

SEQ ID NO: 611265 - RNA, 22 nt, Artificial Sequence
  Synthetic
aacaggugcuggagaggaugug

SEQ ID NO: 611266 - RNA, 23 nt, Artificial Sequence
  Synthetic
caacaggugcuggagaggaugug

SEQ ID NO: 611267 - RNA, 24 nt, Artificial Sequence
  Synthetic
acaacaggugcuggagaggaugug

SEQ ID NO: 611268 - RNA, 18 nt, Artificial Sequence
  Synthetic
caacuuacaagggaugug

SEQ ID NO: 611269 - RNA, 19 nt, Artificial Sequence
  Synthetic
acaacuuacaagggaugug

SEQ ID NO: 611270 - RNA, 20 nt, Artificial Sequence
  Synthetic
uacaacuuacaagggaugug

SEQ ID NO: 611271 - RNA, 21 nt, Artificial Sequence
  Synthetic
auacaacuuacaagggaugug

SEQ ID NO: 611272 - RNA, 22 nt, Artificial Sequence
  Synthetic
aauacaacuuacaagggaugug

SEQ ID NO: 611273 - RNA, 23 nt, Artificial Sequence
  Synthetic
aaauacaacuuacaagggaugug

SEQ ID NO: 611274 - RNA, 24 nt, Artificial Sequence
  Synthetic
caaauacaacuuacaagggaugug

SEQ ID NO: 611275 - RNA, 23 nt, Artificial Sequence
  Synthetic
gaauacaacuuacaagggaugug

SEQ ID NO: 611276 - RNA, 24 nt, Artificial Sequence
  Synthetic
ggaauacaacuuacaagggaugug

SEQ ID NO: 611277 - RNA, 21 nt, Artificial Sequence
  Synthetic
auccaacuuacaagggaugug

SEQ ID NO: 611278 - RNA, 22 nt, Artificial Sequence
  Synthetic
aauccaacuuacaagggaugug

SEQ ID NO: 611279 - RNA, 23 nt, Artificial Sequence
  Synthetic
gaauccaacuuacaagggaugug

SEQ ID NO: 611280 - RNA, 24 nt, Artificial Sequence
  Synthetic
ggaauccaacuuacaagggaugug

SEQ ID NO: 611281 - RNA, 18 nt, Artificial Sequence
  Synthetic
caacuugcaagggaugug

SEQ ID NO: 611282 - RNA, 19 nt, Artificial Sequence
  Synthetic
acaacuugcaagggaugug

SEQ ID NO: 611283 - RNA, 20 nt, Artificial Sequence
  Synthetic
uacaacuugcaagggaugug

SEQ ID NO: 611284 - RNA, 21 nt, Artificial Sequence
  Synthetic
auacaacuugcaagggaugug

SEQ ID NO: 611285 - RNA, 22 nt, Artificial Sequence
  Synthetic
aauacaacuugcaagggaugug

SEQ ID NO: 611286 - RNA, 23 nt, Artificial Sequence
  Synthetic
gaauacaacuugcaagggaugug

SEQ ID NO: 611287 - RNA, 24 nt, Artificial Sequence
  Synthetic
ggaauacaacuugcaagggaugug

SEQ ID NO: 611288 - RNA, 18 nt, Artificial Sequence
  Synthetic
auuuucaagggggaugug

SEQ ID NO: 611289 - RNA, 19 nt, Artificial Sequence
  Synthetic
aauuuucaagggggaugug

SEQ ID NO: 611290 - RNA, 20 nt, Artificial Sequence
  Synthetic
gaauuuucaagggggaugug

SEQ ID NO: 611291 - RNA, 21 nt, Artificial Sequence
  Synthetic
agaauuuucaagggggaugug

SEQ ID NO: 611292 - RNA, 22 nt, Artificial Sequence
  Synthetic
cagaauuuucaagggggaugug

SEQ ID NO: 611293 - RNA, 23 nt, Artificial Sequence
  Synthetic
ccagaauuuucaagggggaugug

SEQ ID NO: 611294 - RNA, 24 nt, Artificial Sequence
  Synthetic
uccagaauuuucaagggggaugug

SEQ ID NO: 611295 - RNA, 18 nt, Artificial Sequence
  Synthetic
ucugugugaugggaugug

SEQ ID NO: 611296 - RNA, 19 nt, Artificial Sequence
  Synthetic
uucugugugaugggaugug

SEQ ID NO: 611297 - RNA, 20 nt, Artificial Sequence
  Synthetic
guucugugugaugggaugug

SEQ ID NO: 611298 - RNA, 21 nt, Artificial Sequence
  Synthetic
aguucugugugaugggaugug

SEQ ID NO: 611299 - RNA, 22 nt, Artificial Sequence
  Synthetic
aaguucugugugaugggaugug

SEQ ID NO: 611300 - RNA, 23 nt, Artificial Sequence
  Synthetic
caaguucugugugaugggaugug

SEQ ID NO: 611301 - RNA, 24 nt, Artificial Sequence
  Synthetic
acaaguucugugugaugggaugug

SEQ ID NO: 611302 - RNA, 18 nt, Artificial Sequence
  Synthetic
aaggauagaauggaugug

SEQ ID NO: 611303 - RNA, 19 nt, Artificial Sequence
  Synthetic
uaaggauagaauggaugug

SEQ ID NO: 611304 - RNA, 20 nt, Artificial Sequence
  Synthetic
guaaggauagaauggaugug

SEQ ID NO: 611305 - RNA, 21 nt, Artificial Sequence
  Synthetic
gguaaggauagaauggaugug

SEQ ID NO: 611306 - RNA, 22 nt, Artificial Sequence
  Synthetic
ugguaaggauagaauggaugug

SEQ ID NO: 611307 - RNA, 23 nt, Artificial Sequence
  Synthetic
augguaaggauagaauggaugug

SEQ ID NO: 611308 - RNA, 24 nt, Artificial Sequence
  Synthetic
gaugguaaggauagaauggaugug

SEQ ID NO: 611309 - RNA, 18 nt, Artificial Sequence
  Synthetic
gggaagucacuggaugug

SEQ ID NO: 611310 - RNA, 19 nt, Artificial Sequence
  Synthetic
ggggaagucacuggaugug

SEQ ID NO: 611311 - RNA, 20 nt, Artificial Sequence
  Synthetic
aggggaagucacuggaugug

SEQ ID NO: 611312 - RNA, 21 nt, Artificial Sequence
  Synthetic
uaggggaagucacuggaugug

SEQ ID NO: 611313 - RNA, 22 nt, Artificial Sequence
  Synthetic
guaggggaagucacuggaugug

SEQ ID NO: 611314 - RNA, 23 nt, Artificial Sequence
  Synthetic
aguaggggaagucacuggaugug

SEQ ID NO: 611315 - RNA, 24 nt, Artificial Sequence
  Synthetic
uaguaggggaagucacuggaugug

SEQ ID NO: 611316 - RNA, 18 nt, Artificial Sequence
  Synthetic
aaaugcuacaaugaugug

SEQ ID NO: 611317 - RNA, 19 nt, Artificial Sequence
  Synthetic
caaaugcuacaaugaugug

SEQ ID NO: 611318 - RNA, 20 nt, Artificial Sequence
  Synthetic
ccaaaugcuacaaugaugug

SEQ ID NO: 611319 - RNA, 21 nt, Artificial Sequence
  Synthetic
uccaaaugcuacaaugaugug

SEQ ID NO: 611320 - RNA, 22 nt, Artificial Sequence
  Synthetic
uuccaaaugcuacaaugaugug

SEQ ID NO: 611321 - RNA, 23 nt, Artificial Sequence
  Synthetic
uuuccaaaugcuacaaugaugug

SEQ ID NO: 611322 - RNA, 24 nt, Artificial Sequence
  Synthetic
uuuuccaaaugcuacaaugaugug

SEQ ID NO: 611323 - RNA, 18 nt, Artificial Sequence
  Synthetic
uacuuauauucugaugug

SEQ ID NO: 611324 - RNA, 19 nt, Artificial Sequence
  Synthetic
auacuuauauucugaugug

SEQ ID NO: 611325 - RNA, 20 nt, Artificial Sequence
  Synthetic
uauacuuauauucugaugug

SEQ ID NO: 611326 - RNA, 21 nt, Artificial Sequence
  Synthetic
auauacuuauauucugaugug

SEQ ID NO: 611327 - RNA, 22 nt, Artificial Sequence
  Synthetic
aauauacuuauauucugaugug

SEQ ID NO: 611328 - RNA, 23 nt, Artificial Sequence
  Synthetic
uaauauacuuauauucugaugug

SEQ ID NO: 611329 - RNA, 24 nt, Artificial Sequence
  Synthetic
auaauauacuuauauucugaugug

SEQ ID NO: 611330 - RNA, 18 nt, Artificial Sequence
  Synthetic
ucuacggcaggugaugug

SEQ ID NO: 611331 - RNA, 19 nt, Artificial Sequence
  Synthetic
gucuacggcaggugaugug

SEQ ID NO: 611332 - RNA, 20 nt, Artificial Sequence
  Synthetic
ugucuacggcaggugaugug

SEQ ID NO: 611333 - RNA, 21 nt, Artificial Sequence
  Synthetic
uugucuacggcaggugaugug

SEQ ID NO: 611334 - RNA, 22 nt, Artificial Sequence
  Synthetic
cuugucuacggcaggugaugug

SEQ ID NO: 611335 - RNA, 23 nt, Artificial Sequence
  Synthetic
gcuugucuacggcaggugaugug

SEQ ID NO: 611336 - RNA, 24 nt, Artificial Sequence
  Synthetic
ugcuugucuacggcaggugaugug

SEQ ID NO: 611337 - RNA, 18 nt, Artificial Sequence
  Synthetic
acaucucuuucauaugug

SEQ ID NO: 611338 - RNA, 19 nt, Artificial Sequence
  Synthetic
gacaucucuuucauaugug

SEQ ID NO: 611339 - RNA, 20 nt, Artificial Sequence
  Synthetic
ggacaucucuuucauaugug

SEQ ID NO: 611340 - RNA, 21 nt, Artificial Sequence
  Synthetic
aggacaucucuuucauaugug

SEQ ID NO: 611341 - RNA, 22 nt, Artificial Sequence
  Synthetic
uaggacaucucuuucauaugug

SEQ ID NO: 611342 - RNA, 23 nt, Artificial Sequence
  Synthetic
uuaggacaucucuuucauaugug

SEQ ID NO: 611343 - RNA, 24 nt, Artificial Sequence
  Synthetic
uuuaggacaucucuuucauaugug

SEQ ID NO: 611344 - RNA, 18 nt, Artificial Sequence
  Synthetic
ggaaaucaccuauaugug

SEQ ID NO: 611345 - RNA, 19 nt, Artificial Sequence
  Synthetic
aggaaaucaccuauaugug

SEQ ID NO: 611346 - RNA, 20 nt, Artificial Sequence
  Synthetic
uaggaaaucaccuauaugug

SEQ ID NO: 611347 - RNA, 21 nt, Artificial Sequence
  Synthetic
auaggaaaucaccuauaugug

SEQ ID NO: 611348 - RNA, 22 nt, Artificial Sequence
  Synthetic
uauaggaaaucaccuauaugug

SEQ ID NO: 611349 - RNA, 23 nt, Artificial Sequence
  Synthetic
uuauaggaaaucaccuauaugug

SEQ ID NO: 611350 - RNA, 24 nt, Artificial Sequence
  Synthetic
uuuauaggaaaucaccuauaugug

SEQ ID NO: 611351 - RNA, 18 nt, Artificial Sequence
  Synthetic
ccacgagauuuauaugug

SEQ ID NO: 611352 - RNA, 19 nt, Artificial Sequence
  Synthetic
accacgagauuuauaugug

SEQ ID NO: 611353 - RNA, 20 nt, Artificial Sequence
  Synthetic
aaccacgagauuuauaugug

SEQ ID NO: 611354 - RNA, 21 nt, Artificial Sequence
  Synthetic
gaaccacgagauuuauaugug

SEQ ID NO: 611355 - RNA, 22 nt, Artificial Sequence
  Synthetic
agaaccacgagauuuauaugug

SEQ ID NO: 611356 - RNA, 23 nt, Artificial Sequence
  Synthetic
aagaaccacgagauuuauaugug

SEQ ID NO: 611357 - RNA, 24 nt, Artificial Sequence
  Synthetic
aaagaaccacgagauuuauaugug

SEQ ID NO: 611358 - RNA, 18 nt, Artificial Sequence
  Synthetic
gauugauauagcuaugug

SEQ ID NO: 611359 - RNA, 19 nt, Artificial Sequence
  Synthetic
cgauugauauagcuaugug

SEQ ID NO: 611360 - RNA, 20 nt, Artificial Sequence
  Synthetic
gcgauugauauagcuaugug

SEQ ID NO: 611361 - RNA, 21 nt, Artificial Sequence
  Synthetic
ggcgauugauauagcuaugug

SEQ ID NO: 611362 - RNA, 22 nt, Artificial Sequence
  Synthetic
gggcgauugauauagcuaugug

SEQ ID NO: 611363 - RNA, 23 nt, Artificial Sequence
  Synthetic
ggggcgauugauauagcuaugug

SEQ ID NO: 611364 - RNA, 24 nt, Artificial Sequence
  Synthetic
gggggcgauugauauagcuaugug

SEQ ID NO: 611365 - RNA, 18 nt, Artificial Sequence
  Synthetic
cauuccuuucucuaugug

SEQ ID NO: 611366 - RNA, 19 nt, Artificial Sequence
  Synthetic
ucauuccuuucucuaugug

SEQ ID NO: 611367 - RNA, 20 nt, Artificial Sequence
  Synthetic
uucauuccuuucucuaugug

SEQ ID NO: 611368 - RNA, 21 nt, Artificial Sequence
  Synthetic
uuucauuccuuucucuaugug

SEQ ID NO: 611369 - RNA, 22 nt, Artificial Sequence
  Synthetic
uuuucauuccuuucucuaugug

SEQ ID NO: 611370 - RNA, 23 nt, Artificial Sequence
  Synthetic
uuuuucauuccuuucucuaugug

SEQ ID NO: 611371 - RNA, 24 nt, Artificial Sequence
  Synthetic
uuuuuucauuccuuucucuaugug

SEQ ID NO: 611372 - RNA, 18 nt, Artificial Sequence
  Synthetic
aauguugacaaguaugug

SEQ ID NO: 611373 - RNA, 19 nt, Artificial Sequence
  Synthetic
caauguugacaaguaugug

SEQ ID NO: 611374 - RNA, 20 nt, Artificial Sequence
  Synthetic
ccaauguugacaaguaugug

SEQ ID NO: 611375 - RNA, 21 nt, Artificial Sequence
  Synthetic
accaauguugacaaguaugug

SEQ ID NO: 611376 - RNA, 22 nt, Artificial Sequence
  Synthetic
aaccaauguugacaaguaugug

SEQ ID NO: 611377 - RNA, 23 nt, Artificial Sequence
  Synthetic
uaaccaauguugacaaguaugug

SEQ ID NO: 611378 - RNA, 24 nt, Artificial Sequence
  Synthetic
auaaccaauguugacaaguaugug

SEQ ID NO: 611379 - RNA, 18 nt, Artificial Sequence
  Synthetic
uucuuuuacugguaugug

SEQ ID NO: 611380 - RNA, 19 nt, Artificial Sequence
  Synthetic
uuucuuuuacugguaugug

SEQ ID NO: 611381 - RNA, 20 nt, Artificial Sequence
  Synthetic
guuucuuuuacugguaugug

SEQ ID NO: 611382 - RNA, 21 nt, Artificial Sequence
  Synthetic
aguuucuuuuacugguaugug

SEQ ID NO: 611383 - RNA, 22 nt, Artificial Sequence
  Synthetic
gaguuucuuuuacugguaugug

SEQ ID NO: 611384 - RNA, 23 nt, Artificial Sequence
  Synthetic
ugaguuucuuuuacugguaugug

SEQ ID NO: 611385 - RNA, 24 nt, Artificial Sequence
  Synthetic
cugaguuucuuuuacugguaugug

SEQ ID NO: 611386 - RNA, 21 nt, Artificial Sequence
  Synthetic
agucuugggagaguguaugug

SEQ ID NO: 611387 - RNA, 22 nt, Artificial Sequence
  Synthetic
uagucuugggagaguguaugug

SEQ ID NO: 611388 - RNA, 23 nt, Artificial Sequence
  Synthetic
uuagucuugggagaguguaugug

SEQ ID NO: 611389 - RNA, 24 nt, Artificial Sequence
  Synthetic
uuuagucuugggagaguguaugug

SEQ ID NO: 611390 - RNA, 18 nt, Artificial Sequence
  Synthetic
aguuuuucuaauuaugug

SEQ ID NO: 611391 - RNA, 19 nt, Artificial Sequence
  Synthetic
uaguuuuucuaauuaugug

SEQ ID NO: 611392 - RNA, 20 nt, Artificial Sequence
  Synthetic
guaguuuuucuaauuaugug

SEQ ID NO: 611393 - RNA, 21 nt, Artificial Sequence
  Synthetic
aguaguuuuucuaauuaugug

SEQ ID NO: 611394 - RNA, 22 nt, Artificial Sequence
  Synthetic
aaguaguuuuucuaauuaugug

SEQ ID NO: 611395 - RNA, 23 nt, Artificial Sequence
  Synthetic
aaaguaguuuuucuaauuaugug

SEQ ID NO: 611396 - RNA, 24 nt, Artificial Sequence
  Synthetic
uaaaguaguuuuucuaauuaugug

SEQ ID NO: 611397 - RNA, 18 nt, Artificial Sequence
  Synthetic
uccucagauuauuaugug

SEQ ID NO: 611398 - RNA, 19 nt, Artificial Sequence
  Synthetic
cuccucagauuauuaugug

SEQ ID NO: 611399 - RNA, 20 nt, Artificial Sequence
  Synthetic
ucuccucagauuauuaugug

SEQ ID NO: 611400 - RNA, 21 nt, Artificial Sequence
  Synthetic
cucuccucagauuauuaugug

SEQ ID NO: 611401 - RNA, 22 nt, Artificial Sequence
  Synthetic
gcucuccucagauuauuaugug

SEQ ID NO: 611402 - RNA, 23 nt, Artificial Sequence
  Synthetic
ugcucuccucagauuauuaugug

SEQ ID NO: 611403 - RNA, 24 nt, Artificial Sequence
  Synthetic
cugcucuccucagauuauuaugug

SEQ ID NO: 611404 - RNA, 18 nt, Artificial Sequence
  Synthetic
uuuacuuauguuuaugug

SEQ ID NO: 611405 - RNA, 19 nt, Artificial Sequence
  Synthetic
uuuuacuuauguuuaugug

SEQ ID NO: 611406 - RNA, 20 nt, Artificial Sequence
  Synthetic
auuuuacuuauguuuaugug

SEQ ID NO: 611407 - RNA, 21 nt, Artificial Sequence
  Synthetic
aauuuuacuuauguuuaugug

SEQ ID NO: 611408 - RNA, 22 nt, Artificial Sequence
  Synthetic
caauuuuacuuauguuuaugug

SEQ ID NO: 611409 - RNA, 23 nt, Artificial Sequence
  Synthetic
gcaauuuuacuuauguuuaugug

SEQ ID NO: 611410 - RNA, 24 nt, Artificial Sequence
  Synthetic
agcaauuuuacuuauguuuaugug

SEQ ID NO: 611411 - RNA, 18 nt, Artificial Sequence
  Synthetic
uauauuauauuuuaugug

SEQ ID NO: 611412 - RNA, 19 nt, Artificial Sequence
  Synthetic
uuauauuauauuuuaugug

SEQ ID NO: 611413 - RNA, 20 nt, Artificial Sequence
  Synthetic
uuuauauuauauuuuaugug

SEQ ID NO: 611414 - RNA, 21 nt, Artificial Sequence
  Synthetic
uuuuauauuauauuuuaugug

SEQ ID NO: 611415 - RNA, 22 nt, Artificial Sequence
  Synthetic
uuuuuauauuauauuuuaugug

SEQ ID NO: 611416 - RNA, 23 nt, Artificial Sequence
  Synthetic
uuuuuuauauuauauuuuaugug

SEQ ID NO: 611417 - RNA, 24 nt, Artificial Sequence
  Synthetic
guuuuuuauauuauauuuuaugug

SEQ ID NO: 611418 - RNA, 18 nt, Artificial Sequence
  Synthetic
cagugaugaacaacugug

SEQ ID NO: 611419 - RNA, 19 nt, Artificial Sequence
  Synthetic
acagugaugaacaacugug

SEQ ID NO: 611420 - RNA, 20 nt, Artificial Sequence
  Synthetic
cacagugaugaacaacugug

SEQ ID NO: 611421 - RNA, 21 nt, Artificial Sequence
  Synthetic
acacagugaugaacaacugug

SEQ ID NO: 611422 - RNA, 22 nt, Artificial Sequence
  Synthetic
aacacagugaugaacaacugug

SEQ ID NO: 611423 - RNA, 23 nt, Artificial Sequence
  Synthetic
aaacacagugaugaacaacugug

SEQ ID NO: 611424 - RNA, 24 nt, Artificial Sequence
  Synthetic
gaaacacagugaugaacaacugug

SEQ ID NO: 611425 - RNA, 18 nt, Artificial Sequence
  Synthetic
ggcuuuguuuacacugug

SEQ ID NO: 611426 - RNA, 19 nt, Artificial Sequence
  Synthetic
cggcuuuguuuacacugug

SEQ ID NO: 611427 - RNA, 20 nt, Artificial Sequence
  Synthetic
acggcuuuguuuacacugug

SEQ ID NO: 611428 - RNA, 21 nt, Artificial Sequence
  Synthetic
gacggcuuuguuuacacugug

SEQ ID NO: 611429 - RNA, 22 nt, Artificial Sequence
  Synthetic
ugacggcuuuguuuacacugug

SEQ ID NO: 611430 - RNA, 23 nt, Artificial Sequence
  Synthetic
uugacggcuuuguuuacacugug

SEQ ID NO: 611431 - RNA, 24 nt, Artificial Sequence
  Synthetic
cuugacggcuuuguuuacacugug

SEQ ID NO: 611432 - RNA, 18 nt, Artificial Sequence
  Synthetic
uuacaacaagccacugug

SEQ ID NO: 611433 - RNA, 19 nt, Artificial Sequence
  Synthetic
auuacaacaagccacugug

SEQ ID NO: 611434 - RNA, 20 nt, Artificial Sequence
  Synthetic
cauuacaacaagccacugug

SEQ ID NO: 611435 - RNA, 21 nt, Artificial Sequence
  Synthetic
gcauuacaacaagccacugug

SEQ ID NO: 611436 - RNA, 22 nt, Artificial Sequence
  Synthetic
ugcauuacaacaagccacugug

SEQ ID NO: 611437 - RNA, 23 nt, Artificial Sequence
  Synthetic
augcauuacaacaagccacugug

SEQ ID NO: 611438 - RNA, 24 nt, Artificial Sequence
  Synthetic
aaugcauuacaacaagccacugug

SEQ ID NO: 611439 - RNA, 18 nt, Artificial Sequence
  Synthetic
ggucccugagucacugug

SEQ ID NO: 611440 - RNA, 19 nt, Artificial Sequence
  Synthetic
aggucccugagucacugug

SEQ ID NO: 611441 - RNA, 20 nt, Artificial Sequence
  Synthetic
uaggucccugagucacugug

SEQ ID NO: 611442 - RNA, 21 nt, Artificial Sequence
  Synthetic
uuaggucccugagucacugug

SEQ ID NO: 611443 - RNA, 22 nt, Artificial Sequence
  Synthetic
uuuaggucccugagucacugug

SEQ ID NO: 611444 - RNA, 23 nt, Artificial Sequence
  Synthetic
auuuaggucccugagucacugug

SEQ ID NO: 611445 - RNA, 24 nt, Artificial Sequence
  Synthetic
aauuuaggucccugagucacugug

SEQ ID NO: 611446 - RNA, 18 nt, Artificial Sequence
  Synthetic
aaauucugagggacugug

SEQ ID NO: 611447 - RNA, 19 nt, Artificial Sequence
  Synthetic
caaauucugagggacugug

SEQ ID NO: 611448 - RNA, 20 nt, Artificial Sequence
  Synthetic
ccaaauucugagggacugug

SEQ ID NO: 611449 - RNA, 21 nt, Artificial Sequence
  Synthetic
gccaaauucugagggacugug

SEQ ID NO: 611450 - RNA, 22 nt, Artificial Sequence
  Synthetic
ugccaaauucugagggacugug

SEQ ID NO: 611451 - RNA, 23 nt, Artificial Sequence
  Synthetic
cugccaaauucugagggacugug

SEQ ID NO: 611452 - RNA, 24 nt, Artificial Sequence
  Synthetic
ucugccaaauucugagggacugug

SEQ ID NO: 611453 - RNA, 18 nt, Artificial Sequence
  Synthetic
auggaauguaauacugug

SEQ ID NO: 611454 - RNA, 19 nt, Artificial Sequence
  Synthetic
gauggaauguaauacugug

SEQ ID NO: 611455 - RNA, 20 nt, Artificial Sequence
  Synthetic
ggauggaauguaauacugug

SEQ ID NO: 611456 - RNA, 21 nt, Artificial Sequence
  Synthetic
aggauggaauguaauacugug

SEQ ID NO: 611457 - RNA, 22 nt, Artificial Sequence
  Synthetic
gaggauggaauguaauacugug

SEQ ID NO: 611458 - RNA, 23 nt, Artificial Sequence
  Synthetic
ugaggauggaauguaauacugug

SEQ ID NO: 611459 - RNA, 24 nt, Artificial Sequence
  Synthetic
gugaggauggaauguaauacugug

SEQ ID NO: 611460 - RNA, 18 nt, Artificial Sequence
  Synthetic
aacggcuugacuacugug

SEQ ID NO: 611461 - RNA, 19 nt, Artificial Sequence
  Synthetic
gaacggcuugacuacugug

SEQ ID NO: 611462 - RNA, 20 nt, Artificial Sequence
  Synthetic
ugaacggcuugacuacugug

SEQ ID NO: 611463 - RNA, 21 nt, Artificial Sequence
  Synthetic
augaacggcuugacuacugug

SEQ ID NO: 611464 - RNA, 22 nt, Artificial Sequence
  Synthetic
aaugaacggcuugacuacugug

SEQ ID NO: 611465 - RNA, 23 nt, Artificial Sequence
  Synthetic
gaaugaacggcuugacuacugug

SEQ ID NO: 611466 - RNA, 24 nt, Artificial Sequence
  Synthetic
agaaugaacggcuugacuacugug

SEQ ID NO: 611467 - RNA, 18 nt, Artificial Sequence
  Synthetic
ucucucacuauuacugug

SEQ ID NO: 611468 - RNA, 19 nt, Artificial Sequence
  Synthetic
gucucucacuauuacugug

SEQ ID NO: 611469 - RNA, 20 nt, Artificial Sequence
  Synthetic
agucucucacuauuacugug

SEQ ID NO: 611470 - RNA, 21 nt, Artificial Sequence
  Synthetic
aagucucucacuauuacugug

SEQ ID NO: 611471 - RNA, 22 nt, Artificial Sequence
  Synthetic
aaagucucucacuauuacugug

SEQ ID NO: 611472 - RNA, 23 nt, Artificial Sequence
  Synthetic
aaaagucucucacuauuacugug

SEQ ID NO: 611473 - RNA, 24 nt, Artificial Sequence
  Synthetic
uaaaagucucucacuauuacugug

SEQ ID NO: 611474 - RNA, 18 nt, Artificial Sequence
  Synthetic
gaccuaguuauuacugug

SEQ ID NO: 611475 - RNA, 19 nt, Artificial Sequence
  Synthetic
ggaccuaguuauuacugug

SEQ ID NO: 611476 - RNA, 20 nt, Artificial Sequence
  Synthetic
aggaccuaguuauuacugug

SEQ ID NO: 611477 - RNA, 21 nt, Artificial Sequence
  Synthetic
gaggaccuaguuauuacugug

SEQ ID NO: 611478 - RNA, 22 nt, Artificial Sequence
  Synthetic
ugaggaccuaguuauuacugug

SEQ ID NO: 611479 - RNA, 23 nt, Artificial Sequence
  Synthetic
uugaggaccuaguuauuacugug

SEQ ID NO: 611480 - RNA, 24 nt, Artificial Sequence
  Synthetic
auugaggaccuaguuauuacugug

SEQ ID NO: 611481 - RNA, 18 nt, Artificial Sequence
  Synthetic
auaaauuaucucccugug

SEQ ID NO: 611482 - RNA, 19 nt, Artificial Sequence
  Synthetic
aauaaauuaucucccugug

SEQ ID NO: 611483 - RNA, 20 nt, Artificial Sequence
  Synthetic
aaauaaauuaucucccugug

SEQ ID NO: 611484 - RNA, 21 nt, Artificial Sequence
  Synthetic
aaaauaaauuaucucccugug

SEQ ID NO: 611485 - RNA, 22 nt, Artificial Sequence
  Synthetic
uaaaauaaauuaucucccugug

SEQ ID NO: 611486 - RNA, 23 nt, Artificial Sequence
  Synthetic
uuaaaauaaauuaucucccugug

SEQ ID NO: 611487 - RNA, 24 nt, Artificial Sequence
  Synthetic
uuuaaaauaaauuaucucccugug

SEQ ID NO: 611488 - RNA, 18 nt, Artificial Sequence
  Synthetic
uauaacauguucccugug

SEQ ID NO: 611489 - RNA, 19 nt, Artificial Sequence
  Synthetic
auauaacauguucccugug

SEQ ID NO: 611490 - RNA, 20 nt, Artificial Sequence
  Synthetic
cauauaacauguucccugug

SEQ ID NO: 611491 - RNA, 21 nt, Artificial Sequence
  Synthetic
ucauauaacauguucccugug

SEQ ID NO: 611492 - RNA, 22 nt, Artificial Sequence
  Synthetic
uucauauaacauguucccugug

SEQ ID NO: 611493 - RNA, 23 nt, Artificial Sequence
  Synthetic
cuucauauaacauguucccugug

SEQ ID NO: 611494 - RNA, 24 nt, Artificial Sequence
  Synthetic
ucuucauauaacauguucccugug

SEQ ID NO: 611495 - RNA, 18 nt, Artificial Sequence
  Synthetic
acacugaagguuccugug

SEQ ID NO: 611496 - RNA, 19 nt, Artificial Sequence
  Synthetic
aacacugaagguuccugug

SEQ ID NO: 611497 - RNA, 20 nt, Artificial Sequence
  Synthetic
aaacacugaagguuccugug

SEQ ID NO: 611498 - RNA, 21 nt, Artificial Sequence
  Synthetic
gaaacacugaagguuccugug

SEQ ID NO: 611499 - RNA, 22 nt, Artificial Sequence
  Synthetic
agaaacacugaagguuccugug

SEQ ID NO: 611500 - RNA, 23 nt, Artificial Sequence
  Synthetic
gagaaacacugaagguuccugug

SEQ ID NO: 611501 - RNA, 24 nt, Artificial Sequence
  Synthetic
agagaaacacugaagguuccugug

SEQ ID NO: 611502 - RNA, 18 nt, Artificial Sequence
  Synthetic
cucaaccaccaagcugug

SEQ ID NO: 611503 - RNA, 19 nt, Artificial Sequence
  Synthetic
acucaaccaccaagcugug

SEQ ID NO: 611504 - RNA, 20 nt, Artificial Sequence
  Synthetic
aacucaaccaccaagcugug

SEQ ID NO: 611505 - RNA, 21 nt, Artificial Sequence
  Synthetic
gaacucaaccaccaagcugug

SEQ ID NO: 611506 - RNA, 22 nt, Artificial Sequence
  Synthetic
agaacucaaccaccaagcugug

SEQ ID NO: 611507 - RNA, 23 nt, Artificial Sequence
  Synthetic
cagaacucaaccaccaagcugug

SEQ ID NO: 611508 - RNA, 24 nt, Artificial Sequence
  Synthetic
acagaacucaaccaccaagcugug

SEQ ID NO: 611509 - RNA, 18 nt, Artificial Sequence
  Synthetic
gaggccuccccagcugug

SEQ ID NO: 611510 - RNA, 19 nt, Artificial Sequence
  Synthetic
ugaggccuccccagcugug

SEQ ID NO: 611511 - RNA, 20 nt, Artificial Sequence
  Synthetic
gugaggccuccccagcugug

SEQ ID NO: 611512 - RNA, 21 nt, Artificial Sequence
  Synthetic
ugugaggccuccccagcugug

SEQ ID NO: 611513 - RNA, 22 nt, Artificial Sequence
  Synthetic
uugugaggccuccccagcugug

SEQ ID NO: 611514 - RNA, 23 nt, Artificial Sequence
  Synthetic
auugugaggccuccccagcugug

SEQ ID NO: 611515 - RNA, 24 nt, Artificial Sequence
  Synthetic
gauugugaggccuccccagcugug

SEQ ID NO: 611516 - RNA, 18 nt, Artificial Sequence
  Synthetic
ccuucuuacagagcugug

SEQ ID NO: 611517 - RNA, 19 nt, Artificial Sequence
  Synthetic
gccuucuuacagagcugug

SEQ ID NO: 611518 - RNA, 20 nt, Artificial Sequence
  Synthetic
ugccuucuuacagagcugug

SEQ ID NO: 611519 - RNA, 21 nt, Artificial Sequence
  Synthetic
cugccuucuuacagagcugug

SEQ ID NO: 611520 - RNA, 22 nt, Artificial Sequence
  Synthetic
acugccuucuuacagagcugug

SEQ ID NO: 611521 - RNA, 23 nt, Artificial Sequence
  Synthetic
cacugccuucuuacagagcugug

SEQ ID NO: 611522 - RNA, 24 nt, Artificial Sequence
  Synthetic
acacugccuucuuacagagcugug

SEQ ID NO: 611523 - RNA, 18 nt, Artificial Sequence
  Synthetic
ccagaauaaauagcugug

SEQ ID NO: 611524 - RNA, 19 nt, Artificial Sequence
  Synthetic
uccagaauaaauagcugug

SEQ ID NO: 611525 - RNA, 20 nt, Artificial Sequence
  Synthetic
cuccagaauaaauagcugug

SEQ ID NO: 611526 - RNA, 21 nt, Artificial Sequence
  Synthetic
ucuccagaauaaauagcugug

SEQ ID NO: 611527 - RNA, 22 nt, Artificial Sequence
  Synthetic
cucuccagaauaaauagcugug

SEQ ID NO: 611528 - RNA, 23 nt, Artificial Sequence
  Synthetic
acucuccagaauaaauagcugug

SEQ ID NO: 611529 - RNA, 24 nt, Artificial Sequence
  Synthetic
cacucuccagaauaaauagcugug

SEQ ID NO: 611530 - RNA, 18 nt, Artificial Sequence
  Synthetic
cuaaaauuauuagcugug

SEQ ID NO: 611531 - RNA, 19 nt, Artificial Sequence
  Synthetic
acuaaaauuauuagcugug

SEQ ID NO: 611532 - RNA, 20 nt, Artificial Sequence
  Synthetic
uacuaaaauuauuagcugug

SEQ ID NO: 611533 - RNA, 21 nt, Artificial Sequence
  Synthetic
cuacuaaaauuauuagcugug

SEQ ID NO: 611534 - RNA, 22 nt, Artificial Sequence
  Synthetic
gcuacuaaaauuauuagcugug

SEQ ID NO: 611535 - RNA, 23 nt, Artificial Sequence
  Synthetic
ugcuacuaaaauuauuagcugug

SEQ ID NO: 611536 - RNA, 24 nt, Artificial Sequence
  Synthetic
augcuacuaaaauuauuagcugug

SEQ ID NO: 611537 - RNA, 18 nt, Artificial Sequence
  Synthetic
auauuagaguuagcugug

SEQ ID NO: 611538 - RNA, 19 nt, Artificial Sequence
  Synthetic
cauauuagaguuagcugug

SEQ ID NO: 611539 - RNA, 20 nt, Artificial Sequence
  Synthetic
gcauauuagaguuagcugug

SEQ ID NO: 611540 - RNA, 21 nt, Artificial Sequence
  Synthetic
agcauauuagaguuagcugug

SEQ ID NO: 611541 - RNA, 22 nt, Artificial Sequence
  Synthetic
cagcauauuagaguuagcugug

SEQ ID NO: 611542 - RNA, 23 nt, Artificial Sequence
  Synthetic
gcagcauauuagaguuagcugug

SEQ ID NO: 611543 - RNA, 24 nt, Artificial Sequence
  Synthetic
ugcagcauauuagaguuagcugug

SEQ ID NO: 611544 - RNA, 18 nt, Artificial Sequence
  Synthetic
ugcuucaugguggcugug

SEQ ID NO: 611545 - RNA, 19 nt, Artificial Sequence
  Synthetic
augcuucaugguggcugug

SEQ ID NO: 611546 - RNA, 20 nt, Artificial Sequence
  Synthetic
caugcuucaugguggcugug

SEQ ID NO: 611547 - RNA, 21 nt, Artificial Sequence
  Synthetic
ccaugcuucaugguggcugug

SEQ ID NO: 611548 - RNA, 22 nt, Artificial Sequence
  Synthetic
accaugcuucaugguggcugug

SEQ ID NO: 611549 - RNA, 23 nt, Artificial Sequence
  Synthetic
aaccaugcuucaugguggcugug

SEQ ID NO: 611550 - RNA, 24 nt, Artificial Sequence
  Synthetic
uaaccaugcuucaugguggcugug

SEQ ID NO: 611551 - RNA, 18 nt, Artificial Sequence
  Synthetic
cagagcucgagugcugug

SEQ ID NO: 611552 - RNA, 19 nt, Artificial Sequence
  Synthetic
gcagagcucgagugcugug

SEQ ID NO: 611553 - RNA, 20 nt, Artificial Sequence
  Synthetic
agcagagcucgagugcugug

SEQ ID NO: 611554 - RNA, 21 nt, Artificial Sequence
  Synthetic
uagcagagcucgagugcugug

SEQ ID NO: 611555 - RNA, 22 nt, Artificial Sequence
  Synthetic
uuagcagagcucgagugcugug

SEQ ID NO: 611556 - RNA, 23 nt, Artificial Sequence
  Synthetic
cuuagcagagcucgagugcugug

SEQ ID NO: 611557 - RNA, 24 nt, Artificial Sequence
  Synthetic
ccuuagcagagcucgagugcugug

SEQ ID NO: 611558 - RNA, 18 nt, Artificial Sequence
  Synthetic
gcaauaucuauugcugug

SEQ ID NO: 611559 - RNA, 19 nt, Artificial Sequence
  Synthetic
ugcaauaucuauugcugug

SEQ ID NO: 611560 - RNA, 20 nt, Artificial Sequence
  Synthetic
cugcaauaucuauugcugug

SEQ ID NO: 611561 - RNA, 21 nt, Artificial Sequence
  Synthetic
ucugcaauaucuauugcugug

SEQ ID NO: 611562 - RNA, 22 nt, Artificial Sequence
  Synthetic
aucugcaauaucuauugcugug

SEQ ID NO: 611563 - RNA, 23 nt, Artificial Sequence
  Synthetic
caucugcaauaucuauugcugug

SEQ ID NO: 611564 - RNA, 24 nt, Artificial Sequence
  Synthetic
ucaucugcaauaucuauugcugug

SEQ ID NO: 611565 - RNA, 18 nt, Artificial Sequence
  Synthetic
uuuagcucauuugcugug

SEQ ID NO: 611566 - RNA, 19 nt, Artificial Sequence
  Synthetic
uuuuagcucauuugcugug

SEQ ID NO: 611567 - RNA, 20 nt, Artificial Sequence
  Synthetic
uuuuuagcucauuugcugug

SEQ ID NO: 611568 - RNA, 21 nt, Artificial Sequence
  Synthetic
auuuuuagcucauuugcugug

SEQ ID NO: 611569 - RNA, 22 nt, Artificial Sequence
  Synthetic
gauuuuuagcucauuugcugug

SEQ ID NO: 611570 - RNA, 23 nt, Artificial Sequence
  Synthetic
agauuuuuagcucauuugcugug

SEQ ID NO: 611571 - RNA, 24 nt, Artificial Sequence
  Synthetic
uagauuuuuagcucauuugcugug

SEQ ID NO: 611572 - RNA, 21 nt, Artificial Sequence
  Synthetic
augauaguuucuuuugcugug

SEQ ID NO: 611573 - RNA, 22 nt, Artificial Sequence
  Synthetic
gaugauaguuucuuuugcugug

SEQ ID NO: 611574 - RNA, 23 nt, Artificial Sequence
  Synthetic
ugaugauaguuucuuuugcugug

SEQ ID NO: 611575 - RNA, 24 nt, Artificial Sequence
  Synthetic
cugaugauaguuucuuuugcugug

SEQ ID NO: 611576 - RNA, 21 nt, Artificial Sequence
  Synthetic
uugauaguuucuuuugcugug

SEQ ID NO: 611577 - RNA, 22 nt, Artificial Sequence
  Synthetic
guugauaguuucuuuugcugug

SEQ ID NO: 611578 - RNA, 23 nt, Artificial Sequence
  Synthetic
uguugauaguuucuuuugcugug

SEQ ID NO: 611579 - RNA, 24 nt, Artificial Sequence
  Synthetic
cuguugauaguuucuuuugcugug

SEQ ID NO: 611580 - RNA, 21 nt, Artificial Sequence
  Synthetic
augguaguuucuuuugcugug

SEQ ID NO: 611581 - RNA, 22 nt, Artificial Sequence
  Synthetic
gaugguaguuucuuuugcugug

SEQ ID NO: 611582 - RNA, 23 nt, Artificial Sequence
  Synthetic
ugaugguaguuucuuuugcugug

SEQ ID NO: 611583 - RNA, 24 nt, Artificial Sequence
  Synthetic
cugaugguaguuucuuuugcugug

SEQ ID NO: 611584 - RNA, 18 nt, Artificial Sequence
  Synthetic
aggaaagaacaaucugug

SEQ ID NO: 611585 - RNA, 19 nt, Artificial Sequence
  Synthetic
caggaaagaacaaucugug

SEQ ID NO: 611586 - RNA, 20 nt, Artificial Sequence
  Synthetic
ucaggaaagaacaaucugug

SEQ ID NO: 611587 - RNA, 21 nt, Artificial Sequence
  Synthetic
cucaggaaagaacaaucugug

SEQ ID NO: 611588 - RNA, 22 nt, Artificial Sequence
  Synthetic
ucucaggaaagaacaaucugug

SEQ ID NO: 611589 - RNA, 23 nt, Artificial Sequence
  Synthetic
aucucaggaaagaacaaucugug

SEQ ID NO: 611590 - RNA, 24 nt, Artificial Sequence
  Synthetic
uaucucaggaaagaacaaucugug

SEQ ID NO: 611591 - RNA, 18 nt, Artificial Sequence
  Synthetic
uagacaggcagaucugug

SEQ ID NO: 611592 - RNA, 19 nt, Artificial Sequence
  Synthetic
cuagacaggcagaucugug

SEQ ID NO: 611593 - RNA, 20 nt, Artificial Sequence
  Synthetic
ucuagacaggcagaucugug

SEQ ID NO: 611594 - RNA, 21 nt, Artificial Sequence
  Synthetic
cucuagacaggcagaucugug

SEQ ID NO: 611595 - RNA, 22 nt, Artificial Sequence
  Synthetic
ucucuagacaggcagaucugug

SEQ ID NO: 611596 - RNA, 23 nt, Artificial Sequence
  Synthetic
aucucuagacaggcagaucugug

SEQ ID NO: 611597 - RNA, 24 nt, Artificial Sequence
  Synthetic
aaucucuagacaggcagaucugug

SEQ ID NO: 611598 - RNA, 18 nt, Artificial Sequence
  Synthetic
uguuuaacaaacucugug

SEQ ID NO: 611599 - RNA, 19 nt, Artificial Sequence
  Synthetic
guguuuaacaaacucugug

SEQ ID NO: 611600 - RNA, 20 nt, Artificial Sequence
  Synthetic
uguguuuaacaaacucugug

SEQ ID NO: 611601 - RNA, 21 nt, Artificial Sequence
  Synthetic
auguguuuaacaaacucugug

SEQ ID NO: 611602 - RNA, 22 nt, Artificial Sequence
  Synthetic
aauguguuuaacaaacucugug

SEQ ID NO: 611603 - RNA, 23 nt, Artificial Sequence
  Synthetic
aaauguguuuaacaaacucugug

SEQ ID NO: 611604 - RNA, 24 nt, Artificial Sequence
  Synthetic
aaaauguguuuaacaaacucugug

SEQ ID NO: 611605 - RNA, 18 nt, Artificial Sequence
  Synthetic
gauuuaugaaacucugug

SEQ ID NO: 611606 - RNA, 19 nt, Artificial Sequence
  Synthetic
ggauuuaugaaacucugug

SEQ ID NO: 611607 - RNA, 20 nt, Artificial Sequence
  Synthetic
aggauuuaugaaacucugug

SEQ ID NO: 611608 - RNA, 21 nt, Artificial Sequence
  Synthetic
caggauuuaugaaacucugug

SEQ ID NO: 611609 - RNA, 22 nt, Artificial Sequence
  Synthetic
ucaggauuuaugaaacucugug

SEQ ID NO: 611610 - RNA, 23 nt, Artificial Sequence
  Synthetic
gucaggauuuaugaaacucugug

SEQ ID NO: 611611 - RNA, 24 nt, Artificial Sequence
  Synthetic
agucaggauuuaugaaacucugug

SEQ ID NO: 611612 - RNA, 21 nt, Artificial Sequence
  Synthetic
ugccccaguggggacucugug

SEQ ID NO: 611613 - RNA, 22 nt, Artificial Sequence
  Synthetic
gugccccaguggggacucugug

SEQ ID NO: 611614 - RNA, 23 nt, Artificial Sequence
  Synthetic
agugccccaguggggacucugug

SEQ ID NO: 611615 - RNA, 24 nt, Artificial Sequence
  Synthetic
cagugccccaguggggacucugug

SEQ ID NO: 611616 - RNA, 18 nt, Artificial Sequence
  Synthetic
aggaggcaccccucugug

SEQ ID NO: 611617 - RNA, 19 nt, Artificial Sequence
  Synthetic
aaggaggcaccccucugug

SEQ ID NO: 611618 - RNA, 20 nt, Artificial Sequence
  Synthetic
caaggaggcaccccucugug

SEQ ID NO: 611619 - RNA, 21 nt, Artificial Sequence
  Synthetic
ccaaggaggcaccccucugug

SEQ ID NO: 611620 - RNA, 22 nt, Artificial Sequence
  Synthetic
gccaaggaggcaccccucugug

SEQ ID NO: 611621 - RNA, 23 nt, Artificial Sequence
  Synthetic
ggccaaggaggcaccccucugug

SEQ ID NO: 611622 - RNA, 24 nt, Artificial Sequence
  Synthetic
uggccaaggaggcaccccucugug

SEQ ID NO: 611623 - RNA, 18 nt, Artificial Sequence
  Synthetic
uaagagacuagcucugug

SEQ ID NO: 611624 - RNA, 19 nt, Artificial Sequence
  Synthetic
uuaagagacuagcucugug

SEQ ID NO: 611625 - RNA, 20 nt, Artificial Sequence
  Synthetic
auuaagagacuagcucugug

SEQ ID NO: 611626 - RNA, 21 nt, Artificial Sequence
  Synthetic
aauuaagagacuagcucugug

SEQ ID NO: 611627 - RNA, 22 nt, Artificial Sequence
  Synthetic
caauuaagagacuagcucugug

SEQ ID NO: 611628 - RNA, 23 nt, Artificial Sequence
  Synthetic
ucaauuaagagacuagcucugug

SEQ ID NO: 611629 - RNA, 24 nt, Artificial Sequence
  Synthetic
aucaauuaagagacuagcucugug

SEQ ID NO: 611630 - RNA, 18 nt, Artificial Sequence
  Synthetic
uaaaucagaaucucugug

SEQ ID NO: 611631 - RNA, 19 nt, Artificial Sequence
  Synthetic
cuaaaucagaaucucugug

SEQ ID NO: 611632 - RNA, 20 nt, Artificial Sequence
  Synthetic
gcuaaaucagaaucucugug

SEQ ID NO: 611633 - RNA, 21 nt, Artificial Sequence
  Synthetic
ugcuaaaucagaaucucugug

SEQ ID NO: 611634 - RNA, 22 nt, Artificial Sequence
  Synthetic
cugcuaaaucagaaucucugug

SEQ ID NO: 611635 - RNA, 23 nt, Artificial Sequence
  Synthetic
ccugcuaaaucagaaucucugug

SEQ ID NO: 611636 - RNA, 24 nt, Artificial Sequence
  Synthetic
accugcuaaaucagaaucucugug

SEQ ID NO: 611637 - RNA, 18 nt, Artificial Sequence
  Synthetic
uuaaagacgaucucugug

SEQ ID NO: 611638 - RNA, 19 nt, Artificial Sequence
  Synthetic
uuuaaagacgaucucugug

SEQ ID NO: 611639 - RNA, 20 nt, Artificial Sequence
  Synthetic
auuuaaagacgaucucugug

SEQ ID NO: 611640 - RNA, 21 nt, Artificial Sequence
  Synthetic
uauuuaaagacgaucucugug

SEQ ID NO: 611641 - RNA, 22 nt, Artificial Sequence
  Synthetic
auauuuaaagacgaucucugug

SEQ ID NO: 611642 - RNA, 23 nt, Artificial Sequence
  Synthetic
uauauuuaaagacgaucucugug

SEQ ID NO: 611643 - RNA, 24 nt, Artificial Sequence
  Synthetic
cuauauuuaaagacgaucucugug

SEQ ID NO: 611644 - RNA, 18 nt, Artificial Sequence
  Synthetic
cagauuguggagucugug

SEQ ID NO: 611645 - RNA, 19 nt, Artificial Sequence
  Synthetic
ccagauuguggagucugug

SEQ ID NO: 611646 - RNA, 20 nt, Artificial Sequence
  Synthetic
accagauuguggagucugug

SEQ ID NO: 611647 - RNA, 21 nt, Artificial Sequence
  Synthetic
caccagauuguggagucugug

SEQ ID NO: 611648 - RNA, 22 nt, Artificial Sequence
  Synthetic
ucaccagauuguggagucugug

SEQ ID NO: 611649 - RNA, 23 nt, Artificial Sequence
  Synthetic
uucaccagauuguggagucugug

SEQ ID NO: 611650 - RNA, 24 nt, Artificial Sequence
  Synthetic
cuucaccagauuguggagucugug

SEQ ID NO: 611651 - RNA, 18 nt, Artificial Sequence
  Synthetic
aacuuguucuagucugug

SEQ ID NO: 611652 - RNA, 19 nt, Artificial Sequence
  Synthetic
caacuuguucuagucugug

SEQ ID NO: 611653 - RNA, 20 nt, Artificial Sequence
  Synthetic
ccaacuuguucuagucugug

SEQ ID NO: 611654 - RNA, 21 nt, Artificial Sequence
  Synthetic
cccaacuuguucuagucugug

SEQ ID NO: 611655 - RNA, 22 nt, Artificial Sequence
  Synthetic
ucccaacuuguucuagucugug

SEQ ID NO: 611656 - RNA, 23 nt, Artificial Sequence
  Synthetic
aucccaacuuguucuagucugug

SEQ ID NO: 611657 - RNA, 24 nt, Artificial Sequence
  Synthetic
caucccaacuuguucuagucugug

SEQ ID NO: 611658 - RNA, 18 nt, Artificial Sequence
  Synthetic
cuauaauagcauucugug

SEQ ID NO: 611659 - RNA, 19 nt, Artificial Sequence
  Synthetic
acuauaauagcauucugug

SEQ ID NO: 611660 - RNA, 20 nt, Artificial Sequence
  Synthetic
uacuauaauagcauucugug

SEQ ID NO: 611661 - RNA, 21 nt, Artificial Sequence
  Synthetic
uuacuauaauagcauucugug

SEQ ID NO: 611662 - RNA, 22 nt, Artificial Sequence
  Synthetic
guuacuauaauagcauucugug

SEQ ID NO: 611663 - RNA, 23 nt, Artificial Sequence
  Synthetic
uguuacuauaauagcauucugug

SEQ ID NO: 611664 - RNA, 24 nt, Artificial Sequence
  Synthetic
guguuacuauaauagcauucugug

SEQ ID NO: 611665 - RNA, 18 nt, Artificial Sequence
  Synthetic
uccaauaucccuucugug

SEQ ID NO: 611666 - RNA, 19 nt, Artificial Sequence
  Synthetic
guccaauaucccuucugug

SEQ ID NO: 611667 - RNA, 20 nt, Artificial Sequence
  Synthetic
uguccaauaucccuucugug

SEQ ID NO: 611668 - RNA, 21 nt, Artificial Sequence
  Synthetic
cuguccaauaucccuucugug

SEQ ID NO: 611669 - RNA, 22 nt, Artificial Sequence
  Synthetic
ucuguccaauaucccuucugug

SEQ ID NO: 611670 - RNA, 23 nt, Artificial Sequence
  Synthetic
gucuguccaauaucccuucugug

SEQ ID NO: 611671 - RNA, 24 nt, Artificial Sequence
  Synthetic
ugucuguccaauaucccuucugug

SEQ ID NO: 611672 - RNA, 18 nt, Artificial Sequence
  Synthetic
aguagaaacucuucugug

SEQ ID NO: 611673 - RNA, 19 nt, Artificial Sequence
  Synthetic
aaguagaaacucuucugug

SEQ ID NO: 611674 - RNA, 20 nt, Artificial Sequence
  Synthetic
caaguagaaacucuucugug

SEQ ID NO: 611675 - RNA, 21 nt, Artificial Sequence
  Synthetic
ucaaguagaaacucuucugug

SEQ ID NO: 611676 - RNA, 22 nt, Artificial Sequence
  Synthetic
uucaaguagaaacucuucugug

SEQ ID NO: 611677 - RNA, 23 nt, Artificial Sequence
  Synthetic
guucaaguagaaacucuucugug

SEQ ID NO: 611678 - RNA, 24 nt, Artificial Sequence
  Synthetic
uguucaaguagaaacucuucugug

SEQ ID NO: 611679 - RNA, 18 nt, Artificial Sequence
  Synthetic
uguaguguuucuucugug

SEQ ID NO: 611680 - RNA, 19 nt, Artificial Sequence
  Synthetic
cuguaguguuucuucugug

SEQ ID NO: 611681 - RNA, 20 nt, Artificial Sequence
  Synthetic
ucuguaguguuucuucugug

SEQ ID NO: 611682 - RNA, 21 nt, Artificial Sequence
  Synthetic
uucuguaguguuucuucugug

SEQ ID NO: 611683 - RNA, 22 nt, Artificial Sequence
  Synthetic
auucuguaguguuucuucugug

SEQ ID NO: 611684 - RNA, 23 nt, Artificial Sequence
  Synthetic
cauucuguaguguuucuucugug

SEQ ID NO: 611685 - RNA, 24 nt, Artificial Sequence
  Synthetic
ucauucuguaguguuucuucugug

SEQ ID NO: 611686 - RNA, 18 nt, Artificial Sequence
  Synthetic
cacggggaugguucugug

SEQ ID NO: 611687 - RNA, 19 nt, Artificial Sequence
  Synthetic
ucacggggaugguucugug

SEQ ID NO: 611688 - RNA, 20 nt, Artificial Sequence
  Synthetic
aucacggggaugguucugug

SEQ ID NO: 611689 - RNA, 21 nt, Artificial Sequence
  Synthetic
aaucacggggaugguucugug

SEQ ID NO: 611690 - RNA, 22 nt, Artificial Sequence
  Synthetic
gaaucacggggaugguucugug

SEQ ID NO: 611691 - RNA, 23 nt, Artificial Sequence
  Synthetic
ugaaucacggggaugguucugug

SEQ ID NO: 611692 - RNA, 24 nt, Artificial Sequence
  Synthetic
uugaaucacggggaugguucugug

SEQ ID NO: 611693 - RNA, 18 nt, Artificial Sequence
  Synthetic
ucuuuuguacuuucugug

SEQ ID NO: 611694 - RNA, 19 nt, Artificial Sequence
  Synthetic
uucuuuuguacuuucugug

SEQ ID NO: 611695 - RNA, 20 nt, Artificial Sequence
  Synthetic
cuucuuuuguacuuucugug

SEQ ID NO: 611696 - RNA, 21 nt, Artificial Sequence
  Synthetic
ucuucuuuuguacuuucugug

SEQ ID NO: 611697 - RNA, 22 nt, Artificial Sequence
  Synthetic
aucuucuuuuguacuuucugug

SEQ ID NO: 611698 - RNA, 23 nt, Artificial Sequence
  Synthetic
gaucuucuuuuguacuuucugug

SEQ ID NO: 611699 - RNA, 24 nt, Artificial Sequence
  Synthetic
agaucuucuuuuguacuuucugug

SEQ ID NO: 611700 - RNA, 18 nt, Artificial Sequence
  Synthetic
aguuggaggcaaagugug

SEQ ID NO: 611701 - RNA, 19 nt, Artificial Sequence
  Synthetic
aaguuggaggcaaagugug

SEQ ID NO: 611702 - RNA, 20 nt, Artificial Sequence
  Synthetic
gaaguuggaggcaaagugug

SEQ ID NO: 611703 - RNA, 21 nt, Artificial Sequence
  Synthetic
ggaaguuggaggcaaagugug

SEQ ID NO: 611704 - RNA, 22 nt, Artificial Sequence
  Synthetic
aggaaguuggaggcaaagugug

SEQ ID NO: 611705 - RNA, 23 nt, Artificial Sequence
  Synthetic
gaggaaguuggaggcaaagugug

SEQ ID NO: 611706 - RNA, 24 nt, Artificial Sequence
  Synthetic
agaggaaguuggaggcaaagugug

SEQ ID NO: 611707 - RNA, 18 nt, Artificial Sequence
  Synthetic
gggugagaugaaagugug

SEQ ID NO: 611708 - RNA, 19 nt, Artificial Sequence
  Synthetic
agggugagaugaaagugug

SEQ ID NO: 611709 - RNA, 20 nt, Artificial Sequence
  Synthetic
gagggugagaugaaagugug

SEQ ID NO: 611710 - RNA, 21 nt, Artificial Sequence
  Synthetic
agagggugagaugaaagugug

SEQ ID NO: 611711 - RNA, 22 nt, Artificial Sequence
  Synthetic
gagagggugagaugaaagugug

SEQ ID NO: 611712 - RNA, 23 nt, Artificial Sequence
  Synthetic
ugagagggugagaugaaagugug

SEQ ID NO: 611713 - RNA, 24 nt, Artificial Sequence
  Synthetic
uugagagggugagaugaaagugug

SEQ ID NO: 611714 - RNA, 18 nt, Artificial Sequence
  Synthetic
gcgcaaaguuaaagugug

SEQ ID NO: 611715 - RNA, 19 nt, Artificial Sequence
  Synthetic
agcgcaaaguuaaagugug

SEQ ID NO: 611716 - RNA, 20 nt, Artificial Sequence
  Synthetic
cagcgcaaaguuaaagugug

SEQ ID NO: 611717 - RNA, 21 nt, Artificial Sequence
  Synthetic
ucagcgcaaaguuaaagugug

SEQ ID NO: 611718 - RNA, 22 nt, Artificial Sequence
  Synthetic
uucagcgcaaaguuaaagugug

SEQ ID NO: 611719 - RNA, 23 nt, Artificial Sequence
  Synthetic
uuucagcgcaaaguuaaagugug

SEQ ID NO: 611720 - RNA, 24 nt, Artificial Sequence
  Synthetic
auuucagcgcaaaguuaaagugug

SEQ ID NO: 611721 - RNA, 18 nt, Artificial Sequence
  Synthetic
auccaacuaccaagugug

SEQ ID NO: 611722 - RNA, 19 nt, Artificial Sequence
  Synthetic
aauccaacuaccaagugug

SEQ ID NO: 611723 - RNA, 20 nt, Artificial Sequence
  Synthetic
aaauccaacuaccaagugug

SEQ ID NO: 611724 - RNA, 21 nt, Artificial Sequence
  Synthetic
gaaauccaacuaccaagugug

SEQ ID NO: 611725 - RNA, 22 nt, Artificial Sequence
  Synthetic
ggaaauccaacuaccaagugug

SEQ ID NO: 611726 - RNA, 23 nt, Artificial Sequence
  Synthetic
uggaaauccaacuaccaagugug

SEQ ID NO: 611727 - RNA, 24 nt, Artificial Sequence
  Synthetic
uuggaaauccaacuaccaagugug

SEQ ID NO: 611728 - RNA, 18 nt, Artificial Sequence
  Synthetic
gacuuuugucccagugug

SEQ ID NO: 611729 - RNA, 19 nt, Artificial Sequence
  Synthetic
ggacuuuugucccagugug

SEQ ID NO: 611730 - RNA, 20 nt, Artificial Sequence
  Synthetic
aggacuuuugucccagugug

SEQ ID NO: 611731 - RNA, 21 nt, Artificial Sequence
  Synthetic
aaggacuuuugucccagugug

SEQ ID NO: 611732 - RNA, 22 nt, Artificial Sequence
  Synthetic
caaggacuuuugucccagugug

SEQ ID NO: 611733 - RNA, 23 nt, Artificial Sequence
  Synthetic
gcaaggacuuuugucccagugug

SEQ ID NO: 611734 - RNA, 24 nt, Artificial Sequence
  Synthetic
ugcaaggacuuuugucccagugug

SEQ ID NO: 611735 - RNA, 18 nt, Artificial Sequence
  Synthetic
cgcauucaaagcagugug

SEQ ID NO: 611736 - RNA, 19 nt, Artificial Sequence
  Synthetic
acgcauucaaagcagugug

SEQ ID NO: 611737 - RNA, 20 nt, Artificial Sequence
  Synthetic
gacgcauucaaagcagugug

SEQ ID NO: 611738 - RNA, 21 nt, Artificial Sequence
  Synthetic
ggacgcauucaaagcagugug

SEQ ID NO: 611739 - RNA, 22 nt, Artificial Sequence
  Synthetic
gggacgcauucaaagcagugug

SEQ ID NO: 611740 - RNA, 23 nt, Artificial Sequence
  Synthetic
ugggacgcauucaaagcagugug

SEQ ID NO: 611741 - RNA, 24 nt, Artificial Sequence
  Synthetic
cugggacgcauucaaagcagugug

SEQ ID NO: 611742 - RNA, 18 nt, Artificial Sequence
  Synthetic
ucgagagugagcagugug

SEQ ID NO: 611743 - RNA, 19 nt, Artificial Sequence
  Synthetic
uucgagagugagcagugug

SEQ ID NO: 611744 - RNA, 20 nt, Artificial Sequence
  Synthetic
uuucgagagugagcagugug

SEQ ID NO: 611745 - RNA, 21 nt, Artificial Sequence
  Synthetic
uuuucgagagugagcagugug

SEQ ID NO: 611746 - RNA, 22 nt, Artificial Sequence
  Synthetic
guuuucgagagugagcagugug

SEQ ID NO: 611747 - RNA, 23 nt, Artificial Sequence
  Synthetic
cguuuucgagagugagcagugug

SEQ ID NO: 611748 - RNA, 24 nt, Artificial Sequence
  Synthetic
acguuuucgagagugagcagugug

SEQ ID NO: 611749 - RNA, 18 nt, Artificial Sequence
  Synthetic
guggcuuuuggcagugug

SEQ ID NO: 611750 - RNA, 19 nt, Artificial Sequence
  Synthetic
aguggcuuuuggcagugug

SEQ ID NO: 611751 - RNA, 20 nt, Artificial Sequence
  Synthetic
caguggcuuuuggcagugug

SEQ ID NO: 611752 - RNA, 21 nt, Artificial Sequence
  Synthetic
gcaguggcuuuuggcagugug

SEQ ID NO: 611753 - RNA, 22 nt, Artificial Sequence
  Synthetic
ugcaguggcuuuuggcagugug

SEQ ID NO: 611754 - RNA, 23 nt, Artificial Sequence
  Synthetic
cugcaguggcuuuuggcagugug

SEQ ID NO: 611755 - RNA, 24 nt, Artificial Sequence
  Synthetic
ucugcaguggcuuuuggcagugug

SEQ ID NO: 611756 - RNA, 18 nt, Artificial Sequence
  Synthetic
aaugcuggagagagugug

SEQ ID NO: 611757 - RNA, 19 nt, Artificial Sequence
  Synthetic
aaaugcuggagagagugug

SEQ ID NO: 611758 - RNA, 20 nt, Artificial Sequence
  Synthetic
caaaugcuggagagagugug

SEQ ID NO: 611759 - RNA, 21 nt, Artificial Sequence
  Synthetic
acaaaugcuggagagagugug

SEQ ID NO: 611760 - RNA, 22 nt, Artificial Sequence
  Synthetic
uacaaaugcuggagagagugug

SEQ ID NO: 611761 - RNA, 23 nt, Artificial Sequence
  Synthetic
uuacaaaugcuggagagagugug

SEQ ID NO: 611762 - RNA, 24 nt, Artificial Sequence
  Synthetic
auuacaaaugcuggagagagugug

SEQ ID NO: 611763 - RNA, 18 nt, Artificial Sequence
  Synthetic
ucaacuuuaaggagugug

SEQ ID NO: 611764 - RNA, 19 nt, Artificial Sequence
  Synthetic
aucaacuuuaaggagugug

SEQ ID NO: 611765 - RNA, 20 nt, Artificial Sequence
  Synthetic
aaucaacuuuaaggagugug

SEQ ID NO: 611766 - RNA, 21 nt, Artificial Sequence
  Synthetic
uaaucaacuuuaaggagugug

SEQ ID NO: 611767 - RNA, 22 nt, Artificial Sequence
  Synthetic
uuaaucaacuuuaaggagugug

SEQ ID NO: 611768 - RNA, 23 nt, Artificial Sequence
  Synthetic
auuaaucaacuuuaaggagugug

SEQ ID NO: 611769 - RNA, 24 nt, Artificial Sequence
  Synthetic
uauuaaucaacuuuaaggagugug

SEQ ID NO: 611770 - RNA, 18 nt, Artificial Sequence
  Synthetic
gacaauuucaauagugug

SEQ ID NO: 611771 - RNA, 19 nt, Artificial Sequence
  Synthetic
ggacaauuucaauagugug

SEQ ID NO: 611772 - RNA, 20 nt, Artificial Sequence
  Synthetic
uggacaauuucaauagugug

SEQ ID NO: 611773 - RNA, 21 nt, Artificial Sequence
  Synthetic
cuggacaauuucaauagugug

SEQ ID NO: 611774 - RNA, 22 nt, Artificial Sequence
  Synthetic
ccuggacaauuucaauagugug

SEQ ID NO: 611775 - RNA, 23 nt, Artificial Sequence
  Synthetic
accuggacaauuucaauagugug

SEQ ID NO: 611776 - RNA, 24 nt, Artificial Sequence
  Synthetic
caccuggacaauuucaauagugug

SEQ ID NO: 611777 - RNA, 18 nt, Artificial Sequence
  Synthetic
aagaggaagcauagugug

SEQ ID NO: 611778 - RNA, 19 nt, Artificial Sequence
  Synthetic
aaagaggaagcauagugug

SEQ ID NO: 611779 - RNA, 20 nt, Artificial Sequence
  Synthetic
uaaagaggaagcauagugug

SEQ ID NO: 611780 - RNA, 21 nt, Artificial Sequence
  Synthetic
auaaagaggaagcauagugug

SEQ ID NO: 611781 - RNA, 22 nt, Artificial Sequence
  Synthetic
gauaaagaggaagcauagugug

SEQ ID NO: 611782 - RNA, 23 nt, Artificial Sequence
  Synthetic
ugauaaagaggaagcauagugug

SEQ ID NO: 611783 - RNA, 24 nt, Artificial Sequence
  Synthetic
cugauaaagaggaagcauagugug

SEQ ID NO: 611784 - RNA, 18 nt, Artificial Sequence
  Synthetic
gaaauagaagauagugug

SEQ ID NO: 611785 - RNA, 19 nt, Artificial Sequence
  Synthetic
ugaaauagaagauagugug

SEQ ID NO: 611786 - RNA, 20 nt, Artificial Sequence
  Synthetic
gugaaauagaagauagugug

SEQ ID NO: 611787 - RNA, 21 nt, Artificial Sequence
  Synthetic
ugugaaauagaagauagugug

SEQ ID NO: 611788 - RNA, 22 nt, Artificial Sequence
  Synthetic
gugugaaauagaagauagugug

SEQ ID NO: 611789 - RNA, 23 nt, Artificial Sequence
  Synthetic
agugugaaauagaagauagugug

SEQ ID NO: 611790 - RNA, 24 nt, Artificial Sequence
  Synthetic
cagugugaaauagaagauagugug

SEQ ID NO: 611791 - RNA, 18 nt, Artificial Sequence
  Synthetic
uuugccauugcuagugug

SEQ ID NO: 611792 - RNA, 19 nt, Artificial Sequence
  Synthetic
cuuugccauugcuagugug

SEQ ID NO: 611793 - RNA, 20 nt, Artificial Sequence
  Synthetic
gcuuugccauugcuagugug

SEQ ID NO: 611794 - RNA, 21 nt, Artificial Sequence
  Synthetic
agcuuugccauugcuagugug

SEQ ID NO: 611795 - RNA, 22 nt, Artificial Sequence
  Synthetic
aagcuuugccauugcuagugug

SEQ ID NO: 611796 - RNA, 23 nt, Artificial Sequence
  Synthetic
aaagcuuugccauugcuagugug

SEQ ID NO: 611797 - RNA, 24 nt, Artificial Sequence
  Synthetic
caaagcuuugccauugcuagugug

SEQ ID NO: 611798 - RNA, 18 nt, Artificial Sequence
  Synthetic
uuuaagagagaaggugug

SEQ ID NO: 611799 - RNA, 19 nt, Artificial Sequence
  Synthetic
uuuuaagagagaaggugug

SEQ ID NO: 611800 - RNA, 20 nt, Artificial Sequence
  Synthetic
guuuuaagagagaaggugug

SEQ ID NO: 611801 - RNA, 21 nt, Artificial Sequence
  Synthetic
gguuuuaagagagaaggugug

SEQ ID NO: 611802 - RNA, 22 nt, Artificial Sequence
  Synthetic
ugguuuuaagagagaaggugug

SEQ ID NO: 611803 - RNA, 23 nt, Artificial Sequence
  Synthetic
gugguuuuaagagagaaggugug

SEQ ID NO: 611804 - RNA, 24 nt, Artificial Sequence
  Synthetic
ggugguuuuaagagagaaggugug

SEQ ID NO: 611805 - RNA, 18 nt, Artificial Sequence
  Synthetic
ggaagggggaggggugug

SEQ ID NO: 611806 - RNA, 19 nt, Artificial Sequence
  Synthetic
gggaagggggaggggugug

SEQ ID NO: 611807 - RNA, 20 nt, Artificial Sequence
  Synthetic
ggggaagggggaggggugug

SEQ ID NO: 611808 - RNA, 21 nt, Artificial Sequence
  Synthetic
uggggaagggggaggggugug

SEQ ID NO: 611809 - RNA, 22 nt, Artificial Sequence
  Synthetic
uuggggaagggggaggggugug

SEQ ID NO: 611810 - RNA, 23 nt, Artificial Sequence
  Synthetic
uuuggggaagggggaggggugug

SEQ ID NO: 611811 - RNA, 24 nt, Artificial Sequence
  Synthetic
uuuuggggaagggggaggggugug

SEQ ID NO: 611812 - RNA, 18 nt, Artificial Sequence
  Synthetic
ugaagggggaggggugug

SEQ ID NO: 611813 - RNA, 19 nt, Artificial Sequence
  Synthetic
gugaagggggaggggugug

SEQ ID NO: 611814 - RNA, 20 nt, Artificial Sequence
  Synthetic
ugugaagggggaggggugug

SEQ ID NO: 611815 - RNA, 21 nt, Artificial Sequence
  Synthetic
gugugaagggggaggggugug

SEQ ID NO: 611816 - RNA, 22 nt, Artificial Sequence
  Synthetic
ggugugaagggggaggggugug

SEQ ID NO: 611817 - RNA, 23 nt, Artificial Sequence
  Synthetic
gggugugaagggggaggggugug

SEQ ID NO: 611818 - RNA, 24 nt, Artificial Sequence
  Synthetic
ggggugugaagggggaggggugug

SEQ ID NO: 611819 - RNA, 18 nt, Artificial Sequence
  Synthetic
gguggguaugggggugug

SEQ ID NO: 611820 - RNA, 19 nt, Artificial Sequence
  Synthetic
ugguggguaugggggugug

SEQ ID NO: 611821 - RNA, 20 nt, Artificial Sequence
  Synthetic
gugguggguaugggggugug

SEQ ID NO: 611822 - RNA, 21 nt, Artificial Sequence
  Synthetic
agugguggguaugggggugug

SEQ ID NO: 611823 - RNA, 22 nt, Artificial Sequence
  Synthetic
gagugguggguaugggggugug

SEQ ID NO: 611824 - RNA, 23 nt, Artificial Sequence
  Synthetic
ggagugguggguaugggggugug

SEQ ID NO: 611825 - RNA, 24 nt, Artificial Sequence
  Synthetic
uggagugguggguaugggggugug

SEQ ID NO: 611826 - RNA, 18 nt, Artificial Sequence
  Synthetic
uaauaugcugggggugug

SEQ ID NO: 611827 - RNA, 19 nt, Artificial Sequence
  Synthetic
auaauaugcugggggugug

SEQ ID NO: 611828 - RNA, 20 nt, Artificial Sequence
  Synthetic
gauaauaugcugggggugug

SEQ ID NO: 611829 - RNA, 21 nt, Artificial Sequence
  Synthetic
ugauaauaugcugggggugug

SEQ ID NO: 611830 - RNA, 22 nt, Artificial Sequence
  Synthetic
gugauaauaugcugggggugug

SEQ ID NO: 611831 - RNA, 23 nt, Artificial Sequence
  Synthetic
ugugauaauaugcugggggugug

SEQ ID NO: 611832 - RNA, 24 nt, Artificial Sequence
  Synthetic
uugugauaauaugcugggggugug

SEQ ID NO: 611833 - RNA, 18 nt, Artificial Sequence
  Synthetic
acccaaugauugggugug

SEQ ID NO: 611834 - RNA, 19 nt, Artificial Sequence
  Synthetic
cacccaaugauugggugug

SEQ ID NO: 611835 - RNA, 20 nt, Artificial Sequence
  Synthetic
ucacccaaugauugggugug

SEQ ID NO: 611836 - RNA, 21 nt, Artificial Sequence
  Synthetic
cucacccaaugauugggugug

SEQ ID NO: 611837 - RNA, 22 nt, Artificial Sequence
  Synthetic
ccucacccaaugauugggugug

SEQ ID NO: 611838 - RNA, 23 nt, Artificial Sequence
  Synthetic
uccucacccaaugauugggugug

SEQ ID NO: 611839 - RNA, 24 nt, Artificial Sequence
  Synthetic
cuccucacccaaugauugggugug

SEQ ID NO: 611840 - RNA, 18 nt, Artificial Sequence
  Synthetic
ugaaugcugaauggugug

SEQ ID NO: 611841 - RNA, 19 nt, Artificial Sequence
  Synthetic
cugaaugcugaauggugug

SEQ ID NO: 611842 - RNA, 20 nt, Artificial Sequence
  Synthetic
acugaaugcugaauggugug

SEQ ID NO: 611843 - RNA, 21 nt, Artificial Sequence
  Synthetic
cacugaaugcugaauggugug

SEQ ID NO: 611844 - RNA, 22 nt, Artificial Sequence
  Synthetic
gcacugaaugcugaauggugug

SEQ ID NO: 611845 - RNA, 23 nt, Artificial Sequence
  Synthetic
ugcacugaaugcugaauggugug

SEQ ID NO: 611846 - RNA, 24 nt, Artificial Sequence
  Synthetic
uugcacugaaugcugaauggugug

SEQ ID NO: 611847 - RNA, 18 nt, Artificial Sequence
  Synthetic
ucacaaagacuuggugug

SEQ ID NO: 611848 - RNA, 19 nt, Artificial Sequence
  Synthetic
cucacaaagacuuggugug

SEQ ID NO: 611849 - RNA, 20 nt, Artificial Sequence
  Synthetic
acucacaaagacuuggugug

SEQ ID NO: 611850 - RNA, 21 nt, Artificial Sequence
  Synthetic
aacucacaaagacuuggugug

SEQ ID NO: 611851 - RNA, 22 nt, Artificial Sequence
  Synthetic
gaacucacaaagacuuggugug

SEQ ID NO: 611852 - RNA, 23 nt, Artificial Sequence
  Synthetic
ggaacucacaaagacuuggugug

SEQ ID NO: 611853 - RNA, 24 nt, Artificial Sequence
  Synthetic
uggaacucacaaagacuuggugug

SEQ ID NO: 611854 - RNA, 18 nt, Artificial Sequence
  Synthetic
accuccccuacaugugug

SEQ ID NO: 611855 - RNA, 19 nt, Artificial Sequence
  Synthetic
uaccuccccuacaugugug

SEQ ID NO: 611856 - RNA, 20 nt, Artificial Sequence
  Synthetic
auaccuccccuacaugugug

SEQ ID NO: 611857 - RNA, 21 nt, Artificial Sequence
  Synthetic
cauaccuccccuacaugugug

SEQ ID NO: 611858 - RNA, 22 nt, Artificial Sequence
  Synthetic
ccauaccuccccuacaugugug

SEQ ID NO: 611859 - RNA, 23 nt, Artificial Sequence
  Synthetic
accauaccuccccuacaugugug

SEQ ID NO: 611860 - RNA, 24 nt, Artificial Sequence
  Synthetic
aaccauaccuccccuacaugugug

SEQ ID NO: 611861 - RNA, 18 nt, Artificial Sequence
  Synthetic
ugccuccaaggcugugug

SEQ ID NO: 611862 - RNA, 19 nt, Artificial Sequence
  Synthetic
augccuccaaggcugugug

SEQ ID NO: 611863 - RNA, 20 nt, Artificial Sequence
  Synthetic
uaugccuccaaggcugugug

SEQ ID NO: 611864 - RNA, 21 nt, Artificial Sequence
  Synthetic
uuaugccuccaaggcugugug

SEQ ID NO: 611865 - RNA, 22 nt, Artificial Sequence
  Synthetic
cuuaugccuccaaggcugugug

SEQ ID NO: 611866 - RNA, 23 nt, Artificial Sequence
  Synthetic
acuuaugccuccaaggcugugug

SEQ ID NO: 611867 - RNA, 24 nt, Artificial Sequence
  Synthetic
aacuuaugccuccaaggcugugug

SEQ ID NO: 611868 - RNA, 18 nt, Artificial Sequence
  Synthetic
gagaacaaguucugugug

SEQ ID NO: 611869 - RNA, 19 nt, Artificial Sequence
  Synthetic
cgagaacaaguucugugug

SEQ ID NO: 611870 - RNA, 20 nt, Artificial Sequence
  Synthetic
ucgagaacaaguucugugug

SEQ ID NO: 611871 - RNA, 21 nt, Artificial Sequence
  Synthetic
aucgagaacaaguucugugug

SEQ ID NO: 611872 - RNA, 22 nt, Artificial Sequence
  Synthetic
aaucgagaacaaguucugugug

SEQ ID NO: 611873 - RNA, 23 nt, Artificial Sequence
  Synthetic
caaucgagaacaaguucugugug

SEQ ID NO: 611874 - RNA, 24 nt, Artificial Sequence
  Synthetic
ucaaucgagaacaaguucugugug

SEQ ID NO: 611875 - RNA, 18 nt, Artificial Sequence
  Synthetic
ugcuacgucaagugugug

SEQ ID NO: 611876 - RNA, 19 nt, Artificial Sequence
  Synthetic
cugcuacgucaagugugug

SEQ ID NO: 611877 - RNA, 20 nt, Artificial Sequence
  Synthetic
acugcuacgucaagugugug

SEQ ID NO: 611878 - RNA, 21 nt, Artificial Sequence
  Synthetic
cacugcuacgucaagugugug

SEQ ID NO: 611879 - RNA, 22 nt, Artificial Sequence
  Synthetic
ccacugcuacgucaagugugug

SEQ ID NO: 611880 - RNA, 23 nt, Artificial Sequence
  Synthetic
cccacugcuacgucaagugugug

SEQ ID NO: 611881 - RNA, 24 nt, Artificial Sequence
  Synthetic
ucccacugcuacgucaagugugug

SEQ ID NO: 611882 - RNA, 18 nt, Artificial Sequence
  Synthetic
caagcuugacagugugug

SEQ ID NO: 611883 - RNA, 19 nt, Artificial Sequence
  Synthetic
ucaagcuugacagugugug

SEQ ID NO: 611884 - RNA, 20 nt, Artificial Sequence
  Synthetic
cucaagcuugacagugugug

SEQ ID NO: 611885 - RNA, 21 nt, Artificial Sequence
  Synthetic
gcucaagcuugacagugugug

SEQ ID NO: 611886 - RNA, 22 nt, Artificial Sequence
  Synthetic
ggcucaagcuugacagugugug

SEQ ID NO: 611887 - RNA, 23 nt, Artificial Sequence
  Synthetic
uggcucaagcuugacagugugug

SEQ ID NO: 611888 - RNA, 24 nt, Artificial Sequence
  Synthetic
uuggcucaagcuugacagugugug

SEQ ID NO: 611889 - RNA, 18 nt, Artificial Sequence
  Synthetic
ccuauaugcacgugugug

SEQ ID NO: 611890 - RNA, 19 nt, Artificial Sequence
  Synthetic
gccuauaugcacgugugug

SEQ ID NO: 611891 - RNA, 20 nt, Artificial Sequence
  Synthetic
ugccuauaugcacgugugug

SEQ ID NO: 611892 - RNA, 21 nt, Artificial Sequence
  Synthetic
gugccuauaugcacgugugug

SEQ ID NO: 611893 - RNA, 22 nt, Artificial Sequence
  Synthetic
ugugccuauaugcacgugugug

SEQ ID NO: 611894 - RNA, 23 nt, Artificial Sequence
  Synthetic
gugugccuauaugcacgugugug

SEQ ID NO: 611895 - RNA, 24 nt, Artificial Sequence
  Synthetic
agugugccuauaugcacgugugug

SEQ ID NO: 611896 - RNA, 18 nt, Artificial Sequence
  Synthetic
uggugaucauggugugug

SEQ ID NO: 611897 - RNA, 19 nt, Artificial Sequence
  Synthetic
guggugaucauggugugug

SEQ ID NO: 611898 - RNA, 20 nt, Artificial Sequence
  Synthetic
uguggugaucauggugugug

SEQ ID NO: 611899 - RNA, 21 nt, Artificial Sequence
  Synthetic
guguggugaucauggugugug

SEQ ID NO: 611900 - RNA, 22 nt, Artificial Sequence
  Synthetic
uguguggugaucauggugugug

SEQ ID NO: 611901 - RNA, 23 nt, Artificial Sequence
  Synthetic
uuguguggugaucauggugugug

SEQ ID NO: 611902 - RNA, 24 nt, Artificial Sequence
  Synthetic
cuuguguggugaucauggugugug

SEQ ID NO: 611903 - RNA, 18 nt, Artificial Sequence
  Synthetic
agguaaaagaugugugug

SEQ ID NO: 611904 - RNA, 19 nt, Artificial Sequence
  Synthetic
aagguaaaagaugugugug

SEQ ID NO: 611905 - RNA, 20 nt, Artificial Sequence
  Synthetic
gaagguaaaagaugugugug

SEQ ID NO: 611906 - RNA, 21 nt, Artificial Sequence
  Synthetic
agaagguaaaagaugugugug

SEQ ID NO: 611907 - RNA, 22 nt, Artificial Sequence
  Synthetic
aagaagguaaaagaugugugug

SEQ ID NO: 611908 - RNA, 23 nt, Artificial Sequence
  Synthetic
caagaagguaaaagaugugugug

SEQ ID NO: 611909 - RNA, 24 nt, Artificial Sequence
  Synthetic
ccaagaagguaaaagaugugugug

SEQ ID NO: 611910 - RNA, 18 nt, Artificial Sequence
  Synthetic
uaugugccugugugugug

SEQ ID NO: 611911 - RNA, 19 nt, Artificial Sequence
  Synthetic
guaugugccugugugugug

SEQ ID NO: 611912 - RNA, 20 nt, Artificial Sequence
  Synthetic
uguaugugccugugugugug

SEQ ID NO: 611913 - RNA, 21 nt, Artificial Sequence
  Synthetic
guguaugugccugugugugug

SEQ ID NO: 611914 - RNA, 22 nt, Artificial Sequence
  Synthetic
uguguaugugccugugugugug

SEQ ID NO: 611915 - RNA, 23 nt, Artificial Sequence
  Synthetic
uuguguaugugccugugugugug

SEQ ID NO: 611916 - RNA, 24 nt, Artificial Sequence
  Synthetic
uuuguguaugugccugugugugug

SEQ ID NO: 611917 - RNA, 18 nt, Artificial Sequence
  Synthetic
ugcgcgcgugugugugug

SEQ ID NO: 611918 - RNA, 19 nt, Artificial Sequence
  Synthetic
uugcgcgcgugugugugug

SEQ ID NO: 611919 - RNA, 20 nt, Artificial Sequence
  Synthetic
uuugcgcgcgugugugugug

SEQ ID NO: 611920 - RNA, 21 nt, Artificial Sequence
  Synthetic
uuuugcgcgcgugugugugug

SEQ ID NO: 611921 - RNA, 22 nt, Artificial Sequence
  Synthetic
uuuuugcgcgcgugugugugug

SEQ ID NO: 611922 - RNA, 23 nt, Artificial Sequence
  Synthetic
auuuuugcgcgcgugugugugug

SEQ ID NO: 611923 - RNA, 24 nt, Artificial Sequence
  Synthetic
aauuuuugcgcgcgugugugugug

SEQ ID NO: 611924 - RNA, 18 nt, Artificial Sequence
  Synthetic
ggugugugugugugugug

SEQ ID NO: 611925 - RNA, 19 nt, Artificial Sequence
  Synthetic
uggugugugugugugugug

SEQ ID NO: 611926 - RNA, 20 nt, Artificial Sequence
  Synthetic
auggugugugugugugugug

SEQ ID NO: 611927 - RNA, 21 nt, Artificial Sequence
  Synthetic
gauggugugugugugugugug

SEQ ID NO: 611928 - RNA, 22 nt, Artificial Sequence
  Synthetic
ugauggugugugugugugugug

SEQ ID NO: 611929 - RNA, 23 nt, Artificial Sequence
  Synthetic
augauggugugugugugugugug

SEQ ID NO: 611930 - RNA, 24 nt, Artificial Sequence
  Synthetic
caugauggugugugugugugugug

SEQ ID NO: 611931 - RNA, 18 nt, Artificial Sequence
  Synthetic
ugugugugugugugugug

SEQ ID NO: 611932 - RNA, 19 nt, Artificial Sequence
  Synthetic
gugugugugugugugugug

SEQ ID NO: 611933 - RNA, 20 nt, Artificial Sequence
  Synthetic
ggugugugugugugugugug

SEQ ID NO: 611934 - RNA, 21 nt, Artificial Sequence
  Synthetic
uggugugugugugugugugug

SEQ ID NO: 611935 - RNA, 22 nt, Artificial Sequence
  Synthetic
auggugugugugugugugugug

SEQ ID NO: 611936 - RNA, 23 nt, Artificial Sequence
  Synthetic
gauggugugugugugugugugug

SEQ ID NO: 611937 - RNA, 24 nt, Artificial Sequence
  Synthetic
ugauggugugugugugugugugug

SEQ ID NO: 611938 - RNA, 18 nt, Artificial Sequence
  Synthetic
cucccuauccauugugug

SEQ ID NO: 611939 - RNA, 19 nt, Artificial Sequence
  Synthetic
gcucccuauccauugugug

SEQ ID NO: 611940 - RNA, 20 nt, Artificial Sequence
  Synthetic
agcucccuauccauugugug

SEQ ID NO: 611941 - RNA, 21 nt, Artificial Sequence
  Synthetic
uagcucccuauccauugugug

SEQ ID NO: 611942 - RNA, 22 nt, Artificial Sequence
  Synthetic
auagcucccuauccauugugug

SEQ ID NO: 611943 - RNA, 23 nt, Artificial Sequence
  Synthetic
aauagcucccuauccauugugug

SEQ ID NO: 611944 - RNA, 24 nt, Artificial Sequence
  Synthetic
aaauagcucccuauccauugugug

SEQ ID NO: 611945 - RNA, 18 nt, Artificial Sequence
  Synthetic
caccauucuuuuugugug

SEQ ID NO: 611946 - RNA, 19 nt, Artificial Sequence
  Synthetic
gcaccauucuuuuugugug

SEQ ID NO: 611947 - RNA, 20 nt, Artificial Sequence
  Synthetic
agcaccauucuuuuugugug

SEQ ID NO: 611948 - RNA, 21 nt, Artificial Sequence
  Synthetic
aagcaccauucuuuuugugug

SEQ ID NO: 611949 - RNA, 22 nt, Artificial Sequence
  Synthetic
uaagcaccauucuuuuugugug

SEQ ID NO: 611950 - RNA, 23 nt, Artificial Sequence
  Synthetic
uuaagcaccauucuuuuugugug

SEQ ID NO: 611951 - RNA, 24 nt, Artificial Sequence
  Synthetic
auuaagcaccauucuuuuugugug

SEQ ID NO: 611952 - RNA, 18 nt, Artificial Sequence
  Synthetic
gacucaggggcaauugug

SEQ ID NO: 611953 - RNA, 19 nt, Artificial Sequence
  Synthetic
agacucaggggcaauugug

SEQ ID NO: 611954 - RNA, 20 nt, Artificial Sequence
  Synthetic
gagacucaggggcaauugug

SEQ ID NO: 611955 - RNA, 21 nt, Artificial Sequence
  Synthetic
cgagacucaggggcaauugug

SEQ ID NO: 611956 - RNA, 22 nt, Artificial Sequence
  Synthetic
acgagacucaggggcaauugug

SEQ ID NO: 611957 - RNA, 23 nt, Artificial Sequence
  Synthetic
aacgagacucaggggcaauugug

SEQ ID NO: 611958 - RNA, 24 nt, Artificial Sequence
  Synthetic
aaacgagacucaggggcaauugug

SEQ ID NO: 611959 - RNA, 18 nt, Artificial Sequence
  Synthetic
gacgacaaaagaauugug

SEQ ID NO: 611960 - RNA, 19 nt, Artificial Sequence
  Synthetic
agacgacaaaagaauugug

SEQ ID NO: 611961 - RNA, 20 nt, Artificial Sequence
  Synthetic
gagacgacaaaagaauugug

SEQ ID NO: 611962 - RNA, 21 nt, Artificial Sequence
  Synthetic
ugagacgacaaaagaauugug

SEQ ID NO: 611963 - RNA, 22 nt, Artificial Sequence
  Synthetic
augagacgacaaaagaauugug

SEQ ID NO: 611964 - RNA, 23 nt, Artificial Sequence
  Synthetic
gaugagacgacaaaagaauugug

SEQ ID NO: 611965 - RNA, 24 nt, Artificial Sequence
  Synthetic
ugaugagacgacaaaagaauugug

SEQ ID NO: 611966 - RNA, 18 nt, Artificial Sequence
  Synthetic
aagauuucuagaauugug

SEQ ID NO: 611967 - RNA, 19 nt, Artificial Sequence
  Synthetic
uaagauuucuagaauugug

SEQ ID NO: 611968 - RNA, 20 nt, Artificial Sequence
  Synthetic
auaagauuucuagaauugug

SEQ ID NO: 611969 - RNA, 21 nt, Artificial Sequence
  Synthetic
uauaagauuucuagaauugug

SEQ ID NO: 611970 - RNA, 22 nt, Artificial Sequence
  Synthetic
cuauaagauuucuagaauugug

SEQ ID NO: 611971 - RNA, 23 nt, Artificial Sequence
  Synthetic
acuauaagauuucuagaauugug

SEQ ID NO: 611972 - RNA, 24 nt, Artificial Sequence
  Synthetic
aacuauaagauuucuagaauugug

SEQ ID NO: 611973 - RNA, 18 nt, Artificial Sequence
  Synthetic
gaauuuggacacauugug

SEQ ID NO: 611974 - RNA, 19 nt, Artificial Sequence
  Synthetic
ugaauuuggacacauugug

SEQ ID NO: 611975 - RNA, 20 nt, Artificial Sequence
  Synthetic
augaauuuggacacauugug

SEQ ID NO: 611976 - RNA, 21 nt, Artificial Sequence
  Synthetic
aaugaauuuggacacauugug

SEQ ID NO: 611977 - RNA, 22 nt, Artificial Sequence
  Synthetic
aaaugaauuuggacacauugug

SEQ ID NO: 611978 - RNA, 23 nt, Artificial Sequence
  Synthetic
aaaaugaauuuggacacauugug

SEQ ID NO: 611979 - RNA, 24 nt, Artificial Sequence
  Synthetic
uaaaaugaauuuggacacauugug

SEQ ID NO: 611980 - RNA, 18 nt, Artificial Sequence
  Synthetic
aaaauaguuaccauugug

SEQ ID NO: 611981 - RNA, 19 nt, Artificial Sequence
  Synthetic
uaaaauaguuaccauugug

SEQ ID NO: 611982 - RNA, 20 nt, Artificial Sequence
  Synthetic
guaaaauaguuaccauugug

SEQ ID NO: 611983 - RNA, 21 nt, Artificial Sequence
  Synthetic
uguaaaauaguuaccauugug

SEQ ID NO: 611984 - RNA, 22 nt, Artificial Sequence
  Synthetic
guguaaaauaguuaccauugug

SEQ ID NO: 611985 - RNA, 23 nt, Artificial Sequence
  Synthetic
aguguaaaauaguuaccauugug

SEQ ID NO: 611986 - RNA, 24 nt, Artificial Sequence
  Synthetic
uaguguaaaauaguuaccauugug

SEQ ID NO: 611987 - RNA, 18 nt, Artificial Sequence
  Synthetic
aggagggccuggauugug

SEQ ID NO: 611988 - RNA, 19 nt, Artificial Sequence
  Synthetic
aaggagggccuggauugug

SEQ ID NO: 611989 - RNA, 20 nt, Artificial Sequence
  Synthetic
gaaggagggccuggauugug

SEQ ID NO: 611990 - RNA, 21 nt, Artificial Sequence
  Synthetic
ggaaggagggccuggauugug

SEQ ID NO: 611991 - RNA, 22 nt, Artificial Sequence
  Synthetic
aggaaggagggccuggauugug

SEQ ID NO: 611992 - RNA, 23 nt, Artificial Sequence
  Synthetic
caggaaggagggccuggauugug

SEQ ID NO: 611993 - RNA, 24 nt, Artificial Sequence
  Synthetic
acaggaaggagggccuggauugug

SEQ ID NO: 611994 - RNA, 18 nt, Artificial Sequence
  Synthetic
uugucccuguguauugug

SEQ ID NO: 611995 - RNA, 19 nt, Artificial Sequence
  Synthetic
guugucccuguguauugug

SEQ ID NO: 611996 - RNA, 20 nt, Artificial Sequence
  Synthetic
uguugucccuguguauugug

SEQ ID NO: 611997 - RNA, 21 nt, Artificial Sequence
  Synthetic
auguugucccuguguauugug

SEQ ID NO: 611998 - RNA, 22 nt, Artificial Sequence
  Synthetic
aauguugucccuguguauugug

SEQ ID NO: 611999 - RNA, 23 nt, Artificial Sequence
  Synthetic
aaauguugucccuguguauugug

SEQ ID NO: 612000 - RNA, 24 nt, Artificial Sequence
  Synthetic
caaauguugucccuguguauugug

SEQ ID NO: 612001 - RNA, 18 nt, Artificial Sequence
  Synthetic
uaaauaaauaaacuugug

SEQ ID NO: 612002 - RNA, 19 nt, Artificial Sequence
  Synthetic
guaaauaaauaaacuugug

SEQ ID NO: 612003 - RNA, 20 nt, Artificial Sequence
  Synthetic
aguaaauaaauaaacuugug

SEQ ID NO: 612004 - RNA, 21 nt, Artificial Sequence
  Synthetic
aaguaaauaaauaaacuugug

SEQ ID NO: 612005 - RNA, 22 nt, Artificial Sequence
  Synthetic
uaaguaaauaaauaaacuugug

SEQ ID NO: 612006 - RNA, 23 nt, Artificial Sequence
  Synthetic
guaaguaaauaaauaaacuugug

SEQ ID NO: 612007 - RNA, 24 nt, Artificial Sequence
  Synthetic
gguaaguaaauaaauaaacuugug

SEQ ID NO: 612008 - RNA, 18 nt, Artificial Sequence
  Synthetic
gaaauaauugaacuugug

SEQ ID NO: 612009 - RNA, 19 nt, Artificial Sequence
  Synthetic
ugaaauaauugaacuugug

SEQ ID NO: 612010 - RNA, 20 nt, Artificial Sequence
  Synthetic
gugaaauaauugaacuugug

SEQ ID NO: 612011 - RNA, 21 nt, Artificial Sequence
  Synthetic
agugaaauaauugaacuugug

SEQ ID NO: 612012 - RNA, 22 nt, Artificial Sequence
  Synthetic
uagugaaauaauugaacuugug

SEQ ID NO: 612013 - RNA, 23 nt, Artificial Sequence
  Synthetic
cuagugaaauaauugaacuugug

SEQ ID NO: 612014 - RNA, 24 nt, Artificial Sequence
  Synthetic
ucuagugaaauaauugaacuugug

SEQ ID NO: 612015 - RNA, 18 nt, Artificial Sequence
  Synthetic
aaauauuuuccacuugug

SEQ ID NO: 612016 - RNA, 19 nt, Artificial Sequence
  Synthetic
caaauauuuuccacuugug

SEQ ID NO: 612017 - RNA, 20 nt, Artificial Sequence
  Synthetic
acaaauauuuuccacuugug

SEQ ID NO: 612018 - RNA, 21 nt, Artificial Sequence
  Synthetic
uacaaauauuuuccacuugug

SEQ ID NO: 612019 - RNA, 22 nt, Artificial Sequence
  Synthetic
uuacaaauauuuuccacuugug

SEQ ID NO: 612020 - RNA, 23 nt, Artificial Sequence
  Synthetic
uuuacaaauauuuuccacuugug

SEQ ID NO: 612021 - RNA, 24 nt, Artificial Sequence
  Synthetic
auuuacaaauauuuuccacuugug

SEQ ID NO: 612022 - RNA, 18 nt, Artificial Sequence
  Synthetic
cuuuauauuguacuugug

SEQ ID NO: 612023 - RNA, 19 nt, Artificial Sequence
  Synthetic
acuuuauauuguacuugug

SEQ ID NO: 612024 - RNA, 20 nt, Artificial Sequence
  Synthetic
aacuuuauauuguacuugug

SEQ ID NO: 612025 - RNA, 21 nt, Artificial Sequence
  Synthetic
uaacuuuauauuguacuugug

SEQ ID NO: 612026 - RNA, 22 nt, Artificial Sequence
  Synthetic
auaacuuuauauuguacuugug

SEQ ID NO: 612027 - RNA, 23 nt, Artificial Sequence
  Synthetic
cauaacuuuauauuguacuugug

SEQ ID NO: 612028 - RNA, 24 nt, Artificial Sequence
  Synthetic
acauaacuuuauauuguacuugug

SEQ ID NO: 612029 - RNA, 18 nt, Artificial Sequence
  Synthetic
cugaauaccuuacuugug

SEQ ID NO: 612030 - RNA, 19 nt, Artificial Sequence
  Synthetic
acugaauaccuuacuugug

SEQ ID NO: 612031 - RNA, 20 nt, Artificial Sequence
  Synthetic
aacugaauaccuuacuugug

SEQ ID NO: 612032 - RNA, 21 nt, Artificial Sequence
  Synthetic
uaacugaauaccuuacuugug

SEQ ID NO: 612033 - RNA, 22 nt, Artificial Sequence
  Synthetic
uuaacugaauaccuuacuugug

SEQ ID NO: 612034 - RNA, 23 nt, Artificial Sequence
  Synthetic
cuuaacugaauaccuuacuugug

SEQ ID NO: 612035 - RNA, 24 nt, Artificial Sequence
  Synthetic
ucuuaacugaauaccuuacuugug

SEQ ID NO: 612036 - RNA, 18 nt, Artificial Sequence
  Synthetic
gucuauguacaccuugug

SEQ ID NO: 612037 - RNA, 19 nt, Artificial Sequence
  Synthetic
agucuauguacaccuugug

SEQ ID NO: 612038 - RNA, 20 nt, Artificial Sequence
  Synthetic
cagucuauguacaccuugug

SEQ ID NO: 612039 - RNA, 21 nt, Artificial Sequence
  Synthetic
ccagucuauguacaccuugug

SEQ ID NO: 612040 - RNA, 22 nt, Artificial Sequence
  Synthetic
uccagucuauguacaccuugug

SEQ ID NO: 612041 - RNA, 23 nt, Artificial Sequence
  Synthetic
uuccagucuauguacaccuugug

SEQ ID NO: 612042 - RNA, 24 nt, Artificial Sequence
  Synthetic
cuuccagucuauguacaccuugug

SEQ ID NO: 612043 - RNA, 18 nt, Artificial Sequence
  Synthetic
ccuuccugccaccuugug

SEQ ID NO: 612044 - RNA, 19 nt, Artificial Sequence
  Synthetic
uccuuccugccaccuugug

SEQ ID NO: 612045 - RNA, 20 nt, Artificial Sequence
  Synthetic
cuccuuccugccaccuugug

SEQ ID NO: 612046 - RNA, 21 nt, Artificial Sequence
  Synthetic
ucuccuuccugccaccuugug

SEQ ID NO: 612047 - RNA, 22 nt, Artificial Sequence
  Synthetic
uucuccuuccugccaccuugug

SEQ ID NO: 612048 - RNA, 23 nt, Artificial Sequence
  Synthetic
cuucuccuuccugccaccuugug

SEQ ID NO: 612049 - RNA, 24 nt, Artificial Sequence
  Synthetic
acuucuccuuccugccaccuugug

SEQ ID NO: 612050 - RNA, 18 nt, Artificial Sequence
  Synthetic
ccuuccugcggccuugug

SEQ ID NO: 612051 - RNA, 19 nt, Artificial Sequence
  Synthetic
uccuuccugcggccuugug

SEQ ID NO: 612052 - RNA, 20 nt, Artificial Sequence
  Synthetic
cuccuuccugcggccuugug

SEQ ID NO: 612053 - RNA, 21 nt, Artificial Sequence
  Synthetic
ucuccuuccugcggccuugug

SEQ ID NO: 612054 - RNA, 22 nt, Artificial Sequence
  Synthetic
uucuccuuccugcggccuugug

SEQ ID NO: 612055 - RNA, 23 nt, Artificial Sequence
  Synthetic
cuucuccuuccugcggccuugug

SEQ ID NO: 612056 - RNA, 24 nt, Artificial Sequence
  Synthetic
gcuucuccuuccugcggccuugug

SEQ ID NO: 612057 - RNA, 18 nt, Artificial Sequence
  Synthetic
ccuaaauaauuccuugug

SEQ ID NO: 612058 - RNA, 19 nt, Artificial Sequence
  Synthetic
gccuaaauaauuccuugug

SEQ ID NO: 612059 - RNA, 20 nt, Artificial Sequence
  Synthetic
ggccuaaauaauuccuugug

SEQ ID NO: 612060 - RNA, 21 nt, Artificial Sequence
  Synthetic
uggccuaaauaauuccuugug

SEQ ID NO: 612061 - RNA, 22 nt, Artificial Sequence
  Synthetic
uuggccuaaauaauuccuugug

SEQ ID NO: 612062 - RNA, 23 nt, Artificial Sequence
  Synthetic
uuuggccuaaauaauuccuugug

SEQ ID NO: 612063 - RNA, 24 nt, Artificial Sequence
  Synthetic
uuuuggccuaaauaauuccuugug

SEQ ID NO: 612064 - RNA, 18 nt, Artificial Sequence
  Synthetic
uucuauaaggagcuugug

SEQ ID NO: 612065 - RNA, 19 nt, Artificial Sequence
  Synthetic
uuucuauaaggagcuugug

SEQ ID NO: 612066 - RNA, 20 nt, Artificial Sequence
  Synthetic
uuuucuauaaggagcuugug

SEQ ID NO: 612067 - RNA, 21 nt, Artificial Sequence
  Synthetic
cuuuucuauaaggagcuugug

SEQ ID NO: 612068 - RNA, 22 nt, Artificial Sequence
  Synthetic
ccuuuucuauaaggagcuugug

SEQ ID NO: 612069 - RNA, 23 nt, Artificial Sequence
  Synthetic
cccuuuucuauaaggagcuugug

SEQ ID NO: 612070 - RNA, 24 nt, Artificial Sequence
  Synthetic
gcccuuuucuauaaggagcuugug

SEQ ID NO: 612071 - RNA, 18 nt, Artificial Sequence
  Synthetic
uaggccucugggcuugug

SEQ ID NO: 612072 - RNA, 19 nt, Artificial Sequence
  Synthetic
uuaggccucugggcuugug

SEQ ID NO: 612073 - RNA, 20 nt, Artificial Sequence
  Synthetic
uuuaggccucugggcuugug

SEQ ID NO: 612074 - RNA, 21 nt, Artificial Sequence
  Synthetic
uuuuaggccucugggcuugug

SEQ ID NO: 612075 - RNA, 22 nt, Artificial Sequence
  Synthetic
cuuuuaggccucugggcuugug

SEQ ID NO: 612076 - RNA, 23 nt, Artificial Sequence
  Synthetic
ccuuuuaggccucugggcuugug

SEQ ID NO: 612077 - RNA, 24 nt, Artificial Sequence
  Synthetic
uccuuuuaggccucugggcuugug

SEQ ID NO: 612078 - RNA, 18 nt, Artificial Sequence
  Synthetic
uguuguuuccugcuugug

SEQ ID NO: 612079 - RNA, 19 nt, Artificial Sequence
  Synthetic
cuguuguuuccugcuugug

SEQ ID NO: 612080 - RNA, 20 nt, Artificial Sequence
  Synthetic
acuguuguuuccugcuugug

SEQ ID NO: 612081 - RNA, 21 nt, Artificial Sequence
  Synthetic
gacuguuguuuccugcuugug

SEQ ID NO: 612082 - RNA, 22 nt, Artificial Sequence
  Synthetic
agacuguuguuuccugcuugug

SEQ ID NO: 612083 - RNA, 23 nt, Artificial Sequence
  Synthetic
aagacuguuguuuccugcuugug

SEQ ID NO: 612084 - RNA, 24 nt, Artificial Sequence
  Synthetic
uaagacuguuguuuccugcuugug

SEQ ID NO: 612085 - RNA, 18 nt, Artificial Sequence
  Synthetic
ucauauuguucucuugug

SEQ ID NO: 612086 - RNA, 19 nt, Artificial Sequence
  Synthetic
aucauauuguucucuugug

SEQ ID NO: 612087 - RNA, 20 nt, Artificial Sequence
  Synthetic
aaucauauuguucucuugug

SEQ ID NO: 612088 - RNA, 21 nt, Artificial Sequence
  Synthetic
aaaucauauuguucucuugug

SEQ ID NO: 612089 - RNA, 22 nt, Artificial Sequence
  Synthetic
aaaaucauauuguucucuugug

SEQ ID NO: 612090 - RNA, 23 nt, Artificial Sequence
  Synthetic
aaaaaucauauuguucucuugug

SEQ ID NO: 612091 - RNA, 24 nt, Artificial Sequence
  Synthetic
caaaaaucauauuguucucuugug

SEQ ID NO: 612092 - RNA, 18 nt, Artificial Sequence
  Synthetic
caagaaaucagaguugug

SEQ ID NO: 612093 - RNA, 19 nt, Artificial Sequence
  Synthetic
gcaagaaaucagaguugug

SEQ ID NO: 612094 - RNA, 20 nt, Artificial Sequence
  Synthetic
agcaagaaaucagaguugug

SEQ ID NO: 612095 - RNA, 21 nt, Artificial Sequence
  Synthetic
aagcaagaaaucagaguugug

SEQ ID NO: 612096 - RNA, 22 nt, Artificial Sequence
  Synthetic
gaagcaagaaaucagaguugug

SEQ ID NO: 612097 - RNA, 23 nt, Artificial Sequence
  Synthetic
ggaagcaagaaaucagaguugug

SEQ ID NO: 612098 - RNA, 24 nt, Artificial Sequence
  Synthetic
aggaagcaagaaaucagaguugug

SEQ ID NO: 612099 - RNA, 18 nt, Artificial Sequence
  Synthetic
uaauaugacugaguugug

SEQ ID NO: 612100 - RNA, 19 nt, Artificial Sequence
  Synthetic
uuaauaugacugaguugug

SEQ ID NO: 612101 - RNA, 20 nt, Artificial Sequence
  Synthetic
auuaauaugacugaguugug

SEQ ID NO: 612102 - RNA, 21 nt, Artificial Sequence
  Synthetic
gauuaauaugacugaguugug

SEQ ID NO: 612103 - RNA, 22 nt, Artificial Sequence
  Synthetic
agauuaauaugacugaguugug

SEQ ID NO: 612104 - RNA, 23 nt, Artificial Sequence
  Synthetic
aagauuaauaugacugaguugug

SEQ ID NO: 612105 - RNA, 24 nt, Artificial Sequence
  Synthetic
caagauuaauaugacugaguugug

SEQ ID NO: 612106 - RNA, 18 nt, Artificial Sequence
  Synthetic
ugggugguagagguugug

SEQ ID NO: 612107 - RNA, 19 nt, Artificial Sequence
  Synthetic
cugggugguagagguugug

SEQ ID NO: 612108 - RNA, 20 nt, Artificial Sequence
  Synthetic
ccugggugguagagguugug

SEQ ID NO: 612109 - RNA, 21 nt, Artificial Sequence
  Synthetic
accugggugguagagguugug

SEQ ID NO: 612110 - RNA, 22 nt, Artificial Sequence
  Synthetic
aaccugggugguagagguugug

SEQ ID NO: 612111 - RNA, 23 nt, Artificial Sequence
  Synthetic
gaaccugggugguagagguugug

SEQ ID NO: 612112 - RNA, 24 nt, Artificial Sequence
  Synthetic
ugaaccugggugguagagguugug

SEQ ID NO: 612113 - RNA, 18 nt, Artificial Sequence
  Synthetic
auucacugggagguugug

SEQ ID NO: 612114 - RNA, 19 nt, Artificial Sequence
  Synthetic
uauucacugggagguugug

SEQ ID NO: 612115 - RNA, 20 nt, Artificial Sequence
  Synthetic
cuauucacugggagguugug

SEQ ID NO: 612116 - RNA, 21 nt, Artificial Sequence
  Synthetic
ccuauucacugggagguugug

SEQ ID NO: 612117 - RNA, 22 nt, Artificial Sequence
  Synthetic
accuauucacugggagguugug

SEQ ID NO: 612118 - RNA, 23 nt, Artificial Sequence
  Synthetic
gaccuauucacugggagguugug

SEQ ID NO: 612119 - RNA, 24 nt, Artificial Sequence
  Synthetic
ggaccuauucacugggagguugug

SEQ ID NO: 612120 - RNA, 18 nt, Artificial Sequence
  Synthetic
gaugcuggugagguugug

SEQ ID NO: 612121 - RNA, 19 nt, Artificial Sequence
  Synthetic
agaugcuggugagguugug

SEQ ID NO: 612122 - RNA, 20 nt, Artificial Sequence
  Synthetic
cagaugcuggugagguugug

SEQ ID NO: 612123 - RNA, 21 nt, Artificial Sequence
  Synthetic
ccagaugcuggugagguugug

SEQ ID NO: 612124 - RNA, 22 nt, Artificial Sequence
  Synthetic
accagaugcuggugagguugug

SEQ ID NO: 612125 - RNA, 23 nt, Artificial Sequence
  Synthetic
uaccagaugcuggugagguugug

SEQ ID NO: 612126 - RNA, 24 nt, Artificial Sequence
  Synthetic
auaccagaugcuggugagguugug

SEQ ID NO: 612127 - RNA, 18 nt, Artificial Sequence
  Synthetic
gcaggguuggggguugug

SEQ ID NO: 612128 - RNA, 19 nt, Artificial Sequence
  Synthetic
ggcaggguuggggguugug

SEQ ID NO: 612129 - RNA, 20 nt, Artificial Sequence
  Synthetic
uggcaggguuggggguugug

SEQ ID NO: 612130 - RNA, 21 nt, Artificial Sequence
  Synthetic
uuggcaggguuggggguugug

SEQ ID NO: 612131 - RNA, 22 nt, Artificial Sequence
  Synthetic
guuggcaggguuggggguugug

SEQ ID NO: 612132 - RNA, 23 nt, Artificial Sequence
  Synthetic
aguuggcaggguuggggguugug

SEQ ID NO: 612133 - RNA, 24 nt, Artificial Sequence
  Synthetic
aaguuggcaggguuggggguugug

SEQ ID NO: 612134 - RNA, 18 nt, Artificial Sequence
  Synthetic
ggggcgggugggguugug

SEQ ID NO: 612135 - RNA, 19 nt, Artificial Sequence
  Synthetic
aggggcgggugggguugug

SEQ ID NO: 612136 - RNA, 20 nt, Artificial Sequence
  Synthetic
caggggcgggugggguugug

SEQ ID NO: 612137 - RNA, 21 nt, Artificial Sequence
  Synthetic
ucaggggcgggugggguugug

SEQ ID NO: 612138 - RNA, 22 nt, Artificial Sequence
  Synthetic
aucaggggcgggugggguugug

SEQ ID NO: 612139 - RNA, 23 nt, Artificial Sequence
  Synthetic
gaucaggggcgggugggguugug

SEQ ID NO: 612140 - RNA, 24 nt, Artificial Sequence
  Synthetic
ggaucaggggcgggugggguugug

SEQ ID NO: 612141 - RNA, 18 nt, Artificial Sequence
  Synthetic
aaauaauucuuuguugug

SEQ ID NO: 612142 - RNA, 19 nt, Artificial Sequence
  Synthetic
caaauaauucuuuguugug

SEQ ID NO: 612143 - RNA, 20 nt, Artificial Sequence
  Synthetic
ccaaauaauucuuuguugug

SEQ ID NO: 612144 - RNA, 21 nt, Artificial Sequence
  Synthetic
accaaauaauucuuuguugug

SEQ ID NO: 612145 - RNA, 22 nt, Artificial Sequence
  Synthetic
gaccaaauaauucuuuguugug

SEQ ID NO: 612146 - RNA, 23 nt, Artificial Sequence
  Synthetic
ggaccaaauaauucuuuguugug

SEQ ID NO: 612147 - RNA, 24 nt, Artificial Sequence
  Synthetic
uggaccaaauaauucuuuguugug

SEQ ID NO: 612148 - RNA, 18 nt, Artificial Sequence
  Synthetic
aaaguuuacaaauuugug

SEQ ID NO: 612149 - RNA, 19 nt, Artificial Sequence
  Synthetic
gaaaguuuacaaauuugug

SEQ ID NO: 612150 - RNA, 20 nt, Artificial Sequence
  Synthetic
agaaaguuuacaaauuugug

SEQ ID NO: 612151 - RNA, 21 nt, Artificial Sequence
  Synthetic
aagaaaguuuacaaauuugug

SEQ ID NO: 612152 - RNA, 22 nt, Artificial Sequence
  Synthetic
uaagaaaguuuacaaauuugug

SEQ ID NO: 612153 - RNA, 23 nt, Artificial Sequence
  Synthetic
uuaagaaaguuuacaaauuugug

SEQ ID NO: 612154 - RNA, 24 nt, Artificial Sequence
  Synthetic
uuuaagaaaguuuacaaauuugug

SEQ ID NO: 612155 - RNA, 18 nt, Artificial Sequence
  Synthetic
uuuaaaagucaauuugug

SEQ ID NO: 612156 - RNA, 19 nt, Artificial Sequence
  Synthetic
guuuaaaagucaauuugug

SEQ ID NO: 612157 - RNA, 20 nt, Artificial Sequence
  Synthetic
cguuuaaaagucaauuugug

SEQ ID NO: 612158 - RNA, 21 nt, Artificial Sequence
  Synthetic
acguuuaaaagucaauuugug

SEQ ID NO: 612159 - RNA, 22 nt, Artificial Sequence
  Synthetic
uacguuuaaaagucaauuugug

SEQ ID NO: 612160 - RNA, 23 nt, Artificial Sequence
  Synthetic
guacguuuaaaagucaauuugug

SEQ ID NO: 612161 - RNA, 24 nt, Artificial Sequence
  Synthetic
uguacguuuaaaagucaauuugug

SEQ ID NO: 612162 - RNA, 18 nt, Artificial Sequence
  Synthetic
gacuuaauucaauuugug

SEQ ID NO: 612163 - RNA, 19 nt, Artificial Sequence
  Synthetic
ggacuuaauucaauuugug

SEQ ID NO: 612164 - RNA, 20 nt, Artificial Sequence
  Synthetic
aggacuuaauucaauuugug

SEQ ID NO: 612165 - RNA, 21 nt, Artificial Sequence
  Synthetic
gaggacuuaauucaauuugug

SEQ ID NO: 612166 - RNA, 22 nt, Artificial Sequence
  Synthetic
agaggacuuaauucaauuugug

SEQ ID NO: 612167 - RNA, 23 nt, Artificial Sequence
  Synthetic
aagaggacuuaauucaauuugug

SEQ ID NO: 612168 - RNA, 24 nt, Artificial Sequence
  Synthetic
caagaggacuuaauucaauuugug

SEQ ID NO: 612169 - RNA, 18 nt, Artificial Sequence
  Synthetic
agcugcuuagaauuugug

SEQ ID NO: 612170 - RNA, 19 nt, Artificial Sequence
  Synthetic
uagcugcuuagaauuugug

SEQ ID NO: 612171 - RNA, 20 nt, Artificial Sequence
  Synthetic
auagcugcuuagaauuugug

SEQ ID NO: 612172 - RNA, 21 nt, Artificial Sequence
  Synthetic
aauagcugcuuagaauuugug

SEQ ID NO: 612173 - RNA, 22 nt, Artificial Sequence
  Synthetic
aaauagcugcuuagaauuugug

SEQ ID NO: 612174 - RNA, 23 nt, Artificial Sequence
  Synthetic
caaauagcugcuuagaauuugug

SEQ ID NO: 612175 - RNA, 24 nt, Artificial Sequence
  Synthetic
ucaaauagcugcuuagaauuugug

SEQ ID NO: 612176 - RNA, 18 nt, Artificial Sequence
  Synthetic
agaaguuacugauuugug

SEQ ID NO: 612177 - RNA, 19 nt, Artificial Sequence
  Synthetic
uagaaguuacugauuugug

SEQ ID NO: 612178 - RNA, 20 nt, Artificial Sequence
  Synthetic
uuagaaguuacugauuugug

SEQ ID NO: 612179 - RNA, 21 nt, Artificial Sequence
  Synthetic
guuagaaguuacugauuugug

SEQ ID NO: 612180 - RNA, 22 nt, Artificial Sequence
  Synthetic
cguuagaaguuacugauuugug

SEQ ID NO: 612181 - RNA, 23 nt, Artificial Sequence
  Synthetic
ucguuagaaguuacugauuugug

SEQ ID NO: 612182 - RNA, 24 nt, Artificial Sequence
  Synthetic
uucguuagaaguuacugauuugug

SEQ ID NO: 612183 - RNA, 18 nt, Artificial Sequence
  Synthetic
uuuucuaguuuauuugug

SEQ ID NO: 612184 - RNA, 19 nt, Artificial Sequence
  Synthetic
auuuucuaguuuauuugug

SEQ ID NO: 612185 - RNA, 20 nt, Artificial Sequence
  Synthetic
gauuuucuaguuuauuugug

SEQ ID NO: 612186 - RNA, 21 nt, Artificial Sequence
  Synthetic
agauuuucuaguuuauuugug

SEQ ID NO: 612187 - RNA, 22 nt, Artificial Sequence
  Synthetic
uagauuuucuaguuuauuugug

SEQ ID NO: 612188 - RNA, 23 nt, Artificial Sequence
  Synthetic
cuagauuuucuaguuuauuugug

SEQ ID NO: 612189 - RNA, 24 nt, Artificial Sequence
  Synthetic
ucuagauuuucuaguuuauuugug

SEQ ID NO: 612190 - RNA, 18 nt, Artificial Sequence
  Synthetic
uucuuaaacaaguuugug

SEQ ID NO: 612191 - RNA, 19 nt, Artificial Sequence
  Synthetic
uuucuuaaacaaguuugug

SEQ ID NO: 612192 - RNA, 20 nt, Artificial Sequence
  Synthetic
auuucuuaaacaaguuugug

SEQ ID NO: 612193 - RNA, 21 nt, Artificial Sequence
  Synthetic
uauuucuuaaacaaguuugug

SEQ ID NO: 612194 - RNA, 22 nt, Artificial Sequence
  Synthetic
guauuucuuaaacaaguuugug

SEQ ID NO: 612195 - RNA, 23 nt, Artificial Sequence
  Synthetic
gguauuucuuaaacaaguuugug

SEQ ID NO: 612196 - RNA, 24 nt, Artificial Sequence
  Synthetic
ugguauuucuuaaacaaguuugug

SEQ ID NO: 612197 - RNA, 18 nt, Artificial Sequence
  Synthetic
acguaauuaugguuugug

SEQ ID NO: 612198 - RNA, 19 nt, Artificial Sequence
  Synthetic
gacguaauuaugguuugug

SEQ ID NO: 612199 - RNA, 20 nt, Artificial Sequence
  Synthetic
ggacguaauuaugguuugug

SEQ ID NO: 612200 - RNA, 21 nt, Artificial Sequence
  Synthetic
gggacguaauuaugguuugug

SEQ ID NO: 612201 - RNA, 22 nt, Artificial Sequence
  Synthetic
ggggacguaauuaugguuugug

SEQ ID NO: 612202 - RNA, 23 nt, Artificial Sequence
  Synthetic
gggggacguaauuaugguuugug

SEQ ID NO: 612203 - RNA, 24 nt, Artificial Sequence
  Synthetic
ugggggacguaauuaugguuugug

SEQ ID NO: 612204 - RNA, 18 nt, Artificial Sequence
  Synthetic
uguguguugugguuugug

SEQ ID NO: 612205 - RNA, 19 nt, Artificial Sequence
  Synthetic
auguguguugugguuugug

SEQ ID NO: 612206 - RNA, 20 nt, Artificial Sequence
  Synthetic
cauguguguugugguuugug

SEQ ID NO: 612207 - RNA, 21 nt, Artificial Sequence
  Synthetic
acauguguguugugguuugug

SEQ ID NO: 612208 - RNA, 22 nt, Artificial Sequence
  Synthetic
cacauguguguugugguuugug

SEQ ID NO: 612209 - RNA, 23 nt, Artificial Sequence
  Synthetic
acacauguguguugugguuugug

SEQ ID NO: 612210 - RNA, 24 nt, Artificial Sequence
  Synthetic
aacacauguguguugugguuugug

SEQ ID NO: 612211 - RNA, 18 nt, Artificial Sequence
  Synthetic
cuguacauaaauuuugug

SEQ ID NO: 612212 - RNA, 19 nt, Artificial Sequence
  Synthetic
ccuguacauaaauuuugug

SEQ ID NO: 612213 - RNA, 20 nt, Artificial Sequence
  Synthetic
uccuguacauaaauuuugug

SEQ ID NO: 612214 - RNA, 21 nt, Artificial Sequence
  Synthetic
uuccuguacauaaauuuugug

SEQ ID NO: 612215 - RNA, 22 nt, Artificial Sequence
  Synthetic
auuccuguacauaaauuuugug

SEQ ID NO: 612216 - RNA, 23 nt, Artificial Sequence
  Synthetic
aauuccuguacauaaauuuugug

SEQ ID NO: 612217 - RNA, 24 nt, Artificial Sequence
  Synthetic
caauuccuguacauaaauuuugug

SEQ ID NO: 612218 - RNA, 18 nt, Artificial Sequence
  Synthetic
auuacucuagcuuuugug

SEQ ID NO: 612219 - RNA, 19 nt, Artificial Sequence
  Synthetic
aauuacucuagcuuuugug

SEQ ID NO: 612220 - RNA, 20 nt, Artificial Sequence
  Synthetic
aaauuacucuagcuuuugug

SEQ ID NO: 612221 - RNA, 21 nt, Artificial Sequence
  Synthetic
aaaauuacucuagcuuuugug

SEQ ID NO: 612222 - RNA, 22 nt, Artificial Sequence
  Synthetic
aaaaauuacucuagcuuuugug

SEQ ID NO: 612223 - RNA, 23 nt, Artificial Sequence
  Synthetic
aaaaaauuacucuagcuuuugug

SEQ ID NO: 612224 - RNA, 24 nt, Artificial Sequence
  Synthetic
uaaaaaauuacucuagcuuuugug

SEQ ID NO: 612225 - RNA, 18 nt, Artificial Sequence
  Synthetic
cuuucuuuuucuuuugug

SEQ ID NO: 612226 - RNA, 19 nt, Artificial Sequence
  Synthetic
ucuuucuuuuucuuuugug

SEQ ID NO: 612227 - RNA, 20 nt, Artificial Sequence
  Synthetic
aucuuucuuuuucuuuugug

SEQ ID NO: 612228 - RNA, 21 nt, Artificial Sequence
  Synthetic
caucuuucuuuuucuuuugug

SEQ ID NO: 612229 - RNA, 22 nt, Artificial Sequence
  Synthetic
gcaucuuucuuuuucuuuugug

SEQ ID NO: 612230 - RNA, 23 nt, Artificial Sequence
  Synthetic
agcaucuuucuuuuucuuuugug

SEQ ID NO: 612231 - RNA, 24 nt, Artificial Sequence
  Synthetic
uagcaucuuucuuuuucuuuugug

SEQ ID NO: 612232 - RNA, 18 nt, Artificial Sequence
  Synthetic
ugguuuauagguuuugug

SEQ ID NO: 612233 - RNA, 19 nt, Artificial Sequence
  Synthetic
gugguuuauagguuuugug

SEQ ID NO: 612234 - RNA, 20 nt, Artificial Sequence
  Synthetic
ugugguuuauagguuuugug

SEQ ID NO: 612235 - RNA, 21 nt, Artificial Sequence
  Synthetic
gugugguuuauagguuuugug

SEQ ID NO: 612236 - RNA, 22 nt, Artificial Sequence
  Synthetic
ggugugguuuauagguuuugug

SEQ ID NO: 612237 - RNA, 23 nt, Artificial Sequence
  Synthetic
uggugugguuuauagguuuugug

SEQ ID NO: 612238 - RNA, 24 nt, Artificial Sequence
  Synthetic
guggugugguuuauagguuuugug

SEQ ID NO: 612239 - RNA, 18 nt, Artificial Sequence
  Synthetic
agcaccauucuuuuugug

SEQ ID NO: 612240 - RNA, 19 nt, Artificial Sequence
  Synthetic
aagcaccauucuuuuugug

SEQ ID NO: 612241 - RNA, 20 nt, Artificial Sequence
  Synthetic
uaagcaccauucuuuuugug

SEQ ID NO: 612242 - RNA, 21 nt, Artificial Sequence
  Synthetic
uuaagcaccauucuuuuugug

SEQ ID NO: 612243 - RNA, 22 nt, Artificial Sequence
  Synthetic
auuaagcaccauucuuuuugug

SEQ ID NO: 612244 - RNA, 23 nt, Artificial Sequence
  Synthetic
gauuaagcaccauucuuuuugug

SEQ ID NO: 612245 - RNA, 24 nt, Artificial Sequence
  Synthetic
ggauuaagcaccauucuuuuugug

SEQ ID NO: 612246 - RNA, 18 nt, Artificial Sequence
  Synthetic
ccuuacaagguuuuugug

SEQ ID NO: 612247 - RNA, 19 nt, Artificial Sequence
  Synthetic
accuuacaagguuuuugug

SEQ ID NO: 612248 - RNA, 20 nt, Artificial Sequence
  Synthetic
caccuuacaagguuuuugug

SEQ ID NO: 612249 - RNA, 21 nt, Artificial Sequence
  Synthetic
ucaccuuacaagguuuuugug

SEQ ID NO: 612250 - RNA, 22 nt, Artificial Sequence
  Synthetic
cucaccuuacaagguuuuugug

SEQ ID NO: 612251 - RNA, 23 nt, Artificial Sequence
  Synthetic
gcucaccuuacaagguuuuugug

SEQ ID NO: 612252 - RNA, 24 nt, Artificial Sequence
  Synthetic
agcucaccuuacaagguuuuugug

SEQ ID NO: 612253 - RNA, 18 nt, Artificial Sequence
  Synthetic
cucuguauugaaaaauug

SEQ ID NO: 612254 - RNA, 19 nt, Artificial Sequence
  Synthetic
ucucuguauugaaaaauug

SEQ ID NO: 612255 - RNA, 20 nt, Artificial Sequence
  Synthetic
cucucuguauugaaaaauug

SEQ ID NO: 612256 - RNA, 21 nt, Artificial Sequence
  Synthetic
ccucucuguauugaaaaauug

SEQ ID NO: 612257 - RNA, 22 nt, Artificial Sequence
  Synthetic
uccucucuguauugaaaaauug

SEQ ID NO: 612258 - RNA, 23 nt, Artificial Sequence
  Synthetic
cuccucucuguauugaaaaauug

SEQ ID NO: 612259 - RNA, 24 nt, Artificial Sequence
  Synthetic
ucuccucucuguauugaaaaauug

SEQ ID NO: 612260 - RNA, 18 nt, Artificial Sequence
  Synthetic
ucucauggguaaaaauug

SEQ ID NO: 612261 - RNA, 19 nt, Artificial Sequence
  Synthetic
cucucauggguaaaaauug

SEQ ID NO: 612262 - RNA, 20 nt, Artificial Sequence
  Synthetic
gcucucauggguaaaaauug

SEQ ID NO: 612263 - RNA, 21 nt, Artificial Sequence
  Synthetic
agcucucauggguaaaaauug

SEQ ID NO: 612264 - RNA, 22 nt, Artificial Sequence
  Synthetic
aagcucucauggguaaaaauug

SEQ ID NO: 612265 - RNA, 23 nt, Artificial Sequence
  Synthetic
caagcucucauggguaaaaauug

SEQ ID NO: 612266 - RNA, 24 nt, Artificial Sequence
  Synthetic
ccaagcucucauggguaaaaauug

SEQ ID NO: 612267 - RNA, 18 nt, Artificial Sequence
  Synthetic
uaacaaaauacaaaauug

SEQ ID NO: 612268 - RNA, 19 nt, Artificial Sequence
  Synthetic
uuaacaaaauacaaaauug

SEQ ID NO: 612269 - RNA, 20 nt, Artificial Sequence
  Synthetic
uuuaacaaaauacaaaauug

SEQ ID NO: 612270 - RNA, 21 nt, Artificial Sequence
  Synthetic
uuuuaacaaaauacaaaauug

SEQ ID NO: 612271 - RNA, 22 nt, Artificial Sequence
  Synthetic
guuuuaacaaaauacaaaauug

SEQ ID NO: 612272 - RNA, 23 nt, Artificial Sequence
  Synthetic
aguuuuaacaaaauacaaaauug

SEQ ID NO: 612273 - RNA, 24 nt, Artificial Sequence
  Synthetic
aaguuuuaacaaaauacaaaauug

SEQ ID NO: 612274 - RNA, 18 nt, Artificial Sequence
  Synthetic
uucucaaucucaaaauug

SEQ ID NO: 612275 - RNA, 19 nt, Artificial Sequence
  Synthetic
uuucucaaucucaaaauug

SEQ ID NO: 612276 - RNA, 20 nt, Artificial Sequence
  Synthetic
guuucucaaucucaaaauug

SEQ ID NO: 612277 - RNA, 21 nt, Artificial Sequence
  Synthetic
aguuucucaaucucaaaauug

SEQ ID NO: 612278 - RNA, 22 nt, Artificial Sequence
  Synthetic
aaguuucucaaucucaaaauug

SEQ ID NO: 612279 - RNA, 23 nt, Artificial Sequence
  Synthetic
uaaguuucucaaucucaaaauug

SEQ ID NO: 612280 - RNA, 24 nt, Artificial Sequence
  Synthetic
cuaaguuucucaaucucaaaauug

SEQ ID NO: 612281 - RNA, 18 nt, Artificial Sequence
  Synthetic
aaauacgugugaaaauug

SEQ ID NO: 612282 - RNA, 19 nt, Artificial Sequence
  Synthetic
caaauacgugugaaaauug

SEQ ID NO: 612283 - RNA, 20 nt, Artificial Sequence
  Synthetic
acaaauacgugugaaaauug

SEQ ID NO: 612284 - RNA, 21 nt, Artificial Sequence
  Synthetic
aacaaauacgugugaaaauug

SEQ ID NO: 612285 - RNA, 22 nt, Artificial Sequence
  Synthetic
gaacaaauacgugugaaaauug

SEQ ID NO: 612286 - RNA, 23 nt, Artificial Sequence
  Synthetic
ugaacaaauacgugugaaaauug

SEQ ID NO: 612287 - RNA, 24 nt, Artificial Sequence
  Synthetic
augaacaaauacgugugaaaauug

SEQ ID NO: 612288 - RNA, 18 nt, Artificial Sequence
  Synthetic
gaaagauggcuaaaauug

SEQ ID NO: 612289 - RNA, 19 nt, Artificial Sequence
  Synthetic
ugaaagauggcuaaaauug

SEQ ID NO: 612290 - RNA, 20 nt, Artificial Sequence
  Synthetic
uugaaagauggcuaaaauug

SEQ ID NO: 612291 - RNA, 21 nt, Artificial Sequence
  Synthetic
auugaaagauggcuaaaauug

SEQ ID NO: 612292 - RNA, 22 nt, Artificial Sequence
  Synthetic
aauugaaagauggcuaaaauug

SEQ ID NO: 612293 - RNA, 23 nt, Artificial Sequence
  Synthetic
caauugaaagauggcuaaaauug

SEQ ID NO: 612294 - RNA, 24 nt, Artificial Sequence
  Synthetic
acaauugaaagauggcuaaaauug

SEQ ID NO: 612295 - RNA, 18 nt, Artificial Sequence
  Synthetic
aaaaauauuguaaaauug

SEQ ID NO: 612296 - RNA, 19 nt, Artificial Sequence
  Synthetic
gaaaaauauuguaaaauug

SEQ ID NO: 612297 - RNA, 20 nt, Artificial Sequence
  Synthetic
ggaaaaauauuguaaaauug

SEQ ID NO: 612298 - RNA, 21 nt, Artificial Sequence
  Synthetic
uggaaaaauauuguaaaauug

SEQ ID NO: 612299 - RNA, 22 nt, Artificial Sequence
  Synthetic
uuggaaaaauauuguaaaauug

SEQ ID NO: 612300 - RNA, 23 nt, Artificial Sequence
  Synthetic
uuuggaaaaauauuguaaaauug

SEQ ID NO: 612301 - RNA, 24 nt, Artificial Sequence
  Synthetic
uuuuggaaaaauauuguaaaauug

SEQ ID NO: 612302 - RNA, 18 nt, Artificial Sequence
  Synthetic
uuaauuagcaccaaauug

SEQ ID NO: 612303 - RNA, 19 nt, Artificial Sequence
  Synthetic
uuuaauuagcaccaaauug

SEQ ID NO: 612304 - RNA, 20 nt, Artificial Sequence
  Synthetic
uuuuaauuagcaccaaauug

SEQ ID NO: 612305 - RNA, 21 nt, Artificial Sequence
  Synthetic
auuuuaauuagcaccaaauug

SEQ ID NO: 612306 - RNA, 22 nt, Artificial Sequence
  Synthetic
cauuuuaauuagcaccaaauug

SEQ ID NO: 612307 - RNA, 23 nt, Artificial Sequence
  Synthetic
acauuuuaauuagcaccaaauug

SEQ ID NO: 612308 - RNA, 24 nt, Artificial Sequence
  Synthetic
cacauuuuaauuagcaccaaauug

SEQ ID NO: 612309 - RNA, 18 nt, Artificial Sequence
  Synthetic
ccuuagccucccaaauug

SEQ ID NO: 612310 - RNA, 19 nt, Artificial Sequence
  Synthetic
gccuuagccucccaaauug

SEQ ID NO: 612311 - RNA, 20 nt, Artificial Sequence
  Synthetic
ugccuuagccucccaaauug

SEQ ID NO: 612312 - RNA, 21 nt, Artificial Sequence
  Synthetic
cugccuuagccucccaaauug

SEQ ID NO: 612313 - RNA, 22 nt, Artificial Sequence
  Synthetic
ccugccuuagccucccaaauug

SEQ ID NO: 612314 - RNA, 23 nt, Artificial Sequence
  Synthetic
uccugccuuagccucccaaauug

SEQ ID NO: 612315 - RNA, 24 nt, Artificial Sequence
  Synthetic
cuccugccuuagccucccaaauug

SEQ ID NO: 612316 - RNA, 18 nt, Artificial Sequence
  Synthetic
cauuguauucccaaauug

SEQ ID NO: 612317 - RNA, 19 nt, Artificial Sequence
  Synthetic
acauuguauucccaaauug

SEQ ID NO: 612318 - RNA, 20 nt, Artificial Sequence
  Synthetic
uacauuguauucccaaauug

SEQ ID NO: 612319 - RNA, 21 nt, Artificial Sequence
  Synthetic
cuacauuguauucccaaauug

SEQ ID NO: 612320 - RNA, 22 nt, Artificial Sequence
  Synthetic
ccuacauuguauucccaaauug

SEQ ID NO: 612321 - RNA, 23 nt, Artificial Sequence
  Synthetic
accuacauuguauucccaaauug

SEQ ID NO: 612322 - RNA, 24 nt, Artificial Sequence
  Synthetic
caccuacauuguauucccaaauug

SEQ ID NO: 612323 - RNA, 18 nt, Artificial Sequence
  Synthetic
ccucggccucucaaauug

SEQ ID NO: 612324 - RNA, 19 nt, Artificial Sequence
  Synthetic
accucggccucucaaauug

SEQ ID NO: 612325 - RNA, 20 nt, Artificial Sequence
  Synthetic
caccucggccucucaaauug

SEQ ID NO: 612326 - RNA, 21 nt, Artificial Sequence
  Synthetic
ccaccucggccucucaaauug

SEQ ID NO: 612327 - RNA, 22 nt, Artificial Sequence
  Synthetic
cccaccucggccucucaaauug

SEQ ID NO: 612328 - RNA, 23 nt, Artificial Sequence
  Synthetic
gcccaccucggccucucaaauug

SEQ ID NO: 612329 - RNA, 24 nt, Artificial Sequence
  Synthetic
ugcccaccucggccucucaaauug

SEQ ID NO: 612330 - RNA, 18 nt, Artificial Sequence
  Synthetic
ucaagucuggucaaauug

SEQ ID NO: 612331 - RNA, 19 nt, Artificial Sequence
  Synthetic
uucaagucuggucaaauug

SEQ ID NO: 612332 - RNA, 20 nt, Artificial Sequence
  Synthetic
cuucaagucuggucaaauug

SEQ ID NO: 612333 - RNA, 21 nt, Artificial Sequence
  Synthetic
ccuucaagucuggucaaauug

SEQ ID NO: 612334 - RNA, 22 nt, Artificial Sequence
  Synthetic
uccuucaagucuggucaaauug

SEQ ID NO: 612335 - RNA, 23 nt, Artificial Sequence
  Synthetic
guccuucaagucuggucaaauug

SEQ ID NO: 612336 - RNA, 24 nt, Artificial Sequence
  Synthetic
aguccuucaagucuggucaaauug

SEQ ID NO: 612337 - RNA, 18 nt, Artificial Sequence
  Synthetic
gaggcauccuagaaauug

SEQ ID NO: 612338 - RNA, 19 nt, Artificial Sequence
  Synthetic
agaggcauccuagaaauug

SEQ ID NO: 612339 - RNA, 20 nt, Artificial Sequence
  Synthetic
aagaggcauccuagaaauug

SEQ ID NO: 612340 - RNA, 21 nt, Artificial Sequence
  Synthetic
aaagaggcauccuagaaauug

SEQ ID NO: 612341 - RNA, 22 nt, Artificial Sequence
  Synthetic
aaaagaggcauccuagaaauug

SEQ ID NO: 612342 - RNA, 23 nt, Artificial Sequence
  Synthetic
aaaaagaggcauccuagaaauug

SEQ ID NO: 612343 - RNA, 24 nt, Artificial Sequence
  Synthetic
aaaaaagaggcauccuagaaauug

SEQ ID NO: 612344 - RNA, 18 nt, Artificial Sequence
  Synthetic
gggagagugaggaaauug

SEQ ID NO: 612345 - RNA, 19 nt, Artificial Sequence
  Synthetic
ugggagagugaggaaauug

SEQ ID NO: 612346 - RNA, 20 nt, Artificial Sequence
  Synthetic
augggagagugaggaaauug

SEQ ID NO: 612347 - RNA, 21 nt, Artificial Sequence
  Synthetic
uaugggagagugaggaaauug

SEQ ID NO: 612348 - RNA, 22 nt, Artificial Sequence
  Synthetic
auaugggagagugaggaaauug

SEQ ID NO: 612349 - RNA, 23 nt, Artificial Sequence
  Synthetic
cauaugggagagugaggaaauug

SEQ ID NO: 612350 - RNA, 24 nt, Artificial Sequence
  Synthetic
ucauaugggagagugaggaaauug

SEQ ID NO: 612351 - RNA, 18 nt, Artificial Sequence
  Synthetic
agagaggugaggaaauug

SEQ ID NO: 612352 - RNA, 19 nt, Artificial Sequence
  Synthetic
gagagaggugaggaaauug

SEQ ID NO: 612353 - RNA, 20 nt, Artificial Sequence
  Synthetic
ugagagaggugaggaaauug

SEQ ID NO: 612354 - RNA, 21 nt, Artificial Sequence
  Synthetic
cugagagaggugaggaaauug

SEQ ID NO: 612355 - RNA, 22 nt, Artificial Sequence
  Synthetic
gcugagagaggugaggaaauug

SEQ ID NO: 612356 - RNA, 23 nt, Artificial Sequence
  Synthetic
ugcugagagaggugaggaaauug

SEQ ID NO: 612357 - RNA, 24 nt, Artificial Sequence
  Synthetic
augcugagagaggugaggaaauug

SEQ ID NO: 612358 - RNA, 18 nt, Artificial Sequence
  Synthetic
uauauagaagugaaauug

SEQ ID NO: 612359 - RNA, 19 nt, Artificial Sequence
  Synthetic
auauauagaagugaaauug

SEQ ID NO: 612360 - RNA, 20 nt, Artificial Sequence
  Synthetic
uauauauagaagugaaauug

SEQ ID NO: 612361 - RNA, 21 nt, Artificial Sequence
  Synthetic
guauauauagaagugaaauug

SEQ ID NO: 612362 - RNA, 22 nt, Artificial Sequence
  Synthetic
uguauauauagaagugaaauug

SEQ ID NO: 612363 - RNA, 23 nt, Artificial Sequence
  Synthetic
guguauauauagaagugaaauug

SEQ ID NO: 612364 - RNA, 24 nt, Artificial Sequence
  Synthetic
aguguauauauagaagugaaauug

SEQ ID NO: 612365 - RNA, 18 nt, Artificial Sequence
  Synthetic
agaguagagaauaaauug

SEQ ID NO: 612366 - RNA, 19 nt, Artificial Sequence
  Synthetic
aagaguagagaauaaauug

SEQ ID NO: 612367 - RNA, 20 nt, Artificial Sequence
  Synthetic
gaagaguagagaauaaauug

SEQ ID NO: 612368 - RNA, 21 nt, Artificial Sequence
  Synthetic
ugaagaguagagaauaaauug

SEQ ID NO: 612369 - RNA, 22 nt, Artificial Sequence
  Synthetic
augaagaguagagaauaaauug

SEQ ID NO: 612370 - RNA, 23 nt, Artificial Sequence
  Synthetic
uaugaagaguagagaauaaauug

SEQ ID NO: 612371 - RNA, 24 nt, Artificial Sequence
  Synthetic
cuaugaagaguagagaauaaauug

SEQ ID NO: 612372 - RNA, 18 nt, Artificial Sequence
  Synthetic
aguaugcucaguaaauug

SEQ ID NO: 612373 - RNA, 19 nt, Artificial Sequence
  Synthetic
aaguaugcucaguaaauug

SEQ ID NO: 612374 - RNA, 20 nt, Artificial Sequence
  Synthetic
gaaguaugcucaguaaauug

SEQ ID NO: 612375 - RNA, 21 nt, Artificial Sequence
  Synthetic
agaaguaugcucaguaaauug

SEQ ID NO: 612376 - RNA, 22 nt, Artificial Sequence
  Synthetic
gagaaguaugcucaguaaauug

SEQ ID NO: 612377 - RNA, 23 nt, Artificial Sequence
  Synthetic
ugagaaguaugcucaguaaauug

SEQ ID NO: 612378 - RNA, 24 nt, Artificial Sequence
  Synthetic
uugagaaguaugcucaguaaauug

SEQ ID NO: 612379 - RNA, 18 nt, Artificial Sequence
  Synthetic
acuagaaagaguaaauug

SEQ ID NO: 612380 - RNA, 19 nt, Artificial Sequence
  Synthetic
gacuagaaagaguaaauug

SEQ ID NO: 612381 - RNA, 20 nt, Artificial Sequence
  Synthetic
agacuagaaagaguaaauug

SEQ ID NO: 612382 - RNA, 21 nt, Artificial Sequence
  Synthetic
aagacuagaaagaguaaauug

SEQ ID NO: 612383 - RNA, 22 nt, Artificial Sequence
  Synthetic
aaagacuagaaagaguaaauug

SEQ ID NO: 612384 - RNA, 23 nt, Artificial Sequence
  Synthetic
gaaagacuagaaagaguaaauug

SEQ ID NO: 612385 - RNA, 24 nt, Artificial Sequence
  Synthetic
ggaaagacuagaaagaguaaauug

SEQ ID NO: 612386 - RNA, 18 nt, Artificial Sequence
  Synthetic
aauagagaauuuaaauug

SEQ ID NO: 612387 - RNA, 19 nt, Artificial Sequence
  Synthetic
caauagagaauuuaaauug

SEQ ID NO: 612388 - RNA, 20 nt, Artificial Sequence
  Synthetic
acaauagagaauuuaaauug

SEQ ID NO: 612389 - RNA, 21 nt, Artificial Sequence
  Synthetic
cacaauagagaauuuaaauug

SEQ ID NO: 612390 - RNA, 22 nt, Artificial Sequence
  Synthetic
acacaauagagaauuuaaauug

SEQ ID NO: 612391 - RNA, 23 nt, Artificial Sequence
  Synthetic
aacacaauagagaauuuaaauug

SEQ ID NO: 612392 - RNA, 24 nt, Artificial Sequence
  Synthetic
uaacacaauagagaauuuaaauug

SEQ ID NO: 612393 - RNA, 18 nt, Artificial Sequence
  Synthetic
uguguuaggaaacaauug

SEQ ID NO: 612394 - RNA, 19 nt, Artificial Sequence
  Synthetic
cuguguuaggaaacaauug

SEQ ID NO: 612395 - RNA, 20 nt, Artificial Sequence
  Synthetic
ucuguguuaggaaacaauug

SEQ ID NO: 612396 - RNA, 21 nt, Artificial Sequence
  Synthetic
aucuguguuaggaaacaauug

SEQ ID NO: 612397 - RNA, 22 nt, Artificial Sequence
  Synthetic
caucuguguuaggaaacaauug

SEQ ID NO: 612398 - RNA, 23 nt, Artificial Sequence
  Synthetic
acaucuguguuaggaaacaauug

SEQ ID NO: 612399 - RNA, 24 nt, Artificial Sequence
  Synthetic
uacaucuguguuaggaaacaauug

SEQ ID NO: 612400 - RNA, 18 nt, Artificial Sequence
  Synthetic
gauaugugguuacaauug

SEQ ID NO: 612401 - RNA, 19 nt, Artificial Sequence
  Synthetic
agauaugugguuacaauug

SEQ ID NO: 612402 - RNA, 20 nt, Artificial Sequence
  Synthetic
uagauaugugguuacaauug

SEQ ID NO: 612403 - RNA, 21 nt, Artificial Sequence
  Synthetic
auagauaugugguuacaauug

SEQ ID NO: 612404 - RNA, 22 nt, Artificial Sequence
  Synthetic
gauagauaugugguuacaauug

SEQ ID NO: 612405 - RNA, 23 nt, Artificial Sequence
  Synthetic
agauagauaugugguuacaauug

SEQ ID NO: 612406 - RNA, 24 nt, Artificial Sequence
  Synthetic
aagauagauaugugguuacaauug

SEQ ID NO: 612407 - RNA, 18 nt, Artificial Sequence
  Synthetic
uucaguaccugccaauug

SEQ ID NO: 612408 - RNA, 19 nt, Artificial Sequence
  Synthetic
cuucaguaccugccaauug

SEQ ID NO: 612409 - RNA, 20 nt, Artificial Sequence
  Synthetic
ccuucaguaccugccaauug

SEQ ID NO: 612410 - RNA, 21 nt, Artificial Sequence
  Synthetic
cccuucaguaccugccaauug

SEQ ID NO: 612411 - RNA, 22 nt, Artificial Sequence
  Synthetic
ucccuucaguaccugccaauug

SEQ ID NO: 612412 - RNA, 23 nt, Artificial Sequence
  Synthetic
aucccuucaguaccugccaauug

SEQ ID NO: 612413 - RNA, 24 nt, Artificial Sequence
  Synthetic
uaucccuucaguaccugccaauug

SEQ ID NO: 612414 - RNA, 18 nt, Artificial Sequence
  Synthetic
aaaaaaaguauccaauug

SEQ ID NO: 612415 - RNA, 19 nt, Artificial Sequence
  Synthetic
aaaaaaaaguauccaauug

SEQ ID NO: 612416 - RNA, 20 nt, Artificial Sequence
  Synthetic
aaaaaaaaaguauccaauug

SEQ ID NO: 612417 - RNA, 21 nt, Artificial Sequence
  Synthetic
aaaaaaaaaaguauccaauug

SEQ ID NO: 612418 - RNA, 22 nt, Artificial Sequence
  Synthetic
aaaaaaaaaaaguauccaauug

SEQ ID NO: 612419 - RNA, 23 nt, Artificial Sequence
  Synthetic
aaaaaaaaaaaaguauccaauug

SEQ ID NO: 612420 - RNA, 24 nt, Artificial Sequence
  Synthetic
caaaaaaaaaaaaguauccaauug

SEQ ID NO: 612421 - RNA, 18 nt, Artificial Sequence
  Synthetic
gagacucaggggcaauug

SEQ ID NO: 612422 - RNA, 19 nt, Artificial Sequence
  Synthetic
cgagacucaggggcaauug

SEQ ID NO: 612423 - RNA, 20 nt, Artificial Sequence
  Synthetic
acgagacucaggggcaauug

SEQ ID NO: 612424 - RNA, 21 nt, Artificial Sequence
  Synthetic
aacgagacucaggggcaauug

SEQ ID NO: 612425 - RNA, 22 nt, Artificial Sequence
  Synthetic
aaacgagacucaggggcaauug

SEQ ID NO: 612426 - RNA, 23 nt, Artificial Sequence
  Synthetic
gaaacgagacucaggggcaauug

SEQ ID NO: 612427 - RNA, 24 nt, Artificial Sequence
  Synthetic
ggaaacgagacucaggggcaauug

SEQ ID NO: 612428 - RNA, 18 nt, Artificial Sequence
  Synthetic
ugaccuuagaaucaauug

SEQ ID NO: 612429 - RNA, 19 nt, Artificial Sequence
  Synthetic
cugaccuuagaaucaauug

SEQ ID NO: 612430 - RNA, 20 nt, Artificial Sequence
  Synthetic
ucugaccuuagaaucaauug

SEQ ID NO: 612431 - RNA, 21 nt, Artificial Sequence
  Synthetic
uucugaccuuagaaucaauug

SEQ ID NO: 612432 - RNA, 22 nt, Artificial Sequence
  Synthetic
auucugaccuuagaaucaauug

SEQ ID NO: 612433 - RNA, 23 nt, Artificial Sequence
  Synthetic
gauucugaccuuagaaucaauug

SEQ ID NO: 612434 - RNA, 24 nt, Artificial Sequence
  Synthetic
agauucugaccuuagaaucaauug

SEQ ID NO: 612435 - RNA, 18 nt, Artificial Sequence
  Synthetic
gagucuguagaucaauug

SEQ ID NO: 612436 - RNA, 19 nt, Artificial Sequence
  Synthetic
agagucuguagaucaauug

SEQ ID NO: 612437 - RNA, 20 nt, Artificial Sequence
  Synthetic
uagagucuguagaucaauug

SEQ ID NO: 612438 - RNA, 21 nt, Artificial Sequence
  Synthetic
auagagucuguagaucaauug

SEQ ID NO: 612439 - RNA, 22 nt, Artificial Sequence
  Synthetic
cauagagucuguagaucaauug

SEQ ID NO: 612440 - RNA, 23 nt, Artificial Sequence
  Synthetic
ccauagagucuguagaucaauug

SEQ ID NO: 612441 - RNA, 24 nt, Artificial Sequence
  Synthetic
uccauagagucuguagaucaauug

SEQ ID NO: 612442 - RNA, 18 nt, Artificial Sequence
  Synthetic
ggaacaggaagucaauug

SEQ ID NO: 612443 - RNA, 19 nt, Artificial Sequence
  Synthetic
aggaacaggaagucaauug

SEQ ID NO: 612444 - RNA, 20 nt, Artificial Sequence
  Synthetic
aaggaacaggaagucaauug

SEQ ID NO: 612445 - RNA, 21 nt, Artificial Sequence
  Synthetic
gaaggaacaggaagucaauug

SEQ ID NO: 612446 - RNA, 22 nt, Artificial Sequence
  Synthetic
ggaaggaacaggaagucaauug

SEQ ID NO: 612447 - RNA, 23 nt, Artificial Sequence
  Synthetic
uggaaggaacaggaagucaauug

SEQ ID NO: 612448 - RNA, 24 nt, Artificial Sequence
  Synthetic
uuggaaggaacaggaagucaauug

SEQ ID NO: 612449 - RNA, 18 nt, Artificial Sequence
  Synthetic
uaaaacacuuuucaauug

SEQ ID NO: 612450 - RNA, 19 nt, Artificial Sequence
  Synthetic
auaaaacacuuuucaauug

SEQ ID NO: 612451 - RNA, 20 nt, Artificial Sequence
  Synthetic
cauaaaacacuuuucaauug

SEQ ID NO: 612452 - RNA, 21 nt, Artificial Sequence
  Synthetic
ucauaaaacacuuuucaauug

SEQ ID NO: 612453 - RNA, 22 nt, Artificial Sequence
  Synthetic
uucauaaaacacuuuucaauug

SEQ ID NO: 612454 - RNA, 23 nt, Artificial Sequence
  Synthetic
auucauaaaacacuuuucaauug

SEQ ID NO: 612455 - RNA, 24 nt, Artificial Sequence
  Synthetic
uauucauaaaacacuuuucaauug

SEQ ID NO: 612456 - RNA, 18 nt, Artificial Sequence
  Synthetic
guaaaguguaaagaauug

SEQ ID NO: 612457 - RNA, 19 nt, Artificial Sequence
  Synthetic
uguaaaguguaaagaauug

SEQ ID NO: 612458 - RNA, 20 nt, Artificial Sequence
  Synthetic
auguaaaguguaaagaauug

SEQ ID NO: 612459 - RNA, 21 nt, Artificial Sequence
  Synthetic
uauguaaaguguaaagaauug

SEQ ID NO: 612460 - RNA, 22 nt, Artificial Sequence
  Synthetic
uuauguaaaguguaaagaauug

SEQ ID NO: 612461 - RNA, 23 nt, Artificial Sequence
  Synthetic
guuauguaaaguguaaagaauug

SEQ ID NO: 612462 - RNA, 24 nt, Artificial Sequence
  Synthetic
aguuauguaaaguguaaagaauug

SEQ ID NO: 612463 - RNA, 18 nt, Artificial Sequence
  Synthetic
accccaagggaagaauug

SEQ ID NO: 612464 - RNA, 19 nt, Artificial Sequence
  Synthetic
uaccccaagggaagaauug

SEQ ID NO: 612465 - RNA, 20 nt, Artificial Sequence
  Synthetic
cuaccccaagggaagaauug

SEQ ID NO: 612466 - RNA, 21 nt, Artificial Sequence
  Synthetic
ccuaccccaagggaagaauug

SEQ ID NO: 612467 - RNA, 22 nt, Artificial Sequence
  Synthetic
cccuaccccaagggaagaauug

SEQ ID NO: 612468 - RNA, 23 nt, Artificial Sequence
  Synthetic
ccccuaccccaagggaagaauug

SEQ ID NO: 612469 - RNA, 24 nt, Artificial Sequence
  Synthetic
cccccuaccccaagggaagaauug

SEQ ID NO: 612470 - RNA, 18 nt, Artificial Sequence
  Synthetic
auaugguuugaagaauug

SEQ ID NO: 612471 - RNA, 19 nt, Artificial Sequence
  Synthetic
gauaugguuugaagaauug

SEQ ID NO: 612472 - RNA, 20 nt, Artificial Sequence
  Synthetic
ggauaugguuugaagaauug

SEQ ID NO: 612473 - RNA, 21 nt, Artificial Sequence
  Synthetic
aggauaugguuugaagaauug

SEQ ID NO: 612474 - RNA, 22 nt, Artificial Sequence
  Synthetic
aaggauaugguuugaagaauug

SEQ ID NO: 612475 - RNA, 23 nt, Artificial Sequence
  Synthetic
aaaggauaugguuugaagaauug

SEQ ID NO: 612476 - RNA, 24 nt, Artificial Sequence
  Synthetic
gaaaggauaugguuugaagaauug

SEQ ID NO: 612477 - RNA, 18 nt, Artificial Sequence
  Synthetic
ucggcauucacagaauug

SEQ ID NO: 612478 - RNA, 19 nt, Artificial Sequence
  Synthetic
cucggcauucacagaauug

SEQ ID NO: 612479 - RNA, 20 nt, Artificial Sequence
  Synthetic
ucucggcauucacagaauug

SEQ ID NO: 612480 - RNA, 21 nt, Artificial Sequence
  Synthetic
cucucggcauucacagaauug

SEQ ID NO: 612481 - RNA, 22 nt, Artificial Sequence
  Synthetic
ucucucggcauucacagaauug

SEQ ID NO: 612482 - RNA, 23 nt, Artificial Sequence
  Synthetic
cucucucggcauucacagaauug

SEQ ID NO: 612483 - RNA, 24 nt, Artificial Sequence
  Synthetic
ccucucucggcauucacagaauug

SEQ ID NO: 612484 - RNA, 18 nt, Artificial Sequence
  Synthetic
gauaugaauacagaauug

SEQ ID NO: 612485 - RNA, 19 nt, Artificial Sequence
  Synthetic
ugauaugaauacagaauug

SEQ ID NO: 612486 - RNA, 20 nt, Artificial Sequence
  Synthetic
gugauaugaauacagaauug

SEQ ID NO: 612487 - RNA, 21 nt, Artificial Sequence
  Synthetic
ggugauaugaauacagaauug

SEQ ID NO: 612488 - RNA, 22 nt, Artificial Sequence
  Synthetic
gggugauaugaauacagaauug

SEQ ID NO: 612489 - RNA, 23 nt, Artificial Sequence
  Synthetic
agggugauaugaauacagaauug

SEQ ID NO: 612490 - RNA, 24 nt, Artificial Sequence
  Synthetic
gagggugauaugaauacagaauug

SEQ ID NO: 612491 - RNA, 18 nt, Artificial Sequence
  Synthetic
gaacuuccuagagaauug

SEQ ID NO: 612492 - RNA, 19 nt, Artificial Sequence
  Synthetic
ggaacuuccuagagaauug

SEQ ID NO: 612493 - RNA, 20 nt, Artificial Sequence
  Synthetic
uggaacuuccuagagaauug

SEQ ID NO: 612494 - RNA, 21 nt, Artificial Sequence
  Synthetic
cuggaacuuccuagagaauug

SEQ ID NO: 612495 - RNA, 22 nt, Artificial Sequence
  Synthetic
ucuggaacuuccuagagaauug

SEQ ID NO: 612496 - RNA, 23 nt, Artificial Sequence
  Synthetic
cucuggaacuuccuagagaauug

SEQ ID NO: 612497 - RNA, 24 nt, Artificial Sequence
  Synthetic
acucuggaacuuccuagagaauug

SEQ ID NO: 612498 - RNA, 18 nt, Artificial Sequence
  Synthetic
acagaaggauaggaauug

SEQ ID NO: 612499 - RNA, 19 nt, Artificial Sequence
  Synthetic
cacagaaggauaggaauug

SEQ ID NO: 612500 - RNA, 20 nt, Artificial Sequence
  Synthetic
ucacagaaggauaggaauug

SEQ ID NO: 612501 - RNA, 21 nt, Artificial Sequence
  Synthetic
aucacagaaggauaggaauug

SEQ ID NO: 612502 - RNA, 22 nt, Artificial Sequence
  Synthetic
caucacagaaggauaggaauug

SEQ ID NO: 612503 - RNA, 23 nt, Artificial Sequence
  Synthetic
ccaucacagaaggauaggaauug

SEQ ID NO: 612504 - RNA, 24 nt, Artificial Sequence
  Synthetic
cccaucacagaaggauaggaauug

SEQ ID NO: 612505 - RNA, 18 nt, Artificial Sequence
  Synthetic
uuuauuccuauggaauug

SEQ ID NO: 612506 - RNA, 19 nt, Artificial Sequence
  Synthetic
uuuuauuccuauggaauug

SEQ ID NO: 612507 - RNA, 20 nt, Artificial Sequence
  Synthetic
cuuuuauuccuauggaauug

SEQ ID NO: 612508 - RNA, 21 nt, Artificial Sequence
  Synthetic
acuuuuauuccuauggaauug

SEQ ID NO: 612509 - RNA, 22 nt, Artificial Sequence
  Synthetic
uacuuuuauuccuauggaauug

SEQ ID NO: 612510 - RNA, 23 nt, Artificial Sequence
  Synthetic
uuacuuuuauuccuauggaauug

SEQ ID NO: 612511 - RNA, 24 nt, Artificial Sequence
  Synthetic
auuacuuuuauuccuauggaauug

SEQ ID NO: 612512 - RNA, 18 nt, Artificial Sequence
  Synthetic
gacguaaaaguggaauug

SEQ ID NO: 612513 - RNA, 19 nt, Artificial Sequence
  Synthetic
ugacguaaaaguggaauug

SEQ ID NO: 612514 - RNA, 20 nt, Artificial Sequence
  Synthetic
cugacguaaaaguggaauug

SEQ ID NO: 612515 - RNA, 21 nt, Artificial Sequence
  Synthetic
ucugacguaaaaguggaauug

SEQ ID NO: 612516 - RNA, 22 nt, Artificial Sequence
  Synthetic
aucugacguaaaaguggaauug

SEQ ID NO: 612517 - RNA, 23 nt, Artificial Sequence
  Synthetic
aaucugacguaaaaguggaauug

SEQ ID NO: 612518 - RNA, 24 nt, Artificial Sequence
  Synthetic
caaucugacguaaaaguggaauug

SEQ ID NO: 612519 - RNA, 18 nt, Artificial Sequence
  Synthetic
aauaugaguuuggaauug

SEQ ID NO: 612520 - RNA, 19 nt, Artificial Sequence
  Synthetic
aaauaugaguuuggaauug

SEQ ID NO: 612521 - RNA, 20 nt, Artificial Sequence
  Synthetic
aaaauaugaguuuggaauug

SEQ ID NO: 612522 - RNA, 21 nt, Artificial Sequence
  Synthetic
gaaaauaugaguuuggaauug

SEQ ID NO: 612523 - RNA, 22 nt, Artificial Sequence
  Synthetic
ugaaaauaugaguuuggaauug

SEQ ID NO: 612524 - RNA, 23 nt, Artificial Sequence
  Synthetic
gugaaaauaugaguuuggaauug

SEQ ID NO: 612525 - RNA, 24 nt, Artificial Sequence
  Synthetic
ggugaaaauaugaguuuggaauug

SEQ ID NO: 612526 - RNA, 18 nt, Artificial Sequence
  Synthetic
agaugaggaaaugaauug

SEQ ID NO: 612527 - RNA, 19 nt, Artificial Sequence
  Synthetic
aagaugaggaaaugaauug

SEQ ID NO: 612528 - RNA, 20 nt, Artificial Sequence
  Synthetic
gaagaugaggaaaugaauug

SEQ ID NO: 612529 - RNA, 21 nt, Artificial Sequence
  Synthetic
ggaagaugaggaaaugaauug

SEQ ID NO: 612530 - RNA, 22 nt, Artificial Sequence
  Synthetic
gggaagaugaggaaaugaauug

SEQ ID NO: 612531 - RNA, 23 nt, Artificial Sequence
  Synthetic
ggggaagaugaggaaaugaauug

SEQ ID NO: 612532 - RNA, 24 nt, Artificial Sequence
  Synthetic
aggggaagaugaggaaaugaauug

SEQ ID NO: 612533 - RNA, 18 nt, Artificial Sequence
  Synthetic
aucgcuagaacauaauug

SEQ ID NO: 612534 - RNA, 19 nt, Artificial Sequence
  Synthetic
uaucgcuagaacauaauug

SEQ ID NO: 612535 - RNA, 20 nt, Artificial Sequence
  Synthetic
auaucgcuagaacauaauug

SEQ ID NO: 612536 - RNA, 21 nt, Artificial Sequence
  Synthetic
aauaucgcuagaacauaauug

SEQ ID NO: 612537 - RNA, 22 nt, Artificial Sequence
  Synthetic
uaauaucgcuagaacauaauug

SEQ ID NO: 612538 - RNA, 23 nt, Artificial Sequence
  Synthetic
uuaauaucgcuagaacauaauug

SEQ ID NO: 612539 - RNA, 24 nt, Artificial Sequence
  Synthetic
uuuaauaucgcuagaacauaauug

SEQ ID NO: 612540 - RNA, 18 nt, Artificial Sequence
  Synthetic
aauggaaaaccauaauug

SEQ ID NO: 612541 - RNA, 19 nt, Artificial Sequence
  Synthetic
uaauggaaaaccauaauug

SEQ ID NO: 612542 - RNA, 20 nt, Artificial Sequence
  Synthetic
cuaauggaaaaccauaauug

SEQ ID NO: 612543 - RNA, 21 nt, Artificial Sequence
  Synthetic
ccuaauggaaaaccauaauug

SEQ ID NO: 612544 - RNA, 22 nt, Artificial Sequence
  Synthetic
accuaauggaaaaccauaauug

SEQ ID NO: 612545 - RNA, 23 nt, Artificial Sequence
  Synthetic
uaccuaauggaaaaccauaauug

SEQ ID NO: 612546 - RNA, 24 nt, Artificial Sequence
  Synthetic
auaccuaauggaaaaccauaauug

SEQ ID NO: 612547 - RNA, 18 nt, Artificial Sequence
  Synthetic
auuuugcuuccauaauug

SEQ ID NO: 612548 - RNA, 19 nt, Artificial Sequence
  Synthetic
uauuuugcuuccauaauug

SEQ ID NO: 612549 - RNA, 20 nt, Artificial Sequence
  Synthetic
uuauuuugcuuccauaauug

SEQ ID NO: 612550 - RNA, 21 nt, Artificial Sequence
  Synthetic
uuuauuuugcuuccauaauug

SEQ ID NO: 612551 - RNA, 22 nt, Artificial Sequence
  Synthetic
guuuauuuugcuuccauaauug

SEQ ID NO: 612552 - RNA, 23 nt, Artificial Sequence
  Synthetic
aguuuauuuugcuuccauaauug

SEQ ID NO: 612553 - RNA, 24 nt, Artificial Sequence
  Synthetic
caguuuauuuugcuuccauaauug

SEQ ID NO: 612554 - RNA, 18 nt, Artificial Sequence
  Synthetic
uguggaugugcauaauug

SEQ ID NO: 612555 - RNA, 19 nt, Artificial Sequence
  Synthetic
uuguggaugugcauaauug

SEQ ID NO: 612556 - RNA, 20 nt, Artificial Sequence
  Synthetic
uuuguggaugugcauaauug

SEQ ID NO: 612557 - RNA, 21 nt, Artificial Sequence
  Synthetic
cuuuguggaugugcauaauug

SEQ ID NO: 612558 - RNA, 22 nt, Artificial Sequence
  Synthetic
ucuuuguggaugugcauaauug

SEQ ID NO: 612559 - RNA, 23 nt, Artificial Sequence
  Synthetic
aucuuuguggaugugcauaauug

SEQ ID NO: 612560 - RNA, 24 nt, Artificial Sequence
  Synthetic
aaucuuuguggaugugcauaauug

SEQ ID NO: 612561 - RNA, 18 nt, Artificial Sequence
  Synthetic
cuagcaucgucauaauug

SEQ ID NO: 612562 - RNA, 19 nt, Artificial Sequence
  Synthetic
acuagcaucgucauaauug

SEQ ID NO: 612563 - RNA, 20 nt, Artificial Sequence
  Synthetic
cacuagcaucgucauaauug

SEQ ID NO: 612564 - RNA, 21 nt, Artificial Sequence
  Synthetic
acacuagcaucgucauaauug

SEQ ID NO: 612565 - RNA, 22 nt, Artificial Sequence
  Synthetic
aacacuagcaucgucauaauug

SEQ ID NO: 612566 - RNA, 23 nt, Artificial Sequence
  Synthetic
aaacacuagcaucgucauaauug

SEQ ID NO: 612567 - RNA, 24 nt, Artificial Sequence
  Synthetic
uaaacacuagcaucgucauaauug

SEQ ID NO: 612568 - RNA, 18 nt, Artificial Sequence
  Synthetic
agaagguggagauaauug

SEQ ID NO: 612569 - RNA, 19 nt, Artificial Sequence
  Synthetic
cagaagguggagauaauug

SEQ ID NO: 612570 - RNA, 20 nt, Artificial Sequence
  Synthetic
acagaagguggagauaauug

SEQ ID NO: 612571 - RNA, 21 nt, Artificial Sequence
  Synthetic
gacagaagguggagauaauug

SEQ ID NO: 612572 - RNA, 22 nt, Artificial Sequence
  Synthetic
ugacagaagguggagauaauug

SEQ ID NO: 612573 - RNA, 23 nt, Artificial Sequence
  Synthetic
uugacagaagguggagauaauug

SEQ ID NO: 612574 - RNA, 24 nt, Artificial Sequence
  Synthetic
cuugacagaagguggagauaauug

SEQ ID NO: 612575 - RNA, 18 nt, Artificial Sequence
  Synthetic
guauauaaugacuaauug

SEQ ID NO: 612576 - RNA, 19 nt, Artificial Sequence
  Synthetic
uguauauaaugacuaauug

SEQ ID NO: 612577 - RNA, 20 nt, Artificial Sequence
  Synthetic
cuguauauaaugacuaauug

SEQ ID NO: 612578 - RNA, 21 nt, Artificial Sequence
  Synthetic
ccuguauauaaugacuaauug

SEQ ID NO: 612579 - RNA, 22 nt, Artificial Sequence
  Synthetic
gccuguauauaaugacuaauug

SEQ ID NO: 612580 - RNA, 23 nt, Artificial Sequence
  Synthetic
agccuguauauaaugacuaauug

SEQ ID NO: 612581 - RNA, 24 nt, Artificial Sequence
  Synthetic
cagccuguauauaaugacuaauug

SEQ ID NO: 612582 - RNA, 18 nt, Artificial Sequence
  Synthetic
gucuuacaagucuaauug

SEQ ID NO: 612583 - RNA, 19 nt, Artificial Sequence
  Synthetic
agucuuacaagucuaauug

SEQ ID NO: 612584 - RNA, 20 nt, Artificial Sequence
  Synthetic
cagucuuacaagucuaauug

SEQ ID NO: 612585 - RNA, 21 nt, Artificial Sequence
  Synthetic
ccagucuuacaagucuaauug

SEQ ID NO: 612586 - RNA, 22 nt, Artificial Sequence
  Synthetic
cccagucuuacaagucuaauug

SEQ ID NO: 612587 - RNA, 23 nt, Artificial Sequence
  Synthetic
ucccagucuuacaagucuaauug

SEQ ID NO: 612588 - RNA, 24 nt, Artificial Sequence
  Synthetic
uucccagucuuacaagucuaauug

SEQ ID NO: 612589 - RNA, 18 nt, Artificial Sequence
  Synthetic
acaaucaacuuguaauug

SEQ ID NO: 612590 - RNA, 19 nt, Artificial Sequence
  Synthetic
cacaaucaacuuguaauug

SEQ ID NO: 612591 - RNA, 20 nt, Artificial Sequence
  Synthetic
ucacaaucaacuuguaauug

SEQ ID NO: 612592 - RNA, 21 nt, Artificial Sequence
  Synthetic
gucacaaucaacuuguaauug

SEQ ID NO: 612593 - RNA, 22 nt, Artificial Sequence
  Synthetic
ugucacaaucaacuuguaauug

SEQ ID NO: 612594 - RNA, 23 nt, Artificial Sequence
  Synthetic
uugucacaaucaacuuguaauug

SEQ ID NO: 612595 - RNA, 24 nt, Artificial Sequence
  Synthetic
cuugucacaaucaacuuguaauug

SEQ ID NO: 612596 - RNA, 18 nt, Artificial Sequence
  Synthetic
auuuauuacuuguaauug

SEQ ID NO: 612597 - RNA, 19 nt, Artificial Sequence
  Synthetic
uauuuauuacuuguaauug

SEQ ID NO: 612598 - RNA, 20 nt, Artificial Sequence
  Synthetic
auauuuauuacuuguaauug

SEQ ID NO: 612599 - RNA, 21 nt, Artificial Sequence
  Synthetic
uauauuuauuacuuguaauug

SEQ ID NO: 612600 - RNA, 22 nt, Artificial Sequence
  Synthetic
auauauuuauuacuuguaauug

SEQ ID NO: 612601 - RNA, 23 nt, Artificial Sequence
  Synthetic
gauauauuuauuacuuguaauug

SEQ ID NO: 612602 - RNA, 24 nt, Artificial Sequence
  Synthetic
ugauauauuuauuacuuguaauug

SEQ ID NO: 612603 - RNA, 18 nt, Artificial Sequence
  Synthetic
ugugcauguuuguaauug

SEQ ID NO: 612604 - RNA, 19 nt, Artificial Sequence
  Synthetic
cugugcauguuuguaauug

SEQ ID NO: 612605 - RNA, 20 nt, Artificial Sequence
  Synthetic
ucugugcauguuuguaauug

SEQ ID NO: 612606 - RNA, 21 nt, Artificial Sequence
  Synthetic
aucugugcauguuuguaauug

SEQ ID NO: 612607 - RNA, 22 nt, Artificial Sequence
  Synthetic
aaucugugcauguuuguaauug

SEQ ID NO: 612608 - RNA, 23 nt, Artificial Sequence
  Synthetic
caaucugugcauguuuguaauug

SEQ ID NO: 612609 - RNA, 24 nt, Artificial Sequence
  Synthetic
acaaucugugcauguuuguaauug

SEQ ID NO: 612610 - RNA, 18 nt, Artificial Sequence
  Synthetic
cuagguauuaauuaauug

SEQ ID NO: 612611 - RNA, 19 nt, Artificial Sequence
  Synthetic
gcuagguauuaauuaauug

SEQ ID NO: 612612 - RNA, 20 nt, Artificial Sequence
  Synthetic
ggcuagguauuaauuaauug

SEQ ID NO: 612613 - RNA, 21 nt, Artificial Sequence
  Synthetic
gggcuagguauuaauuaauug

SEQ ID NO: 612614 - RNA, 22 nt, Artificial Sequence
  Synthetic
agggcuagguauuaauuaauug

SEQ ID NO: 612615 - RNA, 23 nt, Artificial Sequence
  Synthetic
cagggcuagguauuaauuaauug

SEQ ID NO: 612616 - RNA, 24 nt, Artificial Sequence
  Synthetic
acagggcuagguauuaauuaauug

SEQ ID NO: 612617 - RNA, 18 nt, Artificial Sequence
  Synthetic
accuccuaagguuaauug

SEQ ID NO: 612618 - RNA, 19 nt, Artificial Sequence
  Synthetic
uaccuccuaagguuaauug

SEQ ID NO: 612619 - RNA, 20 nt, Artificial Sequence
  Synthetic
uuaccuccuaagguuaauug

SEQ ID NO: 612620 - RNA, 21 nt, Artificial Sequence
  Synthetic
cuuaccuccuaagguuaauug

SEQ ID NO: 612621 - RNA, 22 nt, Artificial Sequence
  Synthetic
acuuaccuccuaagguuaauug

SEQ ID NO: 612622 - RNA, 23 nt, Artificial Sequence
  Synthetic
uacuuaccuccuaagguuaauug

SEQ ID NO: 612623 - RNA, 24 nt, Artificial Sequence
  Synthetic
guacuuaccuccuaagguuaauug

SEQ ID NO: 612624 - RNA, 18 nt, Artificial Sequence
  Synthetic
uaucuugauuguuaauug

SEQ ID NO: 612625 - RNA, 19 nt, Artificial Sequence
  Synthetic
auaucuugauuguuaauug

SEQ ID NO: 612626 - RNA, 20 nt, Artificial Sequence
  Synthetic
cauaucuugauuguuaauug

SEQ ID NO: 612627 - RNA, 21 nt, Artificial Sequence
  Synthetic
ucauaucuugauuguuaauug

SEQ ID NO: 612628 - RNA, 22 nt, Artificial Sequence
  Synthetic
aucauaucuugauuguuaauug

SEQ ID NO: 612629 - RNA, 23 nt, Artificial Sequence
  Synthetic
aaucauaucuugauuguuaauug

SEQ ID NO: 612630 - RNA, 24 nt, Artificial Sequence
  Synthetic
aaaucauaucuugauuguuaauug

SEQ ID NO: 612631 - RNA, 18 nt, Artificial Sequence
  Synthetic
agcuauaaaauuuaauug

SEQ ID NO: 612632 - RNA, 19 nt, Artificial Sequence
  Synthetic
uagcuauaaaauuuaauug

SEQ ID NO: 612633 - RNA, 20 nt, Artificial Sequence
  Synthetic
guagcuauaaaauuuaauug

SEQ ID NO: 612634 - RNA, 21 nt, Artificial Sequence
  Synthetic
uguagcuauaaaauuuaauug

SEQ ID NO: 612635 - RNA, 22 nt, Artificial Sequence
  Synthetic
auguagcuauaaaauuuaauug

SEQ ID NO: 612636 - RNA, 23 nt, Artificial Sequence
  Synthetic
uauguagcuauaaaauuuaauug

SEQ ID NO: 612637 - RNA, 24 nt, Artificial Sequence
  Synthetic
uuauguagcuauaaaauuuaauug

SEQ ID NO: 612638 - RNA, 18 nt, Artificial Sequence
  Synthetic
uaaauuuuauuuuaauug

SEQ ID NO: 612639 - RNA, 19 nt, Artificial Sequence
  Synthetic
guaaauuuuauuuuaauug

SEQ ID NO: 612640 - RNA, 20 nt, Artificial Sequence
  Synthetic
aguaaauuuuauuuuaauug

SEQ ID NO: 612641 - RNA, 21 nt, Artificial Sequence
  Synthetic
caguaaauuuuauuuuaauug

SEQ ID NO: 612642 - RNA, 22 nt, Artificial Sequence
  Synthetic
ucaguaaauuuuauuuuaauug

SEQ ID NO: 612643 - RNA, 23 nt, Artificial Sequence
  Synthetic
cucaguaaauuuuauuuuaauug

SEQ ID NO: 612644 - RNA, 24 nt, Artificial Sequence
  Synthetic
acucaguaaauuuuauuuuaauug

SEQ ID NO: 612645 - RNA, 18 nt, Artificial Sequence
  Synthetic
guaagugagaaaacauug

SEQ ID NO: 612646 - RNA, 19 nt, Artificial Sequence
  Synthetic
aguaagugagaaaacauug

SEQ ID NO: 612647 - RNA, 20 nt, Artificial Sequence
  Synthetic
caguaagugagaaaacauug

SEQ ID NO: 612648 - RNA, 21 nt, Artificial Sequence
  Synthetic
gcaguaagugagaaaacauug

SEQ ID NO: 612649 - RNA, 22 nt, Artificial Sequence
  Synthetic
agcaguaagugagaaaacauug

SEQ ID NO: 612650 - RNA, 23 nt, Artificial Sequence
  Synthetic
aagcaguaagugagaaaacauug

SEQ ID NO: 612651 - RNA, 24 nt, Artificial Sequence
  Synthetic
gaagcaguaagugagaaaacauug

SEQ ID NO: 612652 - RNA, 18 nt, Artificial Sequence
  Synthetic
aauguccaagaaacauug

SEQ ID NO: 612653 - RNA, 19 nt, Artificial Sequence
  Synthetic
aaauguccaagaaacauug

SEQ ID NO: 612654 - RNA, 20 nt, Artificial Sequence
  Synthetic
aaaauguccaagaaacauug

SEQ ID NO: 612655 - RNA, 21 nt, Artificial Sequence
  Synthetic
gaaaauguccaagaaacauug

SEQ ID NO: 612656 - RNA, 22 nt, Artificial Sequence
  Synthetic
ggaaaauguccaagaaacauug

SEQ ID NO: 612657 - RNA, 23 nt, Artificial Sequence
  Synthetic
aggaaaauguccaagaaacauug

SEQ ID NO: 612658 - RNA, 24 nt, Artificial Sequence
  Synthetic
caggaaaauguccaagaaacauug

SEQ ID NO: 612659 - RNA, 18 nt, Artificial Sequence
  Synthetic
uacuacaaggaaacauug

SEQ ID NO: 612660 - RNA, 19 nt, Artificial Sequence
  Synthetic
cuacuacaaggaaacauug

SEQ ID NO: 612661 - RNA, 20 nt, Artificial Sequence
  Synthetic
acuacuacaaggaaacauug

SEQ ID NO: 612662 - RNA, 21 nt, Artificial Sequence
  Synthetic
aacuacuacaaggaaacauug

SEQ ID NO: 612663 - RNA, 22 nt, Artificial Sequence
  Synthetic
aaacuacuacaaggaaacauug

SEQ ID NO: 612664 - RNA, 23 nt, Artificial Sequence
  Synthetic
gaaacuacuacaaggaaacauug

SEQ ID NO: 612665 - RNA, 24 nt, Artificial Sequence
  Synthetic
agaaacuacuacaaggaaacauug

SEQ ID NO: 612666 - RNA, 18 nt, Artificial Sequence
  Synthetic
ucaucugcaacaacauug

SEQ ID NO: 612667 - RNA, 19 nt, Artificial Sequence
  Synthetic
gucaucugcaacaacauug

SEQ ID NO: 612668 - RNA, 20 nt, Artificial Sequence
  Synthetic
ugucaucugcaacaacauug

SEQ ID NO: 612669 - RNA, 21 nt, Artificial Sequence
  Synthetic
cugucaucugcaacaacauug

SEQ ID NO: 612670 - RNA, 22 nt, Artificial Sequence
  Synthetic
ucugucaucugcaacaacauug

SEQ ID NO: 612671 - RNA, 23 nt, Artificial Sequence
  Synthetic
uucugucaucugcaacaacauug

SEQ ID NO: 612672 - RNA, 24 nt, Artificial Sequence
  Synthetic
auucugucaucugcaacaacauug

SEQ ID NO: 612673 - RNA, 18 nt, Artificial Sequence
  Synthetic
gaauaaaugaacacauug

SEQ ID NO: 612674 - RNA, 19 nt, Artificial Sequence
  Synthetic
ggaauaaaugaacacauug

SEQ ID NO: 612675 - RNA, 20 nt, Artificial Sequence
  Synthetic
uggaauaaaugaacacauug

SEQ ID NO: 612676 - RNA, 21 nt, Artificial Sequence
  Synthetic
guggaauaaaugaacacauug

SEQ ID NO: 612677 - RNA, 22 nt, Artificial Sequence
  Synthetic
uguggaauaaaugaacacauug

SEQ ID NO: 612678 - RNA, 23 nt, Artificial Sequence
  Synthetic
cuguggaauaaaugaacacauug

SEQ ID NO: 612679 - RNA, 24 nt, Artificial Sequence
  Synthetic
ucuguggaauaaaugaacacauug

SEQ ID NO: 612680 - RNA, 18 nt, Artificial Sequence
  Synthetic
uuaaugguuuacacauug

SEQ ID NO: 612681 - RNA, 19 nt, Artificial Sequence
  Synthetic
uuuaaugguuuacacauug

SEQ ID NO: 612682 - RNA, 20 nt, Artificial Sequence
  Synthetic
cuuuaaugguuuacacauug

SEQ ID NO: 612683 - RNA, 21 nt, Artificial Sequence
  Synthetic
ucuuuaaugguuuacacauug

SEQ ID NO: 612684 - RNA, 22 nt, Artificial Sequence
  Synthetic
uucuuuaaugguuuacacauug

SEQ ID NO: 612685 - RNA, 23 nt, Artificial Sequence
  Synthetic
guucuuuaaugguuuacacauug

SEQ ID NO: 612686 - RNA, 24 nt, Artificial Sequence
  Synthetic
uguucuuuaaugguuuacacauug

SEQ ID NO: 612687 - RNA, 18 nt, Artificial Sequence
  Synthetic
gcuguuguuaccacauug

SEQ ID NO: 612688 - RNA, 19 nt, Artificial Sequence
  Synthetic
ggcuguuguuaccacauug

SEQ ID NO: 612689 - RNA, 20 nt, Artificial Sequence
  Synthetic
aggcuguuguuaccacauug

SEQ ID NO: 612690 - RNA, 21 nt, Artificial Sequence
  Synthetic
uaggcuguuguuaccacauug

SEQ ID NO: 612691 - RNA, 22 nt, Artificial Sequence
  Synthetic
guaggcuguuguuaccacauug

SEQ ID NO: 612692 - RNA, 23 nt, Artificial Sequence
  Synthetic
gguaggcuguuguuaccacauug

SEQ ID NO: 612693 - RNA, 24 nt, Artificial Sequence
  Synthetic
ugguaggcuguuguuaccacauug

SEQ ID NO: 612694 - RNA, 18 nt, Artificial Sequence
  Synthetic
aggauaaauugcacauug

SEQ ID NO: 612695 - RNA, 19 nt, Artificial Sequence
  Synthetic
aaggauaaauugcacauug

SEQ ID NO: 612696 - RNA, 20 nt, Artificial Sequence
  Synthetic
aaaggauaaauugcacauug

SEQ ID NO: 612697 - RNA, 21 nt, Artificial Sequence
  Synthetic
caaaggauaaauugcacauug

SEQ ID NO: 612698 - RNA, 22 nt, Artificial Sequence
  Synthetic
gcaaaggauaaauugcacauug

SEQ ID NO: 612699 - RNA, 23 nt, Artificial Sequence
  Synthetic
ggcaaaggauaaauugcacauug

SEQ ID NO: 612700 - RNA, 24 nt, Artificial Sequence
  Synthetic
gggcaaaggauaaauugcacauug

SEQ ID NO: 612701 - RNA, 18 nt, Artificial Sequence
  Synthetic
acaaugaguugcacauug

SEQ ID NO: 612702 - RNA, 19 nt, Artificial Sequence
  Synthetic
uacaaugaguugcacauug

SEQ ID NO: 612703 - RNA, 20 nt, Artificial Sequence
  Synthetic
auacaaugaguugcacauug

SEQ ID NO: 612704 - RNA, 21 nt, Artificial Sequence
  Synthetic
cauacaaugaguugcacauug

SEQ ID NO: 612705 - RNA, 22 nt, Artificial Sequence
  Synthetic
acauacaaugaguugcacauug

SEQ ID NO: 612706 - RNA, 23 nt, Artificial Sequence
  Synthetic
uacauacaaugaguugcacauug

SEQ ID NO: 612707 - RNA, 24 nt, Artificial Sequence
  Synthetic
auacauacaaugaguugcacauug

SEQ ID NO: 612708 - RNA, 18 nt, Artificial Sequence
  Synthetic
auugaacaucagacauug

SEQ ID NO: 612709 - RNA, 19 nt, Artificial Sequence
  Synthetic
cauugaacaucagacauug

SEQ ID NO: 612710 - RNA, 20 nt, Artificial Sequence
  Synthetic
acauugaacaucagacauug

SEQ ID NO: 612711 - RNA, 21 nt, Artificial Sequence
  Synthetic
cacauugaacaucagacauug

SEQ ID NO: 612712 - RNA, 22 nt, Artificial Sequence
  Synthetic
acacauugaacaucagacauug

SEQ ID NO: 612713 - RNA, 23 nt, Artificial Sequence
  Synthetic
aacacauugaacaucagacauug

SEQ ID NO: 612714 - RNA, 24 nt, Artificial Sequence
  Synthetic
caacacauugaacaucagacauug

SEQ ID NO: 612715 - RNA, 18 nt, Artificial Sequence
  Synthetic
cagguaagagggacauug

SEQ ID NO: 612716 - RNA, 19 nt, Artificial Sequence
  Synthetic
ccagguaagagggacauug

SEQ ID NO: 612717 - RNA, 20 nt, Artificial Sequence
  Synthetic
accagguaagagggacauug

SEQ ID NO: 612718 - RNA, 21 nt, Artificial Sequence
  Synthetic
uaccagguaagagggacauug

SEQ ID NO: 612719 - RNA, 22 nt, Artificial Sequence
  Synthetic
guaccagguaagagggacauug

SEQ ID NO: 612720 - RNA, 23 nt, Artificial Sequence
  Synthetic
uguaccagguaagagggacauug

SEQ ID NO: 612721 - RNA, 24 nt, Artificial Sequence
  Synthetic
cuguaccagguaagagggacauug

SEQ ID NO: 612722 - RNA, 18 nt, Artificial Sequence
  Synthetic
ugaccuugacugacauug

SEQ ID NO: 612723 - RNA, 19 nt, Artificial Sequence
  Synthetic
cugaccuugacugacauug

SEQ ID NO: 612724 - RNA, 20 nt, Artificial Sequence
  Synthetic
acugaccuugacugacauug

SEQ ID NO: 612725 - RNA, 21 nt, Artificial Sequence
  Synthetic
cacugaccuugacugacauug

SEQ ID NO: 612726 - RNA, 22 nt, Artificial Sequence
  Synthetic
ccacugaccuugacugacauug

SEQ ID NO: 612727 - RNA, 23 nt, Artificial Sequence
  Synthetic
cccacugaccuugacugacauug

SEQ ID NO: 612728 - RNA, 24 nt, Artificial Sequence
  Synthetic
ucccacugaccuugacugacauug

SEQ ID NO: 612729 - RNA, 18 nt, Artificial Sequence
  Synthetic
uaacaaucauauacauug

SEQ ID NO: 612730 - RNA, 19 nt, Artificial Sequence
  Synthetic
guaacaaucauauacauug

SEQ ID NO: 612731 - RNA, 20 nt, Artificial Sequence
  Synthetic
aguaacaaucauauacauug

SEQ ID NO: 612732 - RNA, 21 nt, Artificial Sequence
  Synthetic
caguaacaaucauauacauug

SEQ ID NO: 612733 - RNA, 22 nt, Artificial Sequence
  Synthetic
ucaguaacaaucauauacauug

SEQ ID NO: 612734 - RNA, 23 nt, Artificial Sequence
  Synthetic
cucaguaacaaucauauacauug

SEQ ID NO: 612735 - RNA, 24 nt, Artificial Sequence
  Synthetic
ucucaguaacaaucauauacauug

SEQ ID NO: 612736 - RNA, 18 nt, Artificial Sequence
  Synthetic
gauacucugacaccauug

SEQ ID NO: 612737 - RNA, 19 nt, Artificial Sequence
  Synthetic
ggauacucugacaccauug

SEQ ID NO: 612738 - RNA, 20 nt, Artificial Sequence
  Synthetic
cggauacucugacaccauug

SEQ ID NO: 612739 - RNA, 21 nt, Artificial Sequence
  Synthetic
acggauacucugacaccauug

SEQ ID NO: 612740 - RNA, 22 nt, Artificial Sequence
  Synthetic
aacggauacucugacaccauug

SEQ ID NO: 612741 - RNA, 23 nt, Artificial Sequence
  Synthetic
uaacggauacucugacaccauug

SEQ ID NO: 612742 - RNA, 24 nt, Artificial Sequence
  Synthetic
cuaacggauacucugacaccauug

SEQ ID NO: 612743 - RNA, 18 nt, Artificial Sequence
  Synthetic
aaauuaguuccaccauug

SEQ ID NO: 612744 - RNA, 19 nt, Artificial Sequence
  Synthetic
uaaauuaguuccaccauug

SEQ ID NO: 612745 - RNA, 20 nt, Artificial Sequence
  Synthetic
guaaauuaguuccaccauug

SEQ ID NO: 612746 - RNA, 21 nt, Artificial Sequence
  Synthetic
uguaaauuaguuccaccauug

SEQ ID NO: 612747 - RNA, 22 nt, Artificial Sequence
  Synthetic
guguaaauuaguuccaccauug

SEQ ID NO: 612748 - RNA, 23 nt, Artificial Sequence
  Synthetic
aguguaaauuaguuccaccauug

SEQ ID NO: 612749 - RNA, 24 nt, Artificial Sequence
  Synthetic
gaguguaaauuaguuccaccauug

SEQ ID NO: 612750 - RNA, 18 nt, Artificial Sequence
  Synthetic
agaaaacucuuaccauug

SEQ ID NO: 612751 - RNA, 19 nt, Artificial Sequence
  Synthetic
aagaaaacucuuaccauug

SEQ ID NO: 612752 - RNA, 20 nt, Artificial Sequence
  Synthetic
aaagaaaacucuuaccauug

SEQ ID NO: 612753 - RNA, 21 nt, Artificial Sequence
  Synthetic
aaaagaaaacucuuaccauug

SEQ ID NO: 612754 - RNA, 22 nt, Artificial Sequence
  Synthetic
gaaaagaaaacucuuaccauug

SEQ ID NO: 612755 - RNA, 23 nt, Artificial Sequence
  Synthetic
agaaaagaaaacucuuaccauug

SEQ ID NO: 612756 - RNA, 24 nt, Artificial Sequence
  Synthetic
aagaaaagaaaacucuuaccauug

SEQ ID NO: 612757 - RNA, 18 nt, Artificial Sequence
  Synthetic
guaaaauaguuaccauug

SEQ ID NO: 612758 - RNA, 19 nt, Artificial Sequence
  Synthetic
uguaaaauaguuaccauug

SEQ ID NO: 612759 - RNA, 20 nt, Artificial Sequence
  Synthetic
guguaaaauaguuaccauug

SEQ ID NO: 612760 - RNA, 21 nt, Artificial Sequence
  Synthetic
aguguaaaauaguuaccauug

SEQ ID NO: 612761 - RNA, 22 nt, Artificial Sequence
  Synthetic
uaguguaaaauaguuaccauug

SEQ ID NO: 612762 - RNA, 23 nt, Artificial Sequence
  Synthetic
auaguguaaaauaguuaccauug

SEQ ID NO: 612763 - RNA, 24 nt, Artificial Sequence
  Synthetic
uauaguguaaaauaguuaccauug

SEQ ID NO: 612764 - RNA, 18 nt, Artificial Sequence
  Synthetic
uaaucucaaucuccauug

SEQ ID NO: 612765 - RNA, 19 nt, Artificial Sequence
  Synthetic
uuaaucucaaucuccauug

SEQ ID NO: 612766 - RNA, 20 nt, Artificial Sequence
  Synthetic
auuaaucucaaucuccauug

SEQ ID NO: 612767 - RNA, 21 nt, Artificial Sequence
  Synthetic
aauuaaucucaaucuccauug

SEQ ID NO: 612768 - RNA, 22 nt, Artificial Sequence
  Synthetic
uaauuaaucucaaucuccauug

SEQ ID NO: 612769 - RNA, 23 nt, Artificial Sequence
  Synthetic
uuaauuaaucucaaucuccauug

SEQ ID NO: 612770 - RNA, 24 nt, Artificial Sequence
  Synthetic
cuuaauuaaucucaaucuccauug

SEQ ID NO: 612771 - RNA, 18 nt, Artificial Sequence
  Synthetic
uucuucucaaguccauug

SEQ ID NO: 612772 - RNA, 19 nt, Artificial Sequence
  Synthetic
auucuucucaaguccauug

SEQ ID NO: 612773 - RNA, 20 nt, Artificial Sequence
  Synthetic
uauucuucucaaguccauug

SEQ ID NO: 612774 - RNA, 21 nt, Artificial Sequence
  Synthetic
guauucuucucaaguccauug

SEQ ID NO: 612775 - RNA, 22 nt, Artificial Sequence
  Synthetic
gguauucuucucaaguccauug

SEQ ID NO: 612776 - RNA, 23 nt, Artificial Sequence
  Synthetic
ggguauucuucucaaguccauug

SEQ ID NO: 612777 - RNA, 24 nt, Artificial Sequence
  Synthetic
aggguauucuucucaaguccauug

SEQ ID NO: 612778 - RNA, 18 nt, Artificial Sequence
  Synthetic
guauauuuuauuccauug

SEQ ID NO: 612779 - RNA, 19 nt, Artificial Sequence
  Synthetic
aguauauuuuauuccauug

SEQ ID NO: 612780 - RNA, 20 nt, Artificial Sequence
  Synthetic
uaguauauuuuauuccauug

SEQ ID NO: 612781 - RNA, 21 nt, Artificial Sequence
  Synthetic
uuaguauauuuuauuccauug

SEQ ID NO: 612782 - RNA, 22 nt, Artificial Sequence
  Synthetic
auuaguauauuuuauuccauug

SEQ ID NO: 612783 - RNA, 23 nt, Artificial Sequence
  Synthetic
gauuaguauauuuuauuccauug

SEQ ID NO: 612784 - RNA, 24 nt, Artificial Sequence
  Synthetic
ggauuaguauauuuuauuccauug

SEQ ID NO: 612785 - RNA, 18 nt, Artificial Sequence
  Synthetic
uauucccauuuuccauug

SEQ ID NO: 612786 - RNA, 19 nt, Artificial Sequence
  Synthetic
uuauucccauuuuccauug

SEQ ID NO: 612787 - RNA, 20 nt, Artificial Sequence
  Synthetic
auuauucccauuuuccauug

SEQ ID NO: 612788 - RNA, 21 nt, Artificial Sequence
  Synthetic
uauuauucccauuuuccauug

SEQ ID NO: 612789 - RNA, 22 nt, Artificial Sequence
  Synthetic
uuauuauucccauuuuccauug

SEQ ID NO: 612790 - RNA, 23 nt, Artificial Sequence
  Synthetic
auuauuauucccauuuuccauug

SEQ ID NO: 612791 - RNA, 24 nt, Artificial Sequence
  Synthetic
aauuauuauucccauuuuccauug

SEQ ID NO: 612792 - RNA, 18 nt, Artificial Sequence
  Synthetic
auguaaguaaaagcauug

SEQ ID NO: 612793 - RNA, 19 nt, Artificial Sequence
  Synthetic
uauguaaguaaaagcauug

SEQ ID NO: 612794 - RNA, 20 nt, Artificial Sequence
  Synthetic
cuauguaaguaaaagcauug

SEQ ID NO: 612795 - RNA, 21 nt, Artificial Sequence
  Synthetic
gcuauguaaguaaaagcauug

SEQ ID NO: 612796 - RNA, 22 nt, Artificial Sequence
  Synthetic
ugcuauguaaguaaaagcauug

SEQ ID NO: 612797 - RNA, 23 nt, Artificial Sequence
  Synthetic
gugcuauguaaguaaaagcauug

SEQ ID NO: 612798 - RNA, 24 nt, Artificial Sequence
  Synthetic
ggugcuauguaaguaaaagcauug

SEQ ID NO: 612799 - RNA, 18 nt, Artificial Sequence
  Synthetic
gagaggaacaaagcauug

SEQ ID NO: 612800 - RNA, 19 nt, Artificial Sequence
  Synthetic
ggagaggaacaaagcauug

SEQ ID NO: 612801 - RNA, 20 nt, Artificial Sequence
  Synthetic
uggagaggaacaaagcauug

SEQ ID NO: 612802 - RNA, 21 nt, Artificial Sequence
  Synthetic
cuggagaggaacaaagcauug

SEQ ID NO: 612803 - RNA, 22 nt, Artificial Sequence
  Synthetic
acuggagaggaacaaagcauug

SEQ ID NO: 612804 - RNA, 23 nt, Artificial Sequence
  Synthetic
gacuggagaggaacaaagcauug

SEQ ID NO: 612805 - RNA, 24 nt, Artificial Sequence
  Synthetic
cgacuggagaggaacaaagcauug

SEQ ID NO: 612806 - RNA, 18 nt, Artificial Sequence
  Synthetic
guuaaccagugagcauug

SEQ ID NO: 612807 - RNA, 19 nt, Artificial Sequence
  Synthetic
uguuaaccagugagcauug

SEQ ID NO: 612808 - RNA, 20 nt, Artificial Sequence
  Synthetic
cuguuaaccagugagcauug

SEQ ID NO: 612809 - RNA, 21 nt, Artificial Sequence
  Synthetic
ccuguuaaccagugagcauug

SEQ ID NO: 612810 - RNA, 22 nt, Artificial Sequence
  Synthetic
uccuguuaaccagugagcauug

SEQ ID NO: 612811 - RNA, 23 nt, Artificial Sequence
  Synthetic
uuccuguuaaccagugagcauug

SEQ ID NO: 612812 - RNA, 24 nt, Artificial Sequence
  Synthetic
uuuccuguuaaccagugagcauug

SEQ ID NO: 612813 - RNA, 18 nt, Artificial Sequence
  Synthetic
uugcuaaaagaggcauug

SEQ ID NO: 612814 - RNA, 19 nt, Artificial Sequence
  Synthetic
cuugcuaaaagaggcauug

SEQ ID NO: 612815 - RNA, 20 nt, Artificial Sequence
  Synthetic
ucuugcuaaaagaggcauug

SEQ ID NO: 612816 - RNA, 21 nt, Artificial Sequence
  Synthetic
aucuugcuaaaagaggcauug

SEQ ID NO: 612817 - RNA, 22 nt, Artificial Sequence
  Synthetic
caucuugcuaaaagaggcauug

SEQ ID NO: 612818 - RNA, 23 nt, Artificial Sequence
  Synthetic
ucaucuugcuaaaagaggcauug

SEQ ID NO: 612819 - RNA, 24 nt, Artificial Sequence
  Synthetic
uucaucuugcuaaaagaggcauug

SEQ ID NO: 612820 - RNA, 18 nt, Artificial Sequence
  Synthetic
gauguaaauuuggcauug

SEQ ID NO: 612821 - RNA, 19 nt, Artificial Sequence
  Synthetic
ugauguaaauuuggcauug

SEQ ID NO: 612822 - RNA, 20 nt, Artificial Sequence
  Synthetic
augauguaaauuuggcauug

SEQ ID NO: 612823 - RNA, 21 nt, Artificial Sequence
  Synthetic
gaugauguaaauuuggcauug

SEQ ID NO: 612824 - RNA, 22 nt, Artificial Sequence
  Synthetic
ggaugauguaaauuuggcauug

SEQ ID NO: 612825 - RNA, 23 nt, Artificial Sequence
  Synthetic
gggaugauguaaauuuggcauug

SEQ ID NO: 612826 - RNA, 24 nt, Artificial Sequence
  Synthetic
ggggaugauguaaauuuggcauug

SEQ ID NO: 612827 - RNA, 18 nt, Artificial Sequence
  Synthetic
aaguuuguugcugcauug

SEQ ID NO: 612828 - RNA, 19 nt, Artificial Sequence
  Synthetic
aaaguuuguugcugcauug

SEQ ID NO: 612829 - RNA, 20 nt, Artificial Sequence
  Synthetic
gaaaguuuguugcugcauug

SEQ ID NO: 612830 - RNA, 21 nt, Artificial Sequence
  Synthetic
agaaaguuuguugcugcauug

SEQ ID NO: 612831 - RNA, 22 nt, Artificial Sequence
  Synthetic
aagaaaguuuguugcugcauug

SEQ ID NO: 612832 - RNA, 23 nt, Artificial Sequence
  Synthetic
caagaaaguuuguugcugcauug

SEQ ID NO: 612833 - RNA, 24 nt, Artificial Sequence
  Synthetic
acaagaaaguuuguugcugcauug

SEQ ID NO: 612834 - RNA, 18 nt, Artificial Sequence
  Synthetic
cuugaaauaugugcauug

SEQ ID NO: 612835 - RNA, 19 nt, Artificial Sequence
  Synthetic
gcuugaaauaugugcauug

SEQ ID NO: 612836 - RNA, 20 nt, Artificial Sequence
  Synthetic
agcuugaaauaugugcauug

SEQ ID NO: 612837 - RNA, 21 nt, Artificial Sequence
  Synthetic
cagcuugaaauaugugcauug

SEQ ID NO: 612838 - RNA, 22 nt, Artificial Sequence
  Synthetic
acagcuugaaauaugugcauug

SEQ ID NO: 612839 - RNA, 23 nt, Artificial Sequence
  Synthetic
uacagcuugaaauaugugcauug

SEQ ID NO: 612840 - RNA, 24 nt, Artificial Sequence
  Synthetic
cuacagcuugaaauaugugcauug

SEQ ID NO: 612841 - RNA, 18 nt, Artificial Sequence
  Synthetic
gauucguguuuugcauug

SEQ ID NO: 612842 - RNA, 19 nt, Artificial Sequence
  Synthetic
cgauucguguuuugcauug

SEQ ID NO: 612843 - RNA, 20 nt, Artificial Sequence
  Synthetic
acgauucguguuuugcauug

SEQ ID NO: 612844 - RNA, 21 nt, Artificial Sequence
  Synthetic
uacgauucguguuuugcauug

SEQ ID NO: 612845 - RNA, 22 nt, Artificial Sequence
  Synthetic
auacgauucguguuuugcauug

SEQ ID NO: 612846 - RNA, 23 nt, Artificial Sequence
  Synthetic
gauacgauucguguuuugcauug

SEQ ID NO: 612847 - RNA, 24 nt, Artificial Sequence
  Synthetic
ugauacgauucguguuuugcauug

SEQ ID NO: 612848 - RNA, 18 nt, Artificial Sequence
  Synthetic
uaaugaauacaaucauug

SEQ ID NO: 612849 - RNA, 19 nt, Artificial Sequence
  Synthetic
uuaaugaauacaaucauug

SEQ ID NO: 612850 - RNA, 20 nt, Artificial Sequence
  Synthetic
auuaaugaauacaaucauug

SEQ ID NO: 612851 - RNA, 21 nt, Artificial Sequence
  Synthetic
uauuaaugaauacaaucauug

SEQ ID NO: 612852 - RNA, 22 nt, Artificial Sequence
  Synthetic
auauuaaugaauacaaucauug

SEQ ID NO: 612853 - RNA, 23 nt, Artificial Sequence
  Synthetic
uauauuaaugaauacaaucauug

SEQ ID NO: 612854 - RNA, 24 nt, Artificial Sequence
  Synthetic
auauauuaaugaauacaaucauug

SEQ ID NO: 612855 - RNA, 18 nt, Artificial Sequence
  Synthetic
uuuuggacugaaucauug

SEQ ID NO: 612856 - RNA, 19 nt, Artificial Sequence
  Synthetic
auuuuggacugaaucauug

SEQ ID NO: 612857 - RNA, 20 nt, Artificial Sequence
  Synthetic
gauuuuggacugaaucauug

SEQ ID NO: 612858 - RNA, 21 nt, Artificial Sequence
  Synthetic
ugauuuuggacugaaucauug

SEQ ID NO: 612859 - RNA, 22 nt, Artificial Sequence
  Synthetic
augauuuuggacugaaucauug

SEQ ID NO: 612860 - RNA, 23 nt, Artificial Sequence
  Synthetic
aaugauuuuggacugaaucauug

SEQ ID NO: 612861 - RNA, 24 nt, Artificial Sequence
  Synthetic
aaaugauuuuggacugaaucauug

SEQ ID NO: 612862 - RNA, 18 nt, Artificial Sequence
  Synthetic
caacaucacugaucauug

SEQ ID NO: 612863 - RNA, 19 nt, Artificial Sequence
  Synthetic
ucaacaucacugaucauug

SEQ ID NO: 612864 - RNA, 20 nt, Artificial Sequence
  Synthetic
cucaacaucacugaucauug

SEQ ID NO: 612865 - RNA, 21 nt, Artificial Sequence
  Synthetic
gcucaacaucacugaucauug

SEQ ID NO: 612866 - RNA, 22 nt, Artificial Sequence
  Synthetic
agcucaacaucacugaucauug

SEQ ID NO: 612867 - RNA, 23 nt, Artificial Sequence
  Synthetic
aagcucaacaucacugaucauug

SEQ ID NO: 612868 - RNA, 24 nt, Artificial Sequence
  Synthetic
aaagcucaacaucacugaucauug

SEQ ID NO: 612869 - RNA, 18 nt, Artificial Sequence
  Synthetic
caauccagucuaucauug

SEQ ID NO: 612870 - RNA, 19 nt, Artificial Sequence
  Synthetic
ucaauccagucuaucauug

SEQ ID NO: 612871 - RNA, 20 nt, Artificial Sequence
  Synthetic
cucaauccagucuaucauug

SEQ ID NO: 612872 - RNA, 21 nt, Artificial Sequence
  Synthetic
ucucaauccagucuaucauug

SEQ ID NO: 612873 - RNA, 22 nt, Artificial Sequence
  Synthetic
uucucaauccagucuaucauug

SEQ ID NO: 612874 - RNA, 23 nt, Artificial Sequence
  Synthetic
uuucucaauccagucuaucauug

SEQ ID NO: 612875 - RNA, 24 nt, Artificial Sequence
  Synthetic
uuuucucaauccagucuaucauug

SEQ ID NO: 612876 - RNA, 24 nt, Artificial Sequence
  Synthetic
uuuucuuuauccagucuaucauug

SEQ ID NO: 612877 - RNA, 18 nt, Artificial Sequence
  Synthetic
uaauccggucuaucauug

SEQ ID NO: 612878 - RNA, 19 nt, Artificial Sequence
  Synthetic
uuaauccggucuaucauug

SEQ ID NO: 612879 - RNA, 20 nt, Artificial Sequence
  Synthetic
cuuaauccggucuaucauug

SEQ ID NO: 612880 - RNA, 21 nt, Artificial Sequence
  Synthetic
ucuuaauccggucuaucauug

SEQ ID NO: 612881 - RNA, 22 nt, Artificial Sequence
  Synthetic
uucuuaauccggucuaucauug

SEQ ID NO: 612882 - RNA, 23 nt, Artificial Sequence
  Synthetic
uuucuuaauccggucuaucauug

SEQ ID NO: 612883 - RNA, 24 nt, Artificial Sequence
  Synthetic
uuuucuuaauccggucuaucauug

SEQ ID NO: 612884 - RNA, 18 nt, Artificial Sequence
  Synthetic
caauuauccuuaucauug

SEQ ID NO: 612885 - RNA, 19 nt, Artificial Sequence
  Synthetic
ucaauuauccuuaucauug

SEQ ID NO: 612886 - RNA, 20 nt, Artificial Sequence
  Synthetic
uucaauuauccuuaucauug

SEQ ID NO: 612887 - RNA, 21 nt, Artificial Sequence
  Synthetic
uuucaauuauccuuaucauug

SEQ ID NO: 612888 - RNA, 22 nt, Artificial Sequence
  Synthetic
cuuucaauuauccuuaucauug

SEQ ID NO: 612889 - RNA, 23 nt, Artificial Sequence
  Synthetic
ucuuucaauuauccuuaucauug

SEQ ID NO: 612890 - RNA, 24 nt, Artificial Sequence
  Synthetic
cucuuucaauuauccuuaucauug

SEQ ID NO: 612891 - RNA, 18 nt, Artificial Sequence
  Synthetic
auaugagcuaccucauug

SEQ ID NO: 612892 - RNA, 19 nt, Artificial Sequence
  Synthetic
aauaugagcuaccucauug

SEQ ID NO: 612893 - RNA, 20 nt, Artificial Sequence
  Synthetic
gaauaugagcuaccucauug

SEQ ID NO: 612894 - RNA, 21 nt, Artificial Sequence
  Synthetic
ggaauaugagcuaccucauug

SEQ ID NO: 612895 - RNA, 22 nt, Artificial Sequence
  Synthetic
aggaauaugagcuaccucauug

SEQ ID NO: 612896 - RNA, 23 nt, Artificial Sequence
  Synthetic
aaggaauaugagcuaccucauug

SEQ ID NO: 612897 - RNA, 24 nt, Artificial Sequence
  Synthetic
uaaggaauaugagcuaccucauug

SEQ ID NO: 612898 - RNA, 18 nt, Artificial Sequence
  Synthetic
uuaacaagcugcucauug

SEQ ID NO: 612899 - RNA, 19 nt, Artificial Sequence
  Synthetic
guuaacaagcugcucauug

SEQ ID NO: 612900 - RNA, 20 nt, Artificial Sequence
  Synthetic
uguuaacaagcugcucauug

SEQ ID NO: 612901 - RNA, 21 nt, Artificial Sequence
  Synthetic
auguuaacaagcugcucauug

SEQ ID NO: 612902 - RNA, 22 nt, Artificial Sequence
  Synthetic
aauguuaacaagcugcucauug

SEQ ID NO: 612903 - RNA, 23 nt, Artificial Sequence
  Synthetic
uaauguuaacaagcugcucauug

SEQ ID NO: 612904 - RNA, 24 nt, Artificial Sequence
  Synthetic
cuaauguuaacaagcugcucauug

SEQ ID NO: 612905 - RNA, 18 nt, Artificial Sequence
  Synthetic
uauaacuuguggucauug

SEQ ID NO: 612906 - RNA, 19 nt, Artificial Sequence
  Synthetic
guauaacuuguggucauug

SEQ ID NO: 612907 - RNA, 20 nt, Artificial Sequence
  Synthetic
aguauaacuuguggucauug

SEQ ID NO: 612908 - RNA, 21 nt, Artificial Sequence
  Synthetic
caguauaacuuguggucauug

SEQ ID NO: 612909 - RNA, 22 nt, Artificial Sequence
  Synthetic
ucaguauaacuuguggucauug

SEQ ID NO: 612910 - RNA, 23 nt, Artificial Sequence
  Synthetic
aucaguauaacuuguggucauug

SEQ ID NO: 612911 - RNA, 24 nt, Artificial Sequence
  Synthetic
gaucaguauaacuuguggucauug

SEQ ID NO: 612912 - RNA, 18 nt, Artificial Sequence
  Synthetic
uuagaauacaauucauug

SEQ ID NO: 612913 - RNA, 19 nt, Artificial Sequence
  Synthetic
auuagaauacaauucauug

SEQ ID NO: 612914 - RNA, 20 nt, Artificial Sequence
  Synthetic
cauuagaauacaauucauug

SEQ ID NO: 612915 - RNA, 21 nt, Artificial Sequence
  Synthetic
acauuagaauacaauucauug

SEQ ID NO: 612916 - RNA, 22 nt, Artificial Sequence
  Synthetic
cacauuagaauacaauucauug

SEQ ID NO: 612917 - RNA, 23 nt, Artificial Sequence
  Synthetic
ucacauuagaauacaauucauug

SEQ ID NO: 612918 - RNA, 24 nt, Artificial Sequence
  Synthetic
aucacauuagaauacaauucauug

SEQ ID NO: 612919 - RNA, 18 nt, Artificial Sequence
  Synthetic
augauuacaucuucauug

SEQ ID NO: 612920 - RNA, 19 nt, Artificial Sequence
  Synthetic
gaugauuacaucuucauug

SEQ ID NO: 612921 - RNA, 20 nt, Artificial Sequence
  Synthetic
ggaugauuacaucuucauug

SEQ ID NO: 612922 - RNA, 21 nt, Artificial Sequence
  Synthetic
uggaugauuacaucuucauug

SEQ ID NO: 612923 - RNA, 22 nt, Artificial Sequence
  Synthetic
uuggaugauuacaucuucauug

SEQ ID NO: 612924 - RNA, 23 nt, Artificial Sequence
  Synthetic
uuuggaugauuacaucuucauug

SEQ ID NO: 612925 - RNA, 24 nt, Artificial Sequence
  Synthetic
guuuggaugauuacaucuucauug

SEQ ID NO: 612926 - RNA, 18 nt, Artificial Sequence
  Synthetic
ucucccacuucuucauug

SEQ ID NO: 612927 - RNA, 19 nt, Artificial Sequence
  Synthetic
uucucccacuucuucauug

SEQ ID NO: 612928 - RNA, 20 nt, Artificial Sequence
  Synthetic
uuucucccacuucuucauug

SEQ ID NO: 612929 - RNA, 21 nt, Artificial Sequence
  Synthetic
auuucucccacuucuucauug

SEQ ID NO: 612930 - RNA, 22 nt, Artificial Sequence
  Synthetic
cauuucucccacuucuucauug

SEQ ID NO: 612931 - RNA, 23 nt, Artificial Sequence
  Synthetic
ucauuucucccacuucuucauug

SEQ ID NO: 612932 - RNA, 24 nt, Artificial Sequence
  Synthetic
gucauuucucccacuucuucauug

SEQ ID NO: 612933 - RNA, 18 nt, Artificial Sequence
  Synthetic
gagguauccuguucauug

SEQ ID NO: 612934 - RNA, 19 nt, Artificial Sequence
  Synthetic
ggagguauccuguucauug

SEQ ID NO: 612935 - RNA, 20 nt, Artificial Sequence
  Synthetic
gggagguauccuguucauug

SEQ ID NO: 612936 - RNA, 21 nt, Artificial Sequence
  Synthetic
agggagguauccuguucauug

SEQ ID NO: 612937 - RNA, 22 nt, Artificial Sequence
  Synthetic
aagggagguauccuguucauug

SEQ ID NO: 612938 - RNA, 23 nt, Artificial Sequence
  Synthetic
gaagggagguauccuguucauug

SEQ ID NO: 612939 - RNA, 24 nt, Artificial Sequence
  Synthetic
ggaagggagguauccuguucauug

SEQ ID NO: 612940 - RNA, 18 nt, Artificial Sequence
  Synthetic
agaagugucuguucauug

SEQ ID NO: 612941 - RNA, 19 nt, Artificial Sequence
  Synthetic
gagaagugucuguucauug

SEQ ID NO: 612942 - RNA, 20 nt, Artificial Sequence
  Synthetic
ugagaagugucuguucauug

SEQ ID NO: 612943 - RNA, 21 nt, Artificial Sequence
  Synthetic
uugagaagugucuguucauug

SEQ ID NO: 612944 - RNA, 22 nt, Artificial Sequence
  Synthetic
uuugagaagugucuguucauug

SEQ ID NO: 612945 - RNA, 23 nt, Artificial Sequence
  Synthetic
uuuugagaagugucuguucauug

SEQ ID NO: 612946 - RNA, 24 nt, Artificial Sequence
  Synthetic
cuuuugagaagugucuguucauug

SEQ ID NO: 612947 - RNA, 18 nt, Artificial Sequence
  Synthetic
aaucaaaacauuucauug

SEQ ID NO: 612948 - RNA, 19 nt, Artificial Sequence
  Synthetic
uaaucaaaacauuucauug

SEQ ID NO: 612949 - RNA, 20 nt, Artificial Sequence
  Synthetic
uuaaucaaaacauuucauug

SEQ ID NO: 612950 - RNA, 21 nt, Artificial Sequence
  Synthetic
uuuaaucaaaacauuucauug

SEQ ID NO: 612951 - RNA, 22 nt, Artificial Sequence
  Synthetic
guuuaaucaaaacauuucauug

SEQ ID NO: 612952 - RNA, 23 nt, Artificial Sequence
  Synthetic
gguuuaaucaaaacauuucauug

SEQ ID NO: 612953 - RNA, 24 nt, Artificial Sequence
  Synthetic
agguuuaaucaaaacauuucauug

SEQ ID NO: 612954 - RNA, 18 nt, Artificial Sequence
  Synthetic
guuaacuacauuucauug

SEQ ID NO: 612955 - RNA, 19 nt, Artificial Sequence
  Synthetic
cguuaacuacauuucauug

SEQ ID NO: 612956 - RNA, 20 nt, Artificial Sequence
  Synthetic
acguuaacuacauuucauug

SEQ ID NO: 612957 - RNA, 21 nt, Artificial Sequence
  Synthetic
uacguuaacuacauuucauug

SEQ ID NO: 612958 - RNA, 22 nt, Artificial Sequence
  Synthetic
cuacguuaacuacauuucauug

SEQ ID NO: 612959 - RNA, 23 nt, Artificial Sequence
  Synthetic
acuacguuaacuacauuucauug

SEQ ID NO: 612960 - RNA, 24 nt, Artificial Sequence
  Synthetic
uacuacguuaacuacauuucauug

SEQ ID NO: 612961 - RNA, 18 nt, Artificial Sequence
  Synthetic
ugucaaagauuuucauug

SEQ ID NO: 612962 - RNA, 19 nt, Artificial Sequence
  Synthetic
cugucaaagauuuucauug

SEQ ID NO: 612963 - RNA, 20 nt, Artificial Sequence
  Synthetic
gcugucaaagauuuucauug

SEQ ID NO: 612964 - RNA, 21 nt, Artificial Sequence
  Synthetic
ugcugucaaagauuuucauug

SEQ ID NO: 612965 - RNA, 22 nt, Artificial Sequence
  Synthetic
uugcugucaaagauuuucauug

SEQ ID NO: 612966 - RNA, 23 nt, Artificial Sequence
  Synthetic
cuugcugucaaagauuuucauug

SEQ ID NO: 612967 - RNA, 24 nt, Artificial Sequence
  Synthetic
ccuugcugucaaagauuuucauug

SEQ ID NO: 612968 - RNA, 18 nt, Artificial Sequence
  Synthetic
ugcacuguccccagauug

SEQ ID NO: 612969 - RNA, 19 nt, Artificial Sequence
  Synthetic
augcacuguccccagauug

SEQ ID NO: 612970 - RNA, 20 nt, Artificial Sequence
  Synthetic
gaugcacuguccccagauug

SEQ ID NO: 612971 - RNA, 21 nt, Artificial Sequence
  Synthetic
agaugcacuguccccagauug

SEQ ID NO: 612972 - RNA, 22 nt, Artificial Sequence
  Synthetic
gagaugcacuguccccagauug

SEQ ID NO: 612973 - RNA, 23 nt, Artificial Sequence
  Synthetic
ugagaugcacuguccccagauug

SEQ ID NO: 612974 - RNA, 24 nt, Artificial Sequence
  Synthetic
augagaugcacuguccccagauug

SEQ ID NO: 612975 - RNA, 18 nt, Artificial Sequence
  Synthetic
ucacacaaucagagauug

SEQ ID NO: 612976 - RNA, 19 nt, Artificial Sequence
  Synthetic
uucacacaaucagagauug

SEQ ID NO: 612977 - RNA, 20 nt, Artificial Sequence
  Synthetic
auucacacaaucagagauug

SEQ ID NO: 612978 - RNA, 21 nt, Artificial Sequence
  Synthetic
aauucacacaaucagagauug

SEQ ID NO: 612979 - RNA, 22 nt, Artificial Sequence
  Synthetic
aaauucacacaaucagagauug

SEQ ID NO: 612980 - RNA, 23 nt, Artificial Sequence
  Synthetic
aaaauucacacaaucagagauug

SEQ ID NO: 612981 - RNA, 24 nt, Artificial Sequence
  Synthetic
aaaaauucacacaaucagagauug

SEQ ID NO: 612982 - RNA, 18 nt, Artificial Sequence
  Synthetic
cagagaugggggagauug

SEQ ID NO: 612983 - RNA, 19 nt, Artificial Sequence
  Synthetic
acagagaugggggagauug

SEQ ID NO: 612984 - RNA, 20 nt, Artificial Sequence
  Synthetic
uacagagaugggggagauug

SEQ ID NO: 612985 - RNA, 21 nt, Artificial Sequence
  Synthetic
cuacagagaugggggagauug

SEQ ID NO: 612986 - RNA, 22 nt, Artificial Sequence
  Synthetic
acuacagagaugggggagauug

SEQ ID NO: 612987 - RNA, 23 nt, Artificial Sequence
  Synthetic
aacuacagagaugggggagauug

SEQ ID NO: 612988 - RNA, 24 nt, Artificial Sequence
  Synthetic
gaacuacagagaugggggagauug

SEQ ID NO: 612989 - RNA, 18 nt, Artificial Sequence
  Synthetic
ggguguagaaauagauug

SEQ ID NO: 612990 - RNA, 19 nt, Artificial Sequence
  Synthetic
aggguguagaaauagauug

SEQ ID NO: 612991 - RNA, 20 nt, Artificial Sequence
  Synthetic
uaggguguagaaauagauug

SEQ ID NO: 612992 - RNA, 21 nt, Artificial Sequence
  Synthetic
cuaggguguagaaauagauug

SEQ ID NO: 612993 - RNA, 22 nt, Artificial Sequence
  Synthetic
ucuaggguguagaaauagauug

SEQ ID NO: 612994 - RNA, 23 nt, Artificial Sequence
  Synthetic
gucuaggguguagaaauagauug

SEQ ID NO: 612995 - RNA, 24 nt, Artificial Sequence
  Synthetic
agucuaggguguagaaauagauug

SEQ ID NO: 612996 - RNA, 18 nt, Artificial Sequence
  Synthetic
uuguguagaaauagauug

SEQ ID NO: 612997 - RNA, 19 nt, Artificial Sequence
  Synthetic
uuuguguagaaauagauug

SEQ ID NO: 612998 - RNA, 20 nt, Artificial Sequence
  Synthetic
uuuuguguagaaauagauug

SEQ ID NO: 612999 - RNA, 21 nt, Artificial Sequence
  Synthetic
cuuuuguguagaaauagauug

SEQ ID NO: 613000 - RNA, 22 nt, Artificial Sequence
  Synthetic
gcuuuuguguagaaauagauug

SEQ ID NO: 613001 - RNA, 23 nt, Artificial Sequence
  Synthetic
agcuuuuguguagaaauagauug

SEQ ID NO: 613002 - RNA, 24 nt, Artificial Sequence
  Synthetic
uagcuuuuguguagaaauagauug

SEQ ID NO: 613003 - RNA, 18 nt, Artificial Sequence
  Synthetic
uaauuggagaguagauug

SEQ ID NO: 613004 - RNA, 19 nt, Artificial Sequence
  Synthetic
cuaauuggagaguagauug

SEQ ID NO: 613005 - RNA, 20 nt, Artificial Sequence
  Synthetic
gcuaauuggagaguagauug

SEQ ID NO: 613006 - RNA, 21 nt, Artificial Sequence
  Synthetic
ugcuaauuggagaguagauug

SEQ ID NO: 613007 - RNA, 22 nt, Artificial Sequence
  Synthetic
uugcuaauuggagaguagauug

SEQ ID NO: 613008 - RNA, 23 nt, Artificial Sequence
  Synthetic
guugcuaauuggagaguagauug

SEQ ID NO: 613009 - RNA, 24 nt, Artificial Sequence
  Synthetic
uguugcuaauuggagaguagauug

SEQ ID NO: 613010 - RNA, 18 nt, Artificial Sequence
  Synthetic
caaagcaaauuuagauug

SEQ ID NO: 613011 - RNA, 19 nt, Artificial Sequence
  Synthetic
ucaaagcaaauuuagauug

SEQ ID NO: 613012 - RNA, 20 nt, Artificial Sequence
  Synthetic
uucaaagcaaauuuagauug

SEQ ID NO: 613013 - RNA, 21 nt, Artificial Sequence
  Synthetic
uuucaaagcaaauuuagauug

SEQ ID NO: 613014 - RNA, 22 nt, Artificial Sequence
  Synthetic
uuuucaaagcaaauuuagauug

SEQ ID NO: 613015 - RNA, 23 nt, Artificial Sequence
  Synthetic
auuuucaaagcaaauuuagauug

SEQ ID NO: 613016 - RNA, 24 nt, Artificial Sequence
  Synthetic
uauuuucaaagcaaauuuagauug

SEQ ID NO: 613017 - RNA, 18 nt, Artificial Sequence
  Synthetic
auauagaagacacgauug

SEQ ID NO: 613018 - RNA, 19 nt, Artificial Sequence
  Synthetic
uauauagaagacacgauug

SEQ ID NO: 613019 - RNA, 20 nt, Artificial Sequence
  Synthetic
cuauauagaagacacgauug

SEQ ID NO: 613020 - RNA, 21 nt, Artificial Sequence
  Synthetic
gcuauauagaagacacgauug

SEQ ID NO: 613021 - RNA, 22 nt, Artificial Sequence
  Synthetic
ggcuauauagaagacacgauug

SEQ ID NO: 613022 - RNA, 23 nt, Artificial Sequence
  Synthetic
aggcuauauagaagacacgauug

SEQ ID NO: 613023 - RNA, 24 nt, Artificial Sequence
  Synthetic
gaggcuauauagaagacacgauug

SEQ ID NO: 613024 - RNA, 18 nt, Artificial Sequence
  Synthetic
guaagauggcagggauug

SEQ ID NO: 613025 - RNA, 19 nt, Artificial Sequence
  Synthetic
aguaagauggcagggauug

SEQ ID NO: 613026 - RNA, 20 nt, Artificial Sequence
  Synthetic
gaguaagauggcagggauug

SEQ ID NO: 613027 - RNA, 21 nt, Artificial Sequence
  Synthetic
ggaguaagauggcagggauug

SEQ ID NO: 613028 - RNA, 22 nt, Artificial Sequence
  Synthetic
aggaguaagauggcagggauug

SEQ ID NO: 613029 - RNA, 23 nt, Artificial Sequence
  Synthetic
gaggaguaagauggcagggauug

SEQ ID NO: 613030 - RNA, 24 nt, Artificial Sequence
  Synthetic
agaggaguaagauggcagggauug

SEQ ID NO: 613031 - RNA, 18 nt, Artificial Sequence
  Synthetic
acaaaaagaaggggauug

SEQ ID NO: 613032 - RNA, 19 nt, Artificial Sequence
  Synthetic
gacaaaaagaaggggauug

SEQ ID NO: 613033 - RNA, 20 nt, Artificial Sequence
  Synthetic
agacaaaaagaaggggauug

SEQ ID NO: 613034 - RNA, 21 nt, Artificial Sequence
  Synthetic
aagacaaaaagaaggggauug

SEQ ID NO: 613035 - RNA, 22 nt, Artificial Sequence
  Synthetic
aaagacaaaaagaaggggauug

SEQ ID NO: 613036 - RNA, 23 nt, Artificial Sequence
  Synthetic
aaaagacaaaaagaaggggauug

SEQ ID NO: 613037 - RNA, 24 nt, Artificial Sequence
  Synthetic
gaaaagacaaaaagaaggggauug

SEQ ID NO: 613038 - RNA, 18 nt, Artificial Sequence
  Synthetic
cuugacauguggggauug

SEQ ID NO: 613039 - RNA, 19 nt, Artificial Sequence
  Synthetic
ccuugacauguggggauug

SEQ ID NO: 613040 - RNA, 20 nt, Artificial Sequence
  Synthetic
cccuugacauguggggauug

SEQ ID NO: 613041 - RNA, 21 nt, Artificial Sequence
  Synthetic
ucccuugacauguggggauug

SEQ ID NO: 613042 - RNA, 22 nt, Artificial Sequence
  Synthetic
cucccuugacauguggggauug

SEQ ID NO: 613043 - RNA, 23 nt, Artificial Sequence
  Synthetic
ucucccuugacauguggggauug

SEQ ID NO: 613044 - RNA, 24 nt, Artificial Sequence
  Synthetic
cucucccuugacauguggggauug

SEQ ID NO: 613045 - RNA, 18 nt, Artificial Sequence
  Synthetic
auuggcucaaauggauug

SEQ ID NO: 613046 - RNA, 19 nt, Artificial Sequence
  Synthetic
aauuggcucaaauggauug

SEQ ID NO: 613047 - RNA, 20 nt, Artificial Sequence
  Synthetic
aaauuggcucaaauggauug

SEQ ID NO: 613048 - RNA, 21 nt, Artificial Sequence
  Synthetic
uaaauuggcucaaauggauug

SEQ ID NO: 613049 - RNA, 22 nt, Artificial Sequence
  Synthetic
cuaaauuggcucaaauggauug

SEQ ID NO: 613050 - RNA, 23 nt, Artificial Sequence
  Synthetic
ccuaaauuggcucaaauggauug

SEQ ID NO: 613051 - RNA, 24 nt, Artificial Sequence
  Synthetic
uccuaaauuggcucaaauggauug

SEQ ID NO: 613052 - RNA, 18 nt, Artificial Sequence
  Synthetic
uggaggaugaauggauug

SEQ ID NO: 613053 - RNA, 19 nt, Artificial Sequence
  Synthetic
cuggaggaugaauggauug

SEQ ID NO: 613054 - RNA, 20 nt, Artificial Sequence
  Synthetic
gcuggaggaugaauggauug

SEQ ID NO: 613055 - RNA, 21 nt, Artificial Sequence
  Synthetic
ugcuggaggaugaauggauug

SEQ ID NO: 613056 - RNA, 22 nt, Artificial Sequence
  Synthetic
cugcuggaggaugaauggauug

SEQ ID NO: 613057 - RNA, 23 nt, Artificial Sequence
  Synthetic
ucugcuggaggaugaauggauug

SEQ ID NO: 613058 - RNA, 24 nt, Artificial Sequence
  Synthetic
cucugcuggaggaugaauggauug

SEQ ID NO: 613059 - RNA, 18 nt, Artificial Sequence
  Synthetic
aaaacaaacacuggauug

SEQ ID NO: 613060 - RNA, 19 nt, Artificial Sequence
  Synthetic
caaaacaaacacuggauug

SEQ ID NO: 613061 - RNA, 20 nt, Artificial Sequence
  Synthetic
ccaaaacaaacacuggauug

SEQ ID NO: 613062 - RNA, 21 nt, Artificial Sequence
  Synthetic
uccaaaacaaacacuggauug

SEQ ID NO: 613063 - RNA, 22 nt, Artificial Sequence
  Synthetic
auccaaaacaaacacuggauug

SEQ ID NO: 613064 - RNA, 23 nt, Artificial Sequence
  Synthetic
uauccaaaacaaacacuggauug

SEQ ID NO: 613065 - RNA, 24 nt, Artificial Sequence
  Synthetic
auauccaaaacaaacacuggauug

SEQ ID NO: 613066 - RNA, 18 nt, Artificial Sequence
  Synthetic
cuaauccuauguggauug

SEQ ID NO: 613067 - RNA, 19 nt, Artificial Sequence
  Synthetic
ccuaauccuauguggauug

SEQ ID NO: 613068 - RNA, 20 nt, Artificial Sequence
  Synthetic
cccuaauccuauguggauug

SEQ ID NO: 613069 - RNA, 21 nt, Artificial Sequence
  Synthetic
acccuaauccuauguggauug

SEQ ID NO: 613070 - RNA, 22 nt, Artificial Sequence
  Synthetic
uacccuaauccuauguggauug

SEQ ID NO: 613071 - RNA, 23 nt, Artificial Sequence
  Synthetic
cuacccuaauccuauguggauug

SEQ ID NO: 613072 - RNA, 24 nt, Artificial Sequence
  Synthetic
acuacccuaauccuauguggauug

SEQ ID NO: 613073 - RNA, 18 nt, Artificial Sequence
  Synthetic
agauggucgcuuggauug

SEQ ID NO: 613074 - RNA, 19 nt, Artificial Sequence
  Synthetic
aagauggucgcuuggauug

SEQ ID NO: 613075 - RNA, 20 nt, Artificial Sequence
  Synthetic
aaagauggucgcuuggauug

SEQ ID NO: 613076 - RNA, 21 nt, Artificial Sequence
  Synthetic
gaaagauggucgcuuggauug

SEQ ID NO: 613077 - RNA, 22 nt, Artificial Sequence
  Synthetic
ggaaagauggucgcuuggauug

SEQ ID NO: 613078 - RNA, 23 nt, Artificial Sequence
  Synthetic
aggaaagauggucgcuuggauug

SEQ ID NO: 613079 - RNA, 24 nt, Artificial Sequence
  Synthetic
gaggaaagauggucgcuuggauug

SEQ ID NO: 613080 - RNA, 18 nt, Artificial Sequence
  Synthetic
uauguauucagaugauug

SEQ ID NO: 613081 - RNA, 19 nt, Artificial Sequence
  Synthetic
uuauguauucagaugauug

SEQ ID NO: 613082 - RNA, 20 nt, Artificial Sequence
  Synthetic
uuuauguauucagaugauug

SEQ ID NO: 613083 - RNA, 21 nt, Artificial Sequence
  Synthetic
auuuauguauucagaugauug

SEQ ID NO: 613084 - RNA, 22 nt, Artificial Sequence
  Synthetic
aauuuauguauucagaugauug

SEQ ID NO: 613085 - RNA, 23 nt, Artificial Sequence
  Synthetic
gaauuuauguauucagaugauug

SEQ ID NO: 613086 - RNA, 24 nt, Artificial Sequence
  Synthetic
ugaauuuauguauucagaugauug

SEQ ID NO: 613087 - RNA, 18 nt, Artificial Sequence
  Synthetic
aggagaguaaagugauug

SEQ ID NO: 613088 - RNA, 19 nt, Artificial Sequence
  Synthetic
uaggagaguaaagugauug

SEQ ID NO: 613089 - RNA, 20 nt, Artificial Sequence
  Synthetic
cuaggagaguaaagugauug

SEQ ID NO: 613090 - RNA, 21 nt, Artificial Sequence
  Synthetic
ucuaggagaguaaagugauug

SEQ ID NO: 613091 - RNA, 22 nt, Artificial Sequence
  Synthetic
gucuaggagaguaaagugauug

SEQ ID NO: 613092 - RNA, 23 nt, Artificial Sequence
  Synthetic
ggucuaggagaguaaagugauug

SEQ ID NO: 613093 - RNA, 24 nt, Artificial Sequence
  Synthetic
uggucuaggagaguaaagugauug

SEQ ID NO: 613094 - RNA, 18 nt, Artificial Sequence
  Synthetic
guucauaaagugugauug

SEQ ID NO: 613095 - RNA, 19 nt, Artificial Sequence
  Synthetic
gguucauaaagugugauug

SEQ ID NO: 613096 - RNA, 20 nt, Artificial Sequence
  Synthetic
agguucauaaagugugauug

SEQ ID NO: 613097 - RNA, 21 nt, Artificial Sequence
  Synthetic
cagguucauaaagugugauug

SEQ ID NO: 613098 - RNA, 22 nt, Artificial Sequence
  Synthetic
ccagguucauaaagugugauug

SEQ ID NO: 613099 - RNA, 23 nt, Artificial Sequence
  Synthetic
uccagguucauaaagugugauug

SEQ ID NO: 613100 - RNA, 24 nt, Artificial Sequence
  Synthetic
uuccagguucauaaagugugauug

SEQ ID NO: 613101 - RNA, 18 nt, Artificial Sequence
  Synthetic
uuguuaagguugugauug

SEQ ID NO: 613102 - RNA, 19 nt, Artificial Sequence
  Synthetic
auuguuaagguugugauug

SEQ ID NO: 613103 - RNA, 20 nt, Artificial Sequence
  Synthetic
cauuguuaagguugugauug

SEQ ID NO: 613104 - RNA, 21 nt, Artificial Sequence
  Synthetic
gcauuguuaagguugugauug

SEQ ID NO: 613105 - RNA, 22 nt, Artificial Sequence
  Synthetic
ggcauuguuaagguugugauug

SEQ ID NO: 613106 - RNA, 23 nt, Artificial Sequence
  Synthetic
aggcauuguuaagguugugauug

SEQ ID NO: 613107 - RNA, 24 nt, Artificial Sequence
  Synthetic
gaggcauuguuaagguugugauug

SEQ ID NO: 613108 - RNA, 18 nt, Artificial Sequence
  Synthetic
guggcccuauauugauug

SEQ ID NO: 613109 - RNA, 19 nt, Artificial Sequence
  Synthetic
uguggcccuauauugauug

SEQ ID NO: 613110 - RNA, 20 nt, Artificial Sequence
  Synthetic
guguggcccuauauugauug

SEQ ID NO: 613111 - RNA, 21 nt, Artificial Sequence
  Synthetic
uguguggcccuauauugauug

SEQ ID NO: 613112 - RNA, 22 nt, Artificial Sequence
  Synthetic
guguguggcccuauauugauug

SEQ ID NO: 613113 - RNA, 23 nt, Artificial Sequence
  Synthetic
cguguguggcccuauauugauug

SEQ ID NO: 613114 - RNA, 24 nt, Artificial Sequence
  Synthetic
ccguguguggcccuauauugauug

SEQ ID NO: 613115 - RNA, 18 nt, Artificial Sequence
  Synthetic
gaauauagguauugauug

SEQ ID NO: 613116 - RNA, 19 nt, Artificial Sequence
  Synthetic
ugaauauagguauugauug

SEQ ID NO: 613117 - RNA, 20 nt, Artificial Sequence
  Synthetic
augaauauagguauugauug

SEQ ID NO: 613118 - RNA, 21 nt, Artificial Sequence
  Synthetic
uaugaauauagguauugauug

SEQ ID NO: 613119 - RNA, 22 nt, Artificial Sequence
  Synthetic
guaugaauauagguauugauug

SEQ ID NO: 613120 - RNA, 23 nt, Artificial Sequence
  Synthetic
aguaugaauauagguauugauug

SEQ ID NO: 613121 - RNA, 24 nt, Artificial Sequence
  Synthetic
gaguaugaauauagguauugauug

SEQ ID NO: 613122 - RNA, 18 nt, Artificial Sequence
  Synthetic
gaggccaugcaaauauug

SEQ ID NO: 613123 - RNA, 19 nt, Artificial Sequence
  Synthetic
ggaggccaugcaaauauug

SEQ ID NO: 613124 - RNA, 20 nt, Artificial Sequence
  Synthetic
aggaggccaugcaaauauug

SEQ ID NO: 613125 - RNA, 21 nt, Artificial Sequence
  Synthetic
gaggaggccaugcaaauauug

SEQ ID NO: 613126 - RNA, 22 nt, Artificial Sequence
  Synthetic
ggaggaggccaugcaaauauug

SEQ ID NO: 613127 - RNA, 23 nt, Artificial Sequence
  Synthetic
gggaggaggccaugcaaauauug

SEQ ID NO: 613128 - RNA, 24 nt, Artificial Sequence
  Synthetic
agggaggaggccaugcaaauauug

SEQ ID NO: 613129 - RNA, 18 nt, Artificial Sequence
  Synthetic
aaagggauggaaauauug

SEQ ID NO: 613130 - RNA, 19 nt, Artificial Sequence
  Synthetic
aaaagggauggaaauauug

SEQ ID NO: 613131 - RNA, 20 nt, Artificial Sequence
  Synthetic
gaaaagggauggaaauauug

SEQ ID NO: 613132 - RNA, 21 nt, Artificial Sequence
  Synthetic
ggaaaagggauggaaauauug

SEQ ID NO: 613133 - RNA, 22 nt, Artificial Sequence
  Synthetic
uggaaaagggauggaaauauug

SEQ ID NO: 613134 - RNA, 23 nt, Artificial Sequence
  Synthetic
auggaaaagggauggaaauauug

SEQ ID NO: 613135 - RNA, 24 nt, Artificial Sequence
  Synthetic
cauggaaaagggauggaaauauug

SEQ ID NO: 613136 - RNA, 18 nt, Artificial Sequence
  Synthetic
gaaagcuaugaaauauug

SEQ ID NO: 613137 - RNA, 19 nt, Artificial Sequence
  Synthetic
ugaaagcuaugaaauauug

SEQ ID NO: 613138 - RNA, 20 nt, Artificial Sequence
  Synthetic
cugaaagcuaugaaauauug

SEQ ID NO: 613139 - RNA, 21 nt, Artificial Sequence
  Synthetic
gcugaaagcuaugaaauauug

SEQ ID NO: 613140 - RNA, 22 nt, Artificial Sequence
  Synthetic
ugcugaaagcuaugaaauauug

SEQ ID NO: 613141 - RNA, 23 nt, Artificial Sequence
  Synthetic
gugcugaaagcuaugaaauauug

SEQ ID NO: 613142 - RNA, 24 nt, Artificial Sequence
  Synthetic
ugugcugaaagcuaugaaauauug

SEQ ID NO: 613143 - RNA, 18 nt, Artificial Sequence
  Synthetic
aaaagaaaauaaauauug

SEQ ID NO: 613144 - RNA, 19 nt, Artificial Sequence
  Synthetic
aaaaagaaaauaaauauug

SEQ ID NO: 613145 - RNA, 20 nt, Artificial Sequence
  Synthetic
gaaaaagaaaauaaauauug

SEQ ID NO: 613146 - RNA, 21 nt, Artificial Sequence
  Synthetic
agaaaaagaaaauaaauauug

SEQ ID NO: 613147 - RNA, 22 nt, Artificial Sequence
  Synthetic
aagaaaaagaaaauaaauauug

SEQ ID NO: 613148 - RNA, 23 nt, Artificial Sequence
  Synthetic
aaagaaaaagaaaauaaauauug

SEQ ID NO: 613149 - RNA, 24 nt, Artificial Sequence
  Synthetic
aaaagaaaaagaaaauaaauauug

SEQ ID NO: 613150 - RNA, 18 nt, Artificial Sequence
  Synthetic
ucaagaaccacaauauug

SEQ ID NO: 613151 - RNA, 19 nt, Artificial Sequence
  Synthetic
gucaagaaccacaauauug

SEQ ID NO: 613152 - RNA, 20 nt, Artificial Sequence
  Synthetic
ugucaagaaccacaauauug

SEQ ID NO: 613153 - RNA, 21 nt, Artificial Sequence
  Synthetic
augucaagaaccacaauauug

SEQ ID NO: 613154 - RNA, 22 nt, Artificial Sequence
  Synthetic
caugucaagaaccacaauauug

SEQ ID NO: 613155 - RNA, 23 nt, Artificial Sequence
  Synthetic
ucaugucaagaaccacaauauug

SEQ ID NO: 613156 - RNA, 24 nt, Artificial Sequence
  Synthetic
aucaugucaagaaccacaauauug

SEQ ID NO: 613157 - RNA, 18 nt, Artificial Sequence
  Synthetic
gugcaauguggaauauug

SEQ ID NO: 613158 - RNA, 19 nt, Artificial Sequence
  Synthetic
agugcaauguggaauauug

SEQ ID NO: 613159 - RNA, 20 nt, Artificial Sequence
  Synthetic
cagugcaauguggaauauug

SEQ ID NO: 613160 - RNA, 21 nt, Artificial Sequence
  Synthetic
ccagugcaauguggaauauug

SEQ ID NO: 613161 - RNA, 22 nt, Artificial Sequence
  Synthetic
uccagugcaauguggaauauug

SEQ ID NO: 613162 - RNA, 23 nt, Artificial Sequence
  Synthetic
cuccagugcaauguggaauauug

SEQ ID NO: 613163 - RNA, 24 nt, Artificial Sequence
  Synthetic
acuccagugcaauguggaauauug

SEQ ID NO: 613164 - RNA, 18 nt, Artificial Sequence
  Synthetic
uagcauaacauaauauug

SEQ ID NO: 613165 - RNA, 19 nt, Artificial Sequence
  Synthetic
cuagcauaacauaauauug

SEQ ID NO: 613166 - RNA, 20 nt, Artificial Sequence
  Synthetic
gcuagcauaacauaauauug

SEQ ID NO: 613167 - RNA, 21 nt, Artificial Sequence
  Synthetic
agcuagcauaacauaauauug

SEQ ID NO: 613168 - RNA, 22 nt, Artificial Sequence
  Synthetic
cagcuagcauaacauaauauug

SEQ ID NO: 613169 - RNA, 23 nt, Artificial Sequence
  Synthetic
acagcuagcauaacauaauauug

SEQ ID NO: 613170 - RNA, 24 nt, Artificial Sequence
  Synthetic
uacagcuagcauaacauaauauug

SEQ ID NO: 613171 - RNA, 18 nt, Artificial Sequence
  Synthetic
uccugguuuuuaauauug

SEQ ID NO: 613172 - RNA, 19 nt, Artificial Sequence
  Synthetic
uuccugguuuuuaauauug

SEQ ID NO: 613173 - RNA, 20 nt, Artificial Sequence
  Synthetic
guuccugguuuuuaauauug

SEQ ID NO: 613174 - RNA, 21 nt, Artificial Sequence
  Synthetic
aguuccugguuuuuaauauug

SEQ ID NO: 613175 - RNA, 22 nt, Artificial Sequence
  Synthetic
uaguuccugguuuuuaauauug

SEQ ID NO: 613176 - RNA, 23 nt, Artificial Sequence
  Synthetic
uuaguuccugguuuuuaauauug

SEQ ID NO: 613177 - RNA, 24 nt, Artificial Sequence
  Synthetic
uuuaguuccugguuuuuaauauug

SEQ ID NO: 613178 - RNA, 18 nt, Artificial Sequence
  Synthetic
aaucucacaaacauauug

SEQ ID NO: 613179 - RNA, 19 nt, Artificial Sequence
  Synthetic
gaaucucacaaacauauug

SEQ ID NO: 613180 - RNA, 20 nt, Artificial Sequence
  Synthetic
ugaaucucacaaacauauug

SEQ ID NO: 613181 - RNA, 21 nt, Artificial Sequence
  Synthetic
augaaucucacaaacauauug

SEQ ID NO: 613182 - RNA, 22 nt, Artificial Sequence
  Synthetic
gaugaaucucacaaacauauug

SEQ ID NO: 613183 - RNA, 23 nt, Artificial Sequence
  Synthetic
ggaugaaucucacaaacauauug

SEQ ID NO: 613184 - RNA, 24 nt, Artificial Sequence
  Synthetic
uggaugaaucucacaaacauauug

SEQ ID NO: 613185 - RNA, 18 nt, Artificial Sequence
  Synthetic
gugauuugggagauauug

SEQ ID NO: 613186 - RNA, 19 nt, Artificial Sequence
  Synthetic
ggugauuugggagauauug

SEQ ID NO: 613187 - RNA, 20 nt, Artificial Sequence
  Synthetic
gggugauuugggagauauug

SEQ ID NO: 613188 - RNA, 21 nt, Artificial Sequence
  Synthetic
ggggugauuugggagauauug

SEQ ID NO: 613189 - RNA, 22 nt, Artificial Sequence
  Synthetic
uggggugauuugggagauauug

SEQ ID NO: 613190 - RNA, 23 nt, Artificial Sequence
  Synthetic
guggggugauuugggagauauug

SEQ ID NO: 613191 - RNA, 24 nt, Artificial Sequence
  Synthetic
gguggggugauuugggagauauug

SEQ ID NO: 613192 - RNA, 18 nt, Artificial Sequence
  Synthetic
agauguacugagauauug

SEQ ID NO: 613193 - RNA, 19 nt, Artificial Sequence
  Synthetic
aagauguacugagauauug

SEQ ID NO: 613194 - RNA, 20 nt, Artificial Sequence
  Synthetic
uaagauguacugagauauug

SEQ ID NO: 613195 - RNA, 21 nt, Artificial Sequence
  Synthetic
auaagauguacugagauauug

SEQ ID NO: 613196 - RNA, 22 nt, Artificial Sequence
  Synthetic
cauaagauguacugagauauug

SEQ ID NO: 613197 - RNA, 23 nt, Artificial Sequence
  Synthetic
ucauaagauguacugagauauug

SEQ ID NO: 613198 - RNA, 24 nt, Artificial Sequence
  Synthetic
gucauaagauguacugagauauug

SEQ ID NO: 613199 - RNA, 18 nt, Artificial Sequence
  Synthetic
augucaaaguagauauug

SEQ ID NO: 613200 - RNA, 19 nt, Artificial Sequence
  Synthetic
aaugucaaaguagauauug

SEQ ID NO: 613201 - RNA, 20 nt, Artificial Sequence
  Synthetic
aaaugucaaaguagauauug

SEQ ID NO: 613202 - RNA, 21 nt, Artificial Sequence
  Synthetic
uaaaugucaaaguagauauug

SEQ ID NO: 613203 - RNA, 22 nt, Artificial Sequence
  Synthetic
auaaaugucaaaguagauauug

SEQ ID NO: 613204 - RNA, 23 nt, Artificial Sequence
  Synthetic
uauaaaugucaaaguagauauug

SEQ ID NO: 613205 - RNA, 24 nt, Artificial Sequence
  Synthetic
guauaaaugucaaaguagauauug

SEQ ID NO: 613206 - RNA, 18 nt, Artificial Sequence
  Synthetic
gaaaaugaggggauauug

SEQ ID NO: 613207 - RNA, 19 nt, Artificial Sequence
  Synthetic
ggaaaaugaggggauauug

SEQ ID NO: 613208 - RNA, 20 nt, Artificial Sequence
  Synthetic
aggaaaaugaggggauauug

SEQ ID NO: 613209 - RNA, 21 nt, Artificial Sequence
  Synthetic
aaggaaaaugaggggauauug

SEQ ID NO: 613210 - RNA, 22 nt, Artificial Sequence
  Synthetic
gaaggaaaaugaggggauauug

SEQ ID NO: 613211 - RNA, 23 nt, Artificial Sequence
  Synthetic
ggaaggaaaaugaggggauauug

SEQ ID NO: 613212 - RNA, 24 nt, Artificial Sequence
  Synthetic
gggaaggaaaaugaggggauauug

SEQ ID NO: 613213 - RNA, 18 nt, Artificial Sequence
  Synthetic
aaagcagaugauauauug

SEQ ID NO: 613214 - RNA, 19 nt, Artificial Sequence
  Synthetic
uaaagcagaugauauauug

SEQ ID NO: 613215 - RNA, 20 nt, Artificial Sequence
  Synthetic
uuaaagcagaugauauauug

SEQ ID NO: 613216 - RNA, 21 nt, Artificial Sequence
  Synthetic
uuuaaagcagaugauauauug

SEQ ID NO: 613217 - RNA, 22 nt, Artificial Sequence
  Synthetic
cuuuaaagcagaugauauauug

SEQ ID NO: 613218 - RNA, 23 nt, Artificial Sequence
  Synthetic
ucuuuaaagcagaugauauauug

SEQ ID NO: 613219 - RNA, 24 nt, Artificial Sequence
  Synthetic
uucuuuaaagcagaugauauauug

SEQ ID NO: 613220 - RNA, 18 nt, Artificial Sequence
  Synthetic
aaggaaaucaguauauug

SEQ ID NO: 613221 - RNA, 19 nt, Artificial Sequence
  Synthetic
aaaggaaaucaguauauug

SEQ ID NO: 613222 - RNA, 20 nt, Artificial Sequence
  Synthetic
gaaaggaaaucaguauauug

SEQ ID NO: 613223 - RNA, 21 nt, Artificial Sequence
  Synthetic
agaaaggaaaucaguauauug

SEQ ID NO: 613224 - RNA, 22 nt, Artificial Sequence
  Synthetic
aagaaaggaaaucaguauauug

SEQ ID NO: 613225 - RNA, 23 nt, Artificial Sequence
  Synthetic
aaagaaaggaaaucaguauauug

SEQ ID NO: 613226 - RNA, 24 nt, Artificial Sequence
  Synthetic
caaagaaaggaaaucaguauauug

SEQ ID NO: 613227 - RNA, 18 nt, Artificial Sequence
  Synthetic
aaauaaaucaguauauug

SEQ ID NO: 613228 - RNA, 19 nt, Artificial Sequence
  Synthetic
aaaauaaaucaguauauug

SEQ ID NO: 613229 - RNA, 20 nt, Artificial Sequence
  Synthetic
gaaaauaaaucaguauauug

SEQ ID NO: 613230 - RNA, 21 nt, Artificial Sequence
  Synthetic
agaaaauaaaucaguauauug

SEQ ID NO: 613231 - RNA, 22 nt, Artificial Sequence
  Synthetic
aagaaaauaaaucaguauauug

SEQ ID NO: 613232 - RNA, 23 nt, Artificial Sequence
  Synthetic
aaagaaaauaaaucaguauauug

SEQ ID NO: 613233 - RNA, 24 nt, Artificial Sequence
  Synthetic
aaaagaaaauaaaucaguauauug

SEQ ID NO: 613234 - RNA, 18 nt, Artificial Sequence
  Synthetic
acagccaacuguauauug

SEQ ID NO: 613235 - RNA, 19 nt, Artificial Sequence
  Synthetic
uacagccaacuguauauug

SEQ ID NO: 613236 - RNA, 20 nt, Artificial Sequence
  Synthetic
auacagccaacuguauauug

SEQ ID NO: 613237 - RNA, 21 nt, Artificial Sequence
  Synthetic
gauacagccaacuguauauug

SEQ ID NO: 613238 - RNA, 22 nt, Artificial Sequence
  Synthetic
agauacagccaacuguauauug

SEQ ID NO: 613239 - RNA, 23 nt, Artificial Sequence
  Synthetic
uagauacagccaacuguauauug

SEQ ID NO: 613240 - RNA, 24 nt, Artificial Sequence
  Synthetic
uuagauacagccaacuguauauug

SEQ ID NO: 613241 - RNA, 18 nt, Artificial Sequence
  Synthetic
cuccuacccaaacuauug

SEQ ID NO: 613242 - RNA, 19 nt, Artificial Sequence
  Synthetic
ucuccuacccaaacuauug

SEQ ID NO: 613243 - RNA, 20 nt, Artificial Sequence
  Synthetic
uucuccuacccaaacuauug

SEQ ID NO: 613244 - RNA, 21 nt, Artificial Sequence
  Synthetic
auucuccuacccaaacuauug

SEQ ID NO: 613245 - RNA, 22 nt, Artificial Sequence
  Synthetic
uauucuccuacccaaacuauug

SEQ ID NO: 613246 - RNA, 23 nt, Artificial Sequence
  Synthetic
auauucuccuacccaaacuauug

SEQ ID NO: 613247 - RNA, 24 nt, Artificial Sequence
  Synthetic
gauauucuccuacccaaacuauug

SEQ ID NO: 613248 - RNA, 18 nt, Artificial Sequence
  Synthetic
ucaucauuauuacuauug

SEQ ID NO: 613249 - RNA, 19 nt, Artificial Sequence
  Synthetic
aucaucauuauuacuauug

SEQ ID NO: 613250 - RNA, 20 nt, Artificial Sequence
  Synthetic
caucaucauuauuacuauug

SEQ ID NO: 613251 - RNA, 21 nt, Artificial Sequence
  Synthetic
ccaucaucauuauuacuauug

SEQ ID NO: 613252 - RNA, 22 nt, Artificial Sequence
  Synthetic
gccaucaucauuauuacuauug

SEQ ID NO: 613253 - RNA, 23 nt, Artificial Sequence
  Synthetic
cgccaucaucauuauuacuauug

SEQ ID NO: 613254 - RNA, 24 nt, Artificial Sequence
  Synthetic
ucgccaucaucauuauuacuauug

SEQ ID NO: 613255 - RNA, 18 nt, Artificial Sequence
  Synthetic
gauucacuuaagcuauug

SEQ ID NO: 613256 - RNA, 19 nt, Artificial Sequence
  Synthetic
agauucacuuaagcuauug

SEQ ID NO: 613257 - RNA, 20 nt, Artificial Sequence
  Synthetic
aagauucacuuaagcuauug

SEQ ID NO: 613258 - RNA, 21 nt, Artificial Sequence
  Synthetic
uaagauucacuuaagcuauug

SEQ ID NO: 613259 - RNA, 22 nt, Artificial Sequence
  Synthetic
uuaagauucacuuaagcuauug

SEQ ID NO: 613260 - RNA, 23 nt, Artificial Sequence
  Synthetic
uuuaagauucacuuaagcuauug

SEQ ID NO: 613261 - RNA, 24 nt, Artificial Sequence
  Synthetic
auuuaagauucacuuaagcuauug

SEQ ID NO: 613262 - RNA, 18 nt, Artificial Sequence
  Synthetic
auaaagaccacgcuauug

SEQ ID NO: 613263 - RNA, 19 nt, Artificial Sequence
  Synthetic
aauaaagaccacgcuauug

SEQ ID NO: 613264 - RNA, 20 nt, Artificial Sequence
  Synthetic
uaauaaagaccacgcuauug

SEQ ID NO: 613265 - RNA, 21 nt, Artificial Sequence
  Synthetic
auaauaaagaccacgcuauug

SEQ ID NO: 613266 - RNA, 22 nt, Artificial Sequence
  Synthetic
cauaauaaagaccacgcuauug

SEQ ID NO: 613267 - RNA, 23 nt, Artificial Sequence
  Synthetic
ccauaauaaagaccacgcuauug

SEQ ID NO: 613268 - RNA, 24 nt, Artificial Sequence
  Synthetic
accauaauaaagaccacgcuauug

SEQ ID NO: 613269 - RNA, 18 nt, Artificial Sequence
  Synthetic
uauuuuccauggcuauug

SEQ ID NO: 613270 - RNA, 19 nt, Artificial Sequence
  Synthetic
cuauuuuccauggcuauug

SEQ ID NO: 613271 - RNA, 20 nt, Artificial Sequence
  Synthetic
gcuauuuuccauggcuauug

SEQ ID NO: 613272 - RNA, 21 nt, Artificial Sequence
  Synthetic
ugcuauuuuccauggcuauug

SEQ ID NO: 613273 - RNA, 22 nt, Artificial Sequence
  Synthetic
cugcuauuuuccauggcuauug

SEQ ID NO: 613274 - RNA, 23 nt, Artificial Sequence
  Synthetic
ucugcuauuuuccauggcuauug

SEQ ID NO: 613275 - RNA, 24 nt, Artificial Sequence
  Synthetic
uucugcuauuuuccauggcuauug

SEQ ID NO: 613276 - RNA, 18 nt, Artificial Sequence
  Synthetic
aucuuuuagcugcuauug

SEQ ID NO: 613277 - RNA, 19 nt, Artificial Sequence
  Synthetic
aaucuuuuagcugcuauug

SEQ ID NO: 613278 - RNA, 20 nt, Artificial Sequence
  Synthetic
caaucuuuuagcugcuauug

SEQ ID NO: 613279 - RNA, 21 nt, Artificial Sequence
  Synthetic
ucaaucuuuuagcugcuauug

SEQ ID NO: 613280 - RNA, 22 nt, Artificial Sequence
  Synthetic
gucaaucuuuuagcugcuauug

SEQ ID NO: 613281 - RNA, 23 nt, Artificial Sequence
  Synthetic
agucaaucuuuuagcugcuauug

SEQ ID NO: 613282 - RNA, 24 nt, Artificial Sequence
  Synthetic
cagucaaucuuuuagcugcuauug

SEQ ID NO: 613283 - RNA, 18 nt, Artificial Sequence
  Synthetic
uuuuuuuccuuucuauug

SEQ ID NO: 613284 - RNA, 19 nt, Artificial Sequence
  Synthetic
uuuuuuuuccuuucuauug

SEQ ID NO: 613285 - RNA, 20 nt, Artificial Sequence
  Synthetic
auuuuuuuuccuuucuauug

SEQ ID NO: 613286 - RNA, 21 nt, Artificial Sequence
  Synthetic
cauuuuuuuuccuuucuauug

SEQ ID NO: 613287 - RNA, 22 nt, Artificial Sequence
  Synthetic
acauuuuuuuuccuuucuauug

SEQ ID NO: 613288 - RNA, 23 nt, Artificial Sequence
  Synthetic
cacauuuuuuuuccuuucuauug

SEQ ID NO: 613289 - RNA, 24 nt, Artificial Sequence
  Synthetic
ccacauuuuuuuuccuuucuauug

SEQ ID NO: 613290 - RNA, 18 nt, Artificial Sequence
  Synthetic
cuguauauucuaguauug

SEQ ID NO: 613291 - RNA, 19 nt, Artificial Sequence
  Synthetic
acuguauauucuaguauug

SEQ ID NO: 613292 - RNA, 20 nt, Artificial Sequence
  Synthetic
cacuguauauucuaguauug

SEQ ID NO: 613293 - RNA, 21 nt, Artificial Sequence
  Synthetic
acacuguauauucuaguauug

SEQ ID NO: 613294 - RNA, 22 nt, Artificial Sequence
  Synthetic
gacacuguauauucuaguauug

SEQ ID NO: 613295 - RNA, 23 nt, Artificial Sequence
  Synthetic
agacacuguauauucuaguauug

SEQ ID NO: 613296 - RNA, 24 nt, Artificial Sequence
  Synthetic
cagacacuguauauucuaguauug

SEQ ID NO: 613297 - RNA, 18 nt, Artificial Sequence
  Synthetic
auuaagacagacguauug

SEQ ID NO: 613298 - RNA, 19 nt, Artificial Sequence
  Synthetic
uauuaagacagacguauug

SEQ ID NO: 613299 - RNA, 20 nt, Artificial Sequence
  Synthetic
uuauuaagacagacguauug

SEQ ID NO: 613300 - RNA, 21 nt, Artificial Sequence
  Synthetic
auuauuaagacagacguauug

SEQ ID NO: 613301 - RNA, 22 nt, Artificial Sequence
  Synthetic
aauuauuaagacagacguauug

SEQ ID NO: 613302 - RNA, 23 nt, Artificial Sequence
  Synthetic
gaauuauuaagacagacguauug

SEQ ID NO: 613303 - RNA, 24 nt, Artificial Sequence
  Synthetic
agaauuauuaagacagacguauug

SEQ ID NO: 613304 - RNA, 21 nt, Artificial Sequence
  Synthetic
cucucaauaaauuagguauug

SEQ ID NO: 613305 - RNA, 22 nt, Artificial Sequence
  Synthetic
acucucaauaaauuagguauug

SEQ ID NO: 613306 - RNA, 23 nt, Artificial Sequence
  Synthetic
aacucucaauaaauuagguauug

SEQ ID NO: 613307 - RNA, 24 nt, Artificial Sequence
  Synthetic
aaacucucaauaaauuagguauug

SEQ ID NO: 613308 - RNA, 18 nt, Artificial Sequence
  Synthetic
ucgauaaauuagguauug

SEQ ID NO: 613309 - RNA, 19 nt, Artificial Sequence
  Synthetic
cucgauaaauuagguauug

SEQ ID NO: 613310 - RNA, 20 nt, Artificial Sequence
  Synthetic
ucucgauaaauuagguauug

SEQ ID NO: 613311 - RNA, 21 nt, Artificial Sequence
  Synthetic
cucucgauaaauuagguauug

SEQ ID NO: 613312 - RNA, 22 nt, Artificial Sequence
  Synthetic
acucucgauaaauuagguauug

SEQ ID NO: 613313 - RNA, 23 nt, Artificial Sequence
  Synthetic
aacucucgauaaauuagguauug

SEQ ID NO: 613314 - RNA, 24 nt, Artificial Sequence
  Synthetic
aaacucucgauaaauuagguauug

SEQ ID NO: 613315 - RNA, 18 nt, Artificial Sequence
  Synthetic
augcuaaaucggguauug

SEQ ID NO: 613316 - RNA, 19 nt, Artificial Sequence
  Synthetic
aaugcuaaaucggguauug

SEQ ID NO: 613317 - RNA, 20 nt, Artificial Sequence
  Synthetic
aaaugcuaaaucggguauug

SEQ ID NO: 613318 - RNA, 21 nt, Artificial Sequence
  Synthetic
aaaaugcuaaaucggguauug

SEQ ID NO: 613319 - RNA, 22 nt, Artificial Sequence
  Synthetic
aaaaaugcuaaaucggguauug

SEQ ID NO: 613320 - RNA, 23 nt, Artificial Sequence
  Synthetic
caaaaaugcuaaaucggguauug

SEQ ID NO: 613321 - RNA, 24 nt, Artificial Sequence
  Synthetic
ucaaaaaugcuaaaucggguauug

SEQ ID NO: 613322 - RNA, 18 nt, Artificial Sequence
  Synthetic
gaaccauuuuauguauug

SEQ ID NO: 613323 - RNA, 19 nt, Artificial Sequence
  Synthetic
ggaaccauuuuauguauug

SEQ ID NO: 613324 - RNA, 20 nt, Artificial Sequence
  Synthetic
cggaaccauuuuauguauug

SEQ ID NO: 613325 - RNA, 21 nt, Artificial Sequence
  Synthetic
acggaaccauuuuauguauug

SEQ ID NO: 613326 - RNA, 22 nt, Artificial Sequence
  Synthetic
uacggaaccauuuuauguauug

SEQ ID NO: 613327 - RNA, 23 nt, Artificial Sequence
  Synthetic
uuacggaaccauuuuauguauug

SEQ ID NO: 613328 - RNA, 24 nt, Artificial Sequence
  Synthetic
uuuacggaaccauuuuauguauug

SEQ ID NO: 613329 - RNA, 18 nt, Artificial Sequence
  Synthetic
aaaggagggaguguauug

SEQ ID NO: 613330 - RNA, 19 nt, Artificial Sequence
  Synthetic
aaaaggagggaguguauug

SEQ ID NO: 613331 - RNA, 20 nt, Artificial Sequence
  Synthetic
gaaaaggagggaguguauug

SEQ ID NO: 613332 - RNA, 21 nt, Artificial Sequence
  Synthetic
agaaaaggagggaguguauug

SEQ ID NO: 613333 - RNA, 22 nt, Artificial Sequence
  Synthetic
aagaaaaggagggaguguauug

SEQ ID NO: 613334 - RNA, 23 nt, Artificial Sequence
  Synthetic
aaagaaaaggagggaguguauug

SEQ ID NO: 613335 - RNA, 24 nt, Artificial Sequence
  Synthetic
aaaagaaaaggagggaguguauug

SEQ ID NO: 613336 - RNA, 18 nt, Artificial Sequence
  Synthetic
aaauuaguauaauuauug

SEQ ID NO: 613337 - RNA, 19 nt, Artificial Sequence
  Synthetic
uaaauuaguauaauuauug

SEQ ID NO: 613338 - RNA, 20 nt, Artificial Sequence
  Synthetic
guaaauuaguauaauuauug

SEQ ID NO: 613339 - RNA, 21 nt, Artificial Sequence
  Synthetic
uguaaauuaguauaauuauug

SEQ ID NO: 613340 - RNA, 22 nt, Artificial Sequence
  Synthetic
auguaaauuaguauaauuauug

SEQ ID NO: 613341 - RNA, 23 nt, Artificial Sequence
  Synthetic
aauguaaauuaguauaauuauug

SEQ ID NO: 613342 - RNA, 24 nt, Artificial Sequence
  Synthetic
gaauguaaauuaguauaauuauug

SEQ ID NO: 613343 - RNA, 18 nt, Artificial Sequence
  Synthetic
ggauuagcaucauuauug

SEQ ID NO: 613344 - RNA, 19 nt, Artificial Sequence
  Synthetic
cggauuagcaucauuauug

SEQ ID NO: 613345 - RNA, 20 nt, Artificial Sequence
  Synthetic
acggauuagcaucauuauug

SEQ ID NO: 613346 - RNA, 21 nt, Artificial Sequence
  Synthetic
aacggauuagcaucauuauug

SEQ ID NO: 613347 - RNA, 22 nt, Artificial Sequence
  Synthetic
gaacggauuagcaucauuauug

SEQ ID NO: 613348 - RNA, 23 nt, Artificial Sequence
  Synthetic
ugaacggauuagcaucauuauug

SEQ ID NO: 613349 - RNA, 24 nt, Artificial Sequence
  Synthetic
augaacggauuagcaucauuauug

SEQ ID NO: 613350 - RNA, 18 nt, Artificial Sequence
  Synthetic
uaugaauuaugauuauug

SEQ ID NO: 613351 - RNA, 19 nt, Artificial Sequence
  Synthetic
cuaugaauuaugauuauug

SEQ ID NO: 613352 - RNA, 20 nt, Artificial Sequence
  Synthetic
ucuaugaauuaugauuauug

SEQ ID NO: 613353 - RNA, 21 nt, Artificial Sequence
  Synthetic
aucuaugaauuaugauuauug

SEQ ID NO: 613354 - RNA, 22 nt, Artificial Sequence
  Synthetic
aaucuaugaauuaugauuauug

SEQ ID NO: 613355 - RNA, 23 nt, Artificial Sequence
  Synthetic
gaaucuaugaauuaugauuauug

SEQ ID NO: 613356 - RNA, 24 nt, Artificial Sequence
  Synthetic
agaaucuaugaauuaugauuauug

SEQ ID NO: 613357 - RNA, 18 nt, Artificial Sequence
  Synthetic
aguaauauacuauuauug

SEQ ID NO: 613358 - RNA, 19 nt, Artificial Sequence
  Synthetic
uaguaauauacuauuauug

SEQ ID NO: 613359 - RNA, 20 nt, Artificial Sequence
  Synthetic
auaguaauauacuauuauug

SEQ ID NO: 613360 - RNA, 21 nt, Artificial Sequence
  Synthetic
aauaguaauauacuauuauug

SEQ ID NO: 613361 - RNA, 22 nt, Artificial Sequence
  Synthetic
caauaguaauauacuauuauug

SEQ ID NO: 613362 - RNA, 23 nt, Artificial Sequence
  Synthetic
ccaauaguaauauacuauuauug

SEQ ID NO: 613363 - RNA, 24 nt, Artificial Sequence
  Synthetic
cccaauaguaauauacuauuauug

SEQ ID NO: 613364 - RNA, 18 nt, Artificial Sequence
  Synthetic
guauccagucuauuauug

SEQ ID NO: 613365 - RNA, 19 nt, Artificial Sequence
  Synthetic
uguauccagucuauuauug

SEQ ID NO: 613366 - RNA, 20 nt, Artificial Sequence
  Synthetic
cuguauccagucuauuauug

SEQ ID NO: 613367 - RNA, 21 nt, Artificial Sequence
  Synthetic
ucuguauccagucuauuauug

SEQ ID NO: 613368 - RNA, 22 nt, Artificial Sequence
  Synthetic
uucuguauccagucuauuauug

SEQ ID NO: 613369 - RNA, 23 nt, Artificial Sequence
  Synthetic
uuucuguauccagucuauuauug

SEQ ID NO: 613370 - RNA, 24 nt, Artificial Sequence
  Synthetic
uuuucuguauccagucuauuauug

SEQ ID NO: 613371 - RNA, 18 nt, Artificial Sequence
  Synthetic
ucauuucucugcuuauug

SEQ ID NO: 613372 - RNA, 19 nt, Artificial Sequence
  Synthetic
cucauuucucugcuuauug

SEQ ID NO: 613373 - RNA, 20 nt, Artificial Sequence
  Synthetic
ucucauuucucugcuuauug

SEQ ID NO: 613374 - RNA, 21 nt, Artificial Sequence
  Synthetic
uucucauuucucugcuuauug

SEQ ID NO: 613375 - RNA, 22 nt, Artificial Sequence
  Synthetic
guucucauuucucugcuuauug

SEQ ID NO: 613376 - RNA, 23 nt, Artificial Sequence
  Synthetic
aguucucauuucucugcuuauug

SEQ ID NO: 613377 - RNA, 24 nt, Artificial Sequence
  Synthetic
uaguucucauuucucugcuuauug

SEQ ID NO: 613378 - RNA, 18 nt, Artificial Sequence
  Synthetic
ucagaggcuugcuuauug

SEQ ID NO: 613379 - RNA, 19 nt, Artificial Sequence
  Synthetic
aucagaggcuugcuuauug

SEQ ID NO: 613380 - RNA, 20 nt, Artificial Sequence
  Synthetic
caucagaggcuugcuuauug

SEQ ID NO: 613381 - RNA, 21 nt, Artificial Sequence
  Synthetic
acaucagaggcuugcuuauug

SEQ ID NO: 613382 - RNA, 22 nt, Artificial Sequence
  Synthetic
gacaucagaggcuugcuuauug

SEQ ID NO: 613383 - RNA, 23 nt, Artificial Sequence
  Synthetic
ugacaucagaggcuugcuuauug

SEQ ID NO: 613384 - RNA, 24 nt, Artificial Sequence
  Synthetic
uugacaucagaggcuugcuuauug

SEQ ID NO: 613385 - RNA, 18 nt, Artificial Sequence
  Synthetic
aaaccauaucaguuauug

SEQ ID NO: 613386 - RNA, 19 nt, Artificial Sequence
  Synthetic
caaaccauaucaguuauug

SEQ ID NO: 613387 - RNA, 20 nt, Artificial Sequence
  Synthetic
ccaaaccauaucaguuauug

SEQ ID NO: 613388 - RNA, 21 nt, Artificial Sequence
  Synthetic
gccaaaccauaucaguuauug

SEQ ID NO: 613389 - RNA, 22 nt, Artificial Sequence
  Synthetic
agccaaaccauaucaguuauug

SEQ ID NO: 613390 - RNA, 23 nt, Artificial Sequence
  Synthetic
cagccaaaccauaucaguuauug

SEQ ID NO: 613391 - RNA, 24 nt, Artificial Sequence
  Synthetic
acagccaaaccauaucaguuauug

SEQ ID NO: 613392 - RNA, 18 nt, Artificial Sequence
  Synthetic
ucaauaaacuaguuauug

SEQ ID NO: 613393 - RNA, 19 nt, Artificial Sequence
  Synthetic
cucaauaaacuaguuauug

SEQ ID NO: 613394 - RNA, 20 nt, Artificial Sequence
  Synthetic
acucaauaaacuaguuauug

SEQ ID NO: 613395 - RNA, 21 nt, Artificial Sequence
  Synthetic
cacucaauaaacuaguuauug

SEQ ID NO: 613396 - RNA, 22 nt, Artificial Sequence
  Synthetic
acacucaauaaacuaguuauug

SEQ ID NO: 613397 - RNA, 23 nt, Artificial Sequence
  Synthetic
aacacucaauaaacuaguuauug

SEQ ID NO: 613398 - RNA, 24 nt, Artificial Sequence
  Synthetic
aaacacucaauaaacuaguuauug

SEQ ID NO: 613399 - RNA, 18 nt, Artificial Sequence
  Synthetic
cacuaucaaugguuauug

SEQ ID NO: 613400 - RNA, 19 nt, Artificial Sequence
  Synthetic
ucacuaucaaugguuauug

SEQ ID NO: 613401 - RNA, 20 nt, Artificial Sequence
  Synthetic
aucacuaucaaugguuauug

SEQ ID NO: 613402 - RNA, 21 nt, Artificial Sequence
  Synthetic
caucacuaucaaugguuauug

SEQ ID NO: 613403 - RNA, 22 nt, Artificial Sequence
  Synthetic
ucaucacuaucaaugguuauug

SEQ ID NO: 613404 - RNA, 23 nt, Artificial Sequence
  Synthetic
gucaucacuaucaaugguuauug

SEQ ID NO: 613405 - RNA, 24 nt, Artificial Sequence
  Synthetic
ugucaucacuaucaaugguuauug

SEQ ID NO: 613406 - RNA, 18 nt, Artificial Sequence
  Synthetic
aagaacagacuguuauug

SEQ ID NO: 613407 - RNA, 19 nt, Artificial Sequence
  Synthetic
aaagaacagacuguuauug

SEQ ID NO: 613408 - RNA, 20 nt, Artificial Sequence
  Synthetic
caaagaacagacuguuauug

SEQ ID NO: 613409 - RNA, 21 nt, Artificial Sequence
  Synthetic
acaaagaacagacuguuauug

SEQ ID NO: 613410 - RNA, 22 nt, Artificial Sequence
  Synthetic
aacaaagaacagacuguuauug

SEQ ID NO: 613411 - RNA, 23 nt, Artificial Sequence
  Synthetic
aaacaaagaacagacuguuauug

SEQ ID NO: 613412 - RNA, 24 nt, Artificial Sequence
  Synthetic
uaaacaaagaacagacuguuauug

SEQ ID NO: 613413 - RNA, 18 nt, Artificial Sequence
  Synthetic
aaaacaagcucuuuauug

SEQ ID NO: 613414 - RNA, 19 nt, Artificial Sequence
  Synthetic
uaaaacaagcucuuuauug

SEQ ID NO: 613415 - RNA, 20 nt, Artificial Sequence
  Synthetic
auaaaacaagcucuuuauug

SEQ ID NO: 613416 - RNA, 21 nt, Artificial Sequence
  Synthetic
gauaaaacaagcucuuuauug

SEQ ID NO: 613417 - RNA, 22 nt, Artificial Sequence
  Synthetic
agauaaaacaagcucuuuauug

SEQ ID NO: 613418 - RNA, 23 nt, Artificial Sequence
  Synthetic
aagauaaaacaagcucuuuauug

SEQ ID NO: 613419 - RNA, 24 nt, Artificial Sequence
  Synthetic
gaagauaaaacaagcucuuuauug

SEQ ID NO: 613420 - RNA, 18 nt, Artificial Sequence
  Synthetic
aaauauaagaguuuauug

SEQ ID NO: 613421 - RNA, 19 nt, Artificial Sequence
  Synthetic
uaaauauaagaguuuauug

SEQ ID NO: 613422 - RNA, 20 nt, Artificial Sequence
  Synthetic
auaaauauaagaguuuauug

SEQ ID NO: 613423 - RNA, 21 nt, Artificial Sequence
  Synthetic
cauaaauauaagaguuuauug

SEQ ID NO: 613424 - RNA, 22 nt, Artificial Sequence
  Synthetic
ccauaaauauaagaguuuauug

SEQ ID NO: 613425 - RNA, 23 nt, Artificial Sequence
  Synthetic
accauaaauauaagaguuuauug

SEQ ID NO: 613426 - RNA, 24 nt, Artificial Sequence
  Synthetic
gaccauaaauauaagaguuuauug

SEQ ID NO: 613427 - RNA, 18 nt, Artificial Sequence
  Synthetic
aaugaacagcuuuuauug

SEQ ID NO: 613428 - RNA, 19 nt, Artificial Sequence
  Synthetic
caaugaacagcuuuuauug

SEQ ID NO: 613429 - RNA, 20 nt, Artificial Sequence
  Synthetic
acaaugaacagcuuuuauug

SEQ ID NO: 613430 - RNA, 21 nt, Artificial Sequence
  Synthetic
cacaaugaacagcuuuuauug

SEQ ID NO: 613431 - RNA, 22 nt, Artificial Sequence
  Synthetic
ccacaaugaacagcuuuuauug

SEQ ID NO: 613432 - RNA, 23 nt, Artificial Sequence
  Synthetic
accacaaugaacagcuuuuauug

SEQ ID NO: 613433 - RNA, 24 nt, Artificial Sequence
  Synthetic
gaccacaaugaacagcuuuuauug

SEQ ID NO: 613434 - RNA, 18 nt, Artificial Sequence
  Synthetic
uuaauuuauguuuuauug

SEQ ID NO: 613435 - RNA, 19 nt, Artificial Sequence
  Synthetic
uuuaauuuauguuuuauug

SEQ ID NO: 613436 - RNA, 20 nt, Artificial Sequence
  Synthetic
auuuaauuuauguuuuauug

SEQ ID NO: 613437 - RNA, 21 nt, Artificial Sequence
  Synthetic
uauuuaauuuauguuuuauug

SEQ ID NO: 613438 - RNA, 22 nt, Artificial Sequence
  Synthetic
uuauuuaauuuauguuuuauug

SEQ ID NO: 613439 - RNA, 23 nt, Artificial Sequence
  Synthetic
guuauuuaauuuauguuuuauug

SEQ ID NO: 613440 - RNA, 24 nt, Artificial Sequence
  Synthetic
aguuauuuaauuuauguuuuauug

SEQ ID NO: 613441 - RNA, 18 nt, Artificial Sequence
  Synthetic
caugagaaaacaaacuug

SEQ ID NO: 613442 - RNA, 19 nt, Artificial Sequence
  Synthetic
acaugagaaaacaaacuug

SEQ ID NO: 613443 - RNA, 20 nt, Artificial Sequence
  Synthetic
uacaugagaaaacaaacuug

SEQ ID NO: 613444 - RNA, 21 nt, Artificial Sequence
  Synthetic
auacaugagaaaacaaacuug

SEQ ID NO: 613445 - RNA, 22 nt, Artificial Sequence
  Synthetic
uauacaugagaaaacaaacuug

SEQ ID NO: 613446 - RNA, 23 nt, Artificial Sequence
  Synthetic
uuauacaugagaaaacaaacuug

SEQ ID NO: 613447 - RNA, 24 nt, Artificial Sequence
  Synthetic
uuuauacaugagaaaacaaacuug

SEQ ID NO: 613448 - RNA, 18 nt, Artificial Sequence
  Synthetic
gagugauugagaaacuug

SEQ ID NO: 613449 - RNA, 19 nt, Artificial Sequence
  Synthetic
ggagugauugagaaacuug

SEQ ID NO: 613450 - RNA, 20 nt, Artificial Sequence
  Synthetic
uggagugauugagaaacuug

SEQ ID NO: 613451 - RNA, 21 nt, Artificial Sequence
  Synthetic
cuggagugauugagaaacuug

SEQ ID NO: 613452 - RNA, 22 nt, Artificial Sequence
  Synthetic
ccuggagugauugagaaacuug

SEQ ID NO: 613453 - RNA, 23 nt, Artificial Sequence
  Synthetic
accuggagugauugagaaacuug

SEQ ID NO: 613454 - RNA, 24 nt, Artificial Sequence
  Synthetic
gaccuggagugauugagaaacuug

SEQ ID NO: 613455 - RNA, 18 nt, Artificial Sequence
  Synthetic
gccuaccaguccaacuug

SEQ ID NO: 613456 - RNA, 19 nt, Artificial Sequence
  Synthetic
agccuaccaguccaacuug

SEQ ID NO: 613457 - RNA, 20 nt, Artificial Sequence
  Synthetic
cagccuaccaguccaacuug

SEQ ID NO: 613458 - RNA, 21 nt, Artificial Sequence
  Synthetic
ucagccuaccaguccaacuug

SEQ ID NO: 613459 - RNA, 22 nt, Artificial Sequence
  Synthetic
uucagccuaccaguccaacuug

SEQ ID NO: 613460 - RNA, 23 nt, Artificial Sequence
  Synthetic
auucagccuaccaguccaacuug

SEQ ID NO: 613461 - RNA, 24 nt, Artificial Sequence
  Synthetic
uauucagccuaccaguccaacuug

SEQ ID NO: 613462 - RNA, 18 nt, Artificial Sequence
  Synthetic
ucaguguguugcaacuug

SEQ ID NO: 613463 - RNA, 19 nt, Artificial Sequence
  Synthetic
gucaguguguugcaacuug

SEQ ID NO: 613464 - RNA, 20 nt, Artificial Sequence
  Synthetic
ggucaguguguugcaacuug

SEQ ID NO: 613465 - RNA, 21 nt, Artificial Sequence
  Synthetic
gggucaguguguugcaacuug

SEQ ID NO: 613466 - RNA, 22 nt, Artificial Sequence
  Synthetic
ugggucaguguguugcaacuug

SEQ ID NO: 613467 - RNA, 23 nt, Artificial Sequence
  Synthetic
uugggucaguguguugcaacuug

SEQ ID NO: 613468 - RNA, 24 nt, Artificial Sequence
  Synthetic
uuugggucaguguguugcaacuug

SEQ ID NO: 613469 - RNA, 18 nt, Artificial Sequence
  Synthetic
ugggaagcagcgaacuug

SEQ ID NO: 613470 - RNA, 19 nt, Artificial Sequence
  Synthetic
cugggaagcagcgaacuug

SEQ ID NO: 613471 - RNA, 20 nt, Artificial Sequence
  Synthetic
acugggaagcagcgaacuug

SEQ ID NO: 613472 - RNA, 21 nt, Artificial Sequence
  Synthetic
aacugggaagcagcgaacuug

SEQ ID NO: 613473 - RNA, 22 nt, Artificial Sequence
  Synthetic
caacugggaagcagcgaacuug

SEQ ID NO: 613474 - RNA, 23 nt, Artificial Sequence
  Synthetic
acaacugggaagcagcgaacuug

SEQ ID NO: 613475 - RNA, 24 nt, Artificial Sequence
  Synthetic
gacaacugggaagcagcgaacuug

SEQ ID NO: 613476 - RNA, 18 nt, Artificial Sequence
  Synthetic
gacaaagaaaugaacuug

SEQ ID NO: 613477 - RNA, 19 nt, Artificial Sequence
  Synthetic
agacaaagaaaugaacuug

SEQ ID NO: 613478 - RNA, 20 nt, Artificial Sequence
  Synthetic
aagacaaagaaaugaacuug

SEQ ID NO: 613479 - RNA, 21 nt, Artificial Sequence
  Synthetic
gaagacaaagaaaugaacuug

SEQ ID NO: 613480 - RNA, 22 nt, Artificial Sequence
  Synthetic
ugaagacaaagaaaugaacuug

SEQ ID NO: 613481 - RNA, 23 nt, Artificial Sequence
  Synthetic
uugaagacaaagaaaugaacuug

SEQ ID NO: 613482 - RNA, 24 nt, Artificial Sequence
  Synthetic
auugaagacaaagaaaugaacuug

SEQ ID NO: 613483 - RNA, 18 nt, Artificial Sequence
  Synthetic
guaucaccugguaacuug

SEQ ID NO: 613484 - RNA, 19 nt, Artificial Sequence
  Synthetic
aguaucaccugguaacuug

SEQ ID NO: 613485 - RNA, 20 nt, Artificial Sequence
  Synthetic
caguaucaccugguaacuug

SEQ ID NO: 613486 - RNA, 21 nt, Artificial Sequence
  Synthetic
ucaguaucaccugguaacuug

SEQ ID NO: 613487 - RNA, 22 nt, Artificial Sequence
  Synthetic
aucaguaucaccugguaacuug

SEQ ID NO: 613488 - RNA, 23 nt, Artificial Sequence
  Synthetic
caucaguaucaccugguaacuug

SEQ ID NO: 613489 - RNA, 24 nt, Artificial Sequence
  Synthetic
gcaucaguaucaccugguaacuug

SEQ ID NO: 613490 - RNA, 18 nt, Artificial Sequence
  Synthetic
uugaugauguguaacuug

SEQ ID NO: 613491 - RNA, 19 nt, Artificial Sequence
  Synthetic
uuugaugauguguaacuug

SEQ ID NO: 613492 - RNA, 20 nt, Artificial Sequence
  Synthetic
cuuugaugauguguaacuug

SEQ ID NO: 613493 - RNA, 21 nt, Artificial Sequence
  Synthetic
acuuugaugauguguaacuug

SEQ ID NO: 613494 - RNA, 22 nt, Artificial Sequence
  Synthetic
uacuuugaugauguguaacuug

SEQ ID NO: 613495 - RNA, 23 nt, Artificial Sequence
  Synthetic
auacuuugaugauguguaacuug

SEQ ID NO: 613496 - RNA, 24 nt, Artificial Sequence
  Synthetic
aauacuuugaugauguguaacuug

SEQ ID NO: 613497 - RNA, 18 nt, Artificial Sequence
  Synthetic
uuccaugcccuuaacuug

SEQ ID NO: 613498 - RNA, 19 nt, Artificial Sequence
  Synthetic
uuuccaugcccuuaacuug

SEQ ID NO: 613499 - RNA, 20 nt, Artificial Sequence
  Synthetic
auuuccaugcccuuaacuug

SEQ ID NO: 613500 - RNA, 21 nt, Artificial Sequence
  Synthetic
uauuuccaugcccuuaacuug

SEQ ID NO: 613501 - RNA, 22 nt, Artificial Sequence
  Synthetic
uuauuuccaugcccuuaacuug

SEQ ID NO: 613502 - RNA, 23 nt, Artificial Sequence
  Synthetic
uuuauuuccaugcccuuaacuug

SEQ ID NO: 613503 - RNA, 24 nt, Artificial Sequence
  Synthetic
cuuuauuuccaugcccuuaacuug

SEQ ID NO: 613504 - RNA, 18 nt, Artificial Sequence
  Synthetic
auguuuuuauuuaacuug

SEQ ID NO: 613505 - RNA, 19 nt, Artificial Sequence
  Synthetic
uauguuuuuauuuaacuug

SEQ ID NO: 613506 - RNA, 20 nt, Artificial Sequence
  Synthetic
uuauguuuuuauuuaacuug

SEQ ID NO: 613507 - RNA, 21 nt, Artificial Sequence
  Synthetic
uuuauguuuuuauuuaacuug

SEQ ID NO: 613508 - RNA, 22 nt, Artificial Sequence
  Synthetic
auuuauguuuuuauuuaacuug

SEQ ID NO: 613509 - RNA, 23 nt, Artificial Sequence
  Synthetic
aauuuauguuuuuauuuaacuug

SEQ ID NO: 613510 - RNA, 24 nt, Artificial Sequence
  Synthetic
caauuuauguuuuuauuuaacuug

SEQ ID NO: 613511 - RNA, 18 nt, Artificial Sequence
  Synthetic
gcaacucuugaacacuug

SEQ ID NO: 613512 - RNA, 19 nt, Artificial Sequence
  Synthetic
agcaacucuugaacacuug

SEQ ID NO: 613513 - RNA, 20 nt, Artificial Sequence
  Synthetic
aagcaacucuugaacacuug

SEQ ID NO: 613514 - RNA, 21 nt, Artificial Sequence
  Synthetic
aaagcaacucuugaacacuug

SEQ ID NO: 613515 - RNA, 22 nt, Artificial Sequence
  Synthetic
uaaagcaacucuugaacacuug

SEQ ID NO: 613516 - RNA, 23 nt, Artificial Sequence
  Synthetic
auaaagcaacucuugaacacuug

SEQ ID NO: 613517 - RNA, 24 nt, Artificial Sequence
  Synthetic
uauaaagcaacucuugaacacuug

SEQ ID NO: 613518 - RNA, 18 nt, Artificial Sequence
  Synthetic
uucugaaagauacacuug

SEQ ID NO: 613519 - RNA, 19 nt, Artificial Sequence
  Synthetic
uuucugaaagauacacuug

SEQ ID NO: 613520 - RNA, 20 nt, Artificial Sequence
  Synthetic
auuucugaaagauacacuug

SEQ ID NO: 613521 - RNA, 21 nt, Artificial Sequence
  Synthetic
uauuucugaaagauacacuug

SEQ ID NO: 613522 - RNA, 22 nt, Artificial Sequence
  Synthetic
uuauuucugaaagauacacuug

SEQ ID NO: 613523 - RNA, 23 nt, Artificial Sequence
  Synthetic
cuuauuucugaaagauacacuug

SEQ ID NO: 613524 - RNA, 24 nt, Artificial Sequence
  Synthetic
acuuauuucugaaagauacacuug

SEQ ID NO: 613525 - RNA, 18 nt, Artificial Sequence
  Synthetic
agucauuagcuacacuug

SEQ ID NO: 613526 - RNA, 19 nt, Artificial Sequence
  Synthetic
uagucauuagcuacacuug

SEQ ID NO: 613527 - RNA, 20 nt, Artificial Sequence
  Synthetic
guagucauuagcuacacuug

SEQ ID NO: 613528 - RNA, 21 nt, Artificial Sequence
  Synthetic
gguagucauuagcuacacuug

SEQ ID NO: 613529 - RNA, 22 nt, Artificial Sequence
  Synthetic
ugguagucauuagcuacacuug

SEQ ID NO: 613530 - RNA, 23 nt, Artificial Sequence
  Synthetic
augguagucauuagcuacacuug

SEQ ID NO: 613531 - RNA, 24 nt, Artificial Sequence
  Synthetic
uaugguagucauuagcuacacuug

SEQ ID NO: 613532 - RNA, 18 nt, Artificial Sequence
  Synthetic
agauaauuauaccacuug

SEQ ID NO: 613533 - RNA, 19 nt, Artificial Sequence
  Synthetic
cagauaauuauaccacuug

SEQ ID NO: 613534 - RNA, 20 nt, Artificial Sequence
  Synthetic
ucagauaauuauaccacuug

SEQ ID NO: 613535 - RNA, 21 nt, Artificial Sequence
  Synthetic
aucagauaauuauaccacuug

SEQ ID NO: 613536 - RNA, 22 nt, Artificial Sequence
  Synthetic
aaucagauaauuauaccacuug

SEQ ID NO: 613537 - RNA, 23 nt, Artificial Sequence
  Synthetic
aaaucagauaauuauaccacuug

SEQ ID NO: 613538 - RNA, 24 nt, Artificial Sequence
  Synthetic
caaaucagauaauuauaccacuug

SEQ ID NO: 613539 - RNA, 18 nt, Artificial Sequence
  Synthetic
uugcuaaauguccacuug

SEQ ID NO: 613540 - RNA, 19 nt, Artificial Sequence
  Synthetic
auugcuaaauguccacuug

SEQ ID NO: 613541 - RNA, 20 nt, Artificial Sequence
  Synthetic
uauugcuaaauguccacuug

SEQ ID NO: 613542 - RNA, 21 nt, Artificial Sequence
  Synthetic
auauugcuaaauguccacuug

SEQ ID NO: 613543 - RNA, 22 nt, Artificial Sequence
  Synthetic
gauauugcuaaauguccacuug

SEQ ID NO: 613544 - RNA, 23 nt, Artificial Sequence
  Synthetic
agauauugcuaaauguccacuug

SEQ ID NO: 613545 - RNA, 24 nt, Artificial Sequence
  Synthetic
cagauauugcuaaauguccacuug

SEQ ID NO: 613546 - RNA, 18 nt, Artificial Sequence
  Synthetic
aucaaaaguaagcacuug

SEQ ID NO: 613547 - RNA, 19 nt, Artificial Sequence
  Synthetic
uaucaaaaguaagcacuug

SEQ ID NO: 613548 - RNA, 20 nt, Artificial Sequence
  Synthetic
guaucaaaaguaagcacuug

SEQ ID NO: 613549 - RNA, 21 nt, Artificial Sequence
  Synthetic
gguaucaaaaguaagcacuug

SEQ ID NO: 613550 - RNA, 22 nt, Artificial Sequence
  Synthetic
agguaucaaaaguaagcacuug

SEQ ID NO: 613551 - RNA, 23 nt, Artificial Sequence
  Synthetic
gagguaucaaaaguaagcacuug

SEQ ID NO: 613552 - RNA, 24 nt, Artificial Sequence
  Synthetic
cgagguaucaaaaguaagcacuug

SEQ ID NO: 613553 - RNA, 18 nt, Artificial Sequence
  Synthetic
gaugagguucugcacuug

SEQ ID NO: 613554 - RNA, 19 nt, Artificial Sequence
  Synthetic
ggaugagguucugcacuug

SEQ ID NO: 613555 - RNA, 20 nt, Artificial Sequence
  Synthetic
uggaugagguucugcacuug

SEQ ID NO: 613556 - RNA, 21 nt, Artificial Sequence
  Synthetic
uuggaugagguucugcacuug

SEQ ID NO: 613557 - RNA, 22 nt, Artificial Sequence
  Synthetic
guuggaugagguucugcacuug

SEQ ID NO: 613558 - RNA, 23 nt, Artificial Sequence
  Synthetic
aguuggaugagguucugcacuug

SEQ ID NO: 613559 - RNA, 24 nt, Artificial Sequence
  Synthetic
uaguuggaugagguucugcacuug

SEQ ID NO: 613560 - RNA, 18 nt, Artificial Sequence
  Synthetic
ugauaacuaauucacuug

SEQ ID NO: 613561 - RNA, 19 nt, Artificial Sequence
  Synthetic
augauaacuaauucacuug

SEQ ID NO: 613562 - RNA, 20 nt, Artificial Sequence
  Synthetic
gaugauaacuaauucacuug

SEQ ID NO: 613563 - RNA, 21 nt, Artificial Sequence
  Synthetic
agaugauaacuaauucacuug

SEQ ID NO: 613564 - RNA, 22 nt, Artificial Sequence
  Synthetic
cagaugauaacuaauucacuug

SEQ ID NO: 613565 - RNA, 23 nt, Artificial Sequence
  Synthetic
ucagaugauaacuaauucacuug

SEQ ID NO: 613566 - RNA, 24 nt, Artificial Sequence
  Synthetic
cucagaugauaacuaauucacuug

SEQ ID NO: 613567 - RNA, 18 nt, Artificial Sequence
  Synthetic
guccauauuuuucacuug

SEQ ID NO: 613568 - RNA, 19 nt, Artificial Sequence
  Synthetic
uguccauauuuuucacuug

SEQ ID NO: 613569 - RNA, 20 nt, Artificial Sequence
  Synthetic
auguccauauuuuucacuug

SEQ ID NO: 613570 - RNA, 21 nt, Artificial Sequence
  Synthetic
aauguccauauuuuucacuug

SEQ ID NO: 613571 - RNA, 22 nt, Artificial Sequence
  Synthetic
aaauguccauauuuuucacuug

SEQ ID NO: 613572 - RNA, 23 nt, Artificial Sequence
  Synthetic
gaaauguccauauuuuucacuug

SEQ ID NO: 613573 - RNA, 24 nt, Artificial Sequence
  Synthetic
ugaaauguccauauuuuucacuug

SEQ ID NO: 613574 - RNA, 18 nt, Artificial Sequence
  Synthetic
uuuucacaaaaagacuug

SEQ ID NO: 613575 - RNA, 19 nt, Artificial Sequence
  Synthetic
uuuuucacaaaaagacuug

SEQ ID NO: 613576 - RNA, 20 nt, Artificial Sequence
  Synthetic
auuuuucacaaaaagacuug

SEQ ID NO: 613577 - RNA, 21 nt, Artificial Sequence
  Synthetic
aauuuuucacaaaaagacuug

SEQ ID NO: 613578 - RNA, 22 nt, Artificial Sequence
  Synthetic
aaauuuuucacaaaaagacuug

SEQ ID NO: 613579 - RNA, 23 nt, Artificial Sequence
  Synthetic
gaaauuuuucacaaaaagacuug

SEQ ID NO: 613580 - RNA, 24 nt, Artificial Sequence
  Synthetic
ugaaauuuuucacaaaaagacuug

SEQ ID NO: 613581 - RNA, 18 nt, Artificial Sequence
  Synthetic
agaaaauaaaaagacuug

SEQ ID NO: 613582 - RNA, 19 nt, Artificial Sequence
  Synthetic
cagaaaauaaaaagacuug

SEQ ID NO: 613583 - RNA, 20 nt, Artificial Sequence
  Synthetic
acagaaaauaaaaagacuug

SEQ ID NO: 613584 - RNA, 21 nt, Artificial Sequence
  Synthetic
aacagaaaauaaaaagacuug

SEQ ID NO: 613585 - RNA, 22 nt, Artificial Sequence
  Synthetic
gaacagaaaauaaaaagacuug

SEQ ID NO: 613586 - RNA, 23 nt, Artificial Sequence
  Synthetic
ugaacagaaaauaaaaagacuug

SEQ ID NO: 613587 - RNA, 24 nt, Artificial Sequence
  Synthetic
cugaacagaaaauaaaaagacuug

SEQ ID NO: 613588 - RNA, 18 nt, Artificial Sequence
  Synthetic
guagcugguaaagacuug

SEQ ID NO: 613589 - RNA, 19 nt, Artificial Sequence
  Synthetic
gguagcugguaaagacuug

SEQ ID NO: 613590 - RNA, 20 nt, Artificial Sequence
  Synthetic
agguagcugguaaagacuug

SEQ ID NO: 613591 - RNA, 21 nt, Artificial Sequence
  Synthetic
aagguagcugguaaagacuug

SEQ ID NO: 613592 - RNA, 22 nt, Artificial Sequence
  Synthetic
aaagguagcugguaaagacuug

SEQ ID NO: 613593 - RNA, 23 nt, Artificial Sequence
  Synthetic
uaaagguagcugguaaagacuug

SEQ ID NO: 613594 - RNA, 24 nt, Artificial Sequence
  Synthetic
auaaagguagcugguaaagacuug

SEQ ID NO: 613595 - RNA, 18 nt, Artificial Sequence
  Synthetic
ugcgagggacccgacuug

SEQ ID NO: 613596 - RNA, 19 nt, Artificial Sequence
  Synthetic
cugcgagggacccgacuug

SEQ ID NO: 613597 - RNA, 20 nt, Artificial Sequence
  Synthetic
gcugcgagggacccgacuug

SEQ ID NO: 613598 - RNA, 21 nt, Artificial Sequence
  Synthetic
agcugcgagggacccgacuug

SEQ ID NO: 613599 - RNA, 22 nt, Artificial Sequence
  Synthetic
uagcugcgagggacccgacuug

SEQ ID NO: 613600 - RNA, 23 nt, Artificial Sequence
  Synthetic
uuagcugcgagggacccgacuug

SEQ ID NO: 613601 - RNA, 24 nt, Artificial Sequence
  Synthetic
guuagcugcgagggacccgacuug

SEQ ID NO: 613602 - RNA, 18 nt, Artificial Sequence
  Synthetic
aaggacuggcaggacuug

SEQ ID NO: 613603 - RNA, 19 nt, Artificial Sequence
  Synthetic
aaaggacuggcaggacuug

SEQ ID NO: 613604 - RNA, 20 nt, Artificial Sequence
  Synthetic
uaaaggacuggcaggacuug

SEQ ID NO: 613605 - RNA, 21 nt, Artificial Sequence
  Synthetic
auaaaggacuggcaggacuug

SEQ ID NO: 613606 - RNA, 22 nt, Artificial Sequence
  Synthetic
gauaaaggacuggcaggacuug

SEQ ID NO: 613607 - RNA, 23 nt, Artificial Sequence
  Synthetic
ggauaaaggacuggcaggacuug

SEQ ID NO: 613608 - RNA, 24 nt, Artificial Sequence
  Synthetic
uggauaaaggacuggcaggacuug

SEQ ID NO: 613609 - RNA, 18 nt, Artificial Sequence
  Synthetic
gggucgaguggggacuug

SEQ ID NO: 613610 - RNA, 19 nt, Artificial Sequence
  Synthetic
ugggucgaguggggacuug

SEQ ID NO: 613611 - RNA, 20 nt, Artificial Sequence
  Synthetic
cugggucgaguggggacuug

SEQ ID NO: 613612 - RNA, 21 nt, Artificial Sequence
  Synthetic
ucugggucgaguggggacuug

SEQ ID NO: 613613 - RNA, 22 nt, Artificial Sequence
  Synthetic
uucugggucgaguggggacuug

SEQ ID NO: 613614 - RNA, 23 nt, Artificial Sequence
  Synthetic
uuucugggucgaguggggacuug

SEQ ID NO: 613615 - RNA, 24 nt, Artificial Sequence
  Synthetic
cuuucugggucgaguggggacuug

SEQ ID NO: 613616 - RNA, 18 nt, Artificial Sequence
  Synthetic
auauauauaugggacuug

SEQ ID NO: 613617 - RNA, 19 nt, Artificial Sequence
  Synthetic
uauauauauaugggacuug

SEQ ID NO: 613618 - RNA, 20 nt, Artificial Sequence
  Synthetic
uuauauauauaugggacuug

SEQ ID NO: 613619 - RNA, 21 nt, Artificial Sequence
  Synthetic
uuuauauauauaugggacuug

SEQ ID NO: 613620 - RNA, 22 nt, Artificial Sequence
  Synthetic
cuuuauauauauaugggacuug

SEQ ID NO: 613621 - RNA, 23 nt, Artificial Sequence
  Synthetic
acuuuauauauauaugggacuug

SEQ ID NO: 613622 - RNA, 24 nt, Artificial Sequence
  Synthetic
gacuuuauauauauaugggacuug

SEQ ID NO: 613623 - RNA, 18 nt, Artificial Sequence
  Synthetic
uugcccagaccauacuug

SEQ ID NO: 613624 - RNA, 19 nt, Artificial Sequence
  Synthetic
auugcccagaccauacuug

SEQ ID NO: 613625 - RNA, 20 nt, Artificial Sequence
  Synthetic
aauugcccagaccauacuug

SEQ ID NO: 613626 - RNA, 21 nt, Artificial Sequence
  Synthetic
uaauugcccagaccauacuug

SEQ ID NO: 613627 - RNA, 22 nt, Artificial Sequence
  Synthetic
auaauugcccagaccauacuug

SEQ ID NO: 613628 - RNA, 23 nt, Artificial Sequence
  Synthetic
uauaauugcccagaccauacuug

SEQ ID NO: 613629 - RNA, 24 nt, Artificial Sequence
  Synthetic
uuauaauugcccagaccauacuug

SEQ ID NO: 613630 - RNA, 18 nt, Artificial Sequence
  Synthetic
uuccaaaugccauacuug

SEQ ID NO: 613631 - RNA, 19 nt, Artificial Sequence
  Synthetic
guuccaaaugccauacuug

SEQ ID NO: 613632 - RNA, 20 nt, Artificial Sequence
  Synthetic
uguuccaaaugccauacuug

SEQ ID NO: 613633 - RNA, 21 nt, Artificial Sequence
  Synthetic
cuguuccaaaugccauacuug

SEQ ID NO: 613634 - RNA, 22 nt, Artificial Sequence
  Synthetic
ccuguuccaaaugccauacuug

SEQ ID NO: 613635 - RNA, 23 nt, Artificial Sequence
  Synthetic
uccuguuccaaaugccauacuug

SEQ ID NO: 613636 - RNA, 24 nt, Artificial Sequence
  Synthetic
guccuguuccaaaugccauacuug

SEQ ID NO: 613637 - RNA, 18 nt, Artificial Sequence
  Synthetic
ccugaaauggcauacuug

SEQ ID NO: 613638 - RNA, 19 nt, Artificial Sequence
  Synthetic
accugaaauggcauacuug

SEQ ID NO: 613639 - RNA, 20 nt, Artificial Sequence
  Synthetic
caccugaaauggcauacuug

SEQ ID NO: 613640 - RNA, 21 nt, Artificial Sequence
  Synthetic
ucaccugaaauggcauacuug

SEQ ID NO: 613641 - RNA, 22 nt, Artificial Sequence
  Synthetic
uucaccugaaauggcauacuug

SEQ ID NO: 613642 - RNA, 23 nt, Artificial Sequence
  Synthetic
uuucaccugaaauggcauacuug

SEQ ID NO: 613643 - RNA, 24 nt, Artificial Sequence
  Synthetic
guuucaccugaaauggcauacuug

SEQ ID NO: 613644 - RNA, 18 nt, Artificial Sequence
  Synthetic
aaaauauuaugauacuug

SEQ ID NO: 613645 - RNA, 19 nt, Artificial Sequence
  Synthetic
uaaaauauuaugauacuug

SEQ ID NO: 613646 - RNA, 20 nt, Artificial Sequence
  Synthetic
guaaaauauuaugauacuug

SEQ ID NO: 613647 - RNA, 21 nt, Artificial Sequence
  Synthetic
aguaaaauauuaugauacuug

SEQ ID NO: 613648 - RNA, 22 nt, Artificial Sequence
  Synthetic
caguaaaauauuaugauacuug

SEQ ID NO: 613649 - RNA, 23 nt, Artificial Sequence
  Synthetic
ucaguaaaauauuaugauacuug

SEQ ID NO: 613650 - RNA, 24 nt, Artificial Sequence
  Synthetic
cucaguaaaauauuaugauacuug

SEQ ID NO: 613651 - RNA, 18 nt, Artificial Sequence
  Synthetic
auguagggcuuauacuug

SEQ ID NO: 613652 - RNA, 19 nt, Artificial Sequence
  Synthetic
uauguagggcuuauacuug

SEQ ID NO: 613653 - RNA, 20 nt, Artificial Sequence
  Synthetic
guauguagggcuuauacuug

SEQ ID NO: 613654 - RNA, 21 nt, Artificial Sequence
  Synthetic
cguauguagggcuuauacuug

SEQ ID NO: 613655 - RNA, 22 nt, Artificial Sequence
  Synthetic
gcguauguagggcuuauacuug

SEQ ID NO: 613656 - RNA, 23 nt, Artificial Sequence
  Synthetic
ugcguauguagggcuuauacuug

SEQ ID NO: 613657 - RNA, 24 nt, Artificial Sequence
  Synthetic
gugcguauguagggcuuauacuug

SEQ ID NO: 613658 - RNA, 18 nt, Artificial Sequence
  Synthetic
uacugauuuugcuacuug

SEQ ID NO: 613659 - RNA, 19 nt, Artificial Sequence
  Synthetic
guacugauuuugcuacuug

SEQ ID NO: 613660 - RNA, 20 nt, Artificial Sequence
  Synthetic
gguacugauuuugcuacuug

SEQ ID NO: 613661 - RNA, 21 nt, Artificial Sequence
  Synthetic
agguacugauuuugcuacuug

SEQ ID NO: 613662 - RNA, 22 nt, Artificial Sequence
  Synthetic
cagguacugauuuugcuacuug

SEQ ID NO: 613663 - RNA, 23 nt, Artificial Sequence
  Synthetic
ccagguacugauuuugcuacuug

SEQ ID NO: 613664 - RNA, 24 nt, Artificial Sequence
  Synthetic
accagguacugauuuugcuacuug

SEQ ID NO: 613665 - RNA, 18 nt, Artificial Sequence
  Synthetic
ucuggaguuacuuacuug

SEQ ID NO: 613666 - RNA, 19 nt, Artificial Sequence
  Synthetic
cucuggaguuacuuacuug

SEQ ID NO: 613667 - RNA, 20 nt, Artificial Sequence
  Synthetic
acucuggaguuacuuacuug

SEQ ID NO: 613668 - RNA, 21 nt, Artificial Sequence
  Synthetic
aacucuggaguuacuuacuug

SEQ ID NO: 613669 - RNA, 22 nt, Artificial Sequence
  Synthetic
caacucuggaguuacuuacuug

SEQ ID NO: 613670 - RNA, 23 nt, Artificial Sequence
  Synthetic
ucaacucuggaguuacuuacuug

SEQ ID NO: 613671 - RNA, 24 nt, Artificial Sequence
  Synthetic
cucaacucuggaguuacuuacuug

SEQ ID NO: 613672 - RNA, 18 nt, Artificial Sequence
  Synthetic
ucaugaaccucuuacuug

SEQ ID NO: 613673 - RNA, 19 nt, Artificial Sequence
  Synthetic
aucaugaaccucuuacuug

SEQ ID NO: 613674 - RNA, 20 nt, Artificial Sequence
  Synthetic
caucaugaaccucuuacuug

SEQ ID NO: 613675 - RNA, 21 nt, Artificial Sequence
  Synthetic
ucaucaugaaccucuuacuug

SEQ ID NO: 613676 - RNA, 22 nt, Artificial Sequence
  Synthetic
aucaucaugaaccucuuacuug

SEQ ID NO: 613677 - RNA, 23 nt, Artificial Sequence
  Synthetic
caucaucaugaaccucuuacuug

SEQ ID NO: 613678 - RNA, 24 nt, Artificial Sequence
  Synthetic
gcaucaucaugaaccucuuacuug

SEQ ID NO: 613679 - RNA, 18 nt, Artificial Sequence
  Synthetic
gaaggucugauaaccuug

SEQ ID NO: 613680 - RNA, 19 nt, Artificial Sequence
  Synthetic
ggaaggucugauaaccuug

SEQ ID NO: 613681 - RNA, 20 nt, Artificial Sequence
  Synthetic
uggaaggucugauaaccuug

SEQ ID NO: 613682 - RNA, 21 nt, Artificial Sequence
  Synthetic
guggaaggucugauaaccuug

SEQ ID NO: 613683 - RNA, 22 nt, Artificial Sequence
  Synthetic
gguggaaggucugauaaccuug

SEQ ID NO: 613684 - RNA, 23 nt, Artificial Sequence
  Synthetic
ugguggaaggucugauaaccuug

SEQ ID NO: 613685 - RNA, 24 nt, Artificial Sequence
  Synthetic
uugguggaaggucugauaaccuug

SEQ ID NO: 613686 - RNA, 18 nt, Artificial Sequence
  Synthetic
uccuaacuaguaaccuug

SEQ ID NO: 613687 - RNA, 19 nt, Artificial Sequence
  Synthetic
uuccuaacuaguaaccuug

SEQ ID NO: 613688 - RNA, 20 nt, Artificial Sequence
  Synthetic
cuuccuaacuaguaaccuug

SEQ ID NO: 613689 - RNA, 21 nt, Artificial Sequence
  Synthetic
ucuuccuaacuaguaaccuug

SEQ ID NO: 613690 - RNA, 22 nt, Artificial Sequence
  Synthetic
gucuuccuaacuaguaaccuug

SEQ ID NO: 613691 - RNA, 23 nt, Artificial Sequence
  Synthetic
agucuuccuaacuaguaaccuug

SEQ ID NO: 613692 - RNA, 24 nt, Artificial Sequence
  Synthetic
cagucuuccuaacuaguaaccuug

SEQ ID NO: 613693 - RNA, 18 nt, Artificial Sequence
  Synthetic
ggccucugaggcaccuug

SEQ ID NO: 613694 - RNA, 19 nt, Artificial Sequence
  Synthetic
uggccucugaggcaccuug

SEQ ID NO: 613695 - RNA, 20 nt, Artificial Sequence
  Synthetic
uuggccucugaggcaccuug

SEQ ID NO: 613696 - RNA, 21 nt, Artificial Sequence
  Synthetic
uuuggccucugaggcaccuug

SEQ ID NO: 613697 - RNA, 22 nt, Artificial Sequence
  Synthetic
cuuuggccucugaggcaccuug

SEQ ID NO: 613698 - RNA, 23 nt, Artificial Sequence
  Synthetic
ccuuuggccucugaggcaccuug

SEQ ID NO: 613699 - RNA, 24 nt, Artificial Sequence
  Synthetic
cccuuuggccucugaggcaccuug

SEQ ID NO: 613700 - RNA, 18 nt, Artificial Sequence
  Synthetic
aaugcuuauaucaccuug

SEQ ID NO: 613701 - RNA, 19 nt, Artificial Sequence
  Synthetic
gaaugcuuauaucaccuug

SEQ ID NO: 613702 - RNA, 20 nt, Artificial Sequence
  Synthetic
ugaaugcuuauaucaccuug

SEQ ID NO: 613703 - RNA, 21 nt, Artificial Sequence
  Synthetic
cugaaugcuuauaucaccuug

SEQ ID NO: 613704 - RNA, 22 nt, Artificial Sequence
  Synthetic
acugaaugcuuauaucaccuug

SEQ ID NO: 613705 - RNA, 23 nt, Artificial Sequence
  Synthetic
cacugaaugcuuauaucaccuug

SEQ ID NO: 613706 - RNA, 24 nt, Artificial Sequence
  Synthetic
acacugaaugcuuauaucaccuug

SEQ ID NO: 613707 - RNA, 18 nt, Artificial Sequence
  Synthetic
uuuugcaaucagaccuug

SEQ ID NO: 613708 - RNA, 19 nt, Artificial Sequence
  Synthetic
uuuuugcaaucagaccuug

SEQ ID NO: 613709 - RNA, 20 nt, Artificial Sequence
  Synthetic
auuuuugcaaucagaccuug

SEQ ID NO: 613710 - RNA, 21 nt, Artificial Sequence
  Synthetic
aauuuuugcaaucagaccuug

SEQ ID NO: 613711 - RNA, 22 nt, Artificial Sequence
  Synthetic
gaauuuuugcaaucagaccuug

SEQ ID NO: 613712 - RNA, 23 nt, Artificial Sequence
  Synthetic
ugaauuuuugcaaucagaccuug

SEQ ID NO: 613713 - RNA, 24 nt, Artificial Sequence
  Synthetic
uugaauuuuugcaaucagaccuug

SEQ ID NO: 613714 - RNA, 18 nt, Artificial Sequence
  Synthetic
ggaggcagcacgaccuug

SEQ ID NO: 613715 - RNA, 19 nt, Artificial Sequence
  Synthetic
gggaggcagcacgaccuug

SEQ ID NO: 613716 - RNA, 20 nt, Artificial Sequence
  Synthetic
ugggaggcagcacgaccuug

SEQ ID NO: 613717 - RNA, 21 nt, Artificial Sequence
  Synthetic
augggaggcagcacgaccuug

SEQ ID NO: 613718 - RNA, 22 nt, Artificial Sequence
  Synthetic
aaugggaggcagcacgaccuug

SEQ ID NO: 613719 - RNA, 23 nt, Artificial Sequence
  Synthetic
aaaugggaggcagcacgaccuug

SEQ ID NO: 613720 - RNA, 24 nt, Artificial Sequence
  Synthetic
gaaaugggaggcagcacgaccuug

SEQ ID NO: 613721 - RNA, 18 nt, Artificial Sequence
  Synthetic
guaguaaaugugaccuug

SEQ ID NO: 613722 - RNA, 19 nt, Artificial Sequence
  Synthetic
aguaguaaaugugaccuug

SEQ ID NO: 613723 - RNA, 20 nt, Artificial Sequence
  Synthetic
caguaguaaaugugaccuug

SEQ ID NO: 613724 - RNA, 21 nt, Artificial Sequence
  Synthetic
acaguaguaaaugugaccuug

SEQ ID NO: 613725 - RNA, 22 nt, Artificial Sequence
  Synthetic
aacaguaguaaaugugaccuug

SEQ ID NO: 613726 - RNA, 23 nt, Artificial Sequence
  Synthetic
caacaguaguaaaugugaccuug

SEQ ID NO: 613727 - RNA, 24 nt, Artificial Sequence
  Synthetic
gcaacaguaguaaaugugaccuug

SEQ ID NO: 613728 - RNA, 18 nt, Artificial Sequence
  Synthetic
gagagagacaauaccuug

SEQ ID NO: 613729 - RNA, 19 nt, Artificial Sequence
  Synthetic
ggagagagacaauaccuug

SEQ ID NO: 613730 - RNA, 20 nt, Artificial Sequence
  Synthetic
uggagagagacaauaccuug

SEQ ID NO: 613731 - RNA, 21 nt, Artificial Sequence
  Synthetic
cuggagagagacaauaccuug

SEQ ID NO: 613732 - RNA, 22 nt, Artificial Sequence
  Synthetic
ccuggagagagacaauaccuug

SEQ ID NO: 613733 - RNA, 23 nt, Artificial Sequence
  Synthetic
accuggagagagacaauaccuug

SEQ ID NO: 613734 - RNA, 24 nt, Artificial Sequence
  Synthetic
gaccuggagagagacaauaccuug

SEQ ID NO: 613735 - RNA, 18 nt, Artificial Sequence
  Synthetic
cacagagguucuaccuug

SEQ ID NO: 613736 - RNA, 19 nt, Artificial Sequence
  Synthetic
ucacagagguucuaccuug

SEQ ID NO: 613737 - RNA, 20 nt, Artificial Sequence
  Synthetic
uucacagagguucuaccuug

SEQ ID NO: 613738 - RNA, 21 nt, Artificial Sequence
  Synthetic
cuucacagagguucuaccuug

SEQ ID NO: 613739 - RNA, 22 nt, Artificial Sequence
  Synthetic
acuucacagagguucuaccuug

SEQ ID NO: 613740 - RNA, 23 nt, Artificial Sequence
  Synthetic
cacuucacagagguucuaccuug

SEQ ID NO: 613741 - RNA, 24 nt, Artificial Sequence
  Synthetic
ucacuucacagagguucuaccuug

SEQ ID NO: 613742 - RNA, 18 nt, Artificial Sequence
  Synthetic
gggaagucccuuaccuug

SEQ ID NO: 613743 - RNA, 19 nt, Artificial Sequence
  Synthetic
agggaagucccuuaccuug

SEQ ID NO: 613744 - RNA, 20 nt, Artificial Sequence
  Synthetic
uagggaagucccuuaccuug

SEQ ID NO: 613745 - RNA, 21 nt, Artificial Sequence
  Synthetic
uuagggaagucccuuaccuug

SEQ ID NO: 613746 - RNA, 22 nt, Artificial Sequence
  Synthetic
uuuagggaagucccuuaccuug

SEQ ID NO: 613747 - RNA, 23 nt, Artificial Sequence
  Synthetic
cuuuagggaagucccuuaccuug

SEQ ID NO: 613748 - RNA, 24 nt, Artificial Sequence
  Synthetic
ucuuuagggaagucccuuaccuug

SEQ ID NO: 613749 - RNA, 18 nt, Artificial Sequence
  Synthetic
agugccuugucacccuug

SEQ ID NO: 613750 - RNA, 19 nt, Artificial Sequence
  Synthetic
uagugccuugucacccuug

SEQ ID NO: 613751 - RNA, 20 nt, Artificial Sequence
  Synthetic
auagugccuugucacccuug

SEQ ID NO: 613752 - RNA, 21 nt, Artificial Sequence
  Synthetic
gauagugccuugucacccuug

SEQ ID NO: 613753 - RNA, 22 nt, Artificial Sequence
  Synthetic
agauagugccuugucacccuug

SEQ ID NO: 613754 - RNA, 23 nt, Artificial Sequence
  Synthetic
cagauagugccuugucacccuug

SEQ ID NO: 613755 - RNA, 24 nt, Artificial Sequence
  Synthetic
ccagauagugccuugucacccuug

SEQ ID NO: 613756 - RNA, 18 nt, Artificial Sequence
  Synthetic
ucccaccauauacccuug

SEQ ID NO: 613757 - RNA, 19 nt, Artificial Sequence
  Synthetic
gucccaccauauacccuug

SEQ ID NO: 613758 - RNA, 20 nt, Artificial Sequence
  Synthetic
ggucccaccauauacccuug

SEQ ID NO: 613759 - RNA, 21 nt, Artificial Sequence
  Synthetic
gggucccaccauauacccuug

SEQ ID NO: 613760 - RNA, 22 nt, Artificial Sequence
  Synthetic
agggucccaccauauacccuug

SEQ ID NO: 613761 - RNA, 23 nt, Artificial Sequence
  Synthetic
gagggucccaccauauacccuug

SEQ ID NO: 613762 - RNA, 24 nt, Artificial Sequence
  Synthetic
agagggucccaccauauacccuug

SEQ ID NO: 613763 - RNA, 18 nt, Artificial Sequence
  Synthetic
aaacauuuuauccccuug

SEQ ID NO: 613764 - RNA, 19 nt, Artificial Sequence
  Synthetic
aaaacauuuuauccccuug

SEQ ID NO: 613765 - RNA, 20 nt, Artificial Sequence
  Synthetic
aaaaacauuuuauccccuug

SEQ ID NO: 613766 - RNA, 21 nt, Artificial Sequence
  Synthetic
uaaaaacauuuuauccccuug

SEQ ID NO: 613767 - RNA, 22 nt, Artificial Sequence
  Synthetic
auaaaaacauuuuauccccuug

SEQ ID NO: 613768 - RNA, 23 nt, Artificial Sequence
  Synthetic
uauaaaaacauuuuauccccuug

SEQ ID NO: 613769 - RNA, 24 nt, Artificial Sequence
  Synthetic
uuauaaaaacauuuuauccccuug

SEQ ID NO: 613770 - RNA, 18 nt, Artificial Sequence
  Synthetic
ugcccaaagaggcccuug

SEQ ID NO: 613771 - RNA, 19 nt, Artificial Sequence
  Synthetic
uugcccaaagaggcccuug

SEQ ID NO: 613772 - RNA, 20 nt, Artificial Sequence
  Synthetic
uuugcccaaagaggcccuug

SEQ ID NO: 613773 - RNA, 21 nt, Artificial Sequence
  Synthetic
cuuugcccaaagaggcccuug

SEQ ID NO: 613774 - RNA, 22 nt, Artificial Sequence
  Synthetic
ucuuugcccaaagaggcccuug

SEQ ID NO: 613775 - RNA, 23 nt, Artificial Sequence
  Synthetic
uucuuugcccaaagaggcccuug

SEQ ID NO: 613776 - RNA, 24 nt, Artificial Sequence
  Synthetic
cuucuuugcccaaagaggcccuug

SEQ ID NO: 613777 - RNA, 18 nt, Artificial Sequence
  Synthetic
ccauuuuggacucccuug

SEQ ID NO: 613778 - RNA, 19 nt, Artificial Sequence
  Synthetic
cccauuuuggacucccuug

SEQ ID NO: 613779 - RNA, 20 nt, Artificial Sequence
  Synthetic
acccauuuuggacucccuug

SEQ ID NO: 613780 - RNA, 21 nt, Artificial Sequence
  Synthetic
cacccauuuuggacucccuug

SEQ ID NO: 613781 - RNA, 22 nt, Artificial Sequence
  Synthetic
ccacccauuuuggacucccuug

SEQ ID NO: 613782 - RNA, 23 nt, Artificial Sequence
  Synthetic
accacccauuuuggacucccuug

SEQ ID NO: 613783 - RNA, 24 nt, Artificial Sequence
  Synthetic
caccacccauuuuggacucccuug

SEQ ID NO: 613784 - RNA, 18 nt, Artificial Sequence
  Synthetic
uccaguuuuguucccuug

SEQ ID NO: 613785 - RNA, 19 nt, Artificial Sequence
  Synthetic
auccaguuuuguucccuug

SEQ ID NO: 613786 - RNA, 20 nt, Artificial Sequence
  Synthetic
cauccaguuuuguucccuug

SEQ ID NO: 613787 - RNA, 21 nt, Artificial Sequence
  Synthetic
ccauccaguuuuguucccuug

SEQ ID NO: 613788 - RNA, 22 nt, Artificial Sequence
  Synthetic
uccauccaguuuuguucccuug

SEQ ID NO: 613789 - RNA, 23 nt, Artificial Sequence
  Synthetic
cuccauccaguuuuguucccuug

SEQ ID NO: 613790 - RNA, 24 nt, Artificial Sequence
  Synthetic
ucuccauccaguuuuguucccuug

SEQ ID NO: 613791 - RNA, 18 nt, Artificial Sequence
  Synthetic
uggugguaguuucccuug

SEQ ID NO: 613792 - RNA, 19 nt, Artificial Sequence
  Synthetic
cuggugguaguuucccuug

SEQ ID NO: 613793 - RNA, 20 nt, Artificial Sequence
  Synthetic
ccuggugguaguuucccuug

SEQ ID NO: 613794 - RNA, 21 nt, Artificial Sequence
  Synthetic
gccuggugguaguuucccuug

SEQ ID NO: 613795 - RNA, 22 nt, Artificial Sequence
  Synthetic
ugccuggugguaguuucccuug

SEQ ID NO: 613796 - RNA, 23 nt, Artificial Sequence
  Synthetic
augccuggugguaguuucccuug

SEQ ID NO: 613797 - RNA, 24 nt, Artificial Sequence
  Synthetic
gaugccuggugguaguuucccuug

SEQ ID NO: 613798 - RNA, 18 nt, Artificial Sequence
  Synthetic
ugacaucaagaagccuug

SEQ ID NO: 613799 - RNA, 19 nt, Artificial Sequence
  Synthetic
augacaucaagaagccuug

SEQ ID NO: 613800 - RNA, 20 nt, Artificial Sequence
  Synthetic
aaugacaucaagaagccuug

SEQ ID NO: 613801 - RNA, 21 nt, Artificial Sequence
  Synthetic
caaugacaucaagaagccuug

SEQ ID NO: 613802 - RNA, 22 nt, Artificial Sequence
  Synthetic
acaaugacaucaagaagccuug

SEQ ID NO: 613803 - RNA, 23 nt, Artificial Sequence
  Synthetic
aacaaugacaucaagaagccuug

SEQ ID NO: 613804 - RNA, 24 nt, Artificial Sequence
  Synthetic
gaacaaugacaucaagaagccuug

SEQ ID NO: 613805 - RNA, 18 nt, Artificial Sequence
  Synthetic
guaagaauaacagccuug

SEQ ID NO: 613806 - RNA, 19 nt, Artificial Sequence
  Synthetic
gguaagaauaacagccuug

SEQ ID NO: 613807 - RNA, 20 nt, Artificial Sequence
  Synthetic
agguaagaauaacagccuug

SEQ ID NO: 613808 - RNA, 21 nt, Artificial Sequence
  Synthetic
gagguaagaauaacagccuug

SEQ ID NO: 613809 - RNA, 22 nt, Artificial Sequence
  Synthetic
ugagguaagaauaacagccuug

SEQ ID NO: 613810 - RNA, 23 nt, Artificial Sequence
  Synthetic
augagguaagaauaacagccuug

SEQ ID NO: 613811 - RNA, 24 nt, Artificial Sequence
  Synthetic
uaugagguaagaauaacagccuug

SEQ ID NO: 613812 - RNA, 18 nt, Artificial Sequence
  Synthetic
aaauuacguguagccuug

SEQ ID NO: 613813 - RNA, 19 nt, Artificial Sequence
  Synthetic
uaaauuacguguagccuug

SEQ ID NO: 613814 - RNA, 20 nt, Artificial Sequence
  Synthetic
guaaauuacguguagccuug

SEQ ID NO: 613815 - RNA, 21 nt, Artificial Sequence
  Synthetic
uguaaauuacguguagccuug

SEQ ID NO: 613816 - RNA, 22 nt, Artificial Sequence
  Synthetic
cuguaaauuacguguagccuug

SEQ ID NO: 613817 - RNA, 23 nt, Artificial Sequence
  Synthetic
ccuguaaauuacguguagccuug

SEQ ID NO: 613818 - RNA, 24 nt, Artificial Sequence
  Synthetic
cccuguaaauuacguguagccuug

SEQ ID NO: 613819 - RNA, 18 nt, Artificial Sequence
  Synthetic
ggaagaaauggggccuug

SEQ ID NO: 613820 - RNA, 19 nt, Artificial Sequence
  Synthetic
uggaagaaauggggccuug

SEQ ID NO: 613821 - RNA, 20 nt, Artificial Sequence
  Synthetic
guggaagaaauggggccuug

SEQ ID NO: 613822 - RNA, 21 nt, Artificial Sequence
  Synthetic
aguggaagaaauggggccuug

SEQ ID NO: 613823 - RNA, 22 nt, Artificial Sequence
  Synthetic
gaguggaagaaauggggccuug

SEQ ID NO: 613824 - RNA, 23 nt, Artificial Sequence
  Synthetic
agaguggaagaaauggggccuug

SEQ ID NO: 613825 - RNA, 24 nt, Artificial Sequence
  Synthetic
gagaguggaagaaauggggccuug

SEQ ID NO: 613826 - RNA, 18 nt, Artificial Sequence
  Synthetic
gcucauaugacugccuug

SEQ ID NO: 613827 - RNA, 19 nt, Artificial Sequence
  Synthetic
ugcucauaugacugccuug

SEQ ID NO: 613828 - RNA, 20 nt, Artificial Sequence
  Synthetic
augcucauaugacugccuug

SEQ ID NO: 613829 - RNA, 21 nt, Artificial Sequence
  Synthetic
aaugcucauaugacugccuug

SEQ ID NO: 613830 - RNA, 22 nt, Artificial Sequence
  Synthetic
caaugcucauaugacugccuug

SEQ ID NO: 613831 - RNA, 23 nt, Artificial Sequence
  Synthetic
ucaaugcucauaugacugccuug

SEQ ID NO: 613832 - RNA, 24 nt, Artificial Sequence
  Synthetic
cucaaugcucauaugacugccuug

SEQ ID NO: 613833 - RNA, 18 nt, Artificial Sequence
  Synthetic
ucuccuccauccuccuug

SEQ ID NO: 613834 - RNA, 19 nt, Artificial Sequence
  Synthetic
uucuccuccauccuccuug

SEQ ID NO: 613835 - RNA, 20 nt, Artificial Sequence
  Synthetic
uuucuccuccauccuccuug

SEQ ID NO: 613836 - RNA, 21 nt, Artificial Sequence
  Synthetic
auuucuccuccauccuccuug

SEQ ID NO: 613837 - RNA, 22 nt, Artificial Sequence
  Synthetic
aauuucuccuccauccuccuug

SEQ ID NO: 613838 - RNA, 23 nt, Artificial Sequence
  Synthetic
aaauuucuccuccauccuccuug

SEQ ID NO: 613839 - RNA, 24 nt, Artificial Sequence
  Synthetic
aaaauuucuccuccauccuccuug

SEQ ID NO: 613840 - RNA, 18 nt, Artificial Sequence
  Synthetic
ucuccaggacucuccuug

SEQ ID NO: 613841 - RNA, 19 nt, Artificial Sequence
  Synthetic
cucuccaggacucuccuug

SEQ ID NO: 613842 - RNA, 20 nt, Artificial Sequence
  Synthetic
ccucuccaggacucuccuug

SEQ ID NO: 613843 - RNA, 21 nt, Artificial Sequence
  Synthetic
cccucuccaggacucuccuug

SEQ ID NO: 613844 - RNA, 22 nt, Artificial Sequence
  Synthetic
gcccucuccaggacucuccuug

SEQ ID NO: 613845 - RNA, 23 nt, Artificial Sequence
  Synthetic
agcccucuccaggacucuccuug

SEQ ID NO: 613846 - RNA, 24 nt, Artificial Sequence
  Synthetic
cagcccucuccaggacucuccuug

SEQ ID NO: 613847 - RNA, 18 nt, Artificial Sequence
  Synthetic
auagguuggcaguccuug

SEQ ID NO: 613848 - RNA, 19 nt, Artificial Sequence
  Synthetic
aauagguuggcaguccuug

SEQ ID NO: 613849 - RNA, 20 nt, Artificial Sequence
  Synthetic
aaauagguuggcaguccuug

SEQ ID NO: 613850 - RNA, 21 nt, Artificial Sequence
  Synthetic
uaaauagguuggcaguccuug

SEQ ID NO: 613851 - RNA, 22 nt, Artificial Sequence
  Synthetic
auaaauagguuggcaguccuug

SEQ ID NO: 613852 - RNA, 23 nt, Artificial Sequence
  Synthetic
aauaaauagguuggcaguccuug

SEQ ID NO: 613853 - RNA, 24 nt, Artificial Sequence
  Synthetic
caauaaauagguuggcaguccuug

SEQ ID NO: 613854 - RNA, 18 nt, Artificial Sequence
  Synthetic
ggaccaucaguguccuug

SEQ ID NO: 613855 - RNA, 19 nt, Artificial Sequence
  Synthetic
aggaccaucaguguccuug

SEQ ID NO: 613856 - RNA, 20 nt, Artificial Sequence
  Synthetic
gaggaccaucaguguccuug

SEQ ID NO: 613857 - RNA, 21 nt, Artificial Sequence
  Synthetic
ugaggaccaucaguguccuug

SEQ ID NO: 613858 - RNA, 22 nt, Artificial Sequence
  Synthetic
augaggaccaucaguguccuug

SEQ ID NO: 613859 - RNA, 23 nt, Artificial Sequence
  Synthetic
caugaggaccaucaguguccuug

SEQ ID NO: 613860 - RNA, 24 nt, Artificial Sequence
  Synthetic
acaugaggaccaucaguguccuug

SEQ ID NO: 613861 - RNA, 18 nt, Artificial Sequence
  Synthetic
ggccuaaauaauuccuug

SEQ ID NO: 613862 - RNA, 19 nt, Artificial Sequence
  Synthetic
uggccuaaauaauuccuug

SEQ ID NO: 613863 - RNA, 20 nt, Artificial Sequence
  Synthetic
uuggccuaaauaauuccuug

SEQ ID NO: 613864 - RNA, 21 nt, Artificial Sequence
  Synthetic
uuuggccuaaauaauuccuug

SEQ ID NO: 613865 - RNA, 22 nt, Artificial Sequence
  Synthetic
uuuuggccuaaauaauuccuug

SEQ ID NO: 613866 - RNA, 23 nt, Artificial Sequence
  Synthetic
auuuuggccuaaauaauuccuug

SEQ ID NO: 613867 - RNA, 24 nt, Artificial Sequence
  Synthetic
cauuuuggccuaaauaauuccuug

SEQ ID NO: 613868 - RNA, 18 nt, Artificial Sequence
  Synthetic
auaauacagccuuccuug

SEQ ID NO: 613869 - RNA, 19 nt, Artificial Sequence
  Synthetic
aauaauacagccuuccuug

SEQ ID NO: 613870 - RNA, 20 nt, Artificial Sequence
  Synthetic
uaauaauacagccuuccuug

SEQ ID NO: 613871 - RNA, 21 nt, Artificial Sequence
  Synthetic
auaauaauacagccuuccuug

SEQ ID NO: 613872 - RNA, 22 nt, Artificial Sequence
  Synthetic
uauaauaauacagccuuccuug

SEQ ID NO: 613873 - RNA, 23 nt, Artificial Sequence
  Synthetic
guauaauaauacagccuuccuug

SEQ ID NO: 613874 - RNA, 24 nt, Artificial Sequence
  Synthetic
gguauaauaauacagccuuccuug

SEQ ID NO: 613875 - RNA, 18 nt, Artificial Sequence
  Synthetic
ugaaaggagcccagcuug

SEQ ID NO: 613876 - RNA, 19 nt, Artificial Sequence
  Synthetic
augaaaggagcccagcuug

SEQ ID NO: 613877 - RNA, 20 nt, Artificial Sequence
  Synthetic
caugaaaggagcccagcuug

SEQ ID NO: 613878 - RNA, 21 nt, Artificial Sequence
  Synthetic
gcaugaaaggagcccagcuug

SEQ ID NO: 613879 - RNA, 22 nt, Artificial Sequence
  Synthetic
ggcaugaaaggagcccagcuug

SEQ ID NO: 613880 - RNA, 23 nt, Artificial Sequence
  Synthetic
cggcaugaaaggagcccagcuug

SEQ ID NO: 613881 - RNA, 24 nt, Artificial Sequence
  Synthetic
gcggcaugaaaggagcccagcuug

SEQ ID NO: 613882 - RNA, 18 nt, Artificial Sequence
  Synthetic
caacugagauucagcuug

SEQ ID NO: 613883 - RNA, 19 nt, Artificial Sequence
  Synthetic
acaacugagauucagcuug

SEQ ID NO: 613884 - RNA, 20 nt, Artificial Sequence
  Synthetic
aacaacugagauucagcuug

SEQ ID NO: 613885 - RNA, 21 nt, Artificial Sequence
  Synthetic
aaacaacugagauucagcuug

SEQ ID NO: 613886 - RNA, 22 nt, Artificial Sequence
  Synthetic
aaaacaacugagauucagcuug

SEQ ID NO: 613887 - RNA, 23 nt, Artificial Sequence
  Synthetic
aaaaacaacugagauucagcuug

SEQ ID NO: 613888 - RNA, 24 nt, Artificial Sequence
  Synthetic
gaaaaacaacugagauucagcuug

SEQ ID NO: 613889 - RNA, 18 nt, Artificial Sequence
  Synthetic
caagcuuaggggagcuug

SEQ ID NO: 613890 - RNA, 19 nt, Artificial Sequence
  Synthetic
ucaagcuuaggggagcuug

SEQ ID NO: 613891 - RNA, 20 nt, Artificial Sequence
  Synthetic
uucaagcuuaggggagcuug

SEQ ID NO: 613892 - RNA, 21 nt, Artificial Sequence
  Synthetic
cuucaagcuuaggggagcuug

SEQ ID NO: 613893 - RNA, 22 nt, Artificial Sequence
  Synthetic
ucuucaagcuuaggggagcuug

SEQ ID NO: 613894 - RNA, 23 nt, Artificial Sequence
  Synthetic
cucuucaagcuuaggggagcuug

SEQ ID NO: 613895 - RNA, 24 nt, Artificial Sequence
  Synthetic
ucucuucaagcuuaggggagcuug

SEQ ID NO: 613896 - RNA, 18 nt, Artificial Sequence
  Synthetic
cauauuuuaaauagcuug

SEQ ID NO: 613897 - RNA, 19 nt, Artificial Sequence
  Synthetic
ucauauuuuaaauagcuug

SEQ ID NO: 613898 - RNA, 20 nt, Artificial Sequence
  Synthetic
uucauauuuuaaauagcuug

SEQ ID NO: 613899 - RNA, 21 nt, Artificial Sequence
  Synthetic
uuucauauuuuaaauagcuug

SEQ ID NO: 613900 - RNA, 22 nt, Artificial Sequence
  Synthetic
cuuucauauuuuaaauagcuug

SEQ ID NO: 613901 - RNA, 23 nt, Artificial Sequence
  Synthetic
ccuuucauauuuuaaauagcuug

SEQ ID NO: 613902 - RNA, 24 nt, Artificial Sequence
  Synthetic
uccuuucauauuuuaaauagcuug

SEQ ID NO: 613903 - RNA, 24 nt, Artificial Sequence
  Synthetic
gugaagaaagucaaugguagcuug

SEQ ID NO: 613904 - RNA, 18 nt, Artificial Sequence
  Synthetic
cuaauuuaaauuagcuug

SEQ ID NO: 613905 - RNA, 19 nt, Artificial Sequence
  Synthetic
ucuaauuuaaauuagcuug

SEQ ID NO: 613906 - RNA, 20 nt, Artificial Sequence
  Synthetic
aucuaauuuaaauuagcuug

SEQ ID NO: 613907 - RNA, 21 nt, Artificial Sequence
  Synthetic
uaucuaauuuaaauuagcuug

SEQ ID NO: 613908 - RNA, 22 nt, Artificial Sequence
  Synthetic
uuaucuaauuuaaauuagcuug

SEQ ID NO: 613909 - RNA, 23 nt, Artificial Sequence
  Synthetic
uuuaucuaauuuaaauuagcuug

SEQ ID NO: 613910 - RNA, 24 nt, Artificial Sequence
  Synthetic
uuuuaucuaauuuaaauuagcuug

SEQ ID NO: 613911 - RNA, 18 nt, Artificial Sequence
  Synthetic
auauagaggcuacgcuug

SEQ ID NO: 613912 - RNA, 19 nt, Artificial Sequence
  Synthetic
uauauagaggcuacgcuug

SEQ ID NO: 613913 - RNA, 20 nt, Artificial Sequence
  Synthetic
guauauagaggcuacgcuug

SEQ ID NO: 613914 - RNA, 21 nt, Artificial Sequence
  Synthetic
aguauauagaggcuacgcuug

SEQ ID NO: 613915 - RNA, 22 nt, Artificial Sequence
  Synthetic
caguauauagaggcuacgcuug

SEQ ID NO: 613916 - RNA, 23 nt, Artificial Sequence
  Synthetic
acaguauauagaggcuacgcuug

SEQ ID NO: 613917 - RNA, 24 nt, Artificial Sequence
  Synthetic
gacaguauauagaggcuacgcuug

SEQ ID NO: 613918 - RNA, 18 nt, Artificial Sequence
  Synthetic
uaagcccaggagcgcuug

SEQ ID NO: 613919 - RNA, 19 nt, Artificial Sequence
  Synthetic
auaagcccaggagcgcuug

SEQ ID NO: 613920 - RNA, 20 nt, Artificial Sequence
  Synthetic
aauaagcccaggagcgcuug

SEQ ID NO: 613921 - RNA, 21 nt, Artificial Sequence
  Synthetic
gaauaagcccaggagcgcuug

SEQ ID NO: 613922 - RNA, 22 nt, Artificial Sequence
  Synthetic
agaauaagcccaggagcgcuug

SEQ ID NO: 613923 - RNA, 23 nt, Artificial Sequence
  Synthetic
gagaauaagcccaggagcgcuug

SEQ ID NO: 613924 - RNA, 24 nt, Artificial Sequence
  Synthetic
ugagaauaagcccaggagcgcuug

SEQ ID NO: 613925 - RNA, 18 nt, Artificial Sequence
  Synthetic
aaaucugaaaaaggcuug

SEQ ID NO: 613926 - RNA, 19 nt, Artificial Sequence
  Synthetic
aaaaucugaaaaaggcuug

SEQ ID NO: 613927 - RNA, 20 nt, Artificial Sequence
  Synthetic
gaaaaucugaaaaaggcuug

SEQ ID NO: 613928 - RNA, 21 nt, Artificial Sequence
  Synthetic
ugaaaaucugaaaaaggcuug

SEQ ID NO: 613929 - RNA, 22 nt, Artificial Sequence
  Synthetic
cugaaaaucugaaaaaggcuug

SEQ ID NO: 613930 - RNA, 23 nt, Artificial Sequence
  Synthetic
ccugaaaaucugaaaaaggcuug

SEQ ID NO: 613931 - RNA, 24 nt, Artificial Sequence
  Synthetic
uccugaaaaucugaaaaaggcuug

SEQ ID NO: 613932 - RNA, 18 nt, Artificial Sequence
  Synthetic
agaugcaaaacaggcuug

SEQ ID NO: 613933 - RNA, 19 nt, Artificial Sequence
  Synthetic
uagaugcaaaacaggcuug

SEQ ID NO: 613934 - RNA, 20 nt, Artificial Sequence
  Synthetic
uuagaugcaaaacaggcuug

SEQ ID NO: 613935 - RNA, 21 nt, Artificial Sequence
  Synthetic
uuuagaugcaaaacaggcuug

SEQ ID NO: 613936 - RNA, 22 nt, Artificial Sequence
  Synthetic
auuuagaugcaaaacaggcuug

SEQ ID NO: 613937 - RNA, 23 nt, Artificial Sequence
  Synthetic
gauuuagaugcaaaacaggcuug

SEQ ID NO: 613938 - RNA, 24 nt, Artificial Sequence
  Synthetic
ugauuuagaugcaaaacaggcuug

SEQ ID NO: 613939 - RNA, 18 nt, Artificial Sequence
  Synthetic
cagagagaggugggcuug

SEQ ID NO: 613940 - RNA, 19 nt, Artificial Sequence
  Synthetic
acagagagaggugggcuug

SEQ ID NO: 613941 - RNA, 20 nt, Artificial Sequence
  Synthetic
uacagagagaggugggcuug

SEQ ID NO: 613942 - RNA, 21 nt, Artificial Sequence
  Synthetic
uuacagagagaggugggcuug

SEQ ID NO: 613943 - RNA, 22 nt, Artificial Sequence
  Synthetic
uuuacagagagaggugggcuug

SEQ ID NO: 613944 - RNA, 23 nt, Artificial Sequence
  Synthetic
auuuacagagagaggugggcuug

SEQ ID NO: 613945 - RNA, 24 nt, Artificial Sequence
  Synthetic
cauuuacagagagaggugggcuug

SEQ ID NO: 613946 - RNA, 18 nt, Artificial Sequence
  Synthetic
uacaugcugauuggcuug

SEQ ID NO: 613947 - RNA, 19 nt, Artificial Sequence
  Synthetic
cuacaugcugauuggcuug

SEQ ID NO: 613948 - RNA, 20 nt, Artificial Sequence
  Synthetic
acuacaugcugauuggcuug

SEQ ID NO: 613949 - RNA, 21 nt, Artificial Sequence
  Synthetic
gacuacaugcugauuggcuug

SEQ ID NO: 613950 - RNA, 22 nt, Artificial Sequence
  Synthetic
ugacuacaugcugauuggcuug

SEQ ID NO: 613951 - RNA, 23 nt, Artificial Sequence
  Synthetic
cugacuacaugcugauuggcuug

SEQ ID NO: 613952 - RNA, 24 nt, Artificial Sequence
  Synthetic
acugacuacaugcugauuggcuug

SEQ ID NO: 613953 - RNA, 18 nt, Artificial Sequence
  Synthetic
gcucccauaaaaugcuug

SEQ ID NO: 613954 - RNA, 19 nt, Artificial Sequence
  Synthetic
ugcucccauaaaaugcuug

SEQ ID NO: 613955 - RNA, 20 nt, Artificial Sequence
  Synthetic
augcucccauaaaaugcuug

SEQ ID NO: 613956 - RNA, 21 nt, Artificial Sequence
  Synthetic
uaugcucccauaaaaugcuug

SEQ ID NO: 613957 - RNA, 22 nt, Artificial Sequence
  Synthetic
uuaugcucccauaaaaugcuug

SEQ ID NO: 613958 - RNA, 23 nt, Artificial Sequence
  Synthetic
uuuaugcucccauaaaaugcuug

SEQ ID NO: 613959 - RNA, 24 nt, Artificial Sequence
  Synthetic
uuuuaugcucccauaaaaugcuug

SEQ ID NO: 613960 - RNA, 18 nt, Artificial Sequence
  Synthetic
acaaagcacaaaugcuug

SEQ ID NO: 613961 - RNA, 19 nt, Artificial Sequence
  Synthetic
uacaaagcacaaaugcuug

SEQ ID NO: 613962 - RNA, 20 nt, Artificial Sequence
  Synthetic
auacaaagcacaaaugcuug

SEQ ID NO: 613963 - RNA, 21 nt, Artificial Sequence
  Synthetic
aauacaaagcacaaaugcuug

SEQ ID NO: 613964 - RNA, 22 nt, Artificial Sequence
  Synthetic
uaauacaaagcacaaaugcuug

SEQ ID NO: 613965 - RNA, 23 nt, Artificial Sequence
  Synthetic
guaauacaaagcacaaaugcuug

SEQ ID NO: 613966 - RNA, 24 nt, Artificial Sequence
  Synthetic
uguaauacaaagcacaaaugcuug

SEQ ID NO: 613967 - RNA, 18 nt, Artificial Sequence
  Synthetic
gguggccuagaaugcuug

SEQ ID NO: 613968 - RNA, 19 nt, Artificial Sequence
  Synthetic
ggguggccuagaaugcuug

SEQ ID NO: 613969 - RNA, 20 nt, Artificial Sequence
  Synthetic
uggguggccuagaaugcuug

SEQ ID NO: 613970 - RNA, 21 nt, Artificial Sequence
  Synthetic
guggguggccuagaaugcuug

SEQ ID NO: 613971 - RNA, 22 nt, Artificial Sequence
  Synthetic
uguggguggccuagaaugcuug

SEQ ID NO: 613972 - RNA, 23 nt, Artificial Sequence
  Synthetic
guguggguggccuagaaugcuug

SEQ ID NO: 613973 - RNA, 24 nt, Artificial Sequence
  Synthetic
gguguggguggccuagaaugcuug

SEQ ID NO: 613974 - RNA, 18 nt, Artificial Sequence
  Synthetic
guaacagaaugaugcuug

SEQ ID NO: 613975 - RNA, 19 nt, Artificial Sequence
  Synthetic
aguaacagaaugaugcuug

SEQ ID NO: 613976 - RNA, 20 nt, Artificial Sequence
  Synthetic
gaguaacagaaugaugcuug

SEQ ID NO: 613977 - RNA, 21 nt, Artificial Sequence
  Synthetic
ggaguaacagaaugaugcuug

SEQ ID NO: 613978 - RNA, 22 nt, Artificial Sequence
  Synthetic
gggaguaacagaaugaugcuug

SEQ ID NO: 613979 - RNA, 23 nt, Artificial Sequence
  Synthetic
ggggaguaacagaaugaugcuug

SEQ ID NO: 613980 - RNA, 24 nt, Artificial Sequence
  Synthetic
uggggaguaacagaaugaugcuug

SEQ ID NO: 613981 - RNA, 18 nt, Artificial Sequence
  Synthetic
uggggccaguacugcuug

SEQ ID NO: 613982 - RNA, 19 nt, Artificial Sequence
  Synthetic
auggggccaguacugcuug

SEQ ID NO: 613983 - RNA, 20 nt, Artificial Sequence
  Synthetic
uauggggccaguacugcuug

SEQ ID NO: 613984 - RNA, 21 nt, Artificial Sequence
  Synthetic
uuauggggccaguacugcuug

SEQ ID NO: 613985 - RNA, 22 nt, Artificial Sequence
  Synthetic
guuauggggccaguacugcuug

SEQ ID NO: 613986 - RNA, 23 nt, Artificial Sequence
  Synthetic
uguuauggggccaguacugcuug

SEQ ID NO: 613987 - RNA, 24 nt, Artificial Sequence
  Synthetic
cuguuauggggccaguacugcuug

SEQ ID NO: 613988 - RNA, 18 nt, Artificial Sequence
  Synthetic
uugagggaauucugcuug

SEQ ID NO: 613989 - RNA, 19 nt, Artificial Sequence
  Synthetic
auugagggaauucugcuug

SEQ ID NO: 613990 - RNA, 20 nt, Artificial Sequence
  Synthetic
aauugagggaauucugcuug

SEQ ID NO: 613991 - RNA, 21 nt, Artificial Sequence
  Synthetic
aaauugagggaauucugcuug

SEQ ID NO: 613992 - RNA, 22 nt, Artificial Sequence
  Synthetic
uaaauugagggaauucugcuug

SEQ ID NO: 613993 - RNA, 23 nt, Artificial Sequence
  Synthetic
guaaauugagggaauucugcuug

SEQ ID NO: 613994 - RNA, 24 nt, Artificial Sequence
  Synthetic
aguaaauugagggaauucugcuug

SEQ ID NO: 613995 - RNA, 18 nt, Artificial Sequence
  Synthetic
agcaguuucuucugcuug

SEQ ID NO: 613996 - RNA, 19 nt, Artificial Sequence
  Synthetic
aagcaguuucuucugcuug

SEQ ID NO: 613997 - RNA, 20 nt, Artificial Sequence
  Synthetic
uaagcaguuucuucugcuug

SEQ ID NO: 613998 - RNA, 21 nt, Artificial Sequence
  Synthetic
guaagcaguuucuucugcuug

SEQ ID NO: 613999 - RNA, 22 nt, Artificial Sequence
  Synthetic
uguaagcaguuucuucugcuug

SEQ ID NO: 614000 - RNA, 23 nt, Artificial Sequence
  Synthetic
cuguaagcaguuucuucugcuug

SEQ ID NO: 614001 - RNA, 24 nt, Artificial Sequence
  Synthetic
acuguaagcaguuucuucugcuug

SEQ ID NO: 614002 - RNA, 18 nt, Artificial Sequence
  Synthetic
aaaguggaaaagugcuug

SEQ ID NO: 614003 - RNA, 19 nt, Artificial Sequence
  Synthetic
caaaguggaaaagugcuug

SEQ ID NO: 614004 - RNA, 20 nt, Artificial Sequence
  Synthetic
acaaaguggaaaagugcuug

SEQ ID NO: 614005 - RNA, 21 nt, Artificial Sequence
  Synthetic
aacaaaguggaaaagugcuug

SEQ ID NO: 614006 - RNA, 22 nt, Artificial Sequence
  Synthetic
uaacaaaguggaaaagugcuug

SEQ ID NO: 614007 - RNA, 23 nt, Artificial Sequence
  Synthetic
auaacaaaguggaaaagugcuug

SEQ ID NO: 614008 - RNA, 24 nt, Artificial Sequence
  Synthetic
aauaacaaaguggaaaagugcuug

SEQ ID NO: 614009 - RNA, 18 nt, Artificial Sequence
  Synthetic
acaaagaauaauugcuug

SEQ ID NO: 614010 - RNA, 19 nt, Artificial Sequence
  Synthetic
aacaaagaauaauugcuug

SEQ ID NO: 614011 - RNA, 20 nt, Artificial Sequence
  Synthetic
aaacaaagaauaauugcuug

SEQ ID NO: 614012 - RNA, 21 nt, Artificial Sequence
  Synthetic
aaaacaaagaauaauugcuug

SEQ ID NO: 614013 - RNA, 22 nt, Artificial Sequence
  Synthetic
uaaaacaaagaauaauugcuug

SEQ ID NO: 614014 - RNA, 23 nt, Artificial Sequence
  Synthetic
guaaaacaaagaauaauugcuug

SEQ ID NO: 614015 - RNA, 24 nt, Artificial Sequence
  Synthetic
uguaaaacaaagaauaauugcuug

SEQ ID NO: 614016 - RNA, 18 nt, Artificial Sequence
  Synthetic
uuugaucuuauuugcuug

SEQ ID NO: 614017 - RNA, 19 nt, Artificial Sequence
  Synthetic
cuuugaucuuauuugcuug

SEQ ID NO: 614018 - RNA, 20 nt, Artificial Sequence
  Synthetic
ucuuugaucuuauuugcuug

SEQ ID NO: 614019 - RNA, 21 nt, Artificial Sequence
  Synthetic
aucuuugaucuuauuugcuug

SEQ ID NO: 614020 - RNA, 22 nt, Artificial Sequence
  Synthetic
aaucuuugaucuuauuugcuug

SEQ ID NO: 614021 - RNA, 23 nt, Artificial Sequence
  Synthetic
aaaucuuugaucuuauuugcuug

SEQ ID NO: 614022 - RNA, 24 nt, Artificial Sequence
  Synthetic
gaaaucuuugaucuuauuugcuug

SEQ ID NO: 614023 - RNA, 18 nt, Artificial Sequence
  Synthetic
auuuugugccaaaucuug

SEQ ID NO: 614024 - RNA, 19 nt, Artificial Sequence
  Synthetic
gauuuugugccaaaucuug

SEQ ID NO: 614025 - RNA, 20 nt, Artificial Sequence
  Synthetic
cgauuuugugccaaaucuug

SEQ ID NO: 614026 - RNA, 21 nt, Artificial Sequence
  Synthetic
ccgauuuugugccaaaucuug

SEQ ID NO: 614027 - RNA, 22 nt, Artificial Sequence
  Synthetic
accgauuuugugccaaaucuug

SEQ ID NO: 614028 - RNA, 23 nt, Artificial Sequence
  Synthetic
uaccgauuuugugccaaaucuug

SEQ ID NO: 614029 - RNA, 24 nt, Artificial Sequence
  Synthetic
guaccgauuuugugccaaaucuug

SEQ ID NO: 614030 - RNA, 18 nt, Artificial Sequence
  Synthetic
uucauucagagaaucuug

SEQ ID NO: 614031 - RNA, 19 nt, Artificial Sequence
  Synthetic
auucauucagagaaucuug

SEQ ID NO: 614032 - RNA, 20 nt, Artificial Sequence
  Synthetic
uauucauucagagaaucuug

SEQ ID NO: 614033 - RNA, 21 nt, Artificial Sequence
  Synthetic
uuauucauucagagaaucuug

SEQ ID NO: 614034 - RNA, 22 nt, Artificial Sequence
  Synthetic
uuuauucauucagagaaucuug

SEQ ID NO: 614035 - RNA, 23 nt, Artificial Sequence
  Synthetic
auuuauucauucagagaaucuug

SEQ ID NO: 614036 - RNA, 24 nt, Artificial Sequence
  Synthetic
cauuuauucauucagagaaucuug

SEQ ID NO: 614037 - RNA, 18 nt, Artificial Sequence
  Synthetic
uaccaauauugaaucuug

SEQ ID NO: 614038 - RNA, 19 nt, Artificial Sequence
  Synthetic
cuaccaauauugaaucuug

SEQ ID NO: 614039 - RNA, 20 nt, Artificial Sequence
  Synthetic
ucuaccaauauugaaucuug

SEQ ID NO: 614040 - RNA, 21 nt, Artificial Sequence
  Synthetic
aucuaccaauauugaaucuug

SEQ ID NO: 614041 - RNA, 22 nt, Artificial Sequence
  Synthetic
aaucuaccaauauugaaucuug

SEQ ID NO: 614042 - RNA, 23 nt, Artificial Sequence
  Synthetic
caaucuaccaauauugaaucuug

SEQ ID NO: 614043 - RNA, 24 nt, Artificial Sequence
  Synthetic
gcaaucuaccaauauugaaucuug

SEQ ID NO: 614044 - RNA, 18 nt, Artificial Sequence
  Synthetic
cuauacaaguuaaucuug

SEQ ID NO: 614045 - RNA, 19 nt, Artificial Sequence
  Synthetic
acuauacaaguuaaucuug

SEQ ID NO: 614046 - RNA, 20 nt, Artificial Sequence
  Synthetic
aacuauacaaguuaaucuug

SEQ ID NO: 614047 - RNA, 21 nt, Artificial Sequence
  Synthetic
aaacuauacaaguuaaucuug

SEQ ID NO: 614048 - RNA, 22 nt, Artificial Sequence
  Synthetic
uaaacuauacaaguuaaucuug

SEQ ID NO: 614049 - RNA, 23 nt, Artificial Sequence
  Synthetic
uuaaacuauacaaguuaaucuug

SEQ ID NO: 614050 - RNA, 24 nt, Artificial Sequence
  Synthetic
auuaaacuauacaaguuaaucuug

SEQ ID NO: 614051 - RNA, 18 nt, Artificial Sequence
  Synthetic
augaagcuuuuaaucuug

SEQ ID NO: 614052 - RNA, 19 nt, Artificial Sequence
  Synthetic
caugaagcuuuuaaucuug

SEQ ID NO: 614053 - RNA, 20 nt, Artificial Sequence
  Synthetic
ucaugaagcuuuuaaucuug

SEQ ID NO: 614054 - RNA, 21 nt, Artificial Sequence
  Synthetic
cucaugaagcuuuuaaucuug

SEQ ID NO: 614055 - RNA, 22 nt, Artificial Sequence
  Synthetic
ccucaugaagcuuuuaaucuug

SEQ ID NO: 614056 - RNA, 23 nt, Artificial Sequence
  Synthetic
cccucaugaagcuuuuaaucuug

SEQ ID NO: 614057 - RNA, 24 nt, Artificial Sequence
  Synthetic
gcccucaugaagcuuuuaaucuug

SEQ ID NO: 614058 - RNA, 18 nt, Artificial Sequence
  Synthetic
gucaacuauuagaucuug

SEQ ID NO: 614059 - RNA, 19 nt, Artificial Sequence
  Synthetic
ugucaacuauuagaucuug

SEQ ID NO: 614060 - RNA, 20 nt, Artificial Sequence
  Synthetic
cugucaacuauuagaucuug

SEQ ID NO: 614061 - RNA, 21 nt, Artificial Sequence
  Synthetic
ucugucaacuauuagaucuug

SEQ ID NO: 614062 - RNA, 22 nt, Artificial Sequence
  Synthetic
aucugucaacuauuagaucuug

SEQ ID NO: 614063 - RNA, 23 nt, Artificial Sequence
  Synthetic
gaucugucaacuauuagaucuug

SEQ ID NO: 614064 - RNA, 24 nt, Artificial Sequence
  Synthetic
agaucugucaacuauuagaucuug

SEQ ID NO: 614065 - RNA, 18 nt, Artificial Sequence
  Synthetic
auucaauuuaggaucuug

SEQ ID NO: 614066 - RNA, 19 nt, Artificial Sequence
  Synthetic
aauucaauuuaggaucuug

SEQ ID NO: 614067 - RNA, 20 nt, Artificial Sequence
  Synthetic
gaauucaauuuaggaucuug

SEQ ID NO: 614068 - RNA, 21 nt, Artificial Sequence
  Synthetic
cgaauucaauuuaggaucuug

SEQ ID NO: 614069 - RNA, 22 nt, Artificial Sequence
  Synthetic
acgaauucaauuuaggaucuug

SEQ ID NO: 614070 - RNA, 23 nt, Artificial Sequence
  Synthetic
aacgaauucaauuuaggaucuug

SEQ ID NO: 614071 - RNA, 24 nt, Artificial Sequence
  Synthetic
aaacgaauucaauuuaggaucuug

SEQ ID NO: 614072 - RNA, 18 nt, Artificial Sequence
  Synthetic
agaacuaaaaugaucuug

SEQ ID NO: 614073 - RNA, 19 nt, Artificial Sequence
  Synthetic
aagaacuaaaaugaucuug

SEQ ID NO: 614074 - RNA, 20 nt, Artificial Sequence
  Synthetic
aaagaacuaaaaugaucuug

SEQ ID NO: 614075 - RNA, 21 nt, Artificial Sequence
  Synthetic
caaagaacuaaaaugaucuug

SEQ ID NO: 614076 - RNA, 22 nt, Artificial Sequence
  Synthetic
acaaagaacuaaaaugaucuug

SEQ ID NO: 614077 - RNA, 23 nt, Artificial Sequence
  Synthetic
uacaaagaacuaaaaugaucuug

SEQ ID NO: 614078 - RNA, 24 nt, Artificial Sequence
  Synthetic
uuacaaagaacuaaaaugaucuug

SEQ ID NO: 614079 - RNA, 18 nt, Artificial Sequence
  Synthetic
uuucucgaggugaucuug

SEQ ID NO: 614080 - RNA, 19 nt, Artificial Sequence
  Synthetic
cuuucucgaggugaucuug

SEQ ID NO: 614081 - RNA, 20 nt, Artificial Sequence
  Synthetic
acuuucucgaggugaucuug

SEQ ID NO: 614082 - RNA, 21 nt, Artificial Sequence
  Synthetic
gacuuucucgaggugaucuug

SEQ ID NO: 614083 - RNA, 22 nt, Artificial Sequence
  Synthetic
ugacuuucucgaggugaucuug

SEQ ID NO: 614084 - RNA, 23 nt, Artificial Sequence
  Synthetic
uugacuuucucgaggugaucuug

SEQ ID NO: 614085 - RNA, 24 nt, Artificial Sequence
  Synthetic
cuugacuuucucgaggugaucuug

SEQ ID NO: 614086 - RNA, 18 nt, Artificial Sequence
  Synthetic
ccuuuucuaccuaucuug

SEQ ID NO: 614087 - RNA, 19 nt, Artificial Sequence
  Synthetic
accuuuucuaccuaucuug

SEQ ID NO: 614088 - RNA, 20 nt, Artificial Sequence
  Synthetic
uaccuuuucuaccuaucuug

SEQ ID NO: 614089 - RNA, 21 nt, Artificial Sequence
  Synthetic
auaccuuuucuaccuaucuug

SEQ ID NO: 614090 - RNA, 22 nt, Artificial Sequence
  Synthetic
aauaccuuuucuaccuaucuug

SEQ ID NO: 614091 - RNA, 23 nt, Artificial Sequence
  Synthetic
gaauaccuuuucuaccuaucuug

SEQ ID NO: 614092 - RNA, 24 nt, Artificial Sequence
  Synthetic
agaauaccuuuucuaccuaucuug

SEQ ID NO: 614093 - RNA, 18 nt, Artificial Sequence
  Synthetic
caacaaccacguaucuug

SEQ ID NO: 614094 - RNA, 19 nt, Artificial Sequence
  Synthetic
acaacaaccacguaucuug

SEQ ID NO: 614095 - RNA, 20 nt, Artificial Sequence
  Synthetic
aacaacaaccacguaucuug

SEQ ID NO: 614096 - RNA, 21 nt, Artificial Sequence
  Synthetic
uaacaacaaccacguaucuug

SEQ ID NO: 614097 - RNA, 22 nt, Artificial Sequence
  Synthetic
uuaacaacaaccacguaucuug

SEQ ID NO: 614098 - RNA, 23 nt, Artificial Sequence
  Synthetic
auuaacaacaaccacguaucuug

SEQ ID NO: 614099 - RNA, 24 nt, Artificial Sequence
  Synthetic
uauuaacaacaaccacguaucuug

SEQ ID NO: 614100 - RNA, 18 nt, Artificial Sequence
  Synthetic
cauacgagguuuaucuug

SEQ ID NO: 614101 - RNA, 19 nt, Artificial Sequence
  Synthetic
ucauacgagguuuaucuug

SEQ ID NO: 614102 - RNA, 20 nt, Artificial Sequence
  Synthetic
aucauacgagguuuaucuug

SEQ ID NO: 614103 - RNA, 21 nt, Artificial Sequence
  Synthetic
uaucauacgagguuuaucuug

SEQ ID NO: 614104 - RNA, 22 nt, Artificial Sequence
  Synthetic
auaucauacgagguuuaucuug

SEQ ID NO: 614105 - RNA, 23 nt, Artificial Sequence
  Synthetic
aauaucauacgagguuuaucuug

SEQ ID NO: 614106 - RNA, 24 nt, Artificial Sequence
  Synthetic
caauaucauacgagguuuaucuug

SEQ ID NO: 614107 - RNA, 18 nt, Artificial Sequence
  Synthetic
uugggggaaaaccucuug

SEQ ID NO: 614108 - RNA, 19 nt, Artificial Sequence
  Synthetic
guugggggaaaaccucuug

SEQ ID NO: 614109 - RNA, 20 nt, Artificial Sequence
  Synthetic
gguugggggaaaaccucuug

SEQ ID NO: 614110 - RNA, 21 nt, Artificial Sequence
  Synthetic
ugguugggggaaaaccucuug

SEQ ID NO: 614111 - RNA, 22 nt, Artificial Sequence
  Synthetic
gugguugggggaaaaccucuug

SEQ ID NO: 614112 - RNA, 23 nt, Artificial Sequence
  Synthetic
ggugguugggggaaaaccucuug

SEQ ID NO: 614113 - RNA, 24 nt, Artificial Sequence
  Synthetic
uggugguugggggaaaaccucuug

SEQ ID NO: 614114 - RNA, 18 nt, Artificial Sequence
  Synthetic
acauuuguguaccucuug

SEQ ID NO: 614115 - RNA, 19 nt, Artificial Sequence
  Synthetic
uacauuuguguaccucuug

SEQ ID NO: 614116 - RNA, 20 nt, Artificial Sequence
  Synthetic
auacauuuguguaccucuug

SEQ ID NO: 614117 - RNA, 21 nt, Artificial Sequence
  Synthetic
uauacauuuguguaccucuug

SEQ ID NO: 614118 - RNA, 22 nt, Artificial Sequence
  Synthetic
guauacauuuguguaccucuug

SEQ ID NO: 614119 - RNA, 23 nt, Artificial Sequence
  Synthetic
aguauacauuuguguaccucuug

SEQ ID NO: 614120 - RNA, 24 nt, Artificial Sequence
  Synthetic
aaguauacauuuguguaccucuug

SEQ ID NO: 614121 - RNA, 18 nt, Artificial Sequence
  Synthetic
uguaaucucagccucuug

SEQ ID NO: 614122 - RNA, 19 nt, Artificial Sequence
  Synthetic
cuguaaucucagccucuug

SEQ ID NO: 614123 - RNA, 20 nt, Artificial Sequence
  Synthetic
acuguaaucucagccucuug

SEQ ID NO: 614124 - RNA, 21 nt, Artificial Sequence
  Synthetic
gacuguaaucucagccucuug

SEQ ID NO: 614125 - RNA, 22 nt, Artificial Sequence
  Synthetic
ugacuguaaucucagccucuug

SEQ ID NO: 614126 - RNA, 23 nt, Artificial Sequence
  Synthetic
gugacuguaaucucagccucuug

SEQ ID NO: 614127 - RNA, 24 nt, Artificial Sequence
  Synthetic
ggugacuguaaucucagccucuug

SEQ ID NO: 614128 - RNA, 18 nt, Artificial Sequence
  Synthetic
acagacuguugccucuug

SEQ ID NO: 614129 - RNA, 19 nt, Artificial Sequence
  Synthetic
cacagacuguugccucuug

SEQ ID NO: 614130 - RNA, 20 nt, Artificial Sequence
  Synthetic
ccacagacuguugccucuug

SEQ ID NO: 614131 - RNA, 21 nt, Artificial Sequence
  Synthetic
accacagacuguugccucuug

SEQ ID NO: 614132 - RNA, 22 nt, Artificial Sequence
  Synthetic
aaccacagacuguugccucuug

SEQ ID NO: 614133 - RNA, 23 nt, Artificial Sequence
  Synthetic
gaaccacagacuguugccucuug

SEQ ID NO: 614134 - RNA, 24 nt, Artificial Sequence
  Synthetic
ggaaccacagacuguugccucuug

SEQ ID NO: 614135 - RNA, 18 nt, Artificial Sequence
  Synthetic
aauuuauaccugcucuug

SEQ ID NO: 614136 - RNA, 19 nt, Artificial Sequence
  Synthetic
uaauuuauaccugcucuug

SEQ ID NO: 614137 - RNA, 20 nt, Artificial Sequence
  Synthetic
uuaauuuauaccugcucuug

SEQ ID NO: 614138 - RNA, 21 nt, Artificial Sequence
  Synthetic
uuuaauuuauaccugcucuug

SEQ ID NO: 614139 - RNA, 22 nt, Artificial Sequence
  Synthetic
uuuuaauuuauaccugcucuug

SEQ ID NO: 614140 - RNA, 23 nt, Artificial Sequence
  Synthetic
uuuuuaauuuauaccugcucuug

SEQ ID NO: 614141 - RNA, 24 nt, Artificial Sequence
  Synthetic
guuuuuaauuuauaccugcucuug

SEQ ID NO: 614142 - RNA, 18 nt, Artificial Sequence
  Synthetic
ugcucuguaccucucuug

SEQ ID NO: 614143 - RNA, 19 nt, Artificial Sequence
  Synthetic
cugcucuguaccucucuug

SEQ ID NO: 614144 - RNA, 20 nt, Artificial Sequence
  Synthetic
ucugcucuguaccucucuug

SEQ ID NO: 614145 - RNA, 21 nt, Artificial Sequence
  Synthetic
uucugcucuguaccucucuug

SEQ ID NO: 614146 - RNA, 22 nt, Artificial Sequence
  Synthetic
cuucugcucuguaccucucuug

SEQ ID NO: 614147 - RNA, 23 nt, Artificial Sequence
  Synthetic
ucuucugcucuguaccucucuug

SEQ ID NO: 614148 - RNA, 24 nt, Artificial Sequence
  Synthetic
aucuucugcucuguaccucucuug

SEQ ID NO: 614149 - RNA, 18 nt, Artificial Sequence
  Synthetic
ugcugacuagcucucuug

SEQ ID NO: 614150 - RNA, 19 nt, Artificial Sequence
  Synthetic
cugcugacuagcucucuug

SEQ ID NO: 614151 - RNA, 20 nt, Artificial Sequence
  Synthetic
ucugcugacuagcucucuug

SEQ ID NO: 614152 - RNA, 21 nt, Artificial Sequence
  Synthetic
gucugcugacuagcucucuug

SEQ ID NO: 614153 - RNA, 22 nt, Artificial Sequence
  Synthetic
ugucugcugacuagcucucuug

SEQ ID NO: 614154 - RNA, 23 nt, Artificial Sequence
  Synthetic
cugucugcugacuagcucucuug

SEQ ID NO: 614155 - RNA, 24 nt, Artificial Sequence
  Synthetic
acugucugcugacuagcucucuug

SEQ ID NO: 614156 - RNA, 18 nt, Artificial Sequence
  Synthetic
ccauacuuuucucucuug

SEQ ID NO: 614157 - RNA, 19 nt, Artificial Sequence
  Synthetic
gccauacuuuucucucuug

SEQ ID NO: 614158 - RNA, 20 nt, Artificial Sequence
  Synthetic
ugccauacuuuucucucuug

SEQ ID NO: 614159 - RNA, 21 nt, Artificial Sequence
  Synthetic
cugccauacuuuucucucuug

SEQ ID NO: 614160 - RNA, 22 nt, Artificial Sequence
  Synthetic
ccugccauacuuuucucucuug

SEQ ID NO: 614161 - RNA, 23 nt, Artificial Sequence
  Synthetic
cccugccauacuuuucucucuug

SEQ ID NO: 614162 - RNA, 24 nt, Artificial Sequence
  Synthetic
gcccugccauacuuuucucucuug

SEQ ID NO: 614163 - RNA, 18 nt, Artificial Sequence
  Synthetic
gaucacugucuucucuug

SEQ ID NO: 614164 - RNA, 19 nt, Artificial Sequence
  Synthetic
agaucacugucuucucuug

SEQ ID NO: 614165 - RNA, 20 nt, Artificial Sequence
  Synthetic
uagaucacugucuucucuug

SEQ ID NO: 614166 - RNA, 21 nt, Artificial Sequence
  Synthetic
uuagaucacugucuucucuug

SEQ ID NO: 614167 - RNA, 22 nt, Artificial Sequence
  Synthetic
auuagaucacugucuucucuug

SEQ ID NO: 614168 - RNA, 23 nt, Artificial Sequence
  Synthetic
aauuagaucacugucuucucuug

SEQ ID NO: 614169 - RNA, 24 nt, Artificial Sequence
  Synthetic
uaauuagaucacugucuucucuug

SEQ ID NO: 614170 - RNA, 18 nt, Artificial Sequence
  Synthetic
uucagcauuuuucucuug

SEQ ID NO: 614171 - RNA, 19 nt, Artificial Sequence
  Synthetic
cuucagcauuuuucucuug

SEQ ID NO: 614172 - RNA, 20 nt, Artificial Sequence
  Synthetic
acuucagcauuuuucucuug

SEQ ID NO: 614173 - RNA, 21 nt, Artificial Sequence
  Synthetic
uacuucagcauuuuucucuug

SEQ ID NO: 614174 - RNA, 22 nt, Artificial Sequence
  Synthetic
auacuucagcauuuuucucuug

SEQ ID NO: 614175 - RNA, 23 nt, Artificial Sequence
  Synthetic
aauacuucagcauuuuucucuug

SEQ ID NO: 614176 - RNA, 24 nt, Artificial Sequence
  Synthetic
aaauacuucagcauuuuucucuug

SEQ ID NO: 614177 - RNA, 18 nt, Artificial Sequence
  Synthetic
acaggaaaaaaagucuug

SEQ ID NO: 614178 - RNA, 19 nt, Artificial Sequence
  Synthetic
cacaggaaaaaaagucuug

SEQ ID NO: 614179 - RNA, 20 nt, Artificial Sequence
  Synthetic
ccacaggaaaaaaagucuug

SEQ ID NO: 614180 - RNA, 21 nt, Artificial Sequence
  Synthetic
accacaggaaaaaaagucuug

SEQ ID NO: 614181 - RNA, 22 nt, Artificial Sequence
  Synthetic
gaccacaggaaaaaaagucuug

SEQ ID NO: 614182 - RNA, 23 nt, Artificial Sequence
  Synthetic
agaccacaggaaaaaaagucuug

SEQ ID NO: 614183 - RNA, 24 nt, Artificial Sequence
  Synthetic
gagaccacaggaaaaaaagucuug

SEQ ID NO: 614184 - RNA, 18 nt, Artificial Sequence
  Synthetic
auagccaaaacagucuug

SEQ ID NO: 614185 - RNA, 19 nt, Artificial Sequence
  Synthetic
aauagccaaaacagucuug

SEQ ID NO: 614186 - RNA, 20 nt, Artificial Sequence
  Synthetic
aaauagccaaaacagucuug

SEQ ID NO: 614187 - RNA, 21 nt, Artificial Sequence
  Synthetic
caaauagccaaaacagucuug

SEQ ID NO: 614188 - RNA, 22 nt, Artificial Sequence
  Synthetic
ccaaauagccaaaacagucuug

SEQ ID NO: 614189 - RNA, 23 nt, Artificial Sequence
  Synthetic
uccaaauagccaaaacagucuug

SEQ ID NO: 614190 - RNA, 24 nt, Artificial Sequence
  Synthetic
cuccaaauagccaaaacagucuug

SEQ ID NO: 614191 - RNA, 18 nt, Artificial Sequence
  Synthetic
cugagggauuccgucuug

SEQ ID NO: 614192 - RNA, 19 nt, Artificial Sequence
  Synthetic
acugagggauuccgucuug

SEQ ID NO: 614193 - RNA, 20 nt, Artificial Sequence
  Synthetic
gacugagggauuccgucuug

SEQ ID NO: 614194 - RNA, 21 nt, Artificial Sequence
  Synthetic
agacugagggauuccgucuug

SEQ ID NO: 614195 - RNA, 22 nt, Artificial Sequence
  Synthetic
uagacugagggauuccgucuug

SEQ ID NO: 614196 - RNA, 23 nt, Artificial Sequence
  Synthetic
auagacugagggauuccgucuug

SEQ ID NO: 614197 - RNA, 24 nt, Artificial Sequence
  Synthetic
cauagacugagggauuccgucuug

SEQ ID NO: 614198 - RNA, 18 nt, Artificial Sequence
  Synthetic
gauagacucuaugucuug

SEQ ID NO: 614199 - RNA, 19 nt, Artificial Sequence
  Synthetic
ugauagacucuaugucuug

SEQ ID NO: 614200 - RNA, 20 nt, Artificial Sequence
  Synthetic
gugauagacucuaugucuug

SEQ ID NO: 614201 - RNA, 21 nt, Artificial Sequence
  Synthetic
ugugauagacucuaugucuug

SEQ ID NO: 614202 - RNA, 22 nt, Artificial Sequence
  Synthetic
cugugauagacucuaugucuug

SEQ ID NO: 614203 - RNA, 23 nt, Artificial Sequence
  Synthetic
ucugugauagacucuaugucuug

SEQ ID NO: 614204 - RNA, 24 nt, Artificial Sequence
  Synthetic
cucugugauagacucuaugucuug

SEQ ID NO: 614205 - RNA, 18 nt, Artificial Sequence
  Synthetic
ccuaaaguuugugucuug

SEQ ID NO: 614206 - RNA, 19 nt, Artificial Sequence
  Synthetic
cccuaaaguuugugucuug

SEQ ID NO: 614207 - RNA, 20 nt, Artificial Sequence
  Synthetic
ucccuaaaguuugugucuug

SEQ ID NO: 614208 - RNA, 21 nt, Artificial Sequence
  Synthetic
uucccuaaaguuugugucuug

SEQ ID NO: 614209 - RNA, 22 nt, Artificial Sequence
  Synthetic
uuucccuaaaguuugugucuug

SEQ ID NO: 614210 - RNA, 23 nt, Artificial Sequence
  Synthetic
uuuucccuaaaguuugugucuug

SEQ ID NO: 614211 - RNA, 24 nt, Artificial Sequence
  Synthetic
auuuucccuaaaguuugugucuug

SEQ ID NO: 614212 - RNA, 18 nt, Artificial Sequence
  Synthetic
gcuccuuaguuugucuug

SEQ ID NO: 614213 - RNA, 19 nt, Artificial Sequence
  Synthetic
ugcuccuuaguuugucuug

SEQ ID NO: 614214 - RNA, 20 nt, Artificial Sequence
  Synthetic
uugcuccuuaguuugucuug

SEQ ID NO: 614215 - RNA, 21 nt, Artificial Sequence
  Synthetic
auugcuccuuaguuugucuug

SEQ ID NO: 614216 - RNA, 22 nt, Artificial Sequence
  Synthetic
uauugcuccuuaguuugucuug

SEQ ID NO: 614217 - RNA, 23 nt, Artificial Sequence
  Synthetic
uuauugcuccuuaguuugucuug

SEQ ID NO: 614218 - RNA, 24 nt, Artificial Sequence
  Synthetic
uuuauugcuccuuaguuugucuug

SEQ ID NO: 614219 - RNA, 18 nt, Artificial Sequence
  Synthetic
gcaaaggaaaaauucuug

SEQ ID NO: 614220 - RNA, 19 nt, Artificial Sequence
  Synthetic
ugcaaaggaaaaauucuug

SEQ ID NO: 614221 - RNA, 20 nt, Artificial Sequence
  Synthetic
augcaaaggaaaaauucuug

SEQ ID NO: 614222 - RNA, 21 nt, Artificial Sequence
  Synthetic
aaugcaaaggaaaaauucuug

SEQ ID NO: 614223 - RNA, 22 nt, Artificial Sequence
  Synthetic
gaaugcaaaggaaaaauucuug

SEQ ID NO: 614224 - RNA, 23 nt, Artificial Sequence
  Synthetic
ugaaugcaaaggaaaaauucuug

SEQ ID NO: 614225 - RNA, 24 nt, Artificial Sequence
  Synthetic
gugaaugcaaaggaaaaauucuug

SEQ ID NO: 614226 - RNA, 18 nt, Artificial Sequence
  Synthetic
uuaguauugggauucuug

SEQ ID NO: 614227 - RNA, 19 nt, Artificial Sequence
  Synthetic
guuaguauugggauucuug

SEQ ID NO: 614228 - RNA, 20 nt, Artificial Sequence
  Synthetic
gguuaguauugggauucuug

SEQ ID NO: 614229 - RNA, 21 nt, Artificial Sequence
  Synthetic
agguuaguauugggauucuug

SEQ ID NO: 614230 - RNA, 22 nt, Artificial Sequence
  Synthetic
aagguuaguauugggauucuug

SEQ ID NO: 614231 - RNA, 23 nt, Artificial Sequence
  Synthetic
gaagguuaguauugggauucuug

SEQ ID NO: 614232 - RNA, 24 nt, Artificial Sequence
  Synthetic
agaagguuaguauugggauucuug

SEQ ID NO: 614233 - RNA, 18 nt, Artificial Sequence
  Synthetic
ccauuuuacugauucuug

SEQ ID NO: 614234 - RNA, 19 nt, Artificial Sequence
  Synthetic
cccauuuuacugauucuug

SEQ ID NO: 614235 - RNA, 20 nt, Artificial Sequence
  Synthetic
ucccauuuuacugauucuug

SEQ ID NO: 614236 - RNA, 21 nt, Artificial Sequence
  Synthetic
gucccauuuuacugauucuug

SEQ ID NO: 614237 - RNA, 22 nt, Artificial Sequence
  Synthetic
ugucccauuuuacugauucuug

SEQ ID NO: 614238 - RNA, 23 nt, Artificial Sequence
  Synthetic
gugucccauuuuacugauucuug

SEQ ID NO: 614239 - RNA, 24 nt, Artificial Sequence
  Synthetic
ugugucccauuuuacugauucuug

SEQ ID NO: 614240 - RNA, 18 nt, Artificial Sequence
  Synthetic
gaaggaaagugauucuug

SEQ ID NO: 614241 - RNA, 19 nt, Artificial Sequence
  Synthetic
agaaggaaagugauucuug

SEQ ID NO: 614242 - RNA, 20 nt, Artificial Sequence
  Synthetic
cagaaggaaagugauucuug

SEQ ID NO: 614243 - RNA, 21 nt, Artificial Sequence
  Synthetic
acagaaggaaagugauucuug

SEQ ID NO: 614244 - RNA, 22 nt, Artificial Sequence
  Synthetic
cacagaaggaaagugauucuug

SEQ ID NO: 614245 - RNA, 23 nt, Artificial Sequence
  Synthetic
ccacagaaggaaagugauucuug

SEQ ID NO: 614246 - RNA, 24 nt, Artificial Sequence
  Synthetic
accacagaaggaaagugauucuug

SEQ ID NO: 614247 - RNA, 18 nt, Artificial Sequence
  Synthetic
aauuaaaaaaacuucuug

SEQ ID NO: 614248 - RNA, 19 nt, Artificial Sequence
  Synthetic
aaauuaaaaaaacuucuug

SEQ ID NO: 614249 - RNA, 20 nt, Artificial Sequence
  Synthetic
uaaauuaaaaaaacuucuug

SEQ ID NO: 614250 - RNA, 21 nt, Artificial Sequence
  Synthetic
auaaauuaaaaaaacuucuug

SEQ ID NO: 614251 - RNA, 22 nt, Artificial Sequence
  Synthetic
aauaaauuaaaaaaacuucuug

SEQ ID NO: 614252 - RNA, 23 nt, Artificial Sequence
  Synthetic
caauaaauuaaaaaaacuucuug

SEQ ID NO: 614253 - RNA, 24 nt, Artificial Sequence
  Synthetic
acaauaaauuaaaaaaacuucuug

SEQ ID NO: 614254 - RNA, 18 nt, Artificial Sequence
  Synthetic
cucccaaaaaucuucuug

SEQ ID NO: 614255 - RNA, 19 nt, Artificial Sequence
  Synthetic
ccucccaaaaaucuucuug

SEQ ID NO: 614256 - RNA, 20 nt, Artificial Sequence
  Synthetic
cccucccaaaaaucuucuug

SEQ ID NO: 614257 - RNA, 21 nt, Artificial Sequence
  Synthetic
ccccucccaaaaaucuucuug

SEQ ID NO: 614258 - RNA, 22 nt, Artificial Sequence
  Synthetic
cccccucccaaaaaucuucuug

SEQ ID NO: 614259 - RNA, 23 nt, Artificial Sequence
  Synthetic
ucccccucccaaaaaucuucuug

SEQ ID NO: 614260 - RNA, 24 nt, Artificial Sequence
  Synthetic
uucccccucccaaaaaucuucuug

SEQ ID NO: 614261 - RNA, 18 nt, Artificial Sequence
  Synthetic
aagucuaaucaguucuug

SEQ ID NO: 614262 - RNA, 19 nt, Artificial Sequence
  Synthetic
gaagucuaaucaguucuug

SEQ ID NO: 614263 - RNA, 20 nt, Artificial Sequence
  Synthetic
agaagucuaaucaguucuug

SEQ ID NO: 614264 - RNA, 21 nt, Artificial Sequence
  Synthetic
uagaagucuaaucaguucuug

SEQ ID NO: 614265 - RNA, 22 nt, Artificial Sequence
  Synthetic
cuagaagucuaaucaguucuug

SEQ ID NO: 614266 - RNA, 23 nt, Artificial Sequence
  Synthetic
gcuagaagucuaaucaguucuug

SEQ ID NO: 614267 - RNA, 24 nt, Artificial Sequence
  Synthetic
agcuagaagucuaaucaguucuug

SEQ ID NO: 614268 - RNA, 18 nt, Artificial Sequence
  Synthetic
ccgauaaguauguucuug

SEQ ID NO: 614269 - RNA, 19 nt, Artificial Sequence
  Synthetic
accgauaaguauguucuug

SEQ ID NO: 614270 - RNA, 20 nt, Artificial Sequence
  Synthetic
aaccgauaaguauguucuug

SEQ ID NO: 614271 - RNA, 21 nt, Artificial Sequence
  Synthetic
gaaccgauaaguauguucuug

SEQ ID NO: 614272 - RNA, 22 nt, Artificial Sequence
  Synthetic
ugaaccgauaaguauguucuug

SEQ ID NO: 614273 - RNA, 23 nt, Artificial Sequence
  Synthetic
gugaaccgauaaguauguucuug

SEQ ID NO: 614274 - RNA, 24 nt, Artificial Sequence
  Synthetic
agugaaccgauaaguauguucuug

SEQ ID NO: 614275 - RNA, 18 nt, Artificial Sequence
  Synthetic
cuggauaauuauuucuug

SEQ ID NO: 614276 - RNA, 19 nt, Artificial Sequence
  Synthetic
acuggauaauuauuucuug

SEQ ID NO: 614277 - RNA, 20 nt, Artificial Sequence
  Synthetic
gacuggauaauuauuucuug

SEQ ID NO: 614278 - RNA, 21 nt, Artificial Sequence
  Synthetic
ggacuggauaauuauuucuug

SEQ ID NO: 614279 - RNA, 22 nt, Artificial Sequence
  Synthetic
gggacuggauaauuauuucuug

SEQ ID NO: 614280 - RNA, 23 nt, Artificial Sequence
  Synthetic
ugggacuggauaauuauuucuug

SEQ ID NO: 614281 - RNA, 24 nt, Artificial Sequence
  Synthetic
uugggacuggauaauuauuucuug

SEQ ID NO: 614282 - RNA, 18 nt, Artificial Sequence
  Synthetic
aguaacuguacuuucuug

SEQ ID NO: 614283 - RNA, 19 nt, Artificial Sequence
  Synthetic
aaguaacuguacuuucuug

SEQ ID NO: 614284 - RNA, 20 nt, Artificial Sequence
  Synthetic
caaguaacuguacuuucuug

SEQ ID NO: 614285 - RNA, 21 nt, Artificial Sequence
  Synthetic
ccaaguaacuguacuuucuug

SEQ ID NO: 614286 - RNA, 22 nt, Artificial Sequence
  Synthetic
gccaaguaacuguacuuucuug

SEQ ID NO: 614287 - RNA, 23 nt, Artificial Sequence
  Synthetic
ggccaaguaacuguacuuucuug

SEQ ID NO: 614288 - RNA, 24 nt, Artificial Sequence
  Synthetic
gggccaaguaacuguacuuucuug

SEQ ID NO: 614289 - RNA, 18 nt, Artificial Sequence
  Synthetic
ugcaaugccucuuucuug

SEQ ID NO: 614290 - RNA, 19 nt, Artificial Sequence
  Synthetic
uugcaaugccucuuucuug

SEQ ID NO: 614291 - RNA, 20 nt, Artificial Sequence
  Synthetic
guugcaaugccucuuucuug

SEQ ID NO: 614292 - RNA, 21 nt, Artificial Sequence
  Synthetic
aguugcaaugccucuuucuug

SEQ ID NO: 614293 - RNA, 22 nt, Artificial Sequence
  Synthetic
gaguugcaaugccucuuucuug

SEQ ID NO: 614294 - RNA, 23 nt, Artificial Sequence
  Synthetic
agaguugcaaugccucuuucuug

SEQ ID NO: 614295 - RNA, 24 nt, Artificial Sequence
  Synthetic
gagaguugcaaugccucuuucuug

SEQ ID NO: 614296 - RNA, 18 nt, Artificial Sequence
  Synthetic
ugugccaucuguuucuug

SEQ ID NO: 614297 - RNA, 19 nt, Artificial Sequence
  Synthetic
augugccaucuguuucuug

SEQ ID NO: 614298 - RNA, 20 nt, Artificial Sequence
  Synthetic
aaugugccaucuguuucuug

SEQ ID NO: 614299 - RNA, 21 nt, Artificial Sequence
  Synthetic
gaaugugccaucuguuucuug

SEQ ID NO: 614300 - RNA, 22 nt, Artificial Sequence
  Synthetic
ugaaugugccaucuguuucuug

SEQ ID NO: 614301 - RNA, 23 nt, Artificial Sequence
  Synthetic
cugaaugugccaucuguuucuug

SEQ ID NO: 614302 - RNA, 24 nt, Artificial Sequence
  Synthetic
ucugaaugugccaucuguuucuug

SEQ ID NO: 614303 - RNA, 18 nt, Artificial Sequence
  Synthetic
cauaaaauuuguuucuug

SEQ ID NO: 614304 - RNA, 19 nt, Artificial Sequence
  Synthetic
acauaaaauuuguuucuug

SEQ ID NO: 614305 - RNA, 20 nt, Artificial Sequence
  Synthetic
uacauaaaauuuguuucuug

SEQ ID NO: 614306 - RNA, 21 nt, Artificial Sequence
  Synthetic
uuacauaaaauuuguuucuug

SEQ ID NO: 614307 - RNA, 22 nt, Artificial Sequence
  Synthetic
auuacauaaaauuuguuucuug

SEQ ID NO: 614308 - RNA, 23 nt, Artificial Sequence
  Synthetic
cauuacauaaaauuuguuucuug

SEQ ID NO: 614309 - RNA, 24 nt, Artificial Sequence
  Synthetic
ucauuacauaaaauuuguuucuug

SEQ ID NO: 614310 - RNA, 18 nt, Artificial Sequence
  Synthetic
ggcagcacauuuuucuug

SEQ ID NO: 614311 - RNA, 19 nt, Artificial Sequence
  Synthetic
cggcagcacauuuuucuug

SEQ ID NO: 614312 - RNA, 20 nt, Artificial Sequence
  Synthetic
acggcagcacauuuuucuug

SEQ ID NO: 614313 - RNA, 21 nt, Artificial Sequence
  Synthetic
aacggcagcacauuuuucuug

SEQ ID NO: 614314 - RNA, 22 nt, Artificial Sequence
  Synthetic
aaacggcagcacauuuuucuug

SEQ ID NO: 614315 - RNA, 23 nt, Artificial Sequence
  Synthetic
aaaacggcagcacauuuuucuug

SEQ ID NO: 614316 - RNA, 24 nt, Artificial Sequence
  Synthetic
uaaaacggcagcacauuuuucuug

SEQ ID NO: 614317 - RNA, 18 nt, Artificial Sequence
  Synthetic
auuaaacuuuuuuucuug

SEQ ID NO: 614318 - RNA, 19 nt, Artificial Sequence
  Synthetic
aauuaaacuuuuuuucuug

SEQ ID NO: 614319 - RNA, 20 nt, Artificial Sequence
  Synthetic
caauuaaacuuuuuuucuug

SEQ ID NO: 614320 - RNA, 21 nt, Artificial Sequence
  Synthetic
ccaauuaaacuuuuuuucuug

SEQ ID NO: 614321 - RNA, 22 nt, Artificial Sequence
  Synthetic
gccaauuaaacuuuuuuucuug

SEQ ID NO: 614322 - RNA, 23 nt, Artificial Sequence
  Synthetic
agccaauuaaacuuuuuuucuug

SEQ ID NO: 614323 - RNA, 24 nt, Artificial Sequence
  Synthetic
cagccaauuaaacuuuuuuucuug

SEQ ID NO: 614324 - RNA, 18 nt, Artificial Sequence
  Synthetic
auaggggccaaaaaguug

SEQ ID NO: 614325 - RNA, 19 nt, Artificial Sequence
  Synthetic
gauaggggccaaaaaguug

SEQ ID NO: 614326 - RNA, 20 nt, Artificial Sequence
  Synthetic
ggauaggggccaaaaaguug

SEQ ID NO: 614327 - RNA, 21 nt, Artificial Sequence
  Synthetic
uggauaggggccaaaaaguug

SEQ ID NO: 614328 - RNA, 22 nt, Artificial Sequence
  Synthetic
auggauaggggccaaaaaguug

SEQ ID NO: 614329 - RNA, 23 nt, Artificial Sequence
  Synthetic
gauggauaggggccaaaaaguug

SEQ ID NO: 614330 - RNA, 24 nt, Artificial Sequence
  Synthetic
agauggauaggggccaaaaaguug

SEQ ID NO: 614331 - RNA, 18 nt, Artificial Sequence
  Synthetic
gagucaaaaagaaaguug

SEQ ID NO: 614332 - RNA, 19 nt, Artificial Sequence
  Synthetic
ggagucaaaaagaaaguug

SEQ ID NO: 614333 - RNA, 20 nt, Artificial Sequence
  Synthetic
gggagucaaaaagaaaguug

SEQ ID NO: 614334 - RNA, 21 nt, Artificial Sequence
  Synthetic
ggggagucaaaaagaaaguug

SEQ ID NO: 614335 - RNA, 22 nt, Artificial Sequence
  Synthetic
gggggagucaaaaagaaaguug

SEQ ID NO: 614336 - RNA, 23 nt, Artificial Sequence
  Synthetic
ggggggagucaaaaagaaaguug

SEQ ID NO: 614337 - RNA, 24 nt, Artificial Sequence
  Synthetic
gggggggagucaaaaagaaaguug

SEQ ID NO: 614338 - RNA, 18 nt, Artificial Sequence
  Synthetic
augaaaaagagaaaguug

SEQ ID NO: 614339 - RNA, 19 nt, Artificial Sequence
  Synthetic
gaugaaaaagagaaaguug

SEQ ID NO: 614340 - RNA, 20 nt, Artificial Sequence
  Synthetic
agaugaaaaagagaaaguug

SEQ ID NO: 614341 - RNA, 21 nt, Artificial Sequence
  Synthetic
gagaugaaaaagagaaaguug

SEQ ID NO: 614342 - RNA, 22 nt, Artificial Sequence
  Synthetic
ggagaugaaaaagagaaaguug

SEQ ID NO: 614343 - RNA, 23 nt, Artificial Sequence
  Synthetic
aggagaugaaaaagagaaaguug

SEQ ID NO: 614344 - RNA, 24 nt, Artificial Sequence
  Synthetic
uaggagaugaaaaagagaaaguug

SEQ ID NO: 614345 - RNA, 18 nt, Artificial Sequence
  Synthetic
uucgugagcauaaaguug

SEQ ID NO: 614346 - RNA, 19 nt, Artificial Sequence
  Synthetic
auucgugagcauaaaguug

SEQ ID NO: 614347 - RNA, 20 nt, Artificial Sequence
  Synthetic
cauucgugagcauaaaguug

SEQ ID NO: 614348 - RNA, 21 nt, Artificial Sequence
  Synthetic
acauucgugagcauaaaguug

SEQ ID NO: 614349 - RNA, 22 nt, Artificial Sequence
  Synthetic
cacauucgugagcauaaaguug

SEQ ID NO: 614350 - RNA, 23 nt, Artificial Sequence
  Synthetic
acacauucgugagcauaaaguug

SEQ ID NO: 614351 - RNA, 24 nt, Artificial Sequence
  Synthetic
aacacauucgugagcauaaaguug

SEQ ID NO: 614352 - RNA, 18 nt, Artificial Sequence
  Synthetic
aaucuauagaacaaguug

SEQ ID NO: 614353 - RNA, 19 nt, Artificial Sequence
  Synthetic
aaaucuauagaacaaguug

SEQ ID NO: 614354 - RNA, 20 nt, Artificial Sequence
  Synthetic
uaaaucuauagaacaaguug

SEQ ID NO: 614355 - RNA, 21 nt, Artificial Sequence
  Synthetic
uuaaaucuauagaacaaguug

SEQ ID NO: 614356 - RNA, 22 nt, Artificial Sequence
  Synthetic
auuaaaucuauagaacaaguug

SEQ ID NO: 614357 - RNA, 23 nt, Artificial Sequence
  Synthetic
cauuaaaucuauagaacaaguug

SEQ ID NO: 614358 - RNA, 24 nt, Artificial Sequence
  Synthetic
gcauuaaaucuauagaacaaguug

SEQ ID NO: 614359 - RNA, 18 nt, Artificial Sequence
  Synthetic
gaaaucuuaaagaaguug

SEQ ID NO: 614360 - RNA, 19 nt, Artificial Sequence
  Synthetic
agaaaucuuaaagaaguug

SEQ ID NO: 614361 - RNA, 20 nt, Artificial Sequence
  Synthetic
aagaaaucuuaaagaaguug

SEQ ID NO: 614362 - RNA, 21 nt, Artificial Sequence
  Synthetic
aaagaaaucuuaaagaaguug

SEQ ID NO: 614363 - RNA, 22 nt, Artificial Sequence
  Synthetic
aaaagaaaucuuaaagaaguug

SEQ ID NO: 614364 - RNA, 23 nt, Artificial Sequence
  Synthetic
uaaaagaaaucuuaaagaaguug

SEQ ID NO: 614365 - RNA, 24 nt, Artificial Sequence
  Synthetic
auaaaagaaaucuuaaagaaguug

SEQ ID NO: 614366 - RNA, 18 nt, Artificial Sequence
  Synthetic
gagauguguaagaaguug

SEQ ID NO: 614367 - RNA, 19 nt, Artificial Sequence
  Synthetic
ugagauguguaagaaguug

SEQ ID NO: 614368 - RNA, 20 nt, Artificial Sequence
  Synthetic
augagauguguaagaaguug

SEQ ID NO: 614369 - RNA, 21 nt, Artificial Sequence
  Synthetic
aaugagauguguaagaaguug

SEQ ID NO: 614370 - RNA, 22 nt, Artificial Sequence
  Synthetic
aaaugagauguguaagaaguug

SEQ ID NO: 614371 - RNA, 23 nt, Artificial Sequence
  Synthetic
gaaaugagauguguaagaaguug

SEQ ID NO: 614372 - RNA, 24 nt, Artificial Sequence
  Synthetic
agaaaugagauguguaagaaguug

SEQ ID NO: 614373 - RNA, 18 nt, Artificial Sequence
  Synthetic
cauaaaagacagaaguug

SEQ ID NO: 614374 - RNA, 19 nt, Artificial Sequence
  Synthetic
acauaaaagacagaaguug

SEQ ID NO: 614375 - RNA, 20 nt, Artificial Sequence
  Synthetic
uacauaaaagacagaaguug

SEQ ID NO: 614376 - RNA, 21 nt, Artificial Sequence
  Synthetic
guacauaaaagacagaaguug

SEQ ID NO: 614377 - RNA, 22 nt, Artificial Sequence
  Synthetic
uguacauaaaagacagaaguug

SEQ ID NO: 614378 - RNA, 23 nt, Artificial Sequence
  Synthetic
guguacauaaaagacagaaguug

SEQ ID NO: 614379 - RNA, 24 nt, Artificial Sequence
  Synthetic
uguguacauaaaagacagaaguug

SEQ ID NO: 614380 - RNA, 18 nt, Artificial Sequence
  Synthetic
caacuacacgagaaguug

SEQ ID NO: 614381 - RNA, 19 nt, Artificial Sequence
  Synthetic
acaacuacacgagaaguug

SEQ ID NO: 614382 - RNA, 20 nt, Artificial Sequence
  Synthetic
uacaacuacacgagaaguug

SEQ ID NO: 614383 - RNA, 21 nt, Artificial Sequence
  Synthetic
uuacaacuacacgagaaguug

SEQ ID NO: 614384 - RNA, 22 nt, Artificial Sequence
  Synthetic
cuuacaacuacacgagaaguug

SEQ ID NO: 614385 - RNA, 23 nt, Artificial Sequence
  Synthetic
ucuuacaacuacacgagaaguug

SEQ ID NO: 614386 - RNA, 24 nt, Artificial Sequence
  Synthetic
cucuuacaacuacacgagaaguug

SEQ ID NO: 614387 - RNA, 18 nt, Artificial Sequence
  Synthetic
gugcugucuacacaguug

SEQ ID NO: 614388 - RNA, 19 nt, Artificial Sequence
  Synthetic
ugugcugucuacacaguug

SEQ ID NO: 614389 - RNA, 20 nt, Artificial Sequence
  Synthetic
gugugcugucuacacaguug

SEQ ID NO: 614390 - RNA, 21 nt, Artificial Sequence
  Synthetic
ugugugcugucuacacaguug

SEQ ID NO: 614391 - RNA, 22 nt, Artificial Sequence
  Synthetic
gugugugcugucuacacaguug

SEQ ID NO: 614392 - RNA, 23 nt, Artificial Sequence
  Synthetic
ugugugugcugucuacacaguug

SEQ ID NO: 614393 - RNA, 24 nt, Artificial Sequence
  Synthetic
uugugugugcugucuacacaguug

SEQ ID NO: 614394 - RNA, 18 nt, Artificial Sequence
  Synthetic
cuuuaccagccacaguug

SEQ ID NO: 614395 - RNA, 19 nt, Artificial Sequence
  Synthetic
acuuuaccagccacaguug

SEQ ID NO: 614396 - RNA, 20 nt, Artificial Sequence
  Synthetic
gacuuuaccagccacaguug

SEQ ID NO: 614397 - RNA, 21 nt, Artificial Sequence
  Synthetic
ggacuuuaccagccacaguug

SEQ ID NO: 614398 - RNA, 22 nt, Artificial Sequence
  Synthetic
uggacuuuaccagccacaguug

SEQ ID NO: 614399 - RNA, 23 nt, Artificial Sequence
  Synthetic
cuggacuuuaccagccacaguug

SEQ ID NO: 614400 - RNA, 24 nt, Artificial Sequence
  Synthetic
ucuggacuuuaccagccacaguug

SEQ ID NO: 614401 - RNA, 18 nt, Artificial Sequence
  Synthetic
uuccucauauuacaguug

SEQ ID NO: 614402 - RNA, 19 nt, Artificial Sequence
  Synthetic
uuuccucauauuacaguug

SEQ ID NO: 614403 - RNA, 20 nt, Artificial Sequence
  Synthetic
auuuccucauauuacaguug

SEQ ID NO: 614404 - RNA, 21 nt, Artificial Sequence
  Synthetic
aauuuccucauauuacaguug

SEQ ID NO: 614405 - RNA, 22 nt, Artificial Sequence
  Synthetic
caauuuccucauauuacaguug

SEQ ID NO: 614406 - RNA, 23 nt, Artificial Sequence
  Synthetic
ccaauuuccucauauuacaguug

SEQ ID NO: 614407 - RNA, 24 nt, Artificial Sequence
  Synthetic
accaauuuccucauauuacaguug

SEQ ID NO: 614408 - RNA, 18 nt, Artificial Sequence
  Synthetic
ucccccauuuuacaguug

SEQ ID NO: 614409 - RNA, 19 nt, Artificial Sequence
  Synthetic
uucccccauuuuacaguug

SEQ ID NO: 614410 - RNA, 20 nt, Artificial Sequence
  Synthetic
uuucccccauuuuacaguug

SEQ ID NO: 614411 - RNA, 21 nt, Artificial Sequence
  Synthetic
uuuucccccauuuuacaguug

SEQ ID NO: 614412 - RNA, 22 nt, Artificial Sequence
  Synthetic
guuuucccccauuuuacaguug

SEQ ID NO: 614413 - RNA, 23 nt, Artificial Sequence
  Synthetic
gguuuucccccauuuuacaguug

SEQ ID NO: 614414 - RNA, 24 nt, Artificial Sequence
  Synthetic
ugguuuucccccauuuuacaguug

SEQ ID NO: 614415 - RNA, 18 nt, Artificial Sequence
  Synthetic
cauucauucucccaguug

SEQ ID NO: 614416 - RNA, 19 nt, Artificial Sequence
  Synthetic
gcauucauucucccaguug

SEQ ID NO: 614417 - RNA, 20 nt, Artificial Sequence
  Synthetic
agcauucauucucccaguug

SEQ ID NO: 614418 - RNA, 21 nt, Artificial Sequence
  Synthetic
aagcauucauucucccaguug

SEQ ID NO: 614419 - RNA, 22 nt, Artificial Sequence
  Synthetic
gaagcauucauucucccaguug

SEQ ID NO: 614420 - RNA, 23 nt, Artificial Sequence
  Synthetic
ugaagcauucauucucccaguug

SEQ ID NO: 614421 - RNA, 24 nt, Artificial Sequence
  Synthetic
augaagcauucauucucccaguug

SEQ ID NO: 614422 - RNA, 18 nt, Artificial Sequence
  Synthetic
cuggcuaguuggcaguug

SEQ ID NO: 614423 - RNA, 19 nt, Artificial Sequence
  Synthetic
ccuggcuaguuggcaguug

SEQ ID NO: 614424 - RNA, 20 nt, Artificial Sequence
  Synthetic
accuggcuaguuggcaguug

SEQ ID NO: 614425 - RNA, 21 nt, Artificial Sequence
  Synthetic
uaccuggcuaguuggcaguug

SEQ ID NO: 614426 - RNA, 22 nt, Artificial Sequence
  Synthetic
guaccuggcuaguuggcaguug

SEQ ID NO: 614427 - RNA, 23 nt, Artificial Sequence
  Synthetic
uguaccuggcuaguuggcaguug

SEQ ID NO: 614428 - RNA, 24 nt, Artificial Sequence
  Synthetic
uuguaccuggcuaguuggcaguug

SEQ ID NO: 614429 - RNA, 18 nt, Artificial Sequence
  Synthetic
gaacuuucaaugcaguug

SEQ ID NO: 614430 - RNA, 19 nt, Artificial Sequence
  Synthetic
ugaacuuucaaugcaguug

SEQ ID NO: 614431 - RNA, 20 nt, Artificial Sequence
  Synthetic
augaacuuucaaugcaguug

SEQ ID NO: 614432 - RNA, 21 nt, Artificial Sequence
  Synthetic
gaugaacuuucaaugcaguug

SEQ ID NO: 614433 - RNA, 22 nt, Artificial Sequence
  Synthetic
ugaugaacuuucaaugcaguug

SEQ ID NO: 614434 - RNA, 23 nt, Artificial Sequence
  Synthetic
gugaugaacuuucaaugcaguug

SEQ ID NO: 614435 - RNA, 24 nt, Artificial Sequence
  Synthetic
ugugaugaacuuucaaugcaguug

SEQ ID NO: 614436 - RNA, 18 nt, Artificial Sequence
  Synthetic
uuucuaucugugcaguug

SEQ ID NO: 614437 - RNA, 19 nt, Artificial Sequence
  Synthetic
cuuucuaucugugcaguug

SEQ ID NO: 614438 - RNA, 20 nt, Artificial Sequence
  Synthetic
ucuuucuaucugugcaguug

SEQ ID NO: 614439 - RNA, 21 nt, Artificial Sequence
  Synthetic
cucuuucuaucugugcaguug

SEQ ID NO: 614440 - RNA, 22 nt, Artificial Sequence
  Synthetic
ccucuuucuaucugugcaguug

SEQ ID NO: 614441 - RNA, 23 nt, Artificial Sequence
  Synthetic
cccucuuucuaucugugcaguug

SEQ ID NO: 614442 - RNA, 24 nt, Artificial Sequence
  Synthetic
ucccucuuucuaucugugcaguug

SEQ ID NO: 614443 - RNA, 18 nt, Artificial Sequence
  Synthetic
auggcaggacaucaguug

SEQ ID NO: 614444 - RNA, 19 nt, Artificial Sequence
  Synthetic
cauggcaggacaucaguug

SEQ ID NO: 614445 - RNA, 20 nt, Artificial Sequence
  Synthetic
ucauggcaggacaucaguug

SEQ ID NO: 614446 - RNA, 21 nt, Artificial Sequence
  Synthetic
cucauggcaggacaucaguug

SEQ ID NO: 614447 - RNA, 22 nt, Artificial Sequence
  Synthetic
acucauggcaggacaucaguug

SEQ ID NO: 614448 - RNA, 23 nt, Artificial Sequence
  Synthetic
uacucauggcaggacaucaguug

SEQ ID NO: 614449 - RNA, 24 nt, Artificial Sequence
  Synthetic
cuacucauggcaggacaucaguug

SEQ ID NO: 614450 - RNA, 18 nt, Artificial Sequence
  Synthetic
aaguagaggggucaguug

SEQ ID NO: 614451 - RNA, 19 nt, Artificial Sequence
  Synthetic
aaaguagaggggucaguug

SEQ ID NO: 614452 - RNA, 20 nt, Artificial Sequence
  Synthetic
gaaaguagaggggucaguug

SEQ ID NO: 614453 - RNA, 21 nt, Artificial Sequence
  Synthetic
agaaaguagaggggucaguug

SEQ ID NO: 614454 - RNA, 22 nt, Artificial Sequence
  Synthetic
gagaaaguagaggggucaguug

SEQ ID NO: 614455 - RNA, 23 nt, Artificial Sequence
  Synthetic
agagaaaguagaggggucaguug

SEQ ID NO: 614456 - RNA, 24 nt, Artificial Sequence
  Synthetic
gagagaaaguagaggggucaguug

SEQ ID NO: 614457 - RNA, 18 nt, Artificial Sequence
  Synthetic
guaauuuaaauucaguug

SEQ ID NO: 614458 - RNA, 19 nt, Artificial Sequence
  Synthetic
gguaauuuaaauucaguug

SEQ ID NO: 614459 - RNA, 20 nt, Artificial Sequence
  Synthetic
agguaauuuaaauucaguug

SEQ ID NO: 614460 - RNA, 21 nt, Artificial Sequence
  Synthetic
uagguaauuuaaauucaguug

SEQ ID NO: 614461 - RNA, 22 nt, Artificial Sequence
  Synthetic
guagguaauuuaaauucaguug

SEQ ID NO: 614462 - RNA, 23 nt, Artificial Sequence
  Synthetic
uguagguaauuuaaauucaguug

SEQ ID NO: 614463 - RNA, 24 nt, Artificial Sequence
  Synthetic
auguagguaauuuaaauucaguug

SEQ ID NO: 614464 - RNA, 18 nt, Artificial Sequence
  Synthetic
uaggauuuuuuucaguug

SEQ ID NO: 614465 - RNA, 19 nt, Artificial Sequence
  Synthetic
guaggauuuuuuucaguug

SEQ ID NO: 614466 - RNA, 20 nt, Artificial Sequence
  Synthetic
uguaggauuuuuuucaguug

SEQ ID NO: 614467 - RNA, 21 nt, Artificial Sequence
  Synthetic
auguaggauuuuuuucaguug

SEQ ID NO: 614468 - RNA, 22 nt, Artificial Sequence
  Synthetic
uauguaggauuuuuuucaguug

SEQ ID NO: 614469 - RNA, 23 nt, Artificial Sequence
  Synthetic
auauguaggauuuuuuucaguug

SEQ ID NO: 614470 - RNA, 24 nt, Artificial Sequence
  Synthetic
cauauguaggauuuuuuucaguug

SEQ ID NO: 614471 - RNA, 18 nt, Artificial Sequence
  Synthetic
gagaaaaauggagaguug

SEQ ID NO: 614472 - RNA, 19 nt, Artificial Sequence
  Synthetic
agagaaaaauggagaguug

SEQ ID NO: 614473 - RNA, 20 nt, Artificial Sequence
  Synthetic
gagagaaaaauggagaguug

SEQ ID NO: 614474 - RNA, 21 nt, Artificial Sequence
  Synthetic
agagagaaaaauggagaguug

SEQ ID NO: 614475 - RNA, 22 nt, Artificial Sequence
  Synthetic
uagagagaaaaauggagaguug

SEQ ID NO: 614476 - RNA, 23 nt, Artificial Sequence
  Synthetic
uuagagagaaaaauggagaguug

SEQ ID NO: 614477 - RNA, 24 nt, Artificial Sequence
  Synthetic
uuuagagagaaaaauggagaguug

SEQ ID NO: 614478 - RNA, 18 nt, Artificial Sequence
  Synthetic
acauguaauauagaguug

SEQ ID NO: 614479 - RNA, 19 nt, Artificial Sequence
  Synthetic
aacauguaauauagaguug

SEQ ID NO: 614480 - RNA, 20 nt, Artificial Sequence
  Synthetic
uaacauguaauauagaguug

SEQ ID NO: 614481 - RNA, 21 nt, Artificial Sequence
  Synthetic
cuaacauguaauauagaguug

SEQ ID NO: 614482 - RNA, 22 nt, Artificial Sequence
  Synthetic
acuaacauguaauauagaguug

SEQ ID NO: 614483 - RNA, 23 nt, Artificial Sequence
  Synthetic
uacuaacauguaauauagaguug

SEQ ID NO: 614484 - RNA, 24 nt, Artificial Sequence
  Synthetic
guacuaacauguaauauagaguug

SEQ ID NO: 614485 - RNA, 18 nt, Artificial Sequence
  Synthetic
aaaaacaccucggaguug

SEQ ID NO: 614486 - RNA, 19 nt, Artificial Sequence
  Synthetic
gaaaaacaccucggaguug

SEQ ID NO: 614487 - RNA, 20 nt, Artificial Sequence
  Synthetic
ggaaaaacaccucggaguug

SEQ ID NO: 614488 - RNA, 21 nt, Artificial Sequence
  Synthetic
gggaaaaacaccucggaguug

SEQ ID NO: 614489 - RNA, 22 nt, Artificial Sequence
  Synthetic
ggggaaaaacaccucggaguug

SEQ ID NO: 614490 - RNA, 23 nt, Artificial Sequence
  Synthetic
gggggaaaaacaccucggaguug

SEQ ID NO: 614491 - RNA, 24 nt, Artificial Sequence
  Synthetic
agggggaaaaacaccucggaguug

SEQ ID NO: 614492 - RNA, 18 nt, Artificial Sequence
  Synthetic
cgauuagggagcuaguug

SEQ ID NO: 614493 - RNA, 19 nt, Artificial Sequence
  Synthetic
gcgauuagggagcuaguug

SEQ ID NO: 614494 - RNA, 20 nt, Artificial Sequence
  Synthetic
agcgauuagggagcuaguug

SEQ ID NO: 614495 - RNA, 21 nt, Artificial Sequence
  Synthetic
gagcgauuagggagcuaguug

SEQ ID NO: 614496 - RNA, 22 nt, Artificial Sequence
  Synthetic
agagcgauuagggagcuaguug

SEQ ID NO: 614497 - RNA, 23 nt, Artificial Sequence
  Synthetic
cagagcgauuagggagcuaguug

SEQ ID NO: 614498 - RNA, 24 nt, Artificial Sequence
  Synthetic
acagagcgauuagggagcuaguug

SEQ ID NO: 614499 - RNA, 18 nt, Artificial Sequence
  Synthetic
aagauugcagaguaguug

SEQ ID NO: 614500 - RNA, 19 nt, Artificial Sequence
  Synthetic
uaagauugcagaguaguug

SEQ ID NO: 614501 - RNA, 20 nt, Artificial Sequence
  Synthetic
auaagauugcagaguaguug

SEQ ID NO: 614502 - RNA, 21 nt, Artificial Sequence
  Synthetic
aauaagauugcagaguaguug

SEQ ID NO: 614503 - RNA, 22 nt, Artificial Sequence
  Synthetic
aaauaagauugcagaguaguug

SEQ ID NO: 614504 - RNA, 23 nt, Artificial Sequence
  Synthetic
gaaauaagauugcagaguaguug

SEQ ID NO: 614505 - RNA, 24 nt, Artificial Sequence
  Synthetic
ggaaauaagauugcagaguaguug

SEQ ID NO: 614506 - RNA, 18 nt, Artificial Sequence
  Synthetic
uuugaaauauaguaguug

SEQ ID NO: 614507 - RNA, 19 nt, Artificial Sequence
  Synthetic
auuugaaauauaguaguug

SEQ ID NO: 614508 - RNA, 20 nt, Artificial Sequence
  Synthetic
cauuugaaauauaguaguug

SEQ ID NO: 614509 - RNA, 21 nt, Artificial Sequence
  Synthetic
gcauuugaaauauaguaguug

SEQ ID NO: 614510 - RNA, 22 nt, Artificial Sequence
  Synthetic
ugcauuugaaauauaguaguug

SEQ ID NO: 614511 - RNA, 23 nt, Artificial Sequence
  Synthetic
augcauuugaaauauaguaguug

SEQ ID NO: 614512 - RNA, 24 nt, Artificial Sequence
  Synthetic
uaugcauuugaaauauaguaguug

SEQ ID NO: 614513 - RNA, 18 nt, Artificial Sequence
  Synthetic
auuuaauaaugguaguug

SEQ ID NO: 614514 - RNA, 19 nt, Artificial Sequence
  Synthetic
gauuuaauaaugguaguug

SEQ ID NO: 614515 - RNA, 20 nt, Artificial Sequence
  Synthetic
agauuuaauaaugguaguug

SEQ ID NO: 614516 - RNA, 21 nt, Artificial Sequence
  Synthetic
cagauuuaauaaugguaguug

SEQ ID NO: 614517 - RNA, 22 nt, Artificial Sequence
  Synthetic
acagauuuaauaaugguaguug

SEQ ID NO: 614518 - RNA, 23 nt, Artificial Sequence
  Synthetic
gacagauuuaauaaugguaguug

SEQ ID NO: 614519 - RNA, 24 nt, Artificial Sequence
  Synthetic
ugacagauuuaauaaugguaguug

SEQ ID NO: 614520 - RNA, 18 nt, Artificial Sequence
  Synthetic
agguuuacuuauuaguug

SEQ ID NO: 614521 - RNA, 19 nt, Artificial Sequence
  Synthetic
uagguuuacuuauuaguug

SEQ ID NO: 614522 - RNA, 20 nt, Artificial Sequence
  Synthetic
cuagguuuacuuauuaguug

SEQ ID NO: 614523 - RNA, 21 nt, Artificial Sequence
  Synthetic
acuagguuuacuuauuaguug

SEQ ID NO: 614524 - RNA, 22 nt, Artificial Sequence
  Synthetic
uacuagguuuacuuauuaguug

SEQ ID NO: 614525 - RNA, 23 nt, Artificial Sequence
  Synthetic
uuacuagguuuacuuauuaguug

SEQ ID NO: 614526 - RNA, 24 nt, Artificial Sequence
  Synthetic
auuacuagguuuacuuauuaguug

SEQ ID NO: 614527 - RNA, 18 nt, Artificial Sequence
  Synthetic
agaaagucuguuuaguug

SEQ ID NO: 614528 - RNA, 19 nt, Artificial Sequence
  Synthetic
aagaaagucuguuuaguug

SEQ ID NO: 614529 - RNA, 20 nt, Artificial Sequence
  Synthetic
gaagaaagucuguuuaguug

SEQ ID NO: 614530 - RNA, 21 nt, Artificial Sequence
  Synthetic
ggaagaaagucuguuuaguug

SEQ ID NO: 614531 - RNA, 22 nt, Artificial Sequence
  Synthetic
uggaagaaagucuguuuaguug

SEQ ID NO: 614532 - RNA, 23 nt, Artificial Sequence
  Synthetic
auggaagaaagucuguuuaguug

SEQ ID NO: 614533 - RNA, 24 nt, Artificial Sequence
  Synthetic
uauggaagaaagucuguuuaguug

SEQ ID NO: 614534 - RNA, 18 nt, Artificial Sequence
  Synthetic
uuauccaauccaacguug

SEQ ID NO: 614535 - RNA, 19 nt, Artificial Sequence
  Synthetic
uuuauccaauccaacguug

SEQ ID NO: 614536 - RNA, 20 nt, Artificial Sequence
  Synthetic
cuuuauccaauccaacguug

SEQ ID NO: 614537 - RNA, 21 nt, Artificial Sequence
  Synthetic
acuuuauccaauccaacguug

SEQ ID NO: 614538 - RNA, 22 nt, Artificial Sequence
  Synthetic
uacuuuauccaauccaacguug

SEQ ID NO: 614539 - RNA, 23 nt, Artificial Sequence
  Synthetic
uuacuuuauccaauccaacguug

SEQ ID NO: 614540 - RNA, 24 nt, Artificial Sequence
  Synthetic
uuuacuuuauccaauccaacguug

SEQ ID NO: 614541 - RNA, 18 nt, Artificial Sequence
  Synthetic
ggguccccuuccacguug

SEQ ID NO: 614542 - RNA, 19 nt, Artificial Sequence
  Synthetic
uggguccccuuccacguug

SEQ ID NO: 614543 - RNA, 20 nt, Artificial Sequence
  Synthetic
uuggguccccuuccacguug

SEQ ID NO: 614544 - RNA, 21 nt, Artificial Sequence
  Synthetic
cuuggguccccuuccacguug

SEQ ID NO: 614545 - RNA, 22 nt, Artificial Sequence
  Synthetic
gcuuggguccccuuccacguug

SEQ ID NO: 614546 - RNA, 23 nt, Artificial Sequence
  Synthetic
ugcuuggguccccuuccacguug

SEQ ID NO: 614547 - RNA, 24 nt, Artificial Sequence
  Synthetic
cugcuuggguccccuuccacguug

SEQ ID NO: 614548 - RNA, 18 nt, Artificial Sequence
  Synthetic
gaguagaauuuuacguug

SEQ ID NO: 614549 - RNA, 19 nt, Artificial Sequence
  Synthetic
ugaguagaauuuuacguug

SEQ ID NO: 614550 - RNA, 20 nt, Artificial Sequence
  Synthetic
uugaguagaauuuuacguug

SEQ ID NO: 614551 - RNA, 21 nt, Artificial Sequence
  Synthetic
auugaguagaauuuuacguug

SEQ ID NO: 614552 - RNA, 22 nt, Artificial Sequence
  Synthetic
gauugaguagaauuuuacguug

SEQ ID NO: 614553 - RNA, 23 nt, Artificial Sequence
  Synthetic
ugauugaguagaauuuuacguug

SEQ ID NO: 614554 - RNA, 24 nt, Artificial Sequence
  Synthetic
augauugaguagaauuuuacguug

SEQ ID NO: 614555 - RNA, 18 nt, Artificial Sequence
  Synthetic
aacacuuucacaccguug

SEQ ID NO: 614556 - RNA, 19 nt, Artificial Sequence
  Synthetic
gaacacuuucacaccguug

SEQ ID NO: 614557 - RNA, 20 nt, Artificial Sequence
  Synthetic
ggaacacuuucacaccguug

SEQ ID NO: 614558 - RNA, 21 nt, Artificial Sequence
  Synthetic
aggaacacuuucacaccguug

SEQ ID NO: 614559 - RNA, 22 nt, Artificial Sequence
  Synthetic
caggaacacuuucacaccguug

SEQ ID NO: 614560 - RNA, 23 nt, Artificial Sequence
  Synthetic
acaggaacacuuucacaccguug

SEQ ID NO: 614561 - RNA, 24 nt, Artificial Sequence
  Synthetic
aacaggaacacuuucacaccguug

SEQ ID NO: 614562 - RNA, 18 nt, Artificial Sequence
  Synthetic
agcacugguuaaucguug

SEQ ID NO: 614563 - RNA, 19 nt, Artificial Sequence
  Synthetic
aagcacugguuaaucguug

SEQ ID NO: 614564 - RNA, 20 nt, Artificial Sequence
  Synthetic
gaagcacugguuaaucguug

SEQ ID NO: 614565 - RNA, 21 nt, Artificial Sequence
  Synthetic
ugaagcacugguuaaucguug

SEQ ID NO: 614566 - RNA, 22 nt, Artificial Sequence
  Synthetic
cugaagcacugguuaaucguug

SEQ ID NO: 614567 - RNA, 23 nt, Artificial Sequence
  Synthetic
gcugaagcacugguuaaucguug

SEQ ID NO: 614568 - RNA, 24 nt, Artificial Sequence
  Synthetic
ggcugaagcacugguuaaucguug

SEQ ID NO: 614569 - RNA, 18 nt, Artificial Sequence
  Synthetic
gugacaaagaggucguug

SEQ ID NO: 614570 - RNA, 19 nt, Artificial Sequence
  Synthetic
cgugacaaagaggucguug

SEQ ID NO: 614571 - RNA, 20 nt, Artificial Sequence
  Synthetic
acgugacaaagaggucguug

SEQ ID NO: 614572 - RNA, 21 nt, Artificial Sequence
  Synthetic
gacgugacaaagaggucguug

SEQ ID NO: 614573 - RNA, 22 nt, Artificial Sequence
  Synthetic
ugacgugacaaagaggucguug

SEQ ID NO: 614574 - RNA, 23 nt, Artificial Sequence
  Synthetic
uugacgugacaaagaggucguug

SEQ ID NO: 614575 - RNA, 24 nt, Artificial Sequence
  Synthetic
guugacgugacaaagaggucguug

SEQ ID NO: 614576 - RNA, 18 nt, Artificial Sequence
  Synthetic
aggcaugaauuaagguug

SEQ ID NO: 614577 - RNA, 19 nt, Artificial Sequence
  Synthetic
gaggcaugaauuaagguug

SEQ ID NO: 614578 - RNA, 20 nt, Artificial Sequence
  Synthetic
ggaggcaugaauuaagguug

SEQ ID NO: 614579 - RNA, 21 nt, Artificial Sequence
  Synthetic
aggaggcaugaauuaagguug

SEQ ID NO: 614580 - RNA, 22 nt, Artificial Sequence
  Synthetic
gaggaggcaugaauuaagguug

SEQ ID NO: 614581 - RNA, 23 nt, Artificial Sequence
  Synthetic
ugaggaggcaugaauuaagguug

SEQ ID NO: 614582 - RNA, 24 nt, Artificial Sequence
  Synthetic
cugaggaggcaugaauuaagguug

SEQ ID NO: 614583 - RNA, 18 nt, Artificial Sequence
  Synthetic
cugccuuuuaucagguug

SEQ ID NO: 614584 - RNA, 19 nt, Artificial Sequence
  Synthetic
gcugccuuuuaucagguug

SEQ ID NO: 614585 - RNA, 20 nt, Artificial Sequence
  Synthetic
agcugccuuuuaucagguug

SEQ ID NO: 614586 - RNA, 21 nt, Artificial Sequence
  Synthetic
uagcugccuuuuaucagguug

SEQ ID NO: 614587 - RNA, 22 nt, Artificial Sequence
  Synthetic
guagcugccuuuuaucagguug

SEQ ID NO: 614588 - RNA, 23 nt, Artificial Sequence
  Synthetic
uguagcugccuuuuaucagguug

SEQ ID NO: 614589 - RNA, 24 nt, Artificial Sequence
  Synthetic
uuguagcugccuuuuaucagguug

SEQ ID NO: 614590 - RNA, 18 nt, Artificial Sequence
  Synthetic
agaagagguuagagguug

SEQ ID NO: 614591 - RNA, 19 nt, Artificial Sequence
  Synthetic
aagaagagguuagagguug

SEQ ID NO: 614592 - RNA, 20 nt, Artificial Sequence
  Synthetic
gaagaagagguuagagguug

SEQ ID NO: 614593 - RNA, 21 nt, Artificial Sequence
  Synthetic
ggaagaagagguuagagguug

SEQ ID NO: 614594 - RNA, 22 nt, Artificial Sequence
  Synthetic
uggaagaagagguuagagguug

SEQ ID NO: 614595 - RNA, 23 nt, Artificial Sequence
  Synthetic
cuggaagaagagguuagagguug

SEQ ID NO: 614596 - RNA, 24 nt, Artificial Sequence
  Synthetic
acuggaagaagagguuagagguug

SEQ ID NO: 614597 - RNA, 18 nt, Artificial Sequence
  Synthetic
cuugggaggcugagguug

SEQ ID NO: 614598 - RNA, 19 nt, Artificial Sequence
  Synthetic
acuugggaggcugagguug

SEQ ID NO: 614599 - RNA, 20 nt, Artificial Sequence
  Synthetic
uacuugggaggcugagguug

SEQ ID NO: 614600 - RNA, 21 nt, Artificial Sequence
  Synthetic
cuacuugggaggcugagguug

SEQ ID NO: 614601 - RNA, 22 nt, Artificial Sequence
  Synthetic
gcuacuugggaggcugagguug

SEQ ID NO: 614602 - RNA, 23 nt, Artificial Sequence
  Synthetic
ugcuacuugggaggcugagguug

SEQ ID NO: 614603 - RNA, 24 nt, Artificial Sequence
  Synthetic
cugcuacuugggaggcugagguug

SEQ ID NO: 614604 - RNA, 18 nt, Artificial Sequence
  Synthetic
augauggcucugagguug

SEQ ID NO: 614605 - RNA, 19 nt, Artificial Sequence
  Synthetic
aaugauggcucugagguug

SEQ ID NO: 614606 - RNA, 20 nt, Artificial Sequence
  Synthetic
aaaugauggcucugagguug

SEQ ID NO: 614607 - RNA, 21 nt, Artificial Sequence
  Synthetic
caaaugauggcucugagguug

SEQ ID NO: 614608 - RNA, 22 nt, Artificial Sequence
  Synthetic
ucaaaugauggcucugagguug

SEQ ID NO: 614609 - RNA, 23 nt, Artificial Sequence
  Synthetic
uucaaaugauggcucugagguug

SEQ ID NO: 614610 - RNA, 24 nt, Artificial Sequence
  Synthetic
auucaaaugauggcucugagguug

SEQ ID NO: 614611 - RNA, 18 nt, Artificial Sequence
  Synthetic
acgacauaaaauagguug

SEQ ID NO: 614612 - RNA, 19 nt, Artificial Sequence
  Synthetic
aacgacauaaaauagguug

SEQ ID NO: 614613 - RNA, 20 nt, Artificial Sequence
  Synthetic
gaacgacauaaaauagguug

SEQ ID NO: 614614 - RNA, 21 nt, Artificial Sequence
  Synthetic
cgaacgacauaaaauagguug

SEQ ID NO: 614615 - RNA, 22 nt, Artificial Sequence
  Synthetic
gcgaacgacauaaaauagguug

SEQ ID NO: 614616 - RNA, 23 nt, Artificial Sequence
  Synthetic
ggcgaacgacauaaaauagguug

SEQ ID NO: 614617 - RNA, 24 nt, Artificial Sequence
  Synthetic
uggcgaacgacauaaaauagguug

SEQ ID NO: 614618 - RNA, 18 nt, Artificial Sequence
  Synthetic
gccugucuugcuagguug

SEQ ID NO: 614619 - RNA, 19 nt, Artificial Sequence
  Synthetic
ggccugucuugcuagguug

SEQ ID NO: 614620 - RNA, 20 nt, Artificial Sequence
  Synthetic
uggccugucuugcuagguug

SEQ ID NO: 614621 - RNA, 21 nt, Artificial Sequence
  Synthetic
uuggccugucuugcuagguug

SEQ ID NO: 614622 - RNA, 22 nt, Artificial Sequence
  Synthetic
guuggccugucuugcuagguug

SEQ ID NO: 614623 - RNA, 23 nt, Artificial Sequence
  Synthetic
uguuggccugucuugcuagguug

SEQ ID NO: 614624 - RNA, 24 nt, Artificial Sequence
  Synthetic
auguuggccugucuugcuagguug

SEQ ID NO: 614625 - RNA, 18 nt, Artificial Sequence
  Synthetic
ugucagaugaguagguug

SEQ ID NO: 614626 - RNA, 19 nt, Artificial Sequence
  Synthetic
uugucagaugaguagguug

SEQ ID NO: 614627 - RNA, 20 nt, Artificial Sequence
  Synthetic
uuugucagaugaguagguug

SEQ ID NO: 614628 - RNA, 21 nt, Artificial Sequence
  Synthetic
cuuugucagaugaguagguug

SEQ ID NO: 614629 - RNA, 22 nt, Artificial Sequence
  Synthetic
ccuuugucagaugaguagguug

SEQ ID NO: 614630 - RNA, 23 nt, Artificial Sequence
  Synthetic
cccuuugucagaugaguagguug

SEQ ID NO: 614631 - RNA, 24 nt, Artificial Sequence
  Synthetic
gcccuuugucagaugaguagguug

SEQ ID NO: 614632 - RNA, 18 nt, Artificial Sequence
  Synthetic
uaugggcaaguuagguug

SEQ ID NO: 614633 - RNA, 19 nt, Artificial Sequence
  Synthetic
auaugggcaaguuagguug

SEQ ID NO: 614634 - RNA, 20 nt, Artificial Sequence
  Synthetic
uauaugggcaaguuagguug

SEQ ID NO: 614635 - RNA, 21 nt, Artificial Sequence
  Synthetic
uuauaugggcaaguuagguug

SEQ ID NO: 614636 - RNA, 22 nt, Artificial Sequence
  Synthetic
cuuauaugggcaaguuagguug

SEQ ID NO: 614637 - RNA, 23 nt, Artificial Sequence
  Synthetic
ccuuauaugggcaaguuagguug

SEQ ID NO: 614638 - RNA, 24 nt, Artificial Sequence
  Synthetic
uccuuauaugggcaaguuagguug

SEQ ID NO: 614639 - RNA, 18 nt, Artificial Sequence
  Synthetic
ugaucaggguggcgguug

SEQ ID NO: 614640 - RNA, 19 nt, Artificial Sequence
  Synthetic
uugaucaggguggcgguug

SEQ ID NO: 614641 - RNA, 20 nt, Artificial Sequence
  Synthetic
auugaucaggguggcgguug

SEQ ID NO: 614642 - RNA, 21 nt, Artificial Sequence
  Synthetic
gauugaucaggguggcgguug

SEQ ID NO: 614643 - RNA, 22 nt, Artificial Sequence
  Synthetic
ugauugaucaggguggcgguug

SEQ ID NO: 614644 - RNA, 23 nt, Artificial Sequence
  Synthetic
cugauugaucaggguggcgguug

SEQ ID NO: 614645 - RNA, 24 nt, Artificial Sequence
  Synthetic
gcugauugaucaggguggcgguug

SEQ ID NO: 614646 - RNA, 18 nt, Artificial Sequence
  Synthetic
gaaauauauaaaggguug

SEQ ID NO: 614647 - RNA, 19 nt, Artificial Sequence
  Synthetic
ugaaauauauaaaggguug

SEQ ID NO: 614648 - RNA, 20 nt, Artificial Sequence
  Synthetic
uugaaauauauaaaggguug

SEQ ID NO: 614649 - RNA, 21 nt, Artificial Sequence
  Synthetic
guugaaauauauaaaggguug

SEQ ID NO: 614650 - RNA, 22 nt, Artificial Sequence
  Synthetic
uguugaaauauauaaaggguug

SEQ ID NO: 614651 - RNA, 23 nt, Artificial Sequence
  Synthetic
auguugaaauauauaaaggguug

SEQ ID NO: 614652 - RNA, 24 nt, Artificial Sequence
  Synthetic
cauguugaaauauauaaaggguug

SEQ ID NO: 614653 - RNA, 18 nt, Artificial Sequence
  Synthetic
gggaacaggcaaggguug

SEQ ID NO: 614654 - RNA, 19 nt, Artificial Sequence
  Synthetic
agggaacaggcaaggguug

SEQ ID NO: 614655 - RNA, 20 nt, Artificial Sequence
  Synthetic
aagggaacaggcaaggguug

SEQ ID NO: 614656 - RNA, 21 nt, Artificial Sequence
  Synthetic
gaagggaacaggcaaggguug

SEQ ID NO: 614657 - RNA, 22 nt, Artificial Sequence
  Synthetic
ggaagggaacaggcaaggguug

SEQ ID NO: 614658 - RNA, 23 nt, Artificial Sequence
  Synthetic
aggaagggaacaggcaaggguug

SEQ ID NO: 614659 - RNA, 24 nt, Artificial Sequence
  Synthetic
gaggaagggaacaggcaaggguug

SEQ ID NO: 614660 - RNA, 18 nt, Artificial Sequence
  Synthetic
aucuaccucuuaggguug

SEQ ID NO: 614661 - RNA, 19 nt, Artificial Sequence
  Synthetic
aaucuaccucuuaggguug

SEQ ID NO: 614662 - RNA, 20 nt, Artificial Sequence
  Synthetic
aaaucuaccucuuaggguug

SEQ ID NO: 614663 - RNA, 21 nt, Artificial Sequence
  Synthetic
aaaaucuaccucuuaggguug

SEQ ID NO: 614664 - RNA, 22 nt, Artificial Sequence
  Synthetic
uaaaaucuaccucuuaggguug

SEQ ID NO: 614665 - RNA, 23 nt, Artificial Sequence
  Synthetic
auaaaaucuaccucuuaggguug

SEQ ID NO: 614666 - RNA, 24 nt, Artificial Sequence
  Synthetic
aauaaaaucuaccucuuaggguug

SEQ ID NO: 614667 - RNA, 18 nt, Artificial Sequence
  Synthetic
aaaggauucuucggguug

SEQ ID NO: 614668 - RNA, 19 nt, Artificial Sequence
  Synthetic
caaaggauucuucggguug

SEQ ID NO: 614669 - RNA, 20 nt, Artificial Sequence
  Synthetic
acaaaggauucuucggguug

SEQ ID NO: 614670 - RNA, 21 nt, Artificial Sequence
  Synthetic
uacaaaggauucuucggguug

SEQ ID NO: 614671 - RNA, 22 nt, Artificial Sequence
  Synthetic
cuacaaaggauucuucggguug

SEQ ID NO: 614672 - RNA, 23 nt, Artificial Sequence
  Synthetic
acuacaaaggauucuucggguug

SEQ ID NO: 614673 - RNA, 24 nt, Artificial Sequence
  Synthetic
cacuacaaaggauucuucggguug

SEQ ID NO: 614674 - RNA, 18 nt, Artificial Sequence
  Synthetic
aggguaguggggggguug

SEQ ID NO: 614675 - RNA, 19 nt, Artificial Sequence
  Synthetic
aaggguaguggggggguug

SEQ ID NO: 614676 - RNA, 20 nt, Artificial Sequence
  Synthetic
gaaggguaguggggggguug

SEQ ID NO: 614677 - RNA, 21 nt, Artificial Sequence
  Synthetic
ugaaggguaguggggggguug

SEQ ID NO: 614678 - RNA, 22 nt, Artificial Sequence
  Synthetic
gugaaggguaguggggggguug

SEQ ID NO: 614679 - RNA, 23 nt, Artificial Sequence
  Synthetic
ugugaaggguaguggggggguug

SEQ ID NO: 614680 - RNA, 24 nt, Artificial Sequence
  Synthetic
cugugaaggguaguggggggguug

SEQ ID NO: 614681 - RNA, 18 nt, Artificial Sequence
  Synthetic
uuucaagauuggggguug

SEQ ID NO: 614682 - RNA, 19 nt, Artificial Sequence
  Synthetic
cuuucaagauuggggguug

SEQ ID NO: 614683 - RNA, 20 nt, Artificial Sequence
  Synthetic
gcuuucaagauuggggguug

SEQ ID NO: 614684 - RNA, 21 nt, Artificial Sequence
  Synthetic
ugcuuucaagauuggggguug

SEQ ID NO: 614685 - RNA, 22 nt, Artificial Sequence
  Synthetic
cugcuuucaagauuggggguug

SEQ ID NO: 614686 - RNA, 23 nt, Artificial Sequence
  Synthetic
ccugcuuucaagauuggggguug

SEQ ID NO: 614687 - RNA, 24 nt, Artificial Sequence
  Synthetic
uccugcuuucaagauuggggguug

SEQ ID NO: 614688 - RNA, 18 nt, Artificial Sequence
  Synthetic
gacauuuguaugggguug

SEQ ID NO: 614689 - RNA, 19 nt, Artificial Sequence
  Synthetic
ggacauuuguaugggguug

SEQ ID NO: 614690 - RNA, 20 nt, Artificial Sequence
  Synthetic
gggacauuuguaugggguug

SEQ ID NO: 614691 - RNA, 21 nt, Artificial Sequence
  Synthetic
ggggacauuuguaugggguug

SEQ ID NO: 614692 - RNA, 22 nt, Artificial Sequence
  Synthetic
uggggacauuuguaugggguug

SEQ ID NO: 614693 - RNA, 23 nt, Artificial Sequence
  Synthetic
cuggggacauuuguaugggguug

SEQ ID NO: 614694 - RNA, 24 nt, Artificial Sequence
  Synthetic
ucuggggacauuuguaugggguug

SEQ ID NO: 614695 - RNA, 18 nt, Artificial Sequence
  Synthetic
uggagaugacugggguug

SEQ ID NO: 614696 - RNA, 19 nt, Artificial Sequence
  Synthetic
uuggagaugacugggguug

SEQ ID NO: 614697 - RNA, 20 nt, Artificial Sequence
  Synthetic
guuggagaugacugggguug

SEQ ID NO: 614698 - RNA, 21 nt, Artificial Sequence
  Synthetic
uguuggagaugacugggguug

SEQ ID NO: 614699 - RNA, 22 nt, Artificial Sequence
  Synthetic
auguuggagaugacugggguug

SEQ ID NO: 614700 - RNA, 23 nt, Artificial Sequence
  Synthetic
cauguuggagaugacugggguug

SEQ ID NO: 614701 - RNA, 24 nt, Artificial Sequence
  Synthetic
ucauguuggagaugacugggguug

SEQ ID NO: 614702 - RNA, 18 nt, Artificial Sequence
  Synthetic
caggggcgggugggguug

SEQ ID NO: 614703 - RNA, 19 nt, Artificial Sequence
  Synthetic
ucaggggcgggugggguug

SEQ ID NO: 614704 - RNA, 20 nt, Artificial Sequence
  Synthetic
aucaggggcgggugggguug

SEQ ID NO: 614705 - RNA, 21 nt, Artificial Sequence
  Synthetic
gaucaggggcgggugggguug

SEQ ID NO: 614706 - RNA, 22 nt, Artificial Sequence
  Synthetic
ggaucaggggcgggugggguug

SEQ ID NO: 614707 - RNA, 23 nt, Artificial Sequence
  Synthetic
uggaucaggggcgggugggguug

SEQ ID NO: 614708 - RNA, 24 nt, Artificial Sequence
  Synthetic
auggaucaggggcgggugggguug

SEQ ID NO: 614709 - RNA, 18 nt, Artificial Sequence
  Synthetic
uuacauauuaaaugguug

SEQ ID NO: 614710 - RNA, 19 nt, Artificial Sequence
  Synthetic
uuuacauauuaaaugguug

SEQ ID NO: 614711 - RNA, 20 nt, Artificial Sequence
  Synthetic
auuuacauauuaaaugguug

SEQ ID NO: 614712 - RNA, 21 nt, Artificial Sequence
  Synthetic
gauuuacauauuaaaugguug

SEQ ID NO: 614713 - RNA, 22 nt, Artificial Sequence
  Synthetic
ggauuuacauauuaaaugguug

SEQ ID NO: 614714 - RNA, 23 nt, Artificial Sequence
  Synthetic
gggauuuacauauuaaaugguug

SEQ ID NO: 614715 - RNA, 24 nt, Artificial Sequence
  Synthetic
ugggauuuacauauuaaaugguug

SEQ ID NO: 614716 - RNA, 18 nt, Artificial Sequence
  Synthetic
guugauaagacaugguug

SEQ ID NO: 614717 - RNA, 19 nt, Artificial Sequence
  Synthetic
aguugauaagacaugguug

SEQ ID NO: 614718 - RNA, 20 nt, Artificial Sequence
  Synthetic
gaguugauaagacaugguug

SEQ ID NO: 614719 - RNA, 21 nt, Artificial Sequence
  Synthetic
agaguugauaagacaugguug

SEQ ID NO: 614720 - RNA, 22 nt, Artificial Sequence
  Synthetic
gagaguugauaagacaugguug

SEQ ID NO: 614721 - RNA, 23 nt, Artificial Sequence
  Synthetic
ugagaguugauaagacaugguug

SEQ ID NO: 614722 - RNA, 24 nt, Artificial Sequence
  Synthetic
uugagaguugauaagacaugguug

SEQ ID NO: 614723 - RNA, 18 nt, Artificial Sequence
  Synthetic
gggaacagcucaugguug

SEQ ID NO: 614724 - RNA, 19 nt, Artificial Sequence
  Synthetic
cgggaacagcucaugguug

SEQ ID NO: 614725 - RNA, 20 nt, Artificial Sequence
  Synthetic
ucgggaacagcucaugguug

SEQ ID NO: 614726 - RNA, 21 nt, Artificial Sequence
  Synthetic
aucgggaacagcucaugguug

SEQ ID NO: 614727 - RNA, 22 nt, Artificial Sequence
  Synthetic
gaucgggaacagcucaugguug

SEQ ID NO: 614728 - RNA, 23 nt, Artificial Sequence
  Synthetic
ggaucgggaacagcucaugguug

SEQ ID NO: 614729 - RNA, 24 nt, Artificial Sequence
  Synthetic
aggaucgggaacagcucaugguug

SEQ ID NO: 614730 - RNA, 18 nt, Artificial Sequence
  Synthetic
ucaacuaggagcugguug

SEQ ID NO: 614731 - RNA, 19 nt, Artificial Sequence
  Synthetic
cucaacuaggagcugguug

SEQ ID NO: 614732 - RNA, 20 nt, Artificial Sequence
  Synthetic
ccucaacuaggagcugguug

SEQ ID NO: 614733 - RNA, 21 nt, Artificial Sequence
  Synthetic
accucaacuaggagcugguug

SEQ ID NO: 614734 - RNA, 22 nt, Artificial Sequence
  Synthetic
caccucaacuaggagcugguug

SEQ ID NO: 614735 - RNA, 23 nt, Artificial Sequence
  Synthetic
ccaccucaacuaggagcugguug

SEQ ID NO: 614736 - RNA, 24 nt, Artificial Sequence
  Synthetic
gccaccucaacuaggagcugguug

SEQ ID NO: 614737 - RNA, 18 nt, Artificial Sequence
  Synthetic
auggaaucuuucugguug

SEQ ID NO: 614738 - RNA, 19 nt, Artificial Sequence
  Synthetic
uauggaaucuuucugguug

SEQ ID NO: 614739 - RNA, 20 nt, Artificial Sequence
  Synthetic
cuauggaaucuuucugguug

SEQ ID NO: 614740 - RNA, 21 nt, Artificial Sequence
  Synthetic
ccuauggaaucuuucugguug

SEQ ID NO: 614741 - RNA, 22 nt, Artificial Sequence
  Synthetic
accuauggaaucuuucugguug

SEQ ID NO: 614742 - RNA, 23 nt, Artificial Sequence
  Synthetic
uaccuauggaaucuuucugguug

SEQ ID NO: 614743 - RNA, 24 nt, Artificial Sequence
  Synthetic
uuaccuauggaaucuuucugguug

SEQ ID NO: 614744 - RNA, 18 nt, Artificial Sequence
  Synthetic
ugaucacggacgugguug

SEQ ID NO: 614745 - RNA, 19 nt, Artificial Sequence
  Synthetic
cugaucacggacgugguug

SEQ ID NO: 614746 - RNA, 20 nt, Artificial Sequence
  Synthetic
ucugaucacggacgugguug

SEQ ID NO: 614747 - RNA, 21 nt, Artificial Sequence
  Synthetic
uucugaucacggacgugguug

SEQ ID NO: 614748 - RNA, 22 nt, Artificial Sequence
  Synthetic
auucugaucacggacgugguug

SEQ ID NO: 614749 - RNA, 23 nt, Artificial Sequence
  Synthetic
uauucugaucacggacgugguug

SEQ ID NO: 614750 - RNA, 24 nt, Artificial Sequence
  Synthetic
cuauucugaucacggacgugguug

SEQ ID NO: 614751 - RNA, 18 nt, Artificial Sequence
  Synthetic
uguauaugguggugguug

SEQ ID NO: 614752 - RNA, 19 nt, Artificial Sequence
  Synthetic
cuguauaugguggugguug

SEQ ID NO: 614753 - RNA, 20 nt, Artificial Sequence
  Synthetic
ucuguauaugguggugguug

SEQ ID NO: 614754 - RNA, 21 nt, Artificial Sequence
  Synthetic
aucuguauaugguggugguug

SEQ ID NO: 614755 - RNA, 22 nt, Artificial Sequence
  Synthetic
uaucuguauaugguggugguug

SEQ ID NO: 614756 - RNA, 23 nt, Artificial Sequence
  Synthetic
auaucuguauaugguggugguug

SEQ ID NO: 614757 - RNA, 24 nt, Artificial Sequence
  Synthetic
uauaucuguauaugguggugguug

SEQ ID NO: 614758 - RNA, 18 nt, Artificial Sequence
  Synthetic
gcauuucuaaauugguug

SEQ ID NO: 614759 - RNA, 19 nt, Artificial Sequence
  Synthetic
ugcauuucuaaauugguug

SEQ ID NO: 614760 - RNA, 20 nt, Artificial Sequence
  Synthetic
augcauuucuaaauugguug

SEQ ID NO: 614761 - RNA, 21 nt, Artificial Sequence
  Synthetic
aaugcauuucuaaauugguug

SEQ ID NO: 614762 - RNA, 22 nt, Artificial Sequence
  Synthetic
aaaugcauuucuaaauugguug

SEQ ID NO: 614763 - RNA, 23 nt, Artificial Sequence
  Synthetic
aaaaugcauuucuaaauugguug

SEQ ID NO: 614764 - RNA, 24 nt, Artificial Sequence
  Synthetic
gaaaaugcauuucuaaauugguug

SEQ ID NO: 614765 - RNA, 18 nt, Artificial Sequence
  Synthetic
ggcugcacguauugguug

SEQ ID NO: 614766 - RNA, 19 nt, Artificial Sequence
  Synthetic
gggcugcacguauugguug

SEQ ID NO: 614767 - RNA, 20 nt, Artificial Sequence
  Synthetic
cgggcugcacguauugguug

SEQ ID NO: 614768 - RNA, 21 nt, Artificial Sequence
  Synthetic
acgggcugcacguauugguug

SEQ ID NO: 614769 - RNA, 22 nt, Artificial Sequence
  Synthetic
gacgggcugcacguauugguug

SEQ ID NO: 614770 - RNA, 23 nt, Artificial Sequence
  Synthetic
agacgggcugcacguauugguug

SEQ ID NO: 614771 - RNA, 24 nt, Artificial Sequence
  Synthetic
gagacgggcugcacguauugguug

SEQ ID NO: 614772 - RNA, 18 nt, Artificial Sequence
  Synthetic
uccuaccacaaaauguug

SEQ ID NO: 614773 - RNA, 19 nt, Artificial Sequence
  Synthetic
uuccuaccacaaaauguug

SEQ ID NO: 614774 - RNA, 20 nt, Artificial Sequence
  Synthetic
cuuccuaccacaaaauguug

SEQ ID NO: 614775 - RNA, 21 nt, Artificial Sequence
  Synthetic
ucuuccuaccacaaaauguug

SEQ ID NO: 614776 - RNA, 22 nt, Artificial Sequence
  Synthetic
aucuuccuaccacaaaauguug

SEQ ID NO: 614777 - RNA, 23 nt, Artificial Sequence
  Synthetic
caucuuccuaccacaaaauguug

SEQ ID NO: 614778 - RNA, 24 nt, Artificial Sequence
  Synthetic
ucaucuuccuaccacaaaauguug

SEQ ID NO: 614779 - RNA, 18 nt, Artificial Sequence
  Synthetic
agaguguugaaaauguug

SEQ ID NO: 614780 - RNA, 19 nt, Artificial Sequence
  Synthetic
cagaguguugaaaauguug

SEQ ID NO: 614781 - RNA, 20 nt, Artificial Sequence
  Synthetic
acagaguguugaaaauguug

SEQ ID NO: 614782 - RNA, 21 nt, Artificial Sequence
  Synthetic
aacagaguguugaaaauguug

SEQ ID NO: 614783 - RNA, 22 nt, Artificial Sequence
  Synthetic
aaacagaguguugaaaauguug

SEQ ID NO: 614784 - RNA, 23 nt, Artificial Sequence
  Synthetic
aaaacagaguguugaaaauguug

SEQ ID NO: 614785 - RNA, 24 nt, Artificial Sequence
  Synthetic
uaaaacagaguguugaaaauguug

SEQ ID NO: 614786 - RNA, 18 nt, Artificial Sequence
  Synthetic
gaagccacauaaauguug

SEQ ID NO: 614787 - RNA, 19 nt, Artificial Sequence
  Synthetic
ggaagccacauaaauguug

SEQ ID NO: 614788 - RNA, 20 nt, Artificial Sequence
  Synthetic
aggaagccacauaaauguug

SEQ ID NO: 614789 - RNA, 21 nt, Artificial Sequence
  Synthetic
uaggaagccacauaaauguug

SEQ ID NO: 614790 - RNA, 22 nt, Artificial Sequence
  Synthetic
auaggaagccacauaaauguug

SEQ ID NO: 614791 - RNA, 23 nt, Artificial Sequence
  Synthetic
aauaggaagccacauaaauguug

SEQ ID NO: 614792 - RNA, 24 nt, Artificial Sequence
  Synthetic
aaauaggaagccacauaaauguug

SEQ ID NO: 614793 - RNA, 18 nt, Artificial Sequence
  Synthetic
aacccuuguacaauguug

SEQ ID NO: 614794 - RNA, 19 nt, Artificial Sequence
  Synthetic
gaacccuuguacaauguug

SEQ ID NO: 614795 - RNA, 20 nt, Artificial Sequence
  Synthetic
agaacccuuguacaauguug

SEQ ID NO: 614796 - RNA, 21 nt, Artificial Sequence
  Synthetic
gagaacccuuguacaauguug

SEQ ID NO: 614797 - RNA, 22 nt, Artificial Sequence
  Synthetic
agagaacccuuguacaauguug

SEQ ID NO: 614798 - RNA, 23 nt, Artificial Sequence
  Synthetic
aagagaacccuuguacaauguug

SEQ ID NO: 614799 - RNA, 24 nt, Artificial Sequence
  Synthetic
aaagagaacccuuguacaauguug

SEQ ID NO: 614800 - RNA, 18 nt, Artificial Sequence
  Synthetic
cauucuauuagaauguug

SEQ ID NO: 614801 - RNA, 19 nt, Artificial Sequence
  Synthetic
ccauucuauuagaauguug

SEQ ID NO: 614802 - RNA, 20 nt, Artificial Sequence
  Synthetic
uccauucuauuagaauguug

SEQ ID NO: 614803 - RNA, 21 nt, Artificial Sequence
  Synthetic
uuccauucuauuagaauguug

SEQ ID NO: 614804 - RNA, 22 nt, Artificial Sequence
  Synthetic
cuuccauucuauuagaauguug

SEQ ID NO: 614805 - RNA, 23 nt, Artificial Sequence
  Synthetic
acuuccauucuauuagaauguug

SEQ ID NO: 614806 - RNA, 24 nt, Artificial Sequence
  Synthetic
uacuuccauucuauuagaauguug

SEQ ID NO: 614807 - RNA, 18 nt, Artificial Sequence
  Synthetic
uugaauuccuacauguug

SEQ ID NO: 614808 - RNA, 19 nt, Artificial Sequence
  Synthetic
cuugaauuccuacauguug

SEQ ID NO: 614809 - RNA, 20 nt, Artificial Sequence
  Synthetic
ucuugaauuccuacauguug

SEQ ID NO: 614810 - RNA, 21 nt, Artificial Sequence
  Synthetic
aucuugaauuccuacauguug

SEQ ID NO: 614811 - RNA, 22 nt, Artificial Sequence
  Synthetic
caucuugaauuccuacauguug

SEQ ID NO: 614812 - RNA, 23 nt, Artificial Sequence
  Synthetic
ucaucuugaauuccuacauguug

SEQ ID NO: 614813 - RNA, 24 nt, Artificial Sequence
  Synthetic
cucaucuugaauuccuacauguug

SEQ ID NO: 614814 - RNA, 18 nt, Artificial Sequence
  Synthetic
uuccaagugaccauguug

SEQ ID NO: 614815 - RNA, 19 nt, Artificial Sequence
  Synthetic
uuuccaagugaccauguug

SEQ ID NO: 614816 - RNA, 20 nt, Artificial Sequence
  Synthetic
guuuccaagugaccauguug

SEQ ID NO: 614817 - RNA, 21 nt, Artificial Sequence
  Synthetic
gguuuccaagugaccauguug

SEQ ID NO: 614818 - RNA, 22 nt, Artificial Sequence
  Synthetic
ggguuuccaagugaccauguug

SEQ ID NO: 614819 - RNA, 23 nt, Artificial Sequence
  Synthetic
uggguuuccaagugaccauguug

SEQ ID NO: 614820 - RNA, 24 nt, Artificial Sequence
  Synthetic
cuggguuuccaagugaccauguug

SEQ ID NO: 614821 - RNA, 18 nt, Artificial Sequence
  Synthetic
agauagaucagcauguug

SEQ ID NO: 614822 - RNA, 19 nt, Artificial Sequence
  Synthetic
aagauagaucagcauguug

SEQ ID NO: 614823 - RNA, 20 nt, Artificial Sequence
  Synthetic
gaagauagaucagcauguug

SEQ ID NO: 614824 - RNA, 21 nt, Artificial Sequence
  Synthetic
ugaagauagaucagcauguug

SEQ ID NO: 614825 - RNA, 22 nt, Artificial Sequence
  Synthetic
augaagauagaucagcauguug

SEQ ID NO: 614826 - RNA, 23 nt, Artificial Sequence
  Synthetic
caugaagauagaucagcauguug

SEQ ID NO: 614827 - RNA, 24 nt, Artificial Sequence
  Synthetic
gcaugaagauagaucagcauguug

SEQ ID NO: 614828 - RNA, 18 nt, Artificial Sequence
  Synthetic
uuaaugacaugcauguug

SEQ ID NO: 614829 - RNA, 19 nt, Artificial Sequence
  Synthetic
guuaaugacaugcauguug

SEQ ID NO: 614830 - RNA, 20 nt, Artificial Sequence
  Synthetic
gguuaaugacaugcauguug

SEQ ID NO: 614831 - RNA, 21 nt, Artificial Sequence
  Synthetic
ugguuaaugacaugcauguug

SEQ ID NO: 614832 - RNA, 22 nt, Artificial Sequence
  Synthetic
cugguuaaugacaugcauguug

SEQ ID NO: 614833 - RNA, 23 nt, Artificial Sequence
  Synthetic
ucugguuaaugacaugcauguug

SEQ ID NO: 614834 - RNA, 24 nt, Artificial Sequence
  Synthetic
cucugguuaaugacaugcauguug

SEQ ID NO: 614835 - RNA, 18 nt, Artificial Sequence
  Synthetic
cuccuggucugcauguug

SEQ ID NO: 614836 - RNA, 19 nt, Artificial Sequence
  Synthetic
ucuccuggucugcauguug

SEQ ID NO: 614837 - RNA, 20 nt, Artificial Sequence
  Synthetic
aucuccuggucugcauguug

SEQ ID NO: 614838 - RNA, 21 nt, Artificial Sequence
  Synthetic
aaucuccuggucugcauguug

SEQ ID NO: 614839 - RNA, 22 nt, Artificial Sequence
  Synthetic
gaaucuccuggucugcauguug

SEQ ID NO: 614840 - RNA, 23 nt, Artificial Sequence
  Synthetic
ggaaucuccuggucugcauguug

SEQ ID NO: 614841 - RNA, 24 nt, Artificial Sequence
  Synthetic
gggaaucuccuggucugcauguug

SEQ ID NO: 614842 - RNA, 18 nt, Artificial Sequence
  Synthetic
gaugagacccucauguug

SEQ ID NO: 614843 - RNA, 19 nt, Artificial Sequence
  Synthetic
ugaugagacccucauguug

SEQ ID NO: 614844 - RNA, 20 nt, Artificial Sequence
  Synthetic
gugaugagacccucauguug

SEQ ID NO: 614845 - RNA, 21 nt, Artificial Sequence
  Synthetic
ggugaugagacccucauguug

SEQ ID NO: 614846 - RNA, 22 nt, Artificial Sequence
  Synthetic
gggugaugagacccucauguug

SEQ ID NO: 614847 - RNA, 23 nt, Artificial Sequence
  Synthetic
ggggugaugagacccucauguug

SEQ ID NO: 614848 - RNA, 24 nt, Artificial Sequence
  Synthetic
gggggugaugagacccucauguug

SEQ ID NO: 614849 - RNA, 18 nt, Artificial Sequence
  Synthetic
cuaauacuucugauguug

SEQ ID NO: 614850 - RNA, 19 nt, Artificial Sequence
  Synthetic
acuaauacuucugauguug

SEQ ID NO: 614851 - RNA, 20 nt, Artificial Sequence
  Synthetic
aacuaauacuucugauguug

SEQ ID NO: 614852 - RNA, 21 nt, Artificial Sequence
  Synthetic
uaacuaauacuucugauguug

SEQ ID NO: 614853 - RNA, 22 nt, Artificial Sequence
  Synthetic
auaacuaauacuucugauguug

SEQ ID NO: 614854 - RNA, 23 nt, Artificial Sequence
  Synthetic
uauaacuaauacuucugauguug

SEQ ID NO: 614855 - RNA, 24 nt, Artificial Sequence
  Synthetic
auauaacuaauacuucugauguug

SEQ ID NO: 614856 - RNA, 18 nt, Artificial Sequence
  Synthetic
aaguaugaacauauguug

SEQ ID NO: 614857 - RNA, 19 nt, Artificial Sequence
  Synthetic
gaaguaugaacauauguug

SEQ ID NO: 614858 - RNA, 20 nt, Artificial Sequence
  Synthetic
ggaaguaugaacauauguug

SEQ ID NO: 614859 - RNA, 21 nt, Artificial Sequence
  Synthetic
gggaaguaugaacauauguug

SEQ ID NO: 614860 - RNA, 22 nt, Artificial Sequence
  Synthetic
agggaaguaugaacauauguug

SEQ ID NO: 614861 - RNA, 23 nt, Artificial Sequence
  Synthetic
aagggaaguaugaacauauguug

SEQ ID NO: 614862 - RNA, 24 nt, Artificial Sequence
  Synthetic
aaagggaaguaugaacauauguug

SEQ ID NO: 614863 - RNA, 18 nt, Artificial Sequence
  Synthetic
gaugaauuauauauguug

SEQ ID NO: 614864 - RNA, 19 nt, Artificial Sequence
  Synthetic
ggaugaauuauauauguug

SEQ ID NO: 614865 - RNA, 20 nt, Artificial Sequence
  Synthetic
uggaugaauuauauauguug

SEQ ID NO: 614866 - RNA, 21 nt, Artificial Sequence
  Synthetic
guggaugaauuauauauguug

SEQ ID NO: 614867 - RNA, 22 nt, Artificial Sequence
  Synthetic
aguggaugaauuauauauguug

SEQ ID NO: 614868 - RNA, 23 nt, Artificial Sequence
  Synthetic
aaguggaugaauuauauauguug

SEQ ID NO: 614869 - RNA, 24 nt, Artificial Sequence
  Synthetic
aaaguggaugaauuauauauguug

SEQ ID NO: 614870 - RNA, 18 nt, Artificial Sequence
  Synthetic
ugagaaaauuaacuguug

SEQ ID NO: 614871 - RNA, 19 nt, Artificial Sequence
  Synthetic
augagaaaauuaacuguug

SEQ ID NO: 614872 - RNA, 20 nt, Artificial Sequence
  Synthetic
gaugagaaaauuaacuguug

SEQ ID NO: 614873 - RNA, 21 nt, Artificial Sequence
  Synthetic
agaugagaaaauuaacuguug

SEQ ID NO: 614874 - RNA, 22 nt, Artificial Sequence
  Synthetic
cagaugagaaaauuaacuguug

SEQ ID NO: 614875 - RNA, 23 nt, Artificial Sequence
  Synthetic
acagaugagaaaauuaacuguug

SEQ ID NO: 614876 - RNA, 24 nt, Artificial Sequence
  Synthetic
uacagaugagaaaauuaacuguug

SEQ ID NO: 614877 - RNA, 18 nt, Artificial Sequence
  Synthetic
aacucugauacacuguug

SEQ ID NO: 614878 - RNA, 19 nt, Artificial Sequence
  Synthetic
gaacucugauacacuguug

SEQ ID NO: 614879 - RNA, 20 nt, Artificial Sequence
  Synthetic
ggaacucugauacacuguug

SEQ ID NO: 614880 - RNA, 21 nt, Artificial Sequence
  Synthetic
gggaacucugauacacuguug

SEQ ID NO: 614881 - RNA, 22 nt, Artificial Sequence
  Synthetic
agggaacucugauacacuguug

SEQ ID NO: 614882 - RNA, 23 nt, Artificial Sequence
  Synthetic
gagggaacucugauacacuguug

SEQ ID NO: 614883 - RNA, 24 nt, Artificial Sequence
  Synthetic
agagggaacucugauacacuguug

SEQ ID NO: 614884 - RNA, 22 nt, Artificial Sequence
  Synthetic
aaggaacgcuuuuacacuguug

SEQ ID NO: 614885 - RNA, 23 nt, Artificial Sequence
  Synthetic
aaaggaacgcuuuuacacuguug

SEQ ID NO: 614886 - RNA, 24 nt, Artificial Sequence
  Synthetic
aaaaggaacgcuuuuacacuguug

SEQ ID NO: 614887 - RNA, 18 nt, Artificial Sequence
  Synthetic
aacucuuuuacacuguug

SEQ ID NO: 614888 - RNA, 19 nt, Artificial Sequence
  Synthetic
gaacucuuuuacacuguug

SEQ ID NO: 614889 - RNA, 20 nt, Artificial Sequence
  Synthetic
ggaacucuuuuacacuguug

SEQ ID NO: 614890 - RNA, 21 nt, Artificial Sequence
  Synthetic
aggaacucuuuuacacuguug

SEQ ID NO: 614891 - RNA, 22 nt, Artificial Sequence
  Synthetic
uaggaacucuuuuacacuguug

SEQ ID NO: 614892 - RNA, 23 nt, Artificial Sequence
  Synthetic
auaggaacucuuuuacacuguug

SEQ ID NO: 614893 - RNA, 24 nt, Artificial Sequence
  Synthetic
aauaggaacucuuuuacacuguug

SEQ ID NO: 614894 - RNA, 18 nt, Artificial Sequence
  Synthetic
aacccuuaugcacuguug

SEQ ID NO: 614895 - RNA, 19 nt, Artificial Sequence
  Synthetic
gaacccuuaugcacuguug

SEQ ID NO: 614896 - RNA, 20 nt, Artificial Sequence
  Synthetic
ggaacccuuaugcacuguug

SEQ ID NO: 614897 - RNA, 21 nt, Artificial Sequence
  Synthetic
gggaacccuuaugcacuguug

SEQ ID NO: 614898 - RNA, 22 nt, Artificial Sequence
  Synthetic
agggaacccuuaugcacuguug

SEQ ID NO: 614899 - RNA, 23 nt, Artificial Sequence
  Synthetic
aagggaacccuuaugcacuguug

SEQ ID NO: 614900 - RNA, 24 nt, Artificial Sequence
  Synthetic
aaagggaacccuuaugcacuguug

SEQ ID NO: 614901 - RNA, 18 nt, Artificial Sequence
  Synthetic
ggaaauaagugacuguug

SEQ ID NO: 614902 - RNA, 19 nt, Artificial Sequence
  Synthetic
aggaaauaagugacuguug

SEQ ID NO: 614903 - RNA, 20 nt, Artificial Sequence
  Synthetic
gaggaaauaagugacuguug

SEQ ID NO: 614904 - RNA, 21 nt, Artificial Sequence
  Synthetic
agaggaaauaagugacuguug

SEQ ID NO: 614905 - RNA, 22 nt, Artificial Sequence
  Synthetic
aagaggaaauaagugacuguug

SEQ ID NO: 614906 - RNA, 23 nt, Artificial Sequence
  Synthetic
caagaggaaauaagugacuguug

SEQ ID NO: 614907 - RNA, 24 nt, Artificial Sequence
  Synthetic
gcaagaggaaauaagugacuguug

SEQ ID NO: 614908 - RNA, 18 nt, Artificial Sequence
  Synthetic
aacccuuguauacuguug

SEQ ID NO: 614909 - RNA, 19 nt, Artificial Sequence
  Synthetic
gaacccuuguauacuguug

SEQ ID NO: 614910 - RNA, 20 nt, Artificial Sequence
  Synthetic
ggaacccuuguauacuguug

SEQ ID NO: 614911 - RNA, 21 nt, Artificial Sequence
  Synthetic
aggaacccuuguauacuguug

SEQ ID NO: 614912 - RNA, 22 nt, Artificial Sequence
  Synthetic
aaggaacccuuguauacuguug

SEQ ID NO: 614913 - RNA, 23 nt, Artificial Sequence
  Synthetic
aaaggaacccuuguauacuguug

SEQ ID NO: 614914 - RNA, 24 nt, Artificial Sequence
  Synthetic
aaaaggaacccuuguauacuguug

SEQ ID NO: 614915 - RNA, 18 nt, Artificial Sequence
  Synthetic
aaugcuuauacccuguug

SEQ ID NO: 614916 - RNA, 19 nt, Artificial Sequence
  Synthetic
gaaugcuuauacccuguug

SEQ ID NO: 614917 - RNA, 20 nt, Artificial Sequence
  Synthetic
ggaaugcuuauacccuguug

SEQ ID NO: 614918 - RNA, 21 nt, Artificial Sequence
  Synthetic
gggaaugcuuauacccuguug

SEQ ID NO: 614919 - RNA, 22 nt, Artificial Sequence
  Synthetic
ggggaaugcuuauacccuguug

SEQ ID NO: 614920 - RNA, 23 nt, Artificial Sequence
  Synthetic
aggggaaugcuuauacccuguug

SEQ ID NO: 614921 - RNA, 24 nt, Artificial Sequence
  Synthetic
aaggggaaugcuuauacccuguug

SEQ ID NO: 614922 - RNA, 18 nt, Artificial Sequence
  Synthetic
augagacaaugccuguug

SEQ ID NO: 614923 - RNA, 19 nt, Artificial Sequence
  Synthetic
uaugagacaaugccuguug

SEQ ID NO: 614924 - RNA, 20 nt, Artificial Sequence
  Synthetic
auaugagacaaugccuguug

SEQ ID NO: 614925 - RNA, 21 nt, Artificial Sequence
  Synthetic
gauaugagacaaugccuguug

SEQ ID NO: 614926 - RNA, 22 nt, Artificial Sequence
  Synthetic
agauaugagacaaugccuguug

SEQ ID NO: 614927 - RNA, 23 nt, Artificial Sequence
  Synthetic
aagauaugagacaaugccuguug

SEQ ID NO: 614928 - RNA, 24 nt, Artificial Sequence
  Synthetic
aaagauaugagacaaugccuguug

SEQ ID NO: 614929 - RNA, 18 nt, Artificial Sequence
  Synthetic
acugccaccugccuguug

SEQ ID NO: 614930 - RNA, 19 nt, Artificial Sequence
  Synthetic
aacugccaccugccuguug

SEQ ID NO: 614931 - RNA, 20 nt, Artificial Sequence
  Synthetic
caacugccaccugccuguug

SEQ ID NO: 614932 - RNA, 21 nt, Artificial Sequence
  Synthetic
ucaacugccaccugccuguug

SEQ ID NO: 614933 - RNA, 22 nt, Artificial Sequence
  Synthetic
aucaacugccaccugccuguug

SEQ ID NO: 614934 - RNA, 23 nt, Artificial Sequence
  Synthetic
gaucaacugccaccugccuguug

SEQ ID NO: 614935 - RNA, 24 nt, Artificial Sequence
  Synthetic
ugaucaacugccaccugccuguug

SEQ ID NO: 614936 - RNA, 18 nt, Artificial Sequence
  Synthetic
aagucauauaagcuguug

SEQ ID NO: 614937 - RNA, 19 nt, Artificial Sequence
  Synthetic
caagucauauaagcuguug

SEQ ID NO: 614938 - RNA, 20 nt, Artificial Sequence
  Synthetic
ccaagucauauaagcuguug

SEQ ID NO: 614939 - RNA, 21 nt, Artificial Sequence
  Synthetic
cccaagucauauaagcuguug

SEQ ID NO: 614940 - RNA, 22 nt, Artificial Sequence
  Synthetic
ucccaagucauauaagcuguug

SEQ ID NO: 614941 - RNA, 23 nt, Artificial Sequence
  Synthetic
aucccaagucauauaagcuguug

SEQ ID NO: 614942 - RNA, 24 nt, Artificial Sequence
  Synthetic
aaucccaagucauauaagcuguug

SEQ ID NO: 614943 - RNA, 18 nt, Artificial Sequence
  Synthetic
ccgaauguauaucuguug

SEQ ID NO: 614944 - RNA, 19 nt, Artificial Sequence
  Synthetic
uccgaauguauaucuguug

SEQ ID NO: 614945 - RNA, 20 nt, Artificial Sequence
  Synthetic
cuccgaauguauaucuguug

SEQ ID NO: 614946 - RNA, 21 nt, Artificial Sequence
  Synthetic
ucuccgaauguauaucuguug

SEQ ID NO: 614947 - RNA, 22 nt, Artificial Sequence
  Synthetic
uucuccgaauguauaucuguug

SEQ ID NO: 614948 - RNA, 23 nt, Artificial Sequence
  Synthetic
uuucuccgaauguauaucuguug

SEQ ID NO: 614949 - RNA, 24 nt, Artificial Sequence
  Synthetic
auuucuccgaauguauaucuguug

SEQ ID NO: 614950 - RNA, 18 nt, Artificial Sequence
  Synthetic
gggucuuacgcucuguug

SEQ ID NO: 614951 - RNA, 19 nt, Artificial Sequence
  Synthetic
ugggucuuacgcucuguug

SEQ ID NO: 614952 - RNA, 20 nt, Artificial Sequence
  Synthetic
cugggucuuacgcucuguug

SEQ ID NO: 614953 - RNA, 21 nt, Artificial Sequence
  Synthetic
gcugggucuuacgcucuguug

SEQ ID NO: 614954 - RNA, 22 nt, Artificial Sequence
  Synthetic
agcugggucuuacgcucuguug

SEQ ID NO: 614955 - RNA, 23 nt, Artificial Sequence
  Synthetic
aagcugggucuuacgcucuguug

SEQ ID NO: 614956 - RNA, 24 nt, Artificial Sequence
  Synthetic
gaagcugggucuuacgcucuguug

SEQ ID NO: 614957 - RNA, 18 nt, Artificial Sequence
  Synthetic
acuagaaucugucuguug

SEQ ID NO: 614958 - RNA, 19 nt, Artificial Sequence
  Synthetic
gacuagaaucugucuguug

SEQ ID NO: 614959 - RNA, 20 nt, Artificial Sequence
  Synthetic
agacuagaaucugucuguug

SEQ ID NO: 614960 - RNA, 21 nt, Artificial Sequence
  Synthetic
aagacuagaaucugucuguug

SEQ ID NO: 614961 - RNA, 22 nt, Artificial Sequence
  Synthetic
uaagacuagaaucugucuguug

SEQ ID NO: 614962 - RNA, 23 nt, Artificial Sequence
  Synthetic
uuaagacuagaaucugucuguug

SEQ ID NO: 614963 - RNA, 24 nt, Artificial Sequence
  Synthetic
cuuaagacuagaaucugucuguug

SEQ ID NO: 614964 - RNA, 18 nt, Artificial Sequence
  Synthetic
ugacuuuuuauucuguug

SEQ ID NO: 614965 - RNA, 19 nt, Artificial Sequence
  Synthetic
uugacuuuuuauucuguug

SEQ ID NO: 614966 - RNA, 20 nt, Artificial Sequence
  Synthetic
uuugacuuuuuauucuguug

SEQ ID NO: 614967 - RNA, 21 nt, Artificial Sequence
  Synthetic
auuugacuuuuuauucuguug

SEQ ID NO: 614968 - RNA, 22 nt, Artificial Sequence
  Synthetic
aauuugacuuuuuauucuguug

SEQ ID NO: 614969 - RNA, 23 nt, Artificial Sequence
  Synthetic
aaauuugacuuuuuauucuguug

SEQ ID NO: 614970 - RNA, 24 nt, Artificial Sequence
  Synthetic
aaaauuugacuuuuuauucuguug

SEQ ID NO: 614971 - RNA, 18 nt, Artificial Sequence
  Synthetic
uuuuggcuauuucuguug

SEQ ID NO: 614972 - RNA, 19 nt, Artificial Sequence
  Synthetic
cuuuuggcuauuucuguug

SEQ ID NO: 614973 - RNA, 20 nt, Artificial Sequence
  Synthetic
ccuuuuggcuauuucuguug

SEQ ID NO: 614974 - RNA, 21 nt, Artificial Sequence
  Synthetic
cccuuuuggcuauuucuguug

SEQ ID NO: 614975 - RNA, 22 nt, Artificial Sequence
  Synthetic
ccccuuuuggcuauuucuguug

SEQ ID NO: 614976 - RNA, 23 nt, Artificial Sequence
  Synthetic
gccccuuuuggcuauuucuguug

SEQ ID NO: 614977 - RNA, 24 nt, Artificial Sequence
  Synthetic
ugccccuuuuggcuauuucuguug

SEQ ID NO: 614978 - RNA, 18 nt, Artificial Sequence
  Synthetic
acuauauuguuucuguug

SEQ ID NO: 614979 - RNA, 19 nt, Artificial Sequence
  Synthetic
cacuauauuguuucuguug

SEQ ID NO: 614980 - RNA, 20 nt, Artificial Sequence
  Synthetic
ucacuauauuguuucuguug

SEQ ID NO: 614981 - RNA, 21 nt, Artificial Sequence
  Synthetic
cucacuauauuguuucuguug

SEQ ID NO: 614982 - RNA, 22 nt, Artificial Sequence
  Synthetic
ucucacuauauuguuucuguug

SEQ ID NO: 614983 - RNA, 23 nt, Artificial Sequence
  Synthetic
uucucacuauauuguuucuguug

SEQ ID NO: 614984 - RNA, 24 nt, Artificial Sequence
  Synthetic
cuucucacuauauuguuucuguug

SEQ ID NO: 614985 - RNA, 18 nt, Artificial Sequence
  Synthetic
acuugcagugaaguguug

SEQ ID NO: 614986 - RNA, 19 nt, Artificial Sequence
  Synthetic
uacuugcagugaaguguug

SEQ ID NO: 614987 - RNA, 20 nt, Artificial Sequence
  Synthetic
auacuugcagugaaguguug

SEQ ID NO: 614988 - RNA, 21 nt, Artificial Sequence
  Synthetic
uauacuugcagugaaguguug

SEQ ID NO: 614989 - RNA, 22 nt, Artificial Sequence
  Synthetic
auauacuugcagugaaguguug

SEQ ID NO: 614990 - RNA, 23 nt, Artificial Sequence
  Synthetic
aauauacuugcagugaaguguug

SEQ ID NO: 614991 - RNA, 24 nt, Artificial Sequence
  Synthetic
uaauauacuugcagugaaguguug

SEQ ID NO: 614992 - RNA, 18 nt, Artificial Sequence
  Synthetic
uaggauauuacaguguug

SEQ ID NO: 614993 - RNA, 19 nt, Artificial Sequence
  Synthetic
uuaggauauuacaguguug

SEQ ID NO: 614994 - RNA, 20 nt, Artificial Sequence
  Synthetic
uuuaggauauuacaguguug

SEQ ID NO: 614995 - RNA, 21 nt, Artificial Sequence
  Synthetic
cuuuaggauauuacaguguug

SEQ ID NO: 614996 - RNA, 22 nt, Artificial Sequence
  Synthetic
gcuuuaggauauuacaguguug

SEQ ID NO: 614997 - RNA, 23 nt, Artificial Sequence
  Synthetic
ugcuuuaggauauuacaguguug

SEQ ID NO: 614998 - RNA, 24 nt, Artificial Sequence
  Synthetic
uugcuuuaggauauuacaguguug

SEQ ID NO: 614999 - RNA, 18 nt, Artificial Sequence
  Synthetic
uaugauaggagaguguug

SEQ ID NO: 615000 - RNA, 19 nt, Artificial Sequence
  Synthetic
guaugauaggagaguguug

SEQ ID NO: 615001 - RNA, 20 nt, Artificial Sequence
  Synthetic
gguaugauaggagaguguug

SEQ ID NO: 615002 - RNA, 21 nt, Artificial Sequence
  Synthetic
ggguaugauaggagaguguug

SEQ ID NO: 615003 - RNA, 22 nt, Artificial Sequence
  Synthetic
gggguaugauaggagaguguug

SEQ ID NO: 615004 - RNA, 23 nt, Artificial Sequence
  Synthetic
ggggguaugauaggagaguguug

SEQ ID NO: 615005 - RNA, 24 nt, Artificial Sequence
  Synthetic
uggggguaugauaggagaguguug

SEQ ID NO: 615006 - RNA, 18 nt, Artificial Sequence
  Synthetic
aauaauccccacguguug

SEQ ID NO: 615007 - RNA, 19 nt, Artificial Sequence
  Synthetic
caauaauccccacguguug

SEQ ID NO: 615008 - RNA, 20 nt, Artificial Sequence
  Synthetic
ccaauaauccccacguguug

SEQ ID NO: 615009 - RNA, 21 nt, Artificial Sequence
  Synthetic
uccaauaauccccacguguug

SEQ ID NO: 615010 - RNA, 22 nt, Artificial Sequence
  Synthetic
cuccaauaauccccacguguug

SEQ ID NO: 615011 - RNA, 23 nt, Artificial Sequence
  Synthetic
acuccaauaauccccacguguug

SEQ ID NO: 615012 - RNA, 24 nt, Artificial Sequence
  Synthetic
aacuccaauaauccccacguguug

SEQ ID NO: 615013 - RNA, 18 nt, Artificial Sequence
  Synthetic
agaucauuacauguguug

SEQ ID NO: 615014 - RNA, 19 nt, Artificial Sequence
  Synthetic
aagaucauuacauguguug

SEQ ID NO: 615015 - RNA, 20 nt, Artificial Sequence
  Synthetic
caagaucauuacauguguug

SEQ ID NO: 615016 - RNA, 21 nt, Artificial Sequence
  Synthetic
ccaagaucauuacauguguug

SEQ ID NO: 615017 - RNA, 22 nt, Artificial Sequence
  Synthetic
cccaagaucauuacauguguug

SEQ ID NO: 615018 - RNA, 23 nt, Artificial Sequence
  Synthetic
gcccaagaucauuacauguguug

SEQ ID NO: 615019 - RNA, 24 nt, Artificial Sequence
  Synthetic
agcccaagaucauuacauguguug

SEQ ID NO: 615020 - RNA, 18 nt, Artificial Sequence
  Synthetic
ccucuauauuauguguug

SEQ ID NO: 615021 - RNA, 19 nt, Artificial Sequence
  Synthetic
accucuauauuauguguug

SEQ ID NO: 615022 - RNA, 20 nt, Artificial Sequence
  Synthetic
caccucuauauuauguguug

SEQ ID NO: 615023 - RNA, 21 nt, Artificial Sequence
  Synthetic
ucaccucuauauuauguguug

SEQ ID NO: 615024 - RNA, 22 nt, Artificial Sequence
  Synthetic
uucaccucuauauuauguguug

SEQ ID NO: 615025 - RNA, 23 nt, Artificial Sequence
  Synthetic
uuucaccucuauauuauguguug

SEQ ID NO: 615026 - RNA, 24 nt, Artificial Sequence
  Synthetic
uuuucaccucuauauuauguguug

SEQ ID NO: 615027 - RNA, 18 nt, Artificial Sequence
  Synthetic
aaccagugagcauuguug

SEQ ID NO: 615028 - RNA, 19 nt, Artificial Sequence
  Synthetic
uaaccagugagcauuguug

SEQ ID NO: 615029 - RNA, 20 nt, Artificial Sequence
  Synthetic
uuaaccagugagcauuguug

SEQ ID NO: 615030 - RNA, 21 nt, Artificial Sequence
  Synthetic
guuaaccagugagcauuguug

SEQ ID NO: 615031 - RNA, 22 nt, Artificial Sequence
  Synthetic
uguuaaccagugagcauuguug

SEQ ID NO: 615032 - RNA, 23 nt, Artificial Sequence
  Synthetic
cuguuaaccagugagcauuguug

SEQ ID NO: 615033 - RNA, 24 nt, Artificial Sequence
  Synthetic
ccuguuaaccagugagcauuguug

SEQ ID NO: 615034 - RNA, 18 nt, Artificial Sequence
  Synthetic
aacacuucugcauuguug

SEQ ID NO: 615035 - RNA, 19 nt, Artificial Sequence
  Synthetic
aaacacuucugcauuguug

SEQ ID NO: 615036 - RNA, 20 nt, Artificial Sequence
  Synthetic
gaaacacuucugcauuguug

SEQ ID NO: 615037 - RNA, 21 nt, Artificial Sequence
  Synthetic
ugaaacacuucugcauuguug

SEQ ID NO: 615038 - RNA, 22 nt, Artificial Sequence
  Synthetic
cugaaacacuucugcauuguug

SEQ ID NO: 615039 - RNA, 23 nt, Artificial Sequence
  Synthetic
acugaaacacuucugcauuguug

SEQ ID NO: 615040 - RNA, 24 nt, Artificial Sequence
  Synthetic
aacugaaacacuucugcauuguug

SEQ ID NO: 615041 - RNA, 18 nt, Artificial Sequence
  Synthetic
aacuacauuucauuguug

SEQ ID NO: 615042 - RNA, 19 nt, Artificial Sequence
  Synthetic
uaacuacauuucauuguug

SEQ ID NO: 615043 - RNA, 20 nt, Artificial Sequence
  Synthetic
uuaacuacauuucauuguug

SEQ ID NO: 615044 - RNA, 21 nt, Artificial Sequence
  Synthetic
guuaacuacauuucauuguug

SEQ ID NO: 615045 - RNA, 22 nt, Artificial Sequence
  Synthetic
cguuaacuacauuucauuguug

SEQ ID NO: 615046 - RNA, 23 nt, Artificial Sequence
  Synthetic
acguuaacuacauuucauuguug

SEQ ID NO: 615047 - RNA, 24 nt, Artificial Sequence
  Synthetic
uacguuaacuacauuucauuguug

SEQ ID NO: 615048 - RNA, 18 nt, Artificial Sequence
  Synthetic
cucacaaacauauuguug

SEQ ID NO: 615049 - RNA, 19 nt, Artificial Sequence
  Synthetic
ucucacaaacauauuguug

SEQ ID NO: 615050 - RNA, 20 nt, Artificial Sequence
  Synthetic
aucucacaaacauauuguug

SEQ ID NO: 615051 - RNA, 21 nt, Artificial Sequence
  Synthetic
aaucucacaaacauauuguug

SEQ ID NO: 615052 - RNA, 22 nt, Artificial Sequence
  Synthetic
gaaucucacaaacauauuguug

SEQ ID NO: 615053 - RNA, 23 nt, Artificial Sequence
  Synthetic
ugaaucucacaaacauauuguug

SEQ ID NO: 615054 - RNA, 24 nt, Artificial Sequence
  Synthetic
augaaucucacaaacauauuguug

SEQ ID NO: 615055 - RNA, 18 nt, Artificial Sequence
  Synthetic
uucuaauaucuauuguug

SEQ ID NO: 615056 - RNA, 19 nt, Artificial Sequence
  Synthetic
cuucuaauaucuauuguug

SEQ ID NO: 615057 - RNA, 20 nt, Artificial Sequence
  Synthetic
ucuucuaauaucuauuguug

SEQ ID NO: 615058 - RNA, 21 nt, Artificial Sequence
  Synthetic
gucuucuaauaucuauuguug

SEQ ID NO: 615059 - RNA, 22 nt, Artificial Sequence
  Synthetic
ugucuucuaauaucuauuguug

SEQ ID NO: 615060 - RNA, 23 nt, Artificial Sequence
  Synthetic
cugucuucuaauaucuauuguug

SEQ ID NO: 615061 - RNA, 24 nt, Artificial Sequence
  Synthetic
acugucuucuaauaucuauuguug

SEQ ID NO: 615062 - RNA, 18 nt, Artificial Sequence
  Synthetic
guguguugcaacuuguug

SEQ ID NO: 615063 - RNA, 19 nt, Artificial Sequence
  Synthetic
aguguguugcaacuuguug

SEQ ID NO: 615064 - RNA, 20 nt, Artificial Sequence
  Synthetic
caguguguugcaacuuguug

SEQ ID NO: 615065 - RNA, 21 nt, Artificial Sequence
  Synthetic
ucaguguguugcaacuuguug

SEQ ID NO: 615066 - RNA, 22 nt, Artificial Sequence
  Synthetic
gucaguguguugcaacuuguug

SEQ ID NO: 615067 - RNA, 23 nt, Artificial Sequence
  Synthetic
ggucaguguguugcaacuuguug

SEQ ID NO: 615068 - RNA, 24 nt, Artificial Sequence
  Synthetic
gggucaguguguugcaacuuguug

SEQ ID NO: 615069 - RNA, 18 nt, Artificial Sequence
  Synthetic
uaacucauagcuuuguug

SEQ ID NO: 615070 - RNA, 19 nt, Artificial Sequence
  Synthetic
cuaacucauagcuuuguug

SEQ ID NO: 615071 - RNA, 20 nt, Artificial Sequence
  Synthetic
ccuaacucauagcuuuguug

SEQ ID NO: 615072 - RNA, 21 nt, Artificial Sequence
  Synthetic
accuaacucauagcuuuguug

SEQ ID NO: 615073 - RNA, 22 nt, Artificial Sequence
  Synthetic
caccuaacucauagcuuuguug

SEQ ID NO: 615074 - RNA, 23 nt, Artificial Sequence
  Synthetic
ccaccuaacucauagcuuuguug

SEQ ID NO: 615075 - RNA, 24 nt, Artificial Sequence
  Synthetic
accaccuaacucauagcuuuguug

SEQ ID NO: 615076 - RNA, 18 nt, Artificial Sequence
  Synthetic
ccaaauaauucuuuguug

SEQ ID NO: 615077 - RNA, 19 nt, Artificial Sequence
  Synthetic
accaaauaauucuuuguug

SEQ ID NO: 615078 - RNA, 20 nt, Artificial Sequence
  Synthetic
gaccaaauaauucuuuguug

SEQ ID NO: 615079 - RNA, 21 nt, Artificial Sequence
  Synthetic
ggaccaaauaauucuuuguug

SEQ ID NO: 615080 - RNA, 22 nt, Artificial Sequence
  Synthetic
uggaccaaauaauucuuuguug

SEQ ID NO: 615081 - RNA, 23 nt, Artificial Sequence
  Synthetic
uuggaccaaauaauucuuuguug

SEQ ID NO: 615082 - RNA, 24 nt, Artificial Sequence
  Synthetic
auuggaccaaauaauucuuuguug

SEQ ID NO: 615083 - RNA, 18 nt, Artificial Sequence
  Synthetic
uuuuguuauauuuuguug

SEQ ID NO: 615084 - RNA, 19 nt, Artificial Sequence
  Synthetic
auuuuguuauauuuuguug

SEQ ID NO: 615085 - RNA, 20 nt, Artificial Sequence
  Synthetic
uauuuuguuauauuuuguug

SEQ ID NO: 615086 - RNA, 21 nt, Artificial Sequence
  Synthetic
auauuuuguuauauuuuguug

SEQ ID NO: 615087 - RNA, 22 nt, Artificial Sequence
  Synthetic
uauauuuuguuauauuuuguug

SEQ ID NO: 615088 - RNA, 23 nt, Artificial Sequence
  Synthetic
uuauauuuuguuauauuuuguug

SEQ ID NO: 615089 - RNA, 24 nt, Artificial Sequence
  Synthetic
auuauauuuuguuauauuuuguug

SEQ ID NO: 615090 - RNA, 18 nt, Artificial Sequence
  Synthetic
auggaagaaaaaaauuug

SEQ ID NO: 615091 - RNA, 19 nt, Artificial Sequence
  Synthetic
cauggaagaaaaaaauuug

SEQ ID NO: 615092 - RNA, 20 nt, Artificial Sequence
  Synthetic
ucauggaagaaaaaaauuug

SEQ ID NO: 615093 - RNA, 21 nt, Artificial Sequence
  Synthetic
uucauggaagaaaaaaauuug

SEQ ID NO: 615094 - RNA, 22 nt, Artificial Sequence
  Synthetic
guucauggaagaaaaaaauuug

SEQ ID NO: 615095 - RNA, 23 nt, Artificial Sequence
  Synthetic
gguucauggaagaaaaaaauuug

SEQ ID NO: 615096 - RNA, 24 nt, Artificial Sequence
  Synthetic
ggguucauggaagaaaaaaauuug

SEQ ID NO: 615097 - RNA, 18 nt, Artificial Sequence
  Synthetic
auuuaauuaacaaauuug

SEQ ID NO: 615098 - RNA, 19 nt, Artificial Sequence
  Synthetic
aauuuaauuaacaaauuug

SEQ ID NO: 615099 - RNA, 20 nt, Artificial Sequence
  Synthetic
uaauuuaauuaacaaauuug

SEQ ID NO: 615100 - RNA, 21 nt, Artificial Sequence
  Synthetic
uuaauuuaauuaacaaauuug

SEQ ID NO: 615101 - RNA, 22 nt, Artificial Sequence
  Synthetic
auuaauuuaauuaacaaauuug

SEQ ID NO: 615102 - RNA, 23 nt, Artificial Sequence
  Synthetic
uauuaauuuaauuaacaaauuug

SEQ ID NO: 615103 - RNA, 24 nt, Artificial Sequence
  Synthetic
auauuaauuuaauuaacaaauuug

SEQ ID NO: 615104 - RNA, 18 nt, Artificial Sequence
  Synthetic
ugauuccccacaaauuug

SEQ ID NO: 615105 - RNA, 19 nt, Artificial Sequence
  Synthetic
augauuccccacaaauuug

SEQ ID NO: 615106 - RNA, 20 nt, Artificial Sequence
  Synthetic
uaugauuccccacaaauuug

SEQ ID NO: 615107 - RNA, 21 nt, Artificial Sequence
  Synthetic
guaugauuccccacaaauuug

SEQ ID NO: 615108 - RNA, 22 nt, Artificial Sequence
  Synthetic
cguaugauuccccacaaauuug

SEQ ID NO: 615109 - RNA, 23 nt, Artificial Sequence
  Synthetic
ccguaugauuccccacaaauuug

SEQ ID NO: 615110 - RNA, 24 nt, Artificial Sequence
  Synthetic
gccguaugauuccccacaaauuug

SEQ ID NO: 615111 - RNA, 18 nt, Artificial Sequence
  Synthetic
aaaagcaaagcaaauuug

SEQ ID NO: 615112 - RNA, 19 nt, Artificial Sequence
  Synthetic
caaaagcaaagcaaauuug

SEQ ID NO: 615113 - RNA, 20 nt, Artificial Sequence
  Synthetic
acaaaagcaaagcaaauuug

SEQ ID NO: 615114 - RNA, 21 nt, Artificial Sequence
  Synthetic
uacaaaagcaaagcaaauuug

SEQ ID NO: 615115 - RNA, 22 nt, Artificial Sequence
  Synthetic
guacaaaagcaaagcaaauuug

SEQ ID NO: 615116 - RNA, 23 nt, Artificial Sequence
  Synthetic
aguacaaaagcaaagcaaauuug

SEQ ID NO: 615117 - RNA, 24 nt, Artificial Sequence
  Synthetic
gaguacaaaagcaaagcaaauuug

SEQ ID NO: 615118 - RNA, 18 nt, Artificial Sequence
  Synthetic
aucacuguuagaaauuug

SEQ ID NO: 615119 - RNA, 19 nt, Artificial Sequence
  Synthetic
gaucacuguuagaaauuug

SEQ ID NO: 615120 - RNA, 20 nt, Artificial Sequence
  Synthetic
agaucacuguuagaaauuug

SEQ ID NO: 615121 - RNA, 21 nt, Artificial Sequence
  Synthetic
gagaucacuguuagaaauuug

SEQ ID NO: 615122 - RNA, 22 nt, Artificial Sequence
  Synthetic
agagaucacuguuagaaauuug

SEQ ID NO: 615123 - RNA, 23 nt, Artificial Sequence
  Synthetic
aagagaucacuguuagaaauuug

SEQ ID NO: 615124 - RNA, 24 nt, Artificial Sequence
  Synthetic
aaagagaucacuguuagaaauuug

SEQ ID NO: 615125 - RNA, 18 nt, Artificial Sequence
  Synthetic
uugaauucucuaaauuug

SEQ ID NO: 615126 - RNA, 19 nt, Artificial Sequence
  Synthetic
guugaauucucuaaauuug

SEQ ID NO: 615127 - RNA, 20 nt, Artificial Sequence
  Synthetic
aguugaauucucuaaauuug

SEQ ID NO: 615128 - RNA, 21 nt, Artificial Sequence
  Synthetic
aaguugaauucucuaaauuug

SEQ ID NO: 615129 - RNA, 22 nt, Artificial Sequence
  Synthetic
uaaguugaauucucuaaauuug

SEQ ID NO: 615130 - RNA, 23 nt, Artificial Sequence
  Synthetic
auaaguugaauucucuaaauuug

SEQ ID NO: 615131 - RNA, 24 nt, Artificial Sequence
  Synthetic
uauaaguugaauucucuaaauuug

SEQ ID NO: 615132 - RNA, 18 nt, Artificial Sequence
  Synthetic
gaaagguuucuaaauuug

SEQ ID NO: 615133 - RNA, 19 nt, Artificial Sequence
  Synthetic
ugaaagguuucuaaauuug

SEQ ID NO: 615134 - RNA, 20 nt, Artificial Sequence
  Synthetic
uugaaagguuucuaaauuug

SEQ ID NO: 615135 - RNA, 21 nt, Artificial Sequence
  Synthetic
guugaaagguuucuaaauuug

SEQ ID NO: 615136 - RNA, 22 nt, Artificial Sequence
  Synthetic
gguugaaagguuucuaaauuug

SEQ ID NO: 615137 - RNA, 23 nt, Artificial Sequence
  Synthetic
ugguugaaagguuucuaaauuug

SEQ ID NO: 615138 - RNA, 24 nt, Artificial Sequence
  Synthetic
augguugaaagguuucuaaauuug

SEQ ID NO: 615139 - RNA, 18 nt, Artificial Sequence
  Synthetic
uuuuuucuuguaaauuug

SEQ ID NO: 615140 - RNA, 19 nt, Artificial Sequence
  Synthetic
uuuuuuucuuguaaauuug

SEQ ID NO: 615141 - RNA, 20 nt, Artificial Sequence
  Synthetic
guuuuuuucuuguaaauuug

SEQ ID NO: 615142 - RNA, 21 nt, Artificial Sequence
  Synthetic
uguuuuuuucuuguaaauuug

SEQ ID NO: 615143 - RNA, 22 nt, Artificial Sequence
  Synthetic
uuguuuuuuucuuguaaauuug

SEQ ID NO: 615144 - RNA, 23 nt, Artificial Sequence
  Synthetic
uuuguuuuuuucuuguaaauuug

SEQ ID NO: 615145 - RNA, 24 nt, Artificial Sequence
  Synthetic
guuuguuuuuuucuuguaaauuug

SEQ ID NO: 615146 - RNA, 18 nt, Artificial Sequence
  Synthetic
gguuucaaagacaauuug

SEQ ID NO: 615147 - RNA, 19 nt, Artificial Sequence
  Synthetic
ggguuucaaagacaauuug

SEQ ID NO: 615148 - RNA, 20 nt, Artificial Sequence
  Synthetic
uggguuucaaagacaauuug

SEQ ID NO: 615149 - RNA, 21 nt, Artificial Sequence
  Synthetic
auggguuucaaagacaauuug

SEQ ID NO: 615150 - RNA, 22 nt, Artificial Sequence
  Synthetic
cauggguuucaaagacaauuug

SEQ ID NO: 615151 - RNA, 23 nt, Artificial Sequence
  Synthetic
acauggguuucaaagacaauuug

SEQ ID NO: 615152 - RNA, 24 nt, Artificial Sequence
  Synthetic
aacauggguuucaaagacaauuug

SEQ ID NO: 615153 - RNA, 18 nt, Artificial Sequence
  Synthetic
aauuaaauaugcaauuug

SEQ ID NO: 615154 - RNA, 19 nt, Artificial Sequence
  Synthetic
aaauuaaauaugcaauuug

SEQ ID NO: 615155 - RNA, 20 nt, Artificial Sequence
  Synthetic
aaaauuaaauaugcaauuug

SEQ ID NO: 615156 - RNA, 21 nt, Artificial Sequence
  Synthetic
uaaaauuaaauaugcaauuug

SEQ ID NO: 615157 - RNA, 22 nt, Artificial Sequence
  Synthetic
auaaaauuaaauaugcaauuug

SEQ ID NO: 615158 - RNA, 23 nt, Artificial Sequence
  Synthetic
uauaaaauuaaauaugcaauuug

SEQ ID NO: 615159 - RNA, 24 nt, Artificial Sequence
  Synthetic
cuauaaaauuaaauaugcaauuug

SEQ ID NO: 615160 - RNA, 18 nt, Artificial Sequence
  Synthetic
cguuuaaaagucaauuug

SEQ ID NO: 615161 - RNA, 19 nt, Artificial Sequence
  Synthetic
acguuuaaaagucaauuug

SEQ ID NO: 615162 - RNA, 20 nt, Artificial Sequence
  Synthetic
uacguuuaaaagucaauuug

SEQ ID NO: 615163 - RNA, 21 nt, Artificial Sequence
  Synthetic
guacguuuaaaagucaauuug

SEQ ID NO: 615164 - RNA, 22 nt, Artificial Sequence
  Synthetic
uguacguuuaaaagucaauuug

SEQ ID NO: 615165 - RNA, 23 nt, Artificial Sequence
  Synthetic
cuguacguuuaaaagucaauuug

SEQ ID NO: 615166 - RNA, 24 nt, Artificial Sequence
  Synthetic
ucuguacguuuaaaagucaauuug

SEQ ID NO: 615167 - RNA, 18 nt, Artificial Sequence
  Synthetic
aaacgucaagucaauuug

SEQ ID NO: 615168 - RNA, 19 nt, Artificial Sequence
  Synthetic
aaaacgucaagucaauuug

SEQ ID NO: 615169 - RNA, 20 nt, Artificial Sequence
  Synthetic
uaaaacgucaagucaauuug

SEQ ID NO: 615170 - RNA, 21 nt, Artificial Sequence
  Synthetic
uuaaaacgucaagucaauuug

SEQ ID NO: 615171 - RNA, 22 nt, Artificial Sequence
  Synthetic
uuuaaaacgucaagucaauuug

SEQ ID NO: 615172 - RNA, 23 nt, Artificial Sequence
  Synthetic
auuuaaaacgucaagucaauuug

SEQ ID NO: 615173 - RNA, 24 nt, Artificial Sequence
  Synthetic
aauuuaaaacgucaagucaauuug

SEQ ID NO: 615174 - RNA, 18 nt, Artificial Sequence
  Synthetic
aggacuuaauucaauuug

SEQ ID NO: 615175 - RNA, 19 nt, Artificial Sequence
  Synthetic
gaggacuuaauucaauuug

SEQ ID NO: 615176 - RNA, 20 nt, Artificial Sequence
  Synthetic
agaggacuuaauucaauuug

SEQ ID NO: 615177 - RNA, 21 nt, Artificial Sequence
  Synthetic
aagaggacuuaauucaauuug

SEQ ID NO: 615178 - RNA, 22 nt, Artificial Sequence
  Synthetic
caagaggacuuaauucaauuug

SEQ ID NO: 615179 - RNA, 23 nt, Artificial Sequence
  Synthetic
gcaagaggacuuaauucaauuug

SEQ ID NO: 615180 - RNA, 24 nt, Artificial Sequence
  Synthetic
agcaagaggacuuaauucaauuug

SEQ ID NO: 615181 - RNA, 18 nt, Artificial Sequence
  Synthetic
uccuuacuucagaauuug

SEQ ID NO: 615182 - RNA, 19 nt, Artificial Sequence
  Synthetic
uuccuuacuucagaauuug

SEQ ID NO: 615183 - RNA, 20 nt, Artificial Sequence
  Synthetic
auuccuuacuucagaauuug

SEQ ID NO: 615184 - RNA, 21 nt, Artificial Sequence
  Synthetic
gauuccuuacuucagaauuug

SEQ ID NO: 615185 - RNA, 22 nt, Artificial Sequence
  Synthetic
agauuccuuacuucagaauuug

SEQ ID NO: 615186 - RNA, 23 nt, Artificial Sequence
  Synthetic
aagauuccuuacuucagaauuug

SEQ ID NO: 615187 - RNA, 24 nt, Artificial Sequence
  Synthetic
aaagauuccuuacuucagaauuug

SEQ ID NO: 615188 - RNA, 18 nt, Artificial Sequence
  Synthetic
aaaauagcugagaauuug

SEQ ID NO: 615189 - RNA, 19 nt, Artificial Sequence
  Synthetic
aaaaauagcugagaauuug

SEQ ID NO: 615190 - RNA, 20 nt, Artificial Sequence
  Synthetic
caaaaauagcugagaauuug

SEQ ID NO: 615191 - RNA, 21 nt, Artificial Sequence
  Synthetic
acaaaaauagcugagaauuug

SEQ ID NO: 615192 - RNA, 22 nt, Artificial Sequence
  Synthetic
cacaaaaauagcugagaauuug

SEQ ID NO: 615193 - RNA, 23 nt, Artificial Sequence
  Synthetic
gcacaaaaauagcugagaauuug

SEQ ID NO: 615194 - RNA, 24 nt, Artificial Sequence
  Synthetic
ugcacaaaaauagcugagaauuug

SEQ ID NO: 615195 - RNA, 18 nt, Artificial Sequence
  Synthetic
cagcuaguaaggaauuug

SEQ ID NO: 615196 - RNA, 19 nt, Artificial Sequence
  Synthetic
acagcuaguaaggaauuug

SEQ ID NO: 615197 - RNA, 20 nt, Artificial Sequence
  Synthetic
cacagcuaguaaggaauuug

SEQ ID NO: 615198 - RNA, 21 nt, Artificial Sequence
  Synthetic
acacagcuaguaaggaauuug

SEQ ID NO: 615199 - RNA, 22 nt, Artificial Sequence
  Synthetic
gacacagcuaguaaggaauuug

SEQ ID NO: 615200 - RNA, 23 nt, Artificial Sequence
  Synthetic
ugacacagcuaguaaggaauuug

SEQ ID NO: 615201 - RNA, 24 nt, Artificial Sequence
  Synthetic
augacacagcuaguaaggaauuug

SEQ ID NO: 615202 - RNA, 18 nt, Artificial Sequence
  Synthetic
guaagaaguaggaauuug

SEQ ID NO: 615203 - RNA, 19 nt, Artificial Sequence
  Synthetic
aguaagaaguaggaauuug

SEQ ID NO: 615204 - RNA, 20 nt, Artificial Sequence
  Synthetic
caguaagaaguaggaauuug

SEQ ID NO: 615205 - RNA, 21 nt, Artificial Sequence
  Synthetic
acaguaagaaguaggaauuug

SEQ ID NO: 615206 - RNA, 22 nt, Artificial Sequence
  Synthetic
aacaguaagaaguaggaauuug

SEQ ID NO: 615207 - RNA, 23 nt, Artificial Sequence
  Synthetic
caacaguaagaaguaggaauuug

SEQ ID NO: 615208 - RNA, 24 nt, Artificial Sequence
  Synthetic
acaacaguaagaaguaggaauuug

SEQ ID NO: 615209 - RNA, 18 nt, Artificial Sequence
  Synthetic
caggucugcuggaauuug

SEQ ID NO: 615210 - RNA, 19 nt, Artificial Sequence
  Synthetic
gcaggucugcuggaauuug

SEQ ID NO: 615211 - RNA, 20 nt, Artificial Sequence
  Synthetic
ugcaggucugcuggaauuug

SEQ ID NO: 615212 - RNA, 21 nt, Artificial Sequence
  Synthetic
cugcaggucugcuggaauuug

SEQ ID NO: 615213 - RNA, 22 nt, Artificial Sequence
  Synthetic
gcugcaggucugcuggaauuug

SEQ ID NO: 615214 - RNA, 23 nt, Artificial Sequence
  Synthetic
ugcugcaggucugcuggaauuug

SEQ ID NO: 615215 - RNA, 24 nt, Artificial Sequence
  Synthetic
cugcugcaggucugcuggaauuug

SEQ ID NO: 615216 - RNA, 18 nt, Artificial Sequence
  Synthetic
uguuuuuguuggaauuug

SEQ ID NO: 615217 - RNA, 19 nt, Artificial Sequence
  Synthetic
uuguuuuuguuggaauuug

SEQ ID NO: 615218 - RNA, 20 nt, Artificial Sequence
  Synthetic
auuguuuuuguuggaauuug

SEQ ID NO: 615219 - RNA, 21 nt, Artificial Sequence
  Synthetic
aauuguuuuuguuggaauuug

SEQ ID NO: 615220 - RNA, 22 nt, Artificial Sequence
  Synthetic
caauuguuuuuguuggaauuug

SEQ ID NO: 615221 - RNA, 23 nt, Artificial Sequence
  Synthetic
gcaauuguuuuuguuggaauuug

SEQ ID NO: 615222 - RNA, 24 nt, Artificial Sequence
  Synthetic
ugcaauuguuuuuguuggaauuug

SEQ ID NO: 615223 - RNA, 18 nt, Artificial Sequence
  Synthetic
uauuuagaaaugaauuug

SEQ ID NO: 615224 - RNA, 19 nt, Artificial Sequence
  Synthetic
cuauuuagaaaugaauuug

SEQ ID NO: 615225 - RNA, 20 nt, Artificial Sequence
  Synthetic
gcuauuuagaaaugaauuug

SEQ ID NO: 615226 - RNA, 21 nt, Artificial Sequence
  Synthetic
agcuauuuagaaaugaauuug

SEQ ID NO: 615227 - RNA, 22 nt, Artificial Sequence
  Synthetic
cagcuauuuagaaaugaauuug

SEQ ID NO: 615228 - RNA, 23 nt, Artificial Sequence
  Synthetic
acagcuauuuagaaaugaauuug

SEQ ID NO: 615229 - RNA, 24 nt, Artificial Sequence
  Synthetic
uacagcuauuuagaaaugaauuug

SEQ ID NO: 615230 - RNA, 18 nt, Artificial Sequence
  Synthetic
gauagaucaaugaauuug

SEQ ID NO: 615231 - RNA, 19 nt, Artificial Sequence
  Synthetic
agauagaucaaugaauuug

SEQ ID NO: 615232 - RNA, 20 nt, Artificial Sequence
  Synthetic
aagauagaucaaugaauuug

SEQ ID NO: 615233 - RNA, 21 nt, Artificial Sequence
  Synthetic
caagauagaucaaugaauuug

SEQ ID NO: 615234 - RNA, 22 nt, Artificial Sequence
  Synthetic
acaagauagaucaaugaauuug

SEQ ID NO: 615235 - RNA, 23 nt, Artificial Sequence
  Synthetic
aacaagauagaucaaugaauuug

SEQ ID NO: 615236 - RNA, 24 nt, Artificial Sequence
  Synthetic
gaacaagauagaucaaugaauuug

SEQ ID NO: 615237 - RNA, 18 nt, Artificial Sequence
  Synthetic
ucauucaauaauaauuug

SEQ ID NO: 615238 - RNA, 19 nt, Artificial Sequence
  Synthetic
aucauucaauaauaauuug

SEQ ID NO: 615239 - RNA, 20 nt, Artificial Sequence
  Synthetic
aaucauucaauaauaauuug

SEQ ID NO: 615240 - RNA, 21 nt, Artificial Sequence
  Synthetic
caaucauucaauaauaauuug

SEQ ID NO: 615241 - RNA, 22 nt, Artificial Sequence
  Synthetic
acaaucauucaauaauaauuug

SEQ ID NO: 615242 - RNA, 23 nt, Artificial Sequence
  Synthetic
uacaaucauucaauaauaauuug

SEQ ID NO: 615243 - RNA, 24 nt, Artificial Sequence
  Synthetic
cuacaaucauucaauaauaauuug

SEQ ID NO: 615244 - RNA, 18 nt, Artificial Sequence
  Synthetic
ugaaaauaauauaauuug

SEQ ID NO: 615245 - RNA, 19 nt, Artificial Sequence
  Synthetic
cugaaaauaauauaauuug

SEQ ID NO: 615246 - RNA, 20 nt, Artificial Sequence
  Synthetic
acugaaaauaauauaauuug

SEQ ID NO: 615247 - RNA, 21 nt, Artificial Sequence
  Synthetic
gacugaaaauaauauaauuug

SEQ ID NO: 615248 - RNA, 22 nt, Artificial Sequence
  Synthetic
ugacugaaaauaauauaauuug

SEQ ID NO: 615249 - RNA, 23 nt, Artificial Sequence
  Synthetic
augacugaaaauaauauaauuug

SEQ ID NO: 615250 - RNA, 24 nt, Artificial Sequence
  Synthetic
aaugacugaaaauaauauaauuug

SEQ ID NO: 615251 - RNA, 18 nt, Artificial Sequence
  Synthetic
cagaaauuaaguaauuug

SEQ ID NO: 615252 - RNA, 19 nt, Artificial Sequence
  Synthetic
acagaaauuaaguaauuug

SEQ ID NO: 615253 - RNA, 20 nt, Artificial Sequence
  Synthetic
cacagaaauuaaguaauuug

SEQ ID NO: 615254 - RNA, 21 nt, Artificial Sequence
  Synthetic
ucacagaaauuaaguaauuug

SEQ ID NO: 615255 - RNA, 22 nt, Artificial Sequence
  Synthetic
aucacagaaauuaaguaauuug

SEQ ID NO: 615256 - RNA, 23 nt, Artificial Sequence
  Synthetic
caucacagaaauuaaguaauuug

SEQ ID NO: 615257 - RNA, 24 nt, Artificial Sequence
  Synthetic
ccaucacagaaauuaaguaauuug

SEQ ID NO: 615258 - RNA, 18 nt, Artificial Sequence
  Synthetic
agaacaguagguaauuug

SEQ ID NO: 615259 - RNA, 19 nt, Artificial Sequence
  Synthetic
aagaacaguagguaauuug

SEQ ID NO: 615260 - RNA, 20 nt, Artificial Sequence
  Synthetic
aaagaacaguagguaauuug

SEQ ID NO: 615261 - RNA, 21 nt, Artificial Sequence
  Synthetic
aaaagaacaguagguaauuug

SEQ ID NO: 615262 - RNA, 22 nt, Artificial Sequence
  Synthetic
gaaaagaacaguagguaauuug

SEQ ID NO: 615263 - RNA, 23 nt, Artificial Sequence
  Synthetic
ggaaaagaacaguagguaauuug

SEQ ID NO: 615264 - RNA, 24 nt, Artificial Sequence
  Synthetic
gggaaaagaacaguagguaauuug

SEQ ID NO: 615265 - RNA, 18 nt, Artificial Sequence
  Synthetic
gaacgaugaauuaauuug

SEQ ID NO: 615266 - RNA, 19 nt, Artificial Sequence
  Synthetic
ugaacgaugaauuaauuug

SEQ ID NO: 615267 - RNA, 20 nt, Artificial Sequence
  Synthetic
cugaacgaugaauuaauuug

SEQ ID NO: 615268 - RNA, 21 nt, Artificial Sequence
  Synthetic
acugaacgaugaauuaauuug

SEQ ID NO: 615269 - RNA, 22 nt, Artificial Sequence
  Synthetic
aacugaacgaugaauuaauuug

SEQ ID NO: 615270 - RNA, 23 nt, Artificial Sequence
  Synthetic
caacugaacgaugaauuaauuug

SEQ ID NO: 615271 - RNA, 24 nt, Artificial Sequence
  Synthetic
ccaacugaacgaugaauuaauuug

SEQ ID NO: 615272 - RNA, 18 nt, Artificial Sequence
  Synthetic
aguauuauauuuaauuug

SEQ ID NO: 615273 - RNA, 19 nt, Artificial Sequence
  Synthetic
caguauuauauuuaauuug

SEQ ID NO: 615274 - RNA, 20 nt, Artificial Sequence
  Synthetic
gcaguauuauauuuaauuug

SEQ ID NO: 615275 - RNA, 21 nt, Artificial Sequence
  Synthetic
ugcaguauuauauuuaauuug

SEQ ID NO: 615276 - RNA, 22 nt, Artificial Sequence
  Synthetic
augcaguauuauauuuaauuug

SEQ ID NO: 615277 - RNA, 23 nt, Artificial Sequence
  Synthetic
aaugcaguauuauauuuaauuug

SEQ ID NO: 615278 - RNA, 24 nt, Artificial Sequence
  Synthetic
uaaugcaguauuauauuuaauuug

SEQ ID NO: 615279 - RNA, 18 nt, Artificial Sequence
  Synthetic
auauucgcuuuuaauuug

SEQ ID NO: 615280 - RNA, 19 nt, Artificial Sequence
  Synthetic
aauauucgcuuuuaauuug

SEQ ID NO: 615281 - RNA, 20 nt, Artificial Sequence
  Synthetic
aaauauucgcuuuuaauuug

SEQ ID NO: 615282 - RNA, 21 nt, Artificial Sequence
  Synthetic
aaaauauucgcuuuuaauuug

SEQ ID NO: 615283 - RNA, 22 nt, Artificial Sequence
  Synthetic
uaaaauauucgcuuuuaauuug

SEQ ID NO: 615284 - RNA, 23 nt, Artificial Sequence
  Synthetic
uuaaaauauucgcuuuuaauuug

SEQ ID NO: 615285 - RNA, 24 nt, Artificial Sequence
  Synthetic
auuaaaauauucgcuuuuaauuug

SEQ ID NO: 615286 - RNA, 18 nt, Artificial Sequence
  Synthetic
uguauguauaaacauuug

SEQ ID NO: 615287 - RNA, 19 nt, Artificial Sequence
  Synthetic
auguauguauaaacauuug

SEQ ID NO: 615288 - RNA, 20 nt, Artificial Sequence
  Synthetic
cauguauguauaaacauuug

SEQ ID NO: 615289 - RNA, 21 nt, Artificial Sequence
  Synthetic
acauguauguauaaacauuug

SEQ ID NO: 615290 - RNA, 22 nt, Artificial Sequence
  Synthetic
uacauguauguauaaacauuug

SEQ ID NO: 615291 - RNA, 23 nt, Artificial Sequence
  Synthetic
guacauguauguauaaacauuug

SEQ ID NO: 615292 - RNA, 24 nt, Artificial Sequence
  Synthetic
aguacauguauguauaaacauuug

SEQ ID NO: 615293 - RNA, 18 nt, Artificial Sequence
  Synthetic
caauuguuuuaacauuug

SEQ ID NO: 615294 - RNA, 19 nt, Artificial Sequence
  Synthetic
acaauuguuuuaacauuug

SEQ ID NO: 615295 - RNA, 20 nt, Artificial Sequence
  Synthetic
aacaauuguuuuaacauuug

SEQ ID NO: 615296 - RNA, 21 nt, Artificial Sequence
  Synthetic
uaacaauuguuuuaacauuug

SEQ ID NO: 615297 - RNA, 22 nt, Artificial Sequence
  Synthetic
cuaacaauuguuuuaacauuug

SEQ ID NO: 615298 - RNA, 23 nt, Artificial Sequence
  Synthetic
acuaacaauuguuuuaacauuug

SEQ ID NO: 615299 - RNA, 24 nt, Artificial Sequence
  Synthetic
aacuaacaauuguuuuaacauuug

SEQ ID NO: 615300 - RNA, 18 nt, Artificial Sequence
  Synthetic
cuucuggugucacauuug

SEQ ID NO: 615301 - RNA, 19 nt, Artificial Sequence
  Synthetic
acuucuggugucacauuug

SEQ ID NO: 615302 - RNA, 20 nt, Artificial Sequence
  Synthetic
gacuucuggugucacauuug

SEQ ID NO: 615303 - RNA, 21 nt, Artificial Sequence
  Synthetic
agacuucuggugucacauuug

SEQ ID NO: 615304 - RNA, 22 nt, Artificial Sequence
  Synthetic
cagacuucuggugucacauuug

SEQ ID NO: 615305 - RNA, 23 nt, Artificial Sequence
  Synthetic
ucagacuucuggugucacauuug

SEQ ID NO: 615306 - RNA, 24 nt, Artificial Sequence
  Synthetic
gucagacuucuggugucacauuug

SEQ ID NO: 615307 - RNA, 18 nt, Artificial Sequence
  Synthetic
cagaaguuuggacauuug

SEQ ID NO: 615308 - RNA, 19 nt, Artificial Sequence
  Synthetic
acagaaguuuggacauuug

SEQ ID NO: 615309 - RNA, 20 nt, Artificial Sequence
  Synthetic
uacagaaguuuggacauuug

SEQ ID NO: 615310 - RNA, 21 nt, Artificial Sequence
  Synthetic
cuacagaaguuuggacauuug

SEQ ID NO: 615311 - RNA, 22 nt, Artificial Sequence
  Synthetic
ccuacagaaguuuggacauuug

SEQ ID NO: 615312 - RNA, 23 nt, Artificial Sequence
  Synthetic
accuacagaaguuuggacauuug

SEQ ID NO: 615313 - RNA, 24 nt, Artificial Sequence
  Synthetic
gaccuacagaaguuuggacauuug

SEQ ID NO: 615314 - RNA, 18 nt, Artificial Sequence
  Synthetic
gaguaugauugacauuug

SEQ ID NO: 615315 - RNA, 19 nt, Artificial Sequence
  Synthetic
agaguaugauugacauuug

SEQ ID NO: 615316 - RNA, 20 nt, Artificial Sequence
  Synthetic
aagaguaugauugacauuug

SEQ ID NO: 615317 - RNA, 21 nt, Artificial Sequence
  Synthetic
aaagaguaugauugacauuug

SEQ ID NO: 615318 - RNA, 22 nt, Artificial Sequence
  Synthetic
caaagaguaugauugacauuug

SEQ ID NO: 615319 - RNA, 23 nt, Artificial Sequence
  Synthetic
gcaaagaguaugauugacauuug

SEQ ID NO: 615320 - RNA, 24 nt, Artificial Sequence
  Synthetic
ggcaaagaguaugauugacauuug

SEQ ID NO: 615321 - RNA, 18 nt, Artificial Sequence
  Synthetic
cagagacauguacauuug

SEQ ID NO: 615322 - RNA, 19 nt, Artificial Sequence
  Synthetic
ccagagacauguacauuug

SEQ ID NO: 615323 - RNA, 20 nt, Artificial Sequence
  Synthetic
accagagacauguacauuug

SEQ ID NO: 615324 - RNA, 21 nt, Artificial Sequence
  Synthetic
uaccagagacauguacauuug

SEQ ID NO: 615325 - RNA, 22 nt, Artificial Sequence
  Synthetic
cuaccagagacauguacauuug

SEQ ID NO: 615326 - RNA, 23 nt, Artificial Sequence
  Synthetic
ucuaccagagacauguacauuug

SEQ ID NO: 615327 - RNA, 24 nt, Artificial Sequence
  Synthetic
gucuaccagagacauguacauuug

SEQ ID NO: 615328 - RNA, 18 nt, Artificial Sequence
  Synthetic
ccccugauccaccauuug

SEQ ID NO: 615329 - RNA, 19 nt, Artificial Sequence
  Synthetic
cccccugauccaccauuug

SEQ ID NO: 615330 - RNA, 20 nt, Artificial Sequence
  Synthetic
ccccccugauccaccauuug

SEQ ID NO: 615331 - RNA, 21 nt, Artificial Sequence
  Synthetic
gccccccugauccaccauuug

SEQ ID NO: 615332 - RNA, 22 nt, Artificial Sequence
  Synthetic
ggccccccugauccaccauuug

SEQ ID NO: 615333 - RNA, 23 nt, Artificial Sequence
  Synthetic
gggccccccugauccaccauuug

SEQ ID NO: 615334 - RNA, 24 nt, Artificial Sequence
  Synthetic
ugggccccccugauccaccauuug

SEQ ID NO: 615335 - RNA, 18 nt, Artificial Sequence
  Synthetic
uuucugcaggaccauuug

SEQ ID NO: 615336 - RNA, 19 nt, Artificial Sequence
  Synthetic
auuucugcaggaccauuug

SEQ ID NO: 615337 - RNA, 20 nt, Artificial Sequence
  Synthetic
aauuucugcaggaccauuug

SEQ ID NO: 615338 - RNA, 21 nt, Artificial Sequence
  Synthetic
caauuucugcaggaccauuug

SEQ ID NO: 615339 - RNA, 22 nt, Artificial Sequence
  Synthetic
ccaauuucugcaggaccauuug

SEQ ID NO: 615340 - RNA, 23 nt, Artificial Sequence
  Synthetic
uccaauuucugcaggaccauuug

SEQ ID NO: 615341 - RNA, 24 nt, Artificial Sequence
  Synthetic
guccaauuucugcaggaccauuug

SEQ ID NO: 615342 - RNA, 18 nt, Artificial Sequence
  Synthetic
uaauacugcuaccauuug

SEQ ID NO: 615343 - RNA, 19 nt, Artificial Sequence
  Synthetic
guaauacugcuaccauuug

SEQ ID NO: 615344 - RNA, 20 nt, Artificial Sequence
  Synthetic
gguaauacugcuaccauuug

SEQ ID NO: 615345 - RNA, 21 nt, Artificial Sequence
  Synthetic
agguaauacugcuaccauuug

SEQ ID NO: 615346 - RNA, 22 nt, Artificial Sequence
  Synthetic
aagguaauacugcuaccauuug

SEQ ID NO: 615347 - RNA, 23 nt, Artificial Sequence
  Synthetic
aaagguaauacugcuaccauuug

SEQ ID NO: 615348 - RNA, 24 nt, Artificial Sequence
  Synthetic
uaaagguaauacugcuaccauuug

SEQ ID NO: 615349 - RNA, 18 nt, Artificial Sequence
  Synthetic
aggagagggagccauuug

SEQ ID NO: 615350 - RNA, 19 nt, Artificial Sequence
  Synthetic
uaggagagggagccauuug

SEQ ID NO: 615351 - RNA, 20 nt, Artificial Sequence
  Synthetic
cuaggagagggagccauuug

SEQ ID NO: 615352 - RNA, 21 nt, Artificial Sequence
  Synthetic
ccuaggagagggagccauuug

SEQ ID NO: 615353 - RNA, 22 nt, Artificial Sequence
  Synthetic
uccuaggagagggagccauuug

SEQ ID NO: 615354 - RNA, 23 nt, Artificial Sequence
  Synthetic
uuccuaggagagggagccauuug

SEQ ID NO: 615355 - RNA, 24 nt, Artificial Sequence
  Synthetic
guuccuaggagagggagccauuug

SEQ ID NO: 615356 - RNA, 18 nt, Artificial Sequence
  Synthetic
agccuuaagggccauuug

SEQ ID NO: 615357 - RNA, 19 nt, Artificial Sequence
  Synthetic
aagccuuaagggccauuug

SEQ ID NO: 615358 - RNA, 20 nt, Artificial Sequence
  Synthetic
gaagccuuaagggccauuug

SEQ ID NO: 615359 - RNA, 21 nt, Artificial Sequence
  Synthetic
ggaagccuuaagggccauuug

SEQ ID NO: 615360 - RNA, 22 nt, Artificial Sequence
  Synthetic
gggaagccuuaagggccauuug

SEQ ID NO: 615361 - RNA, 23 nt, Artificial Sequence
  Synthetic
ugggaagccuuaagggccauuug

SEQ ID NO: 615362 - RNA, 24 nt, Artificial Sequence
  Synthetic
augggaagccuuaagggccauuug

SEQ ID NO: 615363 - RNA, 18 nt, Artificial Sequence
  Synthetic
ccuuuuuacuuccauuug

SEQ ID NO: 615364 - RNA, 19 nt, Artificial Sequence
  Synthetic
gccuuuuuacuuccauuug

SEQ ID NO: 615365 - RNA, 20 nt, Artificial Sequence
  Synthetic
ggccuuuuuacuuccauuug

SEQ ID NO: 615366 - RNA, 21 nt, Artificial Sequence
  Synthetic
gggccuuuuuacuuccauuug

SEQ ID NO: 615367 - RNA, 22 nt, Artificial Sequence
  Synthetic
agggccuuuuuacuuccauuug

SEQ ID NO: 615368 - RNA, 23 nt, Artificial Sequence
  Synthetic
cagggccuuuuuacuuccauuug

SEQ ID NO: 615369 - RNA, 24 nt, Artificial Sequence
  Synthetic
ucagggccuuuuuacuuccauuug

SEQ ID NO: 615370 - RNA, 18 nt, Artificial Sequence
  Synthetic
aaaacacuuaggcauuug

SEQ ID NO: 615371 - RNA, 19 nt, Artificial Sequence
  Synthetic
aaaaacacuuaggcauuug

SEQ ID NO: 615372 - RNA, 20 nt, Artificial Sequence
  Synthetic
caaaaacacuuaggcauuug

SEQ ID NO: 615373 - RNA, 21 nt, Artificial Sequence
  Synthetic
acaaaaacacuuaggcauuug

SEQ ID NO: 615374 - RNA, 22 nt, Artificial Sequence
  Synthetic
aacaaaaacacuuaggcauuug

SEQ ID NO: 615375 - RNA, 23 nt, Artificial Sequence
  Synthetic
aaacaaaaacacuuaggcauuug

SEQ ID NO: 615376 - RNA, 24 nt, Artificial Sequence
  Synthetic
aaaacaaaaacacuuaggcauuug

SEQ ID NO: 615377 - RNA, 18 nt, Artificial Sequence
  Synthetic
ugaagaggaaugcauuug

SEQ ID NO: 615378 - RNA, 19 nt, Artificial Sequence
  Synthetic
uugaagaggaaugcauuug

SEQ ID NO: 615379 - RNA, 20 nt, Artificial Sequence
  Synthetic
guugaagaggaaugcauuug

SEQ ID NO: 615380 - RNA, 21 nt, Artificial Sequence
  Synthetic
gguugaagaggaaugcauuug

SEQ ID NO: 615381 - RNA, 22 nt, Artificial Sequence
  Synthetic
ggguugaagaggaaugcauuug

SEQ ID NO: 615382 - RNA, 23 nt, Artificial Sequence
  Synthetic
gggguugaagaggaaugcauuug

SEQ ID NO: 615383 - RNA, 24 nt, Artificial Sequence
  Synthetic
ugggguugaagaggaaugcauuug

SEQ ID NO: 615384 - RNA, 18 nt, Artificial Sequence
  Synthetic
ucaaauuugaugcauuug

SEQ ID NO: 615385 - RNA, 19 nt, Artificial Sequence
  Synthetic
aucaaauuugaugcauuug

SEQ ID NO: 615386 - RNA, 20 nt, Artificial Sequence
  Synthetic
caucaaauuugaugcauuug

SEQ ID NO: 615387 - RNA, 21 nt, Artificial Sequence
  Synthetic
acaucaaauuugaugcauuug

SEQ ID NO: 615388 - RNA, 22 nt, Artificial Sequence
  Synthetic
cacaucaaauuugaugcauuug

SEQ ID NO: 615389 - RNA, 23 nt, Artificial Sequence
  Synthetic
gcacaucaaauuugaugcauuug

SEQ ID NO: 615390 - RNA, 24 nt, Artificial Sequence
  Synthetic
ugcacaucaaauuugaugcauuug

SEQ ID NO: 615391 - RNA, 18 nt, Artificial Sequence
  Synthetic
gugcuuccacugcauuug

SEQ ID NO: 615392 - RNA, 19 nt, Artificial Sequence
  Synthetic
ggugcuuccacugcauuug

SEQ ID NO: 615393 - RNA, 20 nt, Artificial Sequence
  Synthetic
cggugcuuccacugcauuug

SEQ ID NO: 615394 - RNA, 21 nt, Artificial Sequence
  Synthetic
acggugcuuccacugcauuug

SEQ ID NO: 615395 - RNA, 22 nt, Artificial Sequence
  Synthetic
aacggugcuuccacugcauuug

SEQ ID NO: 615396 - RNA, 23 nt, Artificial Sequence
  Synthetic
gaacggugcuuccacugcauuug

SEQ ID NO: 615397 - RNA, 24 nt, Artificial Sequence
  Synthetic
agaacggugcuuccacugcauuug

SEQ ID NO: 615398 - RNA, 18 nt, Artificial Sequence
  Synthetic
caauaaaaggugcauuug

SEQ ID NO: 615399 - RNA, 19 nt, Artificial Sequence
  Synthetic
ucaauaaaaggugcauuug

SEQ ID NO: 615400 - RNA, 20 nt, Artificial Sequence
  Synthetic
aucaauaaaaggugcauuug

SEQ ID NO: 615401 - RNA, 21 nt, Artificial Sequence
  Synthetic
caucaauaaaaggugcauuug

SEQ ID NO: 615402 - RNA, 22 nt, Artificial Sequence
  Synthetic
ucaucaauaaaaggugcauuug

SEQ ID NO: 615403 - RNA, 23 nt, Artificial Sequence
  Synthetic
uucaucaauaaaaggugcauuug

SEQ ID NO: 615404 - RNA, 24 nt, Artificial Sequence
  Synthetic
auucaucaauaaaaggugcauuug

SEQ ID NO: 615405 - RNA, 18 nt, Artificial Sequence
  Synthetic
agaaguagguugcauuug

SEQ ID NO: 615406 - RNA, 19 nt, Artificial Sequence
  Synthetic
cagaaguagguugcauuug

SEQ ID NO: 615407 - RNA, 20 nt, Artificial Sequence
  Synthetic
acagaaguagguugcauuug

SEQ ID NO: 615408 - RNA, 21 nt, Artificial Sequence
  Synthetic
aacagaaguagguugcauuug

SEQ ID NO: 615409 - RNA, 22 nt, Artificial Sequence
  Synthetic
caacagaaguagguugcauuug

SEQ ID NO: 615410 - RNA, 23 nt, Artificial Sequence
  Synthetic
acaacagaaguagguugcauuug

SEQ ID NO: 615411 - RNA, 24 nt, Artificial Sequence
  Synthetic
gacaacagaaguagguugcauuug

SEQ ID NO: 615412 - RNA, 18 nt, Artificial Sequence
  Synthetic
ucuguuuuuuugcauuug

SEQ ID NO: 615413 - RNA, 19 nt, Artificial Sequence
  Synthetic
uucuguuuuuuugcauuug

SEQ ID NO: 615414 - RNA, 20 nt, Artificial Sequence
  Synthetic
uuucuguuuuuuugcauuug

SEQ ID NO: 615415 - RNA, 21 nt, Artificial Sequence
  Synthetic
auuucuguuuuuuugcauuug

SEQ ID NO: 615416 - RNA, 22 nt, Artificial Sequence
  Synthetic
gauuucuguuuuuuugcauuug

SEQ ID NO: 615417 - RNA, 23 nt, Artificial Sequence
  Synthetic
ugauuucuguuuuuuugcauuug

SEQ ID NO: 615418 - RNA, 24 nt, Artificial Sequence
  Synthetic
augauuucuguuuuuuugcauuug

SEQ ID NO: 615419 - RNA, 18 nt, Artificial Sequence
  Synthetic
aggaguugugaucauuug

SEQ ID NO: 615420 - RNA, 19 nt, Artificial Sequence
  Synthetic
gaggaguugugaucauuug

SEQ ID NO: 615421 - RNA, 20 nt, Artificial Sequence
  Synthetic
agaggaguugugaucauuug

SEQ ID NO: 615422 - RNA, 21 nt, Artificial Sequence
  Synthetic
gagaggaguugugaucauuug

SEQ ID NO: 615423 - RNA, 22 nt, Artificial Sequence
  Synthetic
ggagaggaguugugaucauuug

SEQ ID NO: 615424 - RNA, 23 nt, Artificial Sequence
  Synthetic
uggagaggaguugugaucauuug

SEQ ID NO: 615425 - RNA, 24 nt, Artificial Sequence
  Synthetic
cuggagaggaguugugaucauuug

SEQ ID NO: 615426 - RNA, 18 nt, Artificial Sequence
  Synthetic
uuauacaucagucauuug

SEQ ID NO: 615427 - RNA, 19 nt, Artificial Sequence
  Synthetic
guuauacaucagucauuug

SEQ ID NO: 615428 - RNA, 20 nt, Artificial Sequence
  Synthetic
aguuauacaucagucauuug

SEQ ID NO: 615429 - RNA, 21 nt, Artificial Sequence
  Synthetic
aaguuauacaucagucauuug

SEQ ID NO: 615430 - RNA, 22 nt, Artificial Sequence
  Synthetic
gaaguuauacaucagucauuug

SEQ ID NO: 615431 - RNA, 23 nt, Artificial Sequence
  Synthetic
ugaaguuauacaucagucauuug

SEQ ID NO: 615432 - RNA, 24 nt, Artificial Sequence
  Synthetic
cugaaguuauacaucagucauuug

SEQ ID NO: 615433 - RNA, 18 nt, Artificial Sequence
  Synthetic
cacugagacaaagauuug

SEQ ID NO: 615434 - RNA, 19 nt, Artificial Sequence
  Synthetic
ucacugagacaaagauuug

SEQ ID NO: 615435 - RNA, 20 nt, Artificial Sequence
  Synthetic
aucacugagacaaagauuug

SEQ ID NO: 615436 - RNA, 21 nt, Artificial Sequence
  Synthetic
gaucacugagacaaagauuug

SEQ ID NO: 615437 - RNA, 22 nt, Artificial Sequence
  Synthetic
agaucacugagacaaagauuug

SEQ ID NO: 615438 - RNA, 23 nt, Artificial Sequence
  Synthetic
gagaucacugagacaaagauuug

SEQ ID NO: 615439 - RNA, 24 nt, Artificial Sequence
  Synthetic
agagaucacugagacaaagauuug

SEQ ID NO: 615440 - RNA, 18 nt, Artificial Sequence
  Synthetic
ucuuuucugaaagauuug

SEQ ID NO: 615441 - RNA, 19 nt, Artificial Sequence
  Synthetic
uucuuuucugaaagauuug

SEQ ID NO: 615442 - RNA, 20 nt, Artificial Sequence
  Synthetic
guucuuuucugaaagauuug

SEQ ID NO: 615443 - RNA, 21 nt, Artificial Sequence
  Synthetic
uguucuuuucugaaagauuug

SEQ ID NO: 615444 - RNA, 22 nt, Artificial Sequence
  Synthetic
cuguucuuuucugaaagauuug

SEQ ID NO: 615445 - RNA, 23 nt, Artificial Sequence
  Synthetic
ucuguucuuuucugaaagauuug

SEQ ID NO: 615446 - RNA, 24 nt, Artificial Sequence
  Synthetic
aucuguucuuuucugaaagauuug

SEQ ID NO: 615447 - RNA, 18 nt, Artificial Sequence
  Synthetic
gaaauggcagaagauuug

SEQ ID NO: 615448 - RNA, 19 nt, Artificial Sequence
  Synthetic
ggaaauggcagaagauuug

SEQ ID NO: 615449 - RNA, 20 nt, Artificial Sequence
  Synthetic
uggaaauggcagaagauuug

SEQ ID NO: 615450 - RNA, 21 nt, Artificial Sequence
  Synthetic
uuggaaauggcagaagauuug

SEQ ID NO: 615451 - RNA, 22 nt, Artificial Sequence
  Synthetic
auuggaaauggcagaagauuug

SEQ ID NO: 615452 - RNA, 23 nt, Artificial Sequence
  Synthetic
cauuggaaauggcagaagauuug

SEQ ID NO: 615453 - RNA, 24 nt, Artificial Sequence
  Synthetic
acauuggaaauggcagaagauuug

SEQ ID NO: 615454 - RNA, 18 nt, Artificial Sequence
  Synthetic
cuaggcuguacagauuug

SEQ ID NO: 615455 - RNA, 19 nt, Artificial Sequence
  Synthetic
ccuaggcuguacagauuug

SEQ ID NO: 615456 - RNA, 20 nt, Artificial Sequence
  Synthetic
cccuaggcuguacagauuug

SEQ ID NO: 615457 - RNA, 21 nt, Artificial Sequence
  Synthetic
gcccuaggcuguacagauuug

SEQ ID NO: 615458 - RNA, 22 nt, Artificial Sequence
  Synthetic
agcccuaggcuguacagauuug

SEQ ID NO: 615459 - RNA, 23 nt, Artificial Sequence
  Synthetic
aagcccuaggcuguacagauuug

SEQ ID NO: 615460 - RNA, 24 nt, Artificial Sequence
  Synthetic
caagcccuaggcuguacagauuug

SEQ ID NO: 615461 - RNA, 18 nt, Artificial Sequence
  Synthetic
ucaccugcuggagauuug

SEQ ID NO: 615462 - RNA, 19 nt, Artificial Sequence
  Synthetic
uucaccugcuggagauuug

SEQ ID NO: 615463 - RNA, 20 nt, Artificial Sequence
  Synthetic
auucaccugcuggagauuug

SEQ ID NO: 615464 - RNA, 21 nt, Artificial Sequence
  Synthetic
cauucaccugcuggagauuug

SEQ ID NO: 615465 - RNA, 22 nt, Artificial Sequence
  Synthetic
ccauucaccugcuggagauuug

SEQ ID NO: 615466 - RNA, 23 nt, Artificial Sequence
  Synthetic
cccauucaccugcuggagauuug

SEQ ID NO: 615467 - RNA, 24 nt, Artificial Sequence
  Synthetic
gcccauucaccugcuggagauuug

SEQ ID NO: 615468 - RNA, 18 nt, Artificial Sequence
  Synthetic
ggaaauuuuggagauuug

SEQ ID NO: 615469 - RNA, 19 nt, Artificial Sequence
  Synthetic
aggaaauuuuggagauuug

SEQ ID NO: 615470 - RNA, 20 nt, Artificial Sequence
  Synthetic
gaggaaauuuuggagauuug

SEQ ID NO: 615471 - RNA, 21 nt, Artificial Sequence
  Synthetic
agaggaaauuuuggagauuug

SEQ ID NO: 615472 - RNA, 22 nt, Artificial Sequence
  Synthetic
cagaggaaauuuuggagauuug

SEQ ID NO: 615473 - RNA, 23 nt, Artificial Sequence
  Synthetic
acagaggaaauuuuggagauuug

SEQ ID NO: 615474 - RNA, 24 nt, Artificial Sequence
  Synthetic
cacagaggaaauuuuggagauuug

SEQ ID NO: 615475 - RNA, 18 nt, Artificial Sequence
  Synthetic
guuucaagccuagauuug

SEQ ID NO: 615476 - RNA, 19 nt, Artificial Sequence
  Synthetic
aguuucaagccuagauuug

SEQ ID NO: 615477 - RNA, 20 nt, Artificial Sequence
  Synthetic
uaguuucaagccuagauuug

SEQ ID NO: 615478 - RNA, 21 nt, Artificial Sequence
  Synthetic
auaguuucaagccuagauuug

SEQ ID NO: 615479 - RNA, 22 nt, Artificial Sequence
  Synthetic
cauaguuucaagccuagauuug

SEQ ID NO: 615480 - RNA, 23 nt, Artificial Sequence
  Synthetic
ccauaguuucaagccuagauuug

SEQ ID NO: 615481 - RNA, 24 nt, Artificial Sequence
  Synthetic
uccauaguuucaagccuagauuug

SEQ ID NO: 615482 - RNA, 18 nt, Artificial Sequence
  Synthetic
acaaaaugacccgauuug

SEQ ID NO: 615483 - RNA, 19 nt, Artificial Sequence
  Synthetic
uacaaaaugacccgauuug

SEQ ID NO: 615484 - RNA, 20 nt, Artificial Sequence
  Synthetic
guacaaaaugacccgauuug

SEQ ID NO: 615485 - RNA, 21 nt, Artificial Sequence
  Synthetic
cguacaaaaugacccgauuug

SEQ ID NO: 615486 - RNA, 22 nt, Artificial Sequence
  Synthetic
acguacaaaaugacccgauuug

SEQ ID NO: 615487 - RNA, 23 nt, Artificial Sequence
  Synthetic
uacguacaaaaugacccgauuug

SEQ ID NO: 615488 - RNA, 24 nt, Artificial Sequence
  Synthetic
cuacguacaaaaugacccgauuug

SEQ ID NO: 615489 - RNA, 18 nt, Artificial Sequence
  Synthetic
uuaaauugugaggauuug

SEQ ID NO: 615490 - RNA, 19 nt, Artificial Sequence
  Synthetic
cuuaaauugugaggauuug

SEQ ID NO: 615491 - RNA, 20 nt, Artificial Sequence
  Synthetic
ucuuaaauugugaggauuug

SEQ ID NO: 615492 - RNA, 21 nt, Artificial Sequence
  Synthetic
uucuuaaauugugaggauuug

SEQ ID NO: 615493 - RNA, 22 nt, Artificial Sequence
  Synthetic
auucuuaaauugugaggauuug

SEQ ID NO: 615494 - RNA, 23 nt, Artificial Sequence
  Synthetic
aauucuuaaauugugaggauuug

SEQ ID NO: 615495 - RNA, 24 nt, Artificial Sequence
  Synthetic
uaauucuuaaauugugaggauuug

SEQ ID NO: 615496 - RNA, 18 nt, Artificial Sequence
  Synthetic
caugagcuuugggauuug

SEQ ID NO: 615497 - RNA, 19 nt, Artificial Sequence
  Synthetic
ucaugagcuuugggauuug

SEQ ID NO: 615498 - RNA, 20 nt, Artificial Sequence
  Synthetic
uucaugagcuuugggauuug

SEQ ID NO: 615499 - RNA, 21 nt, Artificial Sequence
  Synthetic
uuucaugagcuuugggauuug

SEQ ID NO: 615500 - RNA, 22 nt, Artificial Sequence
  Synthetic
uuuucaugagcuuugggauuug

SEQ ID NO: 615501 - RNA, 23 nt, Artificial Sequence
  Synthetic
guuuucaugagcuuugggauuug

SEQ ID NO: 615502 - RNA, 24 nt, Artificial Sequence
  Synthetic
uguuuucaugagcuuugggauuug

SEQ ID NO: 615503 - RNA, 18 nt, Artificial Sequence
  Synthetic
uauguggauguggauuug

SEQ ID NO: 615504 - RNA, 19 nt, Artificial Sequence
  Synthetic
auauguggauguggauuug

SEQ ID NO: 615505 - RNA, 20 nt, Artificial Sequence
  Synthetic
aauauguggauguggauuug

SEQ ID NO: 615506 - RNA, 21 nt, Artificial Sequence
  Synthetic
aaauauguggauguggauuug

SEQ ID NO: 615507 - RNA, 22 nt, Artificial Sequence
  Synthetic
uaaauauguggauguggauuug

SEQ ID NO: 615508 - RNA, 23 nt, Artificial Sequence
  Synthetic
uuaaauauguggauguggauuug

SEQ ID NO: 615509 - RNA, 24 nt, Artificial Sequence
  Synthetic
cuuaaauauguggauguggauuug

SEQ ID NO: 615510 - RNA, 18 nt, Artificial Sequence
  Synthetic
acguuguacaaauauuug

SEQ ID NO: 615511 - RNA, 19 nt, Artificial Sequence
  Synthetic
uacguuguacaaauauuug

SEQ ID NO: 615512 - RNA, 20 nt, Artificial Sequence
  Synthetic
uuacguuguacaaauauuug

SEQ ID NO: 615513 - RNA, 21 nt, Artificial Sequence
  Synthetic
auuacguuguacaaauauuug

SEQ ID NO: 615514 - RNA, 22 nt, Artificial Sequence
  Synthetic
uauuacguuguacaaauauuug

SEQ ID NO: 615515 - RNA, 23 nt, Artificial Sequence
  Synthetic
uuauuacguuguacaaauauuug

SEQ ID NO: 615516 - RNA, 24 nt, Artificial Sequence
  Synthetic
auuauuacguuguacaaauauuug

SEQ ID NO: 615517 - RNA, 18 nt, Artificial Sequence
  Synthetic
uaacucaagaaauauuug

SEQ ID NO: 615518 - RNA, 19 nt, Artificial Sequence
  Synthetic
uuaacucaagaaauauuug

SEQ ID NO: 615519 - RNA, 20 nt, Artificial Sequence
  Synthetic
auuaacucaagaaauauuug

SEQ ID NO: 615520 - RNA, 21 nt, Artificial Sequence
  Synthetic
cauuaacucaagaaauauuug

SEQ ID NO: 615521 - RNA, 22 nt, Artificial Sequence
  Synthetic
ucauuaacucaagaaauauuug

SEQ ID NO: 615522 - RNA, 23 nt, Artificial Sequence
  Synthetic
uucauuaacucaagaaauauuug

SEQ ID NO: 615523 - RNA, 24 nt, Artificial Sequence
  Synthetic
auucauuaacucaagaaauauuug

SEQ ID NO: 615524 - RNA, 18 nt, Artificial Sequence
  Synthetic
auacacuguaaauauuug

SEQ ID NO: 615525 - RNA, 19 nt, Artificial Sequence
  Synthetic
uauacacuguaaauauuug

SEQ ID NO: 615526 - RNA, 20 nt, Artificial Sequence
  Synthetic
uuauacacuguaaauauuug

SEQ ID NO: 615527 - RNA, 21 nt, Artificial Sequence
  Synthetic
auuauacacuguaaauauuug

SEQ ID NO: 615528 - RNA, 22 nt, Artificial Sequence
  Synthetic
gauuauacacuguaaauauuug

SEQ ID NO: 615529 - RNA, 23 nt, Artificial Sequence
  Synthetic
ugauuauacacuguaaauauuug

SEQ ID NO: 615530 - RNA, 24 nt, Artificial Sequence
  Synthetic
uugauuauacacuguaaauauuug

SEQ ID NO: 615531 - RNA, 18 nt, Artificial Sequence
  Synthetic
ucugauaagcaauauuug

SEQ ID NO: 615532 - RNA, 19 nt, Artificial Sequence
  Synthetic
uucugauaagcaauauuug

SEQ ID NO: 615533 - RNA, 20 nt, Artificial Sequence
  Synthetic
cuucugauaagcaauauuug

SEQ ID NO: 615534 - RNA, 21 nt, Artificial Sequence
  Synthetic
ccuucugauaagcaauauuug

SEQ ID NO: 615535 - RNA, 22 nt, Artificial Sequence
  Synthetic
uccuucugauaagcaauauuug

SEQ ID NO: 615536 - RNA, 23 nt, Artificial Sequence
  Synthetic
auccuucugauaagcaauauuug

SEQ ID NO: 615537 - RNA, 24 nt, Artificial Sequence
  Synthetic
aauccuucugauaagcaauauuug

SEQ ID NO: 615538 - RNA, 18 nt, Artificial Sequence
  Synthetic
uaauauuuggcauauuug

SEQ ID NO: 615539 - RNA, 19 nt, Artificial Sequence
  Synthetic
guaauauuuggcauauuug

SEQ ID NO: 615540 - RNA, 20 nt, Artificial Sequence
  Synthetic
gguaauauuuggcauauuug

SEQ ID NO: 615541 - RNA, 21 nt, Artificial Sequence
  Synthetic
agguaauauuuggcauauuug

SEQ ID NO: 615542 - RNA, 22 nt, Artificial Sequence
  Synthetic
uagguaauauuuggcauauuug

SEQ ID NO: 615543 - RNA, 23 nt, Artificial Sequence
  Synthetic
guagguaauauuuggcauauuug

SEQ ID NO: 615544 - RNA, 24 nt, Artificial Sequence
  Synthetic
gguagguaauauuuggcauauuug

SEQ ID NO: 615545 - RNA, 18 nt, Artificial Sequence
  Synthetic
uaagcagacagauauuug

SEQ ID NO: 615546 - RNA, 19 nt, Artificial Sequence
  Synthetic
cuaagcagacagauauuug

SEQ ID NO: 615547 - RNA, 20 nt, Artificial Sequence
  Synthetic
acuaagcagacagauauuug

SEQ ID NO: 615548 - RNA, 21 nt, Artificial Sequence
  Synthetic
uacuaagcagacagauauuug

SEQ ID NO: 615549 - RNA, 22 nt, Artificial Sequence
  Synthetic
cuacuaagcagacagauauuug

SEQ ID NO: 615550 - RNA, 23 nt, Artificial Sequence
  Synthetic
acuacuaagcagacagauauuug

SEQ ID NO: 615551 - RNA, 24 nt, Artificial Sequence
  Synthetic
gacuacuaagcagacagauauuug

SEQ ID NO: 615552 - RNA, 18 nt, Artificial Sequence
  Synthetic
cuuuuuacacgauauuug

SEQ ID NO: 615553 - RNA, 19 nt, Artificial Sequence
  Synthetic
ucuuuuuacacgauauuug

SEQ ID NO: 615554 - RNA, 20 nt, Artificial Sequence
  Synthetic
uucuuuuuacacgauauuug

SEQ ID NO: 615555 - RNA, 21 nt, Artificial Sequence
  Synthetic
uuucuuuuuacacgauauuug

SEQ ID NO: 615556 - RNA, 22 nt, Artificial Sequence
  Synthetic
cuuucuuuuuacacgauauuug

SEQ ID NO: 615557 - RNA, 23 nt, Artificial Sequence
  Synthetic
ucuuucuuuuuacacgauauuug

SEQ ID NO: 615558 - RNA, 24 nt, Artificial Sequence
  Synthetic
gucuuucuuuuuacacgauauuug

SEQ ID NO: 615559 - RNA, 18 nt, Artificial Sequence
  Synthetic
cauuugacaggauauuug

SEQ ID NO: 615560 - RNA, 19 nt, Artificial Sequence
  Synthetic
gcauuugacaggauauuug

SEQ ID NO: 615561 - RNA, 20 nt, Artificial Sequence
  Synthetic
agcauuugacaggauauuug

SEQ ID NO: 615562 - RNA, 21 nt, Artificial Sequence
  Synthetic
cagcauuugacaggauauuug

SEQ ID NO: 615563 - RNA, 22 nt, Artificial Sequence
  Synthetic
ccagcauuugacaggauauuug

SEQ ID NO: 615564 - RNA, 23 nt, Artificial Sequence
  Synthetic
gccagcauuugacaggauauuug

SEQ ID NO: 615565 - RNA, 24 nt, Artificial Sequence
  Synthetic
agccagcauuugacaggauauuug

SEQ ID NO: 615566 - RNA, 18 nt, Artificial Sequence
  Synthetic
agagugcauggauauuug

SEQ ID NO: 615567 - RNA, 19 nt, Artificial Sequence
  Synthetic
gagagugcauggauauuug

SEQ ID NO: 615568 - RNA, 20 nt, Artificial Sequence
  Synthetic
agagagugcauggauauuug

SEQ ID NO: 615569 - RNA, 21 nt, Artificial Sequence
  Synthetic
aagagagugcauggauauuug

SEQ ID NO: 615570 - RNA, 22 nt, Artificial Sequence
  Synthetic
aaagagagugcauggauauuug

SEQ ID NO: 615571 - RNA, 23 nt, Artificial Sequence
  Synthetic
gaaagagagugcauggauauuug

SEQ ID NO: 615572 - RNA, 24 nt, Artificial Sequence
  Synthetic
agaaagagagugcauggauauuug

SEQ ID NO: 615573 - RNA, 18 nt, Artificial Sequence
  Synthetic
agauuucuaaacuauuug

SEQ ID NO: 615574 - RNA, 19 nt, Artificial Sequence
  Synthetic
aagauuucuaaacuauuug

SEQ ID NO: 615575 - RNA, 20 nt, Artificial Sequence
  Synthetic
aaagauuucuaaacuauuug

SEQ ID NO: 615576 - RNA, 21 nt, Artificial Sequence
  Synthetic
caaagauuucuaaacuauuug

SEQ ID NO: 615577 - RNA, 22 nt, Artificial Sequence
  Synthetic
acaaagauuucuaaacuauuug

SEQ ID NO: 615578 - RNA, 23 nt, Artificial Sequence
  Synthetic
gacaaagauuucuaaacuauuug

SEQ ID NO: 615579 - RNA, 24 nt, Artificial Sequence
  Synthetic
agacaaagauuucuaaacuauuug

SEQ ID NO: 615580 - RNA, 18 nt, Artificial Sequence
  Synthetic
aaugauaacuacuauuug

SEQ ID NO: 615581 - RNA, 19 nt, Artificial Sequence
  Synthetic
uaaugauaacuacuauuug

SEQ ID NO: 615582 - RNA, 20 nt, Artificial Sequence
  Synthetic
auaaugauaacuacuauuug

SEQ ID NO: 615583 - RNA, 21 nt, Artificial Sequence
  Synthetic
aauaaugauaacuacuauuug

SEQ ID NO: 615584 - RNA, 22 nt, Artificial Sequence
  Synthetic
gaauaaugauaacuacuauuug

SEQ ID NO: 615585 - RNA, 23 nt, Artificial Sequence
  Synthetic
ggaauaaugauaacuacuauuug

SEQ ID NO: 615586 - RNA, 24 nt, Artificial Sequence
  Synthetic
gggaauaaugauaacuacuauuug

SEQ ID NO: 615587 - RNA, 18 nt, Artificial Sequence
  Synthetic
acgaaaagguacuauuug

SEQ ID NO: 615588 - RNA, 19 nt, Artificial Sequence
  Synthetic
uacgaaaagguacuauuug

SEQ ID NO: 615589 - RNA, 20 nt, Artificial Sequence
  Synthetic
auacgaaaagguacuauuug

SEQ ID NO: 615590 - RNA, 21 nt, Artificial Sequence
  Synthetic
aauacgaaaagguacuauuug

SEQ ID NO: 615591 - RNA, 22 nt, Artificial Sequence
  Synthetic
caauacgaaaagguacuauuug

SEQ ID NO: 615592 - RNA, 23 nt, Artificial Sequence
  Synthetic
acaauacgaaaagguacuauuug

SEQ ID NO: 615593 - RNA, 24 nt, Artificial Sequence
  Synthetic
uacaauacgaaaagguacuauuug

SEQ ID NO: 615594 - RNA, 18 nt, Artificial Sequence
  Synthetic
cucccuugguacuauuug

SEQ ID NO: 615595 - RNA, 19 nt, Artificial Sequence
  Synthetic
ccucccuugguacuauuug

SEQ ID NO: 615596 - RNA, 20 nt, Artificial Sequence
  Synthetic
cccucccuugguacuauuug

SEQ ID NO: 615597 - RNA, 21 nt, Artificial Sequence
  Synthetic
ucccucccuugguacuauuug

SEQ ID NO: 615598 - RNA, 22 nt, Artificial Sequence
  Synthetic
cucccucccuugguacuauuug

SEQ ID NO: 615599 - RNA, 23 nt, Artificial Sequence
  Synthetic
acucccucccuugguacuauuug

SEQ ID NO: 615600 - RNA, 24 nt, Artificial Sequence
  Synthetic
aacucccucccuugguacuauuug

SEQ ID NO: 615601 - RNA, 18 nt, Artificial Sequence
  Synthetic
auguugaaauucuauuug

SEQ ID NO: 615602 - RNA, 19 nt, Artificial Sequence
  Synthetic
cauguugaaauucuauuug

SEQ ID NO: 615603 - RNA, 20 nt, Artificial Sequence
  Synthetic
acauguugaaauucuauuug

SEQ ID NO: 615604 - RNA, 21 nt, Artificial Sequence
  Synthetic
uacauguugaaauucuauuug

SEQ ID NO: 615605 - RNA, 22 nt, Artificial Sequence
  Synthetic
auacauguugaaauucuauuug

SEQ ID NO: 615606 - RNA, 23 nt, Artificial Sequence
  Synthetic
gauacauguugaaauucuauuug

SEQ ID NO: 615607 - RNA, 24 nt, Artificial Sequence
  Synthetic
agauacauguugaaauucuauuug

SEQ ID NO: 615608 - RNA, 18 nt, Artificial Sequence
  Synthetic
uuacgucauuucuauuug

SEQ ID NO: 615609 - RNA, 19 nt, Artificial Sequence
  Synthetic
guuacgucauuucuauuug

SEQ ID NO: 615610 - RNA, 20 nt, Artificial Sequence
  Synthetic
aguuacgucauuucuauuug

SEQ ID NO: 615611 - RNA, 21 nt, Artificial Sequence
  Synthetic
caguuacgucauuucuauuug

SEQ ID NO: 615612 - RNA, 22 nt, Artificial Sequence
  Synthetic
ucaguuacgucauuucuauuug

SEQ ID NO: 615613 - RNA, 23 nt, Artificial Sequence
  Synthetic
uucaguuacgucauuucuauuug

SEQ ID NO: 615614 - RNA, 24 nt, Artificial Sequence
  Synthetic
cuucaguuacgucauuucuauuug

SEQ ID NO: 615615 - RNA, 18 nt, Artificial Sequence
  Synthetic
ugacuauuuugguauuug

SEQ ID NO: 615616 - RNA, 19 nt, Artificial Sequence
  Synthetic
uugacuauuuugguauuug

SEQ ID NO: 615617 - RNA, 20 nt, Artificial Sequence
  Synthetic
uuugacuauuuugguauuug

SEQ ID NO: 615618 - RNA, 21 nt, Artificial Sequence
  Synthetic
uuuugacuauuuugguauuug

SEQ ID NO: 615619 - RNA, 22 nt, Artificial Sequence
  Synthetic
auuuugacuauuuugguauuug

SEQ ID NO: 615620 - RNA, 23 nt, Artificial Sequence
  Synthetic
aauuuugacuauuuugguauuug

SEQ ID NO: 615621 - RNA, 24 nt, Artificial Sequence
  Synthetic
aaauuuugacuauuuugguauuug

SEQ ID NO: 615622 - RNA, 18 nt, Artificial Sequence
  Synthetic
caaauuaucuuguauuug

SEQ ID NO: 615623 - RNA, 19 nt, Artificial Sequence
  Synthetic
acaaauuaucuuguauuug

SEQ ID NO: 615624 - RNA, 20 nt, Artificial Sequence
  Synthetic
aacaaauuaucuuguauuug

SEQ ID NO: 615625 - RNA, 21 nt, Artificial Sequence
  Synthetic
gaacaaauuaucuuguauuug

SEQ ID NO: 615626 - RNA, 22 nt, Artificial Sequence
  Synthetic
ugaacaaauuaucuuguauuug

SEQ ID NO: 615627 - RNA, 23 nt, Artificial Sequence
  Synthetic
augaacaaauuaucuuguauuug

SEQ ID NO: 615628 - RNA, 24 nt, Artificial Sequence
  Synthetic
aaugaacaaauuaucuuguauuug

SEQ ID NO: 615629 - RNA, 18 nt, Artificial Sequence
  Synthetic
augcugcuaaauuauuug

SEQ ID NO: 615630 - RNA, 19 nt, Artificial Sequence
  Synthetic
aaugcugcuaaauuauuug

SEQ ID NO: 615631 - RNA, 20 nt, Artificial Sequence
  Synthetic
aaaugcugcuaaauuauuug

SEQ ID NO: 615632 - RNA, 21 nt, Artificial Sequence
  Synthetic
aaaaugcugcuaaauuauuug

SEQ ID NO: 615633 - RNA, 22 nt, Artificial Sequence
  Synthetic
gaaaaugcugcuaaauuauuug

SEQ ID NO: 615634 - RNA, 23 nt, Artificial Sequence
  Synthetic
ggaaaaugcugcuaaauuauuug

SEQ ID NO: 615635 - RNA, 24 nt, Artificial Sequence
  Synthetic
gggaaaaugcugcuaaauuauuug

SEQ ID NO: 615636 - RNA, 18 nt, Artificial Sequence
  Synthetic
gaaggaugguauuauuug

SEQ ID NO: 615637 - RNA, 19 nt, Artificial Sequence
  Synthetic
ggaaggaugguauuauuug

SEQ ID NO: 615638 - RNA, 20 nt, Artificial Sequence
  Synthetic
aggaaggaugguauuauuug

SEQ ID NO: 615639 - RNA, 21 nt, Artificial Sequence
  Synthetic
uaggaaggaugguauuauuug

SEQ ID NO: 615640 - RNA, 22 nt, Artificial Sequence
  Synthetic
guaggaaggaugguauuauuug

SEQ ID NO: 615641 - RNA, 23 nt, Artificial Sequence
  Synthetic
aguaggaaggaugguauuauuug

SEQ ID NO: 615642 - RNA, 24 nt, Artificial Sequence
  Synthetic
uaguaggaaggaugguauuauuug

SEQ ID NO: 615643 - RNA, 18 nt, Artificial Sequence
  Synthetic
gacucacaaccuuauuug

SEQ ID NO: 615644 - RNA, 19 nt, Artificial Sequence
  Synthetic
ugacucacaaccuuauuug

SEQ ID NO: 615645 - RNA, 20 nt, Artificial Sequence
  Synthetic
augacucacaaccuuauuug

SEQ ID NO: 615646 - RNA, 21 nt, Artificial Sequence
  Synthetic
uaugacucacaaccuuauuug

SEQ ID NO: 615647 - RNA, 22 nt, Artificial Sequence
  Synthetic
uuaugacucacaaccuuauuug

SEQ ID NO: 615648 - RNA, 23 nt, Artificial Sequence
  Synthetic
auuaugacucacaaccuuauuug

SEQ ID NO: 615649 - RNA, 24 nt, Artificial Sequence
  Synthetic
aauuaugacucacaaccuuauuug

SEQ ID NO: 615650 - RNA, 18 nt, Artificial Sequence
  Synthetic
ccaccaacagcuuauuug

SEQ ID NO: 615651 - RNA, 19 nt, Artificial Sequence
  Synthetic
gccaccaacagcuuauuug

SEQ ID NO: 615652 - RNA, 20 nt, Artificial Sequence
  Synthetic
ugccaccaacagcuuauuug

SEQ ID NO: 615653 - RNA, 21 nt, Artificial Sequence
  Synthetic
cugccaccaacagcuuauuug

SEQ ID NO: 615654 - RNA, 22 nt, Artificial Sequence
  Synthetic
ccugccaccaacagcuuauuug

SEQ ID NO: 615655 - RNA, 23 nt, Artificial Sequence
  Synthetic
uccugccaccaacagcuuauuug

SEQ ID NO: 615656 - RNA, 24 nt, Artificial Sequence
  Synthetic
cuccugccaccaacagcuuauuug

SEQ ID NO: 615657 - RNA, 18 nt, Artificial Sequence
  Synthetic
aauuuuagagcuuauuug

SEQ ID NO: 615658 - RNA, 19 nt, Artificial Sequence
  Synthetic
aaauuuuagagcuuauuug

SEQ ID NO: 615659 - RNA, 20 nt, Artificial Sequence
  Synthetic
aaaauuuuagagcuuauuug

SEQ ID NO: 615660 - RNA, 21 nt, Artificial Sequence
  Synthetic
uaaaauuuuagagcuuauuug

SEQ ID NO: 615661 - RNA, 22 nt, Artificial Sequence
  Synthetic
cuaaaauuuuagagcuuauuug

SEQ ID NO: 615662 - RNA, 23 nt, Artificial Sequence
  Synthetic
ucuaaaauuuuagagcuuauuug

SEQ ID NO: 615663 - RNA, 24 nt, Artificial Sequence
  Synthetic
aucuaaaauuuuagagcuuauuug

SEQ ID NO: 615664 - RNA, 18 nt, Artificial Sequence
  Synthetic
uuucauuuuucuuauuug

SEQ ID NO: 615665 - RNA, 19 nt, Artificial Sequence
  Synthetic
auuucauuuuucuuauuug

SEQ ID NO: 615666 - RNA, 20 nt, Artificial Sequence
  Synthetic
uauuucauuuuucuuauuug

SEQ ID NO: 615667 - RNA, 21 nt, Artificial Sequence
  Synthetic
auauuucauuuuucuuauuug

SEQ ID NO: 615668 - RNA, 22 nt, Artificial Sequence
  Synthetic
aauauuucauuuuucuuauuug

SEQ ID NO: 615669 - RNA, 23 nt, Artificial Sequence
  Synthetic
gaauauuucauuuuucuuauuug

SEQ ID NO: 615670 - RNA, 24 nt, Artificial Sequence
  Synthetic
ggaauauuucauuuuucuuauuug

SEQ ID NO: 615671 - RNA, 18 nt, Artificial Sequence
  Synthetic
guaauuauauuuuauuug

SEQ ID NO: 615672 - RNA, 19 nt, Artificial Sequence
  Synthetic
uguaauuauauuuuauuug

SEQ ID NO: 615673 - RNA, 20 nt, Artificial Sequence
  Synthetic
auguaauuauauuuuauuug

SEQ ID NO: 615674 - RNA, 21 nt, Artificial Sequence
  Synthetic
aauguaauuauauuuuauuug

SEQ ID NO: 615675 - RNA, 22 nt, Artificial Sequence
  Synthetic
aaauguaauuauauuuuauuug

SEQ ID NO: 615676 - RNA, 23 nt, Artificial Sequence
  Synthetic
gaaauguaauuauauuuuauuug

SEQ ID NO: 615677 - RNA, 24 nt, Artificial Sequence
  Synthetic
ggaaauguaauuauauuuuauuug

SEQ ID NO: 615678 - RNA, 18 nt, Artificial Sequence
  Synthetic
gauuacuauuuuuauuug

SEQ ID NO: 615679 - RNA, 19 nt, Artificial Sequence
  Synthetic
agauuacuauuuuuauuug

SEQ ID NO: 615680 - RNA, 20 nt, Artificial Sequence
  Synthetic
gagauuacuauuuuuauuug

SEQ ID NO: 615681 - RNA, 21 nt, Artificial Sequence
  Synthetic
agagauuacuauuuuuauuug

SEQ ID NO: 615682 - RNA, 22 nt, Artificial Sequence
  Synthetic
cagagauuacuauuuuuauuug

SEQ ID NO: 615683 - RNA, 23 nt, Artificial Sequence
  Synthetic
acagagauuacuauuuuuauuug

SEQ ID NO: 615684 - RNA, 24 nt, Artificial Sequence
  Synthetic
gacagagauuacuauuuuuauuug

SEQ ID NO: 615685 - RNA, 18 nt, Artificial Sequence
  Synthetic
ggacuaauuuaaacuuug

SEQ ID NO: 615686 - RNA, 19 nt, Artificial Sequence
  Synthetic
uggacuaauuuaaacuuug

SEQ ID NO: 615687 - RNA, 20 nt, Artificial Sequence
  Synthetic
auggacuaauuuaaacuuug

SEQ ID NO: 615688 - RNA, 21 nt, Artificial Sequence
  Synthetic
cauggacuaauuuaaacuuug

SEQ ID NO: 615689 - RNA, 22 nt, Artificial Sequence
  Synthetic
ucauggacuaauuuaaacuuug

SEQ ID NO: 615690 - RNA, 23 nt, Artificial Sequence
  Synthetic
gucauggacuaauuuaaacuuug

SEQ ID NO: 615691 - RNA, 24 nt, Artificial Sequence
  Synthetic
agucauggacuaauuuaaacuuug

SEQ ID NO: 615692 - RNA, 18 nt, Artificial Sequence
  Synthetic
aguguuguuuaaacuuug

SEQ ID NO: 615693 - RNA, 19 nt, Artificial Sequence
  Synthetic
aaguguuguuuaaacuuug

SEQ ID NO: 615694 - RNA, 20 nt, Artificial Sequence
  Synthetic
aaaguguuguuuaaacuuug

SEQ ID NO: 615695 - RNA, 21 nt, Artificial Sequence
  Synthetic
uaaaguguuguuuaaacuuug

SEQ ID NO: 615696 - RNA, 22 nt, Artificial Sequence
  Synthetic
cuaaaguguuguuuaaacuuug

SEQ ID NO: 615697 - RNA, 23 nt, Artificial Sequence
  Synthetic
ucuaaaguguuguuuaaacuuug

SEQ ID NO: 615698 - RNA, 24 nt, Artificial Sequence
  Synthetic
uucuaaaguguuguuuaaacuuug

SEQ ID NO: 615699 - RNA, 18 nt, Artificial Sequence
  Synthetic
auauccaaggcaacuuug

SEQ ID NO: 615700 - RNA, 19 nt, Artificial Sequence
  Synthetic
aauauccaaggcaacuuug

SEQ ID NO: 615701 - RNA, 20 nt, Artificial Sequence
  Synthetic
gaauauccaaggcaacuuug

SEQ ID NO: 615702 - RNA, 21 nt, Artificial Sequence
  Synthetic
agaauauccaaggcaacuuug

SEQ ID NO: 615703 - RNA, 22 nt, Artificial Sequence
  Synthetic
aagaauauccaaggcaacuuug

SEQ ID NO: 615704 - RNA, 23 nt, Artificial Sequence
  Synthetic
uaagaauauccaaggcaacuuug

SEQ ID NO: 615705 - RNA, 24 nt, Artificial Sequence
  Synthetic
cuaagaauauccaaggcaacuuug

SEQ ID NO: 615706 - RNA, 18 nt, Artificial Sequence
  Synthetic
aaucauggaagaacuuug

SEQ ID NO: 615707 - RNA, 19 nt, Artificial Sequence
  Synthetic
aaaucauggaagaacuuug

SEQ ID NO: 615708 - RNA, 20 nt, Artificial Sequence
  Synthetic
aaaaucauggaagaacuuug

SEQ ID NO: 615709 - RNA, 21 nt, Artificial Sequence
  Synthetic
caaaaucauggaagaacuuug

SEQ ID NO: 615710 - RNA, 22 nt, Artificial Sequence
  Synthetic
ucaaaaucauggaagaacuuug

SEQ ID NO: 615711 - RNA, 23 nt, Artificial Sequence
  Synthetic
aucaaaaucauggaagaacuuug

SEQ ID NO: 615712 - RNA, 24 nt, Artificial Sequence
  Synthetic
caucaaaaucauggaagaacuuug

SEQ ID NO: 615713 - RNA, 18 nt, Artificial Sequence
  Synthetic
uuugucacucuaacuuug

SEQ ID NO: 615714 - RNA, 19 nt, Artificial Sequence
  Synthetic
uuuugucacucuaacuuug

SEQ ID NO: 615715 - RNA, 20 nt, Artificial Sequence
  Synthetic
cuuuugucacucuaacuuug

SEQ ID NO: 615716 - RNA, 21 nt, Artificial Sequence
  Synthetic
ucuuuugucacucuaacuuug

SEQ ID NO: 615717 - RNA, 22 nt, Artificial Sequence
  Synthetic
gucuuuugucacucuaacuuug

SEQ ID NO: 615718 - RNA, 23 nt, Artificial Sequence
  Synthetic
ugucuuuugucacucuaacuuug

SEQ ID NO: 615719 - RNA, 24 nt, Artificial Sequence
  Synthetic
cugucuuuugucacucuaacuuug

SEQ ID NO: 615720 - RNA, 18 nt, Artificial Sequence
  Synthetic
ugguuaacauuaacuuug

SEQ ID NO: 615721 - RNA, 19 nt, Artificial Sequence
  Synthetic
gugguuaacauuaacuuug

SEQ ID NO: 615722 - RNA, 20 nt, Artificial Sequence
  Synthetic
agugguuaacauuaacuuug

SEQ ID NO: 615723 - RNA, 21 nt, Artificial Sequence
  Synthetic
aagugguuaacauuaacuuug

SEQ ID NO: 615724 - RNA, 22 nt, Artificial Sequence
  Synthetic
caagugguuaacauuaacuuug

SEQ ID NO: 615725 - RNA, 23 nt, Artificial Sequence
  Synthetic
ccaagugguuaacauuaacuuug

SEQ ID NO: 615726 - RNA, 24 nt, Artificial Sequence
  Synthetic
uccaagugguuaacauuaacuuug

SEQ ID NO: 615727 - RNA, 18 nt, Artificial Sequence
  Synthetic
augcuuuauuuaacuuug

SEQ ID NO: 615728 - RNA, 19 nt, Artificial Sequence
  Synthetic
aaugcuuuauuuaacuuug

SEQ ID NO: 615729 - RNA, 20 nt, Artificial Sequence
  Synthetic
gaaugcuuuauuuaacuuug

SEQ ID NO: 615730 - RNA, 21 nt, Artificial Sequence
  Synthetic
ggaaugcuuuauuuaacuuug

SEQ ID NO: 615731 - RNA, 22 nt, Artificial Sequence
  Synthetic
uggaaugcuuuauuuaacuuug

SEQ ID NO: 615732 - RNA, 23 nt, Artificial Sequence
  Synthetic
auggaaugcuuuauuuaacuuug

SEQ ID NO: 615733 - RNA, 24 nt, Artificial Sequence
  Synthetic
aauggaaugcuuuauuuaacuuug

SEQ ID NO: 615734 - RNA, 18 nt, Artificial Sequence
  Synthetic
ucucuagcuuuaacuuug

SEQ ID NO: 615735 - RNA, 19 nt, Artificial Sequence
  Synthetic
uucucuagcuuuaacuuug

SEQ ID NO: 615736 - RNA, 20 nt, Artificial Sequence
  Synthetic
uuucucuagcuuuaacuuug

SEQ ID NO: 615737 - RNA, 21 nt, Artificial Sequence
  Synthetic
auuucucuagcuuuaacuuug

SEQ ID NO: 615738 - RNA, 22 nt, Artificial Sequence
  Synthetic
gauuucucuagcuuuaacuuug

SEQ ID NO: 615739 - RNA, 23 nt, Artificial Sequence
  Synthetic
ugauuucucuagcuuuaacuuug

SEQ ID NO: 615740 - RNA, 24 nt, Artificial Sequence
  Synthetic
cugauuucucuagcuuuaacuuug

SEQ ID NO: 615741 - RNA, 18 nt, Artificial Sequence
  Synthetic
uggauauacagcacuuug

SEQ ID NO: 615742 - RNA, 19 nt, Artificial Sequence
  Synthetic
auggauauacagcacuuug

SEQ ID NO: 615743 - RNA, 20 nt, Artificial Sequence
  Synthetic
uauggauauacagcacuuug

SEQ ID NO: 615744 - RNA, 21 nt, Artificial Sequence
  Synthetic
cuauggauauacagcacuuug

SEQ ID NO: 615745 - RNA, 22 nt, Artificial Sequence
  Synthetic
ccuauggauauacagcacuuug

SEQ ID NO: 615746 - RNA, 23 nt, Artificial Sequence
  Synthetic
accuauggauauacagcacuuug

SEQ ID NO: 615747 - RNA, 24 nt, Artificial Sequence
  Synthetic
caccuauggauauacagcacuuug

SEQ ID NO: 615748 - RNA, 18 nt, Artificial Sequence
  Synthetic
uguaaucccagcacuuug

SEQ ID NO: 615749 - RNA, 19 nt, Artificial Sequence
  Synthetic
cuguaaucccagcacuuug

SEQ ID NO: 615750 - RNA, 20 nt, Artificial Sequence
  Synthetic
ccuguaaucccagcacuuug

SEQ ID NO: 615751 - RNA, 21 nt, Artificial Sequence
  Synthetic
gccuguaaucccagcacuuug

SEQ ID NO: 615752 - RNA, 22 nt, Artificial Sequence
  Synthetic
cgccuguaaucccagcacuuug

SEQ ID NO: 615753 - RNA, 23 nt, Artificial Sequence
  Synthetic
acgccuguaaucccagcacuuug

SEQ ID NO: 615754 - RNA, 24 nt, Artificial Sequence
  Synthetic
cacgccuguaaucccagcacuuug

SEQ ID NO: 615755 - RNA, 18 nt, Artificial Sequence
  Synthetic
gggcaaagguucacuuug

SEQ ID NO: 615756 - RNA, 19 nt, Artificial Sequence
  Synthetic
ggggcaaagguucacuuug

SEQ ID NO: 615757 - RNA, 20 nt, Artificial Sequence
  Synthetic
gggggcaaagguucacuuug

SEQ ID NO: 615758 - RNA, 21 nt, Artificial Sequence
  Synthetic
ugggggcaaagguucacuuug

SEQ ID NO: 615759 - RNA, 22 nt, Artificial Sequence
  Synthetic
cugggggcaaagguucacuuug

SEQ ID NO: 615760 - RNA, 23 nt, Artificial Sequence
  Synthetic
acugggggcaaagguucacuuug

SEQ ID NO: 615761 - RNA, 24 nt, Artificial Sequence
  Synthetic
aacugggggcaaagguucacuuug

SEQ ID NO: 615762 - RNA, 18 nt, Artificial Sequence
  Synthetic
cacauuauuuucacuuug

SEQ ID NO: 615763 - RNA, 19 nt, Artificial Sequence
  Synthetic
gcacauuauuuucacuuug

SEQ ID NO: 615764 - RNA, 20 nt, Artificial Sequence
  Synthetic
ugcacauuauuuucacuuug

SEQ ID NO: 615765 - RNA, 21 nt, Artificial Sequence
  Synthetic
gugcacauuauuuucacuuug

SEQ ID NO: 615766 - RNA, 22 nt, Artificial Sequence
  Synthetic
ugugcacauuauuuucacuuug

SEQ ID NO: 615767 - RNA, 23 nt, Artificial Sequence
  Synthetic
cugugcacauuauuuucacuuug

SEQ ID NO: 615768 - RNA, 24 nt, Artificial Sequence
  Synthetic
ccugugcacauuauuuucacuuug

SEQ ID NO: 615769 - RNA, 18 nt, Artificial Sequence
  Synthetic
cugacguauuagacuuug

SEQ ID NO: 615770 - RNA, 19 nt, Artificial Sequence
  Synthetic
ccugacguauuagacuuug

SEQ ID NO: 615771 - RNA, 20 nt, Artificial Sequence
  Synthetic
uccugacguauuagacuuug

SEQ ID NO: 615772 - RNA, 21 nt, Artificial Sequence
  Synthetic
cuccugacguauuagacuuug

SEQ ID NO: 615773 - RNA, 22 nt, Artificial Sequence
  Synthetic
gcuccugacguauuagacuuug

SEQ ID NO: 615774 - RNA, 23 nt, Artificial Sequence
  Synthetic
ugcuccugacguauuagacuuug

SEQ ID NO: 615775 - RNA, 24 nt, Artificial Sequence
  Synthetic
uugcuccugacguauuagacuuug

SEQ ID NO: 615776 - RNA, 18 nt, Artificial Sequence
  Synthetic
auuguggggaugacuuug

SEQ ID NO: 615777 - RNA, 19 nt, Artificial Sequence
  Synthetic
aauuguggggaugacuuug

SEQ ID NO: 615778 - RNA, 20 nt, Artificial Sequence
  Synthetic
caauuguggggaugacuuug

SEQ ID NO: 615779 - RNA, 21 nt, Artificial Sequence
  Synthetic
ucaauuguggggaugacuuug

SEQ ID NO: 615780 - RNA, 22 nt, Artificial Sequence
  Synthetic
gucaauuguggggaugacuuug

SEQ ID NO: 615781 - RNA, 23 nt, Artificial Sequence
  Synthetic
agucaauuguggggaugacuuug

SEQ ID NO: 615782 - RNA, 24 nt, Artificial Sequence
  Synthetic
aagucaauuguggggaugacuuug

SEQ ID NO: 615783 - RNA, 18 nt, Artificial Sequence
  Synthetic
uaauauugauugacuuug

SEQ ID NO: 615784 - RNA, 19 nt, Artificial Sequence
  Synthetic
cuaauauugauugacuuug

SEQ ID NO: 615785 - RNA, 20 nt, Artificial Sequence
  Synthetic
acuaauauugauugacuuug

SEQ ID NO: 615786 - RNA, 21 nt, Artificial Sequence
  Synthetic
gacuaauauugauugacuuug

SEQ ID NO: 615787 - RNA, 22 nt, Artificial Sequence
  Synthetic
ugacuaauauugauugacuuug

SEQ ID NO: 615788 - RNA, 23 nt, Artificial Sequence
  Synthetic
cugacuaauauugauugacuuug

SEQ ID NO: 615789 - RNA, 24 nt, Artificial Sequence
  Synthetic
gcugacuaauauugauugacuuug

SEQ ID NO: 615790 - RNA, 18 nt, Artificial Sequence
  Synthetic
uuuacacugaauacuuug

SEQ ID NO: 615791 - RNA, 19 nt, Artificial Sequence
  Synthetic
cuuuacacugaauacuuug

SEQ ID NO: 615792 - RNA, 20 nt, Artificial Sequence
  Synthetic
ucuuuacacugaauacuuug

SEQ ID NO: 615793 - RNA, 21 nt, Artificial Sequence
  Synthetic
gucuuuacacugaauacuuug

SEQ ID NO: 615794 - RNA, 22 nt, Artificial Sequence
  Synthetic
ugucuuuacacugaauacuuug

SEQ ID NO: 615795 - RNA, 23 nt, Artificial Sequence
  Synthetic
cugucuuuacacugaauacuuug

SEQ ID NO: 615796 - RNA, 24 nt, Artificial Sequence
  Synthetic
acugucuuuacacugaauacuuug

SEQ ID NO: 615797 - RNA, 18 nt, Artificial Sequence
  Synthetic
aucuauacaucuacuuug

SEQ ID NO: 615798 - RNA, 19 nt, Artificial Sequence
  Synthetic
gaucuauacaucuacuuug

SEQ ID NO: 615799 - RNA, 20 nt, Artificial Sequence
  Synthetic
agaucuauacaucuacuuug

SEQ ID NO: 615800 - RNA, 21 nt, Artificial Sequence
  Synthetic
gagaucuauacaucuacuuug

SEQ ID NO: 615801 - RNA, 22 nt, Artificial Sequence
  Synthetic
ggagaucuauacaucuacuuug

SEQ ID NO: 615802 - RNA, 23 nt, Artificial Sequence
  Synthetic
uggagaucuauacaucuacuuug

SEQ ID NO: 615803 - RNA, 24 nt, Artificial Sequence
  Synthetic
auggagaucuauacaucuacuuug

SEQ ID NO: 615804 - RNA, 18 nt, Artificial Sequence
  Synthetic
ugucaccaacuuacuuug

SEQ ID NO: 615805 - RNA, 19 nt, Artificial Sequence
  Synthetic
augucaccaacuuacuuug

SEQ ID NO: 615806 - RNA, 20 nt, Artificial Sequence
  Synthetic
gaugucaccaacuuacuuug

SEQ ID NO: 615807 - RNA, 21 nt, Artificial Sequence
  Synthetic
cgaugucaccaacuuacuuug

SEQ ID NO: 615808 - RNA, 22 nt, Artificial Sequence
  Synthetic
ccgaugucaccaacuuacuuug

SEQ ID NO: 615809 - RNA, 23 nt, Artificial Sequence
  Synthetic
accgaugucaccaacuuacuuug

SEQ ID NO: 615810 - RNA, 24 nt, Artificial Sequence
  Synthetic
aaccgaugucaccaacuuacuuug

SEQ ID NO: 615811 - RNA, 18 nt, Artificial Sequence
  Synthetic
acuucccuguuuacuuug

SEQ ID NO: 615812 - RNA, 19 nt, Artificial Sequence
  Synthetic
gacuucccuguuuacuuug

SEQ ID NO: 615813 - RNA, 20 nt, Artificial Sequence
  Synthetic
ggacuucccuguuuacuuug

SEQ ID NO: 615814 - RNA, 21 nt, Artificial Sequence
  Synthetic
aggacuucccuguuuacuuug

SEQ ID NO: 615815 - RNA, 22 nt, Artificial Sequence
  Synthetic
aaggacuucccuguuuacuuug

SEQ ID NO: 615816 - RNA, 23 nt, Artificial Sequence
  Synthetic
uaaggacuucccuguuuacuuug

SEQ ID NO: 615817 - RNA, 24 nt, Artificial Sequence
  Synthetic
auaaggacuucccuguuuacuuug

SEQ ID NO: 615818 - RNA, 18 nt, Artificial Sequence
  Synthetic
gauauuggauaaccuuug

SEQ ID NO: 615819 - RNA, 19 nt, Artificial Sequence
  Synthetic
ugauauuggauaaccuuug

SEQ ID NO: 615820 - RNA, 20 nt, Artificial Sequence
  Synthetic
cugauauuggauaaccuuug

SEQ ID NO: 615821 - RNA, 21 nt, Artificial Sequence
  Synthetic
ccugauauuggauaaccuuug

SEQ ID NO: 615822 - RNA, 22 nt, Artificial Sequence
  Synthetic
cccugauauuggauaaccuuug

SEQ ID NO: 615823 - RNA, 23 nt, Artificial Sequence
  Synthetic
acccugauauuggauaaccuuug

SEQ ID NO: 615824 - RNA, 24 nt, Artificial Sequence
  Synthetic
cacccugauauuggauaaccuuug

SEQ ID NO: 615825 - RNA, 18 nt, Artificial Sequence
  Synthetic
aauucaaauuaaccuuug

SEQ ID NO: 615826 - RNA, 19 nt, Artificial Sequence
  Synthetic
uaauucaaauuaaccuuug

SEQ ID NO: 615827 - RNA, 20 nt, Artificial Sequence
  Synthetic
uuaauucaaauuaaccuuug

SEQ ID NO: 615828 - RNA, 21 nt, Artificial Sequence
  Synthetic
uuuaauucaaauuaaccuuug

SEQ ID NO: 615829 - RNA, 22 nt, Artificial Sequence
  Synthetic
uuuuaauucaaauuaaccuuug

SEQ ID NO: 615830 - RNA, 23 nt, Artificial Sequence
  Synthetic
auuuuaauucaaauuaaccuuug

SEQ ID NO: 615831 - RNA, 24 nt, Artificial Sequence
  Synthetic
uauuuuaauucaaauuaaccuuug

SEQ ID NO: 615832 - RNA, 18 nt, Artificial Sequence
  Synthetic
gagugguguugaccuuug

SEQ ID NO: 615833 - RNA, 19 nt, Artificial Sequence
  Synthetic
agagugguguugaccuuug

SEQ ID NO: 615834 - RNA, 20 nt, Artificial Sequence
  Synthetic
gagagugguguugaccuuug

SEQ ID NO: 615835 - RNA, 21 nt, Artificial Sequence
  Synthetic
ggagagugguguugaccuuug

SEQ ID NO: 615836 - RNA, 22 nt, Artificial Sequence
  Synthetic
gggagagugguguugaccuuug

SEQ ID NO: 615837 - RNA, 23 nt, Artificial Sequence
  Synthetic
agggagagugguguugaccuuug

SEQ ID NO: 615838 - RNA, 24 nt, Artificial Sequence
  Synthetic
aagggagagugguguugaccuuug

SEQ ID NO: 615839 - RNA, 18 nt, Artificial Sequence
  Synthetic
auuucccugaccccuuug

SEQ ID NO: 615840 - RNA, 19 nt, Artificial Sequence
  Synthetic
uauuucccugaccccuuug

SEQ ID NO: 615841 - RNA, 20 nt, Artificial Sequence
  Synthetic
auauuucccugaccccuuug

SEQ ID NO: 615842 - RNA, 21 nt, Artificial Sequence
  Synthetic
gauauuucccugaccccuuug

SEQ ID NO: 615843 - RNA, 22 nt, Artificial Sequence
  Synthetic
ggauauuucccugaccccuuug

SEQ ID NO: 615844 - RNA, 23 nt, Artificial Sequence
  Synthetic
aggauauuucccugaccccuuug

SEQ ID NO: 615845 - RNA, 24 nt, Artificial Sequence
  Synthetic
caggauauuucccugaccccuuug

SEQ ID NO: 615846 - RNA, 18 nt, Artificial Sequence
  Synthetic
cuuuagaauggcccuuug

SEQ ID NO: 615847 - RNA, 19 nt, Artificial Sequence
  Synthetic
acuuuagaauggcccuuug

SEQ ID NO: 615848 - RNA, 20 nt, Artificial Sequence
  Synthetic
cacuuuagaauggcccuuug

SEQ ID NO: 615849 - RNA, 21 nt, Artificial Sequence
  Synthetic
ccacuuuagaauggcccuuug

SEQ ID NO: 615850 - RNA, 22 nt, Artificial Sequence
  Synthetic
accacuuuagaauggcccuuug

SEQ ID NO: 615851 - RNA, 23 nt, Artificial Sequence
  Synthetic
gaccacuuuagaauggcccuuug

SEQ ID NO: 615852 - RNA, 24 nt, Artificial Sequence
  Synthetic
agaccacuuuagaauggcccuuug

SEQ ID NO: 615853 - RNA, 21 nt, Artificial Sequence
  Synthetic
aggaugaguucacauccuuug

SEQ ID NO: 615854 - RNA, 22 nt, Artificial Sequence
  Synthetic
aaggaugaguucacauccuuug

SEQ ID NO: 615855 - RNA, 23 nt, Artificial Sequence
  Synthetic
aaaggaugaguucacauccuuug

SEQ ID NO: 615856 - RNA, 24 nt, Artificial Sequence
  Synthetic
aaaaggaugaguucacauccuuug

SEQ ID NO: 615857 - RNA, 18 nt, Artificial Sequence
  Synthetic
acaagacagcauccuuug

SEQ ID NO: 615858 - RNA, 19 nt, Artificial Sequence
  Synthetic
gacaagacagcauccuuug

SEQ ID NO: 615859 - RNA, 20 nt, Artificial Sequence
  Synthetic
ggacaagacagcauccuuug

SEQ ID NO: 615860 - RNA, 21 nt, Artificial Sequence
  Synthetic
uggacaagacagcauccuuug

SEQ ID NO: 615861 - RNA, 22 nt, Artificial Sequence
  Synthetic
auggacaagacagcauccuuug

SEQ ID NO: 615862 - RNA, 23 nt, Artificial Sequence
  Synthetic
aauggacaagacagcauccuuug

SEQ ID NO: 615863 - RNA, 24 nt, Artificial Sequence
  Synthetic
aaauggacaagacagcauccuuug

SEQ ID NO: 615864 - RNA, 18 nt, Artificial Sequence
  Synthetic
acugccuuguauccuuug

SEQ ID NO: 615865 - RNA, 19 nt, Artificial Sequence
  Synthetic
cacugccuuguauccuuug

SEQ ID NO: 615866 - RNA, 20 nt, Artificial Sequence
  Synthetic
ccacugccuuguauccuuug

SEQ ID NO: 615867 - RNA, 21 nt, Artificial Sequence
  Synthetic
accacugccuuguauccuuug

SEQ ID NO: 615868 - RNA, 22 nt, Artificial Sequence
  Synthetic
uaccacugccuuguauccuuug

SEQ ID NO: 615869 - RNA, 23 nt, Artificial Sequence
  Synthetic
cuaccacugccuuguauccuuug

SEQ ID NO: 615870 - RNA, 24 nt, Artificial Sequence
  Synthetic
ucuaccacugccuuguauccuuug

SEQ ID NO: 615871 - RNA, 18 nt, Artificial Sequence
  Synthetic
cuaugucuuccuccuuug

SEQ ID NO: 615872 - RNA, 19 nt, Artificial Sequence
  Synthetic
ccuaugucuuccuccuuug

SEQ ID NO: 615873 - RNA, 20 nt, Artificial Sequence
  Synthetic
cccuaugucuuccuccuuug

SEQ ID NO: 615874 - RNA, 21 nt, Artificial Sequence
  Synthetic
acccuaugucuuccuccuuug

SEQ ID NO: 615875 - RNA, 22 nt, Artificial Sequence
  Synthetic
aacccuaugucuuccuccuuug

SEQ ID NO: 615876 - RNA, 23 nt, Artificial Sequence
  Synthetic
aaacccuaugucuuccuccuuug

SEQ ID NO: 615877 - RNA, 24 nt, Artificial Sequence
  Synthetic
gaaacccuaugucuuccuccuuug

SEQ ID NO: 615878 - RNA, 18 nt, Artificial Sequence
  Synthetic
aaaauuaucucuccuuug

SEQ ID NO: 615879 - RNA, 19 nt, Artificial Sequence
  Synthetic
aaaaauuaucucuccuuug

SEQ ID NO: 615880 - RNA, 20 nt, Artificial Sequence
  Synthetic
uaaaaauuaucucuccuuug

SEQ ID NO: 615881 - RNA, 21 nt, Artificial Sequence
  Synthetic
uuaaaaauuaucucuccuuug

SEQ ID NO: 615882 - RNA, 22 nt, Artificial Sequence
  Synthetic
auuaaaaauuaucucuccuuug

SEQ ID NO: 615883 - RNA, 23 nt, Artificial Sequence
  Synthetic
uauuaaaaauuaucucuccuuug

SEQ ID NO: 615884 - RNA, 24 nt, Artificial Sequence
  Synthetic
auauuaaaaauuaucucuccuuug

SEQ ID NO: 615885 - RNA, 18 nt, Artificial Sequence
  Synthetic
ucuaguaucgguccuuug

SEQ ID NO: 615886 - RNA, 19 nt, Artificial Sequence
  Synthetic
aucuaguaucgguccuuug

SEQ ID NO: 615887 - RNA, 20 nt, Artificial Sequence
  Synthetic
uaucuaguaucgguccuuug

SEQ ID NO: 615888 - RNA, 21 nt, Artificial Sequence
  Synthetic
auaucuaguaucgguccuuug

SEQ ID NO: 615889 - RNA, 22 nt, Artificial Sequence
  Synthetic
aauaucuaguaucgguccuuug

SEQ ID NO: 615890 - RNA, 23 nt, Artificial Sequence
  Synthetic
aaauaucuaguaucgguccuuug

SEQ ID NO: 615891 - RNA, 24 nt, Artificial Sequence
  Synthetic
aaaauaucuaguaucgguccuuug

SEQ ID NO: 615892 - RNA, 18 nt, Artificial Sequence
  Synthetic
augacaggugguccuuug

SEQ ID NO: 615893 - RNA, 19 nt, Artificial Sequence
  Synthetic
caugacaggugguccuuug

SEQ ID NO: 615894 - RNA, 20 nt, Artificial Sequence
  Synthetic
gcaugacaggugguccuuug

SEQ ID NO: 615895 - RNA, 21 nt, Artificial Sequence
  Synthetic
agcaugacaggugguccuuug

SEQ ID NO: 615896 - RNA, 22 nt, Artificial Sequence
  Synthetic
aagcaugacaggugguccuuug

SEQ ID NO: 615897 - RNA, 23 nt, Artificial Sequence
  Synthetic
aaagcaugacaggugguccuuug

SEQ ID NO: 615898 - RNA, 24 nt, Artificial Sequence
  Synthetic
uaaagcaugacaggugguccuuug

SEQ ID NO: 615899 - RNA, 18 nt, Artificial Sequence
  Synthetic
augaaaucauguccuuug

SEQ ID NO: 615900 - RNA, 19 nt, Artificial Sequence
  Synthetic
aaugaaaucauguccuuug

SEQ ID NO: 615901 - RNA, 20 nt, Artificial Sequence
  Synthetic
gaaugaaaucauguccuuug

SEQ ID NO: 615902 - RNA, 21 nt, Artificial Sequence
  Synthetic
agaaugaaaucauguccuuug

SEQ ID NO: 615903 - RNA, 22 nt, Artificial Sequence
  Synthetic
aagaaugaaaucauguccuuug

SEQ ID NO: 615904 - RNA, 23 nt, Artificial Sequence
  Synthetic
aaagaaugaaaucauguccuuug

SEQ ID NO: 615905 - RNA, 24 nt, Artificial Sequence
  Synthetic
aaaagaaugaaaucauguccuuug

SEQ ID NO: 615906 - RNA, 18 nt, Artificial Sequence
  Synthetic
augagaucauguccuuug

SEQ ID NO: 615907 - RNA, 21 nt, Artificial Sequence
  Synthetic
agaaugagaucauguccuuug

SEQ ID NO: 615908 - RNA, 22 nt, Artificial Sequence
  Synthetic
aagaaugagaucauguccuuug

SEQ ID NO: 615909 - RNA, 23 nt, Artificial Sequence
  Synthetic
aaagaaugagaucauguccuuug

SEQ ID NO: 615910 - RNA, 24 nt, Artificial Sequence
  Synthetic
aaaagaaugagaucauguccuuug

SEQ ID NO: 615911 - RNA, 21 nt, Artificial Sequence
  Synthetic
ggaaugagaucauguccuuug

SEQ ID NO: 615912 - RNA, 22 nt, Artificial Sequence
  Synthetic
aggaaugagaucauguccuuug

SEQ ID NO: 615913 - RNA, 23 nt, Artificial Sequence
  Synthetic
aaggaaugagaucauguccuuug

SEQ ID NO: 615914 - RNA, 24 nt, Artificial Sequence
  Synthetic
aaaggaaugagaucauguccuuug

SEQ ID NO: 615915 - RNA, 19 nt, Artificial Sequence
  Synthetic
gaugagaucauguccuuug

SEQ ID NO: 615916 - RNA, 20 nt, Artificial Sequence
  Synthetic
ggaugagaucauguccuuug

SEQ ID NO: 615917 - RNA, 21 nt, Artificial Sequence
  Synthetic
aggaugagaucauguccuuug

SEQ ID NO: 615918 - RNA, 22 nt, Artificial Sequence
  Synthetic
aaggaugagaucauguccuuug

SEQ ID NO: 615919 - RNA, 23 nt, Artificial Sequence
  Synthetic
aaaggaugagaucauguccuuug

SEQ ID NO: 615920 - RNA, 24 nt, Artificial Sequence
  Synthetic
aaaaggaugagaucauguccuuug

SEQ ID NO: 615921 - RNA, 18 nt, Artificial Sequence
  Synthetic
augacuucauguccuuug

SEQ ID NO: 615922 - RNA, 19 nt, Artificial Sequence
  Synthetic
gaugacuucauguccuuug

SEQ ID NO: 615923 - RNA, 20 nt, Artificial Sequence
  Synthetic
ggaugacuucauguccuuug

SEQ ID NO: 615924 - RNA, 21 nt, Artificial Sequence
  Synthetic
aggaugacuucauguccuuug

SEQ ID NO: 615925 - RNA, 22 nt, Artificial Sequence
  Synthetic
caggaugacuucauguccuuug

SEQ ID NO: 615926 - RNA, 23 nt, Artificial Sequence
  Synthetic
acaggaugacuucauguccuuug

SEQ ID NO: 615927 - RNA, 24 nt, Artificial Sequence
  Synthetic
aacaggaugacuucauguccuuug

SEQ ID NO: 615928 - RNA, 21 nt, Artificial Sequence
  Synthetic
augaugaguucauguccuuug

SEQ ID NO: 615929 - RNA, 22 nt, Artificial Sequence
  Synthetic
aaugaugaguucauguccuuug

SEQ ID NO: 615930 - RNA, 23 nt, Artificial Sequence
  Synthetic
aaaugaugaguucauguccuuug

SEQ ID NO: 615931 - RNA, 24 nt, Artificial Sequence
  Synthetic
aaaaugaugaguucauguccuuug

SEQ ID NO: 615932 - RNA, 18 nt, Artificial Sequence
  Synthetic
aguuguuuauguccuuug

SEQ ID NO: 615933 - RNA, 19 nt, Artificial Sequence
  Synthetic
gaguuguuuauguccuuug

SEQ ID NO: 615934 - RNA, 20 nt, Artificial Sequence
  Synthetic
ugaguuguuuauguccuuug

SEQ ID NO: 615935 - RNA, 21 nt, Artificial Sequence
  Synthetic
augaguuguuuauguccuuug

SEQ ID NO: 615936 - RNA, 22 nt, Artificial Sequence
  Synthetic
gaugaguuguuuauguccuuug

SEQ ID NO: 615937 - RNA, 23 nt, Artificial Sequence
  Synthetic
ggaugaguuguuuauguccuuug

SEQ ID NO: 615938 - RNA, 24 nt, Artificial Sequence
  Synthetic
aggaugaguuguuuauguccuuug

SEQ ID NO: 615939 - RNA, 18 nt, Artificial Sequence
  Synthetic
augaguucguguccuuug

SEQ ID NO: 615940 - RNA, 19 nt, Artificial Sequence
  Synthetic
aaugaguucguguccuuug

SEQ ID NO: 615941 - RNA, 20 nt, Artificial Sequence
  Synthetic
gaaugaguucguguccuuug

SEQ ID NO: 615942 - RNA, 21 nt, Artificial Sequence
  Synthetic
agaaugaguucguguccuuug

SEQ ID NO: 615943 - RNA, 22 nt, Artificial Sequence
  Synthetic
aagaaugaguucguguccuuug

SEQ ID NO: 615944 - RNA, 23 nt, Artificial Sequence
  Synthetic
aaagaaugaguucguguccuuug

SEQ ID NO: 615945 - RNA, 24 nt, Artificial Sequence
  Synthetic
aaaagaaugaguucguguccuuug

SEQ ID NO: 615946 - RNA, 18 nt, Artificial Sequence
  Synthetic
cacccuuacguuccuuug

SEQ ID NO: 615947 - RNA, 19 nt, Artificial Sequence
  Synthetic
ucacccuuacguuccuuug

SEQ ID NO: 615948 - RNA, 20 nt, Artificial Sequence
  Synthetic
uucacccuuacguuccuuug

SEQ ID NO: 615949 - RNA, 21 nt, Artificial Sequence
  Synthetic
uuucacccuuacguuccuuug

SEQ ID NO: 615950 - RNA, 22 nt, Artificial Sequence
  Synthetic
cuuucacccuuacguuccuuug

SEQ ID NO: 615951 - RNA, 23 nt, Artificial Sequence
  Synthetic
ucuuucacccuuacguuccuuug

SEQ ID NO: 615952 - RNA, 24 nt, Artificial Sequence
  Synthetic
aucuuucacccuuacguuccuuug

SEQ ID NO: 615953 - RNA, 18 nt, Artificial Sequence
  Synthetic
augucugcauuuccuuug

SEQ ID NO: 615954 - RNA, 19 nt, Artificial Sequence
  Synthetic
caugucugcauuuccuuug

SEQ ID NO: 615955 - RNA, 20 nt, Artificial Sequence
  Synthetic
gcaugucugcauuuccuuug

SEQ ID NO: 615956 - RNA, 21 nt, Artificial Sequence
  Synthetic
ugcaugucugcauuuccuuug

SEQ ID NO: 615957 - RNA, 22 nt, Artificial Sequence
  Synthetic
uugcaugucugcauuuccuuug

SEQ ID NO: 615958 - RNA, 23 nt, Artificial Sequence
  Synthetic
cuugcaugucugcauuuccuuug

SEQ ID NO: 615959 - RNA, 24 nt, Artificial Sequence
  Synthetic
ucuugcaugucugcauuuccuuug

SEQ ID NO: 615960 - RNA, 18 nt, Artificial Sequence
  Synthetic
uaaauauuagaagcuuug

SEQ ID NO: 615961 - RNA, 19 nt, Artificial Sequence
  Synthetic
guaaauauuagaagcuuug

SEQ ID NO: 615962 - RNA, 20 nt, Artificial Sequence
  Synthetic
uguaaauauuagaagcuuug

SEQ ID NO: 615963 - RNA, 21 nt, Artificial Sequence
  Synthetic
auguaaauauuagaagcuuug

SEQ ID NO: 615964 - RNA, 22 nt, Artificial Sequence
  Synthetic
gauguaaauauuagaagcuuug

SEQ ID NO: 615965 - RNA, 23 nt, Artificial Sequence
  Synthetic
agauguaaauauuagaagcuuug

SEQ ID NO: 615966 - RNA, 24 nt, Artificial Sequence
  Synthetic
gagauguaaauauuagaagcuuug

SEQ ID NO: 615967 - RNA, 18 nt, Artificial Sequence
  Synthetic
cagaauuguggagcuuug

SEQ ID NO: 615968 - RNA, 19 nt, Artificial Sequence
  Synthetic
acagaauuguggagcuuug

SEQ ID NO: 615969 - RNA, 20 nt, Artificial Sequence
  Synthetic
uacagaauuguggagcuuug

SEQ ID NO: 615970 - RNA, 21 nt, Artificial Sequence
  Synthetic
auacagaauuguggagcuuug

SEQ ID NO: 615971 - RNA, 22 nt, Artificial Sequence
  Synthetic
aauacagaauuguggagcuuug

SEQ ID NO: 615972 - RNA, 23 nt, Artificial Sequence
  Synthetic
gaauacagaauuguggagcuuug

SEQ ID NO: 615973 - RNA, 24 nt, Artificial Sequence
  Synthetic
ugaauacagaauuguggagcuuug

SEQ ID NO: 615974 - RNA, 18 nt, Artificial Sequence
  Synthetic
accuaacucauagcuuug

SEQ ID NO: 615975 - RNA, 19 nt, Artificial Sequence
  Synthetic
caccuaacucauagcuuug

SEQ ID NO: 615976 - RNA, 20 nt, Artificial Sequence
  Synthetic
ccaccuaacucauagcuuug

SEQ ID NO: 615977 - RNA, 21 nt, Artificial Sequence
  Synthetic
accaccuaacucauagcuuug

SEQ ID NO: 615978 - RNA, 22 nt, Artificial Sequence
  Synthetic
uaccaccuaacucauagcuuug

SEQ ID NO: 615979 - RNA, 23 nt, Artificial Sequence
  Synthetic
auaccaccuaacucauagcuuug

SEQ ID NO: 615980 - RNA, 24 nt, Artificial Sequence
  Synthetic
aauaccaccuaacucauagcuuug

SEQ ID NO: 615981 - RNA, 18 nt, Artificial Sequence
  Synthetic
uuuaaaaaaauggcuuug

SEQ ID NO: 615982 - RNA, 19 nt, Artificial Sequence
  Synthetic
guuuaaaaaaauggcuuug

SEQ ID NO: 615983 - RNA, 20 nt, Artificial Sequence
  Synthetic
uguuuaaaaaaauggcuuug

SEQ ID NO: 615984 - RNA, 21 nt, Artificial Sequence
  Synthetic
auguuuaaaaaaauggcuuug

SEQ ID NO: 615985 - RNA, 22 nt, Artificial Sequence
  Synthetic
uauguuuaaaaaaauggcuuug

SEQ ID NO: 615986 - RNA, 23 nt, Artificial Sequence
  Synthetic
uuauguuuaaaaaaauggcuuug

SEQ ID NO: 615987 - RNA, 24 nt, Artificial Sequence
  Synthetic
uuuauguuuaaaaaaauggcuuug

SEQ ID NO: 615988 - RNA, 18 nt, Artificial Sequence
  Synthetic
aaaacaaugcuggcuuug

SEQ ID NO: 615989 - RNA, 19 nt, Artificial Sequence
  Synthetic
gaaaacaaugcuggcuuug

SEQ ID NO: 615990 - RNA, 20 nt, Artificial Sequence
  Synthetic
ugaaaacaaugcuggcuuug

SEQ ID NO: 615991 - RNA, 21 nt, Artificial Sequence
  Synthetic
uugaaaacaaugcuggcuuug

SEQ ID NO: 615992 - RNA, 22 nt, Artificial Sequence
  Synthetic
uuugaaaacaaugcuggcuuug

SEQ ID NO: 615993 - RNA, 23 nt, Artificial Sequence
  Synthetic
guuugaaaacaaugcuggcuuug

SEQ ID NO: 615994 - RNA, 24 nt, Artificial Sequence
  Synthetic
uguuugaaaacaaugcuggcuuug

SEQ ID NO: 615995 - RNA, 18 nt, Artificial Sequence
  Synthetic
cuggcuacaguggcuuug

SEQ ID NO: 615996 - RNA, 19 nt, Artificial Sequence
  Synthetic
ucuggcuacaguggcuuug

SEQ ID NO: 615997 - RNA, 20 nt, Artificial Sequence
  Synthetic
aucuggcuacaguggcuuug

SEQ ID NO: 615998 - RNA, 21 nt, Artificial Sequence
  Synthetic
aaucuggcuacaguggcuuug

SEQ ID NO: 615999 - RNA, 22 nt, Artificial Sequence
  Synthetic
caaucuggcuacaguggcuuug

SEQ ID NO: 616000 - RNA, 23 nt, Artificial Sequence
  Synthetic
gcaaucuggcuacaguggcuuug

SEQ ID NO: 616001 - RNA, 24 nt, Artificial Sequence
  Synthetic
ggcaaucuggcuacaguggcuuug

SEQ ID NO: 616002 - RNA, 18 nt, Artificial Sequence
  Synthetic
accugaaugaaugcuuug

SEQ ID NO: 616003 - RNA, 19 nt, Artificial Sequence
  Synthetic
caccugaaugaaugcuuug

SEQ ID NO: 616004 - RNA, 20 nt, Artificial Sequence
  Synthetic
ccaccugaaugaaugcuuug

SEQ ID NO: 616005 - RNA, 21 nt, Artificial Sequence
  Synthetic
cccaccugaaugaaugcuuug

SEQ ID NO: 616006 - RNA, 22 nt, Artificial Sequence
  Synthetic
acccaccugaaugaaugcuuug

SEQ ID NO: 616007 - RNA, 23 nt, Artificial Sequence
  Synthetic
uacccaccugaaugaaugcuuug

SEQ ID NO: 616008 - RNA, 24 nt, Artificial Sequence
  Synthetic
guacccaccugaaugaaugcuuug

SEQ ID NO: 616009 - RNA, 18 nt, Artificial Sequence
  Synthetic
cuaaaaucagaugcuuug

SEQ ID NO: 616010 - RNA, 19 nt, Artificial Sequence
  Synthetic
ucuaaaaucagaugcuuug

SEQ ID NO: 616011 - RNA, 20 nt, Artificial Sequence
  Synthetic
aucuaaaaucagaugcuuug

SEQ ID NO: 616012 - RNA, 21 nt, Artificial Sequence
  Synthetic
uaucuaaaaucagaugcuuug

SEQ ID NO: 616013 - RNA, 22 nt, Artificial Sequence
  Synthetic
cuaucuaaaaucagaugcuuug

SEQ ID NO: 616014 - RNA, 23 nt, Artificial Sequence
  Synthetic
gcuaucuaaaaucagaugcuuug

SEQ ID NO: 616015 - RNA, 24 nt, Artificial Sequence
  Synthetic
cgcuaucuaaaaucagaugcuuug

SEQ ID NO: 616016 - RNA, 18 nt, Artificial Sequence
  Synthetic
uugcuuaaagcugcuuug

SEQ ID NO: 616017 - RNA, 19 nt, Artificial Sequence
  Synthetic
uuugcuuaaagcugcuuug

SEQ ID NO: 616018 - RNA, 20 nt, Artificial Sequence
  Synthetic
uuuugcuuaaagcugcuuug

SEQ ID NO: 616019 - RNA, 21 nt, Artificial Sequence
  Synthetic
auuuugcuuaaagcugcuuug

SEQ ID NO: 616020 - RNA, 22 nt, Artificial Sequence
  Synthetic
cauuuugcuuaaagcugcuuug

SEQ ID NO: 616021 - RNA, 23 nt, Artificial Sequence
  Synthetic
ucauuuugcuuaaagcugcuuug

SEQ ID NO: 616022 - RNA, 24 nt, Artificial Sequence
  Synthetic
aucauuuugcuuaaagcugcuuug

SEQ ID NO: 616023 - RNA, 18 nt, Artificial Sequence
  Synthetic
uaauacuagaaaucuuug

SEQ ID NO: 616024 - RNA, 19 nt, Artificial Sequence
  Synthetic
guaauacuagaaaucuuug

SEQ ID NO: 616025 - RNA, 20 nt, Artificial Sequence
  Synthetic
aguaauacuagaaaucuuug

SEQ ID NO: 616026 - RNA, 21 nt, Artificial Sequence
  Synthetic
caguaauacuagaaaucuuug

SEQ ID NO: 616027 - RNA, 22 nt, Artificial Sequence
  Synthetic
ccaguaauacuagaaaucuuug

SEQ ID NO: 616028 - RNA, 23 nt, Artificial Sequence
  Synthetic
gccaguaauacuagaaaucuuug

SEQ ID NO: 616029 - RNA, 24 nt, Artificial Sequence
  Synthetic
ggccaguaauacuagaaaucuuug

SEQ ID NO: 616030 - RNA, 18 nt, Artificial Sequence
  Synthetic
cugauugguuaaucuuug

SEQ ID NO: 616031 - RNA, 19 nt, Artificial Sequence
  Synthetic
ucugauugguuaaucuuug

SEQ ID NO: 616032 - RNA, 20 nt, Artificial Sequence
  Synthetic
cucugauugguuaaucuuug

SEQ ID NO: 616033 - RNA, 21 nt, Artificial Sequence
  Synthetic
gcucugauugguuaaucuuug

SEQ ID NO: 616034 - RNA, 22 nt, Artificial Sequence
  Synthetic
ugcucugauugguuaaucuuug

SEQ ID NO: 616035 - RNA, 23 nt, Artificial Sequence
  Synthetic
cugcucugauugguuaaucuuug

SEQ ID NO: 616036 - RNA, 24 nt, Artificial Sequence
  Synthetic
ccugcucugauugguuaaucuuug

SEQ ID NO: 616037 - RNA, 18 nt, Artificial Sequence
  Synthetic
aggauauggacaucuuug

SEQ ID NO: 616038 - RNA, 19 nt, Artificial Sequence
  Synthetic
uaggauauggacaucuuug

SEQ ID NO: 616039 - RNA, 20 nt, Artificial Sequence
  Synthetic
uuaggauauggacaucuuug

SEQ ID NO: 616040 - RNA, 21 nt, Artificial Sequence
  Synthetic
auuaggauauggacaucuuug

SEQ ID NO: 616041 - RNA, 22 nt, Artificial Sequence
  Synthetic
gauuaggauauggacaucuuug

SEQ ID NO: 616042 - RNA, 23 nt, Artificial Sequence
  Synthetic
ggauuaggauauggacaucuuug

SEQ ID NO: 616043 - RNA, 24 nt, Artificial Sequence
  Synthetic
gggauuaggauauggacaucuuug

SEQ ID NO: 616044 - RNA, 18 nt, Artificial Sequence
  Synthetic
gacucugaaagaucuuug

SEQ ID NO: 616045 - RNA, 19 nt, Artificial Sequence
  Synthetic
ugacucugaaagaucuuug

SEQ ID NO: 616046 - RNA, 20 nt, Artificial Sequence
  Synthetic
cugacucugaaagaucuuug

SEQ ID NO: 616047 - RNA, 21 nt, Artificial Sequence
  Synthetic
acugacucugaaagaucuuug

SEQ ID NO: 616048 - RNA, 22 nt, Artificial Sequence
  Synthetic
gacugacucugaaagaucuuug

SEQ ID NO: 616049 - RNA, 23 nt, Artificial Sequence
  Synthetic
agacugacucugaaagaucuuug

SEQ ID NO: 616050 - RNA, 24 nt, Artificial Sequence
  Synthetic
aagacugacucugaaagaucuuug

SEQ ID NO: 616051 - RNA, 18 nt, Artificial Sequence
  Synthetic
ugaugaaugaacucuuug

SEQ ID NO: 616052 - RNA, 19 nt, Artificial Sequence
  Synthetic
augaugaaugaacucuuug

SEQ ID NO: 616053 - RNA, 20 nt, Artificial Sequence
  Synthetic
aaugaugaaugaacucuuug

SEQ ID NO: 616054 - RNA, 21 nt, Artificial Sequence
  Synthetic
caaugaugaaugaacucuuug

SEQ ID NO: 616055 - RNA, 22 nt, Artificial Sequence
  Synthetic
gcaaugaugaaugaacucuuug

SEQ ID NO: 616056 - RNA, 23 nt, Artificial Sequence
  Synthetic
agcaaugaugaaugaacucuuug

SEQ ID NO: 616057 - RNA, 24 nt, Artificial Sequence
  Synthetic
cagcaaugaugaaugaacucuuug

SEQ ID NO: 616058 - RNA, 18 nt, Artificial Sequence
  Synthetic
uguaaucccagcucuuug

SEQ ID NO: 616059 - RNA, 19 nt, Artificial Sequence
  Synthetic
cuguaaucccagcucuuug

SEQ ID NO: 616060 - RNA, 20 nt, Artificial Sequence
  Synthetic
ccuguaaucccagcucuuug

SEQ ID NO: 616061 - RNA, 21 nt, Artificial Sequence
  Synthetic
accuguaaucccagcucuuug

SEQ ID NO: 616062 - RNA, 22 nt, Artificial Sequence
  Synthetic
caccuguaaucccagcucuuug

SEQ ID NO: 616063 - RNA, 23 nt, Artificial Sequence
  Synthetic
acaccuguaaucccagcucuuug

SEQ ID NO: 616064 - RNA, 24 nt, Artificial Sequence
  Synthetic
cacaccuguaaucccagcucuuug

SEQ ID NO: 616065 - RNA, 18 nt, Artificial Sequence
  Synthetic
cauucuuguggcucuuug

SEQ ID NO: 616066 - RNA, 19 nt, Artificial Sequence
  Synthetic
ucauucuuguggcucuuug

SEQ ID NO: 616067 - RNA, 20 nt, Artificial Sequence
  Synthetic
cucauucuuguggcucuuug

SEQ ID NO: 616068 - RNA, 21 nt, Artificial Sequence
  Synthetic
gcucauucuuguggcucuuug

SEQ ID NO: 616069 - RNA, 22 nt, Artificial Sequence
  Synthetic
agcucauucuuguggcucuuug

SEQ ID NO: 616070 - RNA, 23 nt, Artificial Sequence
  Synthetic
aagcucauucuuguggcucuuug

SEQ ID NO: 616071 - RNA, 24 nt, Artificial Sequence
  Synthetic
uaagcucauucuuguggcucuuug

SEQ ID NO: 616072 - RNA, 18 nt, Artificial Sequence
  Synthetic
aaacagcuucucucuuug

SEQ ID NO: 616073 - RNA, 19 nt, Artificial Sequence
  Synthetic
gaaacagcuucucucuuug

SEQ ID NO: 616074 - RNA, 20 nt, Artificial Sequence
  Synthetic
ugaaacagcuucucucuuug

SEQ ID NO: 616075 - RNA, 21 nt, Artificial Sequence
  Synthetic
cugaaacagcuucucucuuug

SEQ ID NO: 616076 - RNA, 22 nt, Artificial Sequence
  Synthetic
acugaaacagcuucucucuuug

SEQ ID NO: 616077 - RNA, 23 nt, Artificial Sequence
  Synthetic
gacugaaacagcuucucucuuug

SEQ ID NO: 616078 - RNA, 24 nt, Artificial Sequence
  Synthetic
ugacugaaacagcuucucucuuug

SEQ ID NO: 616079 - RNA, 18 nt, Artificial Sequence
  Synthetic
cacugucaguggucuuug

SEQ ID NO: 616080 - RNA, 19 nt, Artificial Sequence
  Synthetic
ccacugucaguggucuuug

SEQ ID NO: 616081 - RNA, 20 nt, Artificial Sequence
  Synthetic
cccacugucaguggucuuug

SEQ ID NO: 616082 - RNA, 21 nt, Artificial Sequence
  Synthetic
ccccacugucaguggucuuug

SEQ ID NO: 616083 - RNA, 22 nt, Artificial Sequence
  Synthetic
accccacugucaguggucuuug

SEQ ID NO: 616084 - RNA, 23 nt, Artificial Sequence
  Synthetic
uaccccacugucaguggucuuug

SEQ ID NO: 616085 - RNA, 24 nt, Artificial Sequence
  Synthetic
cuaccccacugucaguggucuuug

SEQ ID NO: 616086 - RNA, 18 nt, Artificial Sequence
  Synthetic
uaauuuuugaauucuuug

SEQ ID NO: 616087 - RNA, 19 nt, Artificial Sequence
  Synthetic
uuaauuuuugaauucuuug

SEQ ID NO: 616088 - RNA, 20 nt, Artificial Sequence
  Synthetic
guuaauuuuugaauucuuug

SEQ ID NO: 616089 - RNA, 21 nt, Artificial Sequence
  Synthetic
aguuaauuuuugaauucuuug

SEQ ID NO: 616090 - RNA, 22 nt, Artificial Sequence
  Synthetic
caguuaauuuuugaauucuuug

SEQ ID NO: 616091 - RNA, 23 nt, Artificial Sequence
  Synthetic
ccaguuaauuuuugaauucuuug

SEQ ID NO: 616092 - RNA, 24 nt, Artificial Sequence
  Synthetic
cccaguuaauuuuugaauucuuug

SEQ ID NO: 616093 - RNA, 18 nt, Artificial Sequence
  Synthetic
auuucuaugucuucuuug

SEQ ID NO: 616094 - RNA, 19 nt, Artificial Sequence
  Synthetic
cauuucuaugucuucuuug

SEQ ID NO: 616095 - RNA, 20 nt, Artificial Sequence
  Synthetic
ccauuucuaugucuucuuug

SEQ ID NO: 616096 - RNA, 21 nt, Artificial Sequence
  Synthetic
gccauuucuaugucuucuuug

SEQ ID NO: 616097 - RNA, 22 nt, Artificial Sequence
  Synthetic
ggccauuucuaugucuucuuug

SEQ ID NO: 616098 - RNA, 23 nt, Artificial Sequence
  Synthetic
uggccauuucuaugucuucuuug

SEQ ID NO: 616099 - RNA, 24 nt, Artificial Sequence
  Synthetic
uuggccauuucuaugucuucuuug

SEQ ID NO: 616100 - RNA, 18 nt, Artificial Sequence
  Synthetic
augaguucauguucuuug

SEQ ID NO: 616101 - RNA, 19 nt, Artificial Sequence
  Synthetic
gaugaguucauguucuuug

SEQ ID NO: 616102 - RNA, 20 nt, Artificial Sequence
  Synthetic
ugaugaguucauguucuuug

SEQ ID NO: 616103 - RNA, 21 nt, Artificial Sequence
  Synthetic
augaugaguucauguucuuug

SEQ ID NO: 616104 - RNA, 22 nt, Artificial Sequence
  Synthetic
aaugaugaguucauguucuuug

SEQ ID NO: 616105 - RNA, 23 nt, Artificial Sequence
  Synthetic
aaaugaugaguucauguucuuug

SEQ ID NO: 616106 - RNA, 24 nt, Artificial Sequence
  Synthetic
aaaaugaugaguucauguucuuug

SEQ ID NO: 616107 - RNA, 18 nt, Artificial Sequence
  Synthetic
uaccacccguguucuuug

SEQ ID NO: 616108 - RNA, 19 nt, Artificial Sequence
  Synthetic
auaccacccguguucuuug

SEQ ID NO: 616109 - RNA, 20 nt, Artificial Sequence
  Synthetic
uauaccacccguguucuuug

SEQ ID NO: 616110 - RNA, 21 nt, Artificial Sequence
  Synthetic
auauaccacccguguucuuug

SEQ ID NO: 616111 - RNA, 22 nt, Artificial Sequence
  Synthetic
aauauaccacccguguucuuug

SEQ ID NO: 616112 - RNA, 23 nt, Artificial Sequence
  Synthetic
caauauaccacccguguucuuug

SEQ ID NO: 616113 - RNA, 24 nt, Artificial Sequence
  Synthetic
ucaauauaccacccguguucuuug

SEQ ID NO: 616114 - RNA, 18 nt, Artificial Sequence
  Synthetic
uuaguaugcauuucuuug

SEQ ID NO: 616115 - RNA, 19 nt, Artificial Sequence
  Synthetic
auuaguaugcauuucuuug

SEQ ID NO: 616116 - RNA, 20 nt, Artificial Sequence
  Synthetic
aauuaguaugcauuucuuug

SEQ ID NO: 616117 - RNA, 21 nt, Artificial Sequence
  Synthetic
caauuaguaugcauuucuuug

SEQ ID NO: 616118 - RNA, 22 nt, Artificial Sequence
  Synthetic
ucaauuaguaugcauuucuuug

SEQ ID NO: 616119 - RNA, 23 nt, Artificial Sequence
  Synthetic
uucaauuaguaugcauuucuuug

SEQ ID NO: 616120 - RNA, 24 nt, Artificial Sequence
  Synthetic
uuucaauuaguaugcauuucuuug

SEQ ID NO: 616121 - RNA, 18 nt, Artificial Sequence
  Synthetic
ucagcucguuuuucuuug

SEQ ID NO: 616122 - RNA, 19 nt, Artificial Sequence
  Synthetic
gucagcucguuuuucuuug

SEQ ID NO: 616123 - RNA, 20 nt, Artificial Sequence
  Synthetic
agucagcucguuuuucuuug

SEQ ID NO: 616124 - RNA, 21 nt, Artificial Sequence
  Synthetic
aagucagcucguuuuucuuug

SEQ ID NO: 616125 - RNA, 22 nt, Artificial Sequence
  Synthetic
caagucagcucguuuuucuuug

SEQ ID NO: 616126 - RNA, 23 nt, Artificial Sequence
  Synthetic
gcaagucagcucguuuuucuuug

SEQ ID NO: 616127 - RNA, 24 nt, Artificial Sequence
  Synthetic
ugcaagucagcucguuuuucuuug

SEQ ID NO: 616128 - RNA, 18 nt, Artificial Sequence
  Synthetic
ugaaauguuaaaaguuug

SEQ ID NO: 616129 - RNA, 19 nt, Artificial Sequence
  Synthetic
cugaaauguuaaaaguuug

SEQ ID NO: 616130 - RNA, 20 nt, Artificial Sequence
  Synthetic
ucugaaauguuaaaaguuug

SEQ ID NO: 616131 - RNA, 21 nt, Artificial Sequence
  Synthetic
aucugaaauguuaaaaguuug

SEQ ID NO: 616132 - RNA, 22 nt, Artificial Sequence
  Synthetic
uaucugaaauguuaaaaguuug

SEQ ID NO: 616133 - RNA, 23 nt, Artificial Sequence
  Synthetic
guaucugaaauguuaaaaguuug

SEQ ID NO: 616134 - RNA, 24 nt, Artificial Sequence
  Synthetic
aguaucugaaauguuaaaaguuug

SEQ ID NO: 616135 - RNA, 18 nt, Artificial Sequence
  Synthetic
caauacuuagaaaguuug

SEQ ID NO: 616136 - RNA, 19 nt, Artificial Sequence
  Synthetic
acaauacuuagaaaguuug

SEQ ID NO: 616137 - RNA, 20 nt, Artificial Sequence
  Synthetic
aacaauacuuagaaaguuug

SEQ ID NO: 616138 - RNA, 21 nt, Artificial Sequence
  Synthetic
uaacaauacuuagaaaguuug

SEQ ID NO: 616139 - RNA, 22 nt, Artificial Sequence
  Synthetic
auaacaauacuuagaaaguuug

SEQ ID NO: 616140 - RNA, 23 nt, Artificial Sequence
  Synthetic
gauaacaauacuuagaaaguuug

SEQ ID NO: 616141 - RNA, 24 nt, Artificial Sequence
  Synthetic
ugauaacaauacuuagaaaguuug

SEQ ID NO: 616142 - RNA, 18 nt, Artificial Sequence
  Synthetic
caaagcaggacaaguuug

SEQ ID NO: 616143 - RNA, 19 nt, Artificial Sequence
  Synthetic
ucaaagcaggacaaguuug

SEQ ID NO: 616144 - RNA, 20 nt, Artificial Sequence
  Synthetic
cucaaagcaggacaaguuug

SEQ ID NO: 616145 - RNA, 21 nt, Artificial Sequence
  Synthetic
gcucaaagcaggacaaguuug

SEQ ID NO: 616146 - RNA, 22 nt, Artificial Sequence
  Synthetic
ggcucaaagcaggacaaguuug

SEQ ID NO: 616147 - RNA, 23 nt, Artificial Sequence
  Synthetic
uggcucaaagcaggacaaguuug

SEQ ID NO: 616148 - RNA, 24 nt, Artificial Sequence
  Synthetic
uuggcucaaagcaggacaaguuug

SEQ ID NO: 616149 - RNA, 18 nt, Artificial Sequence
  Synthetic
augauuuaggcaaguuug

SEQ ID NO: 616150 - RNA, 19 nt, Artificial Sequence
  Synthetic
uaugauuuaggcaaguuug

SEQ ID NO: 616151 - RNA, 20 nt, Artificial Sequence
  Synthetic
uuaugauuuaggcaaguuug

SEQ ID NO: 616152 - RNA, 21 nt, Artificial Sequence
  Synthetic
uuuaugauuuaggcaaguuug

SEQ ID NO: 616153 - RNA, 22 nt, Artificial Sequence
  Synthetic
uuuuaugauuuaggcaaguuug

SEQ ID NO: 616154 - RNA, 23 nt, Artificial Sequence
  Synthetic
cuuuuaugauuuaggcaaguuug

SEQ ID NO: 616155 - RNA, 24 nt, Artificial Sequence
  Synthetic
acuuuuaugauuuaggcaaguuug

SEQ ID NO: 616156 - RNA, 18 nt, Artificial Sequence
  Synthetic
uuaucacccauaaguuug

SEQ ID NO: 616157 - RNA, 19 nt, Artificial Sequence
  Synthetic
uuuaucacccauaaguuug

SEQ ID NO: 616158 - RNA, 20 nt, Artificial Sequence
  Synthetic
uuuuaucacccauaaguuug

SEQ ID NO: 616159 - RNA, 21 nt, Artificial Sequence
  Synthetic
uuuuuaucacccauaaguuug

SEQ ID NO: 616160 - RNA, 22 nt, Artificial Sequence
  Synthetic
cuuuuuaucacccauaaguuug

SEQ ID NO: 616161 - RNA, 23 nt, Artificial Sequence
  Synthetic
gcuuuuuaucacccauaaguuug

SEQ ID NO: 616162 - RNA, 24 nt, Artificial Sequence
  Synthetic
ugcuuuuuaucacccauaaguuug

SEQ ID NO: 616163 - RNA, 18 nt, Artificial Sequence
  Synthetic
uaguaaauacuaaguuug

SEQ ID NO: 616164 - RNA, 19 nt, Artificial Sequence
  Synthetic
cuaguaaauacuaaguuug

SEQ ID NO: 616165 - RNA, 20 nt, Artificial Sequence
  Synthetic
acuaguaaauacuaaguuug

SEQ ID NO: 616166 - RNA, 21 nt, Artificial Sequence
  Synthetic
gacuaguaaauacuaaguuug

SEQ ID NO: 616167 - RNA, 22 nt, Artificial Sequence
  Synthetic
ugacuaguaaauacuaaguuug

SEQ ID NO: 616168 - RNA, 23 nt, Artificial Sequence
  Synthetic
cugacuaguaaauacuaaguuug

SEQ ID NO: 616169 - RNA, 24 nt, Artificial Sequence
  Synthetic
acugacuaguaaauacuaaguuug

SEQ ID NO: 616170 - RNA, 18 nt, Artificial Sequence
  Synthetic
aaauuuaauuuaaguuug

SEQ ID NO: 616171 - RNA, 19 nt, Artificial Sequence
  Synthetic
gaaauuuaauuuaaguuug

SEQ ID NO: 616172 - RNA, 20 nt, Artificial Sequence
  Synthetic
agaaauuuaauuuaaguuug

SEQ ID NO: 616173 - RNA, 21 nt, Artificial Sequence
  Synthetic
gagaaauuuaauuuaaguuug

SEQ ID NO: 616174 - RNA, 22 nt, Artificial Sequence
  Synthetic
ggagaaauuuaauuuaaguuug

SEQ ID NO: 616175 - RNA, 23 nt, Artificial Sequence
  Synthetic
uggagaaauuuaauuuaaguuug

SEQ ID NO: 616176 - RNA, 24 nt, Artificial Sequence
  Synthetic
uuggagaaauuuaauuuaaguuug

SEQ ID NO: 616177 - RNA, 18 nt, Artificial Sequence
  Synthetic
agagucugguacaguuug

SEQ ID NO: 616178 - RNA, 19 nt, Artificial Sequence
  Synthetic
cagagucugguacaguuug

SEQ ID NO: 616179 - RNA, 20 nt, Artificial Sequence
  Synthetic
gcagagucugguacaguuug

SEQ ID NO: 616180 - RNA, 21 nt, Artificial Sequence
  Synthetic
ugcagagucugguacaguuug

SEQ ID NO: 616181 - RNA, 22 nt, Artificial Sequence
  Synthetic
augcagagucugguacaguuug

SEQ ID NO: 616182 - RNA, 23 nt, Artificial Sequence
  Synthetic
caugcagagucugguacaguuug

SEQ ID NO: 616183 - RNA, 24 nt, Artificial Sequence
  Synthetic
acaugcagagucugguacaguuug

SEQ ID NO: 616184 - RNA, 18 nt, Artificial Sequence
  Synthetic
acucauugcaauaguuug

SEQ ID NO: 616185 - RNA, 19 nt, Artificial Sequence
  Synthetic
uacucauugcaauaguuug

SEQ ID NO: 616186 - RNA, 20 nt, Artificial Sequence
  Synthetic
uuacucauugcaauaguuug

SEQ ID NO: 616187 - RNA, 21 nt, Artificial Sequence
  Synthetic
cuuacucauugcaauaguuug

SEQ ID NO: 616188 - RNA, 22 nt, Artificial Sequence
  Synthetic
acuuacucauugcaauaguuug

SEQ ID NO: 616189 - RNA, 23 nt, Artificial Sequence
  Synthetic
aacuuacucauugcaauaguuug

SEQ ID NO: 616190 - RNA, 24 nt, Artificial Sequence
  Synthetic
gaacuuacucauugcaauaguuug

SEQ ID NO: 616191 - RNA, 18 nt, Artificial Sequence
  Synthetic
uguccuugcaauaguuug

SEQ ID NO: 616192 - RNA, 19 nt, Artificial Sequence
  Synthetic
uuguccuugcaauaguuug

SEQ ID NO: 616193 - RNA, 20 nt, Artificial Sequence
  Synthetic
uuuguccuugcaauaguuug

SEQ ID NO: 616194 - RNA, 21 nt, Artificial Sequence
  Synthetic
uuuuguccuugcaauaguuug

SEQ ID NO: 616195 - RNA, 22 nt, Artificial Sequence
  Synthetic
uuuuuguccuugcaauaguuug

SEQ ID NO: 616196 - RNA, 23 nt, Artificial Sequence
  Synthetic
uuuuuuguccuugcaauaguuug

SEQ ID NO: 616197 - RNA, 24 nt, Artificial Sequence
  Synthetic
guuuuuuguccuugcaauaguuug

SEQ ID NO: 616198 - RNA, 18 nt, Artificial Sequence
  Synthetic
uguccuugccauaguuug

SEQ ID NO: 616199 - RNA, 19 nt, Artificial Sequence
  Synthetic
uuguccuugccauaguuug

SEQ ID NO: 616200 - RNA, 20 nt, Artificial Sequence
  Synthetic
uuuguccuugccauaguuug

SEQ ID NO: 616201 - RNA, 21 nt, Artificial Sequence
  Synthetic
uuuuguccuugccauaguuug

SEQ ID NO: 616202 - RNA, 22 nt, Artificial Sequence
  Synthetic
uuuuuguccuugccauaguuug

SEQ ID NO: 616203 - RNA, 23 nt, Artificial Sequence
  Synthetic
uuuuuuguccuugccauaguuug

SEQ ID NO: 616204 - RNA, 24 nt, Artificial Sequence
  Synthetic
guuuuuuguccuugccauaguuug

SEQ ID NO: 616205 - RNA, 18 nt, Artificial Sequence
  Synthetic
gauacaaggcuuaguuug

SEQ ID NO: 616206 - RNA, 19 nt, Artificial Sequence
  Synthetic
ggauacaaggcuuaguuug

SEQ ID NO: 616207 - RNA, 20 nt, Artificial Sequence
  Synthetic
aggauacaaggcuuaguuug

SEQ ID NO: 616208 - RNA, 21 nt, Artificial Sequence
  Synthetic
aaggauacaaggcuuaguuug

SEQ ID NO: 616209 - RNA, 22 nt, Artificial Sequence
  Synthetic
uaaggauacaaggcuuaguuug

SEQ ID NO: 616210 - RNA, 23 nt, Artificial Sequence
  Synthetic
auaaggauacaaggcuuaguuug

SEQ ID NO: 616211 - RNA, 24 nt, Artificial Sequence
  Synthetic
aauaaggauacaaggcuuaguuug

SEQ ID NO: 616212 - RNA, 18 nt, Artificial Sequence
  Synthetic
cauuccuguguuaguuug

SEQ ID NO: 616213 - RNA, 19 nt, Artificial Sequence
  Synthetic
ccauuccuguguuaguuug

SEQ ID NO: 616214 - RNA, 20 nt, Artificial Sequence
  Synthetic
uccauuccuguguuaguuug

SEQ ID NO: 616215 - RNA, 21 nt, Artificial Sequence
  Synthetic
uuccauuccuguguuaguuug

SEQ ID NO: 616216 - RNA, 22 nt, Artificial Sequence
  Synthetic
uuuccauuccuguguuaguuug

SEQ ID NO: 616217 - RNA, 23 nt, Artificial Sequence
  Synthetic
uuuuccauuccuguguuaguuug

SEQ ID NO: 616218 - RNA, 24 nt, Artificial Sequence
  Synthetic
uuuuuccauuccuguguuaguuug

SEQ ID NO: 616219 - RNA, 21 nt, Artificial Sequence
  Synthetic
uucuguuccuguguuaguuug

SEQ ID NO: 616220 - RNA, 22 nt, Artificial Sequence
  Synthetic
uuucuguuccuguguuaguuug

SEQ ID NO: 616221 - RNA, 23 nt, Artificial Sequence
  Synthetic
uuuucuguuccuguguuaguuug

SEQ ID NO: 616222 - RNA, 24 nt, Artificial Sequence
  Synthetic
cuuuucuguuccuguguuaguuug

SEQ ID NO: 616223 - RNA, 24 nt, Artificial Sequence
  Synthetic
guuuucuguuccuguguuaguuug

SEQ ID NO: 616224 - RNA, 18 nt, Artificial Sequence
  Synthetic
ucuguacucccacguuug

SEQ ID NO: 616225 - RNA, 19 nt, Artificial Sequence
  Synthetic
aucuguacucccacguuug

SEQ ID NO: 616226 - RNA, 20 nt, Artificial Sequence
  Synthetic
uaucuguacucccacguuug

SEQ ID NO: 616227 - RNA, 21 nt, Artificial Sequence
  Synthetic
auaucuguacucccacguuug

SEQ ID NO: 616228 - RNA, 22 nt, Artificial Sequence
  Synthetic
gauaucuguacucccacguuug

SEQ ID NO: 616229 - RNA, 23 nt, Artificial Sequence
  Synthetic
agauaucuguacucccacguuug

SEQ ID NO: 616230 - RNA, 24 nt, Artificial Sequence
  Synthetic
gagauaucuguacucccacguuug

SEQ ID NO: 616231 - RNA, 18 nt, Artificial Sequence
  Synthetic
cuguacagaucacguuug

SEQ ID NO: 616232 - RNA, 19 nt, Artificial Sequence
  Synthetic
ucuguacagaucacguuug

SEQ ID NO: 616233 - RNA, 20 nt, Artificial Sequence
  Synthetic
uucuguacagaucacguuug

SEQ ID NO: 616234 - RNA, 21 nt, Artificial Sequence
  Synthetic
uuucuguacagaucacguuug

SEQ ID NO: 616235 - RNA, 22 nt, Artificial Sequence
  Synthetic
uuuucuguacagaucacguuug

SEQ ID NO: 616236 - RNA, 23 nt, Artificial Sequence
  Synthetic
auuuucuguacagaucacguuug

SEQ ID NO: 616237 - RNA, 24 nt, Artificial Sequence
  Synthetic
cauuuucuguacagaucacguuug

SEQ ID NO: 616238 - RNA, 18 nt, Artificial Sequence
  Synthetic
ucacuucgauuacguuug

SEQ ID NO: 616239 - RNA, 19 nt, Artificial Sequence
  Synthetic
aucacuucgauuacguuug

SEQ ID NO: 616240 - RNA, 20 nt, Artificial Sequence
  Synthetic
aaucacuucgauuacguuug

SEQ ID NO: 616241 - RNA, 21 nt, Artificial Sequence
  Synthetic
caaucacuucgauuacguuug

SEQ ID NO: 616242 - RNA, 22 nt, Artificial Sequence
  Synthetic
gcaaucacuucgauuacguuug

SEQ ID NO: 616243 - RNA, 23 nt, Artificial Sequence
  Synthetic
ugcaaucacuucgauuacguuug

SEQ ID NO: 616244 - RNA, 24 nt, Artificial Sequence
  Synthetic
augcaaucacuucgauuacguuug

SEQ ID NO: 616245 - RNA, 18 nt, Artificial Sequence
  Synthetic
uuccuuuuuaaagguuug

SEQ ID NO: 616246 - RNA, 19 nt, Artificial Sequence
  Synthetic
uuuccuuuuuaaagguuug

SEQ ID NO: 616247 - RNA, 20 nt, Artificial Sequence
  Synthetic
auuuccuuuuuaaagguuug

SEQ ID NO: 616248 - RNA, 21 nt, Artificial Sequence
  Synthetic
uauuuccuuuuuaaagguuug

SEQ ID NO: 616249 - RNA, 22 nt, Artificial Sequence
  Synthetic
uuauuuccuuuuuaaagguuug

SEQ ID NO: 616250 - RNA, 23 nt, Artificial Sequence
  Synthetic
uuuauuuccuuuuuaaagguuug

SEQ ID NO: 616251 - RNA, 24 nt, Artificial Sequence
  Synthetic
auuuauuuccuuuuuaaagguuug

SEQ ID NO: 616252 - RNA, 18 nt, Artificial Sequence
  Synthetic
uaaaaaaugcaagguuug

SEQ ID NO: 616253 - RNA, 19 nt, Artificial Sequence
  Synthetic
guaaaaaaugcaagguuug

SEQ ID NO: 616254 - RNA, 20 nt, Artificial Sequence
  Synthetic
aguaaaaaaugcaagguuug

SEQ ID NO: 616255 - RNA, 21 nt, Artificial Sequence
  Synthetic
aaguaaaaaaugcaagguuug

SEQ ID NO: 616256 - RNA, 22 nt, Artificial Sequence
  Synthetic
aaaguaaaaaaugcaagguuug

SEQ ID NO: 616257 - RNA, 23 nt, Artificial Sequence
  Synthetic
gaaaguaaaaaaugcaagguuug

SEQ ID NO: 616258 - RNA, 24 nt, Artificial Sequence
  Synthetic
ugaaaguaaaaaaugcaagguuug

SEQ ID NO: 616259 - RNA, 18 nt, Artificial Sequence
  Synthetic
cacagcagcacagguuug

SEQ ID NO: 616260 - RNA, 19 nt, Artificial Sequence
  Synthetic
acacagcagcacagguuug

SEQ ID NO: 616261 - RNA, 20 nt, Artificial Sequence
  Synthetic
uacacagcagcacagguuug

SEQ ID NO: 616262 - RNA, 21 nt, Artificial Sequence
  Synthetic
auacacagcagcacagguuug

SEQ ID NO: 616263 - RNA, 22 nt, Artificial Sequence
  Synthetic
aauacacagcagcacagguuug

SEQ ID NO: 616264 - RNA, 23 nt, Artificial Sequence
  Synthetic
aaauacacagcagcacagguuug

SEQ ID NO: 616265 - RNA, 24 nt, Artificial Sequence
  Synthetic
caaauacacagcagcacagguuug

SEQ ID NO: 616266 - RNA, 18 nt, Artificial Sequence
  Synthetic
aaaagcuaaagagguuug

SEQ ID NO: 616267 - RNA, 19 nt, Artificial Sequence
  Synthetic
aaaaagcuaaagagguuug

SEQ ID NO: 616268 - RNA, 20 nt, Artificial Sequence
  Synthetic
uaaaaagcuaaagagguuug

SEQ ID NO: 616269 - RNA, 21 nt, Artificial Sequence
  Synthetic
auaaaaagcuaaagagguuug

SEQ ID NO: 616270 - RNA, 22 nt, Artificial Sequence
  Synthetic
aauaaaaagcuaaagagguuug

SEQ ID NO: 616271 - RNA, 23 nt, Artificial Sequence
  Synthetic
aaauaaaaagcuaaagagguuug

SEQ ID NO: 616272 - RNA, 24 nt, Artificial Sequence
  Synthetic
caaauaaaaagcuaaagagguuug

SEQ ID NO: 616273 - RNA, 18 nt, Artificial Sequence
  Synthetic
aauaaauucugagguuug

SEQ ID NO: 616274 - RNA, 19 nt, Artificial Sequence
  Synthetic
uaauaaauucugagguuug

SEQ ID NO: 616275 - RNA, 20 nt, Artificial Sequence
  Synthetic
auaauaaauucugagguuug

SEQ ID NO: 616276 - RNA, 21 nt, Artificial Sequence
  Synthetic
aauaauaaauucugagguuug

SEQ ID NO: 616277 - RNA, 22 nt, Artificial Sequence
  Synthetic
aaauaauaaauucugagguuug

SEQ ID NO: 616278 - RNA, 23 nt, Artificial Sequence
  Synthetic
gaaauaauaaauucugagguuug

SEQ ID NO: 616279 - RNA, 24 nt, Artificial Sequence
  Synthetic
ggaaauaauaaauucugagguuug

SEQ ID NO: 616280 - RNA, 18 nt, Artificial Sequence
  Synthetic
guuauugguugagguuug

SEQ ID NO: 616281 - RNA, 19 nt, Artificial Sequence
  Synthetic
uguuauugguugagguuug

SEQ ID NO: 616282 - RNA, 20 nt, Artificial Sequence
  Synthetic
uuguuauugguugagguuug

SEQ ID NO: 616283 - RNA, 21 nt, Artificial Sequence
  Synthetic
uuuguuauugguugagguuug

SEQ ID NO: 616284 - RNA, 22 nt, Artificial Sequence
  Synthetic
auuuguuauugguugagguuug

SEQ ID NO: 616285 - RNA, 23 nt, Artificial Sequence
  Synthetic
uauuuguuauugguugagguuug

SEQ ID NO: 616286 - RNA, 24 nt, Artificial Sequence
  Synthetic
uuauuuguuauugguugagguuug

SEQ ID NO: 616287 - RNA, 18 nt, Artificial Sequence
  Synthetic
ccuuucagcauagguuug

SEQ ID NO: 616288 - RNA, 19 nt, Artificial Sequence
  Synthetic
uccuuucagcauagguuug

SEQ ID NO: 616289 - RNA, 20 nt, Artificial Sequence
  Synthetic
cuccuuucagcauagguuug

SEQ ID NO: 616290 - RNA, 21 nt, Artificial Sequence
  Synthetic
ccuccuuucagcauagguuug

SEQ ID NO: 616291 - RNA, 22 nt, Artificial Sequence
  Synthetic
gccuccuuucagcauagguuug

SEQ ID NO: 616292 - RNA, 23 nt, Artificial Sequence
  Synthetic
agccuccuuucagcauagguuug

SEQ ID NO: 616293 - RNA, 24 nt, Artificial Sequence
  Synthetic
uagccuccuuucagcauagguuug

SEQ ID NO: 616294 - RNA, 18 nt, Artificial Sequence
  Synthetic
gaggcggccaaggguuug

SEQ ID NO: 616295 - RNA, 19 nt, Artificial Sequence
  Synthetic
ugaggcggccaaggguuug

SEQ ID NO: 616296 - RNA, 20 nt, Artificial Sequence
  Synthetic
uugaggcggccaaggguuug

SEQ ID NO: 616297 - RNA, 21 nt, Artificial Sequence
  Synthetic
auugaggcggccaaggguuug

SEQ ID NO: 616298 - RNA, 22 nt, Artificial Sequence
  Synthetic
aauugaggcggccaaggguuug

SEQ ID NO: 616299 - RNA, 23 nt, Artificial Sequence
  Synthetic
aaauugaggcggccaaggguuug

SEQ ID NO: 616300 - RNA, 24 nt, Artificial Sequence
  Synthetic
aaaauugaggcggccaaggguuug

SEQ ID NO: 616301 - RNA, 18 nt, Artificial Sequence
  Synthetic
ggauguguaucggguuug

SEQ ID NO: 616302 - RNA, 19 nt, Artificial Sequence
  Synthetic
uggauguguaucggguuug

SEQ ID NO: 616303 - RNA, 20 nt, Artificial Sequence
  Synthetic
cuggauguguaucggguuug

SEQ ID NO: 616304 - RNA, 21 nt, Artificial Sequence
  Synthetic
ccuggauguguaucggguuug

SEQ ID NO: 616305 - RNA, 22 nt, Artificial Sequence
  Synthetic
accuggauguguaucggguuug

SEQ ID NO: 616306 - RNA, 23 nt, Artificial Sequence
  Synthetic
aaccuggauguguaucggguuug

SEQ ID NO: 616307 - RNA, 24 nt, Artificial Sequence
  Synthetic
gaaccuggauguguaucggguuug

SEQ ID NO: 616308 - RNA, 18 nt, Artificial Sequence
  Synthetic
cagcugaacagggguuug

SEQ ID NO: 616309 - RNA, 19 nt, Artificial Sequence
  Synthetic
gcagcugaacagggguuug

SEQ ID NO: 616310 - RNA, 20 nt, Artificial Sequence
  Synthetic
agcagcugaacagggguuug

SEQ ID NO: 616311 - RNA, 21 nt, Artificial Sequence
  Synthetic
cagcagcugaacagggguuug

SEQ ID NO: 616312 - RNA, 22 nt, Artificial Sequence
  Synthetic
gcagcagcugaacagggguuug

SEQ ID NO: 616313 - RNA, 23 nt, Artificial Sequence
  Synthetic
ggcagcagcugaacagggguuug

SEQ ID NO: 616314 - RNA, 24 nt, Artificial Sequence
  Synthetic
gggcagcagcugaacagggguuug

SEQ ID NO: 616315 - RNA, 18 nt, Artificial Sequence
  Synthetic
uauucuauuugggguuug

SEQ ID NO: 616316 - RNA, 19 nt, Artificial Sequence
  Synthetic
uuauucuauuugggguuug

SEQ ID NO: 616317 - RNA, 20 nt, Artificial Sequence
  Synthetic
uuuauucuauuugggguuug

SEQ ID NO: 616318 - RNA, 21 nt, Artificial Sequence
  Synthetic
guuuauucuauuugggguuug

SEQ ID NO: 616319 - RNA, 22 nt, Artificial Sequence
  Synthetic
uguuuauucuauuugggguuug

SEQ ID NO: 616320 - RNA, 23 nt, Artificial Sequence
  Synthetic
guguuuauucuauuugggguuug

SEQ ID NO: 616321 - RNA, 24 nt, Artificial Sequence
  Synthetic
cguguuuauucuauuugggguuug

SEQ ID NO: 616322 - RNA, 18 nt, Artificial Sequence
  Synthetic
ugcugcccagcugguuug

SEQ ID NO: 616323 - RNA, 19 nt, Artificial Sequence
  Synthetic
augcugcccagcugguuug

SEQ ID NO: 616324 - RNA, 20 nt, Artificial Sequence
  Synthetic
uaugcugcccagcugguuug

SEQ ID NO: 616325 - RNA, 21 nt, Artificial Sequence
  Synthetic
uuaugcugcccagcugguuug

SEQ ID NO: 616326 - RNA, 22 nt, Artificial Sequence
  Synthetic
guuaugcugcccagcugguuug

SEQ ID NO: 616327 - RNA, 23 nt, Artificial Sequence
  Synthetic
uguuaugcugcccagcugguuug

SEQ ID NO: 616328 - RNA, 24 nt, Artificial Sequence
  Synthetic
uuguuaugcugcccagcugguuug

SEQ ID NO: 616329 - RNA, 18 nt, Artificial Sequence
  Synthetic
aauguuaaaagugguuug

SEQ ID NO: 616330 - RNA, 19 nt, Artificial Sequence
  Synthetic
aaauguuaaaagugguuug

SEQ ID NO: 616331 - RNA, 20 nt, Artificial Sequence
  Synthetic
aaaauguuaaaagugguuug

SEQ ID NO: 616332 - RNA, 21 nt, Artificial Sequence
  Synthetic
caaaauguuaaaagugguuug

SEQ ID NO: 616333 - RNA, 22 nt, Artificial Sequence
  Synthetic
ucaaaauguuaaaagugguuug

SEQ ID NO: 616334 - RNA, 23 nt, Artificial Sequence
  Synthetic
aucaaaauguuaaaagugguuug

SEQ ID NO: 616335 - RNA, 24 nt, Artificial Sequence
  Synthetic
uaucaaaauguuaaaagugguuug

SEQ ID NO: 616336 - RNA, 18 nt, Artificial Sequence
  Synthetic
uucccaaaaugugguuug

SEQ ID NO: 616337 - RNA, 19 nt, Artificial Sequence
  Synthetic
uuucccaaaaugugguuug

SEQ ID NO: 616338 - RNA, 20 nt, Artificial Sequence
  Synthetic
guuucccaaaaugugguuug

SEQ ID NO: 616339 - RNA, 21 nt, Artificial Sequence
  Synthetic
uguuucccaaaaugugguuug

SEQ ID NO: 616340 - RNA, 22 nt, Artificial Sequence
  Synthetic
cuguuucccaaaaugugguuug

SEQ ID NO: 616341 - RNA, 23 nt, Artificial Sequence
  Synthetic
gcuguuucccaaaaugugguuug

SEQ ID NO: 616342 - RNA, 24 nt, Artificial Sequence
  Synthetic
cgcuguuucccaaaaugugguuug

SEQ ID NO: 616343 - RNA, 18 nt, Artificial Sequence
  Synthetic
uaagaagaacuugguuug

SEQ ID NO: 616344 - RNA, 19 nt, Artificial Sequence
  Synthetic
guaagaagaacuugguuug

SEQ ID NO: 616345 - RNA, 20 nt, Artificial Sequence
  Synthetic
aguaagaagaacuugguuug

SEQ ID NO: 616346 - RNA, 21 nt, Artificial Sequence
  Synthetic
gaguaagaagaacuugguuug

SEQ ID NO: 616347 - RNA, 22 nt, Artificial Sequence
  Synthetic
agaguaagaagaacuugguuug

SEQ ID NO: 616348 - RNA, 23 nt, Artificial Sequence
  Synthetic
gagaguaagaagaacuugguuug

SEQ ID NO: 616349 - RNA, 24 nt, Artificial Sequence
  Synthetic
ugagaguaagaagaacuugguuug

SEQ ID NO: 616350 - RNA, 18 nt, Artificial Sequence
  Synthetic
uagaauuugggauguuug

SEQ ID NO: 616351 - RNA, 19 nt, Artificial Sequence
  Synthetic
uuagaauuugggauguuug

SEQ ID NO: 616352 - RNA, 20 nt, Artificial Sequence
  Synthetic
cuuagaauuugggauguuug

SEQ ID NO: 616353 - RNA, 21 nt, Artificial Sequence
  Synthetic
ucuuagaauuugggauguuug

SEQ ID NO: 616354 - RNA, 22 nt, Artificial Sequence
  Synthetic
uucuuagaauuugggauguuug

SEQ ID NO: 616355 - RNA, 23 nt, Artificial Sequence
  Synthetic
uuucuuagaauuugggauguuug

SEQ ID NO: 616356 - RNA, 24 nt, Artificial Sequence
  Synthetic
cuuucuuagaauuugggauguuug

SEQ ID NO: 616357 - RNA, 18 nt, Artificial Sequence
  Synthetic
augcuucuucucuguuug

SEQ ID NO: 616358 - RNA, 19 nt, Artificial Sequence
  Synthetic
uaugcuucuucucuguuug

SEQ ID NO: 616359 - RNA, 20 nt, Artificial Sequence
  Synthetic
cuaugcuucuucucuguuug

SEQ ID NO: 616360 - RNA, 21 nt, Artificial Sequence
  Synthetic
gcuaugcuucuucucuguuug

SEQ ID NO: 616361 - RNA, 22 nt, Artificial Sequence
  Synthetic
ugcuaugcuucuucucuguuug

SEQ ID NO: 616362 - RNA, 23 nt, Artificial Sequence
  Synthetic
augcuaugcuucuucucuguuug

SEQ ID NO: 616363 - RNA, 24 nt, Artificial Sequence
  Synthetic
uaugcuaugcuucuucucuguuug

SEQ ID NO: 616364 - RNA, 18 nt, Artificial Sequence
  Synthetic
caggaaucagucuguuug

SEQ ID NO: 616365 - RNA, 19 nt, Artificial Sequence
  Synthetic
gcaggaaucagucuguuug

SEQ ID NO: 616366 - RNA, 20 nt, Artificial Sequence
  Synthetic
ugcaggaaucagucuguuug

SEQ ID NO: 616367 - RNA, 21 nt, Artificial Sequence
  Synthetic
gugcaggaaucagucuguuug

SEQ ID NO: 616368 - RNA, 22 nt, Artificial Sequence
  Synthetic
ugugcaggaaucagucuguuug

SEQ ID NO: 616369 - RNA, 23 nt, Artificial Sequence
  Synthetic
augugcaggaaucagucuguuug

SEQ ID NO: 616370 - RNA, 24 nt, Artificial Sequence
  Synthetic
uaugugcaggaaucagucuguuug

SEQ ID NO: 616371 - RNA, 18 nt, Artificial Sequence
  Synthetic
auuuuuuucaaguguuug

SEQ ID NO: 616372 - RNA, 19 nt, Artificial Sequence
  Synthetic
uauuuuuuucaaguguuug

SEQ ID NO: 616373 - RNA, 20 nt, Artificial Sequence
  Synthetic
uuauuuuuuucaaguguuug

SEQ ID NO: 616374 - RNA, 21 nt, Artificial Sequence
  Synthetic
cuuauuuuuuucaaguguuug

SEQ ID NO: 616375 - RNA, 22 nt, Artificial Sequence
  Synthetic
ucuuauuuuuuucaaguguuug

SEQ ID NO: 616376 - RNA, 23 nt, Artificial Sequence
  Synthetic
cucuuauuuuuuucaaguguuug

SEQ ID NO: 616377 - RNA, 24 nt, Artificial Sequence
  Synthetic
acucuuauuuuuuucaaguguuug

SEQ ID NO: 616378 - RNA, 18 nt, Artificial Sequence
  Synthetic
acaagcagguaguguuug

SEQ ID NO: 616379 - RNA, 19 nt, Artificial Sequence
  Synthetic
aacaagcagguaguguuug

SEQ ID NO: 616380 - RNA, 20 nt, Artificial Sequence
  Synthetic
uaacaagcagguaguguuug

SEQ ID NO: 616381 - RNA, 21 nt, Artificial Sequence
  Synthetic
uuaacaagcagguaguguuug

SEQ ID NO: 616382 - RNA, 22 nt, Artificial Sequence
  Synthetic
uuuaacaagcagguaguguuug

SEQ ID NO: 616383 - RNA, 23 nt, Artificial Sequence
  Synthetic
auuuaacaagcagguaguguuug

SEQ ID NO: 616384 - RNA, 24 nt, Artificial Sequence
  Synthetic
uauuuaacaagcagguaguguuug

SEQ ID NO: 616385 - RNA, 18 nt, Artificial Sequence
  Synthetic
auaauuucagcguguuug

SEQ ID NO: 616386 - RNA, 19 nt, Artificial Sequence
  Synthetic
cauaauuucagcguguuug

SEQ ID NO: 616387 - RNA, 20 nt, Artificial Sequence
  Synthetic
gcauaauuucagcguguuug

SEQ ID NO: 616388 - RNA, 21 nt, Artificial Sequence
  Synthetic
agcauaauuucagcguguuug

SEQ ID NO: 616389 - RNA, 22 nt, Artificial Sequence
  Synthetic
uagcauaauuucagcguguuug

SEQ ID NO: 616390 - RNA, 23 nt, Artificial Sequence
  Synthetic
uuagcauaauuucagcguguuug

SEQ ID NO: 616391 - RNA, 24 nt, Artificial Sequence
  Synthetic
cuuagcauaauuucagcguguuug

SEQ ID NO: 616392 - RNA, 18 nt, Artificial Sequence
  Synthetic
agucaaaaaagguguuug

SEQ ID NO: 616393 - RNA, 19 nt, Artificial Sequence
  Synthetic
aagucaaaaaagguguuug

SEQ ID NO: 616394 - RNA, 20 nt, Artificial Sequence
  Synthetic
gaagucaaaaaagguguuug

SEQ ID NO: 616395 - RNA, 21 nt, Artificial Sequence
  Synthetic
ugaagucaaaaaagguguuug

SEQ ID NO: 616396 - RNA, 22 nt, Artificial Sequence
  Synthetic
uugaagucaaaaaagguguuug

SEQ ID NO: 616397 - RNA, 23 nt, Artificial Sequence
  Synthetic
uuugaagucaaaaaagguguuug

SEQ ID NO: 616398 - RNA, 24 nt, Artificial Sequence
  Synthetic
cuuugaagucaaaaaagguguuug

SEQ ID NO: 616399 - RNA, 18 nt, Artificial Sequence
  Synthetic
gugagaguaauguguuug

SEQ ID NO: 616400 - RNA, 19 nt, Artificial Sequence
  Synthetic
agugagaguaauguguuug

SEQ ID NO: 616401 - RNA, 20 nt, Artificial Sequence
  Synthetic
uagugagaguaauguguuug

SEQ ID NO: 616402 - RNA, 21 nt, Artificial Sequence
  Synthetic
auagugagaguaauguguuug

SEQ ID NO: 616403 - RNA, 22 nt, Artificial Sequence
  Synthetic
aauagugagaguaauguguuug

SEQ ID NO: 616404 - RNA, 23 nt, Artificial Sequence
  Synthetic
gaauagugagaguaauguguuug

SEQ ID NO: 616405 - RNA, 24 nt, Artificial Sequence
  Synthetic
ugaauagugagaguaauguguuug

SEQ ID NO: 616406 - RNA, 18 nt, Artificial Sequence
  Synthetic
cuuuucaauucuuguuug

SEQ ID NO: 616407 - RNA, 19 nt, Artificial Sequence
  Synthetic
ccuuuucaauucuuguuug

SEQ ID NO: 616408 - RNA, 20 nt, Artificial Sequence
  Synthetic
accuuuucaauucuuguuug

SEQ ID NO: 616409 - RNA, 21 nt, Artificial Sequence
  Synthetic
gaccuuuucaauucuuguuug

SEQ ID NO: 616410 - RNA, 22 nt, Artificial Sequence
  Synthetic
ugaccuuuucaauucuuguuug

SEQ ID NO: 616411 - RNA, 23 nt, Artificial Sequence
  Synthetic
cugaccuuuucaauucuuguuug

SEQ ID NO: 616412 - RNA, 24 nt, Artificial Sequence
  Synthetic
ccugaccuuuucaauucuuguuug

SEQ ID NO: 616413 - RNA, 18 nt, Artificial Sequence
  Synthetic
gagcgaugauguuguuug

SEQ ID NO: 616414 - RNA, 19 nt, Artificial Sequence
  Synthetic
ggagcgaugauguuguuug

SEQ ID NO: 616415 - RNA, 20 nt, Artificial Sequence
  Synthetic
aggagcgaugauguuguuug

SEQ ID NO: 616416 - RNA, 21 nt, Artificial Sequence
  Synthetic
caggagcgaugauguuguuug

SEQ ID NO: 616417 - RNA, 22 nt, Artificial Sequence
  Synthetic
ucaggagcgaugauguuguuug

SEQ ID NO: 616418 - RNA, 23 nt, Artificial Sequence
  Synthetic
cucaggagcgaugauguuguuug

SEQ ID NO: 616419 - RNA, 24 nt, Artificial Sequence
  Synthetic
acucaggagcgaugauguuguuug

SEQ ID NO: 616420 - RNA, 18 nt, Artificial Sequence
  Synthetic
auguuuucguuuuguuug

SEQ ID NO: 616421 - RNA, 19 nt, Artificial Sequence
  Synthetic
aauguuuucguuuuguuug

SEQ ID NO: 616422 - RNA, 20 nt, Artificial Sequence
  Synthetic
uaauguuuucguuuuguuug

SEQ ID NO: 616423 - RNA, 21 nt, Artificial Sequence
  Synthetic
uuaauguuuucguuuuguuug

SEQ ID NO: 616424 - RNA, 22 nt, Artificial Sequence
  Synthetic
guuaauguuuucguuuuguuug

SEQ ID NO: 616425 - RNA, 23 nt, Artificial Sequence
  Synthetic
aguuaauguuuucguuuuguuug

SEQ ID NO: 616426 - RNA, 24 nt, Artificial Sequence
  Synthetic
caguuaauguuuucguuuuguuug

SEQ ID NO: 616427 - RNA, 18 nt, Artificial Sequence
  Synthetic
ccgugcgccaaaauuuug

SEQ ID NO: 616428 - RNA, 19 nt, Artificial Sequence
  Synthetic
uccgugcgccaaaauuuug

SEQ ID NO: 616429 - RNA, 20 nt, Artificial Sequence
  Synthetic
auccgugcgccaaaauuuug

SEQ ID NO: 616430 - RNA, 21 nt, Artificial Sequence
  Synthetic
aauccgugcgccaaaauuuug

SEQ ID NO: 616431 - RNA, 22 nt, Artificial Sequence
  Synthetic
uaauccgugcgccaaaauuuug

SEQ ID NO: 616432 - RNA, 23 nt, Artificial Sequence
  Synthetic
uuaauccgugcgccaaaauuuug

SEQ ID NO: 616433 - RNA, 24 nt, Artificial Sequence
  Synthetic
auuaauccgugcgccaaaauuuug

SEQ ID NO: 616434 - RNA, 18 nt, Artificial Sequence
  Synthetic
cuaccuugacaaauuuug

SEQ ID NO: 616435 - RNA, 19 nt, Artificial Sequence
  Synthetic
acuaccuugacaaauuuug

SEQ ID NO: 616436 - RNA, 20 nt, Artificial Sequence
  Synthetic
aacuaccuugacaaauuuug

SEQ ID NO: 616437 - RNA, 21 nt, Artificial Sequence
  Synthetic
aaacuaccuugacaaauuuug

SEQ ID NO: 616438 - RNA, 22 nt, Artificial Sequence
  Synthetic
caaacuaccuugacaaauuuug

SEQ ID NO: 616439 - RNA, 23 nt, Artificial Sequence
  Synthetic
acaaacuaccuugacaaauuuug

SEQ ID NO: 616440 - RNA, 24 nt, Artificial Sequence
  Synthetic
gacaaacuaccuugacaaauuuug

SEQ ID NO: 616441 - RNA, 18 nt, Artificial Sequence
  Synthetic
uuccccuugcaaauuuug

SEQ ID NO: 616442 - RNA, 19 nt, Artificial Sequence
  Synthetic
uuuccccuugcaaauuuug

SEQ ID NO: 616443 - RNA, 20 nt, Artificial Sequence
  Synthetic
uuuuccccuugcaaauuuug

SEQ ID NO: 616444 - RNA, 21 nt, Artificial Sequence
  Synthetic
uuuuuccccuugcaaauuuug

SEQ ID NO: 616445 - RNA, 22 nt, Artificial Sequence
  Synthetic
auuuuuccccuugcaaauuuug

SEQ ID NO: 616446 - RNA, 23 nt, Artificial Sequence
  Synthetic
cauuuuuccccuugcaaauuuug

SEQ ID NO: 616447 - RNA, 24 nt, Artificial Sequence
  Synthetic
acauuuuuccccuugcaaauuuug

SEQ ID NO: 616448 - RNA, 18 nt, Artificial Sequence
  Synthetic
agcagucuugaaauuuug

SEQ ID NO: 616449 - RNA, 19 nt, Artificial Sequence
  Synthetic
aagcagucuugaaauuuug

SEQ ID NO: 616450 - RNA, 20 nt, Artificial Sequence
  Synthetic
aaagcagucuugaaauuuug

SEQ ID NO: 616451 - RNA, 21 nt, Artificial Sequence
  Synthetic
gaaagcagucuugaaauuuug

SEQ ID NO: 616452 - RNA, 22 nt, Artificial Sequence
  Synthetic
agaaagcagucuugaaauuuug

SEQ ID NO: 616453 - RNA, 23 nt, Artificial Sequence
  Synthetic
uagaaagcagucuugaaauuuug

SEQ ID NO: 616454 - RNA, 24 nt, Artificial Sequence
  Synthetic
uuagaaagcagucuugaaauuuug

SEQ ID NO: 616455 - RNA, 18 nt, Artificial Sequence
  Synthetic
agaagaacaagaauuuug

SEQ ID NO: 616456 - RNA, 19 nt, Artificial Sequence
  Synthetic
gagaagaacaagaauuuug

SEQ ID NO: 616457 - RNA, 20 nt, Artificial Sequence
  Synthetic
ugagaagaacaagaauuuug

SEQ ID NO: 616458 - RNA, 21 nt, Artificial Sequence
  Synthetic
uugagaagaacaagaauuuug

SEQ ID NO: 616459 - RNA, 22 nt, Artificial Sequence
  Synthetic
uuugagaagaacaagaauuuug

SEQ ID NO: 616460 - RNA, 23 nt, Artificial Sequence
  Synthetic
cuuugagaagaacaagaauuuug

SEQ ID NO: 616461 - RNA, 24 nt, Artificial Sequence
  Synthetic
ucuuugagaagaacaagaauuuug

SEQ ID NO: 616462 - RNA, 18 nt, Artificial Sequence
  Synthetic
uucaacauacacauuuug

SEQ ID NO: 616463 - RNA, 19 nt, Artificial Sequence
  Synthetic
uuucaacauacacauuuug

SEQ ID NO: 616464 - RNA, 20 nt, Artificial Sequence
  Synthetic
guuucaacauacacauuuug

SEQ ID NO: 616465 - RNA, 21 nt, Artificial Sequence
  Synthetic
gguuucaacauacacauuuug

SEQ ID NO: 616466 - RNA, 22 nt, Artificial Sequence
  Synthetic
agguuucaacauacacauuuug

SEQ ID NO: 616467 - RNA, 23 nt, Artificial Sequence
  Synthetic
uagguuucaacauacacauuuug

SEQ ID NO: 616468 - RNA, 24 nt, Artificial Sequence
  Synthetic
uuagguuucaacauacacauuuug

SEQ ID NO: 616469 - RNA, 18 nt, Artificial Sequence
  Synthetic
uccaaucacgacauuuug

SEQ ID NO: 616470 - RNA, 19 nt, Artificial Sequence
  Synthetic
guccaaucacgacauuuug

SEQ ID NO: 616471 - RNA, 20 nt, Artificial Sequence
  Synthetic
gguccaaucacgacauuuug

SEQ ID NO: 616472 - RNA, 21 nt, Artificial Sequence
  Synthetic
ggguccaaucacgacauuuug

SEQ ID NO: 616473 - RNA, 22 nt, Artificial Sequence
  Synthetic
uggguccaaucacgacauuuug

SEQ ID NO: 616474 - RNA, 23 nt, Artificial Sequence
  Synthetic
guggguccaaucacgacauuuug

SEQ ID NO: 616475 - RNA, 24 nt, Artificial Sequence
  Synthetic
uguggguccaaucacgacauuuug

SEQ ID NO: 616476 - RNA, 18 nt, Artificial Sequence
  Synthetic
aaauaaauguacauuuug

SEQ ID NO: 616477 - RNA, 19 nt, Artificial Sequence
  Synthetic
caaauaaauguacauuuug

SEQ ID NO: 616478 - RNA, 20 nt, Artificial Sequence
  Synthetic
acaaauaaauguacauuuug

SEQ ID NO: 616479 - RNA, 21 nt, Artificial Sequence
  Synthetic
uacaaauaaauguacauuuug

SEQ ID NO: 616480 - RNA, 22 nt, Artificial Sequence
  Synthetic
uuacaaauaaauguacauuuug

SEQ ID NO: 616481 - RNA, 23 nt, Artificial Sequence
  Synthetic
uuuacaaauaaauguacauuuug

SEQ ID NO: 616482 - RNA, 24 nt, Artificial Sequence
  Synthetic
auuuacaaauaaauguacauuuug

SEQ ID NO: 616483 - RNA, 18 nt, Artificial Sequence
  Synthetic
aacccagcugccauuuug

SEQ ID NO: 616484 - RNA, 19 nt, Artificial Sequence
  Synthetic
caacccagcugccauuuug

SEQ ID NO: 616485 - RNA, 20 nt, Artificial Sequence
  Synthetic
ucaacccagcugccauuuug

SEQ ID NO: 616486 - RNA, 21 nt, Artificial Sequence
  Synthetic
gucaacccagcugccauuuug

SEQ ID NO: 616487 - RNA, 22 nt, Artificial Sequence
  Synthetic
ugucaacccagcugccauuuug

SEQ ID NO: 616488 - RNA, 23 nt, Artificial Sequence
  Synthetic
cugucaacccagcugccauuuug

SEQ ID NO: 616489 - RNA, 24 nt, Artificial Sequence
  Synthetic
ucugucaacccagcugccauuuug

SEQ ID NO: 616490 - RNA, 18 nt, Artificial Sequence
  Synthetic
aacucaacacgcauuuug

SEQ ID NO: 616491 - RNA, 19 nt, Artificial Sequence
  Synthetic
uaacucaacacgcauuuug

SEQ ID NO: 616492 - RNA, 20 nt, Artificial Sequence
  Synthetic
cuaacucaacacgcauuuug

SEQ ID NO: 616493 - RNA, 21 nt, Artificial Sequence
  Synthetic
acuaacucaacacgcauuuug

SEQ ID NO: 616494 - RNA, 22 nt, Artificial Sequence
  Synthetic
aacuaacucaacacgcauuuug

SEQ ID NO: 616495 - RNA, 23 nt, Artificial Sequence
  Synthetic
aaacuaacucaacacgcauuuug

SEQ ID NO: 616496 - RNA, 24 nt, Artificial Sequence
  Synthetic
caaacuaacucaacacgcauuuug

SEQ ID NO: 616497 - RNA, 18 nt, Artificial Sequence
  Synthetic
caggugaacugcauuuug

SEQ ID NO: 616498 - RNA, 19 nt, Artificial Sequence
  Synthetic
acaggugaacugcauuuug

SEQ ID NO: 616499 - RNA, 20 nt, Artificial Sequence
  Synthetic
uacaggugaacugcauuuug

SEQ ID NO: 616500 - RNA, 21 nt, Artificial Sequence
  Synthetic
auacaggugaacugcauuuug

SEQ ID NO: 616501 - RNA, 22 nt, Artificial Sequence
  Synthetic
uauacaggugaacugcauuuug

SEQ ID NO: 616502 - RNA, 23 nt, Artificial Sequence
  Synthetic
cuauacaggugaacugcauuuug

SEQ ID NO: 616503 - RNA, 24 nt, Artificial Sequence
  Synthetic
gcuauacaggugaacugcauuuug

SEQ ID NO: 616504 - RNA, 18 nt, Artificial Sequence
  Synthetic
caaguuuuaaucauuuug

SEQ ID NO: 616505 - RNA, 19 nt, Artificial Sequence
  Synthetic
ccaaguuuuaaucauuuug

SEQ ID NO: 616506 - RNA, 20 nt, Artificial Sequence
  Synthetic
uccaaguuuuaaucauuuug

SEQ ID NO: 616507 - RNA, 21 nt, Artificial Sequence
  Synthetic
auccaaguuuuaaucauuuug

SEQ ID NO: 616508 - RNA, 22 nt, Artificial Sequence
  Synthetic
gauccaaguuuuaaucauuuug

SEQ ID NO: 616509 - RNA, 23 nt, Artificial Sequence
  Synthetic
ugauccaaguuuuaaucauuuug

SEQ ID NO: 616510 - RNA, 24 nt, Artificial Sequence
  Synthetic
cugauccaaguuuuaaucauuuug

SEQ ID NO: 616511 - RNA, 18 nt, Artificial Sequence
  Synthetic
gaaaagaggaucauuuug

SEQ ID NO: 616512 - RNA, 19 nt, Artificial Sequence
  Synthetic
ggaaaagaggaucauuuug

SEQ ID NO: 616513 - RNA, 20 nt, Artificial Sequence
  Synthetic
uggaaaagaggaucauuuug

SEQ ID NO: 616514 - RNA, 21 nt, Artificial Sequence
  Synthetic
cuggaaaagaggaucauuuug

SEQ ID NO: 616515 - RNA, 22 nt, Artificial Sequence
  Synthetic
ccuggaaaagaggaucauuuug

SEQ ID NO: 616516 - RNA, 23 nt, Artificial Sequence
  Synthetic
uccuggaaaagaggaucauuuug

SEQ ID NO: 616517 - RNA, 24 nt, Artificial Sequence
  Synthetic
auccuggaaaagaggaucauuuug

SEQ ID NO: 616518 - RNA, 18 nt, Artificial Sequence
  Synthetic
uuucccagugagauuuug

SEQ ID NO: 616519 - RNA, 19 nt, Artificial Sequence
  Synthetic
uuuucccagugagauuuug

SEQ ID NO: 616520 - RNA, 20 nt, Artificial Sequence
  Synthetic
cuuuucccagugagauuuug

SEQ ID NO: 616521 - RNA, 21 nt, Artificial Sequence
  Synthetic
ccuuuucccagugagauuuug

SEQ ID NO: 616522 - RNA, 22 nt, Artificial Sequence
  Synthetic
accuuuucccagugagauuuug

SEQ ID NO: 616523 - RNA, 23 nt, Artificial Sequence
  Synthetic
uaccuuuucccagugagauuuug

SEQ ID NO: 616524 - RNA, 24 nt, Artificial Sequence
  Synthetic
guaccuuuucccagugagauuuug

SEQ ID NO: 616525 - RNA, 18 nt, Artificial Sequence
  Synthetic
ucacauggcaugauuuug

SEQ ID NO: 616526 - RNA, 19 nt, Artificial Sequence
  Synthetic
aucacauggcaugauuuug

SEQ ID NO: 616527 - RNA, 20 nt, Artificial Sequence
  Synthetic
aaucacauggcaugauuuug

SEQ ID NO: 616528 - RNA, 21 nt, Artificial Sequence
  Synthetic
aaaucacauggcaugauuuug

SEQ ID NO: 616529 - RNA, 22 nt, Artificial Sequence
  Synthetic
caaaucacauggcaugauuuug

SEQ ID NO: 616530 - RNA, 23 nt, Artificial Sequence
  Synthetic
ccaaaucacauggcaugauuuug

SEQ ID NO: 616531 - RNA, 24 nt, Artificial Sequence
  Synthetic
gccaaaucacauggcaugauuuug

SEQ ID NO: 616532 - RNA, 18 nt, Artificial Sequence
  Synthetic
caccaggaacugauuuug

SEQ ID NO: 616533 - RNA, 19 nt, Artificial Sequence
  Synthetic
gcaccaggaacugauuuug

SEQ ID NO: 616534 - RNA, 20 nt, Artificial Sequence
  Synthetic
ggcaccaggaacugauuuug

SEQ ID NO: 616535 - RNA, 21 nt, Artificial Sequence
  Synthetic
uggcaccaggaacugauuuug

SEQ ID NO: 616536 - RNA, 22 nt, Artificial Sequence
  Synthetic
uuggcaccaggaacugauuuug

SEQ ID NO: 616537 - RNA, 23 nt, Artificial Sequence
  Synthetic
uuuggcaccaggaacugauuuug

SEQ ID NO: 616538 - RNA, 24 nt, Artificial Sequence
  Synthetic
uuuuggcaccaggaacugauuuug

SEQ ID NO: 616539 - RNA, 18 nt, Artificial Sequence
  Synthetic
uuucucucacugauuuug

SEQ ID NO: 616540 - RNA, 19 nt, Artificial Sequence
  Synthetic
cuuucucucacugauuuug

SEQ ID NO: 616541 - RNA, 20 nt, Artificial Sequence
  Synthetic
acuuucucucacugauuuug

SEQ ID NO: 616542 - RNA, 21 nt, Artificial Sequence
  Synthetic
cacuuucucucacugauuuug

SEQ ID NO: 616543 - RNA, 22 nt, Artificial Sequence
  Synthetic
ccacuuucucucacugauuuug

SEQ ID NO: 616544 - RNA, 23 nt, Artificial Sequence
  Synthetic
cccacuuucucucacugauuuug

SEQ ID NO: 616545 - RNA, 24 nt, Artificial Sequence
  Synthetic
ccccacuuucucucacugauuuug

SEQ ID NO: 616546 - RNA, 18 nt, Artificial Sequence
  Synthetic
guugucucauauauuuug

SEQ ID NO: 616547 - RNA, 19 nt, Artificial Sequence
  Synthetic
uguugucucauauauuuug

SEQ ID NO: 616548 - RNA, 20 nt, Artificial Sequence
  Synthetic
uuguugucucauauauuuug

SEQ ID NO: 616549 - RNA, 21 nt, Artificial Sequence
  Synthetic
uuuguugucucauauauuuug

SEQ ID NO: 616550 - RNA, 22 nt, Artificial Sequence
  Synthetic
uuuuguugucucauauauuuug

SEQ ID NO: 616551 - RNA, 23 nt, Artificial Sequence
  Synthetic
auuuuguugucucauauauuuug

SEQ ID NO: 616552 - RNA, 24 nt, Artificial Sequence
  Synthetic
uauuuuguugucucauauauuuug

SEQ ID NO: 616553 - RNA, 18 nt, Artificial Sequence
  Synthetic
aucuaucuaucuauuuug

SEQ ID NO: 616554 - RNA, 19 nt, Artificial Sequence
  Synthetic
uaucuaucuaucuauuuug

SEQ ID NO: 616555 - RNA, 20 nt, Artificial Sequence
  Synthetic
cuaucuaucuaucuauuuug

SEQ ID NO: 616556 - RNA, 21 nt, Artificial Sequence
  Synthetic
ucuaucuaucuaucuauuuug

SEQ ID NO: 616557 - RNA, 22 nt, Artificial Sequence
  Synthetic
aucuaucuaucuaucuauuuug

SEQ ID NO: 616558 - RNA, 23 nt, Artificial Sequence
  Synthetic
uaucuaucuaucuaucuauuuug

SEQ ID NO: 616559 - RNA, 24 nt, Artificial Sequence
  Synthetic
cuaucuaucuaucuaucuauuuug

SEQ ID NO: 616560 - RNA, 18 nt, Artificial Sequence
  Synthetic
acugaaaucaguauuuug

SEQ ID NO: 616561 - RNA, 19 nt, Artificial Sequence
  Synthetic
aacugaaaucaguauuuug

SEQ ID NO: 616562 - RNA, 20 nt, Artificial Sequence
  Synthetic
gaacugaaaucaguauuuug

SEQ ID NO: 616563 - RNA, 21 nt, Artificial Sequence
  Synthetic
agaacugaaaucaguauuuug

SEQ ID NO: 616564 - RNA, 22 nt, Artificial Sequence
  Synthetic
aagaacugaaaucaguauuuug

SEQ ID NO: 616565 - RNA, 23 nt, Artificial Sequence
  Synthetic
aaagaacugaaaucaguauuuug

SEQ ID NO: 616566 - RNA, 24 nt, Artificial Sequence
  Synthetic
aaaagaacugaaaucaguauuuug

SEQ ID NO: 616567 - RNA, 18 nt, Artificial Sequence
  Synthetic
gcuaaaaaauguauuuug

SEQ ID NO: 616568 - RNA, 19 nt, Artificial Sequence
  Synthetic
agcuaaaaaauguauuuug

SEQ ID NO: 616569 - RNA, 20 nt, Artificial Sequence
  Synthetic
aagcuaaaaaauguauuuug

SEQ ID NO: 616570 - RNA, 21 nt, Artificial Sequence
  Synthetic
gaagcuaaaaaauguauuuug

SEQ ID NO: 616571 - RNA, 22 nt, Artificial Sequence
  Synthetic
ugaagcuaaaaaauguauuuug

SEQ ID NO: 616572 - RNA, 23 nt, Artificial Sequence
  Synthetic
augaagcuaaaaaauguauuuug

SEQ ID NO: 616573 - RNA, 24 nt, Artificial Sequence
  Synthetic
uaugaagcuaaaaaauguauuuug

SEQ ID NO: 616574 - RNA, 18 nt, Artificial Sequence
  Synthetic
aauauguuaauuauuuug

SEQ ID NO: 616575 - RNA, 19 nt, Artificial Sequence
  Synthetic
aaauauguuaauuauuuug

SEQ ID NO: 616576 - RNA, 20 nt, Artificial Sequence
  Synthetic
aaaauauguuaauuauuuug

SEQ ID NO: 616577 - RNA, 21 nt, Artificial Sequence
  Synthetic
uaaaauauguuaauuauuuug

SEQ ID NO: 616578 - RNA, 22 nt, Artificial Sequence
  Synthetic
uuaaaauauguuaauuauuuug

SEQ ID NO: 616579 - RNA, 23 nt, Artificial Sequence
  Synthetic
auuaaaauauguuaauuauuuug

SEQ ID NO: 616580 - RNA, 24 nt, Artificial Sequence
  Synthetic
uauuaaaauauguuaauuauuuug

SEQ ID NO: 616581 - RNA, 18 nt, Artificial Sequence
  Synthetic
gaguagcuccuuauuuug

SEQ ID NO: 616582 - RNA, 19 nt, Artificial Sequence
  Synthetic
cgaguagcuccuuauuuug

SEQ ID NO: 616583 - RNA, 20 nt, Artificial Sequence
  Synthetic
acgaguagcuccuuauuuug

SEQ ID NO: 616584 - RNA, 21 nt, Artificial Sequence
  Synthetic
aacgaguagcuccuuauuuug

SEQ ID NO: 616585 - RNA, 22 nt, Artificial Sequence
  Synthetic
caacgaguagcuccuuauuuug

SEQ ID NO: 616586 - RNA, 23 nt, Artificial Sequence
  Synthetic
gcaacgaguagcuccuuauuuug

SEQ ID NO: 616587 - RNA, 24 nt, Artificial Sequence
  Synthetic
ugcaacgaguagcuccuuauuuug

SEQ ID NO: 616588 - RNA, 18 nt, Artificial Sequence
  Synthetic
ucuucucuacaacuuuug

SEQ ID NO: 616589 - RNA, 19 nt, Artificial Sequence
  Synthetic
aucuucucuacaacuuuug

SEQ ID NO: 616590 - RNA, 20 nt, Artificial Sequence
  Synthetic
uaucuucucuacaacuuuug

SEQ ID NO: 616591 - RNA, 21 nt, Artificial Sequence
  Synthetic
cuaucuucucuacaacuuuug

SEQ ID NO: 616592 - RNA, 22 nt, Artificial Sequence
  Synthetic
ucuaucuucucuacaacuuuug

SEQ ID NO: 616593 - RNA, 23 nt, Artificial Sequence
  Synthetic
uucuaucuucucuacaacuuuug

SEQ ID NO: 616594 - RNA, 24 nt, Artificial Sequence
  Synthetic
cuucuaucuucucuacaacuuuug

SEQ ID NO: 616595 - RNA, 18 nt, Artificial Sequence
  Synthetic
cucaaaauugaacuuuug

SEQ ID NO: 616596 - RNA, 19 nt, Artificial Sequence
  Synthetic
acucaaaauugaacuuuug

SEQ ID NO: 616597 - RNA, 20 nt, Artificial Sequence
  Synthetic
uacucaaaauugaacuuuug

SEQ ID NO: 616598 - RNA, 21 nt, Artificial Sequence
  Synthetic
guacucaaaauugaacuuuug

SEQ ID NO: 616599 - RNA, 22 nt, Artificial Sequence
  Synthetic
aguacucaaaauugaacuuuug

SEQ ID NO: 616600 - RNA, 23 nt, Artificial Sequence
  Synthetic
gaguacucaaaauugaacuuuug

SEQ ID NO: 616601 - RNA, 24 nt, Artificial Sequence
  Synthetic
ggaguacucaaaauugaacuuuug

SEQ ID NO: 616602 - RNA, 18 nt, Artificial Sequence
  Synthetic
uacuguuaaucacuuuug

SEQ ID NO: 616603 - RNA, 19 nt, Artificial Sequence
  Synthetic
uuacuguuaaucacuuuug

SEQ ID NO: 616604 - RNA, 20 nt, Artificial Sequence
  Synthetic
cuuacuguuaaucacuuuug

SEQ ID NO: 616605 - RNA, 21 nt, Artificial Sequence
  Synthetic
acuuacuguuaaucacuuuug

SEQ ID NO: 616606 - RNA, 22 nt, Artificial Sequence
  Synthetic
aacuuacuguuaaucacuuuug

SEQ ID NO: 616607 - RNA, 23 nt, Artificial Sequence
  Synthetic
gaacuuacuguuaaucacuuuug

SEQ ID NO: 616608 - RNA, 24 nt, Artificial Sequence
  Synthetic
ugaacuuacuguuaaucacuuuug

SEQ ID NO: 616609 - RNA, 18 nt, Artificial Sequence
  Synthetic
uagucauauauacuuuug

SEQ ID NO: 616610 - RNA, 19 nt, Artificial Sequence
  Synthetic
auagucauauauacuuuug

SEQ ID NO: 616611 - RNA, 20 nt, Artificial Sequence
  Synthetic
uauagucauauauacuuuug

SEQ ID NO: 616612 - RNA, 21 nt, Artificial Sequence
  Synthetic
auauagucauauauacuuuug

SEQ ID NO: 616613 - RNA, 22 nt, Artificial Sequence
  Synthetic
uauauagucauauauacuuuug

SEQ ID NO: 616614 - RNA, 23 nt, Artificial Sequence
  Synthetic
uuauauagucauauauacuuuug

SEQ ID NO: 616615 - RNA, 24 nt, Artificial Sequence
  Synthetic
uuuauauagucauauauacuuuug

SEQ ID NO: 616616 - RNA, 18 nt, Artificial Sequence
  Synthetic
auuaaugugaaccuuuug

SEQ ID NO: 616617 - RNA, 19 nt, Artificial Sequence
  Synthetic
aauuaaugugaaccuuuug

SEQ ID NO: 616618 - RNA, 20 nt, Artificial Sequence
  Synthetic
aaauuaaugugaaccuuuug

SEQ ID NO: 616619 - RNA, 21 nt, Artificial Sequence
  Synthetic
aaaauuaaugugaaccuuuug

SEQ ID NO: 616620 - RNA, 22 nt, Artificial Sequence
  Synthetic
uaaaauuaaugugaaccuuuug

SEQ ID NO: 616621 - RNA, 23 nt, Artificial Sequence
  Synthetic
cuaaaauuaaugugaaccuuuug

SEQ ID NO: 616622 - RNA, 24 nt, Artificial Sequence
  Synthetic
gcuaaaauuaaugugaaccuuuug

SEQ ID NO: 616623 - RNA, 18 nt, Artificial Sequence
  Synthetic
uaauaccaagaccuuuug

SEQ ID NO: 616624 - RNA, 19 nt, Artificial Sequence
  Synthetic
uuaauaccaagaccuuuug

SEQ ID NO: 616625 - RNA, 20 nt, Artificial Sequence
  Synthetic
uuuaauaccaagaccuuuug

SEQ ID NO: 616626 - RNA, 21 nt, Artificial Sequence
  Synthetic
uuuuaauaccaagaccuuuug

SEQ ID NO: 616627 - RNA, 22 nt, Artificial Sequence
  Synthetic
cuuuuaauaccaagaccuuuug

SEQ ID NO: 616628 - RNA, 23 nt, Artificial Sequence
  Synthetic
acuuuuaauaccaagaccuuuug

SEQ ID NO: 616629 - RNA, 24 nt, Artificial Sequence
  Synthetic
uacuuuuaauaccaagaccuuuug

SEQ ID NO: 616630 - RNA, 18 nt, Artificial Sequence
  Synthetic
ccugacccagcccuuuug

SEQ ID NO: 616631 - RNA, 19 nt, Artificial Sequence
  Synthetic
cccugacccagcccuuuug

SEQ ID NO: 616632 - RNA, 20 nt, Artificial Sequence
  Synthetic
ccccugacccagcccuuuug

SEQ ID NO: 616633 - RNA, 21 nt, Artificial Sequence
  Synthetic
uccccugacccagcccuuuug

SEQ ID NO: 616634 - RNA, 22 nt, Artificial Sequence
  Synthetic
guccccugacccagcccuuuug

SEQ ID NO: 616635 - RNA, 23 nt, Artificial Sequence
  Synthetic
gguccccugacccagcccuuuug

SEQ ID NO: 616636 - RNA, 24 nt, Artificial Sequence
  Synthetic
ugguccccugacccagcccuuuug

SEQ ID NO: 616637 - RNA, 18 nt, Artificial Sequence
  Synthetic
aucagccuuuuccuuuug

SEQ ID NO: 616638 - RNA, 19 nt, Artificial Sequence
  Synthetic
caucagccuuuuccuuuug

SEQ ID NO: 616639 - RNA, 20 nt, Artificial Sequence
  Synthetic
acaucagccuuuuccuuuug

SEQ ID NO: 616640 - RNA, 21 nt, Artificial Sequence
  Synthetic
cacaucagccuuuuccuuuug

SEQ ID NO: 616641 - RNA, 22 nt, Artificial Sequence
  Synthetic
acacaucagccuuuuccuuuug

SEQ ID NO: 616642 - RNA, 23 nt, Artificial Sequence
  Synthetic
uacacaucagccuuuuccuuuug

SEQ ID NO: 616643 - RNA, 24 nt, Artificial Sequence
  Synthetic
auacacaucagccuuuuccuuuug

SEQ ID NO: 616644 - RNA, 18 nt, Artificial Sequence
  Synthetic
aaaauugugcagcuuuug

SEQ ID NO: 616645 - RNA, 19 nt, Artificial Sequence
  Synthetic
uaaaauugugcagcuuuug

SEQ ID NO: 616646 - RNA, 20 nt, Artificial Sequence
  Synthetic
auaaaauugugcagcuuuug

SEQ ID NO: 616647 - RNA, 21 nt, Artificial Sequence
  Synthetic
uauaaaauugugcagcuuuug

SEQ ID NO: 616648 - RNA, 22 nt, Artificial Sequence
  Synthetic
auauaaaauugugcagcuuuug

SEQ ID NO: 616649 - RNA, 23 nt, Artificial Sequence
  Synthetic
aauauaaaauugugcagcuuuug

SEQ ID NO: 616650 - RNA, 24 nt, Artificial Sequence
  Synthetic
aaauauaaaauugugcagcuuuug

SEQ ID NO: 616651 - RNA, 18 nt, Artificial Sequence
  Synthetic
gcuucaugaaugcuuuug

SEQ ID NO: 616652 - RNA, 19 nt, Artificial Sequence
  Synthetic
ugcuucaugaaugcuuuug

SEQ ID NO: 616653 - RNA, 20 nt, Artificial Sequence
  Synthetic
gugcuucaugaaugcuuuug

SEQ ID NO: 616654 - RNA, 21 nt, Artificial Sequence
  Synthetic
ggugcuucaugaaugcuuuug

SEQ ID NO: 616655 - RNA, 22 nt, Artificial Sequence
  Synthetic
aggugcuucaugaaugcuuuug

SEQ ID NO: 616656 - RNA, 23 nt, Artificial Sequence
  Synthetic
caggugcuucaugaaugcuuuug

SEQ ID NO: 616657 - RNA, 24 nt, Artificial Sequence
  Synthetic
gcaggugcuucaugaaugcuuuug

SEQ ID NO: 616658 - RNA, 18 nt, Artificial Sequence
  Synthetic
aaguuagugcaucuuuug

SEQ ID NO: 616659 - RNA, 19 nt, Artificial Sequence
  Synthetic
caaguuagugcaucuuuug

SEQ ID NO: 616660 - RNA, 20 nt, Artificial Sequence
  Synthetic
acaaguuagugcaucuuuug

SEQ ID NO: 616661 - RNA, 21 nt, Artificial Sequence
  Synthetic
cacaaguuagugcaucuuuug

SEQ ID NO: 616662 - RNA, 22 nt, Artificial Sequence
  Synthetic
gcacaaguuagugcaucuuuug

SEQ ID NO: 616663 - RNA, 23 nt, Artificial Sequence
  Synthetic
ggcacaaguuagugcaucuuuug

SEQ ID NO: 616664 - RNA, 24 nt, Artificial Sequence
  Synthetic
uggcacaaguuagugcaucuuuug

SEQ ID NO: 616665 - RNA, 18 nt, Artificial Sequence
  Synthetic
cauaaaauucaucuuuug

SEQ ID NO: 616666 - RNA, 19 nt, Artificial Sequence
  Synthetic
gcauaaaauucaucuuuug

SEQ ID NO: 616667 - RNA, 20 nt, Artificial Sequence
  Synthetic
agcauaaaauucaucuuuug

SEQ ID NO: 616668 - RNA, 21 nt, Artificial Sequence
  Synthetic
uagcauaaaauucaucuuuug

SEQ ID NO: 616669 - RNA, 22 nt, Artificial Sequence
  Synthetic
cuagcauaaaauucaucuuuug

SEQ ID NO: 616670 - RNA, 23 nt, Artificial Sequence
  Synthetic
acuagcauaaaauucaucuuuug

SEQ ID NO: 616671 - RNA, 24 nt, Artificial Sequence
  Synthetic
aacuagcauaaaauucaucuuuug

SEQ ID NO: 616672 - RNA, 18 nt, Artificial Sequence
  Synthetic
uauucaaaauaucuuuug

SEQ ID NO: 616673 - RNA, 19 nt, Artificial Sequence
  Synthetic
uuauucaaaauaucuuuug

SEQ ID NO: 616674 - RNA, 20 nt, Artificial Sequence
  Synthetic
auuauucaaaauaucuuuug

SEQ ID NO: 616675 - RNA, 21 nt, Artificial Sequence
  Synthetic
aauuauucaaaauaucuuuug

SEQ ID NO: 616676 - RNA, 22 nt, Artificial Sequence
  Synthetic
uaauuauucaaaauaucuuuug

SEQ ID NO: 616677 - RNA, 23 nt, Artificial Sequence
  Synthetic
uuaauuauucaaaauaucuuuug

SEQ ID NO: 616678 - RNA, 24 nt, Artificial Sequence
  Synthetic
cuuaauuauucaaaauaucuuuug

SEQ ID NO: 616679 - RNA, 18 nt, Artificial Sequence
  Synthetic
caggcugacucucuuuug

SEQ ID NO: 616680 - RNA, 19 nt, Artificial Sequence
  Synthetic
acaggcugacucucuuuug

SEQ ID NO: 616681 - RNA, 20 nt, Artificial Sequence
  Synthetic
gacaggcugacucucuuuug

SEQ ID NO: 616682 - RNA, 21 nt, Artificial Sequence
  Synthetic
ggacaggcugacucucuuuug

SEQ ID NO: 616683 - RNA, 22 nt, Artificial Sequence
  Synthetic
aggacaggcugacucucuuuug

SEQ ID NO: 616684 - RNA, 23 nt, Artificial Sequence
  Synthetic
aaggacaggcugacucucuuuug

SEQ ID NO: 616685 - RNA, 24 nt, Artificial Sequence
  Synthetic
aaaggacaggcugacucucuuuug

SEQ ID NO: 616686 - RNA, 18 nt, Artificial Sequence
  Synthetic
auuuuucauagucuuuug

SEQ ID NO: 616687 - RNA, 19 nt, Artificial Sequence
  Synthetic
gauuuuucauagucuuuug

SEQ ID NO: 616688 - RNA, 20 nt, Artificial Sequence
  Synthetic
ugauuuuucauagucuuuug

SEQ ID NO: 616689 - RNA, 21 nt, Artificial Sequence
  Synthetic
cugauuuuucauagucuuuug

SEQ ID NO: 616690 - RNA, 22 nt, Artificial Sequence
  Synthetic
gcugauuuuucauagucuuuug

SEQ ID NO: 616691 - RNA, 23 nt, Artificial Sequence
  Synthetic
agcugauuuuucauagucuuuug

SEQ ID NO: 616692 - RNA, 24 nt, Artificial Sequence
  Synthetic
aagcugauuuuucauagucuuuug

SEQ ID NO: 616693 - RNA, 18 nt, Artificial Sequence
  Synthetic
ugacgaucuagucuuuug

SEQ ID NO: 616694 - RNA, 19 nt, Artificial Sequence
  Synthetic
cugacgaucuagucuuuug

SEQ ID NO: 616695 - RNA, 20 nt, Artificial Sequence
  Synthetic
acugacgaucuagucuuuug

SEQ ID NO: 616696 - RNA, 21 nt, Artificial Sequence
  Synthetic
aacugacgaucuagucuuuug

SEQ ID NO: 616697 - RNA, 22 nt, Artificial Sequence
  Synthetic
caacugacgaucuagucuuuug

SEQ ID NO: 616698 - RNA, 23 nt, Artificial Sequence
  Synthetic
ucaacugacgaucuagucuuuug

SEQ ID NO: 616699 - RNA, 24 nt, Artificial Sequence
  Synthetic
uucaacugacgaucuagucuuuug

SEQ ID NO: 616700 - RNA, 18 nt, Artificial Sequence
  Synthetic
agcccauuucuucuuuug

SEQ ID NO: 616701 - RNA, 19 nt, Artificial Sequence
  Synthetic
aagcccauuucuucuuuug

SEQ ID NO: 616702 - RNA, 20 nt, Artificial Sequence
  Synthetic
uaagcccauuucuucuuuug

SEQ ID NO: 616703 - RNA, 21 nt, Artificial Sequence
  Synthetic
uuaagcccauuucuucuuuug

SEQ ID NO: 616704 - RNA, 22 nt, Artificial Sequence
  Synthetic
uuuaagcccauuucuucuuuug

SEQ ID NO: 616705 - RNA, 23 nt, Artificial Sequence
  Synthetic
cuuuaagcccauuucuucuuuug

SEQ ID NO: 616706 - RNA, 24 nt, Artificial Sequence
  Synthetic
acuuuaagcccauuucuucuuuug

SEQ ID NO: 616707 - RNA, 18 nt, Artificial Sequence
  Synthetic
caucagacuacaguuuug

SEQ ID NO: 616708 - RNA, 19 nt, Artificial Sequence
  Synthetic
acaucagacuacaguuuug

SEQ ID NO: 616709 - RNA, 20 nt, Artificial Sequence
  Synthetic
aacaucagacuacaguuuug

SEQ ID NO: 616710 - RNA, 21 nt, Artificial Sequence
  Synthetic
caacaucagacuacaguuuug

SEQ ID NO: 616711 - RNA, 22 nt, Artificial Sequence
  Synthetic
gcaacaucagacuacaguuuug

SEQ ID NO: 616712 - RNA, 23 nt, Artificial Sequence
  Synthetic
ugcaacaucagacuacaguuuug

SEQ ID NO: 616713 - RNA, 24 nt, Artificial Sequence
  Synthetic
cugcaacaucagacuacaguuuug

SEQ ID NO: 616714 - RNA, 18 nt, Artificial Sequence
  Synthetic
cuuuggauuuuaguuuug

SEQ ID NO: 616715 - RNA, 19 nt, Artificial Sequence
  Synthetic
ccuuuggauuuuaguuuug

SEQ ID NO: 616716 - RNA, 20 nt, Artificial Sequence
  Synthetic
gccuuuggauuuuaguuuug

SEQ ID NO: 616717 - RNA, 21 nt, Artificial Sequence
  Synthetic
ugccuuuggauuuuaguuuug

SEQ ID NO: 616718 - RNA, 22 nt, Artificial Sequence
  Synthetic
gugccuuuggauuuuaguuuug

SEQ ID NO: 616719 - RNA, 23 nt, Artificial Sequence
  Synthetic
ugugccuuuggauuuuaguuuug

SEQ ID NO: 616720 - RNA, 24 nt, Artificial Sequence
  Synthetic
augugccuuuggauuuuaguuuug

SEQ ID NO: 616721 - RNA, 18 nt, Artificial Sequence
  Synthetic
auuaguaguuacguuuug

SEQ ID NO: 616722 - RNA, 19 nt, Artificial Sequence
  Synthetic
uauuaguaguuacguuuug

SEQ ID NO: 616723 - RNA, 20 nt, Artificial Sequence
  Synthetic
cuauuaguaguuacguuuug

SEQ ID NO: 616724 - RNA, 21 nt, Artificial Sequence
  Synthetic
ccuauuaguaguuacguuuug

SEQ ID NO: 616725 - RNA, 22 nt, Artificial Sequence
  Synthetic
gccuauuaguaguuacguuuug

SEQ ID NO: 616726 - RNA, 23 nt, Artificial Sequence
  Synthetic
agccuauuaguaguuacguuuug

SEQ ID NO: 616727 - RNA, 24 nt, Artificial Sequence
  Synthetic
uagccuauuaguaguuacguuuug

SEQ ID NO: 616728 - RNA, 18 nt, Artificial Sequence
  Synthetic
aaauagaauaucguuuug

SEQ ID NO: 616729 - RNA, 19 nt, Artificial Sequence
  Synthetic
aaaauagaauaucguuuug

SEQ ID NO: 616730 - RNA, 20 nt, Artificial Sequence
  Synthetic
gaaaauagaauaucguuuug

SEQ ID NO: 616731 - RNA, 21 nt, Artificial Sequence
  Synthetic
agaaaauagaauaucguuuug

SEQ ID NO: 616732 - RNA, 22 nt, Artificial Sequence
  Synthetic
aagaaaauagaauaucguuuug

SEQ ID NO: 616733 - RNA, 23 nt, Artificial Sequence
  Synthetic
gaagaaaauagaauaucguuuug

SEQ ID NO: 616734 - RNA, 24 nt, Artificial Sequence
  Synthetic
ugaagaaaauagaauaucguuuug

SEQ ID NO: 616735 - RNA, 18 nt, Artificial Sequence
  Synthetic
aagaaguuacagguuuug

SEQ ID NO: 616736 - RNA, 19 nt, Artificial Sequence
  Synthetic
gaagaaguuacagguuuug

SEQ ID NO: 616737 - RNA, 20 nt, Artificial Sequence
  Synthetic
agaagaaguuacagguuuug

SEQ ID NO: 616738 - RNA, 21 nt, Artificial Sequence
  Synthetic
uagaagaaguuacagguuuug

SEQ ID NO: 616739 - RNA, 22 nt, Artificial Sequence
  Synthetic
uuagaagaaguuacagguuuug

SEQ ID NO: 616740 - RNA, 23 nt, Artificial Sequence
  Synthetic
auuagaagaaguuacagguuuug

SEQ ID NO: 616741 - RNA, 24 nt, Artificial Sequence
  Synthetic
uauuagaagaaguuacagguuuug

SEQ ID NO: 616742 - RNA, 18 nt, Artificial Sequence
  Synthetic
acuagugaagagguuuug

SEQ ID NO: 616743 - RNA, 19 nt, Artificial Sequence
  Synthetic
aacuagugaagagguuuug

SEQ ID NO: 616744 - RNA, 20 nt, Artificial Sequence
  Synthetic
aaacuagugaagagguuuug

SEQ ID NO: 616745 - RNA, 21 nt, Artificial Sequence
  Synthetic
aaaacuagugaagagguuuug

SEQ ID NO: 616746 - RNA, 22 nt, Artificial Sequence
  Synthetic
aaaaacuagugaagagguuuug

SEQ ID NO: 616747 - RNA, 23 nt, Artificial Sequence
  Synthetic
gaaaaacuagugaagagguuuug

SEQ ID NO: 616748 - RNA, 24 nt, Artificial Sequence
  Synthetic
agaaaaacuagugaagagguuuug

SEQ ID NO: 616749 - RNA, 18 nt, Artificial Sequence
  Synthetic
guacuauaauugguuuug

SEQ ID NO: 616750 - RNA, 19 nt, Artificial Sequence
  Synthetic
uguacuauaauugguuuug

SEQ ID NO: 616751 - RNA, 20 nt, Artificial Sequence
  Synthetic
cuguacuauaauugguuuug

SEQ ID NO: 616752 - RNA, 21 nt, Artificial Sequence
  Synthetic
ucuguacuauaauugguuuug

SEQ ID NO: 616753 - RNA, 22 nt, Artificial Sequence
  Synthetic
aucuguacuauaauugguuuug

SEQ ID NO: 616754 - RNA, 23 nt, Artificial Sequence
  Synthetic
caucuguacuauaauugguuuug

SEQ ID NO: 616755 - RNA, 24 nt, Artificial Sequence
  Synthetic
gcaucuguacuauaauugguuuug

SEQ ID NO: 616756 - RNA, 18 nt, Artificial Sequence
  Synthetic
uucauuuaauauguuuug

SEQ ID NO: 616757 - RNA, 19 nt, Artificial Sequence
  Synthetic
uuucauuuaauauguuuug

SEQ ID NO: 616758 - RNA, 20 nt, Artificial Sequence
  Synthetic
uuuucauuuaauauguuuug

SEQ ID NO: 616759 - RNA, 21 nt, Artificial Sequence
  Synthetic
uuuuucauuuaauauguuuug

SEQ ID NO: 616760 - RNA, 22 nt, Artificial Sequence
  Synthetic
uuuuuucauuuaauauguuuug

SEQ ID NO: 616761 - RNA, 23 nt, Artificial Sequence
  Synthetic
auuuuuucauuuaauauguuuug

SEQ ID NO: 616762 - RNA, 24 nt, Artificial Sequence
  Synthetic
aauuuuuucauuuaauauguuuug

SEQ ID NO: 616763 - RNA, 18 nt, Artificial Sequence
  Synthetic
uuuuuuuuuuauguuuug

SEQ ID NO: 616764 - RNA, 19 nt, Artificial Sequence
  Synthetic
uuuuuuuuuuuauguuuug

SEQ ID NO: 616765 - RNA, 20 nt, Artificial Sequence
  Synthetic
uuuuuuuuuuuuauguuuug

SEQ ID NO: 616766 - RNA, 21 nt, Artificial Sequence
  Synthetic
uuuuuuuuuuuuuauguuuug

SEQ ID NO: 616767 - RNA, 22 nt, Artificial Sequence
  Synthetic
uuuuuuuuuuuuuuauguuuug

SEQ ID NO: 616768 - RNA, 23 nt, Artificial Sequence
  Synthetic
uuuuuuuuuuuuuuuauguuuug

SEQ ID NO: 616769 - RNA, 24 nt, Artificial Sequence
  Synthetic
uuuuuuuuuuuuuuuuauguuuug

SEQ ID NO: 616770 - RNA, 18 nt, Artificial Sequence
  Synthetic
cuagauuucuguguuuug

SEQ ID NO: 616771 - RNA, 19 nt, Artificial Sequence
  Synthetic
ucuagauuucuguguuuug

SEQ ID NO: 616772 - RNA, 20 nt, Artificial Sequence
  Synthetic
cucuagauuucuguguuuug

SEQ ID NO: 616773 - RNA, 21 nt, Artificial Sequence
  Synthetic
acucuagauuucuguguuuug

SEQ ID NO: 616774 - RNA, 22 nt, Artificial Sequence
  Synthetic
aacucuagauuucuguguuuug

SEQ ID NO: 616775 - RNA, 23 nt, Artificial Sequence
  Synthetic
caacucuagauuucuguguuuug

SEQ ID NO: 616776 - RNA, 24 nt, Artificial Sequence
  Synthetic
ucaacucuagauuucuguguuuug

SEQ ID NO: 616777 - RNA, 18 nt, Artificial Sequence
  Synthetic
uauuguuuuuaauuuuug

SEQ ID NO: 616778 - RNA, 19 nt, Artificial Sequence
  Synthetic
uuauuguuuuuaauuuuug

SEQ ID NO: 616779 - RNA, 20 nt, Artificial Sequence
  Synthetic
uuuauuguuuuuaauuuuug

SEQ ID NO: 616780 - RNA, 21 nt, Artificial Sequence
  Synthetic
auuuauuguuuuuaauuuuug

SEQ ID NO: 616781 - RNA, 22 nt, Artificial Sequence
  Synthetic
gauuuauuguuuuuaauuuuug

SEQ ID NO: 616782 - RNA, 23 nt, Artificial Sequence
  Synthetic
ugauuuauuguuuuuaauuuuug

SEQ ID NO: 616783 - RNA, 24 nt, Artificial Sequence
  Synthetic
augauuuauuguuuuuaauuuuug

SEQ ID NO: 616784 - RNA, 18 nt, Artificial Sequence
  Synthetic
uuccuuggcacauuuuug

SEQ ID NO: 616785 - RNA, 19 nt, Artificial Sequence
  Synthetic
uuuccuuggcacauuuuug

SEQ ID NO: 616786 - RNA, 20 nt, Artificial Sequence
  Synthetic
uuuuccuuggcacauuuuug

SEQ ID NO: 616787 - RNA, 21 nt, Artificial Sequence
  Synthetic
cuuuuccuuggcacauuuuug

SEQ ID NO: 616788 - RNA, 22 nt, Artificial Sequence
  Synthetic
acuuuuccuuggcacauuuuug

SEQ ID NO: 616789 - RNA, 23 nt, Artificial Sequence
  Synthetic
uacuuuuccuuggcacauuuuug

SEQ ID NO: 616790 - RNA, 24 nt, Artificial Sequence
  Synthetic
cuacuuuuccuuggcacauuuuug

SEQ ID NO: 616791 - RNA, 18 nt, Artificial Sequence
  Synthetic
uaucucaguccauuuuug

SEQ ID NO: 616792 - RNA, 19 nt, Artificial Sequence
  Synthetic
auaucucaguccauuuuug

SEQ ID NO: 616793 - RNA, 20 nt, Artificial Sequence
  Synthetic
uauaucucaguccauuuuug

SEQ ID NO: 616794 - RNA, 21 nt, Artificial Sequence
  Synthetic
auauaucucaguccauuuuug

SEQ ID NO: 616795 - RNA, 22 nt, Artificial Sequence
  Synthetic
aauauaucucaguccauuuuug

SEQ ID NO: 616796 - RNA, 23 nt, Artificial Sequence
  Synthetic
uaauauaucucaguccauuuuug

SEQ ID NO: 616797 - RNA, 24 nt, Artificial Sequence
  Synthetic
cuaauauaucucaguccauuuuug

SEQ ID NO: 616798 - RNA, 18 nt, Artificial Sequence
  Synthetic
acuuauuucucauuuuug

SEQ ID NO: 616799 - RNA, 19 nt, Artificial Sequence
  Synthetic
aacuuauuucucauuuuug

SEQ ID NO: 616800 - RNA, 20 nt, Artificial Sequence
  Synthetic
uaacuuauuucucauuuuug

SEQ ID NO: 616801 - RNA, 21 nt, Artificial Sequence
  Synthetic
cuaacuuauuucucauuuuug

SEQ ID NO: 616802 - RNA, 22 nt, Artificial Sequence
  Synthetic
ccuaacuuauuucucauuuuug

SEQ ID NO: 616803 - RNA, 23 nt, Artificial Sequence
  Synthetic
uccuaacuuauuucucauuuuug

SEQ ID NO: 616804 - RNA, 24 nt, Artificial Sequence
  Synthetic
uuccuaacuuauuucucauuuuug

SEQ ID NO: 616805 - RNA, 18 nt, Artificial Sequence
  Synthetic
aaacucagcagauuuuug

SEQ ID NO: 616806 - RNA, 19 nt, Artificial Sequence
  Synthetic
aaaacucagcagauuuuug

SEQ ID NO: 616807 - RNA, 20 nt, Artificial Sequence
  Synthetic
aaaaacucagcagauuuuug

SEQ ID NO: 616808 - RNA, 21 nt, Artificial Sequence
  Synthetic
aaaaaacucagcagauuuuug

SEQ ID NO: 616809 - RNA, 22 nt, Artificial Sequence
  Synthetic
uaaaaaacucagcagauuuuug

SEQ ID NO: 616810 - RNA, 23 nt, Artificial Sequence
  Synthetic
cuaaaaaacucagcagauuuuug

SEQ ID NO: 616811 - RNA, 24 nt, Artificial Sequence
  Synthetic
acuaaaaaacucagcagauuuuug

SEQ ID NO: 616812 - RNA, 18 nt, Artificial Sequence
  Synthetic
ggugccuauugauuuuug

SEQ ID NO: 616813 - RNA, 19 nt, Artificial Sequence
  Synthetic
aggugccuauugauuuuug

SEQ ID NO: 616814 - RNA, 20 nt, Artificial Sequence
  Synthetic
caggugccuauugauuuuug

SEQ ID NO: 616815 - RNA, 21 nt, Artificial Sequence
  Synthetic
gcaggugccuauugauuuuug

SEQ ID NO: 616816 - RNA, 22 nt, Artificial Sequence
  Synthetic
agcaggugccuauugauuuuug

SEQ ID NO: 616817 - RNA, 23 nt, Artificial Sequence
  Synthetic
cagcaggugccuauugauuuuug

SEQ ID NO: 616818 - RNA, 24 nt, Artificial Sequence
  Synthetic
ucagcaggugccuauugauuuuug

SEQ ID NO: 616819 - RNA, 18 nt, Artificial Sequence
  Synthetic
gcucaauaaauauuuuug

SEQ ID NO: 616820 - RNA, 19 nt, Artificial Sequence
  Synthetic
ugcucaauaaauauuuuug

SEQ ID NO: 616821 - RNA, 20 nt, Artificial Sequence
  Synthetic
augcucaauaaauauuuuug

SEQ ID NO: 616822 - RNA, 21 nt, Artificial Sequence
  Synthetic
gaugcucaauaaauauuuuug

SEQ ID NO: 616823 - RNA, 22 nt, Artificial Sequence
  Synthetic
agaugcucaauaaauauuuuug

SEQ ID NO: 616824 - RNA, 23 nt, Artificial Sequence
  Synthetic
uagaugcucaauaaauauuuuug

SEQ ID NO: 616825 - RNA, 24 nt, Artificial Sequence
  Synthetic
uuagaugcucaauaaauauuuuug

SEQ ID NO: 616826 - RNA, 18 nt, Artificial Sequence
  Synthetic
augagcuacauauuuuug

SEQ ID NO: 616827 - RNA, 19 nt, Artificial Sequence
  Synthetic
uaugagcuacauauuuuug

SEQ ID NO: 616828 - RNA, 20 nt, Artificial Sequence
  Synthetic
uuaugagcuacauauuuuug

SEQ ID NO: 616829 - RNA, 21 nt, Artificial Sequence
  Synthetic
cuuaugagcuacauauuuuug

SEQ ID NO: 616830 - RNA, 22 nt, Artificial Sequence
  Synthetic
ucuuaugagcuacauauuuuug

SEQ ID NO: 616831 - RNA, 23 nt, Artificial Sequence
  Synthetic
cucuuaugagcuacauauuuuug

SEQ ID NO: 616832 - RNA, 24 nt, Artificial Sequence
  Synthetic
ucucuuaugagcuacauauuuuug

SEQ ID NO: 616833 - RNA, 18 nt, Artificial Sequence
  Synthetic
cauugaauaguauuuuug

SEQ ID NO: 616834 - RNA, 19 nt, Artificial Sequence
  Synthetic
ucauugaauaguauuuuug

SEQ ID NO: 616835 - RNA, 20 nt, Artificial Sequence
  Synthetic
cucauugaauaguauuuuug

SEQ ID NO: 616836 - RNA, 21 nt, Artificial Sequence
  Synthetic
acucauugaauaguauuuuug

SEQ ID NO: 616837 - RNA, 22 nt, Artificial Sequence
  Synthetic
aacucauugaauaguauuuuug

SEQ ID NO: 616838 - RNA, 23 nt, Artificial Sequence
  Synthetic
aaacucauugaauaguauuuuug

SEQ ID NO: 616839 - RNA, 24 nt, Artificial Sequence
  Synthetic
gaaacucauugaauaguauuuuug

SEQ ID NO: 616840 - RNA, 18 nt, Artificial Sequence
  Synthetic
aagggaaucuuauuuuug

SEQ ID NO: 616841 - RNA, 19 nt, Artificial Sequence
  Synthetic
caagggaaucuuauuuuug

SEQ ID NO: 616842 - RNA, 20 nt, Artificial Sequence
  Synthetic
acaagggaaucuuauuuuug

SEQ ID NO: 616843 - RNA, 21 nt, Artificial Sequence
  Synthetic
aacaagggaaucuuauuuuug

SEQ ID NO: 616844 - RNA, 22 nt, Artificial Sequence
  Synthetic
uaacaagggaaucuuauuuuug

SEQ ID NO: 616845 - RNA, 23 nt, Artificial Sequence
  Synthetic
uuaacaagggaaucuuauuuuug

SEQ ID NO: 616846 - RNA, 24 nt, Artificial Sequence
  Synthetic
auuaacaagggaaucuuauuuuug

SEQ ID NO: 616847 - RNA, 18 nt, Artificial Sequence
  Synthetic
uccuucccccacuuuuug

SEQ ID NO: 616848 - RNA, 19 nt, Artificial Sequence
  Synthetic
auccuucccccacuuuuug

SEQ ID NO: 616849 - RNA, 20 nt, Artificial Sequence
  Synthetic
uauccuucccccacuuuuug

SEQ ID NO: 616850 - RNA, 21 nt, Artificial Sequence
  Synthetic
auauccuucccccacuuuuug

SEQ ID NO: 616851 - RNA, 22 nt, Artificial Sequence
  Synthetic
uauauccuucccccacuuuuug

SEQ ID NO: 616852 - RNA, 23 nt, Artificial Sequence
  Synthetic
uuauauccuucccccacuuuuug

SEQ ID NO: 616853 - RNA, 24 nt, Artificial Sequence
  Synthetic
uuuauauccuucccccacuuuuug

SEQ ID NO: 616854 - RNA, 18 nt, Artificial Sequence
  Synthetic
uccuucgcccacuuuuug

SEQ ID NO: 616855 - RNA, 19 nt, Artificial Sequence
  Synthetic
guccuucgcccacuuuuug

SEQ ID NO: 616856 - RNA, 20 nt, Artificial Sequence
  Synthetic
uguccuucgcccacuuuuug

SEQ ID NO: 616857 - RNA, 21 nt, Artificial Sequence
  Synthetic
auguccuucgcccacuuuuug

SEQ ID NO: 616858 - RNA, 22 nt, Artificial Sequence
  Synthetic
cauguccuucgcccacuuuuug

SEQ ID NO: 616859 - RNA, 23 nt, Artificial Sequence
  Synthetic
ucauguccuucgcccacuuuuug

SEQ ID NO: 616860 - RNA, 24 nt, Artificial Sequence
  Synthetic
uucauguccuucgcccacuuuuug

SEQ ID NO: 616861 - RNA, 18 nt, Artificial Sequence
  Synthetic
uccuucgcucacuuuuug

SEQ ID NO: 616862 - RNA, 19 nt, Artificial Sequence
  Synthetic
guccuucgcucacuuuuug

SEQ ID NO: 616863 - RNA, 20 nt, Artificial Sequence
  Synthetic
uguccuucgcucacuuuuug

SEQ ID NO: 616864 - RNA, 21 nt, Artificial Sequence
  Synthetic
auguccuucgcucacuuuuug

SEQ ID NO: 616865 - RNA, 22 nt, Artificial Sequence
  Synthetic
cauguccuucgcucacuuuuug

SEQ ID NO: 616866 - RNA, 23 nt, Artificial Sequence
  Synthetic
ucauguccuucgcucacuuuuug

SEQ ID NO: 616867 - RNA, 24 nt, Artificial Sequence
  Synthetic
uucauguccuucgcucacuuuuug

SEQ ID NO: 616868 - RNA, 18 nt, Artificial Sequence
  Synthetic
aucagcuuugacuuuuug

SEQ ID NO: 616869 - RNA, 19 nt, Artificial Sequence
  Synthetic
caucagcuuugacuuuuug

SEQ ID NO: 616870 - RNA, 20 nt, Artificial Sequence
  Synthetic
ucaucagcuuugacuuuuug

SEQ ID NO: 616871 - RNA, 21 nt, Artificial Sequence
  Synthetic
uucaucagcuuugacuuuuug

SEQ ID NO: 616872 - RNA, 22 nt, Artificial Sequence
  Synthetic
uuucaucagcuuugacuuuuug

SEQ ID NO: 616873 - RNA, 23 nt, Artificial Sequence
  Synthetic
uuuucaucagcuuugacuuuuug

SEQ ID NO: 616874 - RNA, 24 nt, Artificial Sequence
  Synthetic
uuuuucaucagcuuugacuuuuug

SEQ ID NO: 616875 - RNA, 18 nt, Artificial Sequence
  Synthetic
auaaguacucccuuuuug

SEQ ID NO: 616876 - RNA, 19 nt, Artificial Sequence
  Synthetic
cauaaguacucccuuuuug

SEQ ID NO: 616877 - RNA, 20 nt, Artificial Sequence
  Synthetic
ccauaaguacucccuuuuug

SEQ ID NO: 616878 - RNA, 21 nt, Artificial Sequence
  Synthetic
gccauaaguacucccuuuuug

SEQ ID NO: 616879 - RNA, 22 nt, Artificial Sequence
  Synthetic
agccauaaguacucccuuuuug

SEQ ID NO: 616880 - RNA, 23 nt, Artificial Sequence
  Synthetic
uagccauaaguacucccuuuuug

SEQ ID NO: 616881 - RNA, 24 nt, Artificial Sequence
  Synthetic
cuagccauaaguacucccuuuuug

SEQ ID NO: 616882 - RNA, 18 nt, Artificial Sequence
  Synthetic
aucuguauauccuuuuug

SEQ ID NO: 616883 - RNA, 19 nt, Artificial Sequence
  Synthetic
uaucuguauauccuuuuug

SEQ ID NO: 616884 - RNA, 20 nt, Artificial Sequence
  Synthetic
cuaucuguauauccuuuuug

SEQ ID NO: 616885 - RNA, 21 nt, Artificial Sequence
  Synthetic
gcuaucuguauauccuuuuug

SEQ ID NO: 616886 - RNA, 22 nt, Artificial Sequence
  Synthetic
ugcuaucuguauauccuuuuug

SEQ ID NO: 616887 - RNA, 23 nt, Artificial Sequence
  Synthetic
uugcuaucuguauauccuuuuug

SEQ ID NO: 616888 - RNA, 24 nt, Artificial Sequence
  Synthetic
uuugcuaucuguauauccuuuuug

SEQ ID NO: 616889 - RNA, 18 nt, Artificial Sequence
  Synthetic
uauuguuaagaguuuuug

SEQ ID NO: 616890 - RNA, 19 nt, Artificial Sequence
  Synthetic
uuauuguuaagaguuuuug

SEQ ID NO: 616891 - RNA, 20 nt, Artificial Sequence
  Synthetic
auuauuguuaagaguuuuug

SEQ ID NO: 616892 - RNA, 21 nt, Artificial Sequence
  Synthetic
aauuauuguuaagaguuuuug

SEQ ID NO: 616893 - RNA, 22 nt, Artificial Sequence
  Synthetic
caauuauuguuaagaguuuuug

SEQ ID NO: 616894 - RNA, 23 nt, Artificial Sequence
  Synthetic
acaauuauuguuaagaguuuuug

SEQ ID NO: 616895 - RNA, 24 nt, Artificial Sequence
  Synthetic
aacaauuauuguuaagaguuuuug

SEQ ID NO: 616896 - RNA, 18 nt, Artificial Sequence
  Synthetic
uuugauuucagguuuuug

SEQ ID NO: 616897 - RNA, 19 nt, Artificial Sequence
  Synthetic
uuuugauuucagguuuuug

SEQ ID NO: 616898 - RNA, 20 nt, Artificial Sequence
  Synthetic
uuuuugauuucagguuuuug

SEQ ID NO: 616899 - RNA, 21 nt, Artificial Sequence
  Synthetic
guuuuugauuucagguuuuug

SEQ ID NO: 616900 - RNA, 22 nt, Artificial Sequence
  Synthetic
aguuuuugauuucagguuuuug

SEQ ID NO: 616901 - RNA, 23 nt, Artificial Sequence
  Synthetic
aaguuuuugauuucagguuuuug

SEQ ID NO: 616902 - RNA, 24 nt, Artificial Sequence
  Synthetic
aaaguuuuugauuucagguuuuug

SEQ ID NO: 616903 - RNA, 18 nt, Artificial Sequence
  Synthetic
ucaugggugagguuuuug

SEQ ID NO: 616904 - RNA, 19 nt, Artificial Sequence
  Synthetic
aucaugggugagguuuuug

SEQ ID NO: 616905 - RNA, 20 nt, Artificial Sequence
  Synthetic
caucaugggugagguuuuug

SEQ ID NO: 616906 - RNA, 21 nt, Artificial Sequence
  Synthetic
ucaucaugggugagguuuuug

SEQ ID NO: 616907 - RNA, 22 nt, Artificial Sequence
  Synthetic
uucaucaugggugagguuuuug

SEQ ID NO: 616908 - RNA, 23 nt, Artificial Sequence
  Synthetic
auucaucaugggugagguuuuug

SEQ ID NO: 616909 - RNA, 24 nt, Artificial Sequence
  Synthetic
uauucaucaugggugagguuuuug

SEQ ID NO: 616910 - RNA, 18 nt, Artificial Sequence
  Synthetic
ccuaaaauaauguuuuug

SEQ ID NO: 616911 - RNA, 19 nt, Artificial Sequence
  Synthetic
uccuaaaauaauguuuuug

SEQ ID NO: 616912 - RNA, 20 nt, Artificial Sequence
  Synthetic
uuccuaaaauaauguuuuug

SEQ ID NO: 616913 - RNA, 21 nt, Artificial Sequence
  Synthetic
uuuccuaaaauaauguuuuug

SEQ ID NO: 616914 - RNA, 22 nt, Artificial Sequence
  Synthetic
uuuuccuaaaauaauguuuuug

SEQ ID NO: 616915 - RNA, 23 nt, Artificial Sequence
  Synthetic
uuuuuccuaaaauaauguuuuug

SEQ ID NO: 616916 - RNA, 24 nt, Artificial Sequence
  Synthetic
auuuuuccuaaaauaauguuuuug

SEQ ID NO: 616917 - RNA, 18 nt, Artificial Sequence
  Synthetic
uccaaguuucuguuuuug

SEQ ID NO: 616918 - RNA, 19 nt, Artificial Sequence
  Synthetic
guccaaguuucuguuuuug

SEQ ID NO: 616919 - RNA, 20 nt, Artificial Sequence
  Synthetic
gguccaaguuucuguuuuug

SEQ ID NO: 616920 - RNA, 21 nt, Artificial Sequence
  Synthetic
ugguccaaguuucuguuuuug

SEQ ID NO: 616921 - RNA, 22 nt, Artificial Sequence
  Synthetic
cugguccaaguuucuguuuuug

SEQ ID NO: 616922 - RNA, 23 nt, Artificial Sequence
  Synthetic
acugguccaaguuucuguuuuug

SEQ ID NO: 616923 - RNA, 24 nt, Artificial Sequence
  Synthetic
uacugguccaaguuucuguuuuug

SEQ ID NO: 616924 - RNA, 18 nt, Artificial Sequence
  Synthetic
ucuuugcaauuguuuuug

SEQ ID NO: 616925 - RNA, 19 nt, Artificial Sequence
  Synthetic
gucuuugcaauuguuuuug

SEQ ID NO: 616926 - RNA, 20 nt, Artificial Sequence
  Synthetic
agucuuugcaauuguuuuug

SEQ ID NO: 616927 - RNA, 21 nt, Artificial Sequence
  Synthetic
uagucuuugcaauuguuuuug

SEQ ID NO: 616928 - RNA, 22 nt, Artificial Sequence
  Synthetic
auagucuuugcaauuguuuuug

SEQ ID NO: 616929 - RNA, 23 nt, Artificial Sequence
  Synthetic
aauagucuuugcaauuguuuuug

SEQ ID NO: 616930 - RNA, 24 nt, Artificial Sequence
  Synthetic
uaauagucuuugcaauuguuuuug

SEQ ID NO: 616931 - RNA, 18 nt, Artificial Sequence
  Synthetic
gagacauauuuguuuuug

SEQ ID NO: 616932 - RNA, 19 nt, Artificial Sequence
  Synthetic
ugagacauauuuguuuuug

SEQ ID NO: 616933 - RNA, 20 nt, Artificial Sequence
  Synthetic
cugagacauauuuguuuuug

SEQ ID NO: 616934 - RNA, 21 nt, Artificial Sequence
  Synthetic
ucugagacauauuuguuuuug

SEQ ID NO: 616935 - RNA, 22 nt, Artificial Sequence
  Synthetic
cucugagacauauuuguuuuug

SEQ ID NO: 616936 - RNA, 23 nt, Artificial Sequence
  Synthetic
acucugagacauauuuguuuuug

SEQ ID NO: 616937 - RNA, 24 nt, Artificial Sequence
  Synthetic
aacucugagacauauuuguuuuug

SEQ ID NO: 616938 - RNA, 18 nt, Artificial Sequence
  Synthetic
auaggucuuuuguuuuug

SEQ ID NO: 616939 - RNA, 19 nt, Artificial Sequence
  Synthetic
aauaggucuuuuguuuuug

SEQ ID NO: 616940 - RNA, 20 nt, Artificial Sequence
  Synthetic
uaauaggucuuuuguuuuug

SEQ ID NO: 616941 - RNA, 21 nt, Artificial Sequence
  Synthetic
guaauaggucuuuuguuuuug

SEQ ID NO: 616942 - RNA, 22 nt, Artificial Sequence
  Synthetic
uguaauaggucuuuuguuuuug

SEQ ID NO: 616943 - RNA, 23 nt, Artificial Sequence
  Synthetic
cuguaauaggucuuuuguuuuug

SEQ ID NO: 616944 - RNA, 24 nt, Artificial Sequence
  Synthetic
ucuguaauaggucuuuuguuuuug

SEQ ID NO: 616945 - RNA, 18 nt, Artificial Sequence
  Synthetic
gauuucgaaaauuuuuug

SEQ ID NO: 616946 - RNA, 19 nt, Artificial Sequence
  Synthetic
ugauuucgaaaauuuuuug

SEQ ID NO: 616947 - RNA, 20 nt, Artificial Sequence
  Synthetic
augauuucgaaaauuuuuug

SEQ ID NO: 616948 - RNA, 21 nt, Artificial Sequence
  Synthetic
gaugauuucgaaaauuuuuug

SEQ ID NO: 616949 - RNA, 22 nt, Artificial Sequence
  Synthetic
agaugauuucgaaaauuuuuug

SEQ ID NO: 616950 - RNA, 23 nt, Artificial Sequence
  Synthetic
aagaugauuucgaaaauuuuuug

SEQ ID NO: 616951 - RNA, 24 nt, Artificial Sequence
  Synthetic
aaagaugauuucgaaaauuuuuug

SEQ ID NO: 616952 - RNA, 18 nt, Artificial Sequence
  Synthetic
cucuuuuugcauuuuuug

SEQ ID NO: 616953 - RNA, 19 nt, Artificial Sequence
  Synthetic
acucuuuuugcauuuuuug

SEQ ID NO: 616954 - RNA, 20 nt, Artificial Sequence
  Synthetic
uacucuuuuugcauuuuuug

SEQ ID NO: 616955 - RNA, 21 nt, Artificial Sequence
  Synthetic
guacucuuuuugcauuuuuug

SEQ ID NO: 616956 - RNA, 22 nt, Artificial Sequence
  Synthetic
gguacucuuuuugcauuuuuug

SEQ ID NO: 616957 - RNA, 23 nt, Artificial Sequence
  Synthetic
agguacucuuuuugcauuuuuug

SEQ ID NO: 616958 - RNA, 24 nt, Artificial Sequence
  Synthetic
cagguacucuuuuugcauuuuuug

SEQ ID NO: 616959 - RNA, 18 nt, Artificial Sequence
  Synthetic
cagggucucacuuuuuug

SEQ ID NO: 616960 - RNA, 19 nt, Artificial Sequence
  Synthetic
acagggucucacuuuuuug

SEQ ID NO: 616961 - RNA, 20 nt, Artificial Sequence
  Synthetic
gacagggucucacuuuuuug

SEQ ID NO: 616962 - RNA, 21 nt, Artificial Sequence
  Synthetic
agacagggucucacuuuuuug

SEQ ID NO: 616963 - RNA, 22 nt, Artificial Sequence
  Synthetic
gagacagggucucacuuuuuug

SEQ ID NO: 616964 - RNA, 23 nt, Artificial Sequence
  Synthetic
ggagacagggucucacuuuuuug

SEQ ID NO: 616965 - RNA, 24 nt, Artificial Sequence
  Synthetic
uggagacagggucucacuuuuuug

SEQ ID NO: 616966 - RNA, 18 nt, Artificial Sequence
  Synthetic
caaccuggaccuuuuuug

SEQ ID NO: 616967 - RNA, 19 nt, Artificial Sequence
  Synthetic
ccaaccuggaccuuuuuug

SEQ ID NO: 616968 - RNA, 20 nt, Artificial Sequence
  Synthetic
uccaaccuggaccuuuuuug

SEQ ID NO: 616969 - RNA, 21 nt, Artificial Sequence
  Synthetic
guccaaccuggaccuuuuuug

SEQ ID NO: 616970 - RNA, 22 nt, Artificial Sequence
  Synthetic
cguccaaccuggaccuuuuuug

SEQ ID NO: 616971 - RNA, 23 nt, Artificial Sequence
  Synthetic
acguccaaccuggaccuuuuuug

SEQ ID NO: 616972 - RNA, 24 nt, Artificial Sequence
  Synthetic
aacguccaaccuggaccuuuuuug

SEQ ID NO: 616973 - RNA, 18 nt, Artificial Sequence
  Synthetic
ucuguuuucaguuuuuug

SEQ ID NO: 616974 - RNA, 19 nt, Artificial Sequence
  Synthetic
uucuguuuucaguuuuuug

SEQ ID NO: 616975 - RNA, 20 nt, Artificial Sequence
  Synthetic
auucuguuuucaguuuuuug

SEQ ID NO: 616976 - RNA, 21 nt, Artificial Sequence
  Synthetic
aauucuguuuucaguuuuuug

SEQ ID NO: 616977 - RNA, 22 nt, Artificial Sequence
  Synthetic
uaauucuguuuucaguuuuuug

SEQ ID NO: 616978 - RNA, 23 nt, Artificial Sequence
  Synthetic
guaauucuguuuucaguuuuuug

SEQ ID NO: 616979 - RNA, 24 nt, Artificial Sequence
  Synthetic
gguaauucuguuuucaguuuuuug

SEQ ID NO: 616980 - RNA, 18 nt, Artificial Sequence
  Synthetic
auuuuuaaaauuuuuuug

SEQ ID NO: 616981 - RNA, 19 nt, Artificial Sequence
  Synthetic
aauuuuuaaaauuuuuuug

SEQ ID NO: 616982 - RNA, 20 nt, Artificial Sequence
  Synthetic
uaauuuuuaaaauuuuuuug

SEQ ID NO: 616983 - RNA, 21 nt, Artificial Sequence
  Synthetic
auaauuuuuaaaauuuuuuug

SEQ ID NO: 616984 - RNA, 22 nt, Artificial Sequence
  Synthetic
gauaauuuuuaaaauuuuuuug

SEQ ID NO: 616985 - RNA, 23 nt, Artificial Sequence
  Synthetic
agauaauuuuuaaaauuuuuuug

SEQ ID NO: 616986 - RNA, 24 nt, Artificial Sequence
  Synthetic
cagauaauuuuuaaaauuuuuuug

SEQ ID NO: 616987 - RNA, 18 nt, Artificial Sequence
  Synthetic
uuuuauuucauuuuuuug

SEQ ID NO: 616988 - RNA, 19 nt, Artificial Sequence
  Synthetic
uuuuuauuucauuuuuuug

SEQ ID NO: 616989 - RNA, 20 nt, Artificial Sequence
  Synthetic
cuuuuuauuucauuuuuuug

SEQ ID NO: 616990 - RNA, 21 nt, Artificial Sequence
  Synthetic
acuuuuuauuucauuuuuuug

SEQ ID NO: 616991 - RNA, 22 nt, Artificial Sequence
  Synthetic
aacuuuuuauuucauuuuuuug

SEQ ID NO: 616992 - RNA, 23 nt, Artificial Sequence
  Synthetic
uaacuuuuuauuucauuuuuuug

SEQ ID NO: 616993 - RNA, 24 nt, Artificial Sequence
  Synthetic
cuaacuuuuuauuucauuuuuuug

SEQ ID NO: 616994 - RNA, 18 nt, Artificial Sequence
  Synthetic
auuuuguuccuuuuuuug

SEQ ID NO: 616995 - RNA, 19 nt, Artificial Sequence
  Synthetic
uauuuuguuccuuuuuuug

SEQ ID NO: 616996 - RNA, 20 nt, Artificial Sequence
  Synthetic
uuauuuuguuccuuuuuuug

SEQ ID NO: 616997 - RNA, 21 nt, Artificial Sequence
  Synthetic
auuauuuuguuccuuuuuuug

SEQ ID NO: 616998 - RNA, 22 nt, Artificial Sequence
  Synthetic
cauuauuuuguuccuuuuuuug

SEQ ID NO: 616999 - RNA, 23 nt, Artificial Sequence
  Synthetic
ucauuauuuuguuccuuuuuuug

SEQ ID NO: 617000 - RNA, 24 nt, Artificial Sequence
  Synthetic
aucauuauuuuguuccuuuuuuug

SEQ ID NO: 617001 - RNA, 18 nt, Artificial Sequence
  Synthetic
uggaccuggguuuuuuug

SEQ ID NO: 617002 - RNA, 19 nt, Artificial Sequence
  Synthetic
cuggaccuggguuuuuuug

SEQ ID NO: 617003 - RNA, 20 nt, Artificial Sequence
  Synthetic
ccuggaccuggguuuuuuug

SEQ ID NO: 617004 - RNA, 21 nt, Artificial Sequence
  Synthetic
uccuggaccuggguuuuuuug

SEQ ID NO: 617005 - RNA, 22 nt, Artificial Sequence
  Synthetic
cuccuggaccuggguuuuuuug

SEQ ID NO: 617006 - RNA, 23 nt, Artificial Sequence
  Synthetic
ucuccuggaccuggguuuuuuug

SEQ ID NO: 617007 - RNA, 24 nt, Artificial Sequence
  Synthetic
uucuccuggaccuggguuuuuuug

SEQ ID NO: 617008 - RNA, 18 nt, Artificial Sequence
  Synthetic
ccaagauaauuuuuuuug

SEQ ID NO: 617009 - RNA, 19 nt, Artificial Sequence
  Synthetic
gccaagauaauuuuuuuug

SEQ ID NO: 617010 - RNA, 20 nt, Artificial Sequence
  Synthetic
ggccaagauaauuuuuuuug

SEQ ID NO: 617011 - RNA, 21 nt, Artificial Sequence
  Synthetic
uggccaagauaauuuuuuuug

SEQ ID NO: 617012 - RNA, 22 nt, Artificial Sequence
  Synthetic
cuggccaagauaauuuuuuuug

SEQ ID NO: 617013 - RNA, 23 nt, Artificial Sequence
  Synthetic
ccuggccaagauaauuuuuuuug

SEQ ID NO: 617014 - RNA, 24 nt, Artificial Sequence
  Synthetic
gccuggccaagauaauuuuuuuug

SEQ ID NO: 617015 - RNA, 18 nt, Artificial Sequence
  Synthetic
ggauuaaaguuuuuuuug

SEQ ID NO: 617016 - RNA, 19 nt, Artificial Sequence
  Synthetic
aggauuaaaguuuuuuuug

SEQ ID NO: 617017 - RNA, 20 nt, Artificial Sequence
  Synthetic
gaggauuaaaguuuuuuuug

SEQ ID NO: 617018 - RNA, 21 nt, Artificial Sequence
  Synthetic
ugaggauuaaaguuuuuuuug

SEQ ID NO: 617019 - RNA, 22 nt, Artificial Sequence
  Synthetic
gugaggauuaaaguuuuuuuug

SEQ ID NO: 617020 - RNA, 23 nt, Artificial Sequence
  Synthetic
ugugaggauuaaaguuuuuuuug

SEQ ID NO: 617021 - RNA, 24 nt, Artificial Sequence
  Synthetic
uugugaggauuaaaguuuuuuuug

SEQ ID NO: 617022 - RNA, 18 nt, Artificial Sequence
  Synthetic
aacacuaaguuuuuuuug

SEQ ID NO: 617023 - RNA, 19 nt, Artificial Sequence
  Synthetic
gaacacuaaguuuuuuuug

SEQ ID NO: 617024 - RNA, 20 nt, Artificial Sequence
  Synthetic
agaacacuaaguuuuuuuug

SEQ ID NO: 617025 - RNA, 21 nt, Artificial Sequence
  Synthetic
uagaacacuaaguuuuuuuug

SEQ ID NO: 617026 - RNA, 22 nt, Artificial Sequence
  Synthetic
auagaacacuaaguuuuuuuug

SEQ ID NO: 617027 - RNA, 23 nt, Artificial Sequence
  Synthetic
gauagaacacuaaguuuuuuuug

SEQ ID NO: 617028 - RNA, 24 nt, Artificial Sequence
  Synthetic
ugauagaacacuaaguuuuuuuug

SEQ ID NO: 617029 - RNA, 18 nt, Artificial Sequence
  Synthetic
cuuucuuuuuuuuuuuug

SEQ ID NO: 617030 - RNA, 19 nt, Artificial Sequence
  Synthetic
ucuuucuuuuuuuuuuuug

SEQ ID NO: 617031 - RNA, 20 nt, Artificial Sequence
  Synthetic
uucuuucuuuuuuuuuuuug

SEQ ID NO: 617032 - RNA, 21 nt, Artificial Sequence
  Synthetic
uuucuuucuuuuuuuuuuuug

SEQ ID NO: 617033 - RNA, 22 nt, Artificial Sequence
  Synthetic
uuuucuuucuuuuuuuuuuuug

SEQ ID NO: 617034 - RNA, 23 nt, Artificial Sequence
  Synthetic
uuuuucuuucuuuuuuuuuuuug

SEQ ID NO: 617035 - RNA, 24 nt, Artificial Sequence
  Synthetic
cuuuuucuuucuuuuuuuuuuuug

SEQ ID NO: 617036 - RNA, 18 nt, Artificial Sequence
  Synthetic
uuuuuuuuuuuuuuuuug

SEQ ID NO: 617037 - RNA, 19 nt, Artificial Sequence
  Synthetic
uuuuuuuuuuuuuuuuuug

SEQ ID NO: 617038 - RNA, 20 nt, Artificial Sequence
  Synthetic
cuuuuuuuuuuuuuuuuuug

SEQ ID NO: 617039 - RNA, 21 nt, Artificial Sequence
  Synthetic
ucuuuuuuuuuuuuuuuuuug

SEQ ID NO: 617040 - RNA, 22 nt, Artificial Sequence
  Synthetic
uucuuuuuuuuuuuuuuuuuug

SEQ ID NO: 617041 - RNA, 23 nt, Artificial Sequence
  Synthetic
guucuuuuuuuuuuuuuuuuuug

SEQ ID NO: 617042 - RNA, 24 nt, Artificial Sequence
  Synthetic
aguucuuuuuuuuuuuuuuuuuug

SEQ ID NO: 617043 - RNA, 18 nt, Artificial Sequence
  Synthetic
aaaaagaaaaaaaaaaau

SEQ ID NO: 617044 - RNA, 19 nt, Artificial Sequence
  Synthetic
aaaaaagaaaaaaaaaaau

SEQ ID NO: 617045 - RNA, 20 nt, Artificial Sequence
  Synthetic
caaaaaagaaaaaaaaaaau

SEQ ID NO: 617046 - RNA, 21 nt, Artificial Sequence
  Synthetic
ccaaaaaagaaaaaaaaaaau

SEQ ID NO: 617047 - RNA, 22 nt, Artificial Sequence
  Synthetic
uccaaaaaagaaaaaaaaaaau

SEQ ID NO: 617048 - RNA, 23 nt, Artificial Sequence
  Synthetic
cuccaaaaaagaaaaaaaaaaau

SEQ ID NO: 617049 - RNA, 24 nt, Artificial Sequence
  Synthetic
ucuccaaaaaagaaaaaaaaaaau

SEQ ID NO: 617050 - RNA, 18 nt, Artificial Sequence
  Synthetic
cccauggcaaaaaaaaau

SEQ ID NO: 617051 - RNA, 19 nt, Artificial Sequence
  Synthetic
ccccauggcaaaaaaaaau

SEQ ID NO: 617052 - RNA, 20 nt, Artificial Sequence
  Synthetic
uccccauggcaaaaaaaaau

SEQ ID NO: 617053 - RNA, 21 nt, Artificial Sequence
  Synthetic
uuccccauggcaaaaaaaaau

SEQ ID NO: 617054 - RNA, 22 nt, Artificial Sequence
  Synthetic
auuccccauggcaaaaaaaaau

SEQ ID NO: 617055 - RNA, 23 nt, Artificial Sequence
  Synthetic
aauuccccauggcaaaaaaaaau

SEQ ID NO: 617056 - RNA, 24 nt, Artificial Sequence
  Synthetic
aaauuccccauggcaaaaaaaaau

SEQ ID NO: 617057 - RNA, 18 nt, Artificial Sequence
  Synthetic
aaggaacagaaaaaaaau

SEQ ID NO: 617058 - RNA, 19 nt, Artificial Sequence
  Synthetic
aaaggaacagaaaaaaaau

SEQ ID NO: 617059 - RNA, 20 nt, Artificial Sequence
  Synthetic
uaaaggaacagaaaaaaaau

SEQ ID NO: 617060 - RNA, 21 nt, Artificial Sequence
  Synthetic
auaaaggaacagaaaaaaaau

SEQ ID NO: 617061 - RNA, 22 nt, Artificial Sequence
  Synthetic
uauaaaggaacagaaaaaaaau

SEQ ID NO: 617062 - RNA, 23 nt, Artificial Sequence
  Synthetic
uuauaaaggaacagaaaaaaaau

SEQ ID NO: 617063 - RNA, 24 nt, Artificial Sequence
  Synthetic
guuauaaaggaacagaaaaaaaau

SEQ ID NO: 617064 - RNA, 18 nt, Artificial Sequence
  Synthetic
gauuuugggaaaaaaaau

SEQ ID NO: 617065 - RNA, 19 nt, Artificial Sequence
  Synthetic
agauuuugggaaaaaaaau

SEQ ID NO: 617066 - RNA, 20 nt, Artificial Sequence
  Synthetic
aagauuuugggaaaaaaaau

SEQ ID NO: 617067 - RNA, 21 nt, Artificial Sequence
  Synthetic
uaagauuuugggaaaaaaaau

SEQ ID NO: 617068 - RNA, 22 nt, Artificial Sequence
  Synthetic
guaagauuuugggaaaaaaaau

SEQ ID NO: 617069 - RNA, 23 nt, Artificial Sequence
  Synthetic
uguaagauuuugggaaaaaaaau

SEQ ID NO: 617070 - RNA, 24 nt, Artificial Sequence
  Synthetic
guguaagauuuugggaaaaaaaau

SEQ ID NO: 617071 - RNA, 18 nt, Artificial Sequence
  Synthetic
uucauggaagaaaaaaau

SEQ ID NO: 617072 - RNA, 19 nt, Artificial Sequence
  Synthetic
guucauggaagaaaaaaau

SEQ ID NO: 617073 - RNA, 20 nt, Artificial Sequence
  Synthetic
gguucauggaagaaaaaaau

SEQ ID NO: 617074 - RNA, 21 nt, Artificial Sequence
  Synthetic
ggguucauggaagaaaaaaau

SEQ ID NO: 617075 - RNA, 22 nt, Artificial Sequence
  Synthetic
gggguucauggaagaaaaaaau

SEQ ID NO: 617076 - RNA, 23 nt, Artificial Sequence
  Synthetic
agggguucauggaagaaaaaaau

SEQ ID NO: 617077 - RNA, 24 nt, Artificial Sequence
  Synthetic
uagggguucauggaagaaaaaaau

SEQ ID NO: 617078 - RNA, 18 nt, Artificial Sequence
  Synthetic
ugacgcagagaaaaaaau

SEQ ID NO: 617079 - RNA, 19 nt, Artificial Sequence
  Synthetic
cugacgcagagaaaaaaau

SEQ ID NO: 617080 - RNA, 20 nt, Artificial Sequence
  Synthetic
gcugacgcagagaaaaaaau

SEQ ID NO: 617081 - RNA, 21 nt, Artificial Sequence
  Synthetic
agcugacgcagagaaaaaaau

SEQ ID NO: 617082 - RNA, 22 nt, Artificial Sequence
  Synthetic
aagcugacgcagagaaaaaaau

SEQ ID NO: 617083 - RNA, 23 nt, Artificial Sequence
  Synthetic
aaagcugacgcagagaaaaaaau

SEQ ID NO: 617084 - RNA, 24 nt, Artificial Sequence
  Synthetic
caaagcugacgcagagaaaaaaau

SEQ ID NO: 617085 - RNA, 18 nt, Artificial Sequence
  Synthetic
guuaaacaugaaaaaaau

SEQ ID NO: 617086 - RNA, 19 nt, Artificial Sequence
  Synthetic
uguuaaacaugaaaaaaau

SEQ ID NO: 617087 - RNA, 20 nt, Artificial Sequence
  Synthetic
cuguuaaacaugaaaaaaau

SEQ ID NO: 617088 - RNA, 21 nt, Artificial Sequence
  Synthetic
gcuguuaaacaugaaaaaaau

SEQ ID NO: 617089 - RNA, 22 nt, Artificial Sequence
  Synthetic
ugcuguuaaacaugaaaaaaau

SEQ ID NO: 617090 - RNA, 23 nt, Artificial Sequence
  Synthetic
augcuguuaaacaugaaaaaaau

SEQ ID NO: 617091 - RNA, 24 nt, Artificial Sequence
  Synthetic
gaugcuguuaaacaugaaaaaaau

SEQ ID NO: 617092 - RNA, 18 nt, Artificial Sequence
  Synthetic
aauaucggugaaaaaaau

SEQ ID NO: 617093 - RNA, 19 nt, Artificial Sequence
  Synthetic
caauaucggugaaaaaaau

SEQ ID NO: 617094 - RNA, 20 nt, Artificial Sequence
  Synthetic
ucaauaucggugaaaaaaau

SEQ ID NO: 617095 - RNA, 21 nt, Artificial Sequence
  Synthetic
uucaauaucggugaaaaaaau

SEQ ID NO: 617096 - RNA, 22 nt, Artificial Sequence
  Synthetic
uuucaauaucggugaaaaaaau

SEQ ID NO: 617097 - RNA, 23 nt, Artificial Sequence
  Synthetic
auuucaauaucggugaaaaaaau

SEQ ID NO: 617098 - RNA, 24 nt, Artificial Sequence
  Synthetic
aauuucaauaucggugaaaaaaau

SEQ ID NO: 617099 - RNA, 18 nt, Artificial Sequence
  Synthetic
uggaaacaauaaaaaaau

SEQ ID NO: 617100 - RNA, 19 nt, Artificial Sequence
  Synthetic
cuggaaacaauaaaaaaau

SEQ ID NO: 617101 - RNA, 20 nt, Artificial Sequence
  Synthetic
ucuggaaacaauaaaaaaau

SEQ ID NO: 617102 - RNA, 21 nt, Artificial Sequence
  Synthetic
cucuggaaacaauaaaaaaau

SEQ ID NO: 617103 - RNA, 22 nt, Artificial Sequence
  Synthetic
ucucuggaaacaauaaaaaaau

SEQ ID NO: 617104 - RNA, 23 nt, Artificial Sequence
  Synthetic
uucucuggaaacaauaaaaaaau

SEQ ID NO: 617105 - RNA, 24 nt, Artificial Sequence
  Synthetic
uuucucuggaaacaauaaaaaaau

SEQ ID NO: 617106 - RNA, 18 nt, Artificial Sequence
  Synthetic
ccaaagcaguaaaaaaau

SEQ ID NO: 617107 - RNA, 19 nt, Artificial Sequence
  Synthetic
accaaagcaguaaaaaaau

SEQ ID NO: 617108 - RNA, 20 nt, Artificial Sequence
  Synthetic
aaccaaagcaguaaaaaaau

SEQ ID NO: 617109 - RNA, 21 nt, Artificial Sequence
  Synthetic
uaaccaaagcaguaaaaaaau

SEQ ID NO: 617110 - RNA, 22 nt, Artificial Sequence
  Synthetic
uuaaccaaagcaguaaaaaaau

SEQ ID NO: 617111 - RNA, 23 nt, Artificial Sequence
  Synthetic
auuaaccaaagcaguaaaaaaau

SEQ ID NO: 617112 - RNA, 24 nt, Artificial Sequence
  Synthetic
cauuaaccaaagcaguaaaaaaau

SEQ ID NO: 617113 - RNA, 18 nt, Artificial Sequence
  Synthetic
auuuacauuucaaaaaau

SEQ ID NO: 617114 - RNA, 19 nt, Artificial Sequence
  Synthetic
uauuuacauuucaaaaaau

SEQ ID NO: 617115 - RNA, 20 nt, Artificial Sequence
  Synthetic
guauuuacauuucaaaaaau

SEQ ID NO: 617116 - RNA, 21 nt, Artificial Sequence
  Synthetic
gguauuuacauuucaaaaaau

SEQ ID NO: 617117 - RNA, 22 nt, Artificial Sequence
  Synthetic
agguauuuacauuucaaaaaau

SEQ ID NO: 617118 - RNA, 23 nt, Artificial Sequence
  Synthetic
uagguauuuacauuucaaaaaau

SEQ ID NO: 617119 - RNA, 24 nt, Artificial Sequence
  Synthetic
cuagguauuuacauuucaaaaaau

SEQ ID NO: 617120 - RNA, 18 nt, Artificial Sequence
  Synthetic
acugacuuuagaaaaaau

SEQ ID NO: 617121 - RNA, 19 nt, Artificial Sequence
  Synthetic
cacugacuuuagaaaaaau

SEQ ID NO: 617122 - RNA, 20 nt, Artificial Sequence
  Synthetic
acacugacuuuagaaaaaau

SEQ ID NO: 617123 - RNA, 21 nt, Artificial Sequence
  Synthetic
uacacugacuuuagaaaaaau

SEQ ID NO: 617124 - RNA, 22 nt, Artificial Sequence
  Synthetic
auacacugacuuuagaaaaaau

SEQ ID NO: 617125 - RNA, 23 nt, Artificial Sequence
  Synthetic
aauacacugacuuuagaaaaaau

SEQ ID NO: 617126 - RNA, 24 nt, Artificial Sequence
  Synthetic
aaauacacugacuuuagaaaaaau

SEQ ID NO: 617127 - RNA, 18 nt, Artificial Sequence
  Synthetic
cacauuuagggaaaaaau

SEQ ID NO: 617128 - RNA, 19 nt, Artificial Sequence
  Synthetic
ucacauuuagggaaaaaau

SEQ ID NO: 617129 - RNA, 20 nt, Artificial Sequence
  Synthetic
uucacauuuagggaaaaaau

SEQ ID NO: 617130 - RNA, 21 nt, Artificial Sequence
  Synthetic
uuucacauuuagggaaaaaau

SEQ ID NO: 617131 - RNA, 22 nt, Artificial Sequence
  Synthetic
cuuucacauuuagggaaaaaau

SEQ ID NO: 617132 - RNA, 23 nt, Artificial Sequence
  Synthetic
ucuuucacauuuagggaaaaaau

SEQ ID NO: 617133 - RNA, 24 nt, Artificial Sequence
  Synthetic
uucuuucacauuuagggaaaaaau

SEQ ID NO: 617134 - RNA, 18 nt, Artificial Sequence
  Synthetic
uccaaaaucugaaaaaau

SEQ ID NO: 617135 - RNA, 19 nt, Artificial Sequence
  Synthetic
auccaaaaucugaaaaaau

SEQ ID NO: 617136 - RNA, 20 nt, Artificial Sequence
  Synthetic
aauccaaaaucugaaaaaau

SEQ ID NO: 617137 - RNA, 21 nt, Artificial Sequence
  Synthetic
uaauccaaaaucugaaaaaau

SEQ ID NO: 617138 - RNA, 22 nt, Artificial Sequence
  Synthetic
guaauccaaaaucugaaaaaau

SEQ ID NO: 617139 - RNA, 23 nt, Artificial Sequence
  Synthetic
aguaauccaaaaucugaaaaaau

SEQ ID NO: 617140 - RNA, 24 nt, Artificial Sequence
  Synthetic
aaguaauccaaaaucugaaaaaau

SEQ ID NO: 617141 - RNA, 18 nt, Artificial Sequence
  Synthetic
cauuaauagugaaaaaau

SEQ ID NO: 617142 - RNA, 19 nt, Artificial Sequence
  Synthetic
acauuaauagugaaaaaau

SEQ ID NO: 617143 - RNA, 20 nt, Artificial Sequence
  Synthetic
gacauuaauagugaaaaaau

SEQ ID NO: 617144 - RNA, 21 nt, Artificial Sequence
  Synthetic
ugacauuaauagugaaaaaau

SEQ ID NO: 617145 - RNA, 22 nt, Artificial Sequence
  Synthetic
cugacauuaauagugaaaaaau

SEQ ID NO: 617146 - RNA, 23 nt, Artificial Sequence
  Synthetic
acugacauuaauagugaaaaaau

SEQ ID NO: 617147 - RNA, 24 nt, Artificial Sequence
  Synthetic
aacugacauuaauagugaaaaaau

SEQ ID NO: 617148 - RNA, 18 nt, Artificial Sequence
  Synthetic
cauaaaacuugaaaaaau

SEQ ID NO: 617149 - RNA, 19 nt, Artificial Sequence
  Synthetic
ucauaaaacuugaaaaaau

SEQ ID NO: 617150 - RNA, 20 nt, Artificial Sequence
  Synthetic
uucauaaaacuugaaaaaau

SEQ ID NO: 617151 - RNA, 21 nt, Artificial Sequence
  Synthetic
guucauaaaacuugaaaaaau

SEQ ID NO: 617152 - RNA, 22 nt, Artificial Sequence
  Synthetic
uguucauaaaacuugaaaaaau

SEQ ID NO: 617153 - RNA, 23 nt, Artificial Sequence
  Synthetic
guguucauaaaacuugaaaaaau

SEQ ID NO: 617154 - RNA, 24 nt, Artificial Sequence
  Synthetic
uguguucauaaaacuugaaaaaau

SEQ ID NO: 617155 - RNA, 18 nt, Artificial Sequence
  Synthetic
uauuuaauuguaaaaaau

SEQ ID NO: 617156 - RNA, 19 nt, Artificial Sequence
  Synthetic
auauuuaauuguaaaaaau

SEQ ID NO: 617157 - RNA, 20 nt, Artificial Sequence
  Synthetic
uauauuuaauuguaaaaaau

SEQ ID NO: 617158 - RNA, 21 nt, Artificial Sequence
  Synthetic
guauauuuaauuguaaaaaau

SEQ ID NO: 617159 - RNA, 22 nt, Artificial Sequence
  Synthetic
uguauauuuaauuguaaaaaau

SEQ ID NO: 617160 - RNA, 23 nt, Artificial Sequence
  Synthetic
cuguauauuuaauuguaaaaaau

SEQ ID NO: 617161 - RNA, 24 nt, Artificial Sequence
  Synthetic
gcuguauauuuaauuguaaaaaau

SEQ ID NO: 617162 - RNA, 18 nt, Artificial Sequence
  Synthetic
aacaacaacaacaaaaau

SEQ ID NO: 617163 - RNA, 19 nt, Artificial Sequence
  Synthetic
uaacaacaacaacaaaaau

SEQ ID NO: 617164 - RNA, 20 nt, Artificial Sequence
  Synthetic
auaacaacaacaacaaaaau

SEQ ID NO: 617165 - RNA, 21 nt, Artificial Sequence
  Synthetic
aauaacaacaacaacaaaaau

SEQ ID NO: 617166 - RNA, 22 nt, Artificial Sequence
  Synthetic
uaauaacaacaacaacaaaaau

SEQ ID NO: 617167 - RNA, 23 nt, Artificial Sequence
  Synthetic
guaauaacaacaacaacaaaaau

SEQ ID NO: 617168 - RNA, 24 nt, Artificial Sequence
  Synthetic
cguaauaacaacaacaacaaaaau

SEQ ID NO: 617169 - RNA, 18 nt, Artificial Sequence
  Synthetic
aaagacuggaacaaaaau

SEQ ID NO: 617170 - RNA, 19 nt, Artificial Sequence
  Synthetic
gaaagacuggaacaaaaau

SEQ ID NO: 617171 - RNA, 20 nt, Artificial Sequence
  Synthetic
ugaaagacuggaacaaaaau

SEQ ID NO: 617172 - RNA, 21 nt, Artificial Sequence
  Synthetic
augaaagacuggaacaaaaau

SEQ ID NO: 617173 - RNA, 22 nt, Artificial Sequence
  Synthetic
aaugaaagacuggaacaaaaau

SEQ ID NO: 617174 - RNA, 23 nt, Artificial Sequence
  Synthetic
aaaugaaagacuggaacaaaaau

SEQ ID NO: 617175 - RNA, 24 nt, Artificial Sequence
  Synthetic
aaaaugaaagacuggaacaaaaau

SEQ ID NO: 617176 - RNA, 18 nt, Artificial Sequence
  Synthetic
uauucucaccacaaaaau

SEQ ID NO: 617177 - RNA, 19 nt, Artificial Sequence
  Synthetic
auauucucaccacaaaaau

SEQ ID NO: 617178 - RNA, 20 nt, Artificial Sequence
  Synthetic
aauauucucaccacaaaaau

SEQ ID NO: 617179 - RNA, 21 nt, Artificial Sequence
  Synthetic
aaauauucucaccacaaaaau

SEQ ID NO: 617180 - RNA, 22 nt, Artificial Sequence
  Synthetic
uaaauauucucaccacaaaaau

SEQ ID NO: 617181 - RNA, 23 nt, Artificial Sequence
  Synthetic
uuaaauauucucaccacaaaaau

SEQ ID NO: 617182 - RNA, 24 nt, Artificial Sequence
  Synthetic
uuuaaauauucucaccacaaaaau

SEQ ID NO: 617183 - RNA, 18 nt, Artificial Sequence
  Synthetic
ugugucauucacaaaaau

SEQ ID NO: 617184 - RNA, 19 nt, Artificial Sequence
  Synthetic
uugugucauucacaaaaau

SEQ ID NO: 617185 - RNA, 20 nt, Artificial Sequence
  Synthetic
auugugucauucacaaaaau

SEQ ID NO: 617186 - RNA, 21 nt, Artificial Sequence
  Synthetic
gauugugucauucacaaaaau

SEQ ID NO: 617187 - RNA, 22 nt, Artificial Sequence
  Synthetic
agauugugucauucacaaaaau

SEQ ID NO: 617188 - RNA, 23 nt, Artificial Sequence
  Synthetic
uagauugugucauucacaaaaau

SEQ ID NO: 617189 - RNA, 24 nt, Artificial Sequence
  Synthetic
uuagauugugucauucacaaaaau

SEQ ID NO: 617190 - RNA, 18 nt, Artificial Sequence
  Synthetic
cuuaacaaagacaaaaau

SEQ ID NO: 617191 - RNA, 19 nt, Artificial Sequence
  Synthetic
acuuaacaaagacaaaaau

SEQ ID NO: 617192 - RNA, 20 nt, Artificial Sequence
  Synthetic
gacuuaacaaagacaaaaau

SEQ ID NO: 617193 - RNA, 21 nt, Artificial Sequence
  Synthetic
agacuuaacaaagacaaaaau

SEQ ID NO: 617194 - RNA, 22 nt, Artificial Sequence
  Synthetic
gagacuuaacaaagacaaaaau

SEQ ID NO: 617195 - RNA, 23 nt, Artificial Sequence
  Synthetic
agagacuuaacaaagacaaaaau

SEQ ID NO: 617196 - RNA, 24 nt, Artificial Sequence
  Synthetic
aagagacuuaacaaagacaaaaau

SEQ ID NO: 617197 - RNA, 18 nt, Artificial Sequence
  Synthetic
ucuucugcuaccaaaaau

SEQ ID NO: 617198 - RNA, 19 nt, Artificial Sequence
  Synthetic
gucuucugcuaccaaaaau

SEQ ID NO: 617199 - RNA, 20 nt, Artificial Sequence
  Synthetic
ugucuucugcuaccaaaaau

SEQ ID NO: 617200 - RNA, 21 nt, Artificial Sequence
  Synthetic
gugucuucugcuaccaaaaau

SEQ ID NO: 617201 - RNA, 22 nt, Artificial Sequence
  Synthetic
agugucuucugcuaccaaaaau

SEQ ID NO: 617202 - RNA, 23 nt, Artificial Sequence
  Synthetic
aagugucuucugcuaccaaaaau

SEQ ID NO: 617203 - RNA, 24 nt, Artificial Sequence
  Synthetic
uaagugucuucugcuaccaaaaau

SEQ ID NO: 617204 - RNA, 18 nt, Artificial Sequence
  Synthetic
auaaagaaacccaaaaau

SEQ ID NO: 617205 - RNA, 19 nt, Artificial Sequence
  Synthetic
uauaaagaaacccaaaaau

SEQ ID NO: 617206 - RNA, 20 nt, Artificial Sequence
  Synthetic
cuauaaagaaacccaaaaau

SEQ ID NO: 617207 - RNA, 21 nt, Artificial Sequence
  Synthetic
gcuauaaagaaacccaaaaau

SEQ ID NO: 617208 - RNA, 22 nt, Artificial Sequence
  Synthetic
ugcuauaaagaaacccaaaaau

SEQ ID NO: 617209 - RNA, 23 nt, Artificial Sequence
  Synthetic
cugcuauaaagaaacccaaaaau

SEQ ID NO: 617210 - RNA, 24 nt, Artificial Sequence
  Synthetic
acugcuauaaagaaacccaaaaau

SEQ ID NO: 617211 - RNA, 18 nt, Artificial Sequence
  Synthetic
aagaagaaaaagaaaaau

SEQ ID NO: 617212 - RNA, 19 nt, Artificial Sequence
  Synthetic
aaagaagaaaaagaaaaau

SEQ ID NO: 617213 - RNA, 20 nt, Artificial Sequence
  Synthetic
aaaagaagaaaaagaaaaau

SEQ ID NO: 617214 - RNA, 21 nt, Artificial Sequence
  Synthetic
aaaaagaagaaaaagaaaaau

SEQ ID NO: 617215 - RNA, 22 nt, Artificial Sequence
  Synthetic
aaaaaagaagaaaaagaaaaau

SEQ ID NO: 617216 - RNA, 23 nt, Artificial Sequence
  Synthetic
gaaaaaagaagaaaaagaaaaau

SEQ ID NO: 617217 - RNA, 24 nt, Artificial Sequence
  Synthetic
ggaaaaaagaagaaaaagaaaaau

SEQ ID NO: 617218 - RNA, 18 nt, Artificial Sequence
  Synthetic
agcauaagaaagaaaaau

SEQ ID NO: 617219 - RNA, 19 nt, Artificial Sequence
  Synthetic
aagcauaagaaagaaaaau

SEQ ID NO: 617220 - RNA, 20 nt, Artificial Sequence
  Synthetic
aaagcauaagaaagaaaaau

SEQ ID NO: 617221 - RNA, 21 nt, Artificial Sequence
  Synthetic
uaaagcauaagaaagaaaaau

SEQ ID NO: 617222 - RNA, 22 nt, Artificial Sequence
  Synthetic
auaaagcauaagaaagaaaaau

SEQ ID NO: 617223 - RNA, 23 nt, Artificial Sequence
  Synthetic
gauaaagcauaagaaagaaaaau

SEQ ID NO: 617224 - RNA, 24 nt, Artificial Sequence
  Synthetic
ugauaaagcauaagaaagaaaaau

SEQ ID NO: 617225 - RNA, 18 nt, Artificial Sequence
  Synthetic
auucaaauuaagaaaaau

SEQ ID NO: 617226 - RNA, 19 nt, Artificial Sequence
  Synthetic
aauucaaauuaagaaaaau

SEQ ID NO: 617227 - RNA, 20 nt, Artificial Sequence
  Synthetic
uaauucaaauuaagaaaaau

SEQ ID NO: 617228 - RNA, 21 nt, Artificial Sequence
  Synthetic
auaauucaaauuaagaaaaau

SEQ ID NO: 617229 - RNA, 22 nt, Artificial Sequence
  Synthetic
aauaauucaaauuaagaaaaau

SEQ ID NO: 617230 - RNA, 23 nt, Artificial Sequence
  Synthetic
aaauaauucaaauuaagaaaaau

SEQ ID NO: 617231 - RNA, 24 nt, Artificial Sequence
  Synthetic
gaaauaauucaaauuaagaaaaau

SEQ ID NO: 617232 - RNA, 18 nt, Artificial Sequence
  Synthetic
uuuuacuuucagaaaaau

SEQ ID NO: 617233 - RNA, 19 nt, Artificial Sequence
  Synthetic
uuuuuacuuucagaaaaau

SEQ ID NO: 617234 - RNA, 20 nt, Artificial Sequence
  Synthetic
guuuuuacuuucagaaaaau

SEQ ID NO: 617235 - RNA, 21 nt, Artificial Sequence
  Synthetic
uguuuuuacuuucagaaaaau

SEQ ID NO: 617236 - RNA, 22 nt, Artificial Sequence
  Synthetic
uuguuuuuacuuucagaaaaau

SEQ ID NO: 617237 - RNA, 23 nt, Artificial Sequence
  Synthetic
uuuguuuuuacuuucagaaaaau

SEQ ID NO: 617238 - RNA, 24 nt, Artificial Sequence
  Synthetic
auuuguuuuuacuuucagaaaaau

SEQ ID NO: 617239 - RNA, 18 nt, Artificial Sequence
  Synthetic
auuuuuuaagagaaaaau

SEQ ID NO: 617240 - RNA, 19 nt, Artificial Sequence
  Synthetic
aauuuuuuaagagaaaaau

SEQ ID NO: 617241 - RNA, 20 nt, Artificial Sequence
  Synthetic
aaauuuuuuaagagaaaaau

SEQ ID NO: 617242 - RNA, 21 nt, Artificial Sequence
  Synthetic
uaaauuuuuuaagagaaaaau

SEQ ID NO: 617243 - RNA, 22 nt, Artificial Sequence
  Synthetic
auaaauuuuuuaagagaaaaau

SEQ ID NO: 617244 - RNA, 23 nt, Artificial Sequence
  Synthetic
cauaaauuuuuuaagagaaaaau

SEQ ID NO: 617245 - RNA, 24 nt, Artificial Sequence
  Synthetic
ucauaaauuuuuuaagagaaaaau

SEQ ID NO: 617246 - RNA, 18 nt, Artificial Sequence
  Synthetic
gauagaaaguagaaaaau

SEQ ID NO: 617247 - RNA, 19 nt, Artificial Sequence
  Synthetic
agauagaaaguagaaaaau

SEQ ID NO: 617248 - RNA, 20 nt, Artificial Sequence
  Synthetic
uagauagaaaguagaaaaau

SEQ ID NO: 617249 - RNA, 21 nt, Artificial Sequence
  Synthetic
uuagauagaaaguagaaaaau

SEQ ID NO: 617250 - RNA, 22 nt, Artificial Sequence
  Synthetic
cuuagauagaaaguagaaaaau

SEQ ID NO: 617251 - RNA, 23 nt, Artificial Sequence
  Synthetic
ccuuagauagaaaguagaaaaau

SEQ ID NO: 617252 - RNA, 24 nt, Artificial Sequence
  Synthetic
cccuuagauagaaaguagaaaaau

SEQ ID NO: 617253 - RNA, 18 nt, Artificial Sequence
  Synthetic
guggguggauggaaaaau

SEQ ID NO: 617254 - RNA, 19 nt, Artificial Sequence
  Synthetic
gguggguggauggaaaaau

SEQ ID NO: 617255 - RNA, 20 nt, Artificial Sequence
  Synthetic
ugguggguggauggaaaaau

SEQ ID NO: 617256 - RNA, 21 nt, Artificial Sequence
  Synthetic
gugguggguggauggaaaaau

SEQ ID NO: 617257 - RNA, 22 nt, Artificial Sequence
  Synthetic
agugguggguggauggaaaaau

SEQ ID NO: 617258 - RNA, 23 nt, Artificial Sequence
  Synthetic
cagugguggguggauggaaaaau

SEQ ID NO: 617259 - RNA, 24 nt, Artificial Sequence
  Synthetic
gcagugguggguggauggaaaaau

SEQ ID NO: 617260 - RNA, 18 nt, Artificial Sequence
  Synthetic
auugcugaguggaaaaau

SEQ ID NO: 617261 - RNA, 19 nt, Artificial Sequence
  Synthetic
aauugcugaguggaaaaau

SEQ ID NO: 617262 - RNA, 20 nt, Artificial Sequence
  Synthetic
aaauugcugaguggaaaaau

SEQ ID NO: 617263 - RNA, 21 nt, Artificial Sequence
  Synthetic
uaaauugcugaguggaaaaau

SEQ ID NO: 617264 - RNA, 22 nt, Artificial Sequence
  Synthetic
uuaaauugcugaguggaaaaau

SEQ ID NO: 617265 - RNA, 23 nt, Artificial Sequence
  Synthetic
cuuaaauugcugaguggaaaaau

SEQ ID NO: 617266 - RNA, 24 nt, Artificial Sequence
  Synthetic
gcuuaaauugcugaguggaaaaau

SEQ ID NO: 617267 - RNA, 18 nt, Artificial Sequence
  Synthetic
uuauuuaaauugaaaaau

SEQ ID NO: 617268 - RNA, 19 nt, Artificial Sequence
  Synthetic
cuuauuuaaauugaaaaau

SEQ ID NO: 617269 - RNA, 20 nt, Artificial Sequence
  Synthetic
ucuuauuuaaauugaaaaau

SEQ ID NO: 617270 - RNA, 21 nt, Artificial Sequence
  Synthetic
cucuuauuuaaauugaaaaau

SEQ ID NO: 617271 - RNA, 22 nt, Artificial Sequence
  Synthetic
ucucuuauuuaaauugaaaaau

SEQ ID NO: 617272 - RNA, 23 nt, Artificial Sequence
  Synthetic
cucucuuauuuaaauugaaaaau

SEQ ID NO: 617273 - RNA, 24 nt, Artificial Sequence
  Synthetic
ucucucuuauuuaaauugaaaaau

SEQ ID NO: 617274 - RNA, 18 nt, Artificial Sequence
  Synthetic
cucucuguauugaaaaau

SEQ ID NO: 617275 - RNA, 19 nt, Artificial Sequence
  Synthetic
ccucucuguauugaaaaau

SEQ ID NO: 617276 - RNA, 20 nt, Artificial Sequence
  Synthetic
uccucucuguauugaaaaau

SEQ ID NO: 617277 - RNA, 21 nt, Artificial Sequence
  Synthetic
cuccucucuguauugaaaaau

SEQ ID NO: 617278 - RNA, 22 nt, Artificial Sequence
  Synthetic
ucuccucucuguauugaaaaau

SEQ ID NO: 617279 - RNA, 23 nt, Artificial Sequence
  Synthetic
uucuccucucuguauugaaaaau

SEQ ID NO: 617280 - RNA, 24 nt, Artificial Sequence
  Synthetic
uuucuccucucuguauugaaaaau

SEQ ID NO: 617281 - RNA, 18 nt, Artificial Sequence
  Synthetic
cacauuguauugaaaaau

SEQ ID NO: 617282 - RNA, 19 nt, Artificial Sequence
  Synthetic
acacauuguauugaaaaau

SEQ ID NO: 617283 - RNA, 20 nt, Artificial Sequence
  Synthetic
aacacauuguauugaaaaau

SEQ ID NO: 617284 - RNA, 21 nt, Artificial Sequence
  Synthetic
caacacauuguauugaaaaau

SEQ ID NO: 617285 - RNA, 22 nt, Artificial Sequence
  Synthetic
acaacacauuguauugaaaaau

SEQ ID NO: 617286 - RNA, 23 nt, Artificial Sequence
  Synthetic
uacaacacauuguauugaaaaau

SEQ ID NO: 617287 - RNA, 24 nt, Artificial Sequence
  Synthetic
auacaacacauuguauugaaaaau

SEQ ID NO: 617288 - RNA, 18 nt, Artificial Sequence
  Synthetic
guaaaugauuugaaaaau

SEQ ID NO: 617289 - RNA, 19 nt, Artificial Sequence
  Synthetic
aguaaaugauuugaaaaau

SEQ ID NO: 617290 - RNA, 20 nt, Artificial Sequence
  Synthetic
uaguaaaugauuugaaaaau

SEQ ID NO: 617291 - RNA, 21 nt, Artificial Sequence
  Synthetic
auaguaaaugauuugaaaaau

SEQ ID NO: 617292 - RNA, 22 nt, Artificial Sequence
  Synthetic
uauaguaaaugauuugaaaaau

SEQ ID NO: 617293 - RNA, 23 nt, Artificial Sequence
  Synthetic
uuauaguaaaugauuugaaaaau

SEQ ID NO: 617294 - RNA, 24 nt, Artificial Sequence
  Synthetic
guuauaguaaaugauuugaaaaau

SEQ ID NO: 617295 - RNA, 18 nt, Artificial Sequence
  Synthetic
aaacccagaaauaaaaau

SEQ ID NO: 617296 - RNA, 19 nt, Artificial Sequence
  Synthetic
caaacccagaaauaaaaau

SEQ ID NO: 617297 - RNA, 20 nt, Artificial Sequence
  Synthetic
gcaaacccagaaauaaaaau

SEQ ID NO: 617298 - RNA, 21 nt, Artificial Sequence
  Synthetic
agcaaacccagaaauaaaaau

SEQ ID NO: 617299 - RNA, 22 nt, Artificial Sequence
  Synthetic
uagcaaacccagaaauaaaaau

SEQ ID NO: 617300 - RNA, 23 nt, Artificial Sequence
  Synthetic
guagcaaacccagaaauaaaaau

SEQ ID NO: 617301 - RNA, 24 nt, Artificial Sequence
  Synthetic
aguagcaaacccagaaauaaaaau

SEQ ID NO: 617302 - RNA, 18 nt, Artificial Sequence
  Synthetic
guguauccuaauaaaaau

SEQ ID NO: 617303 - RNA, 19 nt, Artificial Sequence
  Synthetic
gguguauccuaauaaaaau

SEQ ID NO: 617304 - RNA, 20 nt, Artificial Sequence
  Synthetic
agguguauccuaauaaaaau

SEQ ID NO: 617305 - RNA, 21 nt, Artificial Sequence
  Synthetic
uagguguauccuaauaaaaau

SEQ ID NO: 617306 - RNA, 22 nt, Artificial Sequence
  Synthetic
uuagguguauccuaauaaaaau

SEQ ID NO: 617307 - RNA, 23 nt, Artificial Sequence
  Synthetic
guuagguguauccuaauaaaaau

SEQ ID NO: 617308 - RNA, 24 nt, Artificial Sequence
  Synthetic
uguuagguguauccuaauaaaaau

SEQ ID NO: 617309 - RNA, 18 nt, Artificial Sequence
  Synthetic
augaaggcccauaaaaau

SEQ ID NO: 617310 - RNA, 19 nt, Artificial Sequence
  Synthetic
caugaaggcccauaaaaau

SEQ ID NO: 617311 - RNA, 20 nt, Artificial Sequence
  Synthetic
ucaugaaggcccauaaaaau

SEQ ID NO: 617312 - RNA, 21 nt, Artificial Sequence
  Synthetic
aucaugaaggcccauaaaaau

SEQ ID NO: 617313 - RNA, 22 nt, Artificial Sequence
  Synthetic
uaucaugaaggcccauaaaaau

SEQ ID NO: 617314 - RNA, 23 nt, Artificial Sequence
  Synthetic
guaucaugaaggcccauaaaaau

SEQ ID NO: 617315 - RNA, 24 nt, Artificial Sequence
  Synthetic
aguaucaugaaggcccauaaaaau

SEQ ID NO: 617316 - RNA, 18 nt, Artificial Sequence
  Synthetic
aaaagucuucauaaaaau

SEQ ID NO: 617317 - RNA, 19 nt, Artificial Sequence
  Synthetic
aaaaagucuucauaaaaau

SEQ ID NO: 617318 - RNA, 20 nt, Artificial Sequence
  Synthetic
caaaaagucuucauaaaaau

SEQ ID NO: 617319 - RNA, 21 nt, Artificial Sequence
  Synthetic
gcaaaaagucuucauaaaaau

SEQ ID NO: 617320 - RNA, 22 nt, Artificial Sequence
  Synthetic
ggcaaaaagucuucauaaaaau

SEQ ID NO: 617321 - RNA, 23 nt, Artificial Sequence
  Synthetic
cggcaaaaagucuucauaaaaau

SEQ ID NO: 617322 - RNA, 24 nt, Artificial Sequence
  Synthetic
ucggcaaaaagucuucauaaaaau

SEQ ID NO: 617323 - RNA, 18 nt, Artificial Sequence
  Synthetic
ccacauggugauaaaaau

SEQ ID NO: 617324 - RNA, 19 nt, Artificial Sequence
  Synthetic
accacauggugauaaaaau

SEQ ID NO: 617325 - RNA, 20 nt, Artificial Sequence
  Synthetic
aaccacauggugauaaaaau

SEQ ID NO: 617326 - RNA, 21 nt, Artificial Sequence
  Synthetic
caaccacauggugauaaaaau

SEQ ID NO: 617327 - RNA, 22 nt, Artificial Sequence
  Synthetic
ccaaccacauggugauaaaaau

SEQ ID NO: 617328 - RNA, 23 nt, Artificial Sequence
  Synthetic
uccaaccacauggugauaaaaau

SEQ ID NO: 617329 - RNA, 24 nt, Artificial Sequence
  Synthetic
auccaaccacauggugauaaaaau

SEQ ID NO: 617330 - RNA, 18 nt, Artificial Sequence
  Synthetic
aaauagauauauaaaaau

SEQ ID NO: 617331 - RNA, 19 nt, Artificial Sequence
  Synthetic
aaaauagauauauaaaaau

SEQ ID NO: 617332 - RNA, 20 nt, Artificial Sequence
  Synthetic
gaaaauagauauauaaaaau

SEQ ID NO: 617333 - RNA, 21 nt, Artificial Sequence
  Synthetic
agaaaauagauauauaaaaau

SEQ ID NO: 617334 - RNA, 22 nt, Artificial Sequence
  Synthetic
gagaaaauagauauauaaaaau

SEQ ID NO: 617335 - RNA, 23 nt, Artificial Sequence
  Synthetic
ugagaaaauagauauauaaaaau

SEQ ID NO: 617336 - RNA, 24 nt, Artificial Sequence
  Synthetic
gugagaaaauagauauauaaaaau

SEQ ID NO: 617337 - RNA, 18 nt, Artificial Sequence
  Synthetic
auuauuaaguauaaaaau

SEQ ID NO: 617338 - RNA, 19 nt, Artificial Sequence
  Synthetic
aauuauuaaguauaaaaau

SEQ ID NO: 617339 - RNA, 20 nt, Artificial Sequence
  Synthetic
aaauuauuaaguauaaaaau

SEQ ID NO: 617340 - RNA, 21 nt, Artificial Sequence
  Synthetic
caaauuauuaaguauaaaaau

SEQ ID NO: 617341 - RNA, 22 nt, Artificial Sequence
  Synthetic
gcaaauuauuaaguauaaaaau

SEQ ID NO: 617342 - RNA, 23 nt, Artificial Sequence
  Synthetic
ugcaaauuauuaaguauaaaaau

SEQ ID NO: 617343 - RNA, 24 nt, Artificial Sequence
  Synthetic
augcaaauuauuaaguauaaaaau

SEQ ID NO: 617344 - RNA, 18 nt, Artificial Sequence
  Synthetic
uuuucuugaacuaaaaau

SEQ ID NO: 617345 - RNA, 19 nt, Artificial Sequence
  Synthetic
uuuuucuugaacuaaaaau

SEQ ID NO: 617346 - RNA, 20 nt, Artificial Sequence
  Synthetic
cuuuuucuugaacuaaaaau

SEQ ID NO: 617347 - RNA, 21 nt, Artificial Sequence
  Synthetic
ucuuuuucuugaacuaaaaau

SEQ ID NO: 617348 - RNA, 22 nt, Artificial Sequence
  Synthetic
uucuuuuucuugaacuaaaaau

SEQ ID NO: 617349 - RNA, 23 nt, Artificial Sequence
  Synthetic
uuucuuuuucuugaacuaaaaau

SEQ ID NO: 617350 - RNA, 24 nt, Artificial Sequence
  Synthetic
uuuucuuuuucuugaacuaaaaau

SEQ ID NO: 617351 - RNA, 18 nt, Artificial Sequence
  Synthetic
aaccaucuaacuaaaaau

SEQ ID NO: 617352 - RNA, 19 nt, Artificial Sequence
  Synthetic
caaccaucuaacuaaaaau

SEQ ID NO: 617353 - RNA, 20 nt, Artificial Sequence
  Synthetic
ccaaccaucuaacuaaaaau

SEQ ID NO: 617354 - RNA, 21 nt, Artificial Sequence
  Synthetic
uccaaccaucuaacuaaaaau

SEQ ID NO: 617355 - RNA, 22 nt, Artificial Sequence
  Synthetic
auccaaccaucuaacuaaaaau

SEQ ID NO: 617356 - RNA, 23 nt, Artificial Sequence
  Synthetic
uauccaaccaucuaacuaaaaau

SEQ ID NO: 617357 - RNA, 24 nt, Artificial Sequence
  Synthetic
uuauccaaccaucuaacuaaaaau

SEQ ID NO: 617358 - RNA, 18 nt, Artificial Sequence
  Synthetic
agggaaaugucuaaaaau

SEQ ID NO: 617359 - RNA, 19 nt, Artificial Sequence
  Synthetic
uagggaaaugucuaaaaau

SEQ ID NO: 617360 - RNA, 20 nt, Artificial Sequence
  Synthetic
auagggaaaugucuaaaaau

SEQ ID NO: 617361 - RNA, 21 nt, Artificial Sequence
  Synthetic
gauagggaaaugucuaaaaau

SEQ ID NO: 617362 - RNA, 22 nt, Artificial Sequence
  Synthetic
ggauagggaaaugucuaaaaau

SEQ ID NO: 617363 - RNA, 23 nt, Artificial Sequence
  Synthetic
aggauagggaaaugucuaaaaau

SEQ ID NO: 617364 - RNA, 24 nt, Artificial Sequence
  Synthetic
uaggauagggaaaugucuaaaaau

SEQ ID NO: 617365 - RNA, 18 nt, Artificial Sequence
  Synthetic
uccaucuuuaguaaaaau

SEQ ID NO: 617366 - RNA, 19 nt, Artificial Sequence
  Synthetic
auccaucuuuaguaaaaau

SEQ ID NO: 617367 - RNA, 20 nt, Artificial Sequence
  Synthetic
gauccaucuuuaguaaaaau

SEQ ID NO: 617368 - RNA, 21 nt, Artificial Sequence
  Synthetic
ugauccaucuuuaguaaaaau

SEQ ID NO: 617369 - RNA, 22 nt, Artificial Sequence
  Synthetic
augauccaucuuuaguaaaaau

SEQ ID NO: 617370 - RNA, 23 nt, Artificial Sequence
  Synthetic
gaugauccaucuuuaguaaaaau

SEQ ID NO: 617371 - RNA, 24 nt, Artificial Sequence
  Synthetic
ugaugauccaucuuuaguaaaaau

SEQ ID NO: 617372 - RNA, 18 nt, Artificial Sequence
  Synthetic
agcaaaaauauuaaaaau

SEQ ID NO: 617373 - RNA, 19 nt, Artificial Sequence
  Synthetic
cagcaaaaauauuaaaaau

SEQ ID NO: 617374 - RNA, 20 nt, Artificial Sequence
  Synthetic
acagcaaaaauauuaaaaau

SEQ ID NO: 617375 - RNA, 21 nt, Artificial Sequence
  Synthetic
aacagcaaaaauauuaaaaau

SEQ ID NO: 617376 - RNA, 22 nt, Artificial Sequence
  Synthetic
aaacagcaaaaauauuaaaaau

SEQ ID NO: 617377 - RNA, 23 nt, Artificial Sequence
  Synthetic
uaaacagcaaaaauauuaaaaau

SEQ ID NO: 617378 - RNA, 24 nt, Artificial Sequence
  Synthetic
uuaaacagcaaaaauauuaaaaau

SEQ ID NO: 617379 - RNA, 18 nt, Artificial Sequence
  Synthetic
cacagagacguuaaaaau

SEQ ID NO: 617380 - RNA, 19 nt, Artificial Sequence
  Synthetic
ccacagagacguuaaaaau

SEQ ID NO: 617381 - RNA, 20 nt, Artificial Sequence
  Synthetic
gccacagagacguuaaaaau

SEQ ID NO: 617382 - RNA, 21 nt, Artificial Sequence
  Synthetic
ggccacagagacguuaaaaau

SEQ ID NO: 617383 - RNA, 22 nt, Artificial Sequence
  Synthetic
gggccacagagacguuaaaaau

SEQ ID NO: 617384 - RNA, 23 nt, Artificial Sequence
  Synthetic
agggccacagagacguuaaaaau

SEQ ID NO: 617385 - RNA, 24 nt, Artificial Sequence
  Synthetic
gagggccacagagacguuaaaaau

SEQ ID NO: 617386 - RNA, 18 nt, Artificial Sequence
  Synthetic
ucuuauaagguuaaaaau

SEQ ID NO: 617387 - RNA, 19 nt, Artificial Sequence
  Synthetic
aucuuauaagguuaaaaau

SEQ ID NO: 617388 - RNA, 20 nt, Artificial Sequence
  Synthetic
gaucuuauaagguuaaaaau

SEQ ID NO: 617389 - RNA, 21 nt, Artificial Sequence
  Synthetic
ugaucuuauaagguuaaaaau

SEQ ID NO: 617390 - RNA, 22 nt, Artificial Sequence
  Synthetic
cugaucuuauaagguuaaaaau

SEQ ID NO: 617391 - RNA, 23 nt, Artificial Sequence
  Synthetic
ucugaucuuauaagguuaaaaau

SEQ ID NO: 617392 - RNA, 24 nt, Artificial Sequence
  Synthetic
aucugaucuuauaagguuaaaaau

SEQ ID NO: 617393 - RNA, 18 nt, Artificial Sequence
  Synthetic
caaacaaaauuuaaaaau

SEQ ID NO: 617394 - RNA, 19 nt, Artificial Sequence
  Synthetic
ucaaacaaaauuuaaaaau

SEQ ID NO: 617395 - RNA, 20 nt, Artificial Sequence
  Synthetic
uucaaacaaaauuuaaaaau

SEQ ID NO: 617396 - RNA, 21 nt, Artificial Sequence
  Synthetic
uuucaaacaaaauuuaaaaau

SEQ ID NO: 617397 - RNA, 22 nt, Artificial Sequence
  Synthetic
auuucaaacaaaauuuaaaaau

SEQ ID NO: 617398 - RNA, 23 nt, Artificial Sequence
  Synthetic
aauuucaaacaaaauuuaaaaau

SEQ ID NO: 617399 - RNA, 24 nt, Artificial Sequence
  Synthetic
caauuucaaacaaaauuuaaaaau

SEQ ID NO: 617400 - RNA, 18 nt, Artificial Sequence
  Synthetic
aucaggucauuuaaaaau

SEQ ID NO: 617401 - RNA, 19 nt, Artificial Sequence
  Synthetic
uaucaggucauuuaaaaau

SEQ ID NO: 617402 - RNA, 20 nt, Artificial Sequence
  Synthetic
cuaucaggucauuuaaaaau

SEQ ID NO: 617403 - RNA, 21 nt, Artificial Sequence
  Synthetic
acuaucaggucauuuaaaaau

SEQ ID NO: 617404 - RNA, 22 nt, Artificial Sequence
  Synthetic
uacuaucaggucauuuaaaaau

SEQ ID NO: 617405 - RNA, 23 nt, Artificial Sequence
  Synthetic
auacuaucaggucauuuaaaaau

SEQ ID NO: 617406 - RNA, 24 nt, Artificial Sequence
  Synthetic
aauacuaucaggucauuuaaaaau

SEQ ID NO: 617407 - RNA, 18 nt, Artificial Sequence
  Synthetic
ugugccuauuuuaaaaau

SEQ ID NO: 617408 - RNA, 19 nt, Artificial Sequence
  Synthetic
uugugccuauuuuaaaaau

SEQ ID NO: 617409 - RNA, 20 nt, Artificial Sequence
  Synthetic
cuugugccuauuuuaaaaau

SEQ ID NO: 617410 - RNA, 21 nt, Artificial Sequence
  Synthetic
ccuugugccuauuuuaaaaau

SEQ ID NO: 617411 - RNA, 22 nt, Artificial Sequence
  Synthetic
uccuugugccuauuuuaaaaau

SEQ ID NO: 617412 - RNA, 23 nt, Artificial Sequence
  Synthetic
guccuugugccuauuuuaaaaau

SEQ ID NO: 617413 - RNA, 24 nt, Artificial Sequence
  Synthetic
uguccuugugccuauuuuaaaaau

SEQ ID NO: 617414 - RNA, 18 nt, Artificial Sequence
  Synthetic
aaauuuuauuuuaaaaau

SEQ ID NO: 617415 - RNA, 19 nt, Artificial Sequence
  Synthetic
aaaauuuuauuuuaaaaau

SEQ ID NO: 617416 - RNA, 20 nt, Artificial Sequence
  Synthetic
uaaaauuuuauuuuaaaaau

SEQ ID NO: 617417 - RNA, 21 nt, Artificial Sequence
  Synthetic
cuaaaauuuuauuuuaaaaau

SEQ ID NO: 617418 - RNA, 22 nt, Artificial Sequence
  Synthetic
ucuaaaauuuuauuuuaaaaau

SEQ ID NO: 617419 - RNA, 23 nt, Artificial Sequence
  Synthetic
aucuaaaauuuuauuuuaaaaau

SEQ ID NO: 617420 - RNA, 24 nt, Artificial Sequence
  Synthetic
aaucuaaaauuuuauuuuaaaaau

SEQ ID NO: 617421 - RNA, 18 nt, Artificial Sequence
  Synthetic
uguagcaagaaacaaaau

SEQ ID NO: 617422 - RNA, 19 nt, Artificial Sequence
  Synthetic
guguagcaagaaacaaaau

SEQ ID NO: 617423 - RNA, 20 nt, Artificial Sequence
  Synthetic
aguguagcaagaaacaaaau

SEQ ID NO: 617424 - RNA, 21 nt, Artificial Sequence
  Synthetic
aaguguagcaagaaacaaaau

SEQ ID NO: 617425 - RNA, 22 nt, Artificial Sequence
  Synthetic
aaaguguagcaagaaacaaaau

SEQ ID NO: 617426 - RNA, 23 nt, Artificial Sequence
  Synthetic
aaaaguguagcaagaaacaaaau

SEQ ID NO: 617427 - RNA, 24 nt, Artificial Sequence
  Synthetic
aaaaaguguagcaagaaacaaaau

SEQ ID NO: 617428 - RNA, 18 nt, Artificial Sequence
  Synthetic
cugcuauugaaacaaaau

SEQ ID NO: 617429 - RNA, 19 nt, Artificial Sequence
  Synthetic
ucugcuauugaaacaaaau

SEQ ID NO: 617430 - RNA, 20 nt, Artificial Sequence
  Synthetic
uucugcuauugaaacaaaau

SEQ ID NO: 617431 - RNA, 21 nt, Artificial Sequence
  Synthetic
uuucugcuauugaaacaaaau

SEQ ID NO: 617432 - RNA, 22 nt, Artificial Sequence
  Synthetic
guuucugcuauugaaacaaaau

SEQ ID NO: 617433 - RNA, 23 nt, Artificial Sequence
  Synthetic
aguuucugcuauugaaacaaaau

SEQ ID NO: 617434 - RNA, 24 nt, Artificial Sequence
  Synthetic
uaguuucugcuauugaaacaaaau

SEQ ID NO: 617435 - RNA, 18 nt, Artificial Sequence
  Synthetic
aggacauuguaacaaaau

SEQ ID NO: 617436 - RNA, 19 nt, Artificial Sequence
  Synthetic
aaggacauuguaacaaaau

SEQ ID NO: 617437 - RNA, 20 nt, Artificial Sequence
  Synthetic
aaaggacauuguaacaaaau

SEQ ID NO: 617438 - RNA, 21 nt, Artificial Sequence
  Synthetic
uaaaggacauuguaacaaaau

SEQ ID NO: 617439 - RNA, 22 nt, Artificial Sequence
  Synthetic
guaaaggacauuguaacaaaau

SEQ ID NO: 617440 - RNA, 23 nt, Artificial Sequence
  Synthetic
aguaaaggacauuguaacaaaau

SEQ ID NO: 617441 - RNA, 24 nt, Artificial Sequence
  Synthetic
uaguaaaggacauuguaacaaaau

SEQ ID NO: 617442 - RNA, 18 nt, Artificial Sequence
  Synthetic
gauguguuuuaacaaaau

SEQ ID NO: 617443 - RNA, 19 nt, Artificial Sequence
  Synthetic
ggauguguuuuaacaaaau

SEQ ID NO: 617444 - RNA, 20 nt, Artificial Sequence
  Synthetic
aggauguguuuuaacaaaau

SEQ ID NO: 617445 - RNA, 21 nt, Artificial Sequence
  Synthetic
gaggauguguuuuaacaaaau

SEQ ID NO: 617446 - RNA, 22 nt, Artificial Sequence
  Synthetic
agaggauguguuuuaacaaaau

SEQ ID NO: 617447 - RNA, 23 nt, Artificial Sequence
  Synthetic
cagaggauguguuuuaacaaaau

SEQ ID NO: 617448 - RNA, 24 nt, Artificial Sequence
  Synthetic
acagaggauguguuuuaacaaaau

SEQ ID NO: 617449 - RNA, 18 nt, Artificial Sequence
  Synthetic
caaagggcagcacaaaau

SEQ ID NO: 617450 - RNA, 19 nt, Artificial Sequence
  Synthetic
acaaagggcagcacaaaau

SEQ ID NO: 617451 - RNA, 20 nt, Artificial Sequence
  Synthetic
uacaaagggcagcacaaaau

SEQ ID NO: 617452 - RNA, 21 nt, Artificial Sequence
  Synthetic
guacaaagggcagcacaaaau

SEQ ID NO: 617453 - RNA, 22 nt, Artificial Sequence
  Synthetic
cguacaaagggcagcacaaaau

SEQ ID NO: 617454 - RNA, 23 nt, Artificial Sequence
  Synthetic
ucguacaaagggcagcacaaaau

SEQ ID NO: 617455 - RNA, 24 nt, Artificial Sequence
  Synthetic
uucguacaaagggcagcacaaaau

SEQ ID NO: 617456 - RNA, 18 nt, Artificial Sequence
  Synthetic
ugacaagugucacaaaau

SEQ ID NO: 617457 - RNA, 19 nt, Artificial Sequence
  Synthetic
augacaagugucacaaaau

SEQ ID NO: 617458 - RNA, 20 nt, Artificial Sequence
  Synthetic
aaugacaagugucacaaaau

SEQ ID NO: 617459 - RNA, 21 nt, Artificial Sequence
  Synthetic
aaaugacaagugucacaaaau

SEQ ID NO: 617460 - RNA, 22 nt, Artificial Sequence
  Synthetic
aaaaugacaagugucacaaaau

SEQ ID NO: 617461 - RNA, 23 nt, Artificial Sequence
  Synthetic
gaaaaugacaagugucacaaaau

SEQ ID NO: 617462 - RNA, 24 nt, Artificial Sequence
  Synthetic
ugaaaaugacaagugucacaaaau

SEQ ID NO: 617463 - RNA, 18 nt, Artificial Sequence
  Synthetic
uuguacagcauacaaaau

SEQ ID NO: 617464 - RNA, 19 nt, Artificial Sequence
  Synthetic
guuguacagcauacaaaau

SEQ ID NO: 617465 - RNA, 20 nt, Artificial Sequence
  Synthetic
gguuguacagcauacaaaau

SEQ ID NO: 617466 - RNA, 21 nt, Artificial Sequence
  Synthetic
agguuguacagcauacaaaau

SEQ ID NO: 617467 - RNA, 22 nt, Artificial Sequence
  Synthetic
cagguuguacagcauacaaaau

SEQ ID NO: 617468 - RNA, 23 nt, Artificial Sequence
  Synthetic
ucagguuguacagcauacaaaau

SEQ ID NO: 617469 - RNA, 24 nt, Artificial Sequence
  Synthetic
aucagguuguacagcauacaaaau

SEQ ID NO: 617470 - RNA, 18 nt, Artificial Sequence
  Synthetic
aaaauucauauacaaaau

SEQ ID NO: 617471 - RNA, 19 nt, Artificial Sequence
  Synthetic
caaaauucauauacaaaau

SEQ ID NO: 617472 - RNA, 20 nt, Artificial Sequence
  Synthetic
acaaaauucauauacaaaau

SEQ ID NO: 617473 - RNA, 21 nt, Artificial Sequence
  Synthetic
cacaaaauucauauacaaaau

SEQ ID NO: 617474 - RNA, 22 nt, Artificial Sequence
  Synthetic
acacaaaauucauauacaaaau

SEQ ID NO: 617475 - RNA, 23 nt, Artificial Sequence
  Synthetic
gacacaaaauucauauacaaaau

SEQ ID NO: 617476 - RNA, 24 nt, Artificial Sequence
  Synthetic
ugacacaaaauucauauacaaaau

SEQ ID NO: 617477 - RNA, 18 nt, Artificial Sequence
  Synthetic
uggacaaguauacaaaau

SEQ ID NO: 617478 - RNA, 19 nt, Artificial Sequence
  Synthetic
guggacaaguauacaaaau

SEQ ID NO: 617479 - RNA, 20 nt, Artificial Sequence
  Synthetic
cguggacaaguauacaaaau

SEQ ID NO: 617480 - RNA, 21 nt, Artificial Sequence
  Synthetic
acguggacaaguauacaaaau

SEQ ID NO: 617481 - RNA, 22 nt, Artificial Sequence
  Synthetic
uacguggacaaguauacaaaau

SEQ ID NO: 617482 - RNA, 23 nt, Artificial Sequence
  Synthetic
cuacguggacaaguauacaaaau

SEQ ID NO: 617483 - RNA, 24 nt, Artificial Sequence
  Synthetic
ccuacguggacaaguauacaaaau

SEQ ID NO: 617484 - RNA, 21 nt, Artificial Sequence
  Synthetic
ugaacaggcaaccuacaaaau

SEQ ID NO: 617485 - RNA, 22 nt, Artificial Sequence
  Synthetic
gugaacaggcaaccuacaaaau

SEQ ID NO: 617486 - RNA, 23 nt, Artificial Sequence
  Synthetic
agugaacaggcaaccuacaaaau

SEQ ID NO: 617487 - RNA, 24 nt, Artificial Sequence
  Synthetic
gagugaacaggcaaccuacaaaau

SEQ ID NO: 617488 - RNA, 18 nt, Artificial Sequence
  Synthetic
uuuuugauauuacaaaau

SEQ ID NO: 617489 - RNA, 19 nt, Artificial Sequence
  Synthetic
auuuuugauauuacaaaau

SEQ ID NO: 617490 - RNA, 20 nt, Artificial Sequence
  Synthetic
gauuuuugauauuacaaaau

SEQ ID NO: 617491 - RNA, 21 nt, Artificial Sequence
  Synthetic
ugauuuuugauauuacaaaau

SEQ ID NO: 617492 - RNA, 22 nt, Artificial Sequence
  Synthetic
augauuuuugauauuacaaaau

SEQ ID NO: 617493 - RNA, 23 nt, Artificial Sequence
  Synthetic
gaugauuuuugauauuacaaaau

SEQ ID NO: 617494 - RNA, 24 nt, Artificial Sequence
  Synthetic
cgaugauuuuugauauuacaaaau

SEQ ID NO: 617495 - RNA, 18 nt, Artificial Sequence
  Synthetic
cacugcagugaccaaaau

SEQ ID NO: 617496 - RNA, 19 nt, Artificial Sequence
  Synthetic
ucacugcagugaccaaaau

SEQ ID NO: 617497 - RNA, 20 nt, Artificial Sequence
  Synthetic
uucacugcagugaccaaaau

SEQ ID NO: 617498 - RNA, 21 nt, Artificial Sequence
  Synthetic
guucacugcagugaccaaaau

SEQ ID NO: 617499 - RNA, 22 nt, Artificial Sequence
  Synthetic
uguucacugcagugaccaaaau

SEQ ID NO: 617500 - RNA, 23 nt, Artificial Sequence
  Synthetic
auguucacugcagugaccaaaau

SEQ ID NO: 617501 - RNA, 24 nt, Artificial Sequence
  Synthetic
gauguucacugcagugaccaaaau

SEQ ID NO: 617502 - RNA, 18 nt, Artificial Sequence
  Synthetic
uauacugaguaccaaaau

SEQ ID NO: 617503 - RNA, 19 nt, Artificial Sequence
  Synthetic
guauacugaguaccaaaau

SEQ ID NO: 617504 - RNA, 20 nt, Artificial Sequence
  Synthetic
gguauacugaguaccaaaau

SEQ ID NO: 617505 - RNA, 21 nt, Artificial Sequence
  Synthetic
agguauacugaguaccaaaau

SEQ ID NO: 617506 - RNA, 22 nt, Artificial Sequence
  Synthetic
aagguauacugaguaccaaaau

SEQ ID NO: 617507 - RNA, 23 nt, Artificial Sequence
  Synthetic
aaagguauacugaguaccaaaau

SEQ ID NO: 617508 - RNA, 24 nt, Artificial Sequence
  Synthetic
gaaagguauacugaguaccaaaau

SEQ ID NO: 617509 - RNA, 18 nt, Artificial Sequence
  Synthetic
gagauaaggccccaaaau

SEQ ID NO: 617510 - RNA, 19 nt, Artificial Sequence
  Synthetic
ggagauaaggccccaaaau

SEQ ID NO: 617511 - RNA, 20 nt, Artificial Sequence
  Synthetic
uggagauaaggccccaaaau

SEQ ID NO: 617512 - RNA, 21 nt, Artificial Sequence
  Synthetic
cuggagauaaggccccaaaau

SEQ ID NO: 617513 - RNA, 22 nt, Artificial Sequence
  Synthetic
acuggagauaaggccccaaaau

SEQ ID NO: 617514 - RNA, 23 nt, Artificial Sequence
  Synthetic
aacuggagauaaggccccaaaau

SEQ ID NO: 617515 - RNA, 24 nt, Artificial Sequence
  Synthetic
aaacuggagauaaggccccaaaau

SEQ ID NO: 617516 - RNA, 18 nt, Artificial Sequence
  Synthetic
aagauacugagccaaaau

SEQ ID NO: 617517 - RNA, 19 nt, Artificial Sequence
  Synthetic
caagauacugagccaaaau

SEQ ID NO: 617518 - RNA, 20 nt, Artificial Sequence
  Synthetic
ucaagauacugagccaaaau

SEQ ID NO: 617519 - RNA, 21 nt, Artificial Sequence
  Synthetic
cucaagauacugagccaaaau

SEQ ID NO: 617520 - RNA, 22 nt, Artificial Sequence
  Synthetic
ucucaagauacugagccaaaau

SEQ ID NO: 617521 - RNA, 23 nt, Artificial Sequence
  Synthetic
uucucaagauacugagccaaaau

SEQ ID NO: 617522 - RNA, 24 nt, Artificial Sequence
  Synthetic
guucucaagauacugagccaaaau

SEQ ID NO: 617523 - RNA, 18 nt, Artificial Sequence
  Synthetic
uccagauucugccaaaau

SEQ ID NO: 617524 - RNA, 19 nt, Artificial Sequence
  Synthetic
guccagauucugccaaaau

SEQ ID NO: 617525 - RNA, 20 nt, Artificial Sequence
  Synthetic
gguccagauucugccaaaau

SEQ ID NO: 617526 - RNA, 21 nt, Artificial Sequence
  Synthetic
ggguccagauucugccaaaau

SEQ ID NO: 617527 - RNA, 22 nt, Artificial Sequence
  Synthetic
uggguccagauucugccaaaau

SEQ ID NO: 617528 - RNA, 23 nt, Artificial Sequence
  Synthetic
uuggguccagauucugccaaaau

SEQ ID NO: 617529 - RNA, 24 nt, Artificial Sequence
  Synthetic
guuggguccagauucugccaaaau

SEQ ID NO: 617530 - RNA, 18 nt, Artificial Sequence
  Synthetic
ccuuuacuuugccaaaau

SEQ ID NO: 617531 - RNA, 19 nt, Artificial Sequence
  Synthetic
uccuuuacuuugccaaaau

SEQ ID NO: 617532 - RNA, 20 nt, Artificial Sequence
  Synthetic
uuccuuuacuuugccaaaau

SEQ ID NO: 617533 - RNA, 21 nt, Artificial Sequence
  Synthetic
uuuccuuuacuuugccaaaau

SEQ ID NO: 617534 - RNA, 22 nt, Artificial Sequence
  Synthetic
uuuuccuuuacuuugccaaaau

SEQ ID NO: 617535 - RNA, 23 nt, Artificial Sequence
  Synthetic
cuuuuccuuuacuuugccaaaau

SEQ ID NO: 617536 - RNA, 24 nt, Artificial Sequence
  Synthetic
gcuuuuccuuuacuuugccaaaau

SEQ ID NO: 617537 - RNA, 18 nt, Artificial Sequence
  Synthetic
aagcaaguaauccaaaau

SEQ ID NO: 617538 - RNA, 19 nt, Artificial Sequence
  Synthetic
aaagcaaguaauccaaaau

SEQ ID NO: 617539 - RNA, 20 nt, Artificial Sequence
  Synthetic
uaaagcaaguaauccaaaau

SEQ ID NO: 617540 - RNA, 21 nt, Artificial Sequence
  Synthetic
auaaagcaaguaauccaaaau

SEQ ID NO: 617541 - RNA, 22 nt, Artificial Sequence
  Synthetic
uauaaagcaaguaauccaaaau

SEQ ID NO: 617542 - RNA, 23 nt, Artificial Sequence
  Synthetic
uuauaaagcaaguaauccaaaau

SEQ ID NO: 617543 - RNA, 24 nt, Artificial Sequence
  Synthetic
auuauaaagcaaguaauccaaaau

SEQ ID NO: 617544 - RNA, 18 nt, Artificial Sequence
  Synthetic
uucuaagaacuccaaaau

SEQ ID NO: 617545 - RNA, 19 nt, Artificial Sequence
  Synthetic
uuucuaagaacuccaaaau

SEQ ID NO: 617546 - RNA, 20 nt, Artificial Sequence
  Synthetic
uuuucuaagaacuccaaaau

SEQ ID NO: 617547 - RNA, 21 nt, Artificial Sequence
  Synthetic
uuuuucuaagaacuccaaaau

SEQ ID NO: 617548 - RNA, 22 nt, Artificial Sequence
  Synthetic
uuuuuucuaagaacuccaaaau

SEQ ID NO: 617549 - RNA, 23 nt, Artificial Sequence
  Synthetic
auuuuuucuaagaacuccaaaau

SEQ ID NO: 617550 - RNA, 24 nt, Artificial Sequence
  Synthetic
aauuuuuucuaagaacuccaaaau

SEQ ID NO: 617551 - RNA, 18 nt, Artificial Sequence
  Synthetic
uugcuggaaaugcaaaau

SEQ ID NO: 617552 - RNA, 19 nt, Artificial Sequence
  Synthetic
cuugcuggaaaugcaaaau

SEQ ID NO: 617553 - RNA, 20 nt, Artificial Sequence
  Synthetic
acuugcuggaaaugcaaaau

SEQ ID NO: 617554 - RNA, 21 nt, Artificial Sequence
  Synthetic
aacuugcuggaaaugcaaaau

SEQ ID NO: 617555 - RNA, 22 nt, Artificial Sequence
  Synthetic
uaacuugcuggaaaugcaaaau

SEQ ID NO: 617556 - RNA, 23 nt, Artificial Sequence
  Synthetic
guaacuugcuggaaaugcaaaau

SEQ ID NO: 617557 - RNA, 24 nt, Artificial Sequence
  Synthetic
gguaacuugcuggaaaugcaaaau

SEQ ID NO: 617558 - RNA, 18 nt, Artificial Sequence
  Synthetic
ccaucuccagugcaaaau

SEQ ID NO: 617559 - RNA, 19 nt, Artificial Sequence
  Synthetic
uccaucuccagugcaaaau

SEQ ID NO: 617560 - RNA, 20 nt, Artificial Sequence
  Synthetic
cuccaucuccagugcaaaau

SEQ ID NO: 617561 - RNA, 21 nt, Artificial Sequence
  Synthetic
acuccaucuccagugcaaaau

SEQ ID NO: 617562 - RNA, 22 nt, Artificial Sequence
  Synthetic
uacuccaucuccagugcaaaau

SEQ ID NO: 617563 - RNA, 23 nt, Artificial Sequence
  Synthetic
uuacuccaucuccagugcaaaau

SEQ ID NO: 617564 - RNA, 24 nt, Artificial Sequence
  Synthetic
cuuacuccaucuccagugcaaaau

SEQ ID NO: 617565 - RNA, 18 nt, Artificial Sequence
  Synthetic
acagagugaaaucaaaau

SEQ ID NO: 617566 - RNA, 19 nt, Artificial Sequence
  Synthetic
aacagagugaaaucaaaau

SEQ ID NO: 617567 - RNA, 20 nt, Artificial Sequence
  Synthetic
gaacagagugaaaucaaaau

SEQ ID NO: 617568 - RNA, 21 nt, Artificial Sequence
  Synthetic
ggaacagagugaaaucaaaau

SEQ ID NO: 617569 - RNA, 22 nt, Artificial Sequence
  Synthetic
uggaacagagugaaaucaaaau

SEQ ID NO: 617570 - RNA, 23 nt, Artificial Sequence
  Synthetic
cuggaacagagugaaaucaaaau

SEQ ID NO: 617571 - RNA, 24 nt, Artificial Sequence
  Synthetic
acuggaacagagugaaaucaaaau

SEQ ID NO: 617572 - RNA, 18 nt, Artificial Sequence
  Synthetic
uggaauaugaaucaaaau

SEQ ID NO: 617573 - RNA, 19 nt, Artificial Sequence
  Synthetic
auggaauaugaaucaaaau

SEQ ID NO: 617574 - RNA, 20 nt, Artificial Sequence
  Synthetic
uauggaauaugaaucaaaau

SEQ ID NO: 617575 - RNA, 21 nt, Artificial Sequence
  Synthetic
uuauggaauaugaaucaaaau

SEQ ID NO: 617576 - RNA, 22 nt, Artificial Sequence
  Synthetic
guuauggaauaugaaucaaaau

SEQ ID NO: 617577 - RNA, 23 nt, Artificial Sequence
  Synthetic
uguuauggaauaugaaucaaaau

SEQ ID NO: 617578 - RNA, 24 nt, Artificial Sequence
  Synthetic
uuguuauggaauaugaaucaaaau

SEQ ID NO: 617579 - RNA, 18 nt, Artificial Sequence
  Synthetic
ugaaggguacaucaaaau

SEQ ID NO: 617580 - RNA, 19 nt, Artificial Sequence
  Synthetic
cugaaggguacaucaaaau

SEQ ID NO: 617581 - RNA, 20 nt, Artificial Sequence
  Synthetic
ccugaaggguacaucaaaau

SEQ ID NO: 617582 - RNA, 21 nt, Artificial Sequence
  Synthetic
gccugaaggguacaucaaaau

SEQ ID NO: 617583 - RNA, 22 nt, Artificial Sequence
  Synthetic
ggccugaaggguacaucaaaau

SEQ ID NO: 617584 - RNA, 23 nt, Artificial Sequence
  Synthetic
aggccugaaggguacaucaaaau

SEQ ID NO: 617585 - RNA, 24 nt, Artificial Sequence
  Synthetic
uaggccugaaggguacaucaaaau

SEQ ID NO: 617586 - RNA, 18 nt, Artificial Sequence
  Synthetic
ggagcaaaagcucaaaau

SEQ ID NO: 617587 - RNA, 19 nt, Artificial Sequence
  Synthetic
cggagcaaaagcucaaaau

SEQ ID NO: 617588 - RNA, 20 nt, Artificial Sequence
  Synthetic
ccggagcaaaagcucaaaau

SEQ ID NO: 617589 - RNA, 21 nt, Artificial Sequence
  Synthetic
accggagcaaaagcucaaaau

SEQ ID NO: 617590 - RNA, 22 nt, Artificial Sequence
  Synthetic
aaccggagcaaaagcucaaaau

SEQ ID NO: 617591 - RNA, 23 nt, Artificial Sequence
  Synthetic
gaaccggagcaaaagcucaaaau

SEQ ID NO: 617592 - RNA, 24 nt, Artificial Sequence
  Synthetic
ugaaccggagcaaaagcucaaaau

SEQ ID NO: 617593 - RNA, 18 nt, Artificial Sequence
  Synthetic
ccuauuuucagucaaaau

SEQ ID NO: 617594 - RNA, 19 nt, Artificial Sequence
  Synthetic
gccuauuuucagucaaaau

SEQ ID NO: 617595 - RNA, 20 nt, Artificial Sequence
  Synthetic
ugccuauuuucagucaaaau

SEQ ID NO: 617596 - RNA, 21 nt, Artificial Sequence
  Synthetic
uugccuauuuucagucaaaau

SEQ ID NO: 617597 - RNA, 22 nt, Artificial Sequence
  Synthetic
cuugccuauuuucagucaaaau

SEQ ID NO: 617598 - RNA, 23 nt, Artificial Sequence
  Synthetic
ucuugccuauuuucagucaaaau

SEQ ID NO: 617599 - RNA, 24 nt, Artificial Sequence
  Synthetic
uucuugccuauuuucagucaaaau

SEQ ID NO: 617600 - RNA, 18 nt, Artificial Sequence
  Synthetic
aguaugaacauucaaaau

SEQ ID NO: 617601 - RNA, 19 nt, Artificial Sequence
  Synthetic
caguaugaacauucaaaau

SEQ ID NO: 617602 - RNA, 20 nt, Artificial Sequence
  Synthetic
ccaguaugaacauucaaaau

SEQ ID NO: 617603 - RNA, 21 nt, Artificial Sequence
  Synthetic
gccaguaugaacauucaaaau

SEQ ID NO: 617604 - RNA, 22 nt, Artificial Sequence
  Synthetic
agccaguaugaacauucaaaau

SEQ ID NO: 617605 - RNA, 23 nt, Artificial Sequence
  Synthetic
gagccaguaugaacauucaaaau

SEQ ID NO: 617606 - RNA, 24 nt, Artificial Sequence
  Synthetic
ggagccaguaugaacauucaaaau

SEQ ID NO: 617607 - RNA, 18 nt, Artificial Sequence
  Synthetic
aaagaagaaaaagaaaau

SEQ ID NO: 617608 - RNA, 19 nt, Artificial Sequence
  Synthetic
gaaagaagaaaaagaaaau

SEQ ID NO: 617609 - RNA, 20 nt, Artificial Sequence
  Synthetic
agaaagaagaaaaagaaaau

SEQ ID NO: 617610 - RNA, 21 nt, Artificial Sequence
  Synthetic
aagaaagaagaaaaagaaaau

SEQ ID NO: 617611 - RNA, 22 nt, Artificial Sequence
  Synthetic
aaagaaagaagaaaaagaaaau

SEQ ID NO: 617612 - RNA, 23 nt, Artificial Sequence
  Synthetic
gaaagaaagaagaaaaagaaaau

SEQ ID NO: 617613 - RNA, 24 nt, Artificial Sequence
  Synthetic
agaaagaaagaagaaaaagaaaau

SEQ ID NO: 617614 - RNA, 18 nt, Artificial Sequence
  Synthetic
auaaguaguaaagaaaau

SEQ ID NO: 617615 - RNA, 19 nt, Artificial Sequence
  Synthetic
cauaaguaguaaagaaaau

SEQ ID NO: 617616 - RNA, 20 nt, Artificial Sequence
  Synthetic
ucauaaguaguaaagaaaau

SEQ ID NO: 617617 - RNA, 21 nt, Artificial Sequence
  Synthetic
gucauaaguaguaaagaaaau

SEQ ID NO: 617618 - RNA, 22 nt, Artificial Sequence
  Synthetic
ggucauaaguaguaaagaaaau

SEQ ID NO: 617619 - RNA, 23 nt, Artificial Sequence
  Synthetic
aggucauaaguaguaaagaaaau

SEQ ID NO: 617620 - RNA, 24 nt, Artificial Sequence
  Synthetic
gaggucauaaguaguaaagaaaau

SEQ ID NO: 617621 - RNA, 18 nt, Artificial Sequence
  Synthetic
cuauuuaaccaagaaaau

SEQ ID NO: 617622 - RNA, 19 nt, Artificial Sequence
  Synthetic
ucuauuuaaccaagaaaau

SEQ ID NO: 617623 - RNA, 20 nt, Artificial Sequence
  Synthetic
uucuauuuaaccaagaaaau

SEQ ID NO: 617624 - RNA, 21 nt, Artificial Sequence
  Synthetic
auucuauuuaaccaagaaaau

SEQ ID NO: 617625 - RNA, 22 nt, Artificial Sequence
  Synthetic
gauucuauuuaaccaagaaaau

SEQ ID NO: 617626 - RNA, 23 nt, Artificial Sequence
  Synthetic
ugauucuauuuaaccaagaaaau

SEQ ID NO: 617627 - RNA, 24 nt, Artificial Sequence
  Synthetic
uugauucuauuuaaccaagaaaau

SEQ ID NO: 617628 - RNA, 18 nt, Artificial Sequence
  Synthetic
accacuguucaagaaaau

SEQ ID NO: 617629 - RNA, 19 nt, Artificial Sequence
  Synthetic
aaccacuguucaagaaaau

SEQ ID NO: 617630 - RNA, 20 nt, Artificial Sequence
  Synthetic
aaaccacuguucaagaaaau

SEQ ID NO: 617631 - RNA, 21 nt, Artificial Sequence
  Synthetic
caaaccacuguucaagaaaau

SEQ ID NO: 617632 - RNA, 22 nt, Artificial Sequence
  Synthetic
acaaaccacuguucaagaaaau

SEQ ID NO: 617633 - RNA, 23 nt, Artificial Sequence
  Synthetic
uacaaaccacuguucaagaaaau

SEQ ID NO: 617634 - RNA, 24 nt, Artificial Sequence
  Synthetic
cuacaaaccacuguucaagaaaau

SEQ ID NO: 617635 - RNA, 18 nt, Artificial Sequence
  Synthetic
caauauggggaagaaaau

SEQ ID NO: 617636 - RNA, 19 nt, Artificial Sequence
  Synthetic
gcaauauggggaagaaaau

SEQ ID NO: 617637 - RNA, 20 nt, Artificial Sequence
  Synthetic
cgcaauauggggaagaaaau

SEQ ID NO: 617638 - RNA, 21 nt, Artificial Sequence
  Synthetic
gcgcaauauggggaagaaaau

SEQ ID NO: 617639 - RNA, 22 nt, Artificial Sequence
  Synthetic
ugcgcaauauggggaagaaaau

SEQ ID NO: 617640 - RNA, 23 nt, Artificial Sequence
  Synthetic
uugcgcaauauggggaagaaaau

SEQ ID NO: 617641 - RNA, 24 nt, Artificial Sequence
  Synthetic
cuugcgcaauauggggaagaaaau

SEQ ID NO: 617642 - RNA, 18 nt, Artificial Sequence
  Synthetic
agaacuucugaagaaaau

SEQ ID NO: 617643 - RNA, 19 nt, Artificial Sequence
  Synthetic
gagaacuucugaagaaaau

SEQ ID NO: 617644 - RNA, 20 nt, Artificial Sequence
  Synthetic
agagaacuucugaagaaaau

SEQ ID NO: 617645 - RNA, 21 nt, Artificial Sequence
  Synthetic
aagagaacuucugaagaaaau

SEQ ID NO: 617646 - RNA, 22 nt, Artificial Sequence
  Synthetic
caagagaacuucugaagaaaau

SEQ ID NO: 617647 - RNA, 23 nt, Artificial Sequence
  Synthetic
ucaagagaacuucugaagaaaau

SEQ ID NO: 617648 - RNA, 24 nt, Artificial Sequence
  Synthetic
uucaagagaacuucugaagaaaau

SEQ ID NO: 617649 - RNA, 18 nt, Artificial Sequence
  Synthetic
ucaauaacauaagaaaau

SEQ ID NO: 617650 - RNA, 19 nt, Artificial Sequence
  Synthetic
aucaauaacauaagaaaau

SEQ ID NO: 617651 - RNA, 20 nt, Artificial Sequence
  Synthetic
uaucaauaacauaagaaaau

SEQ ID NO: 617652 - RNA, 21 nt, Artificial Sequence
  Synthetic
guaucaauaacauaagaaaau

SEQ ID NO: 617653 - RNA, 22 nt, Artificial Sequence
  Synthetic
uguaucaauaacauaagaaaau

SEQ ID NO: 617654 - RNA, 23 nt, Artificial Sequence
  Synthetic
cuguaucaauaacauaagaaaau

SEQ ID NO: 617655 - RNA, 24 nt, Artificial Sequence
  Synthetic
ccuguaucaauaacauaagaaaau

SEQ ID NO: 617656 - RNA, 18 nt, Artificial Sequence
  Synthetic
uaccguucaacagaaaau

SEQ ID NO: 617657 - RNA, 19 nt, Artificial Sequence
  Synthetic
uuaccguucaacagaaaau

SEQ ID NO: 617658 - RNA, 20 nt, Artificial Sequence
  Synthetic
cuuaccguucaacagaaaau

SEQ ID NO: 617659 - RNA, 21 nt, Artificial Sequence
  Synthetic
acuuaccguucaacagaaaau

SEQ ID NO: 617660 - RNA, 22 nt, Artificial Sequence
  Synthetic
aacuuaccguucaacagaaaau

SEQ ID NO: 617661 - RNA, 23 nt, Artificial Sequence
  Synthetic
caacuuaccguucaacagaaaau

SEQ ID NO: 617662 - RNA, 24 nt, Artificial Sequence
  Synthetic
acaacuuaccguucaacagaaaau

SEQ ID NO: 617663 - RNA, 18 nt, Artificial Sequence
  Synthetic
ucugaauuaucagaaaau

SEQ ID NO: 617664 - RNA, 19 nt, Artificial Sequence
  Synthetic
aucugaauuaucagaaaau

SEQ ID NO: 617665 - RNA, 20 nt, Artificial Sequence
  Synthetic
gaucugaauuaucagaaaau

SEQ ID NO: 617666 - RNA, 21 nt, Artificial Sequence
  Synthetic
ugaucugaauuaucagaaaau

SEQ ID NO: 617667 - RNA, 22 nt, Artificial Sequence
  Synthetic
augaucugaauuaucagaaaau

SEQ ID NO: 617668 - RNA, 23 nt, Artificial Sequence
  Synthetic
gaugaucugaauuaucagaaaau

SEQ ID NO: 617669 - RNA, 24 nt, Artificial Sequence
  Synthetic
agaugaucugaauuaucagaaaau

SEQ ID NO: 617670 - RNA, 18 nt, Artificial Sequence
  Synthetic
ucacaccccucagaaaau

SEQ ID NO: 617671 - RNA, 19 nt, Artificial Sequence
  Synthetic
gucacaccccucagaaaau

SEQ ID NO: 617672 - RNA, 20 nt, Artificial Sequence
  Synthetic
ugucacaccccucagaaaau

SEQ ID NO: 617673 - RNA, 21 nt, Artificial Sequence
  Synthetic
uugucacaccccucagaaaau

SEQ ID NO: 617674 - RNA, 22 nt, Artificial Sequence
  Synthetic
uuugucacaccccucagaaaau

SEQ ID NO: 617675 - RNA, 23 nt, Artificial Sequence
  Synthetic
auuugucacaccccucagaaaau

SEQ ID NO: 617676 - RNA, 24 nt, Artificial Sequence
  Synthetic
cauuugucacaccccucagaaaau

SEQ ID NO: 617677 - RNA, 18 nt, Artificial Sequence
  Synthetic
ggaagcagaagagaaaau

SEQ ID NO: 617678 - RNA, 19 nt, Artificial Sequence
  Synthetic
uggaagcagaagagaaaau

SEQ ID NO: 617679 - RNA, 20 nt, Artificial Sequence
  Synthetic
auggaagcagaagagaaaau

SEQ ID NO: 617680 - RNA, 21 nt, Artificial Sequence
  Synthetic
cauggaagcagaagagaaaau

SEQ ID NO: 617681 - RNA, 22 nt, Artificial Sequence
  Synthetic
acauggaagcagaagagaaaau

SEQ ID NO: 617682 - RNA, 23 nt, Artificial Sequence
  Synthetic
uacauggaagcagaagagaaaau

SEQ ID NO: 617683 - RNA, 24 nt, Artificial Sequence
  Synthetic
uuacauggaagcagaagagaaaau

SEQ ID NO: 617684 - RNA, 18 nt, Artificial Sequence
  Synthetic
aaaugcggaagagaaaau

SEQ ID NO: 617685 - RNA, 19 nt, Artificial Sequence
  Synthetic
uaaaugcggaagagaaaau

SEQ ID NO: 617686 - RNA, 20 nt, Artificial Sequence
  Synthetic
uuaaaugcggaagagaaaau

SEQ ID NO: 617687 - RNA, 21 nt, Artificial Sequence
  Synthetic
uuuaaaugcggaagagaaaau

SEQ ID NO: 617688 - RNA, 22 nt, Artificial Sequence
  Synthetic
uuuuaaaugcggaagagaaaau

SEQ ID NO: 617689 - RNA, 23 nt, Artificial Sequence
  Synthetic
guuuuaaaugcggaagagaaaau

SEQ ID NO: 617690 - RNA, 24 nt, Artificial Sequence
  Synthetic
uguuuuaaaugcggaagagaaaau

SEQ ID NO: 617691 - RNA, 18 nt, Artificial Sequence
  Synthetic
gucaaauugagagaaaau

SEQ ID NO: 617692 - RNA, 19 nt, Artificial Sequence
  Synthetic
ugucaaauugagagaaaau

SEQ ID NO: 617693 - RNA, 20 nt, Artificial Sequence
  Synthetic
gugucaaauugagagaaaau

SEQ ID NO: 617694 - RNA, 21 nt, Artificial Sequence
  Synthetic
ugugucaaauugagagaaaau

SEQ ID NO: 617695 - RNA, 22 nt, Artificial Sequence
  Synthetic
augugucaaauugagagaaaau

SEQ ID NO: 617696 - RNA, 23 nt, Artificial Sequence
  Synthetic
aaugugucaaauugagagaaaau

SEQ ID NO: 617697 - RNA, 24 nt, Artificial Sequence
  Synthetic
caaugugucaaauugagagaaaau

SEQ ID NO: 617698 - RNA, 18 nt, Artificial Sequence
  Synthetic
acugaaaacauagaaaau

SEQ ID NO: 617699 - RNA, 19 nt, Artificial Sequence
  Synthetic
uacugaaaacauagaaaau

SEQ ID NO: 617700 - RNA, 20 nt, Artificial Sequence
  Synthetic
guacugaaaacauagaaaau

SEQ ID NO: 617701 - RNA, 21 nt, Artificial Sequence
  Synthetic
uguacugaaaacauagaaaau

SEQ ID NO: 617702 - RNA, 22 nt, Artificial Sequence
  Synthetic
cuguacugaaaacauagaaaau

SEQ ID NO: 617703 - RNA, 23 nt, Artificial Sequence
  Synthetic
acuguacugaaaacauagaaaau

SEQ ID NO: 617704 - RNA, 24 nt, Artificial Sequence
  Synthetic
uacuguacugaaaacauagaaaau

SEQ ID NO: 617705 - RNA, 18 nt, Artificial Sequence
  Synthetic
gaaaagacacccgaaaau

SEQ ID NO: 617706 - RNA, 19 nt, Artificial Sequence
  Synthetic
ugaaaagacacccgaaaau

SEQ ID NO: 617707 - RNA, 20 nt, Artificial Sequence
  Synthetic
cugaaaagacacccgaaaau

SEQ ID NO: 617708 - RNA, 21 nt, Artificial Sequence
  Synthetic
gcugaaaagacacccgaaaau

SEQ ID NO: 617709 - RNA, 22 nt, Artificial Sequence
  Synthetic
ugcugaaaagacacccgaaaau

SEQ ID NO: 617710 - RNA, 23 nt, Artificial Sequence
  Synthetic
cugcugaaaagacacccgaaaau

SEQ ID NO: 617711 - RNA, 24 nt, Artificial Sequence
  Synthetic
acugcugaaaagacacccgaaaau

SEQ ID NO: 617712 - RNA, 18 nt, Artificial Sequence
  Synthetic
cucagaagaaaggaaaau

SEQ ID NO: 617713 - RNA, 19 nt, Artificial Sequence
  Synthetic
gcucagaagaaaggaaaau

SEQ ID NO: 617714 - RNA, 20 nt, Artificial Sequence
  Synthetic
ggcucagaagaaaggaaaau

SEQ ID NO: 617715 - RNA, 21 nt, Artificial Sequence
  Synthetic
gggcucagaagaaaggaaaau

SEQ ID NO: 617716 - RNA, 22 nt, Artificial Sequence
  Synthetic
agggcucagaagaaaggaaaau

SEQ ID NO: 617717 - RNA, 23 nt, Artificial Sequence
  Synthetic
gagggcucagaagaaaggaaaau

SEQ ID NO: 617718 - RNA, 24 nt, Artificial Sequence
  Synthetic
ggagggcucagaagaaaggaaaau

SEQ ID NO: 617719 - RNA, 18 nt, Artificial Sequence
  Synthetic
gguugugggaaggaaaau

SEQ ID NO: 617720 - RNA, 19 nt, Artificial Sequence
  Synthetic
ggguugugggaaggaaaau

SEQ ID NO: 617721 - RNA, 20 nt, Artificial Sequence
  Synthetic
cggguugugggaaggaaaau

SEQ ID NO: 617722 - RNA, 21 nt, Artificial Sequence
  Synthetic
ucggguugugggaaggaaaau

SEQ ID NO: 617723 - RNA, 22 nt, Artificial Sequence
  Synthetic
uucggguugugggaaggaaaau

SEQ ID NO: 617724 - RNA, 23 nt, Artificial Sequence
  Synthetic
cuucggguugugggaaggaaaau

SEQ ID NO: 617725 - RNA, 24 nt, Artificial Sequence
  Synthetic
ucuucggguugugggaaggaaaau

SEQ ID NO: 617726 - RNA, 18 nt, Artificial Sequence
  Synthetic
agaagaagacaggaaaau

SEQ ID NO: 617727 - RNA, 19 nt, Artificial Sequence
  Synthetic
cagaagaagacaggaaaau

SEQ ID NO: 617728 - RNA, 20 nt, Artificial Sequence
  Synthetic
ucagaagaagacaggaaaau

SEQ ID NO: 617729 - RNA, 21 nt, Artificial Sequence
  Synthetic
cucagaagaagacaggaaaau

SEQ ID NO: 617730 - RNA, 22 nt, Artificial Sequence
  Synthetic
gcucagaagaagacaggaaaau

SEQ ID NO: 617731 - RNA, 23 nt, Artificial Sequence
  Synthetic
ggcucagaagaagacaggaaaau

SEQ ID NO: 617732 - RNA, 24 nt, Artificial Sequence
  Synthetic
aggcucagaagaagacaggaaaau

SEQ ID NO: 617733 - RNA, 18 nt, Artificial Sequence
  Synthetic
gugaagguguaggaaaau

SEQ ID NO: 617734 - RNA, 19 nt, Artificial Sequence
  Synthetic
ggugaagguguaggaaaau

SEQ ID NO: 617735 - RNA, 20 nt, Artificial Sequence
  Synthetic
uggugaagguguaggaaaau

SEQ ID NO: 617736 - RNA, 21 nt, Artificial Sequence
  Synthetic
uuggugaagguguaggaaaau

SEQ ID NO: 617737 - RNA, 22 nt, Artificial Sequence
  Synthetic
guuggugaagguguaggaaaau

SEQ ID NO: 617738 - RNA, 23 nt, Artificial Sequence
  Synthetic
uguuggugaagguguaggaaaau

SEQ ID NO: 617739 - RNA, 24 nt, Artificial Sequence
  Synthetic
guguuggugaagguguaggaaaau

SEQ ID NO: 617740 - RNA, 18 nt, Artificial Sequence
  Synthetic
cuaaauggcagggaaaau

SEQ ID NO: 617741 - RNA, 19 nt, Artificial Sequence
  Synthetic
acuaaauggcagggaaaau

SEQ ID NO: 617742 - RNA, 20 nt, Artificial Sequence
  Synthetic
aacuaaauggcagggaaaau

SEQ ID NO: 617743 - RNA, 21 nt, Artificial Sequence
  Synthetic
gaacuaaauggcagggaaaau

SEQ ID NO: 617744 - RNA, 22 nt, Artificial Sequence
  Synthetic
ggaacuaaauggcagggaaaau

SEQ ID NO: 617745 - RNA, 23 nt, Artificial Sequence
  Synthetic
gggaacuaaauggcagggaaaau

SEQ ID NO: 617746 - RNA, 24 nt, Artificial Sequence
  Synthetic
agggaacuaaauggcagggaaaau

SEQ ID NO: 617747 - RNA, 18 nt, Artificial Sequence
  Synthetic
gaaaaucugagggaaaau

SEQ ID NO: 617748 - RNA, 19 nt, Artificial Sequence
  Synthetic
agaaaaucugagggaaaau

SEQ ID NO: 617749 - RNA, 20 nt, Artificial Sequence
  Synthetic
gagaaaaucugagggaaaau

SEQ ID NO: 617750 - RNA, 21 nt, Artificial Sequence
  Synthetic
agagaaaaucugagggaaaau

SEQ ID NO: 617751 - RNA, 22 nt, Artificial Sequence
  Synthetic
aagagaaaaucugagggaaaau

SEQ ID NO: 617752 - RNA, 23 nt, Artificial Sequence
  Synthetic
gaagagaaaaucugagggaaaau

SEQ ID NO: 617753 - RNA, 24 nt, Artificial Sequence
  Synthetic
ggaagagaaaaucugagggaaaau

SEQ ID NO: 617754 - RNA, 18 nt, Artificial Sequence
  Synthetic
aacaggcuucgggaaaau

SEQ ID NO: 617755 - RNA, 19 nt, Artificial Sequence
  Synthetic
aaacaggcuucgggaaaau

SEQ ID NO: 617756 - RNA, 20 nt, Artificial Sequence
  Synthetic
gaaacaggcuucgggaaaau

SEQ ID NO: 617757 - RNA, 21 nt, Artificial Sequence
  Synthetic
ugaaacaggcuucgggaaaau

SEQ ID NO: 617758 - RNA, 22 nt, Artificial Sequence
  Synthetic
cugaaacaggcuucgggaaaau

SEQ ID NO: 617759 - RNA, 23 nt, Artificial Sequence
  Synthetic
gcugaaacaggcuucgggaaaau

SEQ ID NO: 617760 - RNA, 24 nt, Artificial Sequence
  Synthetic
ugcugaaacaggcuucgggaaaau

SEQ ID NO: 617761 - RNA, 18 nt, Artificial Sequence
  Synthetic
aguauacuuauggaaaau

SEQ ID NO: 617762 - RNA, 19 nt, Artificial Sequence
  Synthetic
aaguauacuuauggaaaau

SEQ ID NO: 617763 - RNA, 20 nt, Artificial Sequence
  Synthetic
aaaguauacuuauggaaaau

SEQ ID NO: 617764 - RNA, 21 nt, Artificial Sequence
  Synthetic
uaaaguauacuuauggaaaau

SEQ ID NO: 617765 - RNA, 22 nt, Artificial Sequence
  Synthetic
uuaaaguauacuuauggaaaau

SEQ ID NO: 617766 - RNA, 23 nt, Artificial Sequence
  Synthetic
auuaaaguauacuuauggaaaau

SEQ ID NO: 617767 - RNA, 24 nt, Artificial Sequence
  Synthetic
aauuaaaguauacuuauggaaaau

SEQ ID NO: 617768 - RNA, 18 nt, Artificial Sequence
  Synthetic
cuucuuugccuggaaaau

SEQ ID NO: 617769 - RNA, 19 nt, Artificial Sequence
  Synthetic
gcuucuuugccuggaaaau

SEQ ID NO: 617770 - RNA, 20 nt, Artificial Sequence
  Synthetic
agcuucuuugccuggaaaau

SEQ ID NO: 617771 - RNA, 21 nt, Artificial Sequence
  Synthetic
cagcuucuuugccuggaaaau

SEQ ID NO: 617772 - RNA, 22 nt, Artificial Sequence
  Synthetic
ccagcuucuuugccuggaaaau

SEQ ID NO: 617773 - RNA, 23 nt, Artificial Sequence
  Synthetic
uccagcuucuuugccuggaaaau

SEQ ID NO: 617774 - RNA, 24 nt, Artificial Sequence
  Synthetic
cuccagcuucuuugccuggaaaau

SEQ ID NO: 617775 - RNA, 18 nt, Artificial Sequence
  Synthetic
uggacagugcuggaaaau

SEQ ID NO: 617776 - RNA, 19 nt, Artificial Sequence
  Synthetic
auggacagugcuggaaaau

SEQ ID NO: 617777 - RNA, 20 nt, Artificial Sequence
  Synthetic
aauggacagugcuggaaaau

SEQ ID NO: 617778 - RNA, 21 nt, Artificial Sequence
  Synthetic
caauggacagugcuggaaaau

SEQ ID NO: 617779 - RNA, 22 nt, Artificial Sequence
  Synthetic
acaauggacagugcuggaaaau

SEQ ID NO: 617780 - RNA, 23 nt, Artificial Sequence
  Synthetic
uacaauggacagugcuggaaaau

SEQ ID NO: 617781 - RNA, 24 nt, Artificial Sequence
  Synthetic
uuacaauggacagugcuggaaaau

SEQ ID NO: 617782 - RNA, 18 nt, Artificial Sequence
  Synthetic
uauuaugugcuggaaaau

SEQ ID NO: 617783 - RNA, 19 nt, Artificial Sequence
  Synthetic
uuauuaugugcuggaaaau

SEQ ID NO: 617784 - RNA, 20 nt, Artificial Sequence
  Synthetic
auuauuaugugcuggaaaau

SEQ ID NO: 617785 - RNA, 21 nt, Artificial Sequence
  Synthetic
gauuauuaugugcuggaaaau

SEQ ID NO: 617786 - RNA, 22 nt, Artificial Sequence
  Synthetic
agauuauuaugugcuggaaaau

SEQ ID NO: 617787 - RNA, 23 nt, Artificial Sequence
  Synthetic
cagauuauuaugugcuggaaaau

SEQ ID NO: 617788 - RNA, 24 nt, Artificial Sequence
  Synthetic
ucagauuauuaugugcuggaaaau

SEQ ID NO: 617789 - RNA, 18 nt, Artificial Sequence
  Synthetic
augccgagucuggaaaau

SEQ ID NO: 617790 - RNA, 19 nt, Artificial Sequence
  Synthetic
aaugccgagucuggaaaau

SEQ ID NO: 617791 - RNA, 20 nt, Artificial Sequence
  Synthetic
aaaugccgagucuggaaaau

SEQ ID NO: 617792 - RNA, 21 nt, Artificial Sequence
  Synthetic
aaaaugccgagucuggaaaau

SEQ ID NO: 617793 - RNA, 22 nt, Artificial Sequence
  Synthetic
uaaaaugccgagucuggaaaau

SEQ ID NO: 617794 - RNA, 23 nt, Artificial Sequence
  Synthetic
cuaaaaugccgagucuggaaaau

SEQ ID NO: 617795 - RNA, 24 nt, Artificial Sequence
  Synthetic
gcuaaaaugccgagucuggaaaau

SEQ ID NO: 617796 - RNA, 18 nt, Artificial Sequence
  Synthetic
acauacaaguuggaaaau

SEQ ID NO: 617797 - RNA, 19 nt, Artificial Sequence
  Synthetic
cacauacaaguuggaaaau

SEQ ID NO: 617798 - RNA, 20 nt, Artificial Sequence
  Synthetic
gcacauacaaguuggaaaau

SEQ ID NO: 617799 - RNA, 21 nt, Artificial Sequence
  Synthetic
ugcacauacaaguuggaaaau

SEQ ID NO: 617800 - RNA, 22 nt, Artificial Sequence
  Synthetic
cugcacauacaaguuggaaaau

SEQ ID NO: 617801 - RNA, 23 nt, Artificial Sequence
  Synthetic
ucugcacauacaaguuggaaaau

SEQ ID NO: 617802 - RNA, 24 nt, Artificial Sequence
  Synthetic
gucugcacauacaaguuggaaaau

SEQ ID NO: 617803 - RNA, 18 nt, Artificial Sequence
  Synthetic
aaugagagaaaugaaaau

SEQ ID NO: 617804 - RNA, 19 nt, Artificial Sequence
  Synthetic
uaaugagagaaaugaaaau

SEQ ID NO: 617805 - RNA, 20 nt, Artificial Sequence
  Synthetic
auaaugagagaaaugaaaau

SEQ ID NO: 617806 - RNA, 21 nt, Artificial Sequence
  Synthetic
aauaaugagagaaaugaaaau

SEQ ID NO: 617807 - RNA, 22 nt, Artificial Sequence
  Synthetic
uaauaaugagagaaaugaaaau

SEQ ID NO: 617808 - RNA, 23 nt, Artificial Sequence
  Synthetic
guaauaaugagagaaaugaaaau

SEQ ID NO: 617809 - RNA, 24 nt, Artificial Sequence
  Synthetic
gguaauaaugagagaaaugaaaau

SEQ ID NO: 617810 - RNA, 18 nt, Artificial Sequence
  Synthetic
aaacugaauaaugaaaau

SEQ ID NO: 617811 - RNA, 19 nt, Artificial Sequence
  Synthetic
aaaacugaauaaugaaaau

SEQ ID NO: 617812 - RNA, 20 nt, Artificial Sequence
  Synthetic
caaaacugaauaaugaaaau

SEQ ID NO: 617813 - RNA, 21 nt, Artificial Sequence
  Synthetic
ccaaaacugaauaaugaaaau

SEQ ID NO: 617814 - RNA, 22 nt, Artificial Sequence
  Synthetic
accaaaacugaauaaugaaaau

SEQ ID NO: 617815 - RNA, 23 nt, Artificial Sequence
  Synthetic
uaccaaaacugaauaaugaaaau

SEQ ID NO: 617816 - RNA, 24 nt, Artificial Sequence
  Synthetic
cuaccaaaacugaauaaugaaaau

SEQ ID NO: 617817 - RNA, 18 nt, Artificial Sequence
  Synthetic
uauaaaaguaaugaaaau

SEQ ID NO: 617818 - RNA, 19 nt, Artificial Sequence
  Synthetic
cuauaaaaguaaugaaaau

SEQ ID NO: 617819 - RNA, 20 nt, Artificial Sequence
  Synthetic
acuauaaaaguaaugaaaau

SEQ ID NO: 617820 - RNA, 21 nt, Artificial Sequence
  Synthetic
aacuauaaaaguaaugaaaau

SEQ ID NO: 617821 - RNA, 22 nt, Artificial Sequence
  Synthetic
gaacuauaaaaguaaugaaaau

SEQ ID NO: 617822 - RNA, 23 nt, Artificial Sequence
  Synthetic
ugaacuauaaaaguaaugaaaau

SEQ ID NO: 617823 - RNA, 24 nt, Artificial Sequence
  Synthetic
uugaacuauaaaaguaaugaaaau

SEQ ID NO: 617824 - RNA, 18 nt, Artificial Sequence
  Synthetic
guuuucucagaugaaaau

SEQ ID NO: 617825 - RNA, 19 nt, Artificial Sequence
  Synthetic
aguuuucucagaugaaaau

SEQ ID NO: 617826 - RNA, 20 nt, Artificial Sequence
  Synthetic
aaguuuucucagaugaaaau

SEQ ID NO: 617827 - RNA, 21 nt, Artificial Sequence
  Synthetic
uaaguuuucucagaugaaaau

SEQ ID NO: 617828 - RNA, 22 nt, Artificial Sequence
  Synthetic
cuaaguuuucucagaugaaaau

SEQ ID NO: 617829 - RNA, 23 nt, Artificial Sequence
  Synthetic
ccuaaguuuucucagaugaaaau

SEQ ID NO: 617830 - RNA, 24 nt, Artificial Sequence
  Synthetic
gccuaaguuuucucagaugaaaau

SEQ ID NO: 617831 - RNA, 18 nt, Artificial Sequence
  Synthetic
aacaccauauaugaaaau

SEQ ID NO: 617832 - RNA, 19 nt, Artificial Sequence
  Synthetic
aaacaccauauaugaaaau

SEQ ID NO: 617833 - RNA, 20 nt, Artificial Sequence
  Synthetic
aaaacaccauauaugaaaau

SEQ ID NO: 617834 - RNA, 21 nt, Artificial Sequence
  Synthetic
uaaaacaccauauaugaaaau

SEQ ID NO: 617835 - RNA, 22 nt, Artificial Sequence
  Synthetic
auaaaacaccauauaugaaaau

SEQ ID NO: 617836 - RNA, 23 nt, Artificial Sequence
  Synthetic
aauaaaacaccauauaugaaaau

SEQ ID NO: 617837 - RNA, 24 nt, Artificial Sequence
  Synthetic
aaauaaaacaccauauaugaaaau

SEQ ID NO: 617838 - RNA, 18 nt, Artificial Sequence
  Synthetic
uauauugcuccugaaaau

SEQ ID NO: 617839 - RNA, 19 nt, Artificial Sequence
  Synthetic
cuauauugcuccugaaaau

SEQ ID NO: 617840 - RNA, 20 nt, Artificial Sequence
  Synthetic
gcuauauugcuccugaaaau

SEQ ID NO: 617841 - RNA, 21 nt, Artificial Sequence
  Synthetic
ugcuauauugcuccugaaaau

SEQ ID NO: 617842 - RNA, 22 nt, Artificial Sequence
  Synthetic
uugcuauauugcuccugaaaau

SEQ ID NO: 617843 - RNA, 23 nt, Artificial Sequence
  Synthetic
guugcuauauugcuccugaaaau

SEQ ID NO: 617844 - RNA, 24 nt, Artificial Sequence
  Synthetic
aguugcuauauugcuccugaaaau

SEQ ID NO: 617845 - RNA, 18 nt, Artificial Sequence
  Synthetic
cagaagucuccugaaaau

SEQ ID NO: 617846 - RNA, 19 nt, Artificial Sequence
  Synthetic
acagaagucuccugaaaau

SEQ ID NO: 617847 - RNA, 20 nt, Artificial Sequence
  Synthetic
cacagaagucuccugaaaau

SEQ ID NO: 617848 - RNA, 21 nt, Artificial Sequence
  Synthetic
gcacagaagucuccugaaaau

SEQ ID NO: 617849 - RNA, 22 nt, Artificial Sequence
  Synthetic
cgcacagaagucuccugaaaau

SEQ ID NO: 617850 - RNA, 23 nt, Artificial Sequence
  Synthetic
ccgcacagaagucuccugaaaau

SEQ ID NO: 617851 - RNA, 24 nt, Artificial Sequence
  Synthetic
accgcacagaagucuccugaaaau

SEQ ID NO: 617852 - RNA, 18 nt, Artificial Sequence
  Synthetic
uuuuuuuucucugaaaau

SEQ ID NO: 617853 - RNA, 19 nt, Artificial Sequence
  Synthetic
uuuuuuuuucucugaaaau

SEQ ID NO: 617854 - RNA, 20 nt, Artificial Sequence
  Synthetic
uuuuuuuuuucucugaaaau

SEQ ID NO: 617855 - RNA, 21 nt, Artificial Sequence
  Synthetic
uuuuuuuuuuucucugaaaau

SEQ ID NO: 617856 - RNA, 22 nt, Artificial Sequence
  Synthetic
auuuuuuuuuuucucugaaaau

SEQ ID NO: 617857 - RNA, 23 nt, Artificial Sequence
  Synthetic
gauuuuuuuuuuucucugaaaau

SEQ ID NO: 617858 - RNA, 24 nt, Artificial Sequence
  Synthetic
agauuuuuuuuuuucucugaaaau

SEQ ID NO: 617859 - RNA, 18 nt, Artificial Sequence
  Synthetic
uaaaaugacugugaaaau

SEQ ID NO: 617860 - RNA, 19 nt, Artificial Sequence
  Synthetic
uuaaaaugacugugaaaau

SEQ ID NO: 617861 - RNA, 20 nt, Artificial Sequence
  Synthetic
auuaaaaugacugugaaaau

SEQ ID NO: 617862 - RNA, 21 nt, Artificial Sequence
  Synthetic
aauuaaaaugacugugaaaau

SEQ ID NO: 617863 - RNA, 22 nt, Artificial Sequence
  Synthetic
aaauuaaaaugacugugaaaau

SEQ ID NO: 617864 - RNA, 23 nt, Artificial Sequence
  Synthetic
uaaauuaaaaugacugugaaaau

SEQ ID NO: 617865 - RNA, 24 nt, Artificial Sequence
  Synthetic
cuaaauuaaaaugacugugaaaau

SEQ ID NO: 617866 - RNA, 18 nt, Artificial Sequence
  Synthetic
auaaagauacuugaaaau

SEQ ID NO: 617867 - RNA, 19 nt, Artificial Sequence
  Synthetic
uauaaagauacuugaaaau

SEQ ID NO: 617868 - RNA, 20 nt, Artificial Sequence
  Synthetic
cuauaaagauacuugaaaau

SEQ ID NO: 617869 - RNA, 21 nt, Artificial Sequence
  Synthetic
gcuauaaagauacuugaaaau

SEQ ID NO: 617870 - RNA, 22 nt, Artificial Sequence
  Synthetic
ugcuauaaagauacuugaaaau

SEQ ID NO: 617871 - RNA, 23 nt, Artificial Sequence
  Synthetic
cugcuauaaagauacuugaaaau

SEQ ID NO: 617872 - RNA, 24 nt, Artificial Sequence
  Synthetic
acugcuauaaagauacuugaaaau

SEQ ID NO: 617873 - RNA, 18 nt, Artificial Sequence
  Synthetic
guuaaagaauuugaaaau

SEQ ID NO: 617874 - RNA, 19 nt, Artificial Sequence
  Synthetic
uguuaaagaauuugaaaau

SEQ ID NO: 617875 - RNA, 20 nt, Artificial Sequence
  Synthetic
uuguuaaagaauuugaaaau

SEQ ID NO: 617876 - RNA, 21 nt, Artificial Sequence
  Synthetic
auuguuaaagaauuugaaaau

SEQ ID NO: 617877 - RNA, 22 nt, Artificial Sequence
  Synthetic
cauuguuaaagaauuugaaaau

SEQ ID NO: 617878 - RNA, 23 nt, Artificial Sequence
  Synthetic
acauuguuaaagaauuugaaaau

SEQ ID NO: 617879 - RNA, 24 nt, Artificial Sequence
  Synthetic
aacauuguuaaagaauuugaaaau

SEQ ID NO: 617880 - RNA, 18 nt, Artificial Sequence
  Synthetic
aacuuuucauuugaaaau

SEQ ID NO: 617881 - RNA, 19 nt, Artificial Sequence
  Synthetic
aaacuuuucauuugaaaau

SEQ ID NO: 617882 - RNA, 20 nt, Artificial Sequence
  Synthetic
aaaacuuuucauuugaaaau

SEQ ID NO: 617883 - RNA, 21 nt, Artificial Sequence
  Synthetic
uaaaacuuuucauuugaaaau

SEQ ID NO: 617884 - RNA, 22 nt, Artificial Sequence
  Synthetic
uuaaaacuuuucauuugaaaau

SEQ ID NO: 617885 - RNA, 23 nt, Artificial Sequence
  Synthetic
uuuaaaacuuuucauuugaaaau

SEQ ID NO: 617886 - RNA, 24 nt, Artificial Sequence
  Synthetic
uuuuaaaacuuuucauuugaaaau

SEQ ID NO: 617887 - RNA, 18 nt, Artificial Sequence
  Synthetic
uguuuucucuuugaaaau

SEQ ID NO: 617888 - RNA, 19 nt, Artificial Sequence
  Synthetic
uuguuuucucuuugaaaau

SEQ ID NO: 617889 - RNA, 20 nt, Artificial Sequence
  Synthetic
uuuguuuucucuuugaaaau

SEQ ID NO: 617890 - RNA, 21 nt, Artificial Sequence
  Synthetic
uuuuguuuucucuuugaaaau

SEQ ID NO: 617891 - RNA, 22 nt, Artificial Sequence
  Synthetic
auuuuguuuucucuuugaaaau

SEQ ID NO: 617892 - RNA, 23 nt, Artificial Sequence
  Synthetic
aauuuuguuuucucuuugaaaau

SEQ ID NO: 617893 - RNA, 24 nt, Artificial Sequence
  Synthetic
aaauuuuguuuucucuuugaaaau

SEQ ID NO: 617894 - RNA, 18 nt, Artificial Sequence
  Synthetic
auuuaauaaaaauaaaau

SEQ ID NO: 617895 - RNA, 19 nt, Artificial Sequence
  Synthetic
cauuuaauaaaaauaaaau

SEQ ID NO: 617896 - RNA, 20 nt, Artificial Sequence
  Synthetic
acauuuaauaaaaauaaaau

SEQ ID NO: 617897 - RNA, 21 nt, Artificial Sequence
  Synthetic
uacauuuaauaaaaauaaaau

SEQ ID NO: 617898 - RNA, 22 nt, Artificial Sequence
  Synthetic
guacauuuaauaaaaauaaaau

SEQ ID NO: 617899 - RNA, 23 nt, Artificial Sequence
  Synthetic
gguacauuuaauaaaaauaaaau

SEQ ID NO: 617900 - RNA, 24 nt, Artificial Sequence
  Synthetic
agguacauuuaauaaaaauaaaau

SEQ ID NO: 617901 - RNA, 18 nt, Artificial Sequence
  Synthetic
gaaaaaaucaaauaaaau

SEQ ID NO: 617902 - RNA, 19 nt, Artificial Sequence
  Synthetic
ggaaaaaaucaaauaaaau

SEQ ID NO: 617903 - RNA, 20 nt, Artificial Sequence
  Synthetic
gggaaaaaaucaaauaaaau

SEQ ID NO: 617904 - RNA, 21 nt, Artificial Sequence
  Synthetic
ugggaaaaaaucaaauaaaau

SEQ ID NO: 617905 - RNA, 22 nt, Artificial Sequence
  Synthetic
augggaaaaaaucaaauaaaau

SEQ ID NO: 617906 - RNA, 23 nt, Artificial Sequence
  Synthetic
uaugggaaaaaaucaaauaaaau

SEQ ID NO: 617907 - RNA, 24 nt, Artificial Sequence
  Synthetic
uuaugggaaaaaaucaaauaaaau

SEQ ID NO: 617908 - RNA, 18 nt, Artificial Sequence
  Synthetic
cuugguucucaauaaaau

SEQ ID NO: 617909 - RNA, 19 nt, Artificial Sequence
  Synthetic
ccuugguucucaauaaaau

SEQ ID NO: 617910 - RNA, 20 nt, Artificial Sequence
  Synthetic
uccuugguucucaauaaaau

SEQ ID NO: 617911 - RNA, 21 nt, Artificial Sequence
  Synthetic
cuccuugguucucaauaaaau

SEQ ID NO: 617912 - RNA, 22 nt, Artificial Sequence
  Synthetic
acuccuugguucucaauaaaau

SEQ ID NO: 617913 - RNA, 23 nt, Artificial Sequence
  Synthetic
aacuccuugguucucaauaaaau

SEQ ID NO: 617914 - RNA, 24 nt, Artificial Sequence
  Synthetic
uaacuccuugguucucaauaaaau

SEQ ID NO: 617915 - RNA, 18 nt, Artificial Sequence
  Synthetic
uacuaaaaagaauaaaau

SEQ ID NO: 617916 - RNA, 19 nt, Artificial Sequence
  Synthetic
uuacuaaaaagaauaaaau

SEQ ID NO: 617917 - RNA, 20 nt, Artificial Sequence
  Synthetic
uuuacuaaaaagaauaaaau

SEQ ID NO: 617918 - RNA, 21 nt, Artificial Sequence
  Synthetic
cuuuacuaaaaagaauaaaau

SEQ ID NO: 617919 - RNA, 22 nt, Artificial Sequence
  Synthetic
ucuuuacuaaaaagaauaaaau

SEQ ID NO: 617920 - RNA, 23 nt, Artificial Sequence
  Synthetic
gucuuuacuaaaaagaauaaaau

SEQ ID NO: 617921 - RNA, 24 nt, Artificial Sequence
  Synthetic
ugucuuuacuaaaaagaauaaaau

SEQ ID NO: 617922 - RNA, 18 nt, Artificial Sequence
  Synthetic
gcuugaugauaauaaaau

SEQ ID NO: 617923 - RNA, 19 nt, Artificial Sequence
  Synthetic
ggcuugaugauaauaaaau

SEQ ID NO: 617924 - RNA, 20 nt, Artificial Sequence
  Synthetic
aggcuugaugauaauaaaau

SEQ ID NO: 617925 - RNA, 21 nt, Artificial Sequence
  Synthetic
uaggcuugaugauaauaaaau

SEQ ID NO: 617926 - RNA, 22 nt, Artificial Sequence
  Synthetic
auaggcuugaugauaauaaaau

SEQ ID NO: 617927 - RNA, 23 nt, Artificial Sequence
  Synthetic
uauaggcuugaugauaauaaaau

SEQ ID NO: 617928 - RNA, 24 nt, Artificial Sequence
  Synthetic
cuauaggcuugaugauaauaaaau

SEQ ID NO: 617929 - RNA, 18 nt, Artificial Sequence
  Synthetic
uauaagcuauaauaaaau

SEQ ID NO: 617930 - RNA, 19 nt, Artificial Sequence
  Synthetic
cuauaagcuauaauaaaau

SEQ ID NO: 617931 - RNA, 20 nt, Artificial Sequence
  Synthetic
gcuauaagcuauaauaaaau

SEQ ID NO: 617932 - RNA, 21 nt, Artificial Sequence
  Synthetic
ugcuauaagcuauaauaaaau

SEQ ID NO: 617933 - RNA, 22 nt, Artificial Sequence
  Synthetic
augcuauaagcuauaauaaaau

SEQ ID NO: 617934 - RNA, 23 nt, Artificial Sequence
  Synthetic
aaugcuauaagcuauaauaaaau

SEQ ID NO: 617935 - RNA, 24 nt, Artificial Sequence
  Synthetic
caaugcuauaagcuauaauaaaau

SEQ ID NO: 617936 - RNA, 18 nt, Artificial Sequence
  Synthetic
auguuagaaacauaaaau

SEQ ID NO: 617937 - RNA, 19 nt, Artificial Sequence
  Synthetic
gauguuagaaacauaaaau

SEQ ID NO: 617938 - RNA, 20 nt, Artificial Sequence
  Synthetic
ugauguuagaaacauaaaau

SEQ ID NO: 617939 - RNA, 21 nt, Artificial Sequence
  Synthetic
gugauguuagaaacauaaaau

SEQ ID NO: 617940 - RNA, 22 nt, Artificial Sequence
  Synthetic
ugugauguuagaaacauaaaau

SEQ ID NO: 617941 - RNA, 23 nt, Artificial Sequence
  Synthetic
uugugauguuagaaacauaaaau

SEQ ID NO: 617942 - RNA, 24 nt, Artificial Sequence
  Synthetic
guugugauguuagaaacauaaaau

SEQ ID NO: 617943 - RNA, 18 nt, Artificial Sequence
  Synthetic
guuaaauugccauaaaau

SEQ ID NO: 617944 - RNA, 19 nt, Artificial Sequence
  Synthetic
cguuaaauugccauaaaau

SEQ ID NO: 617945 - RNA, 20 nt, Artificial Sequence
  Synthetic
ucguuaaauugccauaaaau

SEQ ID NO: 617946 - RNA, 21 nt, Artificial Sequence
  Synthetic
cucguuaaauugccauaaaau

SEQ ID NO: 617947 - RNA, 22 nt, Artificial Sequence
  Synthetic
acucguuaaauugccauaaaau

SEQ ID NO: 617948 - RNA, 23 nt, Artificial Sequence
  Synthetic
uacucguuaaauugccauaaaau

SEQ ID NO: 617949 - RNA, 24 nt, Artificial Sequence
  Synthetic
uuacucguuaaauugccauaaaau

SEQ ID NO: 617950 - RNA, 18 nt, Artificial Sequence
  Synthetic
aaucagaguucauaaaau

SEQ ID NO: 617951 - RNA, 19 nt, Artificial Sequence
  Synthetic
gaaucagaguucauaaaau

SEQ ID NO: 617952 - RNA, 20 nt, Artificial Sequence
  Synthetic
ugaaucagaguucauaaaau

SEQ ID NO: 617953 - RNA, 21 nt, Artificial Sequence
  Synthetic
cugaaucagaguucauaaaau

SEQ ID NO: 617954 - RNA, 22 nt, Artificial Sequence
  Synthetic
gcugaaucagaguucauaaaau

SEQ ID NO: 617955 - RNA, 23 nt, Artificial Sequence
  Synthetic
ggcugaaucagaguucauaaaau

SEQ ID NO: 617956 - RNA, 24 nt, Artificial Sequence
  Synthetic
gggcugaaucagaguucauaaaau

SEQ ID NO: 617957 - RNA, 18 nt, Artificial Sequence
  Synthetic
uucuuuuaaauauaaaau

SEQ ID NO: 617958 - RNA, 19 nt, Artificial Sequence
  Synthetic
auucuuuuaaauauaaaau

SEQ ID NO: 617959 - RNA, 20 nt, Artificial Sequence
  Synthetic
cauucuuuuaaauauaaaau

SEQ ID NO: 617960 - RNA, 21 nt, Artificial Sequence
  Synthetic
acauucuuuuaaauauaaaau

SEQ ID NO: 617961 - RNA, 22 nt, Artificial Sequence
  Synthetic
cacauucuuuuaaauauaaaau

SEQ ID NO: 617962 - RNA, 23 nt, Artificial Sequence
  Synthetic
gcacauucuuuuaaauauaaaau

SEQ ID NO: 617963 - RNA, 24 nt, Artificial Sequence
  Synthetic
agcacauucuuuuaaauauaaaau

SEQ ID NO: 617964 - RNA, 18 nt, Artificial Sequence
  Synthetic
cugaccacaauauaaaau

SEQ ID NO: 617965 - RNA, 19 nt, Artificial Sequence
  Synthetic
ucugaccacaauauaaaau

SEQ ID NO: 617966 - RNA, 20 nt, Artificial Sequence
  Synthetic
uucugaccacaauauaaaau

SEQ ID NO: 617967 - RNA, 21 nt, Artificial Sequence
  Synthetic
uuucugaccacaauauaaaau

SEQ ID NO: 617968 - RNA, 22 nt, Artificial Sequence
  Synthetic
uuuucugaccacaauauaaaau

SEQ ID NO: 617969 - RNA, 23 nt, Artificial Sequence
  Synthetic
cuuuucugaccacaauauaaaau

SEQ ID NO: 617970 - RNA, 24 nt, Artificial Sequence
  Synthetic
ucuuuucugaccacaauauaaaau

SEQ ID NO: 617971 - RNA, 18 nt, Artificial Sequence
  Synthetic
uaucugugaauauaaaau

SEQ ID NO: 617972 - RNA, 19 nt, Artificial Sequence
  Synthetic
auaucugugaauauaaaau

SEQ ID NO: 617973 - RNA, 20 nt, Artificial Sequence
  Synthetic
cauaucugugaauauaaaau

SEQ ID NO: 617974 - RNA, 21 nt, Artificial Sequence
  Synthetic
gcauaucugugaauauaaaau

SEQ ID NO: 617975 - RNA, 22 nt, Artificial Sequence
  Synthetic
ggcauaucugugaauauaaaau

SEQ ID NO: 617976 - RNA, 23 nt, Artificial Sequence
  Synthetic
aggcauaucugugaauauaaaau

SEQ ID NO: 617977 - RNA, 24 nt, Artificial Sequence
  Synthetic
aaggcauaucugugaauauaaaau

SEQ ID NO: 617978 - RNA, 18 nt, Artificial Sequence
  Synthetic
auagauuagauauaaaau

SEQ ID NO: 617979 - RNA, 19 nt, Artificial Sequence
  Synthetic
uauagauuagauauaaaau

SEQ ID NO: 617980 - RNA, 20 nt, Artificial Sequence
  Synthetic
uuauagauuagauauaaaau

SEQ ID NO: 617981 - RNA, 21 nt, Artificial Sequence
  Synthetic
cuuauagauuagauauaaaau

SEQ ID NO: 617982 - RNA, 22 nt, Artificial Sequence
  Synthetic
gcuuauagauuagauauaaaau

SEQ ID NO: 617983 - RNA, 23 nt, Artificial Sequence
  Synthetic
ugcuuauagauuagauauaaaau

SEQ ID NO: 617984 - RNA, 24 nt, Artificial Sequence
  Synthetic
uugcuuauagauuagauauaaaau

SEQ ID NO: 617985 - RNA, 18 nt, Artificial Sequence
  Synthetic
uuccuucauguauaaaau

SEQ ID NO: 617986 - RNA, 19 nt, Artificial Sequence
  Synthetic
uuuccuucauguauaaaau

SEQ ID NO: 617987 - RNA, 20 nt, Artificial Sequence
  Synthetic
auuuccuucauguauaaaau

SEQ ID NO: 617988 - RNA, 21 nt, Artificial Sequence
  Synthetic
cauuuccuucauguauaaaau

SEQ ID NO: 617989 - RNA, 22 nt, Artificial Sequence
  Synthetic
acauuuccuucauguauaaaau

SEQ ID NO: 617990 - RNA, 23 nt, Artificial Sequence
  Synthetic
cacauuuccuucauguauaaaau

SEQ ID NO: 617991 - RNA, 24 nt, Artificial Sequence
  Synthetic
ucacauuuccuucauguauaaaau

SEQ ID NO: 617992 - RNA, 18 nt, Artificial Sequence
  Synthetic
accacuuucuuauaaaau

SEQ ID NO: 617993 - RNA, 19 nt, Artificial Sequence
  Synthetic
uaccacuuucuuauaaaau

SEQ ID NO: 617994 - RNA, 20 nt, Artificial Sequence
  Synthetic
auaccacuuucuuauaaaau

SEQ ID NO: 617995 - RNA, 21 nt, Artificial Sequence
  Synthetic
uauaccacuuucuuauaaaau

SEQ ID NO: 617996 - RNA, 22 nt, Artificial Sequence
  Synthetic
auauaccacuuucuuauaaaau

SEQ ID NO: 617997 - RNA, 23 nt, Artificial Sequence
  Synthetic
cauauaccacuuucuuauaaaau

SEQ ID NO: 617998 - RNA, 24 nt, Artificial Sequence
  Synthetic
gcauauaccacuuucuuauaaaau

SEQ ID NO: 617999 - RNA, 18 nt, Artificial Sequence
  Synthetic
gggucuccuuuauaaaau

SEQ ID NO: 618000 - RNA, 19 nt, Artificial Sequence
  Synthetic
agggucuccuuuauaaaau

SEQ ID NO: 618001 - RNA, 20 nt, Artificial Sequence
  Synthetic
aagggucuccuuuauaaaau

SEQ ID NO: 618002 - RNA, 21 nt, Artificial Sequence
  Synthetic
caagggucuccuuuauaaaau

SEQ ID NO: 618003 - RNA, 22 nt, Artificial Sequence
  Synthetic
ucaagggucuccuuuauaaaau

SEQ ID NO: 618004 - RNA, 23 nt, Artificial Sequence
  Synthetic
uucaagggucuccuuuauaaaau

SEQ ID NO: 618005 - RNA, 24 nt, Artificial Sequence
  Synthetic
auucaagggucuccuuuauaaaau

SEQ ID NO: 618006 - RNA, 18 nt, Artificial Sequence
  Synthetic
gcaagaaauaacuaaaau

SEQ ID NO: 618007 - RNA, 19 nt, Artificial Sequence
  Synthetic
ggcaagaaauaacuaaaau

SEQ ID NO: 618008 - RNA, 20 nt, Artificial Sequence
  Synthetic
aggcaagaaauaacuaaaau

SEQ ID NO: 618009 - RNA, 21 nt, Artificial Sequence
  Synthetic
aaggcaagaaauaacuaaaau

SEQ ID NO: 618010 - RNA, 22 nt, Artificial Sequence
  Synthetic
gaaggcaagaaauaacuaaaau

SEQ ID NO: 618011 - RNA, 23 nt, Artificial Sequence
  Synthetic
agaaggcaagaaauaacuaaaau

SEQ ID NO: 618012 - RNA, 24 nt, Artificial Sequence
  Synthetic
cagaaggcaagaaauaacuaaaau

SEQ ID NO: 618013 - RNA, 18 nt, Artificial Sequence
  Synthetic
uuuggacugcacuaaaau

SEQ ID NO: 618014 - RNA, 19 nt, Artificial Sequence
  Synthetic
uuuuggacugcacuaaaau

SEQ ID NO: 618015 - RNA, 20 nt, Artificial Sequence
  Synthetic
auuuuggacugcacuaaaau

SEQ ID NO: 618016 - RNA, 21 nt, Artificial Sequence
  Synthetic
uauuuuggacugcacuaaaau

SEQ ID NO: 618017 - RNA, 22 nt, Artificial Sequence
  Synthetic
uuauuuuggacugcacuaaaau

SEQ ID NO: 618018 - RNA, 23 nt, Artificial Sequence
  Synthetic
cuuauuuuggacugcacuaaaau

SEQ ID NO: 618019 - RNA, 24 nt, Artificial Sequence
  Synthetic
gcuuauuuuggacugcacuaaaau

SEQ ID NO: 618020 - RNA, 18 nt, Artificial Sequence
  Synthetic
agaaucgaagacuaaaau

SEQ ID NO: 618021 - RNA, 19 nt, Artificial Sequence
  Synthetic
aagaaucgaagacuaaaau

SEQ ID NO: 618022 - RNA, 20 nt, Artificial Sequence
  Synthetic
gaagaaucgaagacuaaaau

SEQ ID NO: 618023 - RNA, 21 nt, Artificial Sequence
  Synthetic
ugaagaaucgaagacuaaaau

SEQ ID NO: 618024 - RNA, 22 nt, Artificial Sequence
  Synthetic
cugaagaaucgaagacuaaaau

SEQ ID NO: 618025 - RNA, 23 nt, Artificial Sequence
  Synthetic
acugaagaaucgaagacuaaaau

SEQ ID NO: 618026 - RNA, 24 nt, Artificial Sequence
  Synthetic
gacugaagaaucgaagacuaaaau

SEQ ID NO: 618027 - RNA, 18 nt, Artificial Sequence
  Synthetic
aacaacuacuacuaaaau

SEQ ID NO: 618028 - RNA, 19 nt, Artificial Sequence
  Synthetic
caacaacuacuacuaaaau

SEQ ID NO: 618029 - RNA, 20 nt, Artificial Sequence
  Synthetic
gcaacaacuacuacuaaaau

SEQ ID NO: 618030 - RNA, 21 nt, Artificial Sequence
  Synthetic
ugcaacaacuacuacuaaaau

SEQ ID NO: 618031 - RNA, 22 nt, Artificial Sequence
  Synthetic
cugcaacaacuacuacuaaaau

SEQ ID NO: 618032 - RNA, 23 nt, Artificial Sequence
  Synthetic
ucugcaacaacuacuacuaaaau

SEQ ID NO: 618033 - RNA, 24 nt, Artificial Sequence
  Synthetic
cucugcaacaacuacuacuaaaau

SEQ ID NO: 618034 - RNA, 18 nt, Artificial Sequence
  Synthetic
ugacagcacaccuaaaau

SEQ ID NO: 618035 - RNA, 19 nt, Artificial Sequence
  Synthetic
augacagcacaccuaaaau

SEQ ID NO: 618036 - RNA, 20 nt, Artificial Sequence
  Synthetic
aaugacagcacaccuaaaau

SEQ ID NO: 618037 - RNA, 21 nt, Artificial Sequence
  Synthetic
caaugacagcacaccuaaaau

SEQ ID NO: 618038 - RNA, 22 nt, Artificial Sequence
  Synthetic
ucaaugacagcacaccuaaaau

SEQ ID NO: 618039 - RNA, 23 nt, Artificial Sequence
  Synthetic
uucaaugacagcacaccuaaaau

SEQ ID NO: 618040 - RNA, 24 nt, Artificial Sequence
  Synthetic
cuucaaugacagcacaccuaaaau

SEQ ID NO: 618041 - RNA, 18 nt, Artificial Sequence
  Synthetic
gugacauaggccuaaaau

SEQ ID NO: 618042 - RNA, 19 nt, Artificial Sequence
  Synthetic
ugugacauaggccuaaaau

SEQ ID NO: 618043 - RNA, 20 nt, Artificial Sequence
  Synthetic
uugugacauaggccuaaaau

SEQ ID NO: 618044 - RNA, 21 nt, Artificial Sequence
  Synthetic
cuugugacauaggccuaaaau

SEQ ID NO: 618045 - RNA, 22 nt, Artificial Sequence
  Synthetic
gcuugugacauaggccuaaaau

SEQ ID NO: 618046 - RNA, 23 nt, Artificial Sequence
  Synthetic
agcuugugacauaggccuaaaau

SEQ ID NO: 618047 - RNA, 24 nt, Artificial Sequence
  Synthetic
gagcuugugacauaggccuaaaau

SEQ ID NO: 618048 - RNA, 18 nt, Artificial Sequence
  Synthetic
uugaaagauggcuaaaau

SEQ ID NO: 618049 - RNA, 19 nt, Artificial Sequence
  Synthetic
auugaaagauggcuaaaau

SEQ ID NO: 618050 - RNA, 20 nt, Artificial Sequence
  Synthetic
aauugaaagauggcuaaaau

SEQ ID NO: 618051 - RNA, 21 nt, Artificial Sequence
  Synthetic
caauugaaagauggcuaaaau

SEQ ID NO: 618052 - RNA, 22 nt, Artificial Sequence
  Synthetic
acaauugaaagauggcuaaaau

SEQ ID NO: 618053 - RNA, 23 nt, Artificial Sequence
  Synthetic
aacaauugaaagauggcuaaaau

SEQ ID NO: 618054 - RNA, 24 nt, Artificial Sequence
  Synthetic
gaacaauugaaagauggcuaaaau

SEQ ID NO: 618055 - RNA, 18 nt, Artificial Sequence
  Synthetic
ugaaagcaaaucuaaaau

SEQ ID NO: 618056 - RNA, 19 nt, Artificial Sequence
  Synthetic
augaaagcaaaucuaaaau

SEQ ID NO: 618057 - RNA, 20 nt, Artificial Sequence
  Synthetic
aaugaaagcaaaucuaaaau

SEQ ID NO: 618058 - RNA, 21 nt, Artificial Sequence
  Synthetic
gaaugaaagcaaaucuaaaau

SEQ ID NO: 618059 - RNA, 22 nt, Artificial Sequence
  Synthetic
ggaaugaaagcaaaucuaaaau

SEQ ID NO: 618060 - RNA, 23 nt, Artificial Sequence
  Synthetic
aggaaugaaagcaaaucuaaaau

SEQ ID NO: 618061 - RNA, 24 nt, Artificial Sequence
  Synthetic
aaggaaugaaagcaaaucuaaaau

SEQ ID NO: 618062 - RNA, 18 nt, Artificial Sequence
  Synthetic
gaggauacacucuaaaau

SEQ ID NO: 618063 - RNA, 19 nt, Artificial Sequence
  Synthetic
agaggauacacucuaaaau

SEQ ID NO: 618064 - RNA, 20 nt, Artificial Sequence
  Synthetic
uagaggauacacucuaaaau

SEQ ID NO: 618065 - RNA, 21 nt, Artificial Sequence
  Synthetic
auagaggauacacucuaaaau

SEQ ID NO: 618066 - RNA, 22 nt, Artificial Sequence
  Synthetic
uauagaggauacacucuaaaau

SEQ ID NO: 618067 - RNA, 23 nt, Artificial Sequence
  Synthetic
uuauagaggauacacucuaaaau

SEQ ID NO: 618068 - RNA, 24 nt, Artificial Sequence
  Synthetic
cuuauagaggauacacucuaaaau

SEQ ID NO: 618069 - RNA, 18 nt, Artificial Sequence
  Synthetic
cccaauauggucuaaaau

SEQ ID NO: 618070 - RNA, 19 nt, Artificial Sequence
  Synthetic
acccaauauggucuaaaau

SEQ ID NO: 618071 - RNA, 20 nt, Artificial Sequence
  Synthetic
uacccaauauggucuaaaau

SEQ ID NO: 618072 - RNA, 21 nt, Artificial Sequence
  Synthetic
uuacccaauauggucuaaaau

SEQ ID NO: 618073 - RNA, 22 nt, Artificial Sequence
  Synthetic
guuacccaauauggucuaaaau

SEQ ID NO: 618074 - RNA, 23 nt, Artificial Sequence
  Synthetic
aguuacccaauauggucuaaaau

SEQ ID NO: 618075 - RNA, 24 nt, Artificial Sequence
  Synthetic
aaguuacccaauauggucuaaaau

SEQ ID NO: 618076 - RNA, 18 nt, Artificial Sequence
  Synthetic
gacccaaauaaguaaaau

SEQ ID NO: 618077 - RNA, 19 nt, Artificial Sequence
  Synthetic
agacccaaauaaguaaaau

SEQ ID NO: 618078 - RNA, 20 nt, Artificial Sequence
  Synthetic
aagacccaaauaaguaaaau

SEQ ID NO: 618079 - RNA, 21 nt, Artificial Sequence
  Synthetic
gaagacccaaauaaguaaaau

SEQ ID NO: 618080 - RNA, 22 nt, Artificial Sequence
  Synthetic
agaagacccaaauaaguaaaau

SEQ ID NO: 618081 - RNA, 23 nt, Artificial Sequence
  Synthetic
gagaagacccaaauaaguaaaau

SEQ ID NO: 618082 - RNA, 24 nt, Artificial Sequence
  Synthetic
ggagaagacccaaauaaguaaaau

SEQ ID NO: 618083 - RNA, 18 nt, Artificial Sequence
  Synthetic
aauucaaauaaguaaaau

SEQ ID NO: 618084 - RNA, 19 nt, Artificial Sequence
  Synthetic
aaauucaaauaaguaaaau

SEQ ID NO: 618085 - RNA, 20 nt, Artificial Sequence
  Synthetic
aaaauucaaauaaguaaaau

SEQ ID NO: 618086 - RNA, 21 nt, Artificial Sequence
  Synthetic
gaaaauucaaauaaguaaaau

SEQ ID NO: 618087 - RNA, 22 nt, Artificial Sequence
  Synthetic
ggaaaauucaaauaaguaaaau

SEQ ID NO: 618088 - RNA, 23 nt, Artificial Sequence
  Synthetic
aggaaaauucaaauaaguaaaau

SEQ ID NO: 618089 - RNA, 24 nt, Artificial Sequence
  Synthetic
aaggaaaauucaaauaaguaaaau

SEQ ID NO: 618090 - RNA, 18 nt, Artificial Sequence
  Synthetic
ucuuaaaaacaguaaaau

SEQ ID NO: 618091 - RNA, 19 nt, Artificial Sequence
  Synthetic
aucuuaaaaacaguaaaau

SEQ ID NO: 618092 - RNA, 20 nt, Artificial Sequence
  Synthetic
uaucuuaaaaacaguaaaau

SEQ ID NO: 618093 - RNA, 21 nt, Artificial Sequence
  Synthetic
guaucuuaaaaacaguaaaau

SEQ ID NO: 618094 - RNA, 22 nt, Artificial Sequence
  Synthetic
gguaucuuaaaaacaguaaaau

SEQ ID NO: 618095 - RNA, 23 nt, Artificial Sequence
  Synthetic
ugguaucuuaaaaacaguaaaau

SEQ ID NO: 618096 - RNA, 24 nt, Artificial Sequence
  Synthetic
augguaucuuaaaaacaguaaaau

SEQ ID NO: 618097 - RNA, 18 nt, Artificial Sequence
  Synthetic
uguauagaagaguaaaau

SEQ ID NO: 618098 - RNA, 19 nt, Artificial Sequence
  Synthetic
uuguauagaagaguaaaau

SEQ ID NO: 618099 - RNA, 20 nt, Artificial Sequence
  Synthetic
auuguauagaagaguaaaau

SEQ ID NO: 618100 - RNA, 21 nt, Artificial Sequence
  Synthetic
cauuguauagaagaguaaaau

SEQ ID NO: 618101 - RNA, 22 nt, Artificial Sequence
  Synthetic
ucauuguauagaagaguaaaau

SEQ ID NO: 618102 - RNA, 23 nt, Artificial Sequence
  Synthetic
cucauuguauagaagaguaaaau

SEQ ID NO: 618103 - RNA, 24 nt, Artificial Sequence
  Synthetic
acucauuguauagaagaguaaaau

SEQ ID NO: 618104 - RNA, 18 nt, Artificial Sequence
  Synthetic
aaauagucaagguaaaau

SEQ ID NO: 618105 - RNA, 19 nt, Artificial Sequence
  Synthetic
aaaauagucaagguaaaau

SEQ ID NO: 618106 - RNA, 20 nt, Artificial Sequence
  Synthetic
caaaauagucaagguaaaau

SEQ ID NO: 618107 - RNA, 21 nt, Artificial Sequence
  Synthetic
acaaaauagucaagguaaaau

SEQ ID NO: 618108 - RNA, 22 nt, Artificial Sequence
  Synthetic
cacaaaauagucaagguaaaau

SEQ ID NO: 618109 - RNA, 23 nt, Artificial Sequence
  Synthetic
acacaaaauagucaagguaaaau

SEQ ID NO: 618110 - RNA, 24 nt, Artificial Sequence
  Synthetic
uacacaaaauagucaagguaaaau

SEQ ID NO: 618111 - RNA, 18 nt, Artificial Sequence
  Synthetic
ugcauugagagguaaaau

SEQ ID NO: 618112 - RNA, 19 nt, Artificial Sequence
  Synthetic
gugcauugagagguaaaau

SEQ ID NO: 618113 - RNA, 20 nt, Artificial Sequence
  Synthetic
ggugcauugagagguaaaau

SEQ ID NO: 618114 - RNA, 21 nt, Artificial Sequence
  Synthetic
aggugcauugagagguaaaau

SEQ ID NO: 618115 - RNA, 22 nt, Artificial Sequence
  Synthetic
aaggugcauugagagguaaaau

SEQ ID NO: 618116 - RNA, 23 nt, Artificial Sequence
  Synthetic
gaaggugcauugagagguaaaau

SEQ ID NO: 618117 - RNA, 24 nt, Artificial Sequence
  Synthetic
ugaaggugcauugagagguaaaau

SEQ ID NO: 618118 - RNA, 18 nt, Artificial Sequence
  Synthetic
cugacaaaaggguaaaau

SEQ ID NO: 618119 - RNA, 19 nt, Artificial Sequence
  Synthetic
ucugacaaaaggguaaaau

SEQ ID NO: 618120 - RNA, 20 nt, Artificial Sequence
  Synthetic
cucugacaaaaggguaaaau

SEQ ID NO: 618121 - RNA, 21 nt, Artificial Sequence
  Synthetic
ucucugacaaaaggguaaaau

SEQ ID NO: 618122 - RNA, 22 nt, Artificial Sequence
  Synthetic
uucucugacaaaaggguaaaau

SEQ ID NO: 618123 - RNA, 23 nt, Artificial Sequence
  Synthetic
auucucugacaaaaggguaaaau

SEQ ID NO: 618124 - RNA, 24 nt, Artificial Sequence
  Synthetic
uauucucugacaaaaggguaaaau

SEQ ID NO: 618125 - RNA, 18 nt, Artificial Sequence
  Synthetic
aaauuuaaccuguaaaau

SEQ ID NO: 618126 - RNA, 19 nt, Artificial Sequence
  Synthetic
uaaauuuaaccuguaaaau

SEQ ID NO: 618127 - RNA, 20 nt, Artificial Sequence
  Synthetic
uuaaauuuaaccuguaaaau

SEQ ID NO: 618128 - RNA, 21 nt, Artificial Sequence
  Synthetic
auuaaauuuaaccuguaaaau

SEQ ID NO: 618129 - RNA, 22 nt, Artificial Sequence
  Synthetic
uauuaaauuuaaccuguaaaau

SEQ ID NO: 618130 - RNA, 23 nt, Artificial Sequence
  Synthetic
auauuaaauuuaaccuguaaaau

SEQ ID NO: 618131 - RNA, 24 nt, Artificial Sequence
  Synthetic
cauauuaaauuuaaccuguaaaau

SEQ ID NO: 618132 - RNA, 18 nt, Artificial Sequence
  Synthetic
gaacaaggucuguaaaau

SEQ ID NO: 618133 - RNA, 19 nt, Artificial Sequence
  Synthetic
ggaacaaggucuguaaaau

SEQ ID NO: 618134 - RNA, 20 nt, Artificial Sequence
  Synthetic
uggaacaaggucuguaaaau

SEQ ID NO: 618135 - RNA, 21 nt, Artificial Sequence
  Synthetic
uuggaacaaggucuguaaaau

SEQ ID NO: 618136 - RNA, 22 nt, Artificial Sequence
  Synthetic
guuggaacaaggucuguaaaau

SEQ ID NO: 618137 - RNA, 23 nt, Artificial Sequence
  Synthetic
uguuggaacaaggucuguaaaau

SEQ ID NO: 618138 - RNA, 24 nt, Artificial Sequence
  Synthetic
uuguuggaacaaggucuguaaaau

SEQ ID NO: 618139 - RNA, 18 nt, Artificial Sequence
  Synthetic
ggaaaaauauuguaaaau

SEQ ID NO: 618140 - RNA, 19 nt, Artificial Sequence
  Synthetic
uggaaaaauauuguaaaau

SEQ ID NO: 618141 - RNA, 20 nt, Artificial Sequence
  Synthetic
uuggaaaaauauuguaaaau

SEQ ID NO: 618142 - RNA, 21 nt, Artificial Sequence
  Synthetic
uuuggaaaaauauuguaaaau

SEQ ID NO: 618143 - RNA, 22 nt, Artificial Sequence
  Synthetic
uuuuggaaaaauauuguaaaau

SEQ ID NO: 618144 - RNA, 23 nt, Artificial Sequence
  Synthetic
uuuuuggaaaaauauuguaaaau

SEQ ID NO: 618145 - RNA, 24 nt, Artificial Sequence
  Synthetic
guuuuuggaaaaauauuguaaaau

SEQ ID NO: 618146 - RNA, 18 nt, Artificial Sequence
  Synthetic
uguccucauuuguaaaau

SEQ ID NO: 618147 - RNA, 19 nt, Artificial Sequence
  Synthetic
guguccucauuuguaaaau

SEQ ID NO: 618148 - RNA, 20 nt, Artificial Sequence
  Synthetic
uguguccucauuuguaaaau

SEQ ID NO: 618149 - RNA, 21 nt, Artificial Sequence
  Synthetic
cuguguccucauuuguaaaau

SEQ ID NO: 618150 - RNA, 22 nt, Artificial Sequence
  Synthetic
ucuguguccucauuuguaaaau

SEQ ID NO: 618151 - RNA, 23 nt, Artificial Sequence
  Synthetic
cucuguguccucauuuguaaaau

SEQ ID NO: 618152 - RNA, 24 nt, Artificial Sequence
  Synthetic
ccucuguguccucauuuguaaaau

SEQ ID NO: 618153 - RNA, 18 nt, Artificial Sequence
  Synthetic
gaaccacagaauuaaaau

SEQ ID NO: 618154 - RNA, 19 nt, Artificial Sequence
  Synthetic
agaaccacagaauuaaaau

SEQ ID NO: 618155 - RNA, 20 nt, Artificial Sequence
  Synthetic
aagaaccacagaauuaaaau

SEQ ID NO: 618156 - RNA, 21 nt, Artificial Sequence
  Synthetic
aaagaaccacagaauuaaaau

SEQ ID NO: 618157 - RNA, 22 nt, Artificial Sequence
  Synthetic
uaaagaaccacagaauuaaaau

SEQ ID NO: 618158 - RNA, 23 nt, Artificial Sequence
  Synthetic
uuaaagaaccacagaauuaaaau

SEQ ID NO: 618159 - RNA, 24 nt, Artificial Sequence
  Synthetic
auuaaagaaccacagaauuaaaau

SEQ ID NO: 618160 - RNA, 18 nt, Artificial Sequence
  Synthetic
cuuaggccccauuaaaau

SEQ ID NO: 618161 - RNA, 19 nt, Artificial Sequence
  Synthetic
ucuuaggccccauuaaaau

SEQ ID NO: 618162 - RNA, 20 nt, Artificial Sequence
  Synthetic
uucuuaggccccauuaaaau

SEQ ID NO: 618163 - RNA, 21 nt, Artificial Sequence
  Synthetic
uuucuuaggccccauuaaaau

SEQ ID NO: 618164 - RNA, 22 nt, Artificial Sequence
  Synthetic
cuuucuuaggccccauuaaaau

SEQ ID NO: 618165 - RNA, 23 nt, Artificial Sequence
  Synthetic
ucuuucuuaggccccauuaaaau

SEQ ID NO: 618166 - RNA, 24 nt, Artificial Sequence
  Synthetic
uucuuucuuaggccccauuaaaau

SEQ ID NO: 618167 - RNA, 18 nt, Artificial Sequence
  Synthetic
ucaaaguuugauuaaaau

SEQ ID NO: 618168 - RNA, 19 nt, Artificial Sequence
  Synthetic
gucaaaguuugauuaaaau

SEQ ID NO: 618169 - RNA, 20 nt, Artificial Sequence
  Synthetic
ggucaaaguuugauuaaaau

SEQ ID NO: 618170 - RNA, 21 nt, Artificial Sequence
  Synthetic
cggucaaaguuugauuaaaau

SEQ ID NO: 618171 - RNA, 22 nt, Artificial Sequence
  Synthetic
acggucaaaguuugauuaaaau

SEQ ID NO: 618172 - RNA, 23 nt, Artificial Sequence
  Synthetic
uacggucaaaguuugauuaaaau

SEQ ID NO: 618173 - RNA, 24 nt, Artificial Sequence
  Synthetic
auacggucaaaguuugauuaaaau

SEQ ID NO: 618174 - RNA, 18 nt, Artificial Sequence
  Synthetic
ccuuuaauaacuuaaaau

SEQ ID NO: 618175 - RNA, 19 nt, Artificial Sequence
  Synthetic
gccuuuaauaacuuaaaau

SEQ ID NO: 618176 - RNA, 20 nt, Artificial Sequence
  Synthetic
agccuuuaauaacuuaaaau

SEQ ID NO: 618177 - RNA, 21 nt, Artificial Sequence
  Synthetic
uagccuuuaauaacuuaaaau

SEQ ID NO: 618178 - RNA, 22 nt, Artificial Sequence
  Synthetic
auagccuuuaauaacuuaaaau

SEQ ID NO: 618179 - RNA, 23 nt, Artificial Sequence
  Synthetic
aauagccuuuaauaacuuaaaau

SEQ ID NO: 618180 - RNA, 24 nt, Artificial Sequence
  Synthetic
aaauagccuuuaauaacuuaaaau

SEQ ID NO: 618181 - RNA, 18 nt, Artificial Sequence
  Synthetic
ugcagauuaucuuaaaau

SEQ ID NO: 618182 - RNA, 19 nt, Artificial Sequence
  Synthetic
gugcagauuaucuuaaaau

SEQ ID NO: 618183 - RNA, 20 nt, Artificial Sequence
  Synthetic
ugugcagauuaucuuaaaau

SEQ ID NO: 618184 - RNA, 21 nt, Artificial Sequence
  Synthetic
cugugcagauuaucuuaaaau

SEQ ID NO: 618185 - RNA, 22 nt, Artificial Sequence
  Synthetic
acugugcagauuaucuuaaaau

SEQ ID NO: 618186 - RNA, 23 nt, Artificial Sequence
  Synthetic
aacugugcagauuaucuuaaaau

SEQ ID NO: 618187 - RNA, 24 nt, Artificial Sequence
  Synthetic
aaacugugcagauuaucuuaaaau

SEQ ID NO: 618188 - RNA, 18 nt, Artificial Sequence
  Synthetic
guuuccucgucuuaaaau

SEQ ID NO: 618189 - RNA, 19 nt, Artificial Sequence
  Synthetic
aguuuccucgucuuaaaau

SEQ ID NO: 618190 - RNA, 20 nt, Artificial Sequence
  Synthetic
caguuuccucgucuuaaaau

SEQ ID NO: 618191 - RNA, 21 nt, Artificial Sequence
  Synthetic
ucaguuuccucgucuuaaaau

SEQ ID NO: 618192 - RNA, 22 nt, Artificial Sequence
  Synthetic
cucaguuuccucgucuuaaaau

SEQ ID NO: 618193 - RNA, 23 nt, Artificial Sequence
  Synthetic
ccucaguuuccucgucuuaaaau

SEQ ID NO: 618194 - RNA, 24 nt, Artificial Sequence
  Synthetic
cccucaguuuccucgucuuaaaau

SEQ ID NO: 618195 - RNA, 18 nt, Artificial Sequence
  Synthetic
ucauugucuucuuaaaau

SEQ ID NO: 618196 - RNA, 19 nt, Artificial Sequence
  Synthetic
uucauugucuucuuaaaau

SEQ ID NO: 618197 - RNA, 20 nt, Artificial Sequence
  Synthetic
auucauugucuucuuaaaau

SEQ ID NO: 618198 - RNA, 21 nt, Artificial Sequence
  Synthetic
cauucauugucuucuuaaaau

SEQ ID NO: 618199 - RNA, 22 nt, Artificial Sequence
  Synthetic
acauucauugucuucuuaaaau

SEQ ID NO: 618200 - RNA, 23 nt, Artificial Sequence
  Synthetic
aacauucauugucuucuuaaaau

SEQ ID NO: 618201 - RNA, 24 nt, Artificial Sequence
  Synthetic
aaacauucauugucuucuuaaaau

SEQ ID NO: 618202 - RNA, 18 nt, Artificial Sequence
  Synthetic
gagucuuuaaguuaaaau

SEQ ID NO: 618203 - RNA, 19 nt, Artificial Sequence
  Synthetic
ggagucuuuaaguuaaaau

SEQ ID NO: 618204 - RNA, 20 nt, Artificial Sequence
  Synthetic
cggagucuuuaaguuaaaau

SEQ ID NO: 618205 - RNA, 21 nt, Artificial Sequence
  Synthetic
acggagucuuuaaguuaaaau

SEQ ID NO: 618206 - RNA, 22 nt, Artificial Sequence
  Synthetic
gacggagucuuuaaguuaaaau

SEQ ID NO: 618207 - RNA, 23 nt, Artificial Sequence
  Synthetic
agacggagucuuuaaguuaaaau

SEQ ID NO: 618208 - RNA, 24 nt, Artificial Sequence
  Synthetic
aagacggagucuuuaaguuaaaau

SEQ ID NO: 618209 - RNA, 18 nt, Artificial Sequence
  Synthetic
gaagagauauguuaaaau

SEQ ID NO: 618210 - RNA, 19 nt, Artificial Sequence
  Synthetic
ugaagagauauguuaaaau

SEQ ID NO: 618211 - RNA, 20 nt, Artificial Sequence
  Synthetic
gugaagagauauguuaaaau

SEQ ID NO: 618212 - RNA, 21 nt, Artificial Sequence
  Synthetic
ugugaagagauauguuaaaau

SEQ ID NO: 618213 - RNA, 22 nt, Artificial Sequence
  Synthetic
uugugaagagauauguuaaaau

SEQ ID NO: 618214 - RNA, 23 nt, Artificial Sequence
  Synthetic
guugugaagagauauguuaaaau

SEQ ID NO: 618215 - RNA, 24 nt, Artificial Sequence
  Synthetic
aguugugaagagauauguuaaaau

SEQ ID NO: 618216 - RNA, 18 nt, Artificial Sequence
  Synthetic
gaguaagacauuuaaaau

SEQ ID NO: 618217 - RNA, 19 nt, Artificial Sequence
  Synthetic
ugaguaagacauuuaaaau

SEQ ID NO: 618218 - RNA, 20 nt, Artificial Sequence
  Synthetic
augaguaagacauuuaaaau

SEQ ID NO: 618219 - RNA, 21 nt, Artificial Sequence
  Synthetic
uaugaguaagacauuuaaaau

SEQ ID NO: 618220 - RNA, 22 nt, Artificial Sequence
  Synthetic
auaugaguaagacauuuaaaau

SEQ ID NO: 618221 - RNA, 23 nt, Artificial Sequence
  Synthetic
uauaugaguaagacauuuaaaau

SEQ ID NO: 618222 - RNA, 24 nt, Artificial Sequence
  Synthetic
cuauaugaguaagacauuuaaaau

SEQ ID NO: 618223 - RNA, 18 nt, Artificial Sequence
  Synthetic
agucccuggauuuaaaau

SEQ ID NO: 618224 - RNA, 19 nt, Artificial Sequence
  Synthetic
gagucccuggauuuaaaau

SEQ ID NO: 618225 - RNA, 20 nt, Artificial Sequence
  Synthetic
cgagucccuggauuuaaaau

SEQ ID NO: 618226 - RNA, 21 nt, Artificial Sequence
  Synthetic
acgagucccuggauuuaaaau

SEQ ID NO: 618227 - RNA, 22 nt, Artificial Sequence
  Synthetic
aacgagucccuggauuuaaaau

SEQ ID NO: 618228 - RNA, 23 nt, Artificial Sequence
  Synthetic
aaacgagucccuggauuuaaaau

SEQ ID NO: 618229 - RNA, 24 nt, Artificial Sequence
  Synthetic
gaaacgagucccuggauuuaaaau

SEQ ID NO: 618230 - RNA, 18 nt, Artificial Sequence
  Synthetic
cuuuuaagacuuuaaaau

SEQ ID NO: 618231 - RNA, 19 nt, Artificial Sequence
  Synthetic
ucuuuuaagacuuuaaaau

SEQ ID NO: 618232 - RNA, 20 nt, Artificial Sequence
  Synthetic
cucuuuuaagacuuuaaaau

SEQ ID NO: 618233 - RNA, 21 nt, Artificial Sequence
  Synthetic
ucucuuuuaagacuuuaaaau

SEQ ID NO: 618234 - RNA, 22 nt, Artificial Sequence
  Synthetic
cucucuuuuaagacuuuaaaau

SEQ ID NO: 618235 - RNA, 23 nt, Artificial Sequence
  Synthetic
acucucuuuuaagacuuuaaaau

SEQ ID NO: 618236 - RNA, 24 nt, Artificial Sequence
  Synthetic
gacucucuuuuaagacuuuaaaau

SEQ ID NO: 618237 - RNA, 18 nt, Artificial Sequence
  Synthetic
aauaccuuacuuuaaaau

SEQ ID NO: 618238 - RNA, 19 nt, Artificial Sequence
  Synthetic
gaauaccuuacuuuaaaau

SEQ ID NO: 618239 - RNA, 20 nt, Artificial Sequence
  Synthetic
agaauaccuuacuuuaaaau

SEQ ID NO: 618240 - RNA, 21 nt, Artificial Sequence
  Synthetic
uagaauaccuuacuuuaaaau

SEQ ID NO: 618241 - RNA, 22 nt, Artificial Sequence
  Synthetic
uuagaauaccuuacuuuaaaau

SEQ ID NO: 618242 - RNA, 23 nt, Artificial Sequence
  Synthetic
uuuagaauaccuuacuuuaaaau

SEQ ID NO: 618243 - RNA, 24 nt, Artificial Sequence
  Synthetic
uuuuagaauaccuuacuuuaaaau

SEQ ID NO: 618244 - RNA, 18 nt, Artificial Sequence
  Synthetic
aaaauuguuguuuaaaau

SEQ ID NO: 618245 - RNA, 19 nt, Artificial Sequence
  Synthetic
uaaaauuguuguuuaaaau

SEQ ID NO: 618246 - RNA, 20 nt, Artificial Sequence
  Synthetic
auaaaauuguuguuuaaaau

SEQ ID NO: 618247 - RNA, 21 nt, Artificial Sequence
  Synthetic
cauaaaauuguuguuuaaaau

SEQ ID NO: 618248 - RNA, 22 nt, Artificial Sequence
  Synthetic
gcauaaaauuguuguuuaaaau

SEQ ID NO: 618249 - RNA, 23 nt, Artificial Sequence
  Synthetic
ggcauaaaauuguuguuuaaaau

SEQ ID NO: 618250 - RNA, 24 nt, Artificial Sequence
  Synthetic
aggcauaaaauuguuguuuaaaau

SEQ ID NO: 618251 - RNA, 18 nt, Artificial Sequence
  Synthetic
caauaaucuuuuuaaaau

SEQ ID NO: 618252 - RNA, 19 nt, Artificial Sequence
  Synthetic
ccaauaaucuuuuuaaaau

SEQ ID NO: 618253 - RNA, 20 nt, Artificial Sequence
  Synthetic
accaauaaucuuuuuaaaau

SEQ ID NO: 618254 - RNA, 21 nt, Artificial Sequence
  Synthetic
uaccaauaaucuuuuuaaaau

SEQ ID NO: 618255 - RNA, 22 nt, Artificial Sequence
  Synthetic
uuaccaauaaucuuuuuaaaau

SEQ ID NO: 618256 - RNA, 23 nt, Artificial Sequence
  Synthetic
auuaccaauaaucuuuuuaaaau

SEQ ID NO: 618257 - RNA, 24 nt, Artificial Sequence
  Synthetic
aauuaccaauaaucuuuuuaaaau

SEQ ID NO: 618258 - RNA, 18 nt, Artificial Sequence
  Synthetic
ggaauuaaaacaacaaau

SEQ ID NO: 618259 - RNA, 19 nt, Artificial Sequence
  Synthetic
uggaauuaaaacaacaaau

SEQ ID NO: 618260 - RNA, 20 nt, Artificial Sequence
  Synthetic
cuggaauuaaaacaacaaau

SEQ ID NO: 618261 - RNA, 21 nt, Artificial Sequence
  Synthetic
gcuggaauuaaaacaacaaau

SEQ ID NO: 618262 - RNA, 22 nt, Artificial Sequence
  Synthetic
agcuggaauuaaaacaacaaau

SEQ ID NO: 618263 - RNA, 23 nt, Artificial Sequence
  Synthetic
aagcuggaauuaaaacaacaaau

SEQ ID NO: 618264 - RNA, 24 nt, Artificial Sequence
  Synthetic
gaagcuggaauuaaaacaacaaau

SEQ ID NO: 618265 - RNA, 18 nt, Artificial Sequence
  Synthetic
aauaugacaauaacaaau

SEQ ID NO: 618266 - RNA, 19 nt, Artificial Sequence
  Synthetic
aaauaugacaauaacaaau

SEQ ID NO: 618267 - RNA, 20 nt, Artificial Sequence
  Synthetic
gaaauaugacaauaacaaau

SEQ ID NO: 618268 - RNA, 21 nt, Artificial Sequence
  Synthetic
ugaaauaugacaauaacaaau

SEQ ID NO: 618269 - RNA, 22 nt, Artificial Sequence
  Synthetic
augaaauaugacaauaacaaau

SEQ ID NO: 618270 - RNA, 23 nt, Artificial Sequence
  Synthetic
caugaaauaugacaauaacaaau

SEQ ID NO: 618271 - RNA, 24 nt, Artificial Sequence
  Synthetic
ccaugaaauaugacaauaacaaau

SEQ ID NO: 618272 - RNA, 18 nt, Artificial Sequence
  Synthetic
uaauauuauauaacaaau

SEQ ID NO: 618273 - RNA, 19 nt, Artificial Sequence
  Synthetic
cuaauauuauauaacaaau

SEQ ID NO: 618274 - RNA, 20 nt, Artificial Sequence
  Synthetic
ucuaauauuauauaacaaau

SEQ ID NO: 618275 - RNA, 21 nt, Artificial Sequence
  Synthetic
uucuaauauuauauaacaaau

SEQ ID NO: 618276 - RNA, 22 nt, Artificial Sequence
  Synthetic
uuucuaauauuauauaacaaau

SEQ ID NO: 618277 - RNA, 23 nt, Artificial Sequence
  Synthetic
auuucuaauauuauauaacaaau

SEQ ID NO: 618278 - RNA, 24 nt, Artificial Sequence
  Synthetic
uauuucuaauauuauauaacaaau

SEQ ID NO: 618279 - RNA, 18 nt, Artificial Sequence
  Synthetic
ccagaagaauuaacaaau

SEQ ID NO: 618280 - RNA, 19 nt, Artificial Sequence
  Synthetic
cccagaagaauuaacaaau

SEQ ID NO: 618281 - RNA, 20 nt, Artificial Sequence
  Synthetic
ucccagaagaauuaacaaau

SEQ ID NO: 618282 - RNA, 21 nt, Artificial Sequence
  Synthetic
uucccagaagaauuaacaaau

SEQ ID NO: 618283 - RNA, 22 nt, Artificial Sequence
  Synthetic
uuucccagaagaauuaacaaau

SEQ ID NO: 618284 - RNA, 23 nt, Artificial Sequence
  Synthetic
auuucccagaagaauuaacaaau

SEQ ID NO: 618285 - RNA, 24 nt, Artificial Sequence
  Synthetic
uauuucccagaagaauuaacaaau

SEQ ID NO: 618286 - RNA, 18 nt, Artificial Sequence
  Synthetic
uauccucauuuaacaaau

SEQ ID NO: 618287 - RNA, 19 nt, Artificial Sequence
  Synthetic
uuauccucauuuaacaaau

SEQ ID NO: 618288 - RNA, 20 nt, Artificial Sequence
  Synthetic
auuauccucauuuaacaaau

SEQ ID NO: 618289 - RNA, 21 nt, Artificial Sequence
  Synthetic
aauuauccucauuuaacaaau

SEQ ID NO: 618290 - RNA, 22 nt, Artificial Sequence
  Synthetic
caauuauccucauuuaacaaau

SEQ ID NO: 618291 - RNA, 23 nt, Artificial Sequence
  Synthetic
gcaauuauccucauuuaacaaau

SEQ ID NO: 618292 - RNA, 24 nt, Artificial Sequence
  Synthetic
ugcaauuauccucauuuaacaaau

SEQ ID NO: 618293 - RNA, 18 nt, Artificial Sequence
  Synthetic
guaugauuccccacaaau

SEQ ID NO: 618294 - RNA, 19 nt, Artificial Sequence
  Synthetic
cguaugauuccccacaaau

SEQ ID NO: 618295 - RNA, 20 nt, Artificial Sequence
  Synthetic
ccguaugauuccccacaaau

SEQ ID NO: 618296 - RNA, 21 nt, Artificial Sequence
  Synthetic
gccguaugauuccccacaaau

SEQ ID NO: 618297 - RNA, 22 nt, Artificial Sequence
  Synthetic
ggccguaugauuccccacaaau

SEQ ID NO: 618298 - RNA, 23 nt, Artificial Sequence
  Synthetic
aggccguaugauuccccacaaau

SEQ ID NO: 618299 - RNA, 24 nt, Artificial Sequence
  Synthetic
gaggccguaugauuccccacaaau

SEQ ID NO: 618300 - RNA, 18 nt, Artificial Sequence
  Synthetic
aaguuacgaaagacaaau

SEQ ID NO: 618301 - RNA, 19 nt, Artificial Sequence
  Synthetic
gaaguuacgaaagacaaau

SEQ ID NO: 618302 - RNA, 20 nt, Artificial Sequence
  Synthetic
agaaguuacgaaagacaaau

SEQ ID NO: 618303 - RNA, 21 nt, Artificial Sequence
  Synthetic
gagaaguuacgaaagacaaau

SEQ ID NO: 618304 - RNA, 22 nt, Artificial Sequence
  Synthetic
agagaaguuacgaaagacaaau

SEQ ID NO: 618305 - RNA, 23 nt, Artificial Sequence
  Synthetic
uagagaaguuacgaaagacaaau

SEQ ID NO: 618306 - RNA, 24 nt, Artificial Sequence
  Synthetic
cuagagaaguuacgaaagacaaau

SEQ ID NO: 618307 - RNA, 18 nt, Artificial Sequence
  Synthetic
gaaaaacaugagacaaau

SEQ ID NO: 618308 - RNA, 19 nt, Artificial Sequence
  Synthetic
agaaaaacaugagacaaau

SEQ ID NO: 618309 - RNA, 20 nt, Artificial Sequence
  Synthetic
uagaaaaacaugagacaaau

SEQ ID NO: 618310 - RNA, 21 nt, Artificial Sequence
  Synthetic
cuagaaaaacaugagacaaau

SEQ ID NO: 618311 - RNA, 22 nt, Artificial Sequence
  Synthetic
gcuagaaaaacaugagacaaau

SEQ ID NO: 618312 - RNA, 23 nt, Artificial Sequence
  Synthetic
ggcuagaaaaacaugagacaaau

SEQ ID NO: 618313 - RNA, 24 nt, Artificial Sequence
  Synthetic
gggcuagaaaaacaugagacaaau

SEQ ID NO: 618314 - RNA, 18 nt, Artificial Sequence
  Synthetic
caaguacgugagacaaau

SEQ ID NO: 618315 - RNA, 19 nt, Artificial Sequence
  Synthetic
ucaaguacgugagacaaau

SEQ ID NO: 618316 - RNA, 20 nt, Artificial Sequence
  Synthetic
aucaaguacgugagacaaau

SEQ ID NO: 618317 - RNA, 21 nt, Artificial Sequence
  Synthetic
aaucaaguacgugagacaaau

SEQ ID NO: 618318 - RNA, 22 nt, Artificial Sequence
  Synthetic
aaaucaaguacgugagacaaau

SEQ ID NO: 618319 - RNA, 23 nt, Artificial Sequence
  Synthetic
caaaucaaguacgugagacaaau

SEQ ID NO: 618320 - RNA, 24 nt, Artificial Sequence
  Synthetic
ccaaaucaaguacgugagacaaau

SEQ ID NO: 618321 - RNA, 18 nt, Artificial Sequence
  Synthetic
uaucucuggaggacaaau

SEQ ID NO: 618322 - RNA, 19 nt, Artificial Sequence
  Synthetic
cuaucucuggaggacaaau

SEQ ID NO: 618323 - RNA, 20 nt, Artificial Sequence
  Synthetic
acuaucucuggaggacaaau

SEQ ID NO: 618324 - RNA, 21 nt, Artificial Sequence
  Synthetic
cacuaucucuggaggacaaau

SEQ ID NO: 618325 - RNA, 22 nt, Artificial Sequence
  Synthetic
ccacuaucucuggaggacaaau

SEQ ID NO: 618326 - RNA, 23 nt, Artificial Sequence
  Synthetic
uccacuaucucuggaggacaaau

SEQ ID NO: 618327 - RNA, 24 nt, Artificial Sequence
  Synthetic
auccacuaucucuggaggacaaau

SEQ ID NO: 618328 - RNA, 18 nt, Artificial Sequence
  Synthetic
caucacuguuggacaaau

SEQ ID NO: 618329 - RNA, 19 nt, Artificial Sequence
  Synthetic
gcaucacuguuggacaaau

SEQ ID NO: 618330 - RNA, 20 nt, Artificial Sequence
  Synthetic
ugcaucacuguuggacaaau

SEQ ID NO: 618331 - RNA, 21 nt, Artificial Sequence
  Synthetic
augcaucacuguuggacaaau

SEQ ID NO: 618332 - RNA, 22 nt, Artificial Sequence
  Synthetic
aaugcaucacuguuggacaaau

SEQ ID NO: 618333 - RNA, 23 nt, Artificial Sequence
  Synthetic
uaaugcaucacuguuggacaaau

SEQ ID NO: 618334 - RNA, 24 nt, Artificial Sequence
  Synthetic
auaaugcaucacuguuggacaaau

SEQ ID NO: 618335 - RNA, 18 nt, Artificial Sequence
  Synthetic
aauaagccaaugacaaau

SEQ ID NO: 618336 - RNA, 19 nt, Artificial Sequence
  Synthetic
aaauaagccaaugacaaau

SEQ ID NO: 618337 - RNA, 20 nt, Artificial Sequence
  Synthetic
caaauaagccaaugacaaau

SEQ ID NO: 618338 - RNA, 21 nt, Artificial Sequence
  Synthetic
ucaaauaagccaaugacaaau

SEQ ID NO: 618339 - RNA, 22 nt, Artificial Sequence
  Synthetic
uucaaauaagccaaugacaaau

SEQ ID NO: 618340 - RNA, 23 nt, Artificial Sequence
  Synthetic
auucaaauaagccaaugacaaau

SEQ ID NO: 618341 - RNA, 24 nt, Artificial Sequence
  Synthetic
cauucaaauaagccaaugacaaau

SEQ ID NO: 618342 - RNA, 18 nt, Artificial Sequence
  Synthetic
uuuuguucuaauacaaau

SEQ ID NO: 618343 - RNA, 19 nt, Artificial Sequence
  Synthetic
auuuuguucuaauacaaau

SEQ ID NO: 618344 - RNA, 20 nt, Artificial Sequence
  Synthetic
uauuuuguucuaauacaaau

SEQ ID NO: 618345 - RNA, 21 nt, Artificial Sequence
  Synthetic
guauuuuguucuaauacaaau

SEQ ID NO: 618346 - RNA, 22 nt, Artificial Sequence
  Synthetic
aguauuuuguucuaauacaaau

SEQ ID NO: 618347 - RNA, 23 nt, Artificial Sequence
  Synthetic
uaguauuuuguucuaauacaaau

SEQ ID NO: 618348 - RNA, 24 nt, Artificial Sequence
  Synthetic
auaguauuuuguucuaauacaaau

SEQ ID NO: 618349 - RNA, 18 nt, Artificial Sequence
  Synthetic
cagagauuucauacaaau

SEQ ID NO: 618350 - RNA, 19 nt, Artificial Sequence
  Synthetic
acagagauuucauacaaau

SEQ ID NO: 618351 - RNA, 20 nt, Artificial Sequence
  Synthetic
aacagagauuucauacaaau

SEQ ID NO: 618352 - RNA, 21 nt, Artificial Sequence
  Synthetic
caacagagauuucauacaaau

SEQ ID NO: 618353 - RNA, 22 nt, Artificial Sequence
  Synthetic
gcaacagagauuucauacaaau

SEQ ID NO: 618354 - RNA, 23 nt, Artificial Sequence
  Synthetic
agcaacagagauuucauacaaau

SEQ ID NO: 618355 - RNA, 24 nt, Artificial Sequence
  Synthetic
uagcaacagagauuucauacaaau

SEQ ID NO: 618356 - RNA, 18 nt, Artificial Sequence
  Synthetic
gccuuguugacuacaaau

SEQ ID NO: 618357 - RNA, 19 nt, Artificial Sequence
  Synthetic
agccuuguugacuacaaau

SEQ ID NO: 618358 - RNA, 20 nt, Artificial Sequence
  Synthetic
aagccuuguugacuacaaau

SEQ ID NO: 618359 - RNA, 21 nt, Artificial Sequence
  Synthetic
uaagccuuguugacuacaaau

SEQ ID NO: 618360 - RNA, 22 nt, Artificial Sequence
  Synthetic
uuaagccuuguugacuacaaau

SEQ ID NO: 618361 - RNA, 23 nt, Artificial Sequence
  Synthetic
auuaagccuuguugacuacaaau

SEQ ID NO: 618362 - RNA, 24 nt, Artificial Sequence
  Synthetic
aauuaagccuuguugacuacaaau

SEQ ID NO: 618363 - RNA, 18 nt, Artificial Sequence
  Synthetic
ccuuugaaguuuacaaau

SEQ ID NO: 618364 - RNA, 19 nt, Artificial Sequence
  Synthetic
uccuuugaaguuuacaaau

SEQ ID NO: 618365 - RNA, 20 nt, Artificial Sequence
  Synthetic
auccuuugaaguuuacaaau

SEQ ID NO: 618366 - RNA, 21 nt, Artificial Sequence
  Synthetic
cauccuuugaaguuuacaaau

SEQ ID NO: 618367 - RNA, 22 nt, Artificial Sequence
  Synthetic
ucauccuuugaaguuuacaaau

SEQ ID NO: 618368 - RNA, 23 nt, Artificial Sequence
  Synthetic
gucauccuuugaaguuuacaaau

SEQ ID NO: 618369 - RNA, 24 nt, Artificial Sequence
  Synthetic
ugucauccuuugaaguuuacaaau

SEQ ID NO: 618370 - RNA, 18 nt, Artificial Sequence
  Synthetic
gguucaauuaaaccaaau

SEQ ID NO: 618371 - RNA, 19 nt, Artificial Sequence
  Synthetic
ugguucaauuaaaccaaau

SEQ ID NO: 618372 - RNA, 20 nt, Artificial Sequence
  Synthetic
augguucaauuaaaccaaau

SEQ ID NO: 618373 - RNA, 21 nt, Artificial Sequence
  Synthetic
aaugguucaauuaaaccaaau

SEQ ID NO: 618374 - RNA, 22 nt, Artificial Sequence
  Synthetic
uaaugguucaauuaaaccaaau

SEQ ID NO: 618375 - RNA, 23 nt, Artificial Sequence
  Synthetic
uuaaugguucaauuaaaccaaau

SEQ ID NO: 618376 - RNA, 24 nt, Artificial Sequence
  Synthetic
auuaaugguucaauuaaaccaaau

SEQ ID NO: 618377 - RNA, 18 nt, Artificial Sequence
  Synthetic
uuaauaaugauaccaaau

SEQ ID NO: 618378 - RNA, 19 nt, Artificial Sequence
  Synthetic
uuuaauaaugauaccaaau

SEQ ID NO: 618379 - RNA, 20 nt, Artificial Sequence
  Synthetic
cuuuaauaaugauaccaaau

SEQ ID NO: 618380 - RNA, 21 nt, Artificial Sequence
  Synthetic
ucuuuaauaaugauaccaaau

SEQ ID NO: 618381 - RNA, 22 nt, Artificial Sequence
  Synthetic
gucuuuaauaaugauaccaaau

SEQ ID NO: 618382 - RNA, 23 nt, Artificial Sequence
  Synthetic
ugucuuuaauaaugauaccaaau

SEQ ID NO: 618383 - RNA, 24 nt, Artificial Sequence
  Synthetic
uugucuuuaauaaugauaccaaau

SEQ ID NO: 618384 - RNA, 18 nt, Artificial Sequence
  Synthetic
ccauuaauuuacccaaau

SEQ ID NO: 618385 - RNA, 19 nt, Artificial Sequence
  Synthetic
uccauuaauuuacccaaau

SEQ ID NO: 618386 - RNA, 20 nt, Artificial Sequence
  Synthetic
auccauuaauuuacccaaau

SEQ ID NO: 618387 - RNA, 21 nt, Artificial Sequence
  Synthetic
uauccauuaauuuacccaaau

SEQ ID NO: 618388 - RNA, 22 nt, Artificial Sequence
  Synthetic
guauccauuaauuuacccaaau

SEQ ID NO: 618389 - RNA, 23 nt, Artificial Sequence
  Synthetic
aguauccauuaauuuacccaaau

SEQ ID NO: 618390 - RNA, 24 nt, Artificial Sequence
  Synthetic
caguauccauuaauuuacccaaau

SEQ ID NO: 618391 - RNA, 18 nt, Artificial Sequence
  Synthetic
aacacuagaugcccaaau

SEQ ID NO: 618392 - RNA, 19 nt, Artificial Sequence
  Synthetic
gaacacuagaugcccaaau

SEQ ID NO: 618393 - RNA, 20 nt, Artificial Sequence
  Synthetic
agaacacuagaugcccaaau

SEQ ID NO: 618394 - RNA, 21 nt, Artificial Sequence
  Synthetic
cagaacacuagaugcccaaau

SEQ ID NO: 618395 - RNA, 22 nt, Artificial Sequence
  Synthetic
ucagaacacuagaugcccaaau

SEQ ID NO: 618396 - RNA, 23 nt, Artificial Sequence
  Synthetic
cucagaacacuagaugcccaaau

SEQ ID NO: 618397 - RNA, 24 nt, Artificial Sequence
  Synthetic
gcucagaacacuagaugcccaaau

SEQ ID NO: 618398 - RNA, 18 nt, Artificial Sequence
  Synthetic
gaauguuuuugcccaaau

SEQ ID NO: 618399 - RNA, 19 nt, Artificial Sequence
  Synthetic
ggaauguuuuugcccaaau

SEQ ID NO: 618400 - RNA, 20 nt, Artificial Sequence
  Synthetic
uggaauguuuuugcccaaau

SEQ ID NO: 618401 - RNA, 21 nt, Artificial Sequence
  Synthetic
cuggaauguuuuugcccaaau

SEQ ID NO: 618402 - RNA, 22 nt, Artificial Sequence
  Synthetic
ccuggaauguuuuugcccaaau

SEQ ID NO: 618403 - RNA, 23 nt, Artificial Sequence
  Synthetic
gccuggaauguuuuugcccaaau

SEQ ID NO: 618404 - RNA, 24 nt, Artificial Sequence
  Synthetic
ugccuggaauguuuuugcccaaau

SEQ ID NO: 618405 - RNA, 18 nt, Artificial Sequence
  Synthetic
uauauaagcaucccaaau

SEQ ID NO: 618406 - RNA, 19 nt, Artificial Sequence
  Synthetic
guauauaagcaucccaaau

SEQ ID NO: 618407 - RNA, 20 nt, Artificial Sequence
  Synthetic
aguauauaagcaucccaaau

SEQ ID NO: 618408 - RNA, 21 nt, Artificial Sequence
  Synthetic
aaguauauaagcaucccaaau

SEQ ID NO: 618409 - RNA, 22 nt, Artificial Sequence
  Synthetic
caaguauauaagcaucccaaau

SEQ ID NO: 618410 - RNA, 23 nt, Artificial Sequence
  Synthetic
acaaguauauaagcaucccaaau

SEQ ID NO: 618411 - RNA, 24 nt, Artificial Sequence
  Synthetic
aacaaguauauaagcaucccaaau

SEQ ID NO: 618412 - RNA, 18 nt, Artificial Sequence
  Synthetic
ggguugagcaucccaaau

SEQ ID NO: 618413 - RNA, 19 nt, Artificial Sequence
  Synthetic
cggguugagcaucccaaau

SEQ ID NO: 618414 - RNA, 20 nt, Artificial Sequence
  Synthetic
ucggguugagcaucccaaau

SEQ ID NO: 618415 - RNA, 21 nt, Artificial Sequence
  Synthetic
uucggguugagcaucccaaau

SEQ ID NO: 618416 - RNA, 22 nt, Artificial Sequence
  Synthetic
auucggguugagcaucccaaau

SEQ ID NO: 618417 - RNA, 23 nt, Artificial Sequence
  Synthetic
uauucggguugagcaucccaaau

SEQ ID NO: 618418 - RNA, 24 nt, Artificial Sequence
  Synthetic
auauucggguugagcaucccaaau

SEQ ID NO: 618419 - RNA, 18 nt, Artificial Sequence
  Synthetic
auuuguacucucccaaau

SEQ ID NO: 618420 - RNA, 19 nt, Artificial Sequence
  Synthetic
aauuuguacucucccaaau

SEQ ID NO: 618421 - RNA, 20 nt, Artificial Sequence
  Synthetic
caauuuguacucucccaaau

SEQ ID NO: 618422 - RNA, 21 nt, Artificial Sequence
  Synthetic
gcaauuuguacucucccaaau

SEQ ID NO: 618423 - RNA, 22 nt, Artificial Sequence
  Synthetic
cgcaauuuguacucucccaaau

SEQ ID NO: 618424 - RNA, 23 nt, Artificial Sequence
  Synthetic
ucgcaauuuguacucucccaaau

SEQ ID NO: 618425 - RNA, 24 nt, Artificial Sequence
  Synthetic
gucgcaauuuguacucucccaaau

SEQ ID NO: 618426 - RNA, 18 nt, Artificial Sequence
  Synthetic
uauuucgguuucccaaau

SEQ ID NO: 618427 - RNA, 19 nt, Artificial Sequence
  Synthetic
uuauuucgguuucccaaau

SEQ ID NO: 618428 - RNA, 20 nt, Artificial Sequence
  Synthetic
auuauuucgguuucccaaau

SEQ ID NO: 618429 - RNA, 21 nt, Artificial Sequence
  Synthetic
uauuauuucgguuucccaaau

SEQ ID NO: 618430 - RNA, 22 nt, Artificial Sequence
  Synthetic
uuauuauuucgguuucccaaau

SEQ ID NO: 618431 - RNA, 23 nt, Artificial Sequence
  Synthetic
uuuauuauuucgguuucccaaau

SEQ ID NO: 618432 - RNA, 24 nt, Artificial Sequence
  Synthetic
uuuuauuauuucgguuucccaaau

SEQ ID NO: 618433 - RNA, 18 nt, Artificial Sequence
  Synthetic
agaaguuuuuucccaaau

SEQ ID NO: 618434 - RNA, 19 nt, Artificial Sequence
  Synthetic
gagaaguuuuuucccaaau

SEQ ID NO: 618435 - RNA, 20 nt, Artificial Sequence
  Synthetic
agagaaguuuuuucccaaau

SEQ ID NO: 618436 - RNA, 21 nt, Artificial Sequence
  Synthetic
aagagaaguuuuuucccaaau

SEQ ID NO: 618437 - RNA, 22 nt, Artificial Sequence
  Synthetic
caagagaaguuuuuucccaaau

SEQ ID NO: 618438 - RNA, 23 nt, Artificial Sequence
  Synthetic
ucaagagaaguuuuuucccaaau

SEQ ID NO: 618439 - RNA, 24 nt, Artificial Sequence
  Synthetic
gucaagagaaguuuuuucccaaau

SEQ ID NO: 618440 - RNA, 18 nt, Artificial Sequence
  Synthetic
uuuaauauacugccaaau

SEQ ID NO: 618441 - RNA, 19 nt, Artificial Sequence
  Synthetic
uuuuaauauacugccaaau

SEQ ID NO: 618442 - RNA, 20 nt, Artificial Sequence
  Synthetic
uuuuuaauauacugccaaau

SEQ ID NO: 618443 - RNA, 21 nt, Artificial Sequence
  Synthetic
auuuuuaauauacugccaaau

SEQ ID NO: 618444 - RNA, 22 nt, Artificial Sequence
  Synthetic
uauuuuuaauauacugccaaau

SEQ ID NO: 618445 - RNA, 23 nt, Artificial Sequence
  Synthetic
uuauuuuuaauauacugccaaau

SEQ ID NO: 618446 - RNA, 24 nt, Artificial Sequence
  Synthetic
cuuauuuuuaauauacugccaaau

SEQ ID NO: 618447 - RNA, 18 nt, Artificial Sequence
  Synthetic
caaugguugcauccaaau

SEQ ID NO: 618448 - RNA, 19 nt, Artificial Sequence
  Synthetic
gcaaugguugcauccaaau

SEQ ID NO: 618449 - RNA, 20 nt, Artificial Sequence
  Synthetic
ugcaaugguugcauccaaau

SEQ ID NO: 618450 - RNA, 21 nt, Artificial Sequence
  Synthetic
augcaaugguugcauccaaau

SEQ ID NO: 618451 - RNA, 22 nt, Artificial Sequence
  Synthetic
aaugcaaugguugcauccaaau

SEQ ID NO: 618452 - RNA, 23 nt, Artificial Sequence
  Synthetic
caaugcaaugguugcauccaaau

SEQ ID NO: 618453 - RNA, 24 nt, Artificial Sequence
  Synthetic
ucaaugcaaugguugcauccaaau

SEQ ID NO: 618454 - RNA, 18 nt, Artificial Sequence
  Synthetic
cuaucccauuuuccaaau

SEQ ID NO: 618455 - RNA, 19 nt, Artificial Sequence
  Synthetic
acuaucccauuuuccaaau

SEQ ID NO: 618456 - RNA, 20 nt, Artificial Sequence
  Synthetic
gacuaucccauuuuccaaau

SEQ ID NO: 618457 - RNA, 21 nt, Artificial Sequence
  Synthetic
ugacuaucccauuuuccaaau

SEQ ID NO: 618458 - RNA, 22 nt, Artificial Sequence
  Synthetic
gugacuaucccauuuuccaaau

SEQ ID NO: 618459 - RNA, 23 nt, Artificial Sequence
  Synthetic
ggugacuaucccauuuuccaaau

SEQ ID NO: 618460 - RNA, 24 nt, Artificial Sequence
  Synthetic
aggugacuaucccauuuuccaaau

SEQ ID NO: 618461 - RNA, 18 nt, Artificial Sequence
  Synthetic
uuugcuacuuuuccaaau

SEQ ID NO: 618462 - RNA, 19 nt, Artificial Sequence
  Synthetic
uuuugcuacuuuuccaaau

SEQ ID NO: 618463 - RNA, 20 nt, Artificial Sequence
  Synthetic
cuuuugcuacuuuuccaaau

SEQ ID NO: 618464 - RNA, 21 nt, Artificial Sequence
  Synthetic
acuuuugcuacuuuuccaaau

SEQ ID NO: 618465 - RNA, 22 nt, Artificial Sequence
  Synthetic
uacuuuugcuacuuuuccaaau

SEQ ID NO: 618466 - RNA, 23 nt, Artificial Sequence
  Synthetic
auacuuuugcuacuuuuccaaau

SEQ ID NO: 618467 - RNA, 24 nt, Artificial Sequence
  Synthetic
aauacuuuugcuacuuuuccaaau

SEQ ID NO: 618468 - RNA, 18 nt, Artificial Sequence
  Synthetic
guuagacaaaaagcaaau

SEQ ID NO: 618469 - RNA, 19 nt, Artificial Sequence
  Synthetic
uguuagacaaaaagcaaau

SEQ ID NO: 618470 - RNA, 20 nt, Artificial Sequence
  Synthetic
auguuagacaaaaagcaaau

SEQ ID NO: 618471 - RNA, 21 nt, Artificial Sequence
  Synthetic
gauguuagacaaaaagcaaau

SEQ ID NO: 618472 - RNA, 22 nt, Artificial Sequence
  Synthetic
ugauguuagacaaaaagcaaau

SEQ ID NO: 618473 - RNA, 23 nt, Artificial Sequence
  Synthetic
augauguuagacaaaaagcaaau

SEQ ID NO: 618474 - RNA, 24 nt, Artificial Sequence
  Synthetic
aaugauguuagacaaaaagcaaau

SEQ ID NO: 618475 - RNA, 18 nt, Artificial Sequence
  Synthetic
caauagucaaaagcaaau

SEQ ID NO: 618476 - RNA, 19 nt, Artificial Sequence
  Synthetic
gcaauagucaaaagcaaau

SEQ ID NO: 618477 - RNA, 20 nt, Artificial Sequence
  Synthetic
ugcaauagucaaaagcaaau

SEQ ID NO: 618478 - RNA, 21 nt, Artificial Sequence
  Synthetic
gugcaauagucaaaagcaaau

SEQ ID NO: 618479 - RNA, 22 nt, Artificial Sequence
  Synthetic
ugugcaauagucaaaagcaaau

SEQ ID NO: 618480 - RNA, 23 nt, Artificial Sequence
  Synthetic
gugugcaauagucaaaagcaaau

SEQ ID NO: 618481 - RNA, 24 nt, Artificial Sequence
  Synthetic
ugugugcaauagucaaaagcaaau

SEQ ID NO: 618482 - RNA, 18 nt, Artificial Sequence
  Synthetic
agaccaagcaaagcaaau

SEQ ID NO: 618483 - RNA, 19 nt, Artificial Sequence
  Synthetic
uagaccaagcaaagcaaau

SEQ ID NO: 618484 - RNA, 20 nt, Artificial Sequence
  Synthetic
cuagaccaagcaaagcaaau

SEQ ID NO: 618485 - RNA, 21 nt, Artificial Sequence
  Synthetic
gcuagaccaagcaaagcaaau

SEQ ID NO: 618486 - RNA, 22 nt, Artificial Sequence
  Synthetic
agcuagaccaagcaaagcaaau

SEQ ID NO: 618487 - RNA, 23 nt, Artificial Sequence
  Synthetic
gagcuagaccaagcaaagcaaau

SEQ ID NO: 618488 - RNA, 24 nt, Artificial Sequence
  Synthetic
ugagcuagaccaagcaaagcaaau

SEQ ID NO: 618489 - RNA, 18 nt, Artificial Sequence
  Synthetic
aauguucuuaaagcaaau

SEQ ID NO: 618490 - RNA, 19 nt, Artificial Sequence
  Synthetic
aaauguucuuaaagcaaau

SEQ ID NO: 618491 - RNA, 20 nt, Artificial Sequence
  Synthetic
aaaauguucuuaaagcaaau

SEQ ID NO: 618492 - RNA, 21 nt, Artificial Sequence
  Synthetic
caaaauguucuuaaagcaaau

SEQ ID NO: 618493 - RNA, 22 nt, Artificial Sequence
  Synthetic
gcaaaauguucuuaaagcaaau

SEQ ID NO: 618494 - RNA, 23 nt, Artificial Sequence
  Synthetic
ugcaaaauguucuuaaagcaaau

SEQ ID NO: 618495 - RNA, 24 nt, Artificial Sequence
  Synthetic
uugcaaaauguucuuaaagcaaau

SEQ ID NO: 618496 - RNA, 18 nt, Artificial Sequence
  Synthetic
ucagcauuugaagcaaau

SEQ ID NO: 618497 - RNA, 19 nt, Artificial Sequence
  Synthetic
uucagcauuugaagcaaau

SEQ ID NO: 618498 - RNA, 20 nt, Artificial Sequence
  Synthetic
guucagcauuugaagcaaau

SEQ ID NO: 618499 - RNA, 21 nt, Artificial Sequence
  Synthetic
uguucagcauuugaagcaaau

SEQ ID NO: 618500 - RNA, 22 nt, Artificial Sequence
  Synthetic
uuguucagcauuugaagcaaau

SEQ ID NO: 618501 - RNA, 23 nt, Artificial Sequence
  Synthetic
guuguucagcauuugaagcaaau

SEQ ID NO: 618502 - RNA, 24 nt, Artificial Sequence
  Synthetic
aguuguucagcauuugaagcaaau

SEQ ID NO: 618503 - RNA, 18 nt, Artificial Sequence
  Synthetic
uccauaagguuagcaaau

SEQ ID NO: 618504 - RNA, 19 nt, Artificial Sequence
  Synthetic
uuccauaagguuagcaaau

SEQ ID NO: 618505 - RNA, 20 nt, Artificial Sequence
  Synthetic
uuuccauaagguuagcaaau

SEQ ID NO: 618506 - RNA, 21 nt, Artificial Sequence
  Synthetic
uuuuccauaagguuagcaaau

SEQ ID NO: 618507 - RNA, 22 nt, Artificial Sequence
  Synthetic
cuuuuccauaagguuagcaaau

SEQ ID NO: 618508 - RNA, 23 nt, Artificial Sequence
  Synthetic
ucuuuuccauaagguuagcaaau

SEQ ID NO: 618509 - RNA, 24 nt, Artificial Sequence
  Synthetic
cucuuuuccauaagguuagcaaau

SEQ ID NO: 618510 - RNA, 18 nt, Artificial Sequence
  Synthetic
uuguauagaaucgcaaau

SEQ ID NO: 618511 - RNA, 19 nt, Artificial Sequence
  Synthetic
uuuguauagaaucgcaaau

SEQ ID NO: 618512 - RNA, 20 nt, Artificial Sequence
  Synthetic
auuuguauagaaucgcaaau

SEQ ID NO: 618513 - RNA, 21 nt, Artificial Sequence
  Synthetic
cauuuguauagaaucgcaaau

SEQ ID NO: 618514 - RNA, 22 nt, Artificial Sequence
  Synthetic
ucauuuguauagaaucgcaaau

SEQ ID NO: 618515 - RNA, 23 nt, Artificial Sequence
  Synthetic
cucauuuguauagaaucgcaaau

SEQ ID NO: 618516 - RNA, 24 nt, Artificial Sequence
  Synthetic
ucucauuuguauagaaucgcaaau

SEQ ID NO: 618517 - RNA, 18 nt, Artificial Sequence
  Synthetic
aaaaaugaguaggcaaau

SEQ ID NO: 618518 - RNA, 19 nt, Artificial Sequence
  Synthetic
gaaaaaugaguaggcaaau

SEQ ID NO: 618519 - RNA, 20 nt, Artificial Sequence
  Synthetic
ugaaaaaugaguaggcaaau

SEQ ID NO: 618520 - RNA, 21 nt, Artificial Sequence
  Synthetic
gugaaaaaugaguaggcaaau

SEQ ID NO: 618521 - RNA, 22 nt, Artificial Sequence
  Synthetic
agugaaaaaugaguaggcaaau

SEQ ID NO: 618522 - RNA, 23 nt, Artificial Sequence
  Synthetic
gagugaaaaaugaguaggcaaau

SEQ ID NO: 618523 - RNA, 24 nt, Artificial Sequence
  Synthetic
agagugaaaaaugaguaggcaaau

SEQ ID NO: 618524 - RNA, 18 nt, Artificial Sequence
  Synthetic
gaucgcuuaguggcaaau

SEQ ID NO: 618525 - RNA, 19 nt, Artificial Sequence
  Synthetic
ugaucgcuuaguggcaaau

SEQ ID NO: 618526 - RNA, 20 nt, Artificial Sequence
  Synthetic
gugaucgcuuaguggcaaau

SEQ ID NO: 618527 - RNA, 21 nt, Artificial Sequence
  Synthetic
cgugaucgcuuaguggcaaau

SEQ ID NO: 618528 - RNA, 22 nt, Artificial Sequence
  Synthetic
gcgugaucgcuuaguggcaaau

SEQ ID NO: 618529 - RNA, 23 nt, Artificial Sequence
  Synthetic
ggcgugaucgcuuaguggcaaau

SEQ ID NO: 618530 - RNA, 24 nt, Artificial Sequence
  Synthetic
uggcgugaucgcuuaguggcaaau

SEQ ID NO: 618531 - RNA, 18 nt, Artificial Sequence
  Synthetic
uuaaagauuuuggcaaau

SEQ ID NO: 618532 - RNA, 19 nt, Artificial Sequence
  Synthetic
cuuaaagauuuuggcaaau

SEQ ID NO: 618533 - RNA, 20 nt, Artificial Sequence
  Synthetic
acuuaaagauuuuggcaaau

SEQ ID NO: 618534 - RNA, 21 nt, Artificial Sequence
  Synthetic
uacuuaaagauuuuggcaaau

SEQ ID NO: 618535 - RNA, 22 nt, Artificial Sequence
  Synthetic
cuacuuaaagauuuuggcaaau

SEQ ID NO: 618536 - RNA, 23 nt, Artificial Sequence
  Synthetic
gcuacuuaaagauuuuggcaaau

SEQ ID NO: 618537 - RNA, 24 nt, Artificial Sequence
  Synthetic
ggcuacuuaaagauuuuggcaaau

SEQ ID NO: 618538 - RNA, 18 nt, Artificial Sequence
  Synthetic
aagauacuccaugcaaau

SEQ ID NO: 618539 - RNA, 19 nt, Artificial Sequence
  Synthetic
aaagauacuccaugcaaau

SEQ ID NO: 618540 - RNA, 20 nt, Artificial Sequence
  Synthetic
aaaagauacuccaugcaaau

SEQ ID NO: 618541 - RNA, 21 nt, Artificial Sequence
  Synthetic
aaaaagauacuccaugcaaau

SEQ ID NO: 618542 - RNA, 22 nt, Artificial Sequence
  Synthetic
gaaaaagauacuccaugcaaau

SEQ ID NO: 618543 - RNA, 23 nt, Artificial Sequence
  Synthetic
ggaaaaagauacuccaugcaaau

SEQ ID NO: 618544 - RNA, 24 nt, Artificial Sequence
  Synthetic
cggaaaaagauacuccaugcaaau

SEQ ID NO: 618545 - RNA, 18 nt, Artificial Sequence
  Synthetic
aaauguaagacugcaaau

SEQ ID NO: 618546 - RNA, 19 nt, Artificial Sequence
  Synthetic
aaaauguaagacugcaaau

SEQ ID NO: 618547 - RNA, 20 nt, Artificial Sequence
  Synthetic
uaaaauguaagacugcaaau

SEQ ID NO: 618548 - RNA, 21 nt, Artificial Sequence
  Synthetic
auaaaauguaagacugcaaau

SEQ ID NO: 618549 - RNA, 22 nt, Artificial Sequence
  Synthetic
uauaaaauguaagacugcaaau

SEQ ID NO: 618550 - RNA, 23 nt, Artificial Sequence
  Synthetic
uuauaaaauguaagacugcaaau

SEQ ID NO: 618551 - RNA, 24 nt, Artificial Sequence
  Synthetic
uuuauaaaauguaagacugcaaau

SEQ ID NO: 618552 - RNA, 18 nt, Artificial Sequence
  Synthetic
uuuauucauuuugcaaau

SEQ ID NO: 618553 - RNA, 19 nt, Artificial Sequence
  Synthetic
uuuuauucauuuugcaaau

SEQ ID NO: 618554 - RNA, 20 nt, Artificial Sequence
  Synthetic
auuuuauucauuuugcaaau

SEQ ID NO: 618555 - RNA, 21 nt, Artificial Sequence
  Synthetic
cauuuuauucauuuugcaaau

SEQ ID NO: 618556 - RNA, 22 nt, Artificial Sequence
  Synthetic
ucauuuuauucauuuugcaaau

SEQ ID NO: 618557 - RNA, 23 nt, Artificial Sequence
  Synthetic
aucauuuuauucauuuugcaaau

SEQ ID NO: 618558 - RNA, 24 nt, Artificial Sequence
  Synthetic
uaucauuuuauucauuuugcaaau

SEQ ID NO: 618559 - RNA, 18 nt, Artificial Sequence
  Synthetic
acuuuuaaaaaaucaaau

SEQ ID NO: 618560 - RNA, 19 nt, Artificial Sequence
  Synthetic
gacuuuuaaaaaaucaaau

SEQ ID NO: 618561 - RNA, 20 nt, Artificial Sequence
  Synthetic
agacuuuuaaaaaaucaaau

SEQ ID NO: 618562 - RNA, 21 nt, Artificial Sequence
  Synthetic
gagacuuuuaaaaaaucaaau

SEQ ID NO: 618563 - RNA, 22 nt, Artificial Sequence
  Synthetic
ggagacuuuuaaaaaaucaaau

SEQ ID NO: 618564 - RNA, 23 nt, Artificial Sequence
  Synthetic
uggagacuuuuaaaaaaucaaau

SEQ ID NO: 618565 - RNA, 24 nt, Artificial Sequence
  Synthetic
uuggagacuuuuaaaaaaucaaau

SEQ ID NO: 618566 - RNA, 18 nt, Artificial Sequence
  Synthetic
ggcucaaauaaaucaaau

SEQ ID NO: 618567 - RNA, 19 nt, Artificial Sequence
  Synthetic
aggcucaaauaaaucaaau

SEQ ID NO: 618568 - RNA, 20 nt, Artificial Sequence
  Synthetic
caggcucaaauaaaucaaau

SEQ ID NO: 618569 - RNA, 21 nt, Artificial Sequence
  Synthetic
gcaggcucaaauaaaucaaau

SEQ ID NO: 618570 - RNA, 22 nt, Artificial Sequence
  Synthetic
agcaggcucaaauaaaucaaau

SEQ ID NO: 618571 - RNA, 23 nt, Artificial Sequence
  Synthetic
gagcaggcucaaauaaaucaaau

SEQ ID NO: 618572 - RNA, 24 nt, Artificial Sequence
  Synthetic
agagcaggcucaaauaaaucaaau

SEQ ID NO: 618573 - RNA, 18 nt, Artificial Sequence
  Synthetic
aaauaaaauacaucaaau

SEQ ID NO: 618574 - RNA, 19 nt, Artificial Sequence
  Synthetic
gaaauaaaauacaucaaau

SEQ ID NO: 618575 - RNA, 20 nt, Artificial Sequence
  Synthetic
agaaauaaaauacaucaaau

SEQ ID NO: 618576 - RNA, 21 nt, Artificial Sequence
  Synthetic
gagaaauaaaauacaucaaau

SEQ ID NO: 618577 - RNA, 22 nt, Artificial Sequence
  Synthetic
agagaaauaaaauacaucaaau

SEQ ID NO: 618578 - RNA, 23 nt, Artificial Sequence
  Synthetic
aagagaaauaaaauacaucaaau

SEQ ID NO: 618579 - RNA, 24 nt, Artificial Sequence
  Synthetic
aaagagaaauaaaauacaucaaau

SEQ ID NO: 618580 - RNA, 18 nt, Artificial Sequence
  Synthetic
agaccaaaaucaucaaau

SEQ ID NO: 618581 - RNA, 19 nt, Artificial Sequence
  Synthetic
aagaccaaaaucaucaaau

SEQ ID NO: 618582 - RNA, 20 nt, Artificial Sequence
  Synthetic
gaagaccaaaaucaucaaau

SEQ ID NO: 618583 - RNA, 21 nt, Artificial Sequence
  Synthetic
ggaagaccaaaaucaucaaau

SEQ ID NO: 618584 - RNA, 22 nt, Artificial Sequence
  Synthetic
aggaagaccaaaaucaucaaau

SEQ ID NO: 618585 - RNA, 23 nt, Artificial Sequence
  Synthetic
aaggaagaccaaaaucaucaaau

SEQ ID NO: 618586 - RNA, 24 nt, Artificial Sequence
  Synthetic
aaaggaagaccaaaaucaucaaau

SEQ ID NO: 618587 - RNA, 18 nt, Artificial Sequence
  Synthetic
gccaacaagagaucaaau

SEQ ID NO: 618588 - RNA, 19 nt, Artificial Sequence
  Synthetic
agccaacaagagaucaaau

SEQ ID NO: 618589 - RNA, 20 nt, Artificial Sequence
  Synthetic
uagccaacaagagaucaaau

SEQ ID NO: 618590 - RNA, 21 nt, Artificial Sequence
  Synthetic
auagccaacaagagaucaaau

SEQ ID NO: 618591 - RNA, 22 nt, Artificial Sequence
  Synthetic
cauagccaacaagagaucaaau

SEQ ID NO: 618592 - RNA, 23 nt, Artificial Sequence
  Synthetic
ccauagccaacaagagaucaaau

SEQ ID NO: 618593 - RNA, 24 nt, Artificial Sequence
  Synthetic
accauagccaacaagagaucaaau

SEQ ID NO: 618594 - RNA, 18 nt, Artificial Sequence
  Synthetic
uuucacuaaggaucaaau

SEQ ID NO: 618595 - RNA, 19 nt, Artificial Sequence
  Synthetic
uuuucacuaaggaucaaau

SEQ ID NO: 618596 - RNA, 20 nt, Artificial Sequence
  Synthetic
guuuucacuaaggaucaaau

SEQ ID NO: 618597 - RNA, 21 nt, Artificial Sequence
  Synthetic
gguuuucacuaaggaucaaau

SEQ ID NO: 618598 - RNA, 22 nt, Artificial Sequence
  Synthetic
agguuuucacuaaggaucaaau

SEQ ID NO: 618599 - RNA, 23 nt, Artificial Sequence
  Synthetic
cagguuuucacuaaggaucaaau

SEQ ID NO: 618600 - RNA, 24 nt, Artificial Sequence
  Synthetic
acagguuuucacuaaggaucaaau

SEQ ID NO: 618601 - RNA, 18 nt, Artificial Sequence
  Synthetic
uuugaugcaggaucaaau

SEQ ID NO: 618602 - RNA, 19 nt, Artificial Sequence
  Synthetic
uuuugaugcaggaucaaau

SEQ ID NO: 618603 - RNA, 20 nt, Artificial Sequence
  Synthetic
auuuugaugcaggaucaaau

SEQ ID NO: 618604 - RNA, 21 nt, Artificial Sequence
  Synthetic
aauuuugaugcaggaucaaau

SEQ ID NO: 618605 - RNA, 22 nt, Artificial Sequence
  Synthetic
aaauuuugaugcaggaucaaau

SEQ ID NO: 618606 - RNA, 23 nt, Artificial Sequence
  Synthetic
gaaauuuugaugcaggaucaaau

SEQ ID NO: 618607 - RNA, 24 nt, Artificial Sequence
  Synthetic
ggaaauuuugaugcaggaucaaau

SEQ ID NO: 618608 - RNA, 18 nt, Artificial Sequence
  Synthetic
ccuggggauguaucaaau

SEQ ID NO: 618609 - RNA, 19 nt, Artificial Sequence
  Synthetic
accuggggauguaucaaau

SEQ ID NO: 618610 - RNA, 20 nt, Artificial Sequence
  Synthetic
gaccuggggauguaucaaau

SEQ ID NO: 618611 - RNA, 21 nt, Artificial Sequence
  Synthetic
ggaccuggggauguaucaaau

SEQ ID NO: 618612 - RNA, 22 nt, Artificial Sequence
  Synthetic
aggaccuggggauguaucaaau

SEQ ID NO: 618613 - RNA, 23 nt, Artificial Sequence
  Synthetic
caggaccuggggauguaucaaau

SEQ ID NO: 618614 - RNA, 24 nt, Artificial Sequence
  Synthetic
ucaggaccuggggauguaucaaau

SEQ ID NO: 618615 - RNA, 18 nt, Artificial Sequence
  Synthetic
uuucaccaucacucaaau

SEQ ID NO: 618616 - RNA, 19 nt, Artificial Sequence
  Synthetic
auuucaccaucacucaaau

SEQ ID NO: 618617 - RNA, 20 nt, Artificial Sequence
  Synthetic
uauuucaccaucacucaaau

SEQ ID NO: 618618 - RNA, 21 nt, Artificial Sequence
  Synthetic
uuauuucaccaucacucaaau

SEQ ID NO: 618619 - RNA, 22 nt, Artificial Sequence
  Synthetic
cuuauuucaccaucacucaaau

SEQ ID NO: 618620 - RNA, 23 nt, Artificial Sequence
  Synthetic
ucuuauuucaccaucacucaaau

SEQ ID NO: 618621 - RNA, 24 nt, Artificial Sequence
  Synthetic
uucuuauuucaccaucacucaaau

SEQ ID NO: 618622 - RNA, 18 nt, Artificial Sequence
  Synthetic
aaaauuugacccucaaau

SEQ ID NO: 618623 - RNA, 19 nt, Artificial Sequence
  Synthetic
gaaaauuugacccucaaau

SEQ ID NO: 618624 - RNA, 20 nt, Artificial Sequence
  Synthetic
ugaaaauuugacccucaaau

SEQ ID NO: 618625 - RNA, 21 nt, Artificial Sequence
  Synthetic
uugaaaauuugacccucaaau

SEQ ID NO: 618626 - RNA, 22 nt, Artificial Sequence
  Synthetic
auugaaaauuugacccucaaau

SEQ ID NO: 618627 - RNA, 23 nt, Artificial Sequence
  Synthetic
uauugaaaauuugacccucaaau

SEQ ID NO: 618628 - RNA, 24 nt, Artificial Sequence
  Synthetic
uuauugaaaauuugacccucaaau

SEQ ID NO: 618629 - RNA, 18 nt, Artificial Sequence
  Synthetic
aauacuuuucccucaaau

SEQ ID NO: 618630 - RNA, 19 nt, Artificial Sequence
  Synthetic
aaauacuuuucccucaaau

SEQ ID NO: 618631 - RNA, 20 nt, Artificial Sequence
  Synthetic
uaaauacuuuucccucaaau

SEQ ID NO: 618632 - RNA, 21 nt, Artificial Sequence
  Synthetic
guaaauacuuuucccucaaau

SEQ ID NO: 618633 - RNA, 22 nt, Artificial Sequence
  Synthetic
gguaaauacuuuucccucaaau

SEQ ID NO: 618634 - RNA, 23 nt, Artificial Sequence
  Synthetic
agguaaauacuuuucccucaaau

SEQ ID NO: 618635 - RNA, 24 nt, Artificial Sequence
  Synthetic
uagguaaauacuuuucccucaaau

SEQ ID NO: 618636 - RNA, 18 nt, Artificial Sequence
  Synthetic
auaauaucagccucaaau

SEQ ID NO: 618637 - RNA, 19 nt, Artificial Sequence
  Synthetic
cauaauaucagccucaaau

SEQ ID NO: 618638 - RNA, 20 nt, Artificial Sequence
  Synthetic
acauaauaucagccucaaau

SEQ ID NO: 618639 - RNA, 21 nt, Artificial Sequence
  Synthetic
gacauaauaucagccucaaau

SEQ ID NO: 618640 - RNA, 22 nt, Artificial Sequence
  Synthetic
agacauaauaucagccucaaau

SEQ ID NO: 618641 - RNA, 23 nt, Artificial Sequence
  Synthetic
cagacauaauaucagccucaaau

SEQ ID NO: 618642 - RNA, 24 nt, Artificial Sequence
  Synthetic
acagacauaauaucagccucaaau

SEQ ID NO: 618643 - RNA, 18 nt, Artificial Sequence
  Synthetic
aucuacuuuuccucaaau

SEQ ID NO: 618644 - RNA, 19 nt, Artificial Sequence
  Synthetic
caucuacuuuuccucaaau

SEQ ID NO: 618645 - RNA, 20 nt, Artificial Sequence
  Synthetic
acaucuacuuuuccucaaau

SEQ ID NO: 618646 - RNA, 21 nt, Artificial Sequence
  Synthetic
gacaucuacuuuuccucaaau

SEQ ID NO: 618647 - RNA, 22 nt, Artificial Sequence
  Synthetic
ggacaucuacuuuuccucaaau

SEQ ID NO: 618648 - RNA, 23 nt, Artificial Sequence
  Synthetic
uggacaucuacuuuuccucaaau

SEQ ID NO: 618649 - RNA, 24 nt, Artificial Sequence
  Synthetic
cuggacaucuacuuuuccucaaau

SEQ ID NO: 618650 - RNA, 18 nt, Artificial Sequence
  Synthetic
uuugauucccucucaaau

SEQ ID NO: 618651 - RNA, 19 nt, Artificial Sequence
  Synthetic
uuuugauucccucucaaau

SEQ ID NO: 618652 - RNA, 20 nt, Artificial Sequence
  Synthetic
cuuuugauucccucucaaau

SEQ ID NO: 618653 - RNA, 21 nt, Artificial Sequence
  Synthetic
ccuuuugauucccucucaaau

SEQ ID NO: 618654 - RNA, 22 nt, Artificial Sequence
  Synthetic
cccuuuugauucccucucaaau

SEQ ID NO: 618655 - RNA, 23 nt, Artificial Sequence
  Synthetic
gcccuuuugauucccucucaaau

SEQ ID NO: 618656 - RNA, 24 nt, Artificial Sequence
  Synthetic
ugcccuuuugauucccucucaaau

SEQ ID NO: 618657 - RNA, 18 nt, Artificial Sequence
  Synthetic
cguacuucagagucaaau

SEQ ID NO: 618658 - RNA, 19 nt, Artificial Sequence
  Synthetic
acguacuucagagucaaau

SEQ ID NO: 618659 - RNA, 20 nt, Artificial Sequence
  Synthetic
cacguacuucagagucaaau

SEQ ID NO: 618660 - RNA, 21 nt, Artificial Sequence
  Synthetic
ccacguacuucagagucaaau

SEQ ID NO: 618661 - RNA, 22 nt, Artificial Sequence
  Synthetic
uccacguacuucagagucaaau

SEQ ID NO: 618662 - RNA, 23 nt, Artificial Sequence
  Synthetic
uuccacguacuucagagucaaau

SEQ ID NO: 618663 - RNA, 24 nt, Artificial Sequence
  Synthetic
uuuccacguacuucagagucaaau

SEQ ID NO: 618664 - RNA, 18 nt, Artificial Sequence
  Synthetic
cuucaagucuggucaaau

SEQ ID NO: 618665 - RNA, 19 nt, Artificial Sequence
  Synthetic
ccuucaagucuggucaaau

SEQ ID NO: 618666 - RNA, 20 nt, Artificial Sequence
  Synthetic
uccuucaagucuggucaaau

SEQ ID NO: 618667 - RNA, 21 nt, Artificial Sequence
  Synthetic
guccuucaagucuggucaaau

SEQ ID NO: 618668 - RNA, 22 nt, Artificial Sequence
  Synthetic
aguccuucaagucuggucaaau

SEQ ID NO: 618669 - RNA, 23 nt, Artificial Sequence
  Synthetic
aaguccuucaagucuggucaaau

SEQ ID NO: 618670 - RNA, 24 nt, Artificial Sequence
  Synthetic
uaaguccuucaagucuggucaaau

SEQ ID NO: 618671 - RNA, 18 nt, Artificial Sequence
  Synthetic
ccuccagaagugucaaau

SEQ ID NO: 618672 - RNA, 19 nt, Artificial Sequence
  Synthetic
accuccagaagugucaaau

SEQ ID NO: 618673 - RNA, 20 nt, Artificial Sequence
  Synthetic
aaccuccagaagugucaaau

SEQ ID NO: 618674 - RNA, 21 nt, Artificial Sequence
  Synthetic
gaaccuccagaagugucaaau

SEQ ID NO: 618675 - RNA, 22 nt, Artificial Sequence
  Synthetic
cgaaccuccagaagugucaaau

SEQ ID NO: 618676 - RNA, 23 nt, Artificial Sequence
  Synthetic
acgaaccuccagaagugucaaau

SEQ ID NO: 618677 - RNA, 24 nt, Artificial Sequence
  Synthetic
uacgaaccuccagaagugucaaau

SEQ ID NO: 618678 - RNA, 18 nt, Artificial Sequence
  Synthetic
aaagaaagauauucaaau

SEQ ID NO: 618679 - RNA, 19 nt, Artificial Sequence
  Synthetic
gaaagaaagauauucaaau

SEQ ID NO: 618680 - RNA, 20 nt, Artificial Sequence
  Synthetic
agaaagaaagauauucaaau

SEQ ID NO: 618681 - RNA, 21 nt, Artificial Sequence
  Synthetic
aagaaagaaagauauucaaau

SEQ ID NO: 618682 - RNA, 22 nt, Artificial Sequence
  Synthetic
aaagaaagaaagauauucaaau

SEQ ID NO: 618683 - RNA, 23 nt, Artificial Sequence
  Synthetic
gaaagaaagaaagauauucaaau

SEQ ID NO: 618684 - RNA, 24 nt, Artificial Sequence
  Synthetic
agaaagaaagaaagauauucaaau

SEQ ID NO: 618685 - RNA, 18 nt, Artificial Sequence
  Synthetic
accagucauuuuucaaau

SEQ ID NO: 618686 - RNA, 19 nt, Artificial Sequence
  Synthetic
gaccagucauuuuucaaau

SEQ ID NO: 618687 - RNA, 20 nt, Artificial Sequence
  Synthetic
ugaccagucauuuuucaaau

SEQ ID NO: 618688 - RNA, 21 nt, Artificial Sequence
  Synthetic
gugaccagucauuuuucaaau

SEQ ID NO: 618689 - RNA, 22 nt, Artificial Sequence
  Synthetic
ugugaccagucauuuuucaaau

SEQ ID NO: 618690 - RNA, 23 nt, Artificial Sequence
  Synthetic
augugaccagucauuuuucaaau

SEQ ID NO: 618691 - RNA, 24 nt, Artificial Sequence
  Synthetic
aaugugaccagucauuuuucaaau

SEQ ID NO: 618692 - RNA, 18 nt, Artificial Sequence
  Synthetic
uugaaaagaaaaagaaau

SEQ ID NO: 618693 - RNA, 19 nt, Artificial Sequence
  Synthetic
cuugaaaagaaaaagaaau

SEQ ID NO: 618694 - RNA, 20 nt, Artificial Sequence
  Synthetic
acuugaaaagaaaaagaaau

SEQ ID NO: 618695 - RNA, 21 nt, Artificial Sequence
  Synthetic
cacuugaaaagaaaaagaaau

SEQ ID NO: 618696 - RNA, 22 nt, Artificial Sequence
  Synthetic
ucacuugaaaagaaaaagaaau

SEQ ID NO: 618697 - RNA, 23 nt, Artificial Sequence
  Synthetic
gucacuugaaaagaaaaagaaau

SEQ ID NO: 618698 - RNA, 24 nt, Artificial Sequence
  Synthetic
agucacuugaaaagaaaaagaaau

SEQ ID NO: 618699 - RNA, 18 nt, Artificial Sequence
  Synthetic
aggaagagaaaaagaaau

SEQ ID NO: 618700 - RNA, 19 nt, Artificial Sequence
  Synthetic
caggaagagaaaaagaaau

SEQ ID NO: 618701 - RNA, 20 nt, Artificial Sequence
  Synthetic
acaggaagagaaaaagaaau

SEQ ID NO: 618702 - RNA, 21 nt, Artificial Sequence
  Synthetic
gacaggaagagaaaaagaaau

SEQ ID NO: 618703 - RNA, 22 nt, Artificial Sequence
  Synthetic
agacaggaagagaaaaagaaau

SEQ ID NO: 618704 - RNA, 23 nt, Artificial Sequence
  Synthetic
aagacaggaagagaaaaagaaau

SEQ ID NO: 618705 - RNA, 24 nt, Artificial Sequence
  Synthetic
caagacaggaagagaaaaagaaau

SEQ ID NO: 618706 - RNA, 18 nt, Artificial Sequence
  Synthetic
cuagggugaaaaagaaau

SEQ ID NO: 618707 - RNA, 19 nt, Artificial Sequence
  Synthetic
ccuagggugaaaaagaaau

SEQ ID NO: 618708 - RNA, 20 nt, Artificial Sequence
  Synthetic
uccuagggugaaaaagaaau

SEQ ID NO: 618709 - RNA, 21 nt, Artificial Sequence
  Synthetic
uuccuagggugaaaaagaaau

SEQ ID NO: 618710 - RNA, 22 nt, Artificial Sequence
  Synthetic
uuuccuagggugaaaaagaaau

SEQ ID NO: 618711 - RNA, 23 nt, Artificial Sequence
  Synthetic
auuuccuagggugaaaaagaaau

SEQ ID NO: 618712 - RNA, 24 nt, Artificial Sequence
  Synthetic
uauuuccuagggugaaaaagaaau

SEQ ID NO: 618713 - RNA, 18 nt, Artificial Sequence
  Synthetic
guagagauaaaaagaaau

SEQ ID NO: 618714 - RNA, 19 nt, Artificial Sequence
  Synthetic
gguagagauaaaaagaaau

SEQ ID NO: 618715 - RNA, 20 nt, Artificial Sequence
  Synthetic
agguagagauaaaaagaaau

SEQ ID NO: 618716 - RNA, 21 nt, Artificial Sequence
  Synthetic
gagguagagauaaaaagaaau

SEQ ID NO: 618717 - RNA, 22 nt, Artificial Sequence
  Synthetic
agagguagagauaaaaagaaau

SEQ ID NO: 618718 - RNA, 23 nt, Artificial Sequence
  Synthetic
cagagguagagauaaaaagaaau

SEQ ID NO: 618719 - RNA, 24 nt, Artificial Sequence
  Synthetic
gcagagguagagauaaaaagaaau

SEQ ID NO: 618720 - RNA, 18 nt, Artificial Sequence
  Synthetic
caaacaaacaaaagaaau

SEQ ID NO: 618721 - RNA, 19 nt, Artificial Sequence
  Synthetic
acaaacaaacaaaagaaau

SEQ ID NO: 618722 - RNA, 20 nt, Artificial Sequence
  Synthetic
aacaaacaaacaaaagaaau

SEQ ID NO: 618723 - RNA, 21 nt, Artificial Sequence
  Synthetic
aaacaaacaaacaaaagaaau

SEQ ID NO: 618724 - RNA, 22 nt, Artificial Sequence
  Synthetic
caaacaaacaaacaaaagaaau

SEQ ID NO: 618725 - RNA, 23 nt, Artificial Sequence
  Synthetic
acaaacaaacaaacaaaagaaau

SEQ ID NO: 618726 - RNA, 24 nt, Artificial Sequence
  Synthetic
cacaaacaaacaaacaaaagaaau

SEQ ID NO: 618727 - RNA, 18 nt, Artificial Sequence
  Synthetic
uuauacuaacaaagaaau

SEQ ID NO: 618728 - RNA, 19 nt, Artificial Sequence
  Synthetic
auuauacuaacaaagaaau

SEQ ID NO: 618729 - RNA, 20 nt, Artificial Sequence
  Synthetic
aauuauacuaacaaagaaau

SEQ ID NO: 618730 - RNA, 21 nt, Artificial Sequence
  Synthetic
aaauuauacuaacaaagaaau

SEQ ID NO: 618731 - RNA, 22 nt, Artificial Sequence
  Synthetic
gaaauuauacuaacaaagaaau

SEQ ID NO: 618732 - RNA, 23 nt, Artificial Sequence
  Synthetic
ggaaauuauacuaacaaagaaau

SEQ ID NO: 618733 - RNA, 24 nt, Artificial Sequence
  Synthetic
aggaaauuauacuaacaaagaaau

SEQ ID NO: 618734 - RNA, 18 nt, Artificial Sequence
  Synthetic
gagaaaauacaaagaaau

SEQ ID NO: 618735 - RNA, 19 nt, Artificial Sequence
  Synthetic
agagaaaauacaaagaaau

SEQ ID NO: 618736 - RNA, 20 nt, Artificial Sequence
  Synthetic
cagagaaaauacaaagaaau

SEQ ID NO: 618737 - RNA, 21 nt, Artificial Sequence
  Synthetic
ucagagaaaauacaaagaaau

SEQ ID NO: 618738 - RNA, 22 nt, Artificial Sequence
  Synthetic
uucagagaaaauacaaagaaau

SEQ ID NO: 618739 - RNA, 23 nt, Artificial Sequence
  Synthetic
guucagagaaaauacaaagaaau

SEQ ID NO: 618740 - RNA, 24 nt, Artificial Sequence
  Synthetic
uguucagagaaaauacaaagaaau

SEQ ID NO: 618741 - RNA, 18 nt, Artificial Sequence
  Synthetic
ugacaaaaaacaagaaau

SEQ ID NO: 618742 - RNA, 19 nt, Artificial Sequence
  Synthetic
cugacaaaaaacaagaaau

SEQ ID NO: 618743 - RNA, 20 nt, Artificial Sequence
  Synthetic
ccugacaaaaaacaagaaau

SEQ ID NO: 618744 - RNA, 21 nt, Artificial Sequence
  Synthetic
accugacaaaaaacaagaaau

SEQ ID NO: 618745 - RNA, 22 nt, Artificial Sequence
  Synthetic
aaccugacaaaaaacaagaaau

SEQ ID NO: 618746 - RNA, 23 nt, Artificial Sequence
  Synthetic
aaaccugacaaaaaacaagaaau

SEQ ID NO: 618747 - RNA, 24 nt, Artificial Sequence
  Synthetic
caaaccugacaaaaaacaagaaau

SEQ ID NO: 618748 - RNA, 18 nt, Artificial Sequence
  Synthetic
cugacaaaaacaagaaau

SEQ ID NO: 618749 - RNA, 19 nt, Artificial Sequence
  Synthetic
ccugacaaaaacaagaaau

SEQ ID NO: 618750 - RNA, 20 nt, Artificial Sequence
  Synthetic
accugacaaaaacaagaaau

SEQ ID NO: 618751 - RNA, 21 nt, Artificial Sequence
  Synthetic
aaccugacaaaaacaagaaau

SEQ ID NO: 618752 - RNA, 22 nt, Artificial Sequence
  Synthetic
aaaccugacaaaaacaagaaau

SEQ ID NO: 618753 - RNA, 23 nt, Artificial Sequence
  Synthetic
caaaccugacaaaaacaagaaau

SEQ ID NO: 618754 - RNA, 24 nt, Artificial Sequence
  Synthetic
acaaaccugacaaaaacaagaaau

SEQ ID NO: 618755 - RNA, 18 nt, Artificial Sequence
  Synthetic
gcaaagccuccaagaaau

SEQ ID NO: 618756 - RNA, 19 nt, Artificial Sequence
  Synthetic
agcaaagccuccaagaaau

SEQ ID NO: 618757 - RNA, 20 nt, Artificial Sequence
  Synthetic
gagcaaagccuccaagaaau

SEQ ID NO: 618758 - RNA, 21 nt, Artificial Sequence
  Synthetic
ugagcaaagccuccaagaaau

SEQ ID NO: 618759 - RNA, 22 nt, Artificial Sequence
  Synthetic
augagcaaagccuccaagaaau

SEQ ID NO: 618760 - RNA, 23 nt, Artificial Sequence
  Synthetic
aaugagcaaagccuccaagaaau

SEQ ID NO: 618761 - RNA, 24 nt, Artificial Sequence
  Synthetic
aaaugagcaaagccuccaagaaau

SEQ ID NO: 618762 - RNA, 18 nt, Artificial Sequence
  Synthetic
accacacugucaagaaau

SEQ ID NO: 618763 - RNA, 19 nt, Artificial Sequence
  Synthetic
aaccacacugucaagaaau

SEQ ID NO: 618764 - RNA, 20 nt, Artificial Sequence
  Synthetic
aaaccacacugucaagaaau

SEQ ID NO: 618765 - RNA, 21 nt, Artificial Sequence
  Synthetic
uaaaccacacugucaagaaau

SEQ ID NO: 618766 - RNA, 22 nt, Artificial Sequence
  Synthetic
cuaaaccacacugucaagaaau

SEQ ID NO: 618767 - RNA, 23 nt, Artificial Sequence
  Synthetic
acuaaaccacacugucaagaaau

SEQ ID NO: 618768 - RNA, 24 nt, Artificial Sequence
  Synthetic
aacuaaaccacacugucaagaaau

SEQ ID NO: 618769 - RNA, 18 nt, Artificial Sequence
  Synthetic
aucaucugaggaagaaau

SEQ ID NO: 618770 - RNA, 19 nt, Artificial Sequence
  Synthetic
aaucaucugaggaagaaau

SEQ ID NO: 618771 - RNA, 20 nt, Artificial Sequence
  Synthetic
gaaucaucugaggaagaaau

SEQ ID NO: 618772 - RNA, 21 nt, Artificial Sequence
  Synthetic
ugaaucaucugaggaagaaau

SEQ ID NO: 618773 - RNA, 22 nt, Artificial Sequence
  Synthetic
gugaaucaucugaggaagaaau

SEQ ID NO: 618774 - RNA, 23 nt, Artificial Sequence
  Synthetic
ggugaaucaucugaggaagaaau

SEQ ID NO: 618775 - RNA, 24 nt, Artificial Sequence
  Synthetic
uggugaaucaucugaggaagaaau

SEQ ID NO: 618776 - RNA, 18 nt, Artificial Sequence
  Synthetic
aauggccauggaagaaau

SEQ ID NO: 618777 - RNA, 19 nt, Artificial Sequence
  Synthetic
uaauggccauggaagaaau

SEQ ID NO: 618778 - RNA, 20 nt, Artificial Sequence
  Synthetic
cuaauggccauggaagaaau

SEQ ID NO: 618779 - RNA, 21 nt, Artificial Sequence
  Synthetic
ccuaauggccauggaagaaau

SEQ ID NO: 618780 - RNA, 22 nt, Artificial Sequence
  Synthetic
uccuaauggccauggaagaaau

SEQ ID NO: 618781 - RNA, 23 nt, Artificial Sequence
  Synthetic
auccuaauggccauggaagaaau

SEQ ID NO: 618782 - RNA, 24 nt, Artificial Sequence
  Synthetic
aauccuaauggccauggaagaaau

SEQ ID NO: 618783 - RNA, 18 nt, Artificial Sequence
  Synthetic
cuacauacaguaagaaau

SEQ ID NO: 618784 - RNA, 19 nt, Artificial Sequence
  Synthetic
ccuacauacaguaagaaau

SEQ ID NO: 618785 - RNA, 20 nt, Artificial Sequence
  Synthetic
uccuacauacaguaagaaau

SEQ ID NO: 618786 - RNA, 21 nt, Artificial Sequence
  Synthetic
guccuacauacaguaagaaau

SEQ ID NO: 618787 - RNA, 22 nt, Artificial Sequence
  Synthetic
uguccuacauacaguaagaaau

SEQ ID NO: 618788 - RNA, 23 nt, Artificial Sequence
  Synthetic
auguccuacauacaguaagaaau

SEQ ID NO: 618789 - RNA, 24 nt, Artificial Sequence
  Synthetic
aauguccuacauacaguaagaaau

SEQ ID NO: 618790 - RNA, 18 nt, Artificial Sequence
  Synthetic
acacccugaguaagaaau

SEQ ID NO: 618791 - RNA, 19 nt, Artificial Sequence
  Synthetic
aacacccugaguaagaaau

SEQ ID NO: 618792 - RNA, 20 nt, Artificial Sequence
  Synthetic
uaacacccugaguaagaaau

SEQ ID NO: 618793 - RNA, 21 nt, Artificial Sequence
  Synthetic
auaacacccugaguaagaaau

SEQ ID NO: 618794 - RNA, 22 nt, Artificial Sequence
  Synthetic
cauaacacccugaguaagaaau

SEQ ID NO: 618795 - RNA, 23 nt, Artificial Sequence
  Synthetic
ucauaacacccugaguaagaaau

SEQ ID NO: 618796 - RNA, 24 nt, Artificial Sequence
  Synthetic
uucauaacacccugaguaagaaau

SEQ ID NO: 618797 - RNA, 18 nt, Artificial Sequence
  Synthetic
accuuggaauuaagaaau

SEQ ID NO: 618798 - RNA, 19 nt, Artificial Sequence
  Synthetic
aaccuuggaauuaagaaau

SEQ ID NO: 618799 - RNA, 20 nt, Artificial Sequence
  Synthetic
uaaccuuggaauuaagaaau

SEQ ID NO: 618800 - RNA, 21 nt, Artificial Sequence
  Synthetic
auaaccuuggaauuaagaaau

SEQ ID NO: 618801 - RNA, 22 nt, Artificial Sequence
  Synthetic
uauaaccuuggaauuaagaaau

SEQ ID NO: 618802 - RNA, 23 nt, Artificial Sequence
  Synthetic
uuauaaccuuggaauuaagaaau

SEQ ID NO: 618803 - RNA, 24 nt, Artificial Sequence
  Synthetic
cuuauaaccuuggaauuaagaaau

SEQ ID NO: 618804 - RNA, 18 nt, Artificial Sequence
  Synthetic
ggugagauaaacagaaau

SEQ ID NO: 618805 - RNA, 19 nt, Artificial Sequence
  Synthetic
uggugagauaaacagaaau

SEQ ID NO: 618806 - RNA, 20 nt, Artificial Sequence
  Synthetic
guggugagauaaacagaaau

SEQ ID NO: 618807 - RNA, 21 nt, Artificial Sequence
  Synthetic
aguggugagauaaacagaaau

SEQ ID NO: 618808 - RNA, 22 nt, Artificial Sequence
  Synthetic
gaguggugagauaaacagaaau

SEQ ID NO: 618809 - RNA, 23 nt, Artificial Sequence
  Synthetic
agaguggugagauaaacagaaau

SEQ ID NO: 618810 - RNA, 24 nt, Artificial Sequence
  Synthetic
aagaguggugagauaaacagaaau

SEQ ID NO: 618811 - RNA, 18 nt, Artificial Sequence
  Synthetic
ugauccuggaacagaaau

SEQ ID NO: 618812 - RNA, 19 nt, Artificial Sequence
  Synthetic
gugauccuggaacagaaau

SEQ ID NO: 618813 - RNA, 20 nt, Artificial Sequence
  Synthetic
agugauccuggaacagaaau

SEQ ID NO: 618814 - RNA, 21 nt, Artificial Sequence
  Synthetic
gagugauccuggaacagaaau

SEQ ID NO: 618815 - RNA, 22 nt, Artificial Sequence
  Synthetic
agagugauccuggaacagaaau

SEQ ID NO: 618816 - RNA, 23 nt, Artificial Sequence
  Synthetic
aagagugauccuggaacagaaau

SEQ ID NO: 618817 - RNA, 24 nt, Artificial Sequence
  Synthetic
aaagagugauccuggaacagaaau

SEQ ID NO: 618818 - RNA, 18 nt, Artificial Sequence
  Synthetic
guaagaaguaacagaaau

SEQ ID NO: 618819 - RNA, 19 nt, Artificial Sequence
  Synthetic
uguaagaaguaacagaaau

SEQ ID NO: 618820 - RNA, 20 nt, Artificial Sequence
  Synthetic
uuguaagaaguaacagaaau

SEQ ID NO: 618821 - RNA, 21 nt, Artificial Sequence
  Synthetic
uuuguaagaaguaacagaaau

SEQ ID NO: 618822 - RNA, 22 nt, Artificial Sequence
  Synthetic
uuuuguaagaaguaacagaaau

SEQ ID NO: 618823 - RNA, 23 nt, Artificial Sequence
  Synthetic
auuuuguaagaaguaacagaaau

SEQ ID NO: 618824 - RNA, 24 nt, Artificial Sequence
  Synthetic
uauuuuguaagaaguaacagaaau

SEQ ID NO: 618825 - RNA, 18 nt, Artificial Sequence
  Synthetic
uuugggagagacagaaau

SEQ ID NO: 618826 - RNA, 19 nt, Artificial Sequence
  Synthetic
uuuugggagagacagaaau

SEQ ID NO: 618827 - RNA, 20 nt, Artificial Sequence
  Synthetic
auuuugggagagacagaaau

SEQ ID NO: 618828 - RNA, 21 nt, Artificial Sequence
  Synthetic
uauuuugggagagacagaaau

SEQ ID NO: 618829 - RNA, 22 nt, Artificial Sequence
  Synthetic
guauuuugggagagacagaaau

SEQ ID NO: 618830 - RNA, 23 nt, Artificial Sequence
  Synthetic
uguauuuugggagagacagaaau

SEQ ID NO: 618831 - RNA, 24 nt, Artificial Sequence
  Synthetic
guguauuuugggagagacagaaau

SEQ ID NO: 618832 - RNA, 18 nt, Artificial Sequence
  Synthetic
uuguacagauacagaaau

SEQ ID NO: 618833 - RNA, 19 nt, Artificial Sequence
  Synthetic
auuguacagauacagaaau

SEQ ID NO: 618834 - RNA, 20 nt, Artificial Sequence
  Synthetic
cauuguacagauacagaaau

SEQ ID NO: 618835 - RNA, 21 nt, Artificial Sequence
  Synthetic
acauuguacagauacagaaau

SEQ ID NO: 618836 - RNA, 22 nt, Artificial Sequence
  Synthetic
gacauuguacagauacagaaau

SEQ ID NO: 618837 - RNA, 23 nt, Artificial Sequence
  Synthetic
agacauuguacagauacagaaau

SEQ ID NO: 618838 - RNA, 24 nt, Artificial Sequence
  Synthetic
aagacauuguacagauacagaaau

SEQ ID NO: 618839 - RNA, 18 nt, Artificial Sequence
  Synthetic
gaaauguuauacagaaau

SEQ ID NO: 618840 - RNA, 19 nt, Artificial Sequence
  Synthetic
agaaauguuauacagaaau

SEQ ID NO: 618841 - RNA, 20 nt, Artificial Sequence
  Synthetic
aagaaauguuauacagaaau

SEQ ID NO: 618842 - RNA, 21 nt, Artificial Sequence
  Synthetic
caagaaauguuauacagaaau

SEQ ID NO: 618843 - RNA, 22 nt, Artificial Sequence
  Synthetic
ucaagaaauguuauacagaaau

SEQ ID NO: 618844 - RNA, 23 nt, Artificial Sequence
  Synthetic
gucaagaaauguuauacagaaau

SEQ ID NO: 618845 - RNA, 24 nt, Artificial Sequence
  Synthetic
agucaagaaauguuauacagaaau

SEQ ID NO: 618846 - RNA, 18 nt, Artificial Sequence
  Synthetic
uaaugcaccaccagaaau

SEQ ID NO: 618847 - RNA, 19 nt, Artificial Sequence
  Synthetic
auaaugcaccaccagaaau

SEQ ID NO: 618848 - RNA, 20 nt, Artificial Sequence
  Synthetic
uauaaugcaccaccagaaau

SEQ ID NO: 618849 - RNA, 21 nt, Artificial Sequence
  Synthetic
uuauaaugcaccaccagaaau

SEQ ID NO: 618850 - RNA, 22 nt, Artificial Sequence
  Synthetic
auuauaaugcaccaccagaaau

SEQ ID NO: 618851 - RNA, 23 nt, Artificial Sequence
  Synthetic
aauuauaaugcaccaccagaaau

SEQ ID NO: 618852 - RNA, 24 nt, Artificial Sequence
  Synthetic
uaauuauaaugcaccaccagaaau

SEQ ID NO: 618853 - RNA, 18 nt, Artificial Sequence
  Synthetic
gaacuuuuacccagaaau

SEQ ID NO: 618854 - RNA, 19 nt, Artificial Sequence
  Synthetic
ggaacuuuuacccagaaau

SEQ ID NO: 618855 - RNA, 20 nt, Artificial Sequence
  Synthetic
aggaacuuuuacccagaaau

SEQ ID NO: 618856 - RNA, 21 nt, Artificial Sequence
  Synthetic
uaggaacuuuuacccagaaau

SEQ ID NO: 618857 - RNA, 22 nt, Artificial Sequence
  Synthetic
guaggaacuuuuacccagaaau

SEQ ID NO: 618858 - RNA, 23 nt, Artificial Sequence
  Synthetic
uguaggaacuuuuacccagaaau

SEQ ID NO: 618859 - RNA, 24 nt, Artificial Sequence
  Synthetic
guguaggaacuuuuacccagaaau

SEQ ID NO: 618860 - RNA, 18 nt, Artificial Sequence
  Synthetic
ugcaaguggugcagaaau

SEQ ID NO: 618861 - RNA, 19 nt, Artificial Sequence
  Synthetic
gugcaaguggugcagaaau

SEQ ID NO: 618862 - RNA, 20 nt, Artificial Sequence
  Synthetic
ggugcaaguggugcagaaau

SEQ ID NO: 618863 - RNA, 21 nt, Artificial Sequence
  Synthetic
uggugcaaguggugcagaaau

SEQ ID NO: 618864 - RNA, 22 nt, Artificial Sequence
  Synthetic
cuggugcaaguggugcagaaau

SEQ ID NO: 618865 - RNA, 23 nt, Artificial Sequence
  Synthetic
acuggugcaaguggugcagaaau

SEQ ID NO: 618866 - RNA, 24 nt, Artificial Sequence
  Synthetic
cacuggugcaaguggugcagaaau

SEQ ID NO: 618867 - RNA, 18 nt, Artificial Sequence
  Synthetic
auaaguaaaaucagaaau

SEQ ID NO: 618868 - RNA, 19 nt, Artificial Sequence
  Synthetic
aauaaguaaaaucagaaau

SEQ ID NO: 618869 - RNA, 20 nt, Artificial Sequence
  Synthetic
aaauaaguaaaaucagaaau

SEQ ID NO: 618870 - RNA, 21 nt, Artificial Sequence
  Synthetic
caaauaaguaaaaucagaaau

SEQ ID NO: 618871 - RNA, 22 nt, Artificial Sequence
  Synthetic
ccaaauaaguaaaaucagaaau

SEQ ID NO: 618872 - RNA, 23 nt, Artificial Sequence
  Synthetic
cccaaauaaguaaaaucagaaau

SEQ ID NO: 618873 - RNA, 24 nt, Artificial Sequence
  Synthetic
acccaaauaaguaaaaucagaaau

SEQ ID NO: 618874 - RNA, 18 nt, Artificial Sequence
  Synthetic
uuguaugguuucagaaau

SEQ ID NO: 618875 - RNA, 19 nt, Artificial Sequence
  Synthetic
auuguaugguuucagaaau

SEQ ID NO: 618876 - RNA, 20 nt, Artificial Sequence
  Synthetic
aauuguaugguuucagaaau

SEQ ID NO: 618877 - RNA, 21 nt, Artificial Sequence
  Synthetic
gaauuguaugguuucagaaau

SEQ ID NO: 618878 - RNA, 22 nt, Artificial Sequence
  Synthetic
ggaauuguaugguuucagaaau

SEQ ID NO: 618879 - RNA, 23 nt, Artificial Sequence
  Synthetic
gggaauuguaugguuucagaaau

SEQ ID NO: 618880 - RNA, 24 nt, Artificial Sequence
  Synthetic
agggaauuguaugguuucagaaau

SEQ ID NO: 618881 - RNA, 18 nt, Artificial Sequence
  Synthetic
aaauggaaaaagagaaau

SEQ ID NO: 618882 - RNA, 19 nt, Artificial Sequence
  Synthetic
aaaauggaaaaagagaaau

SEQ ID NO: 618883 - RNA, 20 nt, Artificial Sequence
  Synthetic
uaaaauggaaaaagagaaau

SEQ ID NO: 618884 - RNA, 21 nt, Artificial Sequence
  Synthetic
uuaaaauggaaaaagagaaau

SEQ ID NO: 618885 - RNA, 22 nt, Artificial Sequence
  Synthetic
cuuaaaauggaaaaagagaaau

SEQ ID NO: 618886 - RNA, 23 nt, Artificial Sequence
  Synthetic
ucuuaaaauggaaaaagagaaau

SEQ ID NO: 618887 - RNA, 24 nt, Artificial Sequence
  Synthetic
aucuuaaaauggaaaaagagaaau

SEQ ID NO: 618888 - RNA, 18 nt, Artificial Sequence
  Synthetic
uuuggaaucaagagaaau

SEQ ID NO: 618889 - RNA, 19 nt, Artificial Sequence
  Synthetic
guuuggaaucaagagaaau

SEQ ID NO: 618890 - RNA, 20 nt, Artificial Sequence
  Synthetic
gguuuggaaucaagagaaau

SEQ ID NO: 618891 - RNA, 21 nt, Artificial Sequence
  Synthetic
agguuuggaaucaagagaaau

SEQ ID NO: 618892 - RNA, 22 nt, Artificial Sequence
  Synthetic
cagguuuggaaucaagagaaau

SEQ ID NO: 618893 - RNA, 23 nt, Artificial Sequence
  Synthetic
gcagguuuggaaucaagagaaau

SEQ ID NO: 618894 - RNA, 24 nt, Artificial Sequence
  Synthetic
agcagguuuggaaucaagagaaau

SEQ ID NO: 618895 - RNA, 18 nt, Artificial Sequence
  Synthetic
ucagugcagaagagaaau

SEQ ID NO: 618896 - RNA, 19 nt, Artificial Sequence
  Synthetic
gucagugcagaagagaaau

SEQ ID NO: 618897 - RNA, 20 nt, Artificial Sequence
  Synthetic
ggucagugcagaagagaaau

SEQ ID NO: 618898 - RNA, 21 nt, Artificial Sequence
  Synthetic
aggucagugcagaagagaaau

SEQ ID NO: 618899 - RNA, 22 nt, Artificial Sequence
  Synthetic
uaggucagugcagaagagaaau

SEQ ID NO: 618900 - RNA, 23 nt, Artificial Sequence
  Synthetic
cuaggucagugcagaagagaaau

SEQ ID NO: 618901 - RNA, 24 nt, Artificial Sequence
  Synthetic
acuaggucagugcagaagagaaau

SEQ ID NO: 618902 - RNA, 18 nt, Artificial Sequence
  Synthetic
auuuuagagaagagaaau

SEQ ID NO: 618903 - RNA, 19 nt, Artificial Sequence
  Synthetic
cauuuuagagaagagaaau

SEQ ID NO: 618904 - RNA, 20 nt, Artificial Sequence
  Synthetic
ccauuuuagagaagagaaau

SEQ ID NO: 618905 - RNA, 21 nt, Artificial Sequence
  Synthetic
uccauuuuagagaagagaaau

SEQ ID NO: 618906 - RNA, 22 nt, Artificial Sequence
  Synthetic
uuccauuuuagagaagagaaau

SEQ ID NO: 618907 - RNA, 23 nt, Artificial Sequence
  Synthetic
uuuccauuuuagagaagagaaau

SEQ ID NO: 618908 - RNA, 24 nt, Artificial Sequence
  Synthetic
auuuccauuuuagagaagagaaau

SEQ ID NO: 618909 - RNA, 18 nt, Artificial Sequence
  Synthetic
ccaggcagacagagaaau

SEQ ID NO: 618910 - RNA, 19 nt, Artificial Sequence
  Synthetic
accaggcagacagagaaau

SEQ ID NO: 618911 - RNA, 20 nt, Artificial Sequence
  Synthetic
uaccaggcagacagagaaau

SEQ ID NO: 618912 - RNA, 21 nt, Artificial Sequence
  Synthetic
uuaccaggcagacagagaaau

SEQ ID NO: 618913 - RNA, 22 nt, Artificial Sequence
  Synthetic
cuuaccaggcagacagagaaau

SEQ ID NO: 618914 - RNA, 23 nt, Artificial Sequence
  Synthetic
ucuuaccaggcagacagagaaau

SEQ ID NO: 618915 - RNA, 24 nt, Artificial Sequence
  Synthetic
uucuuaccaggcagacagagaaau

SEQ ID NO: 618916 - RNA, 18 nt, Artificial Sequence
  Synthetic
aauagaacccagagaaau

SEQ ID NO: 618917 - RNA, 19 nt, Artificial Sequence
  Synthetic
aaauagaacccagagaaau

SEQ ID NO: 618918 - RNA, 20 nt, Artificial Sequence
  Synthetic
aaaauagaacccagagaaau

SEQ ID NO: 618919 - RNA, 21 nt, Artificial Sequence
  Synthetic
aaaaauagaacccagagaaau

SEQ ID NO: 618920 - RNA, 22 nt, Artificial Sequence
  Synthetic
gaaaaauagaacccagagaaau

SEQ ID NO: 618921 - RNA, 23 nt, Artificial Sequence
  Synthetic
agaaaaauagaacccagagaaau

SEQ ID NO: 618922 - RNA, 24 nt, Artificial Sequence
  Synthetic
cagaaaaauagaacccagagaaau

SEQ ID NO: 618923 - RNA, 18 nt, Artificial Sequence
  Synthetic
auaggcauggagagaaau

SEQ ID NO: 618924 - RNA, 19 nt, Artificial Sequence
  Synthetic
cauaggcauggagagaaau

SEQ ID NO: 618925 - RNA, 20 nt, Artificial Sequence
  Synthetic
acauaggcauggagagaaau

SEQ ID NO: 618926 - RNA, 21 nt, Artificial Sequence
  Synthetic
cacauaggcauggagagaaau

SEQ ID NO: 618927 - RNA, 22 nt, Artificial Sequence
  Synthetic
acacauaggcauggagagaaau

SEQ ID NO: 618928 - RNA, 23 nt, Artificial Sequence
  Synthetic
aacacauaggcauggagagaaau

SEQ ID NO: 618929 - RNA, 24 nt, Artificial Sequence
  Synthetic
caacacauaggcauggagagaaau

SEQ ID NO: 618930 - RNA, 18 nt, Artificial Sequence
  Synthetic
caaauccaagggagaaau

SEQ ID NO: 618931 - RNA, 19 nt, Artificial Sequence
  Synthetic
ccaaauccaagggagaaau

SEQ ID NO: 618932 - RNA, 20 nt, Artificial Sequence
  Synthetic
uccaaauccaagggagaaau

SEQ ID NO: 618933 - RNA, 21 nt, Artificial Sequence
  Synthetic
cuccaaauccaagggagaaau

SEQ ID NO: 618934 - RNA, 22 nt, Artificial Sequence
  Synthetic
ucuccaaauccaagggagaaau

SEQ ID NO: 618935 - RNA, 23 nt, Artificial Sequence
  Synthetic
uucuccaaauccaagggagaaau

SEQ ID NO: 618936 - RNA, 24 nt, Artificial Sequence
  Synthetic
uuucuccaaauccaagggagaaau

SEQ ID NO: 618937 - RNA, 18 nt, Artificial Sequence
  Synthetic
gagaagauguggagaaau

SEQ ID NO: 618938 - RNA, 19 nt, Artificial Sequence
  Synthetic
ggagaagauguggagaaau

SEQ ID NO: 618939 - RNA, 20 nt, Artificial Sequence
  Synthetic
uggagaagauguggagaaau

SEQ ID NO: 618940 - RNA, 21 nt, Artificial Sequence
  Synthetic
cuggagaagauguggagaaau

SEQ ID NO: 618941 - RNA, 22 nt, Artificial Sequence
  Synthetic
gcuggagaagauguggagaaau

SEQ ID NO: 618942 - RNA, 23 nt, Artificial Sequence
  Synthetic
ugcuggagaagauguggagaaau

SEQ ID NO: 618943 - RNA, 24 nt, Artificial Sequence
  Synthetic
augcuggagaagauguggagaaau

SEQ ID NO: 618944 - RNA, 18 nt, Artificial Sequence
  Synthetic
gucuacacccugagaaau

SEQ ID NO: 618945 - RNA, 19 nt, Artificial Sequence
  Synthetic
agucuacacccugagaaau

SEQ ID NO: 618946 - RNA, 20 nt, Artificial Sequence
  Synthetic
cagucuacacccugagaaau

SEQ ID NO: 618947 - RNA, 21 nt, Artificial Sequence
  Synthetic
ucagucuacacccugagaaau

SEQ ID NO: 618948 - RNA, 22 nt, Artificial Sequence
  Synthetic
cucagucuacacccugagaaau

SEQ ID NO: 618949 - RNA, 23 nt, Artificial Sequence
  Synthetic
gcucagucuacacccugagaaau

SEQ ID NO: 618950 - RNA, 24 nt, Artificial Sequence
  Synthetic
agcucagucuacacccugagaaau

SEQ ID NO: 618951 - RNA, 18 nt, Artificial Sequence
  Synthetic
ugaauggaaaauagaaau

SEQ ID NO: 618952 - RNA, 19 nt, Artificial Sequence
  Synthetic
gugaauggaaaauagaaau

SEQ ID NO: 618953 - RNA, 20 nt, Artificial Sequence
  Synthetic
ggugaauggaaaauagaaau

SEQ ID NO: 618954 - RNA, 21 nt, Artificial Sequence
  Synthetic
uggugaauggaaaauagaaau

SEQ ID NO: 618955 - RNA, 22 nt, Artificial Sequence
  Synthetic
uuggugaauggaaaauagaaau

SEQ ID NO: 618956 - RNA, 23 nt, Artificial Sequence
  Synthetic
auuggugaauggaaaauagaaau

SEQ ID NO: 618957 - RNA, 24 nt, Artificial Sequence
  Synthetic
uauuggugaauggaaaauagaaau

SEQ ID NO: 618958 - RNA, 18 nt, Artificial Sequence
  Synthetic
aauaaucagucuagaaau

SEQ ID NO: 618959 - RNA, 19 nt, Artificial Sequence
  Synthetic
aaauaaucagucuagaaau

SEQ ID NO: 618960 - RNA, 20 nt, Artificial Sequence
  Synthetic
gaaauaaucagucuagaaau

SEQ ID NO: 618961 - RNA, 21 nt, Artificial Sequence
  Synthetic
ggaaauaaucagucuagaaau

SEQ ID NO: 618962 - RNA, 22 nt, Artificial Sequence
  Synthetic
uggaaauaaucagucuagaaau

SEQ ID NO: 618963 - RNA, 23 nt, Artificial Sequence
  Synthetic
uuggaaauaaucagucuagaaau

SEQ ID NO: 618964 - RNA, 24 nt, Artificial Sequence
  Synthetic
guuggaaauaaucagucuagaaau

SEQ ID NO: 618965 - RNA, 18 nt, Artificial Sequence
  Synthetic
ucaaaguauaguagaaau

SEQ ID NO: 618966 - RNA, 19 nt, Artificial Sequence
  Synthetic
uucaaaguauaguagaaau

SEQ ID NO: 618967 - RNA, 20 nt, Artificial Sequence
  Synthetic
cuucaaaguauaguagaaau

SEQ ID NO: 618968 - RNA, 21 nt, Artificial Sequence
  Synthetic
acuucaaaguauaguagaaau

SEQ ID NO: 618969 - RNA, 22 nt, Artificial Sequence
  Synthetic
uacuucaaaguauaguagaaau

SEQ ID NO: 618970 - RNA, 23 nt, Artificial Sequence
  Synthetic
uuacuucaaaguauaguagaaau

SEQ ID NO: 618971 - RNA, 24 nt, Artificial Sequence
  Synthetic
auuacuucaaaguauaguagaaau

SEQ ID NO: 618972 - RNA, 18 nt, Artificial Sequence
  Synthetic
aggaaaagagguagaaau

SEQ ID NO: 618973 - RNA, 19 nt, Artificial Sequence
  Synthetic
aaggaaaagagguagaaau

SEQ ID NO: 618974 - RNA, 20 nt, Artificial Sequence
  Synthetic
gaaggaaaagagguagaaau

SEQ ID NO: 618975 - RNA, 21 nt, Artificial Sequence
  Synthetic
agaaggaaaagagguagaaau

SEQ ID NO: 618976 - RNA, 22 nt, Artificial Sequence
  Synthetic
cagaaggaaaagagguagaaau

SEQ ID NO: 618977 - RNA, 23 nt, Artificial Sequence
  Synthetic
acagaaggaaaagagguagaaau

SEQ ID NO: 618978 - RNA, 24 nt, Artificial Sequence
  Synthetic
aacagaaggaaaagagguagaaau

SEQ ID NO: 618979 - RNA, 18 nt, Artificial Sequence
  Synthetic
ucuccaggucuuagaaau

SEQ ID NO: 618980 - RNA, 19 nt, Artificial Sequence
  Synthetic
uucuccaggucuuagaaau

SEQ ID NO: 618981 - RNA, 20 nt, Artificial Sequence
  Synthetic
uuucuccaggucuuagaaau

SEQ ID NO: 618982 - RNA, 21 nt, Artificial Sequence
  Synthetic
auuucuccaggucuuagaaau

SEQ ID NO: 618983 - RNA, 22 nt, Artificial Sequence
  Synthetic
gauuucuccaggucuuagaaau

SEQ ID NO: 618984 - RNA, 23 nt, Artificial Sequence
  Synthetic
ugauuucuccaggucuuagaaau

SEQ ID NO: 618985 - RNA, 24 nt, Artificial Sequence
  Synthetic
cugauuucuccaggucuuagaaau

SEQ ID NO: 618986 - RNA, 18 nt, Artificial Sequence
  Synthetic
aaaguaaacuuuagaaau

SEQ ID NO: 618987 - RNA, 19 nt, Artificial Sequence
  Synthetic
uaaaguaaacuuuagaaau

SEQ ID NO: 618988 - RNA, 20 nt, Artificial Sequence
  Synthetic
auaaaguaaacuuuagaaau

SEQ ID NO: 618989 - RNA, 21 nt, Artificial Sequence
  Synthetic
aauaaaguaaacuuuagaaau

SEQ ID NO: 618990 - RNA, 22 nt, Artificial Sequence
  Synthetic
aaauaaaguaaacuuuagaaau

SEQ ID NO: 618991 - RNA, 23 nt, Artificial Sequence
  Synthetic
gaaauaaaguaaacuuuagaaau

SEQ ID NO: 618992 - RNA, 24 nt, Artificial Sequence
  Synthetic
ggaaauaaaguaaacuuuagaaau

SEQ ID NO: 618993 - RNA, 18 nt, Artificial Sequence
  Synthetic
cuggggauagggcgaaau

SEQ ID NO: 618994 - RNA, 19 nt, Artificial Sequence
  Synthetic
gcuggggauagggcgaaau

SEQ ID NO: 618995 - RNA, 20 nt, Artificial Sequence
  Synthetic
ggcuggggauagggcgaaau

SEQ ID NO: 618996 - RNA, 21 nt, Artificial Sequence
  Synthetic
gggcuggggauagggcgaaau

SEQ ID NO: 618997 - RNA, 22 nt, Artificial Sequence
  Synthetic
ggggcuggggauagggcgaaau

SEQ ID NO: 618998 - RNA, 23 nt, Artificial Sequence
  Synthetic
aggggcuggggauagggcgaaau

SEQ ID NO: 618999 - RNA, 24 nt, Artificial Sequence
  Synthetic
caggggcuggggauagggcgaaau

SEQ ID NO: 619000 - RNA, 18 nt, Artificial Sequence
  Synthetic
uuaaacgugcaaggaaau

SEQ ID NO: 619001 - RNA, 19 nt, Artificial Sequence
  Synthetic
auuaaacgugcaaggaaau

SEQ ID NO: 619002 - RNA, 20 nt, Artificial Sequence
  Synthetic
uauuaaacgugcaaggaaau

SEQ ID NO: 619003 - RNA, 21 nt, Artificial Sequence
  Synthetic
auauuaaacgugcaaggaaau

SEQ ID NO: 619004 - RNA, 22 nt, Artificial Sequence
  Synthetic
aauauuaaacgugcaaggaaau

SEQ ID NO: 619005 - RNA, 23 nt, Artificial Sequence
  Synthetic
caauauuaaacgugcaaggaaau

SEQ ID NO: 619006 - RNA, 24 nt, Artificial Sequence
  Synthetic
gcaauauuaaacgugcaaggaaau

SEQ ID NO: 619007 - RNA, 24 nt, Artificial Sequence
  Synthetic
cuacaaaccacugcucaaggaaau

SEQ ID NO: 619008 - RNA, 18 nt, Artificial Sequence
  Synthetic
aaagagaagagaggaaau

SEQ ID NO: 619009 - RNA, 19 nt, Artificial Sequence
  Synthetic
gaaagagaagagaggaaau

SEQ ID NO: 619010 - RNA, 20 nt, Artificial Sequence
  Synthetic
agaaagagaagagaggaaau

SEQ ID NO: 619011 - RNA, 21 nt, Artificial Sequence
  Synthetic
gagaaagagaagagaggaaau

SEQ ID NO: 619012 - RNA, 22 nt, Artificial Sequence
  Synthetic
ggagaaagagaagagaggaaau

SEQ ID NO: 619013 - RNA, 23 nt, Artificial Sequence
  Synthetic
gggagaaagagaagagaggaaau

SEQ ID NO: 619014 - RNA, 24 nt, Artificial Sequence
  Synthetic
ggggagaaagagaagagaggaaau

SEQ ID NO: 619015 - RNA, 18 nt, Artificial Sequence
  Synthetic
gaaaaagaaauaggaaau

SEQ ID NO: 619016 - RNA, 19 nt, Artificial Sequence
  Synthetic
agaaaaagaaauaggaaau

SEQ ID NO: 619017 - RNA, 20 nt, Artificial Sequence
  Synthetic
aagaaaaagaaauaggaaau

SEQ ID NO: 619018 - RNA, 21 nt, Artificial Sequence
  Synthetic
aaagaaaaagaaauaggaaau

SEQ ID NO: 619019 - RNA, 22 nt, Artificial Sequence
  Synthetic
aaaagaaaaagaaauaggaaau

SEQ ID NO: 619020 - RNA, 23 nt, Artificial Sequence
  Synthetic
gaaaagaaaaagaaauaggaaau

SEQ ID NO: 619021 - RNA, 24 nt, Artificial Sequence
  Synthetic
ugaaaagaaaaagaaauaggaaau

SEQ ID NO: 619022 - RNA, 18 nt, Artificial Sequence
  Synthetic
uuuuaguuacuaggaaau

SEQ ID NO: 619023 - RNA, 19 nt, Artificial Sequence
  Synthetic
auuuuaguuacuaggaaau

SEQ ID NO: 619024 - RNA, 20 nt, Artificial Sequence
  Synthetic
gauuuuaguuacuaggaaau

SEQ ID NO: 619025 - RNA, 21 nt, Artificial Sequence
  Synthetic
ggauuuuaguuacuaggaaau

SEQ ID NO: 619026 - RNA, 22 nt, Artificial Sequence
  Synthetic
aggauuuuaguuacuaggaaau

SEQ ID NO: 619027 - RNA, 23 nt, Artificial Sequence
  Synthetic
aaggauuuuaguuacuaggaaau

SEQ ID NO: 619028 - RNA, 24 nt, Artificial Sequence
  Synthetic
uaaggauuuuaguuacuaggaaau

SEQ ID NO: 619029 - RNA, 18 nt, Artificial Sequence
  Synthetic
uccauuuucuuaggaaau

SEQ ID NO: 619030 - RNA, 19 nt, Artificial Sequence
  Synthetic
uuccauuuucuuaggaaau

SEQ ID NO: 619031 - RNA, 20 nt, Artificial Sequence
  Synthetic
auuccauuuucuuaggaaau

SEQ ID NO: 619032 - RNA, 21 nt, Artificial Sequence
  Synthetic
gauuccauuuucuuaggaaau

SEQ ID NO: 619033 - RNA, 22 nt, Artificial Sequence
  Synthetic
ugauuccauuuucuuaggaaau

SEQ ID NO: 619034 - RNA, 23 nt, Artificial Sequence
  Synthetic
gugauuccauuuucuuaggaaau

SEQ ID NO: 619035 - RNA, 24 nt, Artificial Sequence
  Synthetic
ugugauuccauuuucuuaggaaau

SEQ ID NO: 619036 - RNA, 18 nt, Artificial Sequence
  Synthetic
acaguguggaagggaaau

SEQ ID NO: 619037 - RNA, 19 nt, Artificial Sequence
  Synthetic
gacaguguggaagggaaau

SEQ ID NO: 619038 - RNA, 20 nt, Artificial Sequence
  Synthetic
ggacaguguggaagggaaau

SEQ ID NO: 619039 - RNA, 21 nt, Artificial Sequence
  Synthetic
aggacaguguggaagggaaau

SEQ ID NO: 619040 - RNA, 22 nt, Artificial Sequence
  Synthetic
uaggacaguguggaagggaaau

SEQ ID NO: 619041 - RNA, 23 nt, Artificial Sequence
  Synthetic
cuaggacaguguggaagggaaau

SEQ ID NO: 619042 - RNA, 24 nt, Artificial Sequence
  Synthetic
gcuaggacaguguggaagggaaau

SEQ ID NO: 619043 - RNA, 18 nt, Artificial Sequence
  Synthetic
uguaguucucagggaaau

SEQ ID NO: 619044 - RNA, 19 nt, Artificial Sequence
  Synthetic
cuguaguucucagggaaau

SEQ ID NO: 619045 - RNA, 20 nt, Artificial Sequence
  Synthetic
ucuguaguucucagggaaau

SEQ ID NO: 619046 - RNA, 21 nt, Artificial Sequence
  Synthetic
cucuguaguucucagggaaau

SEQ ID NO: 619047 - RNA, 22 nt, Artificial Sequence
  Synthetic
ucucuguaguucucagggaaau

SEQ ID NO: 619048 - RNA, 23 nt, Artificial Sequence
  Synthetic
cucucuguaguucucagggaaau

SEQ ID NO: 619049 - RNA, 24 nt, Artificial Sequence
  Synthetic
ucucucuguaguucucagggaaau

SEQ ID NO: 619050 - RNA, 18 nt, Artificial Sequence
  Synthetic
auugcuuaagagggaaau

SEQ ID NO: 619051 - RNA, 19 nt, Artificial Sequence
  Synthetic
cauugcuuaagagggaaau

SEQ ID NO: 619052 - RNA, 20 nt, Artificial Sequence
  Synthetic
acauugcuuaagagggaaau

SEQ ID NO: 619053 - RNA, 21 nt, Artificial Sequence
  Synthetic
aacauugcuuaagagggaaau

SEQ ID NO: 619054 - RNA, 22 nt, Artificial Sequence
  Synthetic
gaacauugcuuaagagggaaau

SEQ ID NO: 619055 - RNA, 23 nt, Artificial Sequence
  Synthetic
ugaacauugcuuaagagggaaau

SEQ ID NO: 619056 - RNA, 24 nt, Artificial Sequence
  Synthetic
gugaacauugcuuaagagggaaau

SEQ ID NO: 619057 - RNA, 18 nt, Artificial Sequence
  Synthetic
auuauauucuagggaaau

SEQ ID NO: 619058 - RNA, 19 nt, Artificial Sequence
  Synthetic
aauuauauucuagggaaau

SEQ ID NO: 619059 - RNA, 20 nt, Artificial Sequence
  Synthetic
caauuauauucuagggaaau

SEQ ID NO: 619060 - RNA, 21 nt, Artificial Sequence
  Synthetic
ccaauuauauucuagggaaau

SEQ ID NO: 619061 - RNA, 22 nt, Artificial Sequence
  Synthetic
accaauuauauucuagggaaau

SEQ ID NO: 619062 - RNA, 23 nt, Artificial Sequence
  Synthetic
gaccaauuauauucuagggaaau

SEQ ID NO: 619063 - RNA, 24 nt, Artificial Sequence
  Synthetic
ggaccaauuauauucuagggaaau

SEQ ID NO: 619064 - RNA, 18 nt, Artificial Sequence
  Synthetic
gacguauuguagggaaau

SEQ ID NO: 619065 - RNA, 19 nt, Artificial Sequence
  Synthetic
agacguauuguagggaaau

SEQ ID NO: 619066 - RNA, 20 nt, Artificial Sequence
  Synthetic
cagacguauuguagggaaau

SEQ ID NO: 619067 - RNA, 21 nt, Artificial Sequence
  Synthetic
acagacguauuguagggaaau

SEQ ID NO: 619068 - RNA, 22 nt, Artificial Sequence
  Synthetic
gacagacguauuguagggaaau

SEQ ID NO: 619069 - RNA, 23 nt, Artificial Sequence
  Synthetic
agacagacguauuguagggaaau

SEQ ID NO: 619070 - RNA, 24 nt, Artificial Sequence
  Synthetic
aagacagacguauuguagggaaau

SEQ ID NO: 619071 - RNA, 18 nt, Artificial Sequence
  Synthetic
ggagagauuaggggaaau

SEQ ID NO: 619072 - RNA, 19 nt, Artificial Sequence
  Synthetic
uggagagauuaggggaaau

SEQ ID NO: 619073 - RNA, 20 nt, Artificial Sequence
  Synthetic
guggagagauuaggggaaau

SEQ ID NO: 619074 - RNA, 21 nt, Artificial Sequence
  Synthetic
gguggagagauuaggggaaau

SEQ ID NO: 619075 - RNA, 22 nt, Artificial Sequence
  Synthetic
agguggagagauuaggggaaau

SEQ ID NO: 619076 - RNA, 23 nt, Artificial Sequence
  Synthetic
uagguggagagauuaggggaaau

SEQ ID NO: 619077 - RNA, 24 nt, Artificial Sequence
  Synthetic
auagguggagagauuaggggaaau

SEQ ID NO: 619078 - RNA, 18 nt, Artificial Sequence
  Synthetic
cccuuuuuagggggaaau

SEQ ID NO: 619079 - RNA, 19 nt, Artificial Sequence
  Synthetic
ucccuuuuuagggggaaau

SEQ ID NO: 619080 - RNA, 20 nt, Artificial Sequence
  Synthetic
aucccuuuuuagggggaaau

SEQ ID NO: 619081 - RNA, 21 nt, Artificial Sequence
  Synthetic
caucccuuuuuagggggaaau

SEQ ID NO: 619082 - RNA, 22 nt, Artificial Sequence
  Synthetic
acaucccuuuuuagggggaaau

SEQ ID NO: 619083 - RNA, 23 nt, Artificial Sequence
  Synthetic
gacaucccuuuuuagggggaaau

SEQ ID NO: 619084 - RNA, 24 nt, Artificial Sequence
  Synthetic
ugacaucccuuuuuagggggaaau

SEQ ID NO: 619085 - RNA, 18 nt, Artificial Sequence
  Synthetic
guuccugugcugggaaau

SEQ ID NO: 619086 - RNA, 19 nt, Artificial Sequence
  Synthetic
gguuccugugcugggaaau

SEQ ID NO: 619087 - RNA, 20 nt, Artificial Sequence
  Synthetic
agguuccugugcugggaaau

SEQ ID NO: 619088 - RNA, 21 nt, Artificial Sequence
  Synthetic
aagguuccugugcugggaaau

SEQ ID NO: 619089 - RNA, 22 nt, Artificial Sequence
  Synthetic
gaagguuccugugcugggaaau

SEQ ID NO: 619090 - RNA, 23 nt, Artificial Sequence
  Synthetic
ugaagguuccugugcugggaaau

SEQ ID NO: 619091 - RNA, 24 nt, Artificial Sequence
  Synthetic
cugaagguuccugugcugggaaau

SEQ ID NO: 619092 - RNA, 18 nt, Artificial Sequence
  Synthetic
ugugcaguugugggaaau

SEQ ID NO: 619093 - RNA, 19 nt, Artificial Sequence
  Synthetic
cugugcaguugugggaaau

SEQ ID NO: 619094 - RNA, 20 nt, Artificial Sequence
  Synthetic
ucugugcaguugugggaaau

SEQ ID NO: 619095 - RNA, 21 nt, Artificial Sequence
  Synthetic
aucugugcaguugugggaaau

SEQ ID NO: 619096 - RNA, 22 nt, Artificial Sequence
  Synthetic
uaucugugcaguugugggaaau

SEQ ID NO: 619097 - RNA, 23 nt, Artificial Sequence
  Synthetic
cuaucugugcaguugugggaaau

SEQ ID NO: 619098 - RNA, 24 nt, Artificial Sequence
  Synthetic
ucuaucugugcaguugugggaaau

SEQ ID NO: 619099 - RNA, 18 nt, Artificial Sequence
  Synthetic
ggggauaaauugggaaau

SEQ ID NO: 619100 - RNA, 19 nt, Artificial Sequence
  Synthetic
aggggauaaauugggaaau

SEQ ID NO: 619101 - RNA, 20 nt, Artificial Sequence
  Synthetic
caggggauaaauugggaaau

SEQ ID NO: 619102 - RNA, 21 nt, Artificial Sequence
  Synthetic
gcaggggauaaauugggaaau

SEQ ID NO: 619103 - RNA, 22 nt, Artificial Sequence
  Synthetic
ugcaggggauaaauugggaaau

SEQ ID NO: 619104 - RNA, 23 nt, Artificial Sequence
  Synthetic
cugcaggggauaaauugggaaau

SEQ ID NO: 619105 - RNA, 24 nt, Artificial Sequence
  Synthetic
ucugcaggggauaaauugggaaau

SEQ ID NO: 619106 - RNA, 18 nt, Artificial Sequence
  Synthetic
uguauacgauugggaaau

SEQ ID NO: 619107 - RNA, 19 nt, Artificial Sequence
  Synthetic
auguauacgauugggaaau

SEQ ID NO: 619108 - RNA, 20 nt, Artificial Sequence
  Synthetic
gauguauacgauugggaaau

SEQ ID NO: 619109 - RNA, 21 nt, Artificial Sequence
  Synthetic
ggauguauacgauugggaaau

SEQ ID NO: 619110 - RNA, 22 nt, Artificial Sequence
  Synthetic
gggauguauacgauugggaaau

SEQ ID NO: 619111 - RNA, 23 nt, Artificial Sequence
  Synthetic
agggauguauacgauugggaaau

SEQ ID NO: 619112 - RNA, 24 nt, Artificial Sequence
  Synthetic
gagggauguauacgauugggaaau

SEQ ID NO: 619113 - RNA, 18 nt, Artificial Sequence
  Synthetic
gagaggaaagcuggaaau

SEQ ID NO: 619114 - RNA, 19 nt, Artificial Sequence
  Synthetic
agagaggaaagcuggaaau

SEQ ID NO: 619115 - RNA, 20 nt, Artificial Sequence
  Synthetic
gagagaggaaagcuggaaau

SEQ ID NO: 619116 - RNA, 21 nt, Artificial Sequence
  Synthetic
ggagagaggaaagcuggaaau

SEQ ID NO: 619117 - RNA, 22 nt, Artificial Sequence
  Synthetic
gggagagaggaaagcuggaaau

SEQ ID NO: 619118 - RNA, 23 nt, Artificial Sequence
  Synthetic
ggggagagaggaaagcuggaaau

SEQ ID NO: 619119 - RNA, 24 nt, Artificial Sequence
  Synthetic
cggggagagaggaaagcuggaaau

SEQ ID NO: 619120 - RNA, 18 nt, Artificial Sequence
  Synthetic
acaguucuaaguggaaau

SEQ ID NO: 619121 - RNA, 19 nt, Artificial Sequence
  Synthetic
gacaguucuaaguggaaau

SEQ ID NO: 619122 - RNA, 20 nt, Artificial Sequence
  Synthetic
agacaguucuaaguggaaau

SEQ ID NO: 619123 - RNA, 21 nt, Artificial Sequence
  Synthetic
gagacaguucuaaguggaaau

SEQ ID NO: 619124 - RNA, 22 nt, Artificial Sequence
  Synthetic
agagacaguucuaaguggaaau

SEQ ID NO: 619125 - RNA, 23 nt, Artificial Sequence
  Synthetic
gagagacaguucuaaguggaaau

SEQ ID NO: 619126 - RNA, 24 nt, Artificial Sequence
  Synthetic
ugagagacaguucuaaguggaaau

SEQ ID NO: 619127 - RNA, 18 nt, Artificial Sequence
  Synthetic
auaaugaaaauuggaaau

SEQ ID NO: 619128 - RNA, 19 nt, Artificial Sequence
  Synthetic
aauaaugaaaauuggaaau

SEQ ID NO: 619129 - RNA, 20 nt, Artificial Sequence
  Synthetic
gaauaaugaaaauuggaaau

SEQ ID NO: 619130 - RNA, 21 nt, Artificial Sequence
  Synthetic
ugaauaaugaaaauuggaaau

SEQ ID NO: 619131 - RNA, 22 nt, Artificial Sequence
  Synthetic
cugaauaaugaaaauuggaaau

SEQ ID NO: 619132 - RNA, 23 nt, Artificial Sequence
  Synthetic
acugaauaaugaaaauuggaaau

SEQ ID NO: 619133 - RNA, 24 nt, Artificial Sequence
  Synthetic
aacugaauaaugaaaauuggaaau

SEQ ID NO: 619134 - RNA, 18 nt, Artificial Sequence
  Synthetic
uuucuccaucuuggaaau

SEQ ID NO: 619135 - RNA, 19 nt, Artificial Sequence
  Synthetic
guuucuccaucuuggaaau

SEQ ID NO: 619136 - RNA, 20 nt, Artificial Sequence
  Synthetic
aguuucuccaucuuggaaau

SEQ ID NO: 619137 - RNA, 21 nt, Artificial Sequence
  Synthetic
caguuucuccaucuuggaaau

SEQ ID NO: 619138 - RNA, 22 nt, Artificial Sequence
  Synthetic
ucaguuucuccaucuuggaaau

SEQ ID NO: 619139 - RNA, 23 nt, Artificial Sequence
  Synthetic
cucaguuucuccaucuuggaaau

SEQ ID NO: 619140 - RNA, 24 nt, Artificial Sequence
  Synthetic
ccucaguuucuccaucuuggaaau

SEQ ID NO: 619141 - RNA, 18 nt, Artificial Sequence
  Synthetic
cauguagcucuuggaaau

SEQ ID NO: 619142 - RNA, 19 nt, Artificial Sequence
  Synthetic
acauguagcucuuggaaau

SEQ ID NO: 619143 - RNA, 20 nt, Artificial Sequence
  Synthetic
aacauguagcucuuggaaau

SEQ ID NO: 619144 - RNA, 21 nt, Artificial Sequence
  Synthetic
gaacauguagcucuuggaaau

SEQ ID NO: 619145 - RNA, 22 nt, Artificial Sequence
  Synthetic
ugaacauguagcucuuggaaau

SEQ ID NO: 619146 - RNA, 23 nt, Artificial Sequence
  Synthetic
gugaacauguagcucuuggaaau

SEQ ID NO: 619147 - RNA, 24 nt, Artificial Sequence
  Synthetic
ugugaacauguagcucuuggaaau

SEQ ID NO: 619148 - RNA, 18 nt, Artificial Sequence
  Synthetic
uguauaaaauuuggaaau

SEQ ID NO: 619149 - RNA, 19 nt, Artificial Sequence
  Synthetic
auguauaaaauuuggaaau

SEQ ID NO: 619150 - RNA, 20 nt, Artificial Sequence
  Synthetic
cauguauaaaauuuggaaau

SEQ ID NO: 619151 - RNA, 21 nt, Artificial Sequence
  Synthetic
ucauguauaaaauuuggaaau

SEQ ID NO: 619152 - RNA, 22 nt, Artificial Sequence
  Synthetic
uucauguauaaaauuuggaaau

SEQ ID NO: 619153 - RNA, 23 nt, Artificial Sequence
  Synthetic
cuucauguauaaaauuuggaaau

SEQ ID NO: 619154 - RNA, 24 nt, Artificial Sequence
  Synthetic
ccuucauguauaaaauuuggaaau

SEQ ID NO: 619155 - RNA, 18 nt, Artificial Sequence
  Synthetic
ucaguggaauuuggaaau

SEQ ID NO: 619156 - RNA, 19 nt, Artificial Sequence
  Synthetic
gucaguggaauuuggaaau

SEQ ID NO: 619157 - RNA, 20 nt, Artificial Sequence
  Synthetic
ugucaguggaauuuggaaau

SEQ ID NO: 619158 - RNA, 21 nt, Artificial Sequence
  Synthetic
cugucaguggaauuuggaaau

SEQ ID NO: 619159 - RNA, 22 nt, Artificial Sequence
  Synthetic
ccugucaguggaauuuggaaau

SEQ ID NO: 619160 - RNA, 23 nt, Artificial Sequence
  Synthetic
uccugucaguggaauuuggaaau

SEQ ID NO: 619161 - RNA, 24 nt, Artificial Sequence
  Synthetic
guccugucaguggaauuuggaaau

SEQ ID NO: 619162 - RNA, 18 nt, Artificial Sequence
  Synthetic
gauguaauaaaaugaaau

SEQ ID NO: 619163 - RNA, 19 nt, Artificial Sequence
  Synthetic
agauguaauaaaaugaaau

SEQ ID NO: 619164 - RNA, 20 nt, Artificial Sequence
  Synthetic
aagauguaauaaaaugaaau

SEQ ID NO: 619165 - RNA, 21 nt, Artificial Sequence
  Synthetic
aaagauguaauaaaaugaaau

SEQ ID NO: 619166 - RNA, 22 nt, Artificial Sequence
  Synthetic
aaaagauguaauaaaaugaaau

SEQ ID NO: 619167 - RNA, 23 nt, Artificial Sequence
  Synthetic
gaaaagauguaauaaaaugaaau

SEQ ID NO: 619168 - RNA, 24 nt, Artificial Sequence
  Synthetic
agaaaagauguaauaaaaugaaau

SEQ ID NO: 619169 - RNA, 18 nt, Artificial Sequence
  Synthetic
uaaugagauuaaugaaau

SEQ ID NO: 619170 - RNA, 19 nt, Artificial Sequence
  Synthetic
auaaugagauuaaugaaau

SEQ ID NO: 619171 - RNA, 20 nt, Artificial Sequence
  Synthetic
gauaaugagauuaaugaaau

SEQ ID NO: 619172 - RNA, 21 nt, Artificial Sequence
  Synthetic
agauaaugagauuaaugaaau

SEQ ID NO: 619173 - RNA, 22 nt, Artificial Sequence
  Synthetic
aagauaaugagauuaaugaaau

SEQ ID NO: 619174 - RNA, 23 nt, Artificial Sequence
  Synthetic
gaagauaaugagauuaaugaaau

SEQ ID NO: 619175 - RNA, 24 nt, Artificial Sequence
  Synthetic
ugaagauaaugagauuaaugaaau

SEQ ID NO: 619176 - RNA, 18 nt, Artificial Sequence
  Synthetic
uuggaguuaccaugaaau

SEQ ID NO: 619177 - RNA, 19 nt, Artificial Sequence
  Synthetic
cuuggaguuaccaugaaau

SEQ ID NO: 619178 - RNA, 20 nt, Artificial Sequence
  Synthetic
ccuuggaguuaccaugaaau

SEQ ID NO: 619179 - RNA, 21 nt, Artificial Sequence
  Synthetic
accuuggaguuaccaugaaau

SEQ ID NO: 619180 - RNA, 22 nt, Artificial Sequence
  Synthetic
uaccuuggaguuaccaugaaau

SEQ ID NO: 619181 - RNA, 23 nt, Artificial Sequence
  Synthetic
cuaccuuggaguuaccaugaaau

SEQ ID NO: 619182 - RNA, 24 nt, Artificial Sequence
  Synthetic
ucuaccuuggaguuaccaugaaau

SEQ ID NO: 619183 - RNA, 18 nt, Artificial Sequence
  Synthetic
aacuuaauagcaugaaau

SEQ ID NO: 619184 - RNA, 19 nt, Artificial Sequence
  Synthetic
aaacuuaauagcaugaaau

SEQ ID NO: 619185 - RNA, 20 nt, Artificial Sequence
  Synthetic
gaaacuuaauagcaugaaau

SEQ ID NO: 619186 - RNA, 21 nt, Artificial Sequence
  Synthetic
agaaacuuaauagcaugaaau

SEQ ID NO: 619187 - RNA, 22 nt, Artificial Sequence
  Synthetic
gagaaacuuaauagcaugaaau

SEQ ID NO: 619188 - RNA, 23 nt, Artificial Sequence
  Synthetic
agagaaacuuaauagcaugaaau

SEQ ID NO: 619189 - RNA, 24 nt, Artificial Sequence
  Synthetic
aagagaaacuuaauagcaugaaau

SEQ ID NO: 619190 - RNA, 18 nt, Artificial Sequence
  Synthetic
uagagacauggaugaaau

SEQ ID NO: 619191 - RNA, 19 nt, Artificial Sequence
  Synthetic
guagagacauggaugaaau

SEQ ID NO: 619192 - RNA, 20 nt, Artificial Sequence
  Synthetic
uguagagacauggaugaaau

SEQ ID NO: 619193 - RNA, 21 nt, Artificial Sequence
  Synthetic
uuguagagacauggaugaaau

SEQ ID NO: 619194 - RNA, 22 nt, Artificial Sequence
  Synthetic
uuuguagagacauggaugaaau

SEQ ID NO: 619195 - RNA, 23 nt, Artificial Sequence
  Synthetic
cuuuguagagacauggaugaaau

SEQ ID NO: 619196 - RNA, 24 nt, Artificial Sequence
  Synthetic
ucuuuguagagacauggaugaaau

SEQ ID NO: 619197 - RNA, 18 nt, Artificial Sequence
  Synthetic
auagcaacccuaugaaau

SEQ ID NO: 619198 - RNA, 19 nt, Artificial Sequence
  Synthetic
aauagcaacccuaugaaau

SEQ ID NO: 619199 - RNA, 20 nt, Artificial Sequence
  Synthetic
aaauagcaacccuaugaaau

SEQ ID NO: 619200 - RNA, 21 nt, Artificial Sequence
  Synthetic
uaaauagcaacccuaugaaau

SEQ ID NO: 619201 - RNA, 22 nt, Artificial Sequence
  Synthetic
auaaauagcaacccuaugaaau

SEQ ID NO: 619202 - RNA, 23 nt, Artificial Sequence
  Synthetic
uauaaauagcaacccuaugaaau

SEQ ID NO: 619203 - RNA, 24 nt, Artificial Sequence
  Synthetic
uuauaaauagcaacccuaugaaau

SEQ ID NO: 619204 - RNA, 18 nt, Artificial Sequence
  Synthetic
agaaagcaaaacugaaau

SEQ ID NO: 619205 - RNA, 19 nt, Artificial Sequence
  Synthetic
aagaaagcaaaacugaaau

SEQ ID NO: 619206 - RNA, 20 nt, Artificial Sequence
  Synthetic
uaagaaagcaaaacugaaau

SEQ ID NO: 619207 - RNA, 21 nt, Artificial Sequence
  Synthetic
uuaagaaagcaaaacugaaau

SEQ ID NO: 619208 - RNA, 22 nt, Artificial Sequence
  Synthetic
uuuaagaaagcaaaacugaaau

SEQ ID NO: 619209 - RNA, 23 nt, Artificial Sequence
  Synthetic
guuuaagaaagcaaaacugaaau

SEQ ID NO: 619210 - RNA, 24 nt, Artificial Sequence
  Synthetic
uguuuaagaaagcaaaacugaaau

SEQ ID NO: 619211 - RNA, 18 nt, Artificial Sequence
  Synthetic
ugauucauuaacugaaau

SEQ ID NO: 619212 - RNA, 19 nt, Artificial Sequence
  Synthetic
augauucauuaacugaaau

SEQ ID NO: 619213 - RNA, 20 nt, Artificial Sequence
  Synthetic
gaugauucauuaacugaaau

SEQ ID NO: 619214 - RNA, 21 nt, Artificial Sequence
  Synthetic
ugaugauucauuaacugaaau

SEQ ID NO: 619215 - RNA, 22 nt, Artificial Sequence
  Synthetic
augaugauucauuaacugaaau

SEQ ID NO: 619216 - RNA, 23 nt, Artificial Sequence
  Synthetic
gaugaugauucauuaacugaaau

SEQ ID NO: 619217 - RNA, 24 nt, Artificial Sequence
  Synthetic
ggaugaugauucauuaacugaaau

SEQ ID NO: 619218 - RNA, 18 nt, Artificial Sequence
  Synthetic
aucagugacuacugaaau

SEQ ID NO: 619219 - RNA, 19 nt, Artificial Sequence
  Synthetic
caucagugacuacugaaau

SEQ ID NO: 619220 - RNA, 20 nt, Artificial Sequence
  Synthetic
gcaucagugacuacugaaau

SEQ ID NO: 619221 - RNA, 21 nt, Artificial Sequence
  Synthetic
agcaucagugacuacugaaau

SEQ ID NO: 619222 - RNA, 22 nt, Artificial Sequence
  Synthetic
aagcaucagugacuacugaaau

SEQ ID NO: 619223 - RNA, 23 nt, Artificial Sequence
  Synthetic
caagcaucagugacuacugaaau

SEQ ID NO: 619224 - RNA, 24 nt, Artificial Sequence
  Synthetic
gcaagcaucagugacuacugaaau

SEQ ID NO: 619225 - RNA, 18 nt, Artificial Sequence
  Synthetic
acagauuacuacugaaau

SEQ ID NO: 619226 - RNA, 19 nt, Artificial Sequence
  Synthetic
uacagauuacuacugaaau

SEQ ID NO: 619227 - RNA, 20 nt, Artificial Sequence
  Synthetic
auacagauuacuacugaaau

SEQ ID NO: 619228 - RNA, 21 nt, Artificial Sequence
  Synthetic
aauacagauuacuacugaaau

SEQ ID NO: 619229 - RNA, 22 nt, Artificial Sequence
  Synthetic
aaauacagauuacuacugaaau

SEQ ID NO: 619230 - RNA, 23 nt, Artificial Sequence
  Synthetic
aaaauacagauuacuacugaaau

SEQ ID NO: 619231 - RNA, 24 nt, Artificial Sequence
  Synthetic
caaaauacagauuacuacugaaau

SEQ ID NO: 619232 - RNA, 18 nt, Artificial Sequence
  Synthetic
ggcaugguagccugaaau

SEQ ID NO: 619233 - RNA, 19 nt, Artificial Sequence
  Synthetic
gggcaugguagccugaaau

SEQ ID NO: 619234 - RNA, 20 nt, Artificial Sequence
  Synthetic
ugggcaugguagccugaaau

SEQ ID NO: 619235 - RNA, 21 nt, Artificial Sequence
  Synthetic
augggcaugguagccugaaau

SEQ ID NO: 619236 - RNA, 22 nt, Artificial Sequence
  Synthetic
caugggcaugguagccugaaau

SEQ ID NO: 619237 - RNA, 23 nt, Artificial Sequence
  Synthetic
ucaugggcaugguagccugaaau

SEQ ID NO: 619238 - RNA, 24 nt, Artificial Sequence
  Synthetic
cucaugggcaugguagccugaaau

SEQ ID NO: 619239 - RNA, 18 nt, Artificial Sequence
  Synthetic
uuccuguuguccugaaau

SEQ ID NO: 619240 - RNA, 19 nt, Artificial Sequence
  Synthetic
guuccuguuguccugaaau

SEQ ID NO: 619241 - RNA, 20 nt, Artificial Sequence
  Synthetic
uguuccuguuguccugaaau

SEQ ID NO: 619242 - RNA, 21 nt, Artificial Sequence
  Synthetic
cuguuccuguuguccugaaau

SEQ ID NO: 619243 - RNA, 22 nt, Artificial Sequence
  Synthetic
acuguuccuguuguccugaaau

SEQ ID NO: 619244 - RNA, 23 nt, Artificial Sequence
  Synthetic
cacuguuccuguuguccugaaau

SEQ ID NO: 619245 - RNA, 24 nt, Artificial Sequence
  Synthetic
gcacuguuccuguuguccugaaau

SEQ ID NO: 619246 - RNA, 18 nt, Artificial Sequence
  Synthetic
aucgcaguuagcugaaau

SEQ ID NO: 619247 - RNA, 19 nt, Artificial Sequence
  Synthetic
aaucgcaguuagcugaaau

SEQ ID NO: 619248 - RNA, 20 nt, Artificial Sequence
  Synthetic
caaucgcaguuagcugaaau

SEQ ID NO: 619249 - RNA, 21 nt, Artificial Sequence
  Synthetic
gcaaucgcaguuagcugaaau

SEQ ID NO: 619250 - RNA, 22 nt, Artificial Sequence
  Synthetic
ugcaaucgcaguuagcugaaau

SEQ ID NO: 619251 - RNA, 23 nt, Artificial Sequence
  Synthetic
uugcaaucgcaguuagcugaaau

SEQ ID NO: 619252 - RNA, 24 nt, Artificial Sequence
  Synthetic
cuugcaaucgcaguuagcugaaau

SEQ ID NO: 619253 - RNA, 18 nt, Artificial Sequence
  Synthetic
gcaagauuccucugaaau

SEQ ID NO: 619254 - RNA, 19 nt, Artificial Sequence
  Synthetic
ggcaagauuccucugaaau

SEQ ID NO: 619255 - RNA, 20 nt, Artificial Sequence
  Synthetic
gggcaagauuccucugaaau

SEQ ID NO: 619256 - RNA, 21 nt, Artificial Sequence
  Synthetic
ggggcaagauuccucugaaau

SEQ ID NO: 619257 - RNA, 22 nt, Artificial Sequence
  Synthetic
cggggcaagauuccucugaaau

SEQ ID NO: 619258 - RNA, 23 nt, Artificial Sequence
  Synthetic
ccggggcaagauuccucugaaau

SEQ ID NO: 619259 - RNA, 24 nt, Artificial Sequence
  Synthetic
accggggcaagauuccucugaaau

SEQ ID NO: 619260 - RNA, 18 nt, Artificial Sequence
  Synthetic
gguuagcugcucugaaau

SEQ ID NO: 619261 - RNA, 19 nt, Artificial Sequence
  Synthetic
agguuagcugcucugaaau

SEQ ID NO: 619262 - RNA, 20 nt, Artificial Sequence
  Synthetic
cagguuagcugcucugaaau

SEQ ID NO: 619263 - RNA, 21 nt, Artificial Sequence
  Synthetic
acagguuagcugcucugaaau

SEQ ID NO: 619264 - RNA, 22 nt, Artificial Sequence
  Synthetic
aacagguuagcugcucugaaau

SEQ ID NO: 619265 - RNA, 23 nt, Artificial Sequence
  Synthetic
caacagguuagcugcucugaaau

SEQ ID NO: 619266 - RNA, 24 nt, Artificial Sequence
  Synthetic
ucaacagguuagcugcucugaaau

SEQ ID NO: 619267 - RNA, 18 nt, Artificial Sequence
  Synthetic
aauuaucauuucugaaau

SEQ ID NO: 619268 - RNA, 19 nt, Artificial Sequence
  Synthetic
caauuaucauuucugaaau

SEQ ID NO: 619269 - RNA, 20 nt, Artificial Sequence
  Synthetic
ucaauuaucauuucugaaau

SEQ ID NO: 619270 - RNA, 21 nt, Artificial Sequence
  Synthetic
uucaauuaucauuucugaaau

SEQ ID NO: 619271 - RNA, 22 nt, Artificial Sequence
  Synthetic
auucaauuaucauuucugaaau

SEQ ID NO: 619272 - RNA, 23 nt, Artificial Sequence
  Synthetic
cauucaauuaucauuucugaaau

SEQ ID NO: 619273 - RNA, 24 nt, Artificial Sequence
  Synthetic
gcauucaauuaucauuucugaaau

SEQ ID NO: 619274 - RNA, 18 nt, Artificial Sequence
  Synthetic
ggugagaagaagugaaau

SEQ ID NO: 619275 - RNA, 19 nt, Artificial Sequence
  Synthetic
gggugagaagaagugaaau

SEQ ID NO: 619276 - RNA, 20 nt, Artificial Sequence
  Synthetic
agggugagaagaagugaaau

SEQ ID NO: 619277 - RNA, 21 nt, Artificial Sequence
  Synthetic
cagggugagaagaagugaaau

SEQ ID NO: 619278 - RNA, 22 nt, Artificial Sequence
  Synthetic
acagggugagaagaagugaaau

SEQ ID NO: 619279 - RNA, 23 nt, Artificial Sequence
  Synthetic
aacagggugagaagaagugaaau

SEQ ID NO: 619280 - RNA, 24 nt, Artificial Sequence
  Synthetic
caacagggugagaagaagugaaau

SEQ ID NO: 619281 - RNA, 18 nt, Artificial Sequence
  Synthetic
gaagugggagagugaaau

SEQ ID NO: 619282 - RNA, 19 nt, Artificial Sequence
  Synthetic
agaagugggagagugaaau

SEQ ID NO: 619283 - RNA, 20 nt, Artificial Sequence
  Synthetic
gagaagugggagagugaaau

SEQ ID NO: 619284 - RNA, 21 nt, Artificial Sequence
  Synthetic
ggagaagugggagagugaaau

SEQ ID NO: 619285 - RNA, 22 nt, Artificial Sequence
  Synthetic
gggagaagugggagagugaaau

SEQ ID NO: 619286 - RNA, 23 nt, Artificial Sequence
  Synthetic
ggggagaagugggagagugaaau

SEQ ID NO: 619287 - RNA, 24 nt, Artificial Sequence
  Synthetic
aggggagaagugggagagugaaau

SEQ ID NO: 619288 - RNA, 18 nt, Artificial Sequence
  Synthetic
auugaaauugugugaaau

SEQ ID NO: 619289 - RNA, 19 nt, Artificial Sequence
  Synthetic
uauugaaauugugugaaau

SEQ ID NO: 619290 - RNA, 20 nt, Artificial Sequence
  Synthetic
uuauugaaauugugugaaau

SEQ ID NO: 619291 - RNA, 21 nt, Artificial Sequence
  Synthetic
auuauugaaauugugugaaau

SEQ ID NO: 619292 - RNA, 22 nt, Artificial Sequence
  Synthetic
gauuauugaaauugugugaaau

SEQ ID NO: 619293 - RNA, 23 nt, Artificial Sequence
  Synthetic
ggauuauugaaauugugugaaau

SEQ ID NO: 619294 - RNA, 24 nt, Artificial Sequence
  Synthetic
uggauuauugaaauugugugaaau

SEQ ID NO: 619295 - RNA, 18 nt, Artificial Sequence
  Synthetic
gaaccagcaucuugaaau

SEQ ID NO: 619296 - RNA, 19 nt, Artificial Sequence
  Synthetic
ggaaccagcaucuugaaau

SEQ ID NO: 619297 - RNA, 20 nt, Artificial Sequence
  Synthetic
gggaaccagcaucuugaaau

SEQ ID NO: 619298 - RNA, 21 nt, Artificial Sequence
  Synthetic
agggaaccagcaucuugaaau

SEQ ID NO: 619299 - RNA, 22 nt, Artificial Sequence
  Synthetic
cagggaaccagcaucuugaaau

SEQ ID NO: 619300 - RNA, 23 nt, Artificial Sequence
  Synthetic
ccagggaaccagcaucuugaaau

SEQ ID NO: 619301 - RNA, 24 nt, Artificial Sequence
  Synthetic
accagggaaccagcaucuugaaau

SEQ ID NO: 619302 - RNA, 18 nt, Artificial Sequence
  Synthetic
agcacagguauuugaaau

SEQ ID NO: 619303 - RNA, 19 nt, Artificial Sequence
  Synthetic
uagcacagguauuugaaau

SEQ ID NO: 619304 - RNA, 20 nt, Artificial Sequence
  Synthetic
uuagcacagguauuugaaau

SEQ ID NO: 619305 - RNA, 21 nt, Artificial Sequence
  Synthetic
uuuagcacagguauuugaaau

SEQ ID NO: 619306 - RNA, 22 nt, Artificial Sequence
  Synthetic
uuuuagcacagguauuugaaau

SEQ ID NO: 619307 - RNA, 23 nt, Artificial Sequence
  Synthetic
uuuuuagcacagguauuugaaau

SEQ ID NO: 619308 - RNA, 24 nt, Artificial Sequence
  Synthetic
auuuuuagcacagguauuugaaau

SEQ ID NO: 619309 - RNA, 18 nt, Artificial Sequence
  Synthetic
caacagaguguuugaaau

SEQ ID NO: 619310 - RNA, 19 nt, Artificial Sequence
  Synthetic
acaacagaguguuugaaau

SEQ ID NO: 619311 - RNA, 20 nt, Artificial Sequence
  Synthetic
cacaacagaguguuugaaau

SEQ ID NO: 619312 - RNA, 21 nt, Artificial Sequence
  Synthetic
acacaacagaguguuugaaau

SEQ ID NO: 619313 - RNA, 22 nt, Artificial Sequence
  Synthetic
uacacaacagaguguuugaaau

SEQ ID NO: 619314 - RNA, 23 nt, Artificial Sequence
  Synthetic
uuacacaacagaguguuugaaau

SEQ ID NO: 619315 - RNA, 24 nt, Artificial Sequence
  Synthetic
uuuacacaacagaguguuugaaau

SEQ ID NO: 619316 - RNA, 18 nt, Artificial Sequence
  Synthetic
caugauugguuuugaaau

SEQ ID NO: 619317 - RNA, 19 nt, Artificial Sequence
  Synthetic
gcaugauugguuuugaaau

SEQ ID NO: 619318 - RNA, 20 nt, Artificial Sequence
  Synthetic
ggcaugauugguuuugaaau

SEQ ID NO: 619319 - RNA, 21 nt, Artificial Sequence
  Synthetic
aggcaugauugguuuugaaau

SEQ ID NO: 619320 - RNA, 22 nt, Artificial Sequence
  Synthetic
aaggcaugauugguuuugaaau

SEQ ID NO: 619321 - RNA, 23 nt, Artificial Sequence
  Synthetic
caaggcaugauugguuuugaaau

SEQ ID NO: 619322 - RNA, 24 nt, Artificial Sequence
  Synthetic
ucaaggcaugauugguuuugaaau

SEQ ID NO: 619323 - RNA, 18 nt, Artificial Sequence
  Synthetic
auuauuguguuuugaaau

SEQ ID NO: 619324 - RNA, 19 nt, Artificial Sequence
  Synthetic
cauuauuguguuuugaaau

SEQ ID NO: 619325 - RNA, 20 nt, Artificial Sequence
  Synthetic
gcauuauuguguuuugaaau

SEQ ID NO: 619326 - RNA, 21 nt, Artificial Sequence
  Synthetic
ggcauuauuguguuuugaaau

SEQ ID NO: 619327 - RNA, 22 nt, Artificial Sequence
  Synthetic
aggcauuauuguguuuugaaau

SEQ ID NO: 619328 - RNA, 23 nt, Artificial Sequence
  Synthetic
aaggcauuauuguguuuugaaau

SEQ ID NO: 619329 - RNA, 24 nt, Artificial Sequence
  Synthetic
gaaggcauuauuguguuuugaaau

SEQ ID NO: 619330 - RNA, 18 nt, Artificial Sequence
  Synthetic
ccauguacuuuuugaaau

SEQ ID NO: 619331 - RNA, 19 nt, Artificial Sequence
  Synthetic
cccauguacuuuuugaaau

SEQ ID NO: 619332 - RNA, 20 nt, Artificial Sequence
  Synthetic
ccccauguacuuuuugaaau

SEQ ID NO: 619333 - RNA, 21 nt, Artificial Sequence
  Synthetic
accccauguacuuuuugaaau

SEQ ID NO: 619334 - RNA, 22 nt, Artificial Sequence
  Synthetic
aaccccauguacuuuuugaaau

SEQ ID NO: 619335 - RNA, 23 nt, Artificial Sequence
  Synthetic
caaccccauguacuuuuugaaau

SEQ ID NO: 619336 - RNA, 24 nt, Artificial Sequence
  Synthetic
ccaaccccauguacuuuuugaaau

SEQ ID NO: 619337 - RNA, 18 nt, Artificial Sequence
  Synthetic
uguaguaguuuuugaaau

SEQ ID NO: 619338 - RNA, 19 nt, Artificial Sequence
  Synthetic
uuguaguaguuuuugaaau

SEQ ID NO: 619339 - RNA, 20 nt, Artificial Sequence
  Synthetic
uuuguaguaguuuuugaaau

SEQ ID NO: 619340 - RNA, 21 nt, Artificial Sequence
  Synthetic
cuuuguaguaguuuuugaaau

SEQ ID NO: 619341 - RNA, 22 nt, Artificial Sequence
  Synthetic
gcuuuguaguaguuuuugaaau

SEQ ID NO: 619342 - RNA, 23 nt, Artificial Sequence
  Synthetic
agcuuuguaguaguuuuugaaau

SEQ ID NO: 619343 - RNA, 24 nt, Artificial Sequence
  Synthetic
uagcuuuguaguaguuuuugaaau

SEQ ID NO: 619344 - RNA, 18 nt, Artificial Sequence
  Synthetic
uuauugagaaaaauaaau

SEQ ID NO: 619345 - RNA, 19 nt, Artificial Sequence
  Synthetic
uuuauugagaaaaauaaau

SEQ ID NO: 619346 - RNA, 20 nt, Artificial Sequence
  Synthetic
cuuuauugagaaaaauaaau

SEQ ID NO: 619347 - RNA, 21 nt, Artificial Sequence
  Synthetic
acuuuauugagaaaaauaaau

SEQ ID NO: 619348 - RNA, 22 nt, Artificial Sequence
  Synthetic
cacuuuauugagaaaaauaaau

SEQ ID NO: 619349 - RNA, 23 nt, Artificial Sequence
  Synthetic
gcacuuuauugagaaaaauaaau

SEQ ID NO: 619350 - RNA, 24 nt, Artificial Sequence
  Synthetic
ugcacuuuauugagaaaaauaaau

SEQ ID NO: 619351 - RNA, 18 nt, Artificial Sequence
  Synthetic
auacaaaugaaaauaaau

SEQ ID NO: 619352 - RNA, 19 nt, Artificial Sequence
  Synthetic
uauacaaaugaaaauaaau

SEQ ID NO: 619353 - RNA, 20 nt, Artificial Sequence
  Synthetic
uuauacaaaugaaaauaaau

SEQ ID NO: 619354 - RNA, 21 nt, Artificial Sequence
  Synthetic
cuuauacaaaugaaaauaaau

SEQ ID NO: 619355 - RNA, 22 nt, Artificial Sequence
  Synthetic
ccuuauacaaaugaaaauaaau

SEQ ID NO: 619356 - RNA, 23 nt, Artificial Sequence
  Synthetic
accuuauacaaaugaaaauaaau

SEQ ID NO: 619357 - RNA, 24 nt, Artificial Sequence
  Synthetic
uaccuuauacaaaugaaaauaaau

SEQ ID NO: 619358 - RNA, 18 nt, Artificial Sequence
  Synthetic
uuaaacucagaaauaaau

SEQ ID NO: 619359 - RNA, 19 nt, Artificial Sequence
  Synthetic
auuaaacucagaaauaaau

SEQ ID NO: 619360 - RNA, 20 nt, Artificial Sequence
  Synthetic
uauuaaacucagaaauaaau

SEQ ID NO: 619361 - RNA, 21 nt, Artificial Sequence
  Synthetic
auauuaaacucagaaauaaau

SEQ ID NO: 619362 - RNA, 22 nt, Artificial Sequence
  Synthetic
aauauuaaacucagaaauaaau

SEQ ID NO: 619363 - RNA, 23 nt, Artificial Sequence
  Synthetic
uaauauuaaacucagaaauaaau

SEQ ID NO: 619364 - RNA, 24 nt, Artificial Sequence
  Synthetic
cuaauauuaaacucagaaauaaau

SEQ ID NO: 619365 - RNA, 18 nt, Artificial Sequence
  Synthetic
uggucauauuaaauaaau

SEQ ID NO: 619366 - RNA, 19 nt, Artificial Sequence
  Synthetic
guggucauauuaaauaaau

SEQ ID NO: 619367 - RNA, 20 nt, Artificial Sequence
  Synthetic
gguggucauauuaaauaaau

SEQ ID NO: 619368 - RNA, 21 nt, Artificial Sequence
  Synthetic
ugguggucauauuaaauaaau

SEQ ID NO: 619369 - RNA, 22 nt, Artificial Sequence
  Synthetic
augguggucauauuaaauaaau

SEQ ID NO: 619370 - RNA, 23 nt, Artificial Sequence
  Synthetic
gaugguggucauauuaaauaaau

SEQ ID NO: 619371 - RNA, 24 nt, Artificial Sequence
  Synthetic
ggaugguggucauauuaaauaaau

SEQ ID NO: 619372 - RNA, 18 nt, Artificial Sequence
  Synthetic
aaauaaauaggaauaaau

SEQ ID NO: 619373 - RNA, 19 nt, Artificial Sequence
  Synthetic
gaaauaaauaggaauaaau

SEQ ID NO: 619374 - RNA, 20 nt, Artificial Sequence
  Synthetic
ggaaauaaauaggaauaaau

SEQ ID NO: 619375 - RNA, 21 nt, Artificial Sequence
  Synthetic
aggaaauaaauaggaauaaau

SEQ ID NO: 619376 - RNA, 22 nt, Artificial Sequence
  Synthetic
aaggaaauaaauaggaauaaau

SEQ ID NO: 619377 - RNA, 23 nt, Artificial Sequence
  Synthetic
uaaggaaauaaauaggaauaaau

SEQ ID NO: 619378 - RNA, 24 nt, Artificial Sequence
  Synthetic
auaaggaaauaaauaggaauaaau

SEQ ID NO: 619379 - RNA, 18 nt, Artificial Sequence
  Synthetic
guucucuuauuaauaaau

SEQ ID NO: 619380 - RNA, 19 nt, Artificial Sequence
  Synthetic
gguucucuuauuaauaaau

SEQ ID NO: 619381 - RNA, 20 nt, Artificial Sequence
  Synthetic
agguucucuuauuaauaaau

SEQ ID NO: 619382 - RNA, 21 nt, Artificial Sequence
  Synthetic
cagguucucuuauuaauaaau

SEQ ID NO: 619383 - RNA, 22 nt, Artificial Sequence
  Synthetic
acagguucucuuauuaauaaau

SEQ ID NO: 619384 - RNA, 23 nt, Artificial Sequence
  Synthetic
aacagguucucuuauuaauaaau

SEQ ID NO: 619385 - RNA, 24 nt, Artificial Sequence
  Synthetic
gaacagguucucuuauuaauaaau

SEQ ID NO: 619386 - RNA, 18 nt, Artificial Sequence
  Synthetic
ugaguucuuaacauaaau

SEQ ID NO: 619387 - RNA, 19 nt, Artificial Sequence
  Synthetic
uugaguucuuaacauaaau

SEQ ID NO: 619388 - RNA, 20 nt, Artificial Sequence
  Synthetic
auugaguucuuaacauaaau

SEQ ID NO: 619389 - RNA, 21 nt, Artificial Sequence
  Synthetic
uauugaguucuuaacauaaau

SEQ ID NO: 619390 - RNA, 22 nt, Artificial Sequence
  Synthetic
auauugaguucuuaacauaaau

SEQ ID NO: 619391 - RNA, 23 nt, Artificial Sequence
  Synthetic
aauauugaguucuuaacauaaau

SEQ ID NO: 619392 - RNA, 24 nt, Artificial Sequence
  Synthetic
caauauugaguucuuaacauaaau

SEQ ID NO: 619393 - RNA, 18 nt, Artificial Sequence
  Synthetic
gcacacauggacauaaau

SEQ ID NO: 619394 - RNA, 19 nt, Artificial Sequence
  Synthetic
agcacacauggacauaaau

SEQ ID NO: 619395 - RNA, 20 nt, Artificial Sequence
  Synthetic
gagcacacauggacauaaau

SEQ ID NO: 619396 - RNA, 21 nt, Artificial Sequence
  Synthetic
ugagcacacauggacauaaau

SEQ ID NO: 619397 - RNA, 22 nt, Artificial Sequence
  Synthetic
cugagcacacauggacauaaau

SEQ ID NO: 619398 - RNA, 23 nt, Artificial Sequence
  Synthetic
acugagcacacauggacauaaau

SEQ ID NO: 619399 - RNA, 24 nt, Artificial Sequence
  Synthetic
cacugagcacacauggacauaaau

SEQ ID NO: 619400 - RNA, 18 nt, Artificial Sequence
  Synthetic
auagacccacccauaaau

SEQ ID NO: 619401 - RNA, 19 nt, Artificial Sequence
  Synthetic
aauagacccacccauaaau

SEQ ID NO: 619402 - RNA, 20 nt, Artificial Sequence
  Synthetic
gaauagacccacccauaaau

SEQ ID NO: 619403 - RNA, 21 nt, Artificial Sequence
  Synthetic
ggaauagacccacccauaaau

SEQ ID NO: 619404 - RNA, 22 nt, Artificial Sequence
  Synthetic
gggaauagacccacccauaaau

SEQ ID NO: 619405 - RNA, 23 nt, Artificial Sequence
  Synthetic
ggggaauagacccacccauaaau

SEQ ID NO: 619406 - RNA, 24 nt, Artificial Sequence
  Synthetic
uggggaauagacccacccauaaau

SEQ ID NO: 619407 - RNA, 18 nt, Artificial Sequence
  Synthetic
accccaccagccauaaau

SEQ ID NO: 619408 - RNA, 19 nt, Artificial Sequence
  Synthetic
aaccccaccagccauaaau

SEQ ID NO: 619409 - RNA, 20 nt, Artificial Sequence
  Synthetic
aaaccccaccagccauaaau

SEQ ID NO: 619410 - RNA, 21 nt, Artificial Sequence
  Synthetic
caaaccccaccagccauaaau

SEQ ID NO: 619411 - RNA, 22 nt, Artificial Sequence
  Synthetic
acaaaccccaccagccauaaau

SEQ ID NO: 619412 - RNA, 23 nt, Artificial Sequence
  Synthetic
uacaaaccccaccagccauaaau

SEQ ID NO: 619413 - RNA, 24 nt, Artificial Sequence
  Synthetic
guacaaaccccaccagccauaaau

SEQ ID NO: 619414 - RNA, 18 nt, Artificial Sequence
  Synthetic
auuucuguguucauaaau

SEQ ID NO: 619415 - RNA, 19 nt, Artificial Sequence
  Synthetic
gauuucuguguucauaaau

SEQ ID NO: 619416 - RNA, 20 nt, Artificial Sequence
  Synthetic
agauuucuguguucauaaau

SEQ ID NO: 619417 - RNA, 21 nt, Artificial Sequence
  Synthetic
aagauuucuguguucauaaau

SEQ ID NO: 619418 - RNA, 22 nt, Artificial Sequence
  Synthetic
aaagauuucuguguucauaaau

SEQ ID NO: 619419 - RNA, 23 nt, Artificial Sequence
  Synthetic
gaaagauuucuguguucauaaau

SEQ ID NO: 619420 - RNA, 24 nt, Artificial Sequence
  Synthetic
ggaaagauuucuguguucauaaau

SEQ ID NO: 619421 - RNA, 18 nt, Artificial Sequence
  Synthetic
aaccugcaaaagauaaau

SEQ ID NO: 619422 - RNA, 19 nt, Artificial Sequence
  Synthetic
gaaccugcaaaagauaaau

SEQ ID NO: 619423 - RNA, 20 nt, Artificial Sequence
  Synthetic
ugaaccugcaaaagauaaau

SEQ ID NO: 619424 - RNA, 21 nt, Artificial Sequence
  Synthetic
augaaccugcaaaagauaaau

SEQ ID NO: 619425 - RNA, 22 nt, Artificial Sequence
  Synthetic
gaugaaccugcaaaagauaaau

SEQ ID NO: 619426 - RNA, 23 nt, Artificial Sequence
  Synthetic
agaugaaccugcaaaagauaaau

SEQ ID NO: 619427 - RNA, 24 nt, Artificial Sequence
  Synthetic
cagaugaaccugcaaaagauaaau

SEQ ID NO: 619428 - RNA, 18 nt, Artificial Sequence
  Synthetic
uaggaagacaagauaaau

SEQ ID NO: 619429 - RNA, 19 nt, Artificial Sequence
  Synthetic
guaggaagacaagauaaau

SEQ ID NO: 619430 - RNA, 20 nt, Artificial Sequence
  Synthetic
uguaggaagacaagauaaau

SEQ ID NO: 619431 - RNA, 21 nt, Artificial Sequence
  Synthetic
cuguaggaagacaagauaaau

SEQ ID NO: 619432 - RNA, 22 nt, Artificial Sequence
  Synthetic
gcuguaggaagacaagauaaau

SEQ ID NO: 619433 - RNA, 23 nt, Artificial Sequence
  Synthetic
ugcuguaggaagacaagauaaau

SEQ ID NO: 619434 - RNA, 24 nt, Artificial Sequence
  Synthetic
augcuguaggaagacaagauaaau

SEQ ID NO: 619435 - RNA, 18 nt, Artificial Sequence
  Synthetic
auaaaggugaagauaaau

SEQ ID NO: 619436 - RNA, 19 nt, Artificial Sequence
  Synthetic
uauaaaggugaagauaaau

SEQ ID NO: 619437 - RNA, 20 nt, Artificial Sequence
  Synthetic
guauaaaggugaagauaaau

SEQ ID NO: 619438 - RNA, 21 nt, Artificial Sequence
  Synthetic
uguauaaaggugaagauaaau

SEQ ID NO: 619439 - RNA, 22 nt, Artificial Sequence
  Synthetic
auguauaaaggugaagauaaau

SEQ ID NO: 619440 - RNA, 23 nt, Artificial Sequence
  Synthetic
aauguauaaaggugaagauaaau

SEQ ID NO: 619441 - RNA, 24 nt, Artificial Sequence
  Synthetic
gaauguauaaaggugaagauaaau

SEQ ID NO: 619442 - RNA, 18 nt, Artificial Sequence
  Synthetic
ggagaagcagagauaaau

SEQ ID NO: 619443 - RNA, 19 nt, Artificial Sequence
  Synthetic
uggagaagcagagauaaau

SEQ ID NO: 619444 - RNA, 20 nt, Artificial Sequence
  Synthetic
guggagaagcagagauaaau

SEQ ID NO: 619445 - RNA, 21 nt, Artificial Sequence
  Synthetic
aguggagaagcagagauaaau

SEQ ID NO: 619446 - RNA, 22 nt, Artificial Sequence
  Synthetic
gaguggagaagcagagauaaau

SEQ ID NO: 619447 - RNA, 23 nt, Artificial Sequence
  Synthetic
ugaguggagaagcagagauaaau

SEQ ID NO: 619448 - RNA, 24 nt, Artificial Sequence
  Synthetic
augaguggagaagcagagauaaau

SEQ ID NO: 619449 - RNA, 18 nt, Artificial Sequence
  Synthetic
cuuauaugagagauaaau

SEQ ID NO: 619450 - RNA, 19 nt, Artificial Sequence
  Synthetic
acuuauaugagagauaaau

SEQ ID NO: 619451 - RNA, 20 nt, Artificial Sequence
  Synthetic
aacuuauaugagagauaaau

SEQ ID NO: 619452 - RNA, 21 nt, Artificial Sequence
  Synthetic
caacuuauaugagagauaaau

SEQ ID NO: 619453 - RNA, 22 nt, Artificial Sequence
  Synthetic
acaacuuauaugagagauaaau

SEQ ID NO: 619454 - RNA, 23 nt, Artificial Sequence
  Synthetic
cacaacuuauaugagagauaaau

SEQ ID NO: 619455 - RNA, 24 nt, Artificial Sequence
  Synthetic
ucacaacuuauaugagagauaaau

SEQ ID NO: 619456 - RNA, 18 nt, Artificial Sequence
  Synthetic
auguauuguuagauaaau

SEQ ID NO: 619457 - RNA, 19 nt, Artificial Sequence
  Synthetic
aauguauuguuagauaaau

SEQ ID NO: 619458 - RNA, 20 nt, Artificial Sequence
  Synthetic
caauguauuguuagauaaau

SEQ ID NO: 619459 - RNA, 21 nt, Artificial Sequence
  Synthetic
ucaauguauuguuagauaaau

SEQ ID NO: 619460 - RNA, 22 nt, Artificial Sequence
  Synthetic
aucaauguauuguuagauaaau

SEQ ID NO: 619461 - RNA, 23 nt, Artificial Sequence
  Synthetic
caucaauguauuguuagauaaau

SEQ ID NO: 619462 - RNA, 24 nt, Artificial Sequence
  Synthetic
ccaucaauguauuguuagauaaau

SEQ ID NO: 619463 - RNA, 18 nt, Artificial Sequence
  Synthetic
uuucugcaggggauaaau

SEQ ID NO: 619464 - RNA, 19 nt, Artificial Sequence
  Synthetic
auuucugcaggggauaaau

SEQ ID NO: 619465 - RNA, 20 nt, Artificial Sequence
  Synthetic
aauuucugcaggggauaaau

SEQ ID NO: 619466 - RNA, 21 nt, Artificial Sequence
  Synthetic
caauuucugcaggggauaaau

SEQ ID NO: 619467 - RNA, 22 nt, Artificial Sequence
  Synthetic
ucaauuucugcaggggauaaau

SEQ ID NO: 619468 - RNA, 23 nt, Artificial Sequence
  Synthetic
cucaauuucugcaggggauaaau

SEQ ID NO: 619469 - RNA, 24 nt, Artificial Sequence
  Synthetic
ccucaauuucugcaggggauaaau

SEQ ID NO: 619470 - RNA, 18 nt, Artificial Sequence
  Synthetic
accauaagguggauaaau

SEQ ID NO: 619471 - RNA, 19 nt, Artificial Sequence
  Synthetic
aaccauaagguggauaaau

SEQ ID NO: 619472 - RNA, 20 nt, Artificial Sequence
  Synthetic
gaaccauaagguggauaaau

SEQ ID NO: 619473 - RNA, 21 nt, Artificial Sequence
  Synthetic
cgaaccauaagguggauaaau

SEQ ID NO: 619474 - RNA, 22 nt, Artificial Sequence
  Synthetic
ccgaaccauaagguggauaaau

SEQ ID NO: 619475 - RNA, 23 nt, Artificial Sequence
  Synthetic
cccgaaccauaagguggauaaau

SEQ ID NO: 619476 - RNA, 24 nt, Artificial Sequence
  Synthetic
ccccgaaccauaagguggauaaau

SEQ ID NO: 619477 - RNA, 18 nt, Artificial Sequence
  Synthetic
ccuuuuuuuuggauaaau

SEQ ID NO: 619478 - RNA, 19 nt, Artificial Sequence
  Synthetic
accuuuuuuuuggauaaau

SEQ ID NO: 619479 - RNA, 20 nt, Artificial Sequence
  Synthetic
aaccuuuuuuuuggauaaau

SEQ ID NO: 619480 - RNA, 21 nt, Artificial Sequence
  Synthetic
aaaccuuuuuuuuggauaaau

SEQ ID NO: 619481 - RNA, 22 nt, Artificial Sequence
  Synthetic
aaaaccuuuuuuuuggauaaau

SEQ ID NO: 619482 - RNA, 23 nt, Artificial Sequence
  Synthetic
aaaaaccuuuuuuuuggauaaau

SEQ ID NO: 619483 - RNA, 24 nt, Artificial Sequence
  Synthetic
aaaaaaccuuuuuuuuggauaaau

SEQ ID NO: 619484 - RNA, 18 nt, Artificial Sequence
  Synthetic
agaaugguggugauaaau

SEQ ID NO: 619485 - RNA, 19 nt, Artificial Sequence
  Synthetic
cagaaugguggugauaaau

SEQ ID NO: 619486 - RNA, 20 nt, Artificial Sequence
  Synthetic
ccagaaugguggugauaaau

SEQ ID NO: 619487 - RNA, 21 nt, Artificial Sequence
  Synthetic
uccagaaugguggugauaaau

SEQ ID NO: 619488 - RNA, 22 nt, Artificial Sequence
  Synthetic
uuccagaaugguggugauaaau

SEQ ID NO: 619489 - RNA, 23 nt, Artificial Sequence
  Synthetic
guuccagaaugguggugauaaau

SEQ ID NO: 619490 - RNA, 24 nt, Artificial Sequence
  Synthetic
gguuccagaaugguggugauaaau

SEQ ID NO: 619491 - RNA, 18 nt, Artificial Sequence
  Synthetic
uuuuaaaaugugauaaau

SEQ ID NO: 619492 - RNA, 19 nt, Artificial Sequence
  Synthetic
uuuuuaaaaugugauaaau

SEQ ID NO: 619493 - RNA, 20 nt, Artificial Sequence
  Synthetic
auuuuuaaaaugugauaaau

SEQ ID NO: 619494 - RNA, 21 nt, Artificial Sequence
  Synthetic
uauuuuuaaaaugugauaaau

SEQ ID NO: 619495 - RNA, 22 nt, Artificial Sequence
  Synthetic
uuauuuuuaaaaugugauaaau

SEQ ID NO: 619496 - RNA, 23 nt, Artificial Sequence
  Synthetic
guuauuuuuaaaaugugauaaau

SEQ ID NO: 619497 - RNA, 24 nt, Artificial Sequence
  Synthetic
gguuauuuuuaaaaugugauaaau

SEQ ID NO: 619498 - RNA, 18 nt, Artificial Sequence
  Synthetic
uucuuccagaauauaaau

SEQ ID NO: 619499 - RNA, 19 nt, Artificial Sequence
  Synthetic
auucuuccagaauauaaau

SEQ ID NO: 619500 - RNA, 20 nt, Artificial Sequence
  Synthetic
uauucuuccagaauauaaau

SEQ ID NO: 619501 - RNA, 21 nt, Artificial Sequence
  Synthetic
auauucuuccagaauauaaau

SEQ ID NO: 619502 - RNA, 22 nt, Artificial Sequence
  Synthetic
aauauucuuccagaauauaaau

SEQ ID NO: 619503 - RNA, 23 nt, Artificial Sequence
  Synthetic
caauauucuuccagaauauaaau

SEQ ID NO: 619504 - RNA, 24 nt, Artificial Sequence
  Synthetic
acaauauucuuccagaauauaaau

SEQ ID NO: 619505 - RNA, 18 nt, Artificial Sequence
  Synthetic
accgaagcacauauaaau

SEQ ID NO: 619506 - RNA, 19 nt, Artificial Sequence
  Synthetic
uaccgaagcacauauaaau

SEQ ID NO: 619507 - RNA, 20 nt, Artificial Sequence
  Synthetic
guaccgaagcacauauaaau

SEQ ID NO: 619508 - RNA, 21 nt, Artificial Sequence
  Synthetic
uguaccgaagcacauauaaau

SEQ ID NO: 619509 - RNA, 22 nt, Artificial Sequence
  Synthetic
cuguaccgaagcacauauaaau

SEQ ID NO: 619510 - RNA, 23 nt, Artificial Sequence
  Synthetic
acuguaccgaagcacauauaaau

SEQ ID NO: 619511 - RNA, 24 nt, Artificial Sequence
  Synthetic
aacuguaccgaagcacauauaaau

SEQ ID NO: 619512 - RNA, 18 nt, Artificial Sequence
  Synthetic
gacuugacucauauaaau

SEQ ID NO: 619513 - RNA, 19 nt, Artificial Sequence
  Synthetic
ugacuugacucauauaaau

SEQ ID NO: 619514 - RNA, 20 nt, Artificial Sequence
  Synthetic
uugacuugacucauauaaau

SEQ ID NO: 619515 - RNA, 21 nt, Artificial Sequence
  Synthetic
guugacuugacucauauaaau

SEQ ID NO: 619516 - RNA, 22 nt, Artificial Sequence
  Synthetic
gguugacuugacucauauaaau

SEQ ID NO: 619517 - RNA, 23 nt, Artificial Sequence
  Synthetic
agguugacuugacucauauaaau

SEQ ID NO: 619518 - RNA, 24 nt, Artificial Sequence
  Synthetic
aagguugacuugacucauauaaau

SEQ ID NO: 619519 - RNA, 18 nt, Artificial Sequence
  Synthetic
uugacuagagauauaaau

SEQ ID NO: 619520 - RNA, 19 nt, Artificial Sequence
  Synthetic
cuugacuagagauauaaau

SEQ ID NO: 619521 - RNA, 20 nt, Artificial Sequence
  Synthetic
ucuugacuagagauauaaau

SEQ ID NO: 619522 - RNA, 21 nt, Artificial Sequence
  Synthetic
aucuugacuagagauauaaau

SEQ ID NO: 619523 - RNA, 22 nt, Artificial Sequence
  Synthetic
aaucuugacuagagauauaaau

SEQ ID NO: 619524 - RNA, 23 nt, Artificial Sequence
  Synthetic
gaaucuugacuagagauauaaau

SEQ ID NO: 619525 - RNA, 24 nt, Artificial Sequence
  Synthetic
ggaaucuugacuagagauauaaau

SEQ ID NO: 619526 - RNA, 18 nt, Artificial Sequence
  Synthetic
gagaauauggauauaaau

SEQ ID NO: 619527 - RNA, 19 nt, Artificial Sequence
  Synthetic
agagaauauggauauaaau

SEQ ID NO: 619528 - RNA, 20 nt, Artificial Sequence
  Synthetic
aagagaauauggauauaaau

SEQ ID NO: 619529 - RNA, 21 nt, Artificial Sequence
  Synthetic
aaagagaauauggauauaaau

SEQ ID NO: 619530 - RNA, 22 nt, Artificial Sequence
  Synthetic
aaaagagaauauggauauaaau

SEQ ID NO: 619531 - RNA, 23 nt, Artificial Sequence
  Synthetic
aaaaagagaauauggauauaaau

SEQ ID NO: 619532 - RNA, 24 nt, Artificial Sequence
  Synthetic
aaaaaagagaauauggauauaaau

SEQ ID NO: 619533 - RNA, 18 nt, Artificial Sequence
  Synthetic
aucuauggugauauaaau

SEQ ID NO: 619534 - RNA, 19 nt, Artificial Sequence
  Synthetic
aaucuauggugauauaaau

SEQ ID NO: 619535 - RNA, 20 nt, Artificial Sequence
  Synthetic
uaaucuauggugauauaaau

SEQ ID NO: 619536 - RNA, 21 nt, Artificial Sequence
  Synthetic
cuaaucuauggugauauaaau

SEQ ID NO: 619537 - RNA, 22 nt, Artificial Sequence
  Synthetic
acuaaucuauggugauauaaau

SEQ ID NO: 619538 - RNA, 23 nt, Artificial Sequence
  Synthetic
aacuaaucuauggugauauaaau

SEQ ID NO: 619539 - RNA, 24 nt, Artificial Sequence
  Synthetic
aaacuaaucuauggugauauaaau

SEQ ID NO: 619540 - RNA, 18 nt, Artificial Sequence
  Synthetic
acuuauugugauauaaau

SEQ ID NO: 619541 - RNA, 19 nt, Artificial Sequence
  Synthetic
aacuuauugugauauaaau

SEQ ID NO: 619542 - RNA, 20 nt, Artificial Sequence
  Synthetic
caacuuauugugauauaaau

SEQ ID NO: 619543 - RNA, 21 nt, Artificial Sequence
  Synthetic
ucaacuuauugugauauaaau

SEQ ID NO: 619544 - RNA, 22 nt, Artificial Sequence
  Synthetic
uucaacuuauugugauauaaau

SEQ ID NO: 619545 - RNA, 23 nt, Artificial Sequence
  Synthetic
uuucaacuuauugugauauaaau

SEQ ID NO: 619546 - RNA, 24 nt, Artificial Sequence
  Synthetic
uuuucaacuuauugugauauaaau

SEQ ID NO: 619547 - RNA, 18 nt, Artificial Sequence
  Synthetic
cuuuauaaauauauaaau

SEQ ID NO: 619548 - RNA, 19 nt, Artificial Sequence
  Synthetic
acuuuauaaauauauaaau

SEQ ID NO: 619549 - RNA, 20 nt, Artificial Sequence
  Synthetic
cacuuuauaaauauauaaau

SEQ ID NO: 619550 - RNA, 21 nt, Artificial Sequence
  Synthetic
ucacuuuauaaauauauaaau

SEQ ID NO: 619551 - RNA, 22 nt, Artificial Sequence
  Synthetic
gucacuuuauaaauauauaaau

SEQ ID NO: 619552 - RNA, 23 nt, Artificial Sequence
  Synthetic
ugucacuuuauaaauauauaaau

SEQ ID NO: 619553 - RNA, 24 nt, Artificial Sequence
  Synthetic
cugucacuuuauaaauauauaaau

SEQ ID NO: 619554 - RNA, 18 nt, Artificial Sequence
  Synthetic
uguuuagcaacuauaaau

SEQ ID NO: 619555 - RNA, 19 nt, Artificial Sequence
  Synthetic
cuguuuagcaacuauaaau

SEQ ID NO: 619556 - RNA, 20 nt, Artificial Sequence
  Synthetic
acuguuuagcaacuauaaau

SEQ ID NO: 619557 - RNA, 21 nt, Artificial Sequence
  Synthetic
aacuguuuagcaacuauaaau

SEQ ID NO: 619558 - RNA, 22 nt, Artificial Sequence
  Synthetic
aaacuguuuagcaacuauaaau

SEQ ID NO: 619559 - RNA, 23 nt, Artificial Sequence
  Synthetic
caaacuguuuagcaacuauaaau

SEQ ID NO: 619560 - RNA, 24 nt, Artificial Sequence
  Synthetic
ucaaacuguuuagcaacuauaaau

SEQ ID NO: 619561 - RNA, 18 nt, Artificial Sequence
  Synthetic
guuaucuauccuauaaau

SEQ ID NO: 619562 - RNA, 19 nt, Artificial Sequence
  Synthetic
aguuaucuauccuauaaau

SEQ ID NO: 619563 - RNA, 20 nt, Artificial Sequence
  Synthetic
aaguuaucuauccuauaaau

SEQ ID NO: 619564 - RNA, 21 nt, Artificial Sequence
  Synthetic
aaaguuaucuauccuauaaau

SEQ ID NO: 619565 - RNA, 22 nt, Artificial Sequence
  Synthetic
aaaaguuaucuauccuauaaau

SEQ ID NO: 619566 - RNA, 23 nt, Artificial Sequence
  Synthetic
caaaaguuaucuauccuauaaau

SEQ ID NO: 619567 - RNA, 24 nt, Artificial Sequence
  Synthetic
gcaaaaguuaucuauccuauaaau

SEQ ID NO: 619568 - RNA, 18 nt, Artificial Sequence
  Synthetic
guucacaauuguauaaau

SEQ ID NO: 619569 - RNA, 19 nt, Artificial Sequence
  Synthetic
uguucacaauuguauaaau

SEQ ID NO: 619570 - RNA, 20 nt, Artificial Sequence
  Synthetic
auguucacaauuguauaaau

SEQ ID NO: 619571 - RNA, 21 nt, Artificial Sequence
  Synthetic
aauguucacaauuguauaaau

SEQ ID NO: 619572 - RNA, 22 nt, Artificial Sequence
  Synthetic
uaauguucacaauuguauaaau

SEQ ID NO: 619573 - RNA, 23 nt, Artificial Sequence
  Synthetic
uuaauguucacaauuguauaaau

SEQ ID NO: 619574 - RNA, 24 nt, Artificial Sequence
  Synthetic
cuuaauguucacaauuguauaaau

SEQ ID NO: 619575 - RNA, 18 nt, Artificial Sequence
  Synthetic
cuuuuucauuuuauaaau

SEQ ID NO: 619576 - RNA, 19 nt, Artificial Sequence
  Synthetic
acuuuuucauuuuauaaau

SEQ ID NO: 619577 - RNA, 20 nt, Artificial Sequence
  Synthetic
aacuuuuucauuuuauaaau

SEQ ID NO: 619578 - RNA, 21 nt, Artificial Sequence
  Synthetic
aaacuuuuucauuuuauaaau

SEQ ID NO: 619579 - RNA, 22 nt, Artificial Sequence
  Synthetic
caaacuuuuucauuuuauaaau

SEQ ID NO: 619580 - RNA, 23 nt, Artificial Sequence
  Synthetic
ucaaacuuuuucauuuuauaaau

SEQ ID NO: 619581 - RNA, 24 nt, Artificial Sequence
  Synthetic
cucaaacuuuuucauuuuauaaau

SEQ ID NO: 619582 - RNA, 18 nt, Artificial Sequence
  Synthetic
cacauuauuuuuauaaau

SEQ ID NO: 619583 - RNA, 19 nt, Artificial Sequence
  Synthetic
ucacauuauuuuuauaaau

SEQ ID NO: 619584 - RNA, 20 nt, Artificial Sequence
  Synthetic
uucacauuauuuuuauaaau

SEQ ID NO: 619585 - RNA, 21 nt, Artificial Sequence
  Synthetic
uuucacauuauuuuuauaaau

SEQ ID NO: 619586 - RNA, 22 nt, Artificial Sequence
  Synthetic
auuucacauuauuuuuauaaau

SEQ ID NO: 619587 - RNA, 23 nt, Artificial Sequence
  Synthetic
uauuucacauuauuuuuauaaau

SEQ ID NO: 619588 - RNA, 24 nt, Artificial Sequence
  Synthetic
uuauuucacauuauuuuuauaaau

SEQ ID NO: 619589 - RNA, 18 nt, Artificial Sequence
  Synthetic
uuauauuuuuuuauaaau

SEQ ID NO: 619590 - RNA, 19 nt, Artificial Sequence
  Synthetic
uuuauauuuuuuuauaaau

SEQ ID NO: 619591 - RNA, 20 nt, Artificial Sequence
  Synthetic
uuuuauauuuuuuuauaaau

SEQ ID NO: 619592 - RNA, 21 nt, Artificial Sequence
  Synthetic
uuuuuauauuuuuuuauaaau

SEQ ID NO: 619593 - RNA, 22 nt, Artificial Sequence
  Synthetic
auuuuuauauuuuuuuauaaau

SEQ ID NO: 619594 - RNA, 23 nt, Artificial Sequence
  Synthetic
uauuuuuauauuuuuuuauaaau

SEQ ID NO: 619595 - RNA, 24 nt, Artificial Sequence
  Synthetic
auauuuuuauauuuuuuuauaaau

SEQ ID NO: 619596 - RNA, 18 nt, Artificial Sequence
  Synthetic
auaacauauuaacuaaau

SEQ ID NO: 619597 - RNA, 19 nt, Artificial Sequence
  Synthetic
aauaacauauuaacuaaau

SEQ ID NO: 619598 - RNA, 20 nt, Artificial Sequence
  Synthetic
aaauaacauauuaacuaaau

SEQ ID NO: 619599 - RNA, 21 nt, Artificial Sequence
  Synthetic
aaaauaacauauuaacuaaau

SEQ ID NO: 619600 - RNA, 22 nt, Artificial Sequence
  Synthetic
uaaaauaacauauuaacuaaau

SEQ ID NO: 619601 - RNA, 23 nt, Artificial Sequence
  Synthetic
uuaaaauaacauauuaacuaaau

SEQ ID NO: 619602 - RNA, 24 nt, Artificial Sequence
  Synthetic
auuaaaauaacauauuaacuaaau

SEQ ID NO: 619603 - RNA, 18 nt, Artificial Sequence
  Synthetic
ucaucccaguuacuaaau

SEQ ID NO: 619604 - RNA, 19 nt, Artificial Sequence
  Synthetic
aucaucccaguuacuaaau

SEQ ID NO: 619605 - RNA, 20 nt, Artificial Sequence
  Synthetic
caucaucccaguuacuaaau

SEQ ID NO: 619606 - RNA, 21 nt, Artificial Sequence
  Synthetic
ucaucaucccaguuacuaaau

SEQ ID NO: 619607 - RNA, 22 nt, Artificial Sequence
  Synthetic
gucaucaucccaguuacuaaau

SEQ ID NO: 619608 - RNA, 23 nt, Artificial Sequence
  Synthetic
ggucaucaucccaguuacuaaau

SEQ ID NO: 619609 - RNA, 24 nt, Artificial Sequence
  Synthetic
aggucaucaucccaguuacuaaau

SEQ ID NO: 619610 - RNA, 18 nt, Artificial Sequence
  Synthetic
auuuuuuuuauccuaaau

SEQ ID NO: 619611 - RNA, 19 nt, Artificial Sequence
  Synthetic
uauuuuuuuuauccuaaau

SEQ ID NO: 619612 - RNA, 20 nt, Artificial Sequence
  Synthetic
auauuuuuuuuauccuaaau

SEQ ID NO: 619613 - RNA, 21 nt, Artificial Sequence
  Synthetic
aauauuuuuuuuauccuaaau

SEQ ID NO: 619614 - RNA, 22 nt, Artificial Sequence
  Synthetic
aaauauuuuuuuuauccuaaau

SEQ ID NO: 619615 - RNA, 23 nt, Artificial Sequence
  Synthetic
aaaauauuuuuuuuauccuaaau

SEQ ID NO: 619616 - RNA, 24 nt, Artificial Sequence
  Synthetic
uaaaauauuuuuuuuauccuaaau

SEQ ID NO: 619617 - RNA, 18 nt, Artificial Sequence
  Synthetic
gacauagaguuccuaaau

SEQ ID NO: 619618 - RNA, 19 nt, Artificial Sequence
  Synthetic
ugacauagaguuccuaaau

SEQ ID NO: 619619 - RNA, 20 nt, Artificial Sequence
  Synthetic
cugacauagaguuccuaaau

SEQ ID NO: 619620 - RNA, 21 nt, Artificial Sequence
  Synthetic
ccugacauagaguuccuaaau

SEQ ID NO: 619621 - RNA, 22 nt, Artificial Sequence
  Synthetic
accugacauagaguuccuaaau

SEQ ID NO: 619622 - RNA, 23 nt, Artificial Sequence
  Synthetic
aaccugacauagaguuccuaaau

SEQ ID NO: 619623 - RNA, 24 nt, Artificial Sequence
  Synthetic
aaaccugacauagaguuccuaaau

SEQ ID NO: 619624 - RNA, 18 nt, Artificial Sequence
  Synthetic
uuaaaacuacagcuaaau

SEQ ID NO: 619625 - RNA, 19 nt, Artificial Sequence
  Synthetic
guuaaaacuacagcuaaau

SEQ ID NO: 619626 - RNA, 20 nt, Artificial Sequence
  Synthetic
aguuaaaacuacagcuaaau

SEQ ID NO: 619627 - RNA, 21 nt, Artificial Sequence
  Synthetic
aaguuaaaacuacagcuaaau

SEQ ID NO: 619628 - RNA, 22 nt, Artificial Sequence
  Synthetic
aaaguuaaaacuacagcuaaau

SEQ ID NO: 619629 - RNA, 23 nt, Artificial Sequence
  Synthetic
aaaaguuaaaacuacagcuaaau

SEQ ID NO: 619630 - RNA, 24 nt, Artificial Sequence
  Synthetic
caaaaguuaaaacuacagcuaaau

SEQ ID NO: 619631 - RNA, 18 nt, Artificial Sequence
  Synthetic
aauagauagcugcuaaau

SEQ ID NO: 619632 - RNA, 19 nt, Artificial Sequence
  Synthetic
caauagauagcugcuaaau

SEQ ID NO: 619633 - RNA, 20 nt, Artificial Sequence
  Synthetic
ucaauagauagcugcuaaau

SEQ ID NO: 619634 - RNA, 21 nt, Artificial Sequence
  Synthetic
uucaauagauagcugcuaaau

SEQ ID NO: 619635 - RNA, 22 nt, Artificial Sequence
  Synthetic
cuucaauagauagcugcuaaau

SEQ ID NO: 619636 - RNA, 23 nt, Artificial Sequence
  Synthetic
acuucaauagauagcugcuaaau

SEQ ID NO: 619637 - RNA, 24 nt, Artificial Sequence
  Synthetic
aacuucaauagauagcugcuaaau

SEQ ID NO: 619638 - RNA, 18 nt, Artificial Sequence
  Synthetic
agcuaguaagugcuaaau

SEQ ID NO: 619639 - RNA, 19 nt, Artificial Sequence
  Synthetic
aagcuaguaagugcuaaau

SEQ ID NO: 619640 - RNA, 20 nt, Artificial Sequence
  Synthetic
uaagcuaguaagugcuaaau

SEQ ID NO: 619641 - RNA, 21 nt, Artificial Sequence
  Synthetic
auaagcuaguaagugcuaaau

SEQ ID NO: 619642 - RNA, 22 nt, Artificial Sequence
  Synthetic
aauaagcuaguaagugcuaaau

SEQ ID NO: 619643 - RNA, 23 nt, Artificial Sequence
  Synthetic
caauaagcuaguaagugcuaaau

SEQ ID NO: 619644 - RNA, 24 nt, Artificial Sequence
  Synthetic
acaauaagcuaguaagugcuaaau

SEQ ID NO: 619645 - RNA, 18 nt, Artificial Sequence
  Synthetic
aaaauugcagugcuaaau

SEQ ID NO: 619646 - RNA, 19 nt, Artificial Sequence
  Synthetic
caaaauugcagugcuaaau

SEQ ID NO: 619647 - RNA, 20 nt, Artificial Sequence
  Synthetic
acaaaauugcagugcuaaau

SEQ ID NO: 619648 - RNA, 21 nt, Artificial Sequence
  Synthetic
aacaaaauugcagugcuaaau

SEQ ID NO: 619649 - RNA, 22 nt, Artificial Sequence
  Synthetic
aaacaaaauugcagugcuaaau

SEQ ID NO: 619650 - RNA, 23 nt, Artificial Sequence
  Synthetic
aaaacaaaauugcagugcuaaau

SEQ ID NO: 619651 - RNA, 24 nt, Artificial Sequence
  Synthetic
gaaaacaaaauugcagugcuaaau

SEQ ID NO: 619652 - RNA, 18 nt, Artificial Sequence
  Synthetic
uagcauauggugcuaaau

SEQ ID NO: 619653 - RNA, 19 nt, Artificial Sequence
  Synthetic
auagcauauggugcuaaau

SEQ ID NO: 619654 - RNA, 20 nt, Artificial Sequence
  Synthetic
uauagcauauggugcuaaau

SEQ ID NO: 619655 - RNA, 21 nt, Artificial Sequence
  Synthetic
uuauagcauauggugcuaaau

SEQ ID NO: 619656 - RNA, 22 nt, Artificial Sequence
  Synthetic
auuauagcauauggugcuaaau

SEQ ID NO: 619657 - RNA, 23 nt, Artificial Sequence
  Synthetic
gauuauagcauauggugcuaaau

SEQ ID NO: 619658 - RNA, 24 nt, Artificial Sequence
  Synthetic
ugauuauagcauauggugcuaaau

SEQ ID NO: 619659 - RNA, 18 nt, Artificial Sequence
  Synthetic
gaaaauacaucucuaaau

SEQ ID NO: 619660 - RNA, 19 nt, Artificial Sequence
  Synthetic
agaaaauacaucucuaaau

SEQ ID NO: 619661 - RNA, 20 nt, Artificial Sequence
  Synthetic
cagaaaauacaucucuaaau

SEQ ID NO: 619662 - RNA, 21 nt, Artificial Sequence
  Synthetic
acagaaaauacaucucuaaau

SEQ ID NO: 619663 - RNA, 22 nt, Artificial Sequence
  Synthetic
aacagaaaauacaucucuaaau

SEQ ID NO: 619664 - RNA, 23 nt, Artificial Sequence
  Synthetic
gaacagaaaauacaucucuaaau

SEQ ID NO: 619665 - RNA, 24 nt, Artificial Sequence
  Synthetic
ugaacagaaaauacaucucuaaau

SEQ ID NO: 619666 - RNA, 18 nt, Artificial Sequence
  Synthetic
aacauucugucucuaaau

SEQ ID NO: 619667 - RNA, 19 nt, Artificial Sequence
  Synthetic
gaacauucugucucuaaau

SEQ ID NO: 619668 - RNA, 20 nt, Artificial Sequence
  Synthetic
agaacauucugucucuaaau

SEQ ID NO: 619669 - RNA, 21 nt, Artificial Sequence
  Synthetic
aagaacauucugucucuaaau

SEQ ID NO: 619670 - RNA, 22 nt, Artificial Sequence
  Synthetic
aaagaacauucugucucuaaau

SEQ ID NO: 619671 - RNA, 23 nt, Artificial Sequence
  Synthetic
uaaagaacauucugucucuaaau

SEQ ID NO: 619672 - RNA, 24 nt, Artificial Sequence
  Synthetic
cuaaagaacauucugucucuaaau

SEQ ID NO: 619673 - RNA, 18 nt, Artificial Sequence
  Synthetic
uauugaucacgucuaaau

SEQ ID NO: 619674 - RNA, 19 nt, Artificial Sequence
  Synthetic
auauugaucacgucuaaau

SEQ ID NO: 619675 - RNA, 20 nt, Artificial Sequence
  Synthetic
gauauugaucacgucuaaau

SEQ ID NO: 619676 - RNA, 21 nt, Artificial Sequence
  Synthetic
agauauugaucacgucuaaau

SEQ ID NO: 619677 - RNA, 22 nt, Artificial Sequence
  Synthetic
aagauauugaucacgucuaaau

SEQ ID NO: 619678 - RNA, 23 nt, Artificial Sequence
  Synthetic
uaagauauugaucacgucuaaau

SEQ ID NO: 619679 - RNA, 24 nt, Artificial Sequence
  Synthetic
auaagauauugaucacgucuaaau

SEQ ID NO: 619680 - RNA, 18 nt, Artificial Sequence
  Synthetic
ugccuagacugucuaaau

SEQ ID NO: 619681 - RNA, 19 nt, Artificial Sequence
  Synthetic
uugccuagacugucuaaau

SEQ ID NO: 619682 - RNA, 20 nt, Artificial Sequence
  Synthetic
auugccuagacugucuaaau

SEQ ID NO: 619683 - RNA, 21 nt, Artificial Sequence
  Synthetic
uauugccuagacugucuaaau

SEQ ID NO: 619684 - RNA, 22 nt, Artificial Sequence
  Synthetic
auauugccuagacugucuaaau

SEQ ID NO: 619685 - RNA, 23 nt, Artificial Sequence
  Synthetic
gauauugccuagacugucuaaau

SEQ ID NO: 619686 - RNA, 24 nt, Artificial Sequence
  Synthetic
agauauugccuagacugucuaaau

SEQ ID NO: 619687 - RNA, 18 nt, Artificial Sequence
  Synthetic
aauaagccuugucuaaau

SEQ ID NO: 619688 - RNA, 19 nt, Artificial Sequence
  Synthetic
gaauaagccuugucuaaau

SEQ ID NO: 619689 - RNA, 20 nt, Artificial Sequence
  Synthetic
agaauaagccuugucuaaau

SEQ ID NO: 619690 - RNA, 21 nt, Artificial Sequence
  Synthetic
aagaauaagccuugucuaaau

SEQ ID NO: 619691 - RNA, 22 nt, Artificial Sequence
  Synthetic
gaagaauaagccuugucuaaau

SEQ ID NO: 619692 - RNA, 23 nt, Artificial Sequence
  Synthetic
ggaagaauaagccuugucuaaau

SEQ ID NO: 619693 - RNA, 24 nt, Artificial Sequence
  Synthetic
gggaagaauaagccuugucuaaau

SEQ ID NO: 619694 - RNA, 18 nt, Artificial Sequence
  Synthetic
aaauggguaauucuaaau

SEQ ID NO: 619695 - RNA, 19 nt, Artificial Sequence
  Synthetic
aaaauggguaauucuaaau

SEQ ID NO: 619696 - RNA, 20 nt, Artificial Sequence
  Synthetic
aaaaauggguaauucuaaau

SEQ ID NO: 619697 - RNA, 21 nt, Artificial Sequence
  Synthetic
aaaaaauggguaauucuaaau

SEQ ID NO: 619698 - RNA, 22 nt, Artificial Sequence
  Synthetic
aaaaaaauggguaauucuaaau

SEQ ID NO: 619699 - RNA, 23 nt, Artificial Sequence
  Synthetic
gaaaaaaauggguaauucuaaau

SEQ ID NO: 619700 - RNA, 24 nt, Artificial Sequence
  Synthetic
ugaaaaaaauggguaauucuaaau

SEQ ID NO: 619701 - RNA, 18 nt, Artificial Sequence
  Synthetic
acagacauguaaguaaau

SEQ ID NO: 619702 - RNA, 19 nt, Artificial Sequence
  Synthetic
cacagacauguaaguaaau

SEQ ID NO: 619703 - RNA, 20 nt, Artificial Sequence
  Synthetic
ucacagacauguaaguaaau

SEQ ID NO: 619704 - RNA, 21 nt, Artificial Sequence
  Synthetic
uucacagacauguaaguaaau

SEQ ID NO: 619705 - RNA, 22 nt, Artificial Sequence
  Synthetic
auucacagacauguaaguaaau

SEQ ID NO: 619706 - RNA, 23 nt, Artificial Sequence
  Synthetic
cauucacagacauguaaguaaau

SEQ ID NO: 619707 - RNA, 24 nt, Artificial Sequence
  Synthetic
gcauucacagacauguaaguaaau

SEQ ID NO: 619708 - RNA, 18 nt, Artificial Sequence
  Synthetic
accccagagcuaguaaau

SEQ ID NO: 619709 - RNA, 19 nt, Artificial Sequence
  Synthetic
caccccagagcuaguaaau

SEQ ID NO: 619710 - RNA, 20 nt, Artificial Sequence
  Synthetic
ucaccccagagcuaguaaau

SEQ ID NO: 619711 - RNA, 21 nt, Artificial Sequence
  Synthetic
cucaccccagagcuaguaaau

SEQ ID NO: 619712 - RNA, 22 nt, Artificial Sequence
  Synthetic
ucucaccccagagcuaguaaau

SEQ ID NO: 619713 - RNA, 23 nt, Artificial Sequence
  Synthetic
gucucaccccagagcuaguaaau

SEQ ID NO: 619714 - RNA, 24 nt, Artificial Sequence
  Synthetic
ggucucaccccagagcuaguaaau

SEQ ID NO: 619715 - RNA, 18 nt, Artificial Sequence
  Synthetic
ggucaauuucuaguaaau

SEQ ID NO: 619716 - RNA, 19 nt, Artificial Sequence
  Synthetic
cggucaauuucuaguaaau

SEQ ID NO: 619717 - RNA, 20 nt, Artificial Sequence
  Synthetic
acggucaauuucuaguaaau

SEQ ID NO: 619718 - RNA, 21 nt, Artificial Sequence
  Synthetic
cacggucaauuucuaguaaau

SEQ ID NO: 619719 - RNA, 22 nt, Artificial Sequence
  Synthetic
acacggucaauuucuaguaaau

SEQ ID NO: 619720 - RNA, 23 nt, Artificial Sequence
  Synthetic
cacacggucaauuucuaguaaau

SEQ ID NO: 619721 - RNA, 24 nt, Artificial Sequence
  Synthetic
gcacacggucaauuucuaguaaau

SEQ ID NO: 619722 - RNA, 18 nt, Artificial Sequence
  Synthetic
cuuuaucuucagguaaau

SEQ ID NO: 619723 - RNA, 19 nt, Artificial Sequence
  Synthetic
gcuuuaucuucagguaaau

SEQ ID NO: 619724 - RNA, 20 nt, Artificial Sequence
  Synthetic
agcuuuaucuucagguaaau

SEQ ID NO: 619725 - RNA, 21 nt, Artificial Sequence
  Synthetic
aagcuuuaucuucagguaaau

SEQ ID NO: 619726 - RNA, 22 nt, Artificial Sequence
  Synthetic
aaagcuuuaucuucagguaaau

SEQ ID NO: 619727 - RNA, 23 nt, Artificial Sequence
  Synthetic
caaagcuuuaucuucagguaaau

SEQ ID NO: 619728 - RNA, 24 nt, Artificial Sequence
  Synthetic
gcaaagcuuuaucuucagguaaau

SEQ ID NO: 619729 - RNA, 18 nt, Artificial Sequence
  Synthetic
auuuggaaggagguaaau

SEQ ID NO: 619730 - RNA, 19 nt, Artificial Sequence
  Synthetic
uauuuggaaggagguaaau

SEQ ID NO: 619731 - RNA, 20 nt, Artificial Sequence
  Synthetic
guauuuggaaggagguaaau

SEQ ID NO: 619732 - RNA, 21 nt, Artificial Sequence
  Synthetic
uguauuuggaaggagguaaau

SEQ ID NO: 619733 - RNA, 22 nt, Artificial Sequence
  Synthetic
uuguauuuggaaggagguaaau

SEQ ID NO: 619734 - RNA, 23 nt, Artificial Sequence
  Synthetic
guuguauuuggaaggagguaaau

SEQ ID NO: 619735 - RNA, 24 nt, Artificial Sequence
  Synthetic
aguuguauuuggaaggagguaaau

SEQ ID NO: 619736 - RNA, 18 nt, Artificial Sequence
  Synthetic
auuuccagauagguaaau

SEQ ID NO: 619737 - RNA, 19 nt, Artificial Sequence
  Synthetic
uauuuccagauagguaaau

SEQ ID NO: 619738 - RNA, 20 nt, Artificial Sequence
  Synthetic
uuauuuccagauagguaaau

SEQ ID NO: 619739 - RNA, 21 nt, Artificial Sequence
  Synthetic
cuuauuuccagauagguaaau

SEQ ID NO: 619740 - RNA, 22 nt, Artificial Sequence
  Synthetic
ucuuauuuccagauagguaaau

SEQ ID NO: 619741 - RNA, 23 nt, Artificial Sequence
  Synthetic
cucuuauuuccagauagguaaau

SEQ ID NO: 619742 - RNA, 24 nt, Artificial Sequence
  Synthetic
acucuuauuuccagauagguaaau

SEQ ID NO: 619743 - RNA, 18 nt, Artificial Sequence
  Synthetic
gaauaauauuagguaaau

SEQ ID NO: 619744 - RNA, 19 nt, Artificial Sequence
  Synthetic
agaauaauauuagguaaau

SEQ ID NO: 619745 - RNA, 20 nt, Artificial Sequence
  Synthetic
aagaauaauauuagguaaau

SEQ ID NO: 619746 - RNA, 21 nt, Artificial Sequence
  Synthetic
uaagaauaauauuagguaaau

SEQ ID NO: 619747 - RNA, 22 nt, Artificial Sequence
  Synthetic
auaagaauaauauuagguaaau

SEQ ID NO: 619748 - RNA, 23 nt, Artificial Sequence
  Synthetic
uauaagaauaauauuagguaaau

SEQ ID NO: 619749 - RNA, 24 nt, Artificial Sequence
  Synthetic
auauaagaauaauauuagguaaau

SEQ ID NO: 619750 - RNA, 18 nt, Artificial Sequence
  Synthetic
ucuugccuucugguaaau

SEQ ID NO: 619751 - RNA, 19 nt, Artificial Sequence
  Synthetic
cucuugccuucugguaaau

SEQ ID NO: 619752 - RNA, 20 nt, Artificial Sequence
  Synthetic
ucucuugccuucugguaaau

SEQ ID NO: 619753 - RNA, 21 nt, Artificial Sequence
  Synthetic
uucucuugccuucugguaaau

SEQ ID NO: 619754 - RNA, 22 nt, Artificial Sequence
  Synthetic
auucucuugccuucugguaaau

SEQ ID NO: 619755 - RNA, 23 nt, Artificial Sequence
  Synthetic
uauucucuugccuucugguaaau

SEQ ID NO: 619756 - RNA, 24 nt, Artificial Sequence
  Synthetic
uuauucucuugccuucugguaaau

SEQ ID NO: 619757 - RNA, 18 nt, Artificial Sequence
  Synthetic
cauucucaguauguaaau

SEQ ID NO: 619758 - RNA, 19 nt, Artificial Sequence
  Synthetic
ccauucucaguauguaaau

SEQ ID NO: 619759 - RNA, 20 nt, Artificial Sequence
  Synthetic
accauucucaguauguaaau

SEQ ID NO: 619760 - RNA, 21 nt, Artificial Sequence
  Synthetic
uaccauucucaguauguaaau

SEQ ID NO: 619761 - RNA, 22 nt, Artificial Sequence
  Synthetic
guaccauucucaguauguaaau

SEQ ID NO: 619762 - RNA, 23 nt, Artificial Sequence
  Synthetic
uguaccauucucaguauguaaau

SEQ ID NO: 619763 - RNA, 24 nt, Artificial Sequence
  Synthetic
guguaccauucucaguauguaaau

SEQ ID NO: 619764 - RNA, 18 nt, Artificial Sequence
  Synthetic
cagaaaacuccuguaaau

SEQ ID NO: 619765 - RNA, 19 nt, Artificial Sequence
  Synthetic
acagaaaacuccuguaaau

SEQ ID NO: 619766 - RNA, 20 nt, Artificial Sequence
  Synthetic
aacagaaaacuccuguaaau

SEQ ID NO: 619767 - RNA, 21 nt, Artificial Sequence
  Synthetic
aaacagaaaacuccuguaaau

SEQ ID NO: 619768 - RNA, 22 nt, Artificial Sequence
  Synthetic
uaaacagaaaacuccuguaaau

SEQ ID NO: 619769 - RNA, 23 nt, Artificial Sequence
  Synthetic
auaaacagaaaacuccuguaaau

SEQ ID NO: 619770 - RNA, 24 nt, Artificial Sequence
  Synthetic
aauaaacagaaaacuccuguaaau

SEQ ID NO: 619771 - RNA, 18 nt, Artificial Sequence
  Synthetic
aaaauuaaugcuguaaau

SEQ ID NO: 619772 - RNA, 19 nt, Artificial Sequence
  Synthetic
aaaaauuaaugcuguaaau

SEQ ID NO: 619773 - RNA, 20 nt, Artificial Sequence
  Synthetic
aaaaaauuaaugcuguaaau

SEQ ID NO: 619774 - RNA, 21 nt, Artificial Sequence
  Synthetic
gaaaaaauuaaugcuguaaau

SEQ ID NO: 619775 - RNA, 22 nt, Artificial Sequence
  Synthetic
ugaaaaaauuaaugcuguaaau

SEQ ID NO: 619776 - RNA, 23 nt, Artificial Sequence
  Synthetic
gugaaaaaauuaaugcuguaaau

SEQ ID NO: 619777 - RNA, 24 nt, Artificial Sequence
  Synthetic
agugaaaaaauuaaugcuguaaau

SEQ ID NO: 619778 - RNA, 18 nt, Artificial Sequence
  Synthetic
gcaggcaaaauuguaaau

SEQ ID NO: 619779 - RNA, 19 nt, Artificial Sequence
  Synthetic
ugcaggcaaaauuguaaau

SEQ ID NO: 619780 - RNA, 20 nt, Artificial Sequence
  Synthetic
uugcaggcaaaauuguaaau

SEQ ID NO: 619781 - RNA, 21 nt, Artificial Sequence
  Synthetic
uuugcaggcaaaauuguaaau

SEQ ID NO: 619782 - RNA, 22 nt, Artificial Sequence
  Synthetic
auuugcaggcaaaauuguaaau

SEQ ID NO: 619783 - RNA, 23 nt, Artificial Sequence
  Synthetic
cauuugcaggcaaaauuguaaau

SEQ ID NO: 619784 - RNA, 24 nt, Artificial Sequence
  Synthetic
gcauuugcaggcaaaauuguaaau

SEQ ID NO: 619785 - RNA, 18 nt, Artificial Sequence
  Synthetic
aauugaaggauuguaaau

SEQ ID NO: 619786 - RNA, 19 nt, Artificial Sequence
  Synthetic
aaauugaaggauuguaaau

SEQ ID NO: 619787 - RNA, 20 nt, Artificial Sequence
  Synthetic
caaauugaaggauuguaaau

SEQ ID NO: 619788 - RNA, 21 nt, Artificial Sequence
  Synthetic
acaaauugaaggauuguaaau

SEQ ID NO: 619789 - RNA, 22 nt, Artificial Sequence
  Synthetic
aacaaauugaaggauuguaaau

SEQ ID NO: 619790 - RNA, 23 nt, Artificial Sequence
  Synthetic
gaacaaauugaaggauuguaaau

SEQ ID NO: 619791 - RNA, 24 nt, Artificial Sequence
  Synthetic
ugaacaaauugaaggauuguaaau

SEQ ID NO: 619792 - RNA, 18 nt, Artificial Sequence
  Synthetic
cuuauaaauuuuguaaau

SEQ ID NO: 619793 - RNA, 19 nt, Artificial Sequence
  Synthetic
ucuuauaaauuuuguaaau

SEQ ID NO: 619794 - RNA, 20 nt, Artificial Sequence
  Synthetic
uucuuauaaauuuuguaaau

SEQ ID NO: 619795 - RNA, 21 nt, Artificial Sequence
  Synthetic
uuucuuauaaauuuuguaaau

SEQ ID NO: 619796 - RNA, 22 nt, Artificial Sequence
  Synthetic
uuuucuuauaaauuuuguaaau

SEQ ID NO: 619797 - RNA, 23 nt, Artificial Sequence
  Synthetic
auuuucuuauaaauuuuguaaau

SEQ ID NO: 619798 - RNA, 24 nt, Artificial Sequence
  Synthetic
aauuuucuuauaaauuuuguaaau

SEQ ID NO: 619799 - RNA, 18 nt, Artificial Sequence
  Synthetic
ugguuuggcaaauuaaau

SEQ ID NO: 619800 - RNA, 19 nt, Artificial Sequence
  Synthetic
gugguuuggcaaauuaaau

SEQ ID NO: 619801 - RNA, 20 nt, Artificial Sequence
  Synthetic
ugugguuuggcaaauuaaau

SEQ ID NO: 619802 - RNA, 21 nt, Artificial Sequence
  Synthetic
cugugguuuggcaaauuaaau

SEQ ID NO: 619803 - RNA, 22 nt, Artificial Sequence
  Synthetic
ccugugguuuggcaaauuaaau

SEQ ID NO: 619804 - RNA, 23 nt, Artificial Sequence
  Synthetic
gccugugguuuggcaaauuaaau

SEQ ID NO: 619805 - RNA, 24 nt, Artificial Sequence
  Synthetic
ugccugugguuuggcaaauuaaau

SEQ ID NO: 619806 - RNA, 18 nt, Artificial Sequence
  Synthetic
uauauuauagaauuaaau

SEQ ID NO: 619807 - RNA, 19 nt, Artificial Sequence
  Synthetic
auauauuauagaauuaaau

SEQ ID NO: 619808 - RNA, 20 nt, Artificial Sequence
  Synthetic
uauauauuauagaauuaaau

SEQ ID NO: 619809 - RNA, 21 nt, Artificial Sequence
  Synthetic
uuauauauuauagaauuaaau

SEQ ID NO: 619810 - RNA, 22 nt, Artificial Sequence
  Synthetic
cuuauauauuauagaauuaaau

SEQ ID NO: 619811 - RNA, 23 nt, Artificial Sequence
  Synthetic
gcuuauauauuauagaauuaaau

SEQ ID NO: 619812 - RNA, 24 nt, Artificial Sequence
  Synthetic
ugcuuauauauuauagaauuaaau

SEQ ID NO: 619813 - RNA, 18 nt, Artificial Sequence
  Synthetic
cugguuaugagauuaaau

SEQ ID NO: 619814 - RNA, 19 nt, Artificial Sequence
  Synthetic
acugguuaugagauuaaau

SEQ ID NO: 619815 - RNA, 20 nt, Artificial Sequence
  Synthetic
cacugguuaugagauuaaau

SEQ ID NO: 619816 - RNA, 21 nt, Artificial Sequence
  Synthetic
gcacugguuaugagauuaaau

SEQ ID NO: 619817 - RNA, 22 nt, Artificial Sequence
  Synthetic
agcacugguuaugagauuaaau

SEQ ID NO: 619818 - RNA, 23 nt, Artificial Sequence
  Synthetic
uagcacugguuaugagauuaaau

SEQ ID NO: 619819 - RNA, 24 nt, Artificial Sequence
  Synthetic
auagcacugguuaugagauuaaau

SEQ ID NO: 619820 - RNA, 18 nt, Artificial Sequence
  Synthetic
uucucuggauuauuaaau

SEQ ID NO: 619821 - RNA, 19 nt, Artificial Sequence
  Synthetic
uuucucuggauuauuaaau

SEQ ID NO: 619822 - RNA, 20 nt, Artificial Sequence
  Synthetic
uuuucucuggauuauuaaau

SEQ ID NO: 619823 - RNA, 21 nt, Artificial Sequence
  Synthetic
uuuuucucuggauuauuaaau

SEQ ID NO: 619824 - RNA, 22 nt, Artificial Sequence
  Synthetic
auuuuucucuggauuauuaaau

SEQ ID NO: 619825 - RNA, 23 nt, Artificial Sequence
  Synthetic
gauuuuucucuggauuauuaaau

SEQ ID NO: 619826 - RNA, 24 nt, Artificial Sequence
  Synthetic
ugauuuuucucuggauuauuaaau

SEQ ID NO: 619827 - RNA, 22 nt, Artificial Sequence
  Synthetic
cucccagcaccauuuauuaaau

SEQ ID NO: 619828 - RNA, 23 nt, Artificial Sequence
  Synthetic
ucucccagcaccauuuauuaaau

SEQ ID NO: 619829 - RNA, 24 nt, Artificial Sequence
  Synthetic
uucucccagcaccauuuauuaaau

SEQ ID NO: 619830 - RNA, 23 nt, Artificial Sequence
  Synthetic
cuucccagcaccauuuauuaaau

SEQ ID NO: 619831 - RNA, 24 nt, Artificial Sequence
  Synthetic
ucuucccagcaccauuuauuaaau

SEQ ID NO: 619832 - RNA, 18 nt, Artificial Sequence
  Synthetic
aacuucuauuuauuaaau

SEQ ID NO: 619833 - RNA, 19 nt, Artificial Sequence
  Synthetic
aaacuucuauuuauuaaau

SEQ ID NO: 619834 - RNA, 20 nt, Artificial Sequence
  Synthetic
aaaacuucuauuuauuaaau

SEQ ID NO: 619835 - RNA, 21 nt, Artificial Sequence
  Synthetic
uaaaacuucuauuuauuaaau

SEQ ID NO: 619836 - RNA, 22 nt, Artificial Sequence
  Synthetic
auaaaacuucuauuuauuaaau

SEQ ID NO: 619837 - RNA, 23 nt, Artificial Sequence
  Synthetic
uauaaaacuucuauuuauuaaau

SEQ ID NO: 619838 - RNA, 24 nt, Artificial Sequence
  Synthetic
auauaaaacuucuauuuauuaaau

SEQ ID NO: 619839 - RNA, 18 nt, Artificial Sequence
  Synthetic
acuuagagacacuuaaau

SEQ ID NO: 619840 - RNA, 19 nt, Artificial Sequence
  Synthetic
uacuuagagacacuuaaau

SEQ ID NO: 619841 - RNA, 20 nt, Artificial Sequence
  Synthetic
auacuuagagacacuuaaau

SEQ ID NO: 619842 - RNA, 21 nt, Artificial Sequence
  Synthetic
aauacuuagagacacuuaaau

SEQ ID NO: 619843 - RNA, 22 nt, Artificial Sequence
  Synthetic
aaauacuuagagacacuuaaau

SEQ ID NO: 619844 - RNA, 23 nt, Artificial Sequence
  Synthetic
aaaauacuuagagacacuuaaau

SEQ ID NO: 619845 - RNA, 24 nt, Artificial Sequence
  Synthetic
aaaaauacuuagagacacuuaaau

SEQ ID NO: 619846 - RNA, 18 nt, Artificial Sequence
  Synthetic
acuguaauuugcuuaaau

SEQ ID NO: 619847 - RNA, 19 nt, Artificial Sequence
  Synthetic
cacuguaauuugcuuaaau

SEQ ID NO: 619848 - RNA, 20 nt, Artificial Sequence
  Synthetic
acacuguaauuugcuuaaau

SEQ ID NO: 619849 - RNA, 21 nt, Artificial Sequence
  Synthetic
cacacuguaauuugcuuaaau

SEQ ID NO: 619850 - RNA, 22 nt, Artificial Sequence
  Synthetic
ucacacuguaauuugcuuaaau

SEQ ID NO: 619851 - RNA, 23 nt, Artificial Sequence
  Synthetic
uucacacuguaauuugcuuaaau

SEQ ID NO: 619852 - RNA, 24 nt, Artificial Sequence
  Synthetic
cuucacacuguaauuugcuuaaau

SEQ ID NO: 619853 - RNA, 18 nt, Artificial Sequence
  Synthetic
auauccuauaucuuaaau

SEQ ID NO: 619854 - RNA, 19 nt, Artificial Sequence
  Synthetic
aauauccuauaucuuaaau

SEQ ID NO: 619855 - RNA, 20 nt, Artificial Sequence
  Synthetic
uaauauccuauaucuuaaau

SEQ ID NO: 619856 - RNA, 21 nt, Artificial Sequence
  Synthetic
cuaauauccuauaucuuaaau

SEQ ID NO: 619857 - RNA, 22 nt, Artificial Sequence
  Synthetic
acuaauauccuauaucuuaaau

SEQ ID NO: 619858 - RNA, 23 nt, Artificial Sequence
  Synthetic
gacuaauauccuauaucuuaaau

SEQ ID NO: 619859 - RNA, 24 nt, Artificial Sequence
  Synthetic
ggacuaauauccuauaucuuaaau

SEQ ID NO: 619860 - RNA, 18 nt, Artificial Sequence
  Synthetic
aggcuuuuuuucuuaaau

SEQ ID NO: 619861 - RNA, 19 nt, Artificial Sequence
  Synthetic
aaggcuuuuuuucuuaaau

SEQ ID NO: 619862 - RNA, 20 nt, Artificial Sequence
  Synthetic
uaaggcuuuuuuucuuaaau

SEQ ID NO: 619863 - RNA, 21 nt, Artificial Sequence
  Synthetic
auaaggcuuuuuuucuuaaau

SEQ ID NO: 619864 - RNA, 22 nt, Artificial Sequence
  Synthetic
uauaaggcuuuuuuucuuaaau

SEQ ID NO: 619865 - RNA, 23 nt, Artificial Sequence
  Synthetic
auauaaggcuuuuuuucuuaaau

SEQ ID NO: 619866 - RNA, 24 nt, Artificial Sequence
  Synthetic
aauauaaggcuuuuuuucuuaaau

SEQ ID NO: 619867 - RNA, 18 nt, Artificial Sequence
  Synthetic
acauuaguuagguuaaau

SEQ ID NO: 619868 - RNA, 19 nt, Artificial Sequence
  Synthetic
aacauuaguuagguuaaau

SEQ ID NO: 619869 - RNA, 20 nt, Artificial Sequence
  Synthetic
aaacauuaguuagguuaaau

SEQ ID NO: 619870 - RNA, 21 nt, Artificial Sequence
  Synthetic
gaaacauuaguuagguuaaau

SEQ ID NO: 619871 - RNA, 22 nt, Artificial Sequence
  Synthetic
agaaacauuaguuagguuaaau

SEQ ID NO: 619872 - RNA, 23 nt, Artificial Sequence
  Synthetic
cagaaacauuaguuagguuaaau

SEQ ID NO: 619873 - RNA, 24 nt, Artificial Sequence
  Synthetic
gcagaaacauuaguuagguuaaau

SEQ ID NO: 619874 - RNA, 18 nt, Artificial Sequence
  Synthetic
aaauuuuacauguuaaau

SEQ ID NO: 619875 - RNA, 19 nt, Artificial Sequence
  Synthetic
uaaauuuuacauguuaaau

SEQ ID NO: 619876 - RNA, 20 nt, Artificial Sequence
  Synthetic
cuaaauuuuacauguuaaau

SEQ ID NO: 619877 - RNA, 21 nt, Artificial Sequence
  Synthetic
ucuaaauuuuacauguuaaau

SEQ ID NO: 619878 - RNA, 22 nt, Artificial Sequence
  Synthetic
uucuaaauuuuacauguuaaau

SEQ ID NO: 619879 - RNA, 23 nt, Artificial Sequence
  Synthetic
uuucuaaauuuuacauguuaaau

SEQ ID NO: 619880 - RNA, 24 nt, Artificial Sequence
  Synthetic
uuuucuaaauuuuacauguuaaau

SEQ ID NO: 619881 - RNA, 18 nt, Artificial Sequence
  Synthetic
aauaauggaaauuuaaau

SEQ ID NO: 619882 - RNA, 19 nt, Artificial Sequence
  Synthetic
aaauaauggaaauuuaaau

SEQ ID NO: 619883 - RNA, 20 nt, Artificial Sequence
  Synthetic
aaaauaauggaaauuuaaau

SEQ ID NO: 619884 - RNA, 21 nt, Artificial Sequence
  Synthetic
aaaaauaauggaaauuuaaau

SEQ ID NO: 619885 - RNA, 22 nt, Artificial Sequence
  Synthetic
caaaaauaauggaaauuuaaau

SEQ ID NO: 619886 - RNA, 23 nt, Artificial Sequence
  Synthetic
ucaaaaauaauggaaauuuaaau

SEQ ID NO: 619887 - RNA, 24 nt, Artificial Sequence
  Synthetic
uucaaaaauaauggaaauuuaaau

SEQ ID NO: 619888 - RNA, 18 nt, Artificial Sequence
  Synthetic
cugagaccuaauuuaaau

SEQ ID NO: 619889 - RNA, 19 nt, Artificial Sequence
  Synthetic
acugagaccuaauuuaaau

SEQ ID NO: 619890 - RNA, 20 nt, Artificial Sequence
  Synthetic
uacugagaccuaauuuaaau

SEQ ID NO: 619891 - RNA, 21 nt, Artificial Sequence
  Synthetic
uuacugagaccuaauuuaaau

SEQ ID NO: 619892 - RNA, 22 nt, Artificial Sequence
  Synthetic
uuuacugagaccuaauuuaaau

SEQ ID NO: 619893 - RNA, 23 nt, Artificial Sequence
  Synthetic
auuuacugagaccuaauuuaaau

SEQ ID NO: 619894 - RNA, 24 nt, Artificial Sequence
  Synthetic
aauuuacugagaccuaauuuaaau

SEQ ID NO: 619895 - RNA, 18 nt, Artificial Sequence
  Synthetic
aaacuuagacauuuaaau

SEQ ID NO: 619896 - RNA, 19 nt, Artificial Sequence
  Synthetic
caaacuuagacauuuaaau

SEQ ID NO: 619897 - RNA, 20 nt, Artificial Sequence
  Synthetic
gcaaacuuagacauuuaaau

SEQ ID NO: 619898 - RNA, 21 nt, Artificial Sequence
  Synthetic
ggcaaacuuagacauuuaaau

SEQ ID NO: 619899 - RNA, 22 nt, Artificial Sequence
  Synthetic
aggcaaacuuagacauuuaaau

SEQ ID NO: 619900 - RNA, 23 nt, Artificial Sequence
  Synthetic
aaggcaaacuuagacauuuaaau

SEQ ID NO: 619901 - RNA, 24 nt, Artificial Sequence
  Synthetic
gaaggcaaacuuagacauuuaaau

SEQ ID NO: 619902 - RNA, 18 nt, Artificial Sequence
  Synthetic
gaaauaguggauuuaaau

SEQ ID NO: 619903 - RNA, 19 nt, Artificial Sequence
  Synthetic
ugaaauaguggauuuaaau

SEQ ID NO: 619904 - RNA, 20 nt, Artificial Sequence
  Synthetic
augaaauaguggauuuaaau

SEQ ID NO: 619905 - RNA, 21 nt, Artificial Sequence
  Synthetic
gaugaaauaguggauuuaaau

SEQ ID NO: 619906 - RNA, 22 nt, Artificial Sequence
  Synthetic
cgaugaaauaguggauuuaaau

SEQ ID NO: 619907 - RNA, 23 nt, Artificial Sequence
  Synthetic
gcgaugaaauaguggauuuaaau

SEQ ID NO: 619908 - RNA, 24 nt, Artificial Sequence
  Synthetic
agcgaugaaauaguggauuuaaau

SEQ ID NO: 619909 - RNA, 18 nt, Artificial Sequence
  Synthetic
gaagauguauauuuaaau

SEQ ID NO: 619910 - RNA, 19 nt, Artificial Sequence
  Synthetic
ugaagauguauauuuaaau

SEQ ID NO: 619911 - RNA, 20 nt, Artificial Sequence
  Synthetic
augaagauguauauuuaaau

SEQ ID NO: 619912 - RNA, 21 nt, Artificial Sequence
  Synthetic
uaugaagauguauauuuaaau

SEQ ID NO: 619913 - RNA, 22 nt, Artificial Sequence
  Synthetic
auaugaagauguauauuuaaau

SEQ ID NO: 619914 - RNA, 23 nt, Artificial Sequence
  Synthetic
aauaugaagauguauauuuaaau

SEQ ID NO: 619915 - RNA, 24 nt, Artificial Sequence
  Synthetic
uaauaugaagauguauauuuaaau

SEQ ID NO: 619916 - RNA, 18 nt, Artificial Sequence
  Synthetic
uaugcauguccuuuaaau

SEQ ID NO: 619917 - RNA, 19 nt, Artificial Sequence
  Synthetic
uuaugcauguccuuuaaau

SEQ ID NO: 619918 - RNA, 20 nt, Artificial Sequence
  Synthetic
auuaugcauguccuuuaaau

SEQ ID NO: 619919 - RNA, 21 nt, Artificial Sequence
  Synthetic
aauuaugcauguccuuuaaau

SEQ ID NO: 619920 - RNA, 22 nt, Artificial Sequence
  Synthetic
aaauuaugcauguccuuuaaau

SEQ ID NO: 619921 - RNA, 23 nt, Artificial Sequence
  Synthetic
aaaauuaugcauguccuuuaaau

SEQ ID NO: 619922 - RNA, 24 nt, Artificial Sequence
  Synthetic
uaaaauuaugcauguccuuuaaau

SEQ ID NO: 619923 - RNA, 18 nt, Artificial Sequence
  Synthetic
auuaaauaaucuuuaaau

SEQ ID NO: 619924 - RNA, 19 nt, Artificial Sequence
  Synthetic
cauuaaauaaucuuuaaau

SEQ ID NO: 619925 - RNA, 20 nt, Artificial Sequence
  Synthetic
gcauuaaauaaucuuuaaau

SEQ ID NO: 619926 - RNA, 21 nt, Artificial Sequence
  Synthetic
ugcauuaaauaaucuuuaaau

SEQ ID NO: 619927 - RNA, 22 nt, Artificial Sequence
  Synthetic
augcauuaaauaaucuuuaaau

SEQ ID NO: 619928 - RNA, 23 nt, Artificial Sequence
  Synthetic
uaugcauuaaauaaucuuuaaau

SEQ ID NO: 619929 - RNA, 24 nt, Artificial Sequence
  Synthetic
uuaugcauuaaauaaucuuuaaau

SEQ ID NO: 619930 - RNA, 18 nt, Artificial Sequence
  Synthetic
aggucaacauguuuaaau

SEQ ID NO: 619931 - RNA, 19 nt, Artificial Sequence
  Synthetic
uaggucaacauguuuaaau

SEQ ID NO: 619932 - RNA, 20 nt, Artificial Sequence
  Synthetic
guaggucaacauguuuaaau

SEQ ID NO: 619933 - RNA, 21 nt, Artificial Sequence
  Synthetic
uguaggucaacauguuuaaau

SEQ ID NO: 619934 - RNA, 22 nt, Artificial Sequence
  Synthetic
auguaggucaacauguuuaaau

SEQ ID NO: 619935 - RNA, 23 nt, Artificial Sequence
  Synthetic
aauguaggucaacauguuuaaau

SEQ ID NO: 619936 - RNA, 24 nt, Artificial Sequence
  Synthetic
uaauguaggucaacauguuuaaau

SEQ ID NO: 619937 - RNA, 18 nt, Artificial Sequence
  Synthetic
aaugaagcuuguuuaaau

SEQ ID NO: 619938 - RNA, 19 nt, Artificial Sequence
  Synthetic
aaaugaagcuuguuuaaau

SEQ ID NO: 619939 - RNA, 20 nt, Artificial Sequence
  Synthetic
aaaaugaagcuuguuuaaau

SEQ ID NO: 619940 - RNA, 21 nt, Artificial Sequence
  Synthetic
aaaaaugaagcuuguuuaaau

SEQ ID NO: 619941 - RNA, 22 nt, Artificial Sequence
  Synthetic
aaaaaaugaagcuuguuuaaau

SEQ ID NO: 619942 - RNA, 23 nt, Artificial Sequence
  Synthetic
aaaaaaaugaagcuuguuuaaau

SEQ ID NO: 619943 - RNA, 24 nt, Artificial Sequence
  Synthetic
uaaaaaaaugaagcuuguuuaaau

SEQ ID NO: 619944 - RNA, 18 nt, Artificial Sequence
  Synthetic
aaacagcaucuuuuaaau

SEQ ID NO: 619945 - RNA, 19 nt, Artificial Sequence
  Synthetic
aaaacagcaucuuuuaaau

SEQ ID NO: 619946 - RNA, 20 nt, Artificial Sequence
  Synthetic
aaaaacagcaucuuuuaaau

SEQ ID NO: 619947 - RNA, 21 nt, Artificial Sequence
  Synthetic
aaaaaacagcaucuuuuaaau

SEQ ID NO: 619948 - RNA, 22 nt, Artificial Sequence
  Synthetic
aaaaaaacagcaucuuuuaaau

SEQ ID NO: 619949 - RNA, 23 nt, Artificial Sequence
  Synthetic
uaaaaaaacagcaucuuuuaaau

SEQ ID NO: 619950 - RNA, 24 nt, Artificial Sequence
  Synthetic
uuaaaaaaacagcaucuuuuaaau

SEQ ID NO: 619951 - RNA, 18 nt, Artificial Sequence
  Synthetic
gcuacaagaguuuuaaau

SEQ ID NO: 619952 - RNA, 19 nt, Artificial Sequence
  Synthetic
agcuacaagaguuuuaaau

SEQ ID NO: 619953 - RNA, 20 nt, Artificial Sequence
  Synthetic
aagcuacaagaguuuuaaau

SEQ ID NO: 619954 - RNA, 21 nt, Artificial Sequence
  Synthetic
gaagcuacaagaguuuuaaau

SEQ ID NO: 619955 - RNA, 22 nt, Artificial Sequence
  Synthetic
agaagcuacaagaguuuuaaau

SEQ ID NO: 619956 - RNA, 23 nt, Artificial Sequence
  Synthetic
gagaagcuacaagaguuuuaaau

SEQ ID NO: 619957 - RNA, 24 nt, Artificial Sequence
  Synthetic
ggagaagcuacaagaguuuuaaau

SEQ ID NO: 619958 - RNA, 18 nt, Artificial Sequence
  Synthetic
cacccaaguguuuuaaau

SEQ ID NO: 619959 - RNA, 19 nt, Artificial Sequence
  Synthetic
ccacccaaguguuuuaaau

SEQ ID NO: 619960 - RNA, 20 nt, Artificial Sequence
  Synthetic
accacccaaguguuuuaaau

SEQ ID NO: 619961 - RNA, 21 nt, Artificial Sequence
  Synthetic
aaccacccaaguguuuuaaau

SEQ ID NO: 619962 - RNA, 22 nt, Artificial Sequence
  Synthetic
gaaccacccaaguguuuuaaau

SEQ ID NO: 619963 - RNA, 23 nt, Artificial Sequence
  Synthetic
ugaaccacccaaguguuuuaaau

SEQ ID NO: 619964 - RNA, 24 nt, Artificial Sequence
  Synthetic
uugaaccacccaaguguuuuaaau

SEQ ID NO: 619965 - RNA, 18 nt, Artificial Sequence
  Synthetic
gaauaauuauuuuuaaau

SEQ ID NO: 619966 - RNA, 19 nt, Artificial Sequence
  Synthetic
ugaauaauuauuuuuaaau

SEQ ID NO: 619967 - RNA, 20 nt, Artificial Sequence
  Synthetic
cugaauaauuauuuuuaaau

SEQ ID NO: 619968 - RNA, 21 nt, Artificial Sequence
  Synthetic
ucugaauaauuauuuuuaaau

SEQ ID NO: 619969 - RNA, 22 nt, Artificial Sequence
  Synthetic
cucugaauaauuauuuuuaaau

SEQ ID NO: 619970 - RNA, 23 nt, Artificial Sequence
  Synthetic
ucucugaauaauuauuuuuaaau

SEQ ID NO: 619971 - RNA, 24 nt, Artificial Sequence
  Synthetic
uucucugaauaauuauuuuuaaau

SEQ ID NO: 619972 - RNA, 18 nt, Artificial Sequence
  Synthetic
aaaauaaguaaaaacaau

SEQ ID NO: 619973 - RNA, 19 nt, Artificial Sequence
  Synthetic
uaaaauaaguaaaaacaau

SEQ ID NO: 619974 - RNA, 20 nt, Artificial Sequence
  Synthetic
cuaaaauaaguaaaaacaau

SEQ ID NO: 619975 - RNA, 21 nt, Artificial Sequence
  Synthetic
ucuaaaauaaguaaaaacaau

SEQ ID NO: 619976 - RNA, 22 nt, Artificial Sequence
  Synthetic
uucuaaaauaaguaaaaacaau

SEQ ID NO: 619977 - RNA, 23 nt, Artificial Sequence
  Synthetic
auucuaaaauaaguaaaaacaau

SEQ ID NO: 619978 - RNA, 24 nt, Artificial Sequence
  Synthetic
uauucuaaaauaaguaaaaacaau

SEQ ID NO: 619979 - RNA, 18 nt, Artificial Sequence
  Synthetic
uaaagauuucaaaacaau

SEQ ID NO: 619980 - RNA, 19 nt, Artificial Sequence
  Synthetic
auaaagauuucaaaacaau

SEQ ID NO: 619981 - RNA, 20 nt, Artificial Sequence
  Synthetic
aauaaagauuucaaaacaau

SEQ ID NO: 619982 - RNA, 21 nt, Artificial Sequence
  Synthetic
uaauaaagauuucaaaacaau

SEQ ID NO: 619983 - RNA, 22 nt, Artificial Sequence
  Synthetic
guaauaaagauuucaaaacaau

SEQ ID NO: 619984 - RNA, 23 nt, Artificial Sequence
  Synthetic
uguaauaaagauuucaaaacaau

SEQ ID NO: 619985 - RNA, 24 nt, Artificial Sequence
  Synthetic
guguaauaaagauuucaaaacaau

SEQ ID NO: 619986 - RNA, 18 nt, Artificial Sequence
  Synthetic
aaaaagaaagaaaacaau

SEQ ID NO: 619987 - RNA, 19 nt, Artificial Sequence
  Synthetic
caaaaagaaagaaaacaau

SEQ ID NO: 619988 - RNA, 20 nt, Artificial Sequence
  Synthetic
ucaaaaagaaagaaaacaau

SEQ ID NO: 619989 - RNA, 21 nt, Artificial Sequence
  Synthetic
uucaaaaagaaagaaaacaau

SEQ ID NO: 619990 - RNA, 22 nt, Artificial Sequence
  Synthetic
cuucaaaaagaaagaaaacaau

SEQ ID NO: 619991 - RNA, 23 nt, Artificial Sequence
  Synthetic
gcuucaaaaagaaagaaaacaau

SEQ ID NO: 619992 - RNA, 24 nt, Artificial Sequence
  Synthetic
ggcuucaaaaagaaagaaaacaau

SEQ ID NO: 619993 - RNA, 18 nt, Artificial Sequence
  Synthetic
agaaagaaggaaaacaau

SEQ ID NO: 619994 - RNA, 19 nt, Artificial Sequence
  Synthetic
aagaaagaaggaaaacaau

SEQ ID NO: 619995 - RNA, 20 nt, Artificial Sequence
  Synthetic
aaagaaagaaggaaaacaau

SEQ ID NO: 619996 - RNA, 21 nt, Artificial Sequence
  Synthetic
aaaagaaagaaggaaaacaau

SEQ ID NO: 619997 - RNA, 22 nt, Artificial Sequence
  Synthetic
aaaaagaaagaaggaaaacaau

SEQ ID NO: 619998 - RNA, 23 nt, Artificial Sequence
  Synthetic
aaaaaagaaagaaggaaaacaau

SEQ ID NO: 619999 - RNA, 24 nt, Artificial Sequence
  Synthetic
uaaaaaagaaagaaggaaaacaau

SEQ ID NO: 620000 - RNA, 18 nt, Artificial Sequence
  Synthetic
gcuuuuguggaaaacaau

SEQ ID NO: 620001 - RNA, 19 nt, Artificial Sequence
  Synthetic
agcuuuuguggaaaacaau

SEQ ID NO: 620002 - RNA, 20 nt, Artificial Sequence
  Synthetic
cagcuuuuguggaaaacaau

SEQ ID NO: 620003 - RNA, 21 nt, Artificial Sequence
  Synthetic
gcagcuuuuguggaaaacaau

SEQ ID NO: 620004 - RNA, 22 nt, Artificial Sequence
  Synthetic
ugcagcuuuuguggaaaacaau

SEQ ID NO: 620005 - RNA, 23 nt, Artificial Sequence
  Synthetic
gugcagcuuuuguggaaaacaau

SEQ ID NO: 620006 - RNA, 24 nt, Artificial Sequence
  Synthetic
ugugcagcuuuuguggaaaacaau

SEQ ID NO: 620007 - RNA, 18 nt, Artificial Sequence
  Synthetic
uauuuguuuuaaaacaau

SEQ ID NO: 620008 - RNA, 19 nt, Artificial Sequence
  Synthetic
auauuuguuuuaaaacaau

SEQ ID NO: 620009 - RNA, 20 nt, Artificial Sequence
  Synthetic
gauauuuguuuuaaaacaau

SEQ ID NO: 620010 - RNA, 21 nt, Artificial Sequence
  Synthetic
ugauauuuguuuuaaaacaau

SEQ ID NO: 620011 - RNA, 22 nt, Artificial Sequence
  Synthetic
cugauauuuguuuuaaaacaau

SEQ ID NO: 620012 - RNA, 23 nt, Artificial Sequence
  Synthetic
ccugauauuuguuuuaaaacaau

SEQ ID NO: 620013 - RNA, 24 nt, Artificial Sequence
  Synthetic
gccugauauuuguuuuaaaacaau

SEQ ID NO: 620014 - RNA, 18 nt, Artificial Sequence
  Synthetic
ugaauuaaaccaaacaau

SEQ ID NO: 620015 - RNA, 19 nt, Artificial Sequence
  Synthetic
uugaauuaaaccaaacaau

SEQ ID NO: 620016 - RNA, 20 nt, Artificial Sequence
  Synthetic
uuugaauuaaaccaaacaau

SEQ ID NO: 620017 - RNA, 21 nt, Artificial Sequence
  Synthetic
auuugaauuaaaccaaacaau

SEQ ID NO: 620018 - RNA, 22 nt, Artificial Sequence
  Synthetic
gauuugaauuaaaccaaacaau

SEQ ID NO: 620019 - RNA, 23 nt, Artificial Sequence
  Synthetic
ugauuugaauuaaaccaaacaau

SEQ ID NO: 620020 - RNA, 24 nt, Artificial Sequence
  Synthetic
uugauuugaauuaaaccaaacaau

SEQ ID NO: 620021 - RNA, 18 nt, Artificial Sequence
  Synthetic
aaguaaaaaucaaacaau

SEQ ID NO: 620022 - RNA, 19 nt, Artificial Sequence
  Synthetic
aaaguaaaaaucaaacaau

SEQ ID NO: 620023 - RNA, 20 nt, Artificial Sequence
  Synthetic
aaaaguaaaaaucaaacaau

SEQ ID NO: 620024 - RNA, 21 nt, Artificial Sequence
  Synthetic
gaaaaguaaaaaucaaacaau

SEQ ID NO: 620025 - RNA, 22 nt, Artificial Sequence
  Synthetic
ggaaaaguaaaaaucaaacaau

SEQ ID NO: 620026 - RNA, 23 nt, Artificial Sequence
  Synthetic
aggaaaaguaaaaaucaaacaau

SEQ ID NO: 620027 - RNA, 24 nt, Artificial Sequence
  Synthetic
uaggaaaaguaaaaaucaaacaau

SEQ ID NO: 620028 - RNA, 18 nt, Artificial Sequence
  Synthetic
agccaacacagaaacaau

SEQ ID NO: 620029 - RNA, 19 nt, Artificial Sequence
  Synthetic
aagccaacacagaaacaau

SEQ ID NO: 620030 - RNA, 20 nt, Artificial Sequence
  Synthetic
caagccaacacagaaacaau

SEQ ID NO: 620031 - RNA, 21 nt, Artificial Sequence
  Synthetic
acaagccaacacagaaacaau

SEQ ID NO: 620032 - RNA, 22 nt, Artificial Sequence
  Synthetic
aacaagccaacacagaaacaau

SEQ ID NO: 620033 - RNA, 23 nt, Artificial Sequence
  Synthetic
gaacaagccaacacagaaacaau

SEQ ID NO: 620034 - RNA, 24 nt, Artificial Sequence
  Synthetic
agaacaagccaacacagaaacaau

SEQ ID NO: 620035 - RNA, 18 nt, Artificial Sequence
  Synthetic
cuugggauuugaaacaau

SEQ ID NO: 620036 - RNA, 19 nt, Artificial Sequence
  Synthetic
ucuugggauuugaaacaau

SEQ ID NO: 620037 - RNA, 20 nt, Artificial Sequence
  Synthetic
gucuugggauuugaaacaau

SEQ ID NO: 620038 - RNA, 21 nt, Artificial Sequence
  Synthetic
ugucuugggauuugaaacaau

SEQ ID NO: 620039 - RNA, 22 nt, Artificial Sequence
  Synthetic
gugucuugggauuugaaacaau

SEQ ID NO: 620040 - RNA, 23 nt, Artificial Sequence
  Synthetic
ggugucuugggauuugaaacaau

SEQ ID NO: 620041 - RNA, 24 nt, Artificial Sequence
  Synthetic
uggugucuugggauuugaaacaau

SEQ ID NO: 620042 - RNA, 18 nt, Artificial Sequence
  Synthetic
cagugggaaguaaacaau

SEQ ID NO: 620043 - RNA, 19 nt, Artificial Sequence
  Synthetic
ccagugggaaguaaacaau

SEQ ID NO: 620044 - RNA, 20 nt, Artificial Sequence
  Synthetic
uccagugggaaguaaacaau

SEQ ID NO: 620045 - RNA, 21 nt, Artificial Sequence
  Synthetic
uuccagugggaaguaaacaau

SEQ ID NO: 620046 - RNA, 22 nt, Artificial Sequence
  Synthetic
cuuccagugggaaguaaacaau

SEQ ID NO: 620047 - RNA, 23 nt, Artificial Sequence
  Synthetic
ucuuccagugggaaguaaacaau

SEQ ID NO: 620048 - RNA, 24 nt, Artificial Sequence
  Synthetic
uucuuccagugggaaguaaacaau

SEQ ID NO: 620049 - RNA, 18 nt, Artificial Sequence
  Synthetic
ugaaaaggaaccaacaau

SEQ ID NO: 620050 - RNA, 19 nt, Artificial Sequence
  Synthetic
gugaaaaggaaccaacaau

SEQ ID NO: 620051 - RNA, 20 nt, Artificial Sequence
  Synthetic
ugugaaaaggaaccaacaau

SEQ ID NO: 620052 - RNA, 21 nt, Artificial Sequence
  Synthetic
uugugaaaaggaaccaacaau

SEQ ID NO: 620053 - RNA, 22 nt, Artificial Sequence
  Synthetic
guugugaaaaggaaccaacaau

SEQ ID NO: 620054 - RNA, 23 nt, Artificial Sequence
  Synthetic
uguugugaaaaggaaccaacaau

SEQ ID NO: 620055 - RNA, 24 nt, Artificial Sequence
  Synthetic
guguugugaaaaggaaccaacaau

SEQ ID NO: 620056 - RNA, 18 nt, Artificial Sequence
  Synthetic
agacuagaaaucaacaau

SEQ ID NO: 620057 - RNA, 19 nt, Artificial Sequence
  Synthetic
gagacuagaaaucaacaau

SEQ ID NO: 620058 - RNA, 20 nt, Artificial Sequence
  Synthetic
ugagacuagaaaucaacaau

SEQ ID NO: 620059 - RNA, 21 nt, Artificial Sequence
  Synthetic
augagacuagaaaucaacaau

SEQ ID NO: 620060 - RNA, 22 nt, Artificial Sequence
  Synthetic
aaugagacuagaaaucaacaau

SEQ ID NO: 620061 - RNA, 23 nt, Artificial Sequence
  Synthetic
gaaugagacuagaaaucaacaau

SEQ ID NO: 620062 - RNA, 24 nt, Artificial Sequence
  Synthetic
ggaaugagacuagaaaucaacaau

SEQ ID NO: 620063 - RNA, 18 nt, Artificial Sequence
  Synthetic
uaucagaaauagaacaau

SEQ ID NO: 620064 - RNA, 19 nt, Artificial Sequence
  Synthetic
cuaucagaaauagaacaau

SEQ ID NO: 620065 - RNA, 20 nt, Artificial Sequence
  Synthetic
ucuaucagaaauagaacaau

SEQ ID NO: 620066 - RNA, 21 nt, Artificial Sequence
  Synthetic
cucuaucagaaauagaacaau

SEQ ID NO: 620067 - RNA, 22 nt, Artificial Sequence
  Synthetic
ucucuaucagaaauagaacaau

SEQ ID NO: 620068 - RNA, 23 nt, Artificial Sequence
  Synthetic
cucucuaucagaaauagaacaau

SEQ ID NO: 620069 - RNA, 24 nt, Artificial Sequence
  Synthetic
ucucucuaucagaaauagaacaau

SEQ ID NO: 620070 - RNA, 18 nt, Artificial Sequence
  Synthetic
aggugggaauggaacaau

SEQ ID NO: 620071 - RNA, 19 nt, Artificial Sequence
  Synthetic
uaggugggaauggaacaau

SEQ ID NO: 620072 - RNA, 20 nt, Artificial Sequence
  Synthetic
uuaggugggaauggaacaau

SEQ ID NO: 620073 - RNA, 21 nt, Artificial Sequence
  Synthetic
cuuaggugggaauggaacaau

SEQ ID NO: 620074 - RNA, 22 nt, Artificial Sequence
  Synthetic
ucuuaggugggaauggaacaau

SEQ ID NO: 620075 - RNA, 23 nt, Artificial Sequence
  Synthetic
cucuuaggugggaauggaacaau

SEQ ID NO: 620076 - RNA, 24 nt, Artificial Sequence
  Synthetic
acucuuaggugggaauggaacaau

SEQ ID NO: 620077 - RNA, 18 nt, Artificial Sequence
  Synthetic
uauugcaacaugaacaau

SEQ ID NO: 620078 - RNA, 19 nt, Artificial Sequence
  Synthetic
cuauugcaacaugaacaau

SEQ ID NO: 620079 - RNA, 20 nt, Artificial Sequence
  Synthetic
acuauugcaacaugaacaau

SEQ ID NO: 620080 - RNA, 21 nt, Artificial Sequence
  Synthetic
gacuauugcaacaugaacaau

SEQ ID NO: 620081 - RNA, 22 nt, Artificial Sequence
  Synthetic
ugacuauugcaacaugaacaau

SEQ ID NO: 620082 - RNA, 23 nt, Artificial Sequence
  Synthetic
uugacuauugcaacaugaacaau

SEQ ID NO: 620083 - RNA, 24 nt, Artificial Sequence
  Synthetic
auugacuauugcaacaugaacaau

SEQ ID NO: 620084 - RNA, 18 nt, Artificial Sequence
  Synthetic
aaucaacauaugaacaau

SEQ ID NO: 620085 - RNA, 19 nt, Artificial Sequence
  Synthetic
aaaucaacauaugaacaau

SEQ ID NO: 620086 - RNA, 20 nt, Artificial Sequence
  Synthetic
uaaaucaacauaugaacaau

SEQ ID NO: 620087 - RNA, 21 nt, Artificial Sequence
  Synthetic
guaaaucaacauaugaacaau

SEQ ID NO: 620088 - RNA, 22 nt, Artificial Sequence
  Synthetic
uguaaaucaacauaugaacaau

SEQ ID NO: 620089 - RNA, 23 nt, Artificial Sequence
  Synthetic
guguaaaucaacauaugaacaau

SEQ ID NO: 620090 - RNA, 24 nt, Artificial Sequence
  Synthetic
aguguaaaucaacauaugaacaau

SEQ ID NO: 620091 - RNA, 18 nt, Artificial Sequence
  Synthetic
aagugggaauugaacaau

SEQ ID NO: 620092 - RNA, 19 nt, Artificial Sequence
  Synthetic
uaagugggaauugaacaau

SEQ ID NO: 620093 - RNA, 20 nt, Artificial Sequence
  Synthetic
guaagugggaauugaacaau

SEQ ID NO: 620094 - RNA, 21 nt, Artificial Sequence
  Synthetic
cguaagugggaauugaacaau

SEQ ID NO: 620095 - RNA, 22 nt, Artificial Sequence
  Synthetic
ucguaagugggaauugaacaau

SEQ ID NO: 620096 - RNA, 23 nt, Artificial Sequence
  Synthetic
cucguaagugggaauugaacaau

SEQ ID NO: 620097 - RNA, 24 nt, Artificial Sequence
  Synthetic
acucguaagugggaauugaacaau

SEQ ID NO: 620098 - RNA, 24 nt, Artificial Sequence
  Synthetic
gcucauaggugggaauugaacaau

SEQ ID NO: 620099 - RNA, 18 nt, Artificial Sequence
  Synthetic
uauugggaauugaacaau

SEQ ID NO: 620100 - RNA, 19 nt, Artificial Sequence
  Synthetic
auauugggaauugaacaau

SEQ ID NO: 620101 - RNA, 20 nt, Artificial Sequence
  Synthetic
aauauugggaauugaacaau

SEQ ID NO: 620102 - RNA, 21 nt, Artificial Sequence
  Synthetic
uaauauugggaauugaacaau

SEQ ID NO: 620103 - RNA, 22 nt, Artificial Sequence
  Synthetic
auaauauugggaauugaacaau

SEQ ID NO: 620104 - RNA, 23 nt, Artificial Sequence
  Synthetic
aauaauauugggaauugaacaau

SEQ ID NO: 620105 - RNA, 24 nt, Artificial Sequence
  Synthetic
aaauaauauugggaauugaacaau

SEQ ID NO: 620106 - RNA, 18 nt, Artificial Sequence
  Synthetic
gcguaaucuuugaacaau

SEQ ID NO: 620107 - RNA, 19 nt, Artificial Sequence
  Synthetic
agcguaaucuuugaacaau

SEQ ID NO: 620108 - RNA, 20 nt, Artificial Sequence
  Synthetic
uagcguaaucuuugaacaau

SEQ ID NO: 620109 - RNA, 21 nt, Artificial Sequence
  Synthetic
uuagcguaaucuuugaacaau

SEQ ID NO: 620110 - RNA, 22 nt, Artificial Sequence
  Synthetic
cuuagcguaaucuuugaacaau

SEQ ID NO: 620111 - RNA, 23 nt, Artificial Sequence
  Synthetic
ccuuagcguaaucuuugaacaau

SEQ ID NO: 620112 - RNA, 24 nt, Artificial Sequence
  Synthetic
cccuuagcguaaucuuugaacaau

SEQ ID NO: 620113 - RNA, 18 nt, Artificial Sequence
  Synthetic
gguuauagagauaacaau

SEQ ID NO: 620114 - RNA, 19 nt, Artificial Sequence
  Synthetic
ggguuauagagauaacaau

SEQ ID NO: 620115 - RNA, 20 nt, Artificial Sequence
  Synthetic
uggguuauagagauaacaau

SEQ ID NO: 620116 - RNA, 21 nt, Artificial Sequence
  Synthetic
guggguuauagagauaacaau

SEQ ID NO: 620117 - RNA, 22 nt, Artificial Sequence
  Synthetic
uguggguuauagagauaacaau

SEQ ID NO: 620118 - RNA, 23 nt, Artificial Sequence
  Synthetic
cuguggguuauagagauaacaau

SEQ ID NO: 620119 - RNA, 24 nt, Artificial Sequence
  Synthetic
acuguggguuauagagauaacaau

SEQ ID NO: 620120 - RNA, 18 nt, Artificial Sequence
  Synthetic
guugcuauggauaacaau

SEQ ID NO: 620121 - RNA, 19 nt, Artificial Sequence
  Synthetic
uguugcuauggauaacaau

SEQ ID NO: 620122 - RNA, 20 nt, Artificial Sequence
  Synthetic
uuguugcuauggauaacaau

SEQ ID NO: 620123 - RNA, 21 nt, Artificial Sequence
  Synthetic
uuuguugcuauggauaacaau

SEQ ID NO: 620124 - RNA, 22 nt, Artificial Sequence
  Synthetic
auuuguugcuauggauaacaau

SEQ ID NO: 620125 - RNA, 23 nt, Artificial Sequence
  Synthetic
cauuuguugcuauggauaacaau

SEQ ID NO: 620126 - RNA, 24 nt, Artificial Sequence
  Synthetic
acauuuguugcuauggauaacaau

SEQ ID NO: 620127 - RNA, 18 nt, Artificial Sequence
  Synthetic
cuuagccaugcuaacaau

SEQ ID NO: 620128 - RNA, 19 nt, Artificial Sequence
  Synthetic
ccuuagccaugcuaacaau

SEQ ID NO: 620129 - RNA, 20 nt, Artificial Sequence
  Synthetic
accuuagccaugcuaacaau

SEQ ID NO: 620130 - RNA, 21 nt, Artificial Sequence
  Synthetic
uaccuuagccaugcuaacaau

SEQ ID NO: 620131 - RNA, 22 nt, Artificial Sequence
  Synthetic
auaccuuagccaugcuaacaau

SEQ ID NO: 620132 - RNA, 23 nt, Artificial Sequence
  Synthetic
aauaccuuagccaugcuaacaau

SEQ ID NO: 620133 - RNA, 24 nt, Artificial Sequence
  Synthetic
caauaccuuagccaugcuaacaau

SEQ ID NO: 620134 - RNA, 18 nt, Artificial Sequence
  Synthetic
uaauugaagaguaacaau

SEQ ID NO: 620135 - RNA, 19 nt, Artificial Sequence
  Synthetic
uuaauugaagaguaacaau

SEQ ID NO: 620136 - RNA, 20 nt, Artificial Sequence
  Synthetic
uuuaauugaagaguaacaau

SEQ ID NO: 620137 - RNA, 21 nt, Artificial Sequence
  Synthetic
auuuaauugaagaguaacaau

SEQ ID NO: 620138 - RNA, 22 nt, Artificial Sequence
  Synthetic
aauuuaauugaagaguaacaau

SEQ ID NO: 620139 - RNA, 23 nt, Artificial Sequence
  Synthetic
aaauuuaauugaagaguaacaau

SEQ ID NO: 620140 - RNA, 24 nt, Artificial Sequence
  Synthetic
caaauuuaauugaagaguaacaau

SEQ ID NO: 620141 - RNA, 18 nt, Artificial Sequence
  Synthetic
gaagcaaaugguaacaau

SEQ ID NO: 620142 - RNA, 19 nt, Artificial Sequence
  Synthetic
ugaagcaaaugguaacaau

SEQ ID NO: 620143 - RNA, 20 nt, Artificial Sequence
  Synthetic
augaagcaaaugguaacaau

SEQ ID NO: 620144 - RNA, 21 nt, Artificial Sequence
  Synthetic
aaugaagcaaaugguaacaau

SEQ ID NO: 620145 - RNA, 22 nt, Artificial Sequence
  Synthetic
gaaugaagcaaaugguaacaau

SEQ ID NO: 620146 - RNA, 23 nt, Artificial Sequence
  Synthetic
ugaaugaagcaaaugguaacaau

SEQ ID NO: 620147 - RNA, 24 nt, Artificial Sequence
  Synthetic
augaaugaagcaaaugguaacaau

SEQ ID NO: 620148 - RNA, 18 nt, Artificial Sequence
  Synthetic
auggucauauguaacaau

SEQ ID NO: 620149 - RNA, 19 nt, Artificial Sequence
  Synthetic
uauggucauauguaacaau

SEQ ID NO: 620150 - RNA, 20 nt, Artificial Sequence
  Synthetic
auauggucauauguaacaau

SEQ ID NO: 620151 - RNA, 21 nt, Artificial Sequence
  Synthetic
gauauggucauauguaacaau

SEQ ID NO: 620152 - RNA, 22 nt, Artificial Sequence
  Synthetic
agauauggucauauguaacaau

SEQ ID NO: 620153 - RNA, 23 nt, Artificial Sequence
  Synthetic
uagauauggucauauguaacaau

SEQ ID NO: 620154 - RNA, 24 nt, Artificial Sequence
  Synthetic
cuagauauggucauauguaacaau

SEQ ID NO: 620155 - RNA, 18 nt, Artificial Sequence
  Synthetic
guagcaagaacacacaau

SEQ ID NO: 620156 - RNA, 19 nt, Artificial Sequence
  Synthetic
gguagcaagaacacacaau

SEQ ID NO: 620157 - RNA, 20 nt, Artificial Sequence
  Synthetic
agguagcaagaacacacaau

SEQ ID NO: 620158 - RNA, 21 nt, Artificial Sequence
  Synthetic
aagguagcaagaacacacaau

SEQ ID NO: 620159 - RNA, 22 nt, Artificial Sequence
  Synthetic
aaagguagcaagaacacacaau

SEQ ID NO: 620160 - RNA, 23 nt, Artificial Sequence
  Synthetic
caaagguagcaagaacacacaau

SEQ ID NO: 620161 - RNA, 24 nt, Artificial Sequence
  Synthetic
acaaagguagcaagaacacacaau

SEQ ID NO: 620162 - RNA, 18 nt, Artificial Sequence
  Synthetic
gccaaaaauucacacaau

SEQ ID NO: 620163 - RNA, 19 nt, Artificial Sequence
  Synthetic
ugccaaaaauucacacaau

SEQ ID NO: 620164 - RNA, 20 nt, Artificial Sequence
  Synthetic
uugccaaaaauucacacaau

SEQ ID NO: 620165 - RNA, 21 nt, Artificial Sequence
  Synthetic
cuugccaaaaauucacacaau

SEQ ID NO: 620166 - RNA, 22 nt, Artificial Sequence
  Synthetic
acuugccaaaaauucacacaau

SEQ ID NO: 620167 - RNA, 23 nt, Artificial Sequence
  Synthetic
aacuugccaaaaauucacacaau

SEQ ID NO: 620168 - RNA, 24 nt, Artificial Sequence
  Synthetic
aaacuugccaaaaauucacacaau

SEQ ID NO: 620169 - RNA, 18 nt, Artificial Sequence
  Synthetic
cucuggaucagacacaau

SEQ ID NO: 620170 - RNA, 19 nt, Artificial Sequence
  Synthetic
ucucuggaucagacacaau

SEQ ID NO: 620171 - RNA, 20 nt, Artificial Sequence
  Synthetic
cucucuggaucagacacaau

SEQ ID NO: 620172 - RNA, 21 nt, Artificial Sequence
  Synthetic
ucucucuggaucagacacaau

SEQ ID NO: 620173 - RNA, 22 nt, Artificial Sequence
  Synthetic
cucucucuggaucagacacaau

SEQ ID NO: 620174 - RNA, 23 nt, Artificial Sequence
  Synthetic
ucucucucuggaucagacacaau

SEQ ID NO: 620175 - RNA, 24 nt, Artificial Sequence
  Synthetic
cucucucucuggaucagacacaau

SEQ ID NO: 620176 - RNA, 18 nt, Artificial Sequence
  Synthetic
aacuuuaccuuacacaau

SEQ ID NO: 620177 - RNA, 19 nt, Artificial Sequence
  Synthetic
aaacuuuaccuuacacaau

SEQ ID NO: 620178 - RNA, 20 nt, Artificial Sequence
  Synthetic
gaaacuuuaccuuacacaau

SEQ ID NO: 620179 - RNA, 21 nt, Artificial Sequence
  Synthetic
agaaacuuuaccuuacacaau

SEQ ID NO: 620180 - RNA, 22 nt, Artificial Sequence
  Synthetic
cagaaacuuuaccuuacacaau

SEQ ID NO: 620181 - RNA, 23 nt, Artificial Sequence
  Synthetic
ucagaaacuuuaccuuacacaau

SEQ ID NO: 620182 - RNA, 24 nt, Artificial Sequence
  Synthetic
gucagaaacuuuaccuuacacaau

SEQ ID NO: 620183 - RNA, 18 nt, Artificial Sequence
  Synthetic
uguuugcaucaccacaau

SEQ ID NO: 620184 - RNA, 19 nt, Artificial Sequence
  Synthetic
uuguuugcaucaccacaau

SEQ ID NO: 620185 - RNA, 20 nt, Artificial Sequence
  Synthetic
cuuguuugcaucaccacaau

SEQ ID NO: 620186 - RNA, 21 nt, Artificial Sequence
  Synthetic
ccuuguuugcaucaccacaau

SEQ ID NO: 620187 - RNA, 22 nt, Artificial Sequence
  Synthetic
uccuuguuugcaucaccacaau

SEQ ID NO: 620188 - RNA, 23 nt, Artificial Sequence
  Synthetic
uuccuuguuugcaucaccacaau

SEQ ID NO: 620189 - RNA, 24 nt, Artificial Sequence
  Synthetic
uuuccuuguuugcaucaccacaau

SEQ ID NO: 620190 - RNA, 18 nt, Artificial Sequence
  Synthetic
ccaaaggcccuccacaau

SEQ ID NO: 620191 - RNA, 19 nt, Artificial Sequence
  Synthetic
cccaaaggcccuccacaau

SEQ ID NO: 620192 - RNA, 20 nt, Artificial Sequence
  Synthetic
ccccaaaggcccuccacaau

SEQ ID NO: 620193 - RNA, 21 nt, Artificial Sequence
  Synthetic
gccccaaaggcccuccacaau

SEQ ID NO: 620194 - RNA, 22 nt, Artificial Sequence
  Synthetic
ggccccaaaggcccuccacaau

SEQ ID NO: 620195 - RNA, 23 nt, Artificial Sequence
  Synthetic
uggccccaaaggcccuccacaau

SEQ ID NO: 620196 - RNA, 24 nt, Artificial Sequence
  Synthetic
auggccccaaaggcccuccacaau

SEQ ID NO: 620197 - RNA, 18 nt, Artificial Sequence
  Synthetic
aaaucaaaaaggcacaau

SEQ ID NO: 620198 - RNA, 19 nt, Artificial Sequence
  Synthetic
aaaaucaaaaaggcacaau

SEQ ID NO: 620199 - RNA, 20 nt, Artificial Sequence
  Synthetic
gaaaaucaaaaaggcacaau

SEQ ID NO: 620200 - RNA, 21 nt, Artificial Sequence
  Synthetic
agaaaaucaaaaaggcacaau

SEQ ID NO: 620201 - RNA, 22 nt, Artificial Sequence
  Synthetic
uagaaaaucaaaaaggcacaau

SEQ ID NO: 620202 - RNA, 23 nt, Artificial Sequence
  Synthetic
auagaaaaucaaaaaggcacaau

SEQ ID NO: 620203 - RNA, 24 nt, Artificial Sequence
  Synthetic
aauagaaaaucaaaaaggcacaau

SEQ ID NO: 620204 - RNA, 18 nt, Artificial Sequence
  Synthetic
ggacaauccaugcacaau

SEQ ID NO: 620205 - RNA, 19 nt, Artificial Sequence
  Synthetic
uggacaauccaugcacaau

SEQ ID NO: 620206 - RNA, 20 nt, Artificial Sequence
  Synthetic
uuggacaauccaugcacaau

SEQ ID NO: 620207 - RNA, 21 nt, Artificial Sequence
  Synthetic
cuuggacaauccaugcacaau

SEQ ID NO: 620208 - RNA, 22 nt, Artificial Sequence
  Synthetic
ucuuggacaauccaugcacaau

SEQ ID NO: 620209 - RNA, 23 nt, Artificial Sequence
  Synthetic
aucuuggacaauccaugcacaau

SEQ ID NO: 620210 - RNA, 24 nt, Artificial Sequence
  Synthetic
uaucuuggacaauccaugcacaau

SEQ ID NO: 620211 - RNA, 18 nt, Artificial Sequence
  Synthetic
uuaauccaauugcacaau

SEQ ID NO: 620212 - RNA, 19 nt, Artificial Sequence
  Synthetic
guuaauccaauugcacaau

SEQ ID NO: 620213 - RNA, 20 nt, Artificial Sequence
  Synthetic
aguuaauccaauugcacaau

SEQ ID NO: 620214 - RNA, 21 nt, Artificial Sequence
  Synthetic
aaguuaauccaauugcacaau

SEQ ID NO: 620215 - RNA, 22 nt, Artificial Sequence
  Synthetic
aaaguuaauccaauugcacaau

SEQ ID NO: 620216 - RNA, 23 nt, Artificial Sequence
  Synthetic
gaaaguuaauccaauugcacaau

SEQ ID NO: 620217 - RNA, 24 nt, Artificial Sequence
  Synthetic
ugaaaguuaauccaauugcacaau

SEQ ID NO: 620218 - RNA, 18 nt, Artificial Sequence
  Synthetic
ugguucugaacucacaau

SEQ ID NO: 620219 - RNA, 19 nt, Artificial Sequence
  Synthetic
augguucugaacucacaau

SEQ ID NO: 620220 - RNA, 20 nt, Artificial Sequence
  Synthetic
caugguucugaacucacaau

SEQ ID NO: 620221 - RNA, 21 nt, Artificial Sequence
  Synthetic
ucaugguucugaacucacaau

SEQ ID NO: 620222 - RNA, 22 nt, Artificial Sequence
  Synthetic
gucaugguucugaacucacaau

SEQ ID NO: 620223 - RNA, 23 nt, Artificial Sequence
  Synthetic
ugucaugguucugaacucacaau

SEQ ID NO: 620224 - RNA, 24 nt, Artificial Sequence
  Synthetic
uugucaugguucugaacucacaau

SEQ ID NO: 620225 - RNA, 18 nt, Artificial Sequence
  Synthetic
aauguccauagucacaau

SEQ ID NO: 620226 - RNA, 19 nt, Artificial Sequence
  Synthetic
uaauguccauagucacaau

SEQ ID NO: 620227 - RNA, 20 nt, Artificial Sequence
  Synthetic
uuaauguccauagucacaau

SEQ ID NO: 620228 - RNA, 21 nt, Artificial Sequence
  Synthetic
auuaauguccauagucacaau

SEQ ID NO: 620229 - RNA, 22 nt, Artificial Sequence
  Synthetic
cauuaauguccauagucacaau

SEQ ID NO: 620230 - RNA, 23 nt, Artificial Sequence
  Synthetic
ccauuaauguccauagucacaau

SEQ ID NO: 620231 - RNA, 24 nt, Artificial Sequence
  Synthetic
cccauuaauguccauagucacaau

SEQ ID NO: 620232 - RNA, 18 nt, Artificial Sequence
  Synthetic
ugaagaaaacuucacaau

SEQ ID NO: 620233 - RNA, 19 nt, Artificial Sequence
  Synthetic
cugaagaaaacuucacaau

SEQ ID NO: 620234 - RNA, 20 nt, Artificial Sequence
  Synthetic
ucugaagaaaacuucacaau

SEQ ID NO: 620235 - RNA, 21 nt, Artificial Sequence
  Synthetic
cucugaagaaaacuucacaau

SEQ ID NO: 620236 - RNA, 22 nt, Artificial Sequence
  Synthetic
gcucugaagaaaacuucacaau

SEQ ID NO: 620237 - RNA, 23 nt, Artificial Sequence
  Synthetic
ggcucugaagaaaacuucacaau

SEQ ID NO: 620238 - RNA, 24 nt, Artificial Sequence
  Synthetic
gggcucugaagaaaacuucacaau

SEQ ID NO: 620239 - RNA, 18 nt, Artificial Sequence
  Synthetic
aguuguauguuucacaau

SEQ ID NO: 620240 - RNA, 19 nt, Artificial Sequence
  Synthetic
gaguuguauguuucacaau

SEQ ID NO: 620241 - RNA, 20 nt, Artificial Sequence
  Synthetic
ugaguuguauguuucacaau

SEQ ID NO: 620242 - RNA, 21 nt, Artificial Sequence
  Synthetic
augaguuguauguuucacaau

SEQ ID NO: 620243 - RNA, 22 nt, Artificial Sequence
  Synthetic
caugaguuguauguuucacaau

SEQ ID NO: 620244 - RNA, 23 nt, Artificial Sequence
  Synthetic
ucaugaguuguauguuucacaau

SEQ ID NO: 620245 - RNA, 24 nt, Artificial Sequence
  Synthetic
aucaugaguuguauguuucacaau

SEQ ID NO: 620246 - RNA, 18 nt, Artificial Sequence
  Synthetic
cuuuuuguguuucacaau

SEQ ID NO: 620247 - RNA, 19 nt, Artificial Sequence
  Synthetic
ucuuuuuguguuucacaau

SEQ ID NO: 620248 - RNA, 20 nt, Artificial Sequence
  Synthetic
gucuuuuuguguuucacaau

SEQ ID NO: 620249 - RNA, 21 nt, Artificial Sequence
  Synthetic
agucuuuuuguguuucacaau

SEQ ID NO: 620250 - RNA, 22 nt, Artificial Sequence
  Synthetic
aagucuuuuuguguuucacaau

SEQ ID NO: 620251 - RNA, 23 nt, Artificial Sequence
  Synthetic
gaagucuuuuuguguuucacaau

SEQ ID NO: 620252 - RNA, 24 nt, Artificial Sequence
  Synthetic
ugaagucuuuuuguguuucacaau

SEQ ID NO: 620253 - RNA, 18 nt, Artificial Sequence
  Synthetic
gaaaucugaaaagacaau

SEQ ID NO: 620254 - RNA, 19 nt, Artificial Sequence
  Synthetic
agaaaucugaaaagacaau

SEQ ID NO: 620255 - RNA, 20 nt, Artificial Sequence
  Synthetic
gagaaaucugaaaagacaau

SEQ ID NO: 620256 - RNA, 21 nt, Artificial Sequence
  Synthetic
ugagaaaucugaaaagacaau

SEQ ID NO: 620257 - RNA, 22 nt, Artificial Sequence
  Synthetic
cugagaaaucugaaaagacaau

SEQ ID NO: 620258 - RNA, 23 nt, Artificial Sequence
  Synthetic
ccugagaaaucugaaaagacaau

SEQ ID NO: 620259 - RNA, 24 nt, Artificial Sequence
  Synthetic
cccugagaaaucugaaaagacaau

SEQ ID NO: 620260 - RNA, 18 nt, Artificial Sequence
  Synthetic
guuaauaggcaagacaau

SEQ ID NO: 620261 - RNA, 19 nt, Artificial Sequence
  Synthetic
uguuaauaggcaagacaau

SEQ ID NO: 620262 - RNA, 20 nt, Artificial Sequence
  Synthetic
auguuaauaggcaagacaau

SEQ ID NO: 620263 - RNA, 21 nt, Artificial Sequence
  Synthetic
aauguuaauaggcaagacaau

SEQ ID NO: 620264 - RNA, 22 nt, Artificial Sequence
  Synthetic
caauguuaauaggcaagacaau

SEQ ID NO: 620265 - RNA, 23 nt, Artificial Sequence
  Synthetic
ccaauguuaauaggcaagacaau

SEQ ID NO: 620266 - RNA, 24 nt, Artificial Sequence
  Synthetic
cccaauguuaauaggcaagacaau

SEQ ID NO: 620267 - RNA, 18 nt, Artificial Sequence
  Synthetic
guagaaugagaagacaau

SEQ ID NO: 620268 - RNA, 19 nt, Artificial Sequence
  Synthetic
uguagaaugagaagacaau

SEQ ID NO: 620269 - RNA, 20 nt, Artificial Sequence
  Synthetic
auguagaaugagaagacaau

SEQ ID NO: 620270 - RNA, 21 nt, Artificial Sequence
  Synthetic
cauguagaaugagaagacaau

SEQ ID NO: 620271 - RNA, 22 nt, Artificial Sequence
  Synthetic
ucauguagaaugagaagacaau

SEQ ID NO: 620272 - RNA, 23 nt, Artificial Sequence
  Synthetic
cucauguagaaugagaagacaau

SEQ ID NO: 620273 - RNA, 24 nt, Artificial Sequence
  Synthetic
ucucauguagaaugagaagacaau

SEQ ID NO: 620274 - RNA, 18 nt, Artificial Sequence
  Synthetic
uacuugugcuaagacaau

SEQ ID NO: 620275 - RNA, 19 nt, Artificial Sequence
  Synthetic
uuacuugugcuaagacaau

SEQ ID NO: 620276 - RNA, 20 nt, Artificial Sequence
  Synthetic
guuacuugugcuaagacaau

SEQ ID NO: 620277 - RNA, 21 nt, Artificial Sequence
  Synthetic
aguuacuugugcuaagacaau

SEQ ID NO: 620278 - RNA, 22 nt, Artificial Sequence
  Synthetic
caguuacuugugcuaagacaau

SEQ ID NO: 620279 - RNA, 23 nt, Artificial Sequence
  Synthetic
ccaguuacuugugcuaagacaau

SEQ ID NO: 620280 - RNA, 24 nt, Artificial Sequence
  Synthetic
accaguuacuugugcuaagacaau

SEQ ID NO: 620281 - RNA, 18 nt, Artificial Sequence
  Synthetic
agugggauugcagacaau

SEQ ID NO: 620282 - RNA, 19 nt, Artificial Sequence
  Synthetic
gagugggauugcagacaau

SEQ ID NO: 620283 - RNA, 20 nt, Artificial Sequence
  Synthetic
ggagugggauugcagacaau

SEQ ID NO: 620284 - RNA, 21 nt, Artificial Sequence
  Synthetic
aggagugggauugcagacaau

SEQ ID NO: 620285 - RNA, 22 nt, Artificial Sequence
  Synthetic
uaggagugggauugcagacaau

SEQ ID NO: 620286 - RNA, 23 nt, Artificial Sequence
  Synthetic
auaggagugggauugcagacaau

SEQ ID NO: 620287 - RNA, 24 nt, Artificial Sequence
  Synthetic
gauaggagugggauugcagacaau

SEQ ID NO: 620288 - RNA, 18 nt, Artificial Sequence
  Synthetic
uuuagccacguagacaau

SEQ ID NO: 620289 - RNA, 19 nt, Artificial Sequence
  Synthetic
uuuuagccacguagacaau

SEQ ID NO: 620290 - RNA, 20 nt, Artificial Sequence
  Synthetic
guuuuagccacguagacaau

SEQ ID NO: 620291 - RNA, 21 nt, Artificial Sequence
  Synthetic
uguuuuagccacguagacaau

SEQ ID NO: 620292 - RNA, 22 nt, Artificial Sequence
  Synthetic
uuguuuuagccacguagacaau

SEQ ID NO: 620293 - RNA, 23 nt, Artificial Sequence
  Synthetic
uuuguuuuagccacguagacaau

SEQ ID NO: 620294 - RNA, 24 nt, Artificial Sequence
  Synthetic
cuuuguuuuagccacguagacaau

SEQ ID NO: 620295 - RNA, 18 nt, Artificial Sequence
  Synthetic
ucuuccccuauugacaau

SEQ ID NO: 620296 - RNA, 19 nt, Artificial Sequence
  Synthetic
aucuuccccuauugacaau

SEQ ID NO: 620297 - RNA, 20 nt, Artificial Sequence
  Synthetic
aaucuuccccuauugacaau

SEQ ID NO: 620298 - RNA, 21 nt, Artificial Sequence
  Synthetic
uaaucuuccccuauugacaau

SEQ ID NO: 620299 - RNA, 22 nt, Artificial Sequence
  Synthetic
auaaucuuccccuauugacaau

SEQ ID NO: 620300 - RNA, 23 nt, Artificial Sequence
  Synthetic
gauaaucuuccccuauugacaau

SEQ ID NO: 620301 - RNA, 24 nt, Artificial Sequence
  Synthetic
ggauaaucuuccccuauugacaau

SEQ ID NO: 620302 - RNA, 18 nt, Artificial Sequence
  Synthetic
uuuguguaauaauacaau

SEQ ID NO: 620303 - RNA, 19 nt, Artificial Sequence
  Synthetic
uuuuguguaauaauacaau

SEQ ID NO: 620304 - RNA, 20 nt, Artificial Sequence
  Synthetic
uuuuuguguaauaauacaau

SEQ ID NO: 620305 - RNA, 21 nt, Artificial Sequence
  Synthetic
uuuuuuguguaauaauacaau

SEQ ID NO: 620306 - RNA, 22 nt, Artificial Sequence
  Synthetic
auuuuuuguguaauaauacaau

SEQ ID NO: 620307 - RNA, 23 nt, Artificial Sequence
  Synthetic
uauuuuuuguguaauaauacaau

SEQ ID NO: 620308 - RNA, 24 nt, Artificial Sequence
  Synthetic
uuauuuuuuguguaauaauacaau

SEQ ID NO: 620309 - RNA, 18 nt, Artificial Sequence
  Synthetic
uaacaaaauuaauacaau

SEQ ID NO: 620310 - RNA, 19 nt, Artificial Sequence
  Synthetic
auaacaaaauuaauacaau

SEQ ID NO: 620311 - RNA, 20 nt, Artificial Sequence
  Synthetic
cauaacaaaauuaauacaau

SEQ ID NO: 620312 - RNA, 21 nt, Artificial Sequence
  Synthetic
gcauaacaaaauuaauacaau

SEQ ID NO: 620313 - RNA, 22 nt, Artificial Sequence
  Synthetic
agcauaacaaaauuaauacaau

SEQ ID NO: 620314 - RNA, 23 nt, Artificial Sequence
  Synthetic
aagcauaacaaaauuaauacaau

SEQ ID NO: 620315 - RNA, 24 nt, Artificial Sequence
  Synthetic
gaagcauaacaaaauuaauacaau

SEQ ID NO: 620316 - RNA, 18 nt, Artificial Sequence
  Synthetic
augcagauugcauacaau

SEQ ID NO: 620317 - RNA, 19 nt, Artificial Sequence
  Synthetic
caugcagauugcauacaau

SEQ ID NO: 620318 - RNA, 20 nt, Artificial Sequence
  Synthetic
gcaugcagauugcauacaau

SEQ ID NO: 620319 - RNA, 21 nt, Artificial Sequence
  Synthetic
ugcaugcagauugcauacaau

SEQ ID NO: 620320 - RNA, 22 nt, Artificial Sequence
  Synthetic
gugcaugcagauugcauacaau

SEQ ID NO: 620321 - RNA, 23 nt, Artificial Sequence
  Synthetic
agugcaugcagauugcauacaau

SEQ ID NO: 620322 - RNA, 24 nt, Artificial Sequence
  Synthetic
uagugcaugcagauugcauacaau

SEQ ID NO: 620323 - RNA, 18 nt, Artificial Sequence
  Synthetic
gaaggaaaacgauacaau

SEQ ID NO: 620324 - RNA, 19 nt, Artificial Sequence
  Synthetic
ggaaggaaaacgauacaau

SEQ ID NO: 620325 - RNA, 20 nt, Artificial Sequence
  Synthetic
uggaaggaaaacgauacaau

SEQ ID NO: 620326 - RNA, 21 nt, Artificial Sequence
  Synthetic
auggaaggaaaacgauacaau

SEQ ID NO: 620327 - RNA, 22 nt, Artificial Sequence
  Synthetic
aauggaaggaaaacgauacaau

SEQ ID NO: 620328 - RNA, 23 nt, Artificial Sequence
  Synthetic
aaauggaaggaaaacgauacaau

SEQ ID NO: 620329 - RNA, 24 nt, Artificial Sequence
  Synthetic
uaaauggaaggaaaacgauacaau

SEQ ID NO: 620330 - RNA, 18 nt, Artificial Sequence
  Synthetic
uuacuuccaggauacaau

SEQ ID NO: 620331 - RNA, 19 nt, Artificial Sequence
  Synthetic
guuacuuccaggauacaau

SEQ ID NO: 620332 - RNA, 20 nt, Artificial Sequence
  Synthetic
aguuacuuccaggauacaau

SEQ ID NO: 620333 - RNA, 21 nt, Artificial Sequence
  Synthetic
uaguuacuuccaggauacaau

SEQ ID NO: 620334 - RNA, 22 nt, Artificial Sequence
  Synthetic
uuaguuacuuccaggauacaau

SEQ ID NO: 620335 - RNA, 23 nt, Artificial Sequence
  Synthetic
guuaguuacuuccaggauacaau

SEQ ID NO: 620336 - RNA, 24 nt, Artificial Sequence
  Synthetic
aguuaguuacuuccaggauacaau

SEQ ID NO: 620337 - RNA, 18 nt, Artificial Sequence
  Synthetic
uuuuucugcugauacaau

SEQ ID NO: 620338 - RNA, 19 nt, Artificial Sequence
  Synthetic
auuuuucugcugauacaau

SEQ ID NO: 620339 - RNA, 20 nt, Artificial Sequence
  Synthetic
uauuuuucugcugauacaau

SEQ ID NO: 620340 - RNA, 21 nt, Artificial Sequence
  Synthetic
auauuuuucugcugauacaau

SEQ ID NO: 620341 - RNA, 22 nt, Artificial Sequence
  Synthetic
uauauuuuucugcugauacaau

SEQ ID NO: 620342 - RNA, 23 nt, Artificial Sequence
  Synthetic
uuauauuuuucugcugauacaau

SEQ ID NO: 620343 - RNA, 24 nt, Artificial Sequence
  Synthetic
uuuauauuuuucugcugauacaau

SEQ ID NO: 620344 - RNA, 18 nt, Artificial Sequence
  Synthetic
ugaauguauugauacaau

SEQ ID NO: 620345 - RNA, 19 nt, Artificial Sequence
  Synthetic
augaauguauugauacaau

SEQ ID NO: 620346 - RNA, 20 nt, Artificial Sequence
  Synthetic
uaugaauguauugauacaau

SEQ ID NO: 620347 - RNA, 21 nt, Artificial Sequence
  Synthetic
auaugaauguauugauacaau

SEQ ID NO: 620348 - RNA, 22 nt, Artificial Sequence
  Synthetic
uauaugaauguauugauacaau

SEQ ID NO: 620349 - RNA, 23 nt, Artificial Sequence
  Synthetic
uuauaugaauguauugauacaau

SEQ ID NO: 620350 - RNA, 24 nt, Artificial Sequence
  Synthetic
uuuauaugaauguauugauacaau

SEQ ID NO: 620351 - RNA, 18 nt, Artificial Sequence
  Synthetic
auuguaaaauucuacaau

SEQ ID NO: 620352 - RNA, 19 nt, Artificial Sequence
  Synthetic
aauuguaaaauucuacaau

SEQ ID NO: 620353 - RNA, 20 nt, Artificial Sequence
  Synthetic
caauuguaaaauucuacaau

SEQ ID NO: 620354 - RNA, 21 nt, Artificial Sequence
  Synthetic
ucaauuguaaaauucuacaau

SEQ ID NO: 620355 - RNA, 22 nt, Artificial Sequence
  Synthetic
cucaauuguaaaauucuacaau

SEQ ID NO: 620356 - RNA, 23 nt, Artificial Sequence
  Synthetic
ucucaauuguaaaauucuacaau

SEQ ID NO: 620357 - RNA, 24 nt, Artificial Sequence
  Synthetic
aucucaauuguaaaauucuacaau

SEQ ID NO: 620358 - RNA, 18 nt, Artificial Sequence
  Synthetic
auaaauuaauucuacaau

SEQ ID NO: 620359 - RNA, 19 nt, Artificial Sequence
  Synthetic
uauaaauuaauucuacaau

SEQ ID NO: 620360 - RNA, 20 nt, Artificial Sequence
  Synthetic
auauaaauuaauucuacaau

SEQ ID NO: 620361 - RNA, 21 nt, Artificial Sequence
  Synthetic
aauauaaauuaauucuacaau

SEQ ID NO: 620362 - RNA, 22 nt, Artificial Sequence
  Synthetic
gaauauaaauuaauucuacaau

SEQ ID NO: 620363 - RNA, 23 nt, Artificial Sequence
  Synthetic
agaauauaaauuaauucuacaau

SEQ ID NO: 620364 - RNA, 24 nt, Artificial Sequence
  Synthetic
aagaauauaaauuaauucuacaau

SEQ ID NO: 620365 - RNA, 18 nt, Artificial Sequence
  Synthetic
agguagagucaguacaau

SEQ ID NO: 620366 - RNA, 19 nt, Artificial Sequence
  Synthetic
aagguagagucaguacaau

SEQ ID NO: 620367 - RNA, 20 nt, Artificial Sequence
  Synthetic
aaagguagagucaguacaau

SEQ ID NO: 620368 - RNA, 21 nt, Artificial Sequence
  Synthetic
gaaagguagagucaguacaau

SEQ ID NO: 620369 - RNA, 22 nt, Artificial Sequence
  Synthetic
agaaagguagagucaguacaau

SEQ ID NO: 620370 - RNA, 23 nt, Artificial Sequence
  Synthetic
gagaaagguagagucaguacaau

SEQ ID NO: 620371 - RNA, 24 nt, Artificial Sequence
  Synthetic
ugagaaagguagagucaguacaau

SEQ ID NO: 620372 - RNA, 18 nt, Artificial Sequence
  Synthetic
agcacagcgauguacaau

SEQ ID NO: 620373 - RNA, 19 nt, Artificial Sequence
  Synthetic
cagcacagcgauguacaau

SEQ ID NO: 620374 - RNA, 20 nt, Artificial Sequence
  Synthetic
gcagcacagcgauguacaau

SEQ ID NO: 620375 - RNA, 21 nt, Artificial Sequence
  Synthetic
agcagcacagcgauguacaau

SEQ ID NO: 620376 - RNA, 22 nt, Artificial Sequence
  Synthetic
cagcagcacagcgauguacaau

SEQ ID NO: 620377 - RNA, 23 nt, Artificial Sequence
  Synthetic
ucagcagcacagcgauguacaau

SEQ ID NO: 620378 - RNA, 24 nt, Artificial Sequence
  Synthetic
aucagcagcacagcgauguacaau

SEQ ID NO: 620379 - RNA, 18 nt, Artificial Sequence
  Synthetic
aucagacaaaauuacaau

SEQ ID NO: 620380 - RNA, 19 nt, Artificial Sequence
  Synthetic
aaucagacaaaauuacaau

SEQ ID NO: 620381 - RNA, 20 nt, Artificial Sequence
  Synthetic
aaaucagacaaaauuacaau

SEQ ID NO: 620382 - RNA, 21 nt, Artificial Sequence
  Synthetic
aaaaucagacaaaauuacaau

SEQ ID NO: 620383 - RNA, 22 nt, Artificial Sequence
  Synthetic
gaaaaucagacaaaauuacaau

SEQ ID NO: 620384 - RNA, 23 nt, Artificial Sequence
  Synthetic
ugaaaaucagacaaaauuacaau

SEQ ID NO: 620385 - RNA, 24 nt, Artificial Sequence
  Synthetic
cugaaaaucagacaaaauuacaau

SEQ ID NO: 620386 - RNA, 18 nt, Artificial Sequence
  Synthetic
gccaacaauuauuacaau

SEQ ID NO: 620387 - RNA, 19 nt, Artificial Sequence
  Synthetic
agccaacaauuauuacaau

SEQ ID NO: 620388 - RNA, 20 nt, Artificial Sequence
  Synthetic
uagccaacaauuauuacaau

SEQ ID NO: 620389 - RNA, 21 nt, Artificial Sequence
  Synthetic
auagccaacaauuauuacaau

SEQ ID NO: 620390 - RNA, 22 nt, Artificial Sequence
  Synthetic
aauagccaacaauuauuacaau

SEQ ID NO: 620391 - RNA, 23 nt, Artificial Sequence
  Synthetic
gaauagccaacaauuauuacaau

SEQ ID NO: 620392 - RNA, 24 nt, Artificial Sequence
  Synthetic
ggaauagccaacaauuauuacaau

SEQ ID NO: 620393 - RNA, 18 nt, Artificial Sequence
  Synthetic
aaagucaaugcuuacaau

SEQ ID NO: 620394 - RNA, 19 nt, Artificial Sequence
  Synthetic
aaaagucaaugcuuacaau

SEQ ID NO: 620395 - RNA, 20 nt, Artificial Sequence
  Synthetic
uaaaagucaaugcuuacaau

SEQ ID NO: 620396 - RNA, 21 nt, Artificial Sequence
  Synthetic
guaaaagucaaugcuuacaau

SEQ ID NO: 620397 - RNA, 22 nt, Artificial Sequence
  Synthetic
gguaaaagucaaugcuuacaau

SEQ ID NO: 620398 - RNA, 23 nt, Artificial Sequence
  Synthetic
agguaaaagucaaugcuuacaau

SEQ ID NO: 620399 - RNA, 24 nt, Artificial Sequence
  Synthetic
aagguaaaagucaaugcuuacaau

SEQ ID NO: 620400 - RNA, 18 nt, Artificial Sequence
  Synthetic
cuagauauaucuuacaau

SEQ ID NO: 620401 - RNA, 19 nt, Artificial Sequence
  Synthetic
acuagauauaucuuacaau

SEQ ID NO: 620402 - RNA, 20 nt, Artificial Sequence
  Synthetic
uacuagauauaucuuacaau

SEQ ID NO: 620403 - RNA, 21 nt, Artificial Sequence
  Synthetic
uuacuagauauaucuuacaau

SEQ ID NO: 620404 - RNA, 22 nt, Artificial Sequence
  Synthetic
cuuacuagauauaucuuacaau

SEQ ID NO: 620405 - RNA, 23 nt, Artificial Sequence
  Synthetic
acuuacuagauauaucuuacaau

SEQ ID NO: 620406 - RNA, 24 nt, Artificial Sequence
  Synthetic
aacuuacuagauauaucuuacaau

SEQ ID NO: 620407 - RNA, 18 nt, Artificial Sequence
  Synthetic
uuagaugacauaaccaau

SEQ ID NO: 620408 - RNA, 19 nt, Artificial Sequence
  Synthetic
cuuagaugacauaaccaau

SEQ ID NO: 620409 - RNA, 20 nt, Artificial Sequence
  Synthetic
ucuuagaugacauaaccaau

SEQ ID NO: 620410 - RNA, 21 nt, Artificial Sequence
  Synthetic
uucuuagaugacauaaccaau

SEQ ID NO: 620411 - RNA, 22 nt, Artificial Sequence
  Synthetic
cuucuuagaugacauaaccaau

SEQ ID NO: 620412 - RNA, 23 nt, Artificial Sequence
  Synthetic
ccuucuuagaugacauaaccaau

SEQ ID NO: 620413 - RNA, 24 nt, Artificial Sequence
  Synthetic
uccuucuuagaugacauaaccaau

SEQ ID NO: 620414 - RNA, 18 nt, Artificial Sequence
  Synthetic
auuguaaaacgcaccaau

SEQ ID NO: 620415 - RNA, 19 nt, Artificial Sequence
  Synthetic
gauuguaaaacgcaccaau

SEQ ID NO: 620416 - RNA, 20 nt, Artificial Sequence
  Synthetic
ggauuguaaaacgcaccaau

SEQ ID NO: 620417 - RNA, 21 nt, Artificial Sequence
  Synthetic
aggauuguaaaacgcaccaau

SEQ ID NO: 620418 - RNA, 22 nt, Artificial Sequence
  Synthetic
gaggauuguaaaacgcaccaau

SEQ ID NO: 620419 - RNA, 23 nt, Artificial Sequence
  Synthetic
agaggauuguaaaacgcaccaau

SEQ ID NO: 620420 - RNA, 24 nt, Artificial Sequence
  Synthetic
aagaggauuguaaaacgcaccaau

SEQ ID NO: 620421 - RNA, 18 nt, Artificial Sequence
  Synthetic
cuuucugauacuaccaau

SEQ ID NO: 620422 - RNA, 19 nt, Artificial Sequence
  Synthetic
ccuuucugauacuaccaau

SEQ ID NO: 620423 - RNA, 20 nt, Artificial Sequence
  Synthetic
accuuucugauacuaccaau

SEQ ID NO: 620424 - RNA, 21 nt, Artificial Sequence
  Synthetic
aaccuuucugauacuaccaau

SEQ ID NO: 620425 - RNA, 22 nt, Artificial Sequence
  Synthetic
gaaccuuucugauacuaccaau

SEQ ID NO: 620426 - RNA, 23 nt, Artificial Sequence
  Synthetic
agaaccuuucugauacuaccaau

SEQ ID NO: 620427 - RNA, 24 nt, Artificial Sequence
  Synthetic
gagaaccuuucugauacuaccaau

SEQ ID NO: 620428 - RNA, 18 nt, Artificial Sequence
  Synthetic
gucaaugauccuaccaau

SEQ ID NO: 620429 - RNA, 19 nt, Artificial Sequence
  Synthetic
agucaaugauccuaccaau

SEQ ID NO: 620430 - RNA, 20 nt, Artificial Sequence
  Synthetic
uagucaaugauccuaccaau

SEQ ID NO: 620431 - RNA, 21 nt, Artificial Sequence
  Synthetic
cuagucaaugauccuaccaau

SEQ ID NO: 620432 - RNA, 22 nt, Artificial Sequence
  Synthetic
ucuagucaaugauccuaccaau

SEQ ID NO: 620433 - RNA, 23 nt, Artificial Sequence
  Synthetic
uucuagucaaugauccuaccaau

SEQ ID NO: 620434 - RNA, 24 nt, Artificial Sequence
  Synthetic
auucuagucaaugauccuaccaau

SEQ ID NO: 620435 - RNA, 18 nt, Artificial Sequence
  Synthetic
cagugucuucuuaccaau

SEQ ID NO: 620436 - RNA, 19 nt, Artificial Sequence
  Synthetic
acagugucuucuuaccaau

SEQ ID NO: 620437 - RNA, 20 nt, Artificial Sequence
  Synthetic
cacagugucuucuuaccaau

SEQ ID NO: 620438 - RNA, 21 nt, Artificial Sequence
  Synthetic
gcacagugucuucuuaccaau

SEQ ID NO: 620439 - RNA, 22 nt, Artificial Sequence
  Synthetic
ugcacagugucuucuuaccaau

SEQ ID NO: 620440 - RNA, 23 nt, Artificial Sequence
  Synthetic
augcacagugucuucuuaccaau

SEQ ID NO: 620441 - RNA, 24 nt, Artificial Sequence
  Synthetic
uaugcacagugucuucuuaccaau

SEQ ID NO: 620442 - RNA, 18 nt, Artificial Sequence
  Synthetic
auuugucucaaccccaau

SEQ ID NO: 620443 - RNA, 19 nt, Artificial Sequence
  Synthetic
aauuugucucaaccccaau

SEQ ID NO: 620444 - RNA, 20 nt, Artificial Sequence
  Synthetic
caauuugucucaaccccaau

SEQ ID NO: 620445 - RNA, 21 nt, Artificial Sequence
  Synthetic
ccaauuugucucaaccccaau

SEQ ID NO: 620446 - RNA, 22 nt, Artificial Sequence
  Synthetic
gccaauuugucucaaccccaau

SEQ ID NO: 620447 - RNA, 23 nt, Artificial Sequence
  Synthetic
ggccaauuugucucaaccccaau

SEQ ID NO: 620448 - RNA, 24 nt, Artificial Sequence
  Synthetic
uggccaauuugucucaaccccaau

SEQ ID NO: 620449 - RNA, 18 nt, Artificial Sequence
  Synthetic
uccccagaccuccccaau

SEQ ID NO: 620450 - RNA, 19 nt, Artificial Sequence
  Synthetic
cuccccagaccuccccaau

SEQ ID NO: 620451 - RNA, 20 nt, Artificial Sequence
  Synthetic
ccuccccagaccuccccaau

SEQ ID NO: 620452 - RNA, 21 nt, Artificial Sequence
  Synthetic
cccuccccagaccuccccaau

SEQ ID NO: 620453 - RNA, 22 nt, Artificial Sequence
  Synthetic
gcccuccccagaccuccccaau

SEQ ID NO: 620454 - RNA, 23 nt, Artificial Sequence
  Synthetic
ugcccuccccagaccuccccaau

SEQ ID NO: 620455 - RNA, 24 nt, Artificial Sequence
  Synthetic
gugcccuccccagaccuccccaau

SEQ ID NO: 620456 - RNA, 18 nt, Artificial Sequence
  Synthetic
ggcuaucugcaagccaau

SEQ ID NO: 620457 - RNA, 19 nt, Artificial Sequence
  Synthetic
cggcuaucugcaagccaau

SEQ ID NO: 620458 - RNA, 20 nt, Artificial Sequence
  Synthetic
gcggcuaucugcaagccaau

SEQ ID NO: 620459 - RNA, 21 nt, Artificial Sequence
  Synthetic
ggcggcuaucugcaagccaau

SEQ ID NO: 620460 - RNA, 22 nt, Artificial Sequence
  Synthetic
aggcggcuaucugcaagccaau

SEQ ID NO: 620461 - RNA, 23 nt, Artificial Sequence
  Synthetic
aaggcggcuaucugcaagccaau

SEQ ID NO: 620462 - RNA, 24 nt, Artificial Sequence
  Synthetic
gaaggcggcuaucugcaagccaau

SEQ ID NO: 620463 - RNA, 18 nt, Artificial Sequence
  Synthetic
gacccaaccccagccaau

SEQ ID NO: 620464 - RNA, 19 nt, Artificial Sequence
  Synthetic
cgacccaaccccagccaau

SEQ ID NO: 620465 - RNA, 20 nt, Artificial Sequence
  Synthetic
acgacccaaccccagccaau

SEQ ID NO: 620466 - RNA, 21 nt, Artificial Sequence
  Synthetic
uacgacccaaccccagccaau

SEQ ID NO: 620467 - RNA, 22 nt, Artificial Sequence
  Synthetic
guacgacccaaccccagccaau

SEQ ID NO: 620468 - RNA, 23 nt, Artificial Sequence
  Synthetic
uguacgacccaaccccagccaau

SEQ ID NO: 620469 - RNA, 24 nt, Artificial Sequence
  Synthetic
uuguacgacccaaccccagccaau

SEQ ID NO: 620470 - RNA, 18 nt, Artificial Sequence
  Synthetic
acauuucucagagccaau

SEQ ID NO: 620471 - RNA, 19 nt, Artificial Sequence
  Synthetic
gacauuucucagagccaau

SEQ ID NO: 620472 - RNA, 20 nt, Artificial Sequence
  Synthetic
agacauuucucagagccaau

SEQ ID NO: 620473 - RNA, 21 nt, Artificial Sequence
  Synthetic
aagacauuucucagagccaau

SEQ ID NO: 620474 - RNA, 22 nt, Artificial Sequence
  Synthetic
caagacauuucucagagccaau

SEQ ID NO: 620475 - RNA, 23 nt, Artificial Sequence
  Synthetic
ucaagacauuucucagagccaau

SEQ ID NO: 620476 - RNA, 24 nt, Artificial Sequence
  Synthetic
aucaagacauuucucagagccaau

SEQ ID NO: 620477 - RNA, 18 nt, Artificial Sequence
  Synthetic
ucucaguggguagccaau

SEQ ID NO: 620478 - RNA, 19 nt, Artificial Sequence
  Synthetic
uucucaguggguagccaau

SEQ ID NO: 620479 - RNA, 20 nt, Artificial Sequence
  Synthetic
guucucaguggguagccaau

SEQ ID NO: 620480 - RNA, 21 nt, Artificial Sequence
  Synthetic
aguucucaguggguagccaau

SEQ ID NO: 620481 - RNA, 22 nt, Artificial Sequence
  Synthetic
gaguucucaguggguagccaau

SEQ ID NO: 620482 - RNA, 23 nt, Artificial Sequence
  Synthetic
ggaguucucaguggguagccaau

SEQ ID NO: 620483 - RNA, 24 nt, Artificial Sequence
  Synthetic
uggaguucucaguggguagccaau

SEQ ID NO: 620484 - RNA, 18 nt, Artificial Sequence
  Synthetic
ggguacaguguagccaau

SEQ ID NO: 620485 - RNA, 19 nt, Artificial Sequence
  Synthetic
aggguacaguguagccaau

SEQ ID NO: 620486 - RNA, 20 nt, Artificial Sequence
  Synthetic
aaggguacaguguagccaau

SEQ ID NO: 620487 - RNA, 21 nt, Artificial Sequence
  Synthetic
aaaggguacaguguagccaau

SEQ ID NO: 620488 - RNA, 22 nt, Artificial Sequence
  Synthetic
caaaggguacaguguagccaau

SEQ ID NO: 620489 - RNA, 23 nt, Artificial Sequence
  Synthetic
ucaaaggguacaguguagccaau

SEQ ID NO: 620490 - RNA, 24 nt, Artificial Sequence
  Synthetic
uucaaaggguacaguguagccaau

SEQ ID NO: 620491 - RNA, 18 nt, Artificial Sequence
  Synthetic
gcucucuagguugccaau

SEQ ID NO: 620492 - RNA, 19 nt, Artificial Sequence
  Synthetic
ugcucucuagguugccaau

SEQ ID NO: 620493 - RNA, 20 nt, Artificial Sequence
  Synthetic
uugcucucuagguugccaau

SEQ ID NO: 620494 - RNA, 21 nt, Artificial Sequence
  Synthetic
auugcucucuagguugccaau

SEQ ID NO: 620495 - RNA, 22 nt, Artificial Sequence
  Synthetic
aauugcucucuagguugccaau

SEQ ID NO: 620496 - RNA, 23 nt, Artificial Sequence
  Synthetic
uaauugcucucuagguugccaau

SEQ ID NO: 620497 - RNA, 24 nt, Artificial Sequence
  Synthetic
uuaauugcucucuagguugccaau

SEQ ID NO: 620498 - RNA, 18 nt, Artificial Sequence
  Synthetic
cccauauaaugauccaau

SEQ ID NO: 620499 - RNA, 19 nt, Artificial Sequence
  Synthetic
gcccauauaaugauccaau

SEQ ID NO: 620500 - RNA, 20 nt, Artificial Sequence
  Synthetic
ugcccauauaaugauccaau

SEQ ID NO: 620501 - RNA, 21 nt, Artificial Sequence
  Synthetic
uugcccauauaaugauccaau

SEQ ID NO: 620502 - RNA, 22 nt, Artificial Sequence
  Synthetic
uuugcccauauaaugauccaau

SEQ ID NO: 620503 - RNA, 23 nt, Artificial Sequence
  Synthetic
uuuugcccauauaaugauccaau

SEQ ID NO: 620504 - RNA, 24 nt, Artificial Sequence
  Synthetic
uuuuugcccauauaaugauccaau

SEQ ID NO: 620505 - RNA, 18 nt, Artificial Sequence
  Synthetic
aggucuuaucccuccaau

SEQ ID NO: 620506 - RNA, 19 nt, Artificial Sequence
  Synthetic
caggucuuaucccuccaau

SEQ ID NO: 620507 - RNA, 20 nt, Artificial Sequence
  Synthetic
acaggucuuaucccuccaau

SEQ ID NO: 620508 - RNA, 21 nt, Artificial Sequence
  Synthetic
cacaggucuuaucccuccaau

SEQ ID NO: 620509 - RNA, 22 nt, Artificial Sequence
  Synthetic
acacaggucuuaucccuccaau

SEQ ID NO: 620510 - RNA, 23 nt, Artificial Sequence
  Synthetic
gacacaggucuuaucccuccaau

SEQ ID NO: 620511 - RNA, 24 nt, Artificial Sequence
  Synthetic
agacacaggucuuaucccuccaau

SEQ ID NO: 620512 - RNA, 18 nt, Artificial Sequence
  Synthetic
auucccacacucuccaau

SEQ ID NO: 620513 - RNA, 19 nt, Artificial Sequence
  Synthetic
uauucccacacucuccaau

SEQ ID NO: 620514 - RNA, 20 nt, Artificial Sequence
  Synthetic
uuauucccacacucuccaau

SEQ ID NO: 620515 - RNA, 21 nt, Artificial Sequence
  Synthetic
uuuauucccacacucuccaau

SEQ ID NO: 620516 - RNA, 22 nt, Artificial Sequence
  Synthetic
cuuuauucccacacucuccaau

SEQ ID NO: 620517 - RNA, 23 nt, Artificial Sequence
  Synthetic
acuuuauucccacacucuccaau

SEQ ID NO: 620518 - RNA, 24 nt, Artificial Sequence
  Synthetic
uacuuuauucccacacucuccaau

SEQ ID NO: 620519 - RNA, 18 nt, Artificial Sequence
  Synthetic
uacuguguuaauuccaau

SEQ ID NO: 620520 - RNA, 19 nt, Artificial Sequence
  Synthetic
uuacuguguuaauuccaau

SEQ ID NO: 620521 - RNA, 20 nt, Artificial Sequence
  Synthetic
guuacuguguuaauuccaau

SEQ ID NO: 620522 - RNA, 21 nt, Artificial Sequence
  Synthetic
gguuacuguguuaauuccaau

SEQ ID NO: 620523 - RNA, 22 nt, Artificial Sequence
  Synthetic
ggguuacuguguuaauuccaau

SEQ ID NO: 620524 - RNA, 23 nt, Artificial Sequence
  Synthetic
gggguuacuguguuaauuccaau

SEQ ID NO: 620525 - RNA, 24 nt, Artificial Sequence
  Synthetic
ggggguuacuguguuaauuccaau

SEQ ID NO: 620526 - RNA, 18 nt, Artificial Sequence
  Synthetic
augaacccagcuuccaau

SEQ ID NO: 620527 - RNA, 19 nt, Artificial Sequence
  Synthetic
gaugaacccagcuuccaau

SEQ ID NO: 620528 - RNA, 20 nt, Artificial Sequence
  Synthetic
ggaugaacccagcuuccaau

SEQ ID NO: 620529 - RNA, 21 nt, Artificial Sequence
  Synthetic
gggaugaacccagcuuccaau

SEQ ID NO: 620530 - RNA, 22 nt, Artificial Sequence
  Synthetic
agggaugaacccagcuuccaau

SEQ ID NO: 620531 - RNA, 23 nt, Artificial Sequence
  Synthetic
cagggaugaacccagcuuccaau

SEQ ID NO: 620532 - RNA, 24 nt, Artificial Sequence
  Synthetic
gcagggaugaacccagcuuccaau

SEQ ID NO: 620533 - RNA, 18 nt, Artificial Sequence
  Synthetic
uaagaagagaaaagcaau

SEQ ID NO: 620534 - RNA, 19 nt, Artificial Sequence
  Synthetic
uuaagaagagaaaagcaau

SEQ ID NO: 620535 - RNA, 20 nt, Artificial Sequence
  Synthetic
guuaagaagagaaaagcaau

SEQ ID NO: 620536 - RNA, 21 nt, Artificial Sequence
  Synthetic
gguuaagaagagaaaagcaau

SEQ ID NO: 620537 - RNA, 22 nt, Artificial Sequence
  Synthetic
agguuaagaagagaaaagcaau

SEQ ID NO: 620538 - RNA, 23 nt, Artificial Sequence
  Synthetic
aagguuaagaagagaaaagcaau

SEQ ID NO: 620539 - RNA, 24 nt, Artificial Sequence
  Synthetic
caagguuaagaagagaaaagcaau

SEQ ID NO: 620540 - RNA, 18 nt, Artificial Sequence
  Synthetic
gaaacagugaaaagcaau

SEQ ID NO: 620541 - RNA, 19 nt, Artificial Sequence
  Synthetic
ggaaacagugaaaagcaau

SEQ ID NO: 620542 - RNA, 20 nt, Artificial Sequence
  Synthetic
cggaaacagugaaaagcaau

SEQ ID NO: 620543 - RNA, 21 nt, Artificial Sequence
  Synthetic
acggaaacagugaaaagcaau

SEQ ID NO: 620544 - RNA, 22 nt, Artificial Sequence
  Synthetic
gacggaaacagugaaaagcaau

SEQ ID NO: 620545 - RNA, 23 nt, Artificial Sequence
  Synthetic
ugacggaaacagugaaaagcaau

SEQ ID NO: 620546 - RNA, 24 nt, Artificial Sequence
  Synthetic
augacggaaacagugaaaagcaau

SEQ ID NO: 620547 - RNA, 18 nt, Artificial Sequence
  Synthetic
cagaauacuaaaagcaau

SEQ ID NO: 620548 - RNA, 19 nt, Artificial Sequence
  Synthetic
acagaauacuaaaagcaau

SEQ ID NO: 620549 - RNA, 20 nt, Artificial Sequence
  Synthetic
gacagaauacuaaaagcaau

SEQ ID NO: 620550 - RNA, 21 nt, Artificial Sequence
  Synthetic
agacagaauacuaaaagcaau

SEQ ID NO: 620551 - RNA, 22 nt, Artificial Sequence
  Synthetic
aagacagaauacuaaaagcaau

SEQ ID NO: 620552 - RNA, 23 nt, Artificial Sequence
  Synthetic
aaagacagaauacuaaaagcaau

SEQ ID NO: 620553 - RNA, 24 nt, Artificial Sequence
  Synthetic
caaagacagaauacuaaaagcaau

SEQ ID NO: 620554 - RNA, 18 nt, Artificial Sequence
  Synthetic
cugacaaaaacaagcaau

SEQ ID NO: 620555 - RNA, 19 nt, Artificial Sequence
  Synthetic
ccugacaaaaacaagcaau

SEQ ID NO: 620556 - RNA, 20 nt, Artificial Sequence
  Synthetic
accugacaaaaacaagcaau

SEQ ID NO: 620557 - RNA, 21 nt, Artificial Sequence
  Synthetic
aaccugacaaaaacaagcaau

SEQ ID NO: 620558 - RNA, 22 nt, Artificial Sequence
  Synthetic
aaaccugacaaaaacaagcaau

SEQ ID NO: 620559 - RNA, 23 nt, Artificial Sequence
  Synthetic
caaaccugacaaaaacaagcaau

SEQ ID NO: 620560 - RNA, 24 nt, Artificial Sequence
  Synthetic
acaaaccugacaaaaacaagcaau

SEQ ID NO: 620561 - RNA, 18 nt, Artificial Sequence
  Synthetic
ucuucaugagcaagcaau

SEQ ID NO: 620562 - RNA, 19 nt, Artificial Sequence
  Synthetic
gucuucaugagcaagcaau

SEQ ID NO: 620563 - RNA, 20 nt, Artificial Sequence
  Synthetic
ugucuucaugagcaagcaau

SEQ ID NO: 620564 - RNA, 21 nt, Artificial Sequence
  Synthetic
augucuucaugagcaagcaau

SEQ ID NO: 620565 - RNA, 22 nt, Artificial Sequence
  Synthetic
caugucuucaugagcaagcaau

SEQ ID NO: 620566 - RNA, 23 nt, Artificial Sequence
  Synthetic
ucaugucuucaugagcaagcaau

SEQ ID NO: 620567 - RNA, 24 nt, Artificial Sequence
  Synthetic
aucaugucuucaugagcaagcaau

SEQ ID NO: 620568 - RNA, 18 nt, Artificial Sequence
  Synthetic
cugggggcaggaagcaau

SEQ ID NO: 620569 - RNA, 19 nt, Artificial Sequence
  Synthetic
gcugggggcaggaagcaau

SEQ ID NO: 620570 - RNA, 20 nt, Artificial Sequence
  Synthetic
ggcugggggcaggaagcaau

SEQ ID NO: 620571 - RNA, 21 nt, Artificial Sequence
  Synthetic
gggcugggggcaggaagcaau

SEQ ID NO: 620572 - RNA, 22 nt, Artificial Sequence
  Synthetic
ggggcugggggcaggaagcaau

SEQ ID NO: 620573 - RNA, 23 nt, Artificial Sequence
  Synthetic
aggggcugggggcaggaagcaau

SEQ ID NO: 620574 - RNA, 24 nt, Artificial Sequence
  Synthetic
caggggcugggggcaggaagcaau

SEQ ID NO: 620575 - RNA, 18 nt, Artificial Sequence
  Synthetic
uuggucagacuaagcaau

SEQ ID NO: 620576 - RNA, 19 nt, Artificial Sequence
  Synthetic
guuggucagacuaagcaau

SEQ ID NO: 620577 - RNA, 20 nt, Artificial Sequence
  Synthetic
uguuggucagacuaagcaau

SEQ ID NO: 620578 - RNA, 21 nt, Artificial Sequence
  Synthetic
uuguuggucagacuaagcaau

SEQ ID NO: 620579 - RNA, 22 nt, Artificial Sequence
  Synthetic
cuuguuggucagacuaagcaau

SEQ ID NO: 620580 - RNA, 23 nt, Artificial Sequence
  Synthetic
ccuuguuggucagacuaagcaau

SEQ ID NO: 620581 - RNA, 24 nt, Artificial Sequence
  Synthetic
accuuguuggucagacuaagcaau

SEQ ID NO: 620582 - RNA, 18 nt, Artificial Sequence
  Synthetic
aacauuacguuaagcaau

SEQ ID NO: 620583 - RNA, 19 nt, Artificial Sequence
  Synthetic
aaacauuacguuaagcaau

SEQ ID NO: 620584 - RNA, 20 nt, Artificial Sequence
  Synthetic
aaaacauuacguuaagcaau

SEQ ID NO: 620585 - RNA, 21 nt, Artificial Sequence
  Synthetic
aaaaacauuacguuaagcaau

SEQ ID NO: 620586 - RNA, 22 nt, Artificial Sequence
  Synthetic
uaaaaacauuacguuaagcaau

SEQ ID NO: 620587 - RNA, 23 nt, Artificial Sequence
  Synthetic
uuaaaaacauuacguuaagcaau

SEQ ID NO: 620588 - RNA, 24 nt, Artificial Sequence
  Synthetic
auuaaaaacauuacguuaagcaau

SEQ ID NO: 620589 - RNA, 18 nt, Artificial Sequence
  Synthetic
gacaacacucacagcaau

SEQ ID NO: 620590 - RNA, 19 nt, Artificial Sequence
  Synthetic
ugacaacacucacagcaau

SEQ ID NO: 620591 - RNA, 20 nt, Artificial Sequence
  Synthetic
uugacaacacucacagcaau

SEQ ID NO: 620592 - RNA, 21 nt, Artificial Sequence
  Synthetic
uuugacaacacucacagcaau

SEQ ID NO: 620593 - RNA, 22 nt, Artificial Sequence
  Synthetic
cuuugacaacacucacagcaau

SEQ ID NO: 620594 - RNA, 23 nt, Artificial Sequence
  Synthetic
ucuuugacaacacucacagcaau

SEQ ID NO: 620595 - RNA, 24 nt, Artificial Sequence
  Synthetic
uucuuugacaacacucacagcaau

SEQ ID NO: 620596 - RNA, 18 nt, Artificial Sequence
  Synthetic
cuccauacuggcagcaau

SEQ ID NO: 620597 - RNA, 19 nt, Artificial Sequence
  Synthetic
ucuccauacuggcagcaau

SEQ ID NO: 620598 - RNA, 20 nt, Artificial Sequence
  Synthetic
cucuccauacuggcagcaau

SEQ ID NO: 620599 - RNA, 21 nt, Artificial Sequence
  Synthetic
acucuccauacuggcagcaau

SEQ ID NO: 620600 - RNA, 22 nt, Artificial Sequence
  Synthetic
gacucuccauacuggcagcaau

SEQ ID NO: 620601 - RNA, 23 nt, Artificial Sequence
  Synthetic
agacucuccauacuggcagcaau

SEQ ID NO: 620602 - RNA, 24 nt, Artificial Sequence
  Synthetic
cagacucuccauacuggcagcaau

SEQ ID NO: 620603 - RNA, 18 nt, Artificial Sequence
  Synthetic
gccuguaauaucagcaau

SEQ ID NO: 620604 - RNA, 19 nt, Artificial Sequence
  Synthetic
cgccuguaauaucagcaau

SEQ ID NO: 620605 - RNA, 20 nt, Artificial Sequence
  Synthetic
acgccuguaauaucagcaau

SEQ ID NO: 620606 - RNA, 21 nt, Artificial Sequence
  Synthetic
cacgccuguaauaucagcaau

SEQ ID NO: 620607 - RNA, 22 nt, Artificial Sequence
  Synthetic
ucacgccuguaauaucagcaau

SEQ ID NO: 620608 - RNA, 23 nt, Artificial Sequence
  Synthetic
cucacgccuguaauaucagcaau

SEQ ID NO: 620609 - RNA, 24 nt, Artificial Sequence
  Synthetic
gcucacgccuguaauaucagcaau

SEQ ID NO: 620610 - RNA, 18 nt, Artificial Sequence
  Synthetic
cagauuuauaucagcaau

SEQ ID NO: 620611 - RNA, 19 nt, Artificial Sequence
  Synthetic
acagauuuauaucagcaau

SEQ ID NO: 620612 - RNA, 20 nt, Artificial Sequence
  Synthetic
uacagauuuauaucagcaau

SEQ ID NO: 620613 - RNA, 21 nt, Artificial Sequence
  Synthetic
auacagauuuauaucagcaau

SEQ ID NO: 620614 - RNA, 22 nt, Artificial Sequence
  Synthetic
aauacagauuuauaucagcaau

SEQ ID NO: 620615 - RNA, 23 nt, Artificial Sequence
  Synthetic
gaauacagauuuauaucagcaau

SEQ ID NO: 620616 - RNA, 24 nt, Artificial Sequence
  Synthetic
ggaauacagauuuauaucagcaau

SEQ ID NO: 620617 - RNA, 18 nt, Artificial Sequence
  Synthetic
ugggguacagggagcaau

SEQ ID NO: 620618 - RNA, 19 nt, Artificial Sequence
  Synthetic
cugggguacagggagcaau

SEQ ID NO: 620619 - RNA, 20 nt, Artificial Sequence
  Synthetic
gcugggguacagggagcaau

SEQ ID NO: 620620 - RNA, 21 nt, Artificial Sequence
  Synthetic
ugcugggguacagggagcaau

SEQ ID NO: 620621 - RNA, 22 nt, Artificial Sequence
  Synthetic
gugcugggguacagggagcaau

SEQ ID NO: 620622 - RNA, 23 nt, Artificial Sequence
  Synthetic
agugcugggguacagggagcaau

SEQ ID NO: 620623 - RNA, 24 nt, Artificial Sequence
  Synthetic
cagugcugggguacagggagcaau

SEQ ID NO: 620624 - RNA, 18 nt, Artificial Sequence
  Synthetic
aaggcaaggaugagcaau

SEQ ID NO: 620625 - RNA, 19 nt, Artificial Sequence
  Synthetic
gaaggcaaggaugagcaau

SEQ ID NO: 620626 - RNA, 20 nt, Artificial Sequence
  Synthetic
agaaggcaaggaugagcaau

SEQ ID NO: 620627 - RNA, 21 nt, Artificial Sequence
  Synthetic
gagaaggcaaggaugagcaau

SEQ ID NO: 620628 - RNA, 22 nt, Artificial Sequence
  Synthetic
ugagaaggcaaggaugagcaau

SEQ ID NO: 620629 - RNA, 23 nt, Artificial Sequence
  Synthetic
augagaaggcaaggaugagcaau

SEQ ID NO: 620630 - RNA, 24 nt, Artificial Sequence
  Synthetic
caugagaaggcaaggaugagcaau

SEQ ID NO: 620631 - RNA, 18 nt, Artificial Sequence
  Synthetic
caguuaacgcugagcaau

SEQ ID NO: 620632 - RNA, 19 nt, Artificial Sequence
  Synthetic
acaguuaacgcugagcaau

SEQ ID NO: 620633 - RNA, 20 nt, Artificial Sequence
  Synthetic
cacaguuaacgcugagcaau

SEQ ID NO: 620634 - RNA, 21 nt, Artificial Sequence
  Synthetic
gcacaguuaacgcugagcaau

SEQ ID NO: 620635 - RNA, 22 nt, Artificial Sequence
  Synthetic
agcacaguuaacgcugagcaau

SEQ ID NO: 620636 - RNA, 23 nt, Artificial Sequence
  Synthetic
aagcacaguuaacgcugagcaau

SEQ ID NO: 620637 - RNA, 24 nt, Artificial Sequence
  Synthetic
aaagcacaguuaacgcugagcaau

SEQ ID NO: 620638 - RNA, 18 nt, Artificial Sequence
  Synthetic
uauucauuucugagcaau

SEQ ID NO: 620639 - RNA, 19 nt, Artificial Sequence
  Synthetic
guauucauuucugagcaau

SEQ ID NO: 620640 - RNA, 20 nt, Artificial Sequence
  Synthetic
uguauucauuucugagcaau

SEQ ID NO: 620641 - RNA, 21 nt, Artificial Sequence
  Synthetic
auguauucauuucugagcaau

SEQ ID NO: 620642 - RNA, 22 nt, Artificial Sequence
  Synthetic
uauguauucauuucugagcaau

SEQ ID NO: 620643 - RNA, 23 nt, Artificial Sequence
  Synthetic
uuauguauucauuucugagcaau

SEQ ID NO: 620644 - RNA, 24 nt, Artificial Sequence
  Synthetic
cuuauguauucauuucugagcaau

SEQ ID NO: 620645 - RNA, 18 nt, Artificial Sequence
  Synthetic
cauagaaaaaauagcaau

SEQ ID NO: 620646 - RNA, 19 nt, Artificial Sequence
  Synthetic
gcauagaaaaaauagcaau

SEQ ID NO: 620647 - RNA, 20 nt, Artificial Sequence
  Synthetic
ugcauagaaaaaauagcaau

SEQ ID NO: 620648 - RNA, 21 nt, Artificial Sequence
  Synthetic
gugcauagaaaaaauagcaau

SEQ ID NO: 620649 - RNA, 22 nt, Artificial Sequence
  Synthetic
cgugcauagaaaaaauagcaau

SEQ ID NO: 620650 - RNA, 23 nt, Artificial Sequence
  Synthetic
ccgugcauagaaaaaauagcaau

SEQ ID NO: 620651 - RNA, 24 nt, Artificial Sequence
  Synthetic
accgugcauagaaaaaauagcaau

SEQ ID NO: 620652 - RNA, 18 nt, Artificial Sequence
  Synthetic
auaacagaaaguagcaau

SEQ ID NO: 620653 - RNA, 19 nt, Artificial Sequence
  Synthetic
gauaacagaaaguagcaau

SEQ ID NO: 620654 - RNA, 20 nt, Artificial Sequence
  Synthetic
ugauaacagaaaguagcaau

SEQ ID NO: 620655 - RNA, 21 nt, Artificial Sequence
  Synthetic
cugauaacagaaaguagcaau

SEQ ID NO: 620656 - RNA, 22 nt, Artificial Sequence
  Synthetic
ucugauaacagaaaguagcaau

SEQ ID NO: 620657 - RNA, 23 nt, Artificial Sequence
  Synthetic
uucugauaacagaaaguagcaau

SEQ ID NO: 620658 - RNA, 24 nt, Artificial Sequence
  Synthetic
auucugauaacagaaaguagcaau

SEQ ID NO: 620659 - RNA, 18 nt, Artificial Sequence
  Synthetic
uaaugccugaguagcaau

SEQ ID NO: 620660 - RNA, 19 nt, Artificial Sequence
  Synthetic
uuaaugccugaguagcaau

SEQ ID NO: 620661 - RNA, 20 nt, Artificial Sequence
  Synthetic
uuuaaugccugaguagcaau

SEQ ID NO: 620662 - RNA, 21 nt, Artificial Sequence
  Synthetic
uuuuaaugccugaguagcaau

SEQ ID NO: 620663 - RNA, 22 nt, Artificial Sequence
  Synthetic
auuuuaaugccugaguagcaau

SEQ ID NO: 620664 - RNA, 23 nt, Artificial Sequence
  Synthetic
cauuuuaaugccugaguagcaau

SEQ ID NO: 620665 - RNA, 24 nt, Artificial Sequence
  Synthetic
acauuuuaaugccugaguagcaau

SEQ ID NO: 620666 - RNA, 18 nt, Artificial Sequence
  Synthetic
gcuauagacuugcgcaau

SEQ ID NO: 620667 - RNA, 19 nt, Artificial Sequence
  Synthetic
ugcuauagacuugcgcaau

SEQ ID NO: 620668 - RNA, 20 nt, Artificial Sequence
  Synthetic
gugcuauagacuugcgcaau

SEQ ID NO: 620669 - RNA, 21 nt, Artificial Sequence
  Synthetic
agugcuauagacuugcgcaau

SEQ ID NO: 620670 - RNA, 22 nt, Artificial Sequence
  Synthetic
cagugcuauagacuugcgcaau

SEQ ID NO: 620671 - RNA, 23 nt, Artificial Sequence
  Synthetic
acagugcuauagacuugcgcaau

SEQ ID NO: 620672 - RNA, 24 nt, Artificial Sequence
  Synthetic
gacagugcuauagacuugcgcaau

SEQ ID NO: 620673 - RNA, 18 nt, Artificial Sequence
  Synthetic
cauaaaugaaaaggcaau

SEQ ID NO: 620674 - RNA, 19 nt, Artificial Sequence
  Synthetic
ucauaaaugaaaaggcaau

SEQ ID NO: 620675 - RNA, 20 nt, Artificial Sequence
  Synthetic
gucauaaaugaaaaggcaau

SEQ ID NO: 620676 - RNA, 21 nt, Artificial Sequence
  Synthetic
ggucauaaaugaaaaggcaau

SEQ ID NO: 620677 - RNA, 22 nt, Artificial Sequence
  Synthetic
gggucauaaaugaaaaggcaau

SEQ ID NO: 620678 - RNA, 23 nt, Artificial Sequence
  Synthetic
ugggucauaaaugaaaaggcaau

SEQ ID NO: 620679 - RNA, 24 nt, Artificial Sequence
  Synthetic
augggucauaaaugaaaaggcaau

SEQ ID NO: 620680 - RNA, 18 nt, Artificial Sequence
  Synthetic
aaauucaugaaaggcaau

SEQ ID NO: 620681 - RNA, 19 nt, Artificial Sequence
  Synthetic
aaaauucaugaaaggcaau

SEQ ID NO: 620682 - RNA, 20 nt, Artificial Sequence
  Synthetic
gaaaauucaugaaaggcaau

SEQ ID NO: 620683 - RNA, 21 nt, Artificial Sequence
  Synthetic
ugaaaauucaugaaaggcaau

SEQ ID NO: 620684 - RNA, 22 nt, Artificial Sequence
  Synthetic
cugaaaauucaugaaaggcaau

SEQ ID NO: 620685 - RNA, 23 nt, Artificial Sequence
  Synthetic
gcugaaaauucaugaaaggcaau

SEQ ID NO: 620686 - RNA, 24 nt, Artificial Sequence
  Synthetic
agcugaaaauucaugaaaggcaau

SEQ ID NO: 620687 - RNA, 18 nt, Artificial Sequence
  Synthetic
guuaaucaccaaggcaau

SEQ ID NO: 620688 - RNA, 19 nt, Artificial Sequence
  Synthetic
uguuaaucaccaaggcaau

SEQ ID NO: 620689 - RNA, 20 nt, Artificial Sequence
  Synthetic
auguuaaucaccaaggcaau

SEQ ID NO: 620690 - RNA, 21 nt, Artificial Sequence
  Synthetic
aauguuaaucaccaaggcaau

SEQ ID NO: 620691 - RNA, 22 nt, Artificial Sequence
  Synthetic
aaauguuaaucaccaaggcaau

SEQ ID NO: 620692 - RNA, 23 nt, Artificial Sequence
  Synthetic
caaauguuaaucaccaaggcaau

SEQ ID NO: 620693 - RNA, 24 nt, Artificial Sequence
  Synthetic
ccaaauguuaaucaccaaggcaau

SEQ ID NO: 620694 - RNA, 18 nt, Artificial Sequence
  Synthetic
uacaggggagaaggcaau

SEQ ID NO: 620695 - RNA, 19 nt, Artificial Sequence
  Synthetic
cuacaggggagaaggcaau

SEQ ID NO: 620696 - RNA, 20 nt, Artificial Sequence
  Synthetic
ucuacaggggagaaggcaau

SEQ ID NO: 620697 - RNA, 21 nt, Artificial Sequence
  Synthetic
gucuacaggggagaaggcaau

SEQ ID NO: 620698 - RNA, 22 nt, Artificial Sequence
  Synthetic
agucuacaggggagaaggcaau

SEQ ID NO: 620699 - RNA, 23 nt, Artificial Sequence
  Synthetic
gagucuacaggggagaaggcaau

SEQ ID NO: 620700 - RNA, 24 nt, Artificial Sequence
  Synthetic
agagucuacaggggagaaggcaau

SEQ ID NO: 620701 - RNA, 18 nt, Artificial Sequence
  Synthetic
guuaaaguaucaggcaau

SEQ ID NO: 620702 - RNA, 19 nt, Artificial Sequence
  Synthetic
uguuaaaguaucaggcaau

SEQ ID NO: 620703 - RNA, 20 nt, Artificial Sequence
  Synthetic
uuguuaaaguaucaggcaau

SEQ ID NO: 620704 - RNA, 21 nt, Artificial Sequence
  Synthetic
auuguuaaaguaucaggcaau

SEQ ID NO: 620705 - RNA, 22 nt, Artificial Sequence
  Synthetic
uauuguuaaaguaucaggcaau

SEQ ID NO: 620706 - RNA, 23 nt, Artificial Sequence
  Synthetic
auauuguuaaaguaucaggcaau

SEQ ID NO: 620707 - RNA, 24 nt, Artificial Sequence
  Synthetic
cauauuguuaaaguaucaggcaau

SEQ ID NO: 620708 - RNA, 18 nt, Artificial Sequence
  Synthetic
acacagaaaauaggcaau

SEQ ID NO: 620709 - RNA, 19 nt, Artificial Sequence
  Synthetic
gacacagaaaauaggcaau

SEQ ID NO: 620710 - RNA, 20 nt, Artificial Sequence
  Synthetic
agacacagaaaauaggcaau

SEQ ID NO: 620711 - RNA, 21 nt, Artificial Sequence
  Synthetic
aagacacagaaaauaggcaau

SEQ ID NO: 620712 - RNA, 22 nt, Artificial Sequence
  Synthetic
caagacacagaaaauaggcaau

SEQ ID NO: 620713 - RNA, 23 nt, Artificial Sequence
  Synthetic
gcaagacacagaaaauaggcaau

SEQ ID NO: 620714 - RNA, 24 nt, Artificial Sequence
  Synthetic
ugcaagacacagaaaauaggcaau

SEQ ID NO: 620715 - RNA, 18 nt, Artificial Sequence
  Synthetic
uugggcuucuuaggcaau

SEQ ID NO: 620716 - RNA, 19 nt, Artificial Sequence
  Synthetic
guugggcuucuuaggcaau

SEQ ID NO: 620717 - RNA, 20 nt, Artificial Sequence
  Synthetic
uguugggcuucuuaggcaau

SEQ ID NO: 620718 - RNA, 21 nt, Artificial Sequence
  Synthetic
uuguugggcuucuuaggcaau

SEQ ID NO: 620719 - RNA, 22 nt, Artificial Sequence
  Synthetic
uuuguugggcuucuuaggcaau

SEQ ID NO: 620720 - RNA, 23 nt, Artificial Sequence
  Synthetic
cuuuguugggcuucuuaggcaau

SEQ ID NO: 620721 - RNA, 24 nt, Artificial Sequence
  Synthetic
gcuuuguugggcuucuuaggcaau

SEQ ID NO: 620722 - RNA, 18 nt, Artificial Sequence
  Synthetic
ggcucuauuuuaggcaau

SEQ ID NO: 620723 - RNA, 19 nt, Artificial Sequence
  Synthetic
gggcucuauuuuaggcaau

SEQ ID NO: 620724 - RNA, 20 nt, Artificial Sequence
  Synthetic
ugggcucuauuuuaggcaau

SEQ ID NO: 620725 - RNA, 21 nt, Artificial Sequence
  Synthetic
gugggcucuauuuuaggcaau

SEQ ID NO: 620726 - RNA, 22 nt, Artificial Sequence
  Synthetic
agugggcucuauuuuaggcaau

SEQ ID NO: 620727 - RNA, 23 nt, Artificial Sequence
  Synthetic
cagugggcucuauuuuaggcaau

SEQ ID NO: 620728 - RNA, 24 nt, Artificial Sequence
  Synthetic
acagugggcucuauuuuaggcaau

SEQ ID NO: 620729 - RNA, 18 nt, Artificial Sequence
  Synthetic
guagauuucuagggcaau

SEQ ID NO: 620730 - RNA, 19 nt, Artificial Sequence
  Synthetic
aguagauuucuagggcaau

SEQ ID NO: 620731 - RNA, 20 nt, Artificial Sequence
  Synthetic
gaguagauuucuagggcaau

SEQ ID NO: 620732 - RNA, 21 nt, Artificial Sequence
  Synthetic
ugaguagauuucuagggcaau

SEQ ID NO: 620733 - RNA, 22 nt, Artificial Sequence
  Synthetic
augaguagauuucuagggcaau

SEQ ID NO: 620734 - RNA, 23 nt, Artificial Sequence
  Synthetic
uaugaguagauuucuagggcaau

SEQ ID NO: 620735 - RNA, 24 nt, Artificial Sequence
  Synthetic
auaugaguagauuucuagggcaau

SEQ ID NO: 620736 - RNA, 18 nt, Artificial Sequence
  Synthetic
uugagccaucugggcaau

SEQ ID NO: 620737 - RNA, 19 nt, Artificial Sequence
  Synthetic
uuugagccaucugggcaau

SEQ ID NO: 620738 - RNA, 20 nt, Artificial Sequence
  Synthetic
uuuugagccaucugggcaau

SEQ ID NO: 620739 - RNA, 21 nt, Artificial Sequence
  Synthetic
auuuugagccaucugggcaau

SEQ ID NO: 620740 - RNA, 22 nt, Artificial Sequence
  Synthetic
aauuuugagccaucugggcaau

SEQ ID NO: 620741 - RNA, 23 nt, Artificial Sequence
  Synthetic
gaauuuugagccaucugggcaau

SEQ ID NO: 620742 - RNA, 24 nt, Artificial Sequence
  Synthetic
cgaauuuugagccaucugggcaau

SEQ ID NO: 620743 - RNA, 18 nt, Artificial Sequence
  Synthetic
aaggucuaaacuggcaau

SEQ ID NO: 620744 - RNA, 19 nt, Artificial Sequence
  Synthetic
caaggucuaaacuggcaau

SEQ ID NO: 620745 - RNA, 20 nt, Artificial Sequence
  Synthetic
ucaaggucuaaacuggcaau

SEQ ID NO: 620746 - RNA, 21 nt, Artificial Sequence
  Synthetic
gucaaggucuaaacuggcaau

SEQ ID NO: 620747 - RNA, 22 nt, Artificial Sequence
  Synthetic
agucaaggucuaaacuggcaau

SEQ ID NO: 620748 - RNA, 23 nt, Artificial Sequence
  Synthetic
gagucaaggucuaaacuggcaau

SEQ ID NO: 620749 - RNA, 24 nt, Artificial Sequence
  Synthetic
agagucaaggucuaaacuggcaau

SEQ ID NO: 620750 - RNA, 18 nt, Artificial Sequence
  Synthetic
ucccugaucucuggcaau

SEQ ID NO: 620751 - RNA, 19 nt, Artificial Sequence
  Synthetic
uucccugaucucuggcaau

SEQ ID NO: 620752 - RNA, 20 nt, Artificial Sequence
  Synthetic
uuucccugaucucuggcaau

SEQ ID NO: 620753 - RNA, 21 nt, Artificial Sequence
  Synthetic
uuuucccugaucucuggcaau

SEQ ID NO: 620754 - RNA, 22 nt, Artificial Sequence
  Synthetic
auuuucccugaucucuggcaau

SEQ ID NO: 620755 - RNA, 23 nt, Artificial Sequence
  Synthetic
uauuuucccugaucucuggcaau

SEQ ID NO: 620756 - RNA, 24 nt, Artificial Sequence
  Synthetic
uuauuuucccugaucucuggcaau

SEQ ID NO: 620757 - RNA, 18 nt, Artificial Sequence
  Synthetic
gagaagggugguggcaau

SEQ ID NO: 620758 - RNA, 19 nt, Artificial Sequence
  Synthetic
ggagaagggugguggcaau

SEQ ID NO: 620759 - RNA, 20 nt, Artificial Sequence
  Synthetic
uggagaagggugguggcaau

SEQ ID NO: 620760 - RNA, 21 nt, Artificial Sequence
  Synthetic
cuggagaagggugguggcaau

SEQ ID NO: 620761 - RNA, 22 nt, Artificial Sequence
  Synthetic
acuggagaagggugguggcaau

SEQ ID NO: 620762 - RNA, 23 nt, Artificial Sequence
  Synthetic
gacuggagaagggugguggcaau

SEQ ID NO: 620763 - RNA, 24 nt, Artificial Sequence
  Synthetic
ugacuggagaagggugguggcaau

SEQ ID NO: 620764 - RNA, 18 nt, Artificial Sequence
  Synthetic
ugaaaaagucaaugcaau

SEQ ID NO: 620765 - RNA, 19 nt, Artificial Sequence
  Synthetic
augaaaaagucaaugcaau

SEQ ID NO: 620766 - RNA, 20 nt, Artificial Sequence
  Synthetic
caugaaaaagucaaugcaau

SEQ ID NO: 620767 - RNA, 21 nt, Artificial Sequence
  Synthetic
ucaugaaaaagucaaugcaau

SEQ ID NO: 620768 - RNA, 22 nt, Artificial Sequence
  Synthetic
aucaugaaaaagucaaugcaau

SEQ ID NO: 620769 - RNA, 23 nt, Artificial Sequence
  Synthetic
uaucaugaaaaagucaaugcaau

SEQ ID NO: 620770 - RNA, 24 nt, Artificial Sequence
  Synthetic
cuaucaugaaaaagucaaugcaau

SEQ ID NO: 620771 - RNA, 18 nt, Artificial Sequence
  Synthetic
uugauacacgcaugcaau

SEQ ID NO: 620772 - RNA, 19 nt, Artificial Sequence
  Synthetic
uuugauacacgcaugcaau

SEQ ID NO: 620773 - RNA, 20 nt, Artificial Sequence
  Synthetic
uuuugauacacgcaugcaau

SEQ ID NO: 620774 - RNA, 21 nt, Artificial Sequence
  Synthetic
auuuugauacacgcaugcaau

SEQ ID NO: 620775 - RNA, 22 nt, Artificial Sequence
  Synthetic
uauuuugauacacgcaugcaau

SEQ ID NO: 620776 - RNA, 23 nt, Artificial Sequence
  Synthetic
auauuuugauacacgcaugcaau

SEQ ID NO: 620777 - RNA, 24 nt, Artificial Sequence
  Synthetic
gauauuuugauacacgcaugcaau

SEQ ID NO: 620778 - RNA, 18 nt, Artificial Sequence
  Synthetic
caacaacauggaugcaau

SEQ ID NO: 620779 - RNA, 19 nt, Artificial Sequence
  Synthetic
gcaacaacauggaugcaau

SEQ ID NO: 620780 - RNA, 20 nt, Artificial Sequence
  Synthetic
ugcaacaacauggaugcaau

SEQ ID NO: 620781 - RNA, 21 nt, Artificial Sequence
  Synthetic
gugcaacaacauggaugcaau

SEQ ID NO: 620782 - RNA, 22 nt, Artificial Sequence
  Synthetic
ugugcaacaacauggaugcaau

SEQ ID NO: 620783 - RNA, 23 nt, Artificial Sequence
  Synthetic
cugugcaacaacauggaugcaau

SEQ ID NO: 620784 - RNA, 24 nt, Artificial Sequence
  Synthetic
ccugugcaacaacauggaugcaau

SEQ ID NO: 620785 - RNA, 18 nt, Artificial Sequence
  Synthetic
uaaaauuaaauaugcaau

SEQ ID NO: 620786 - RNA, 19 nt, Artificial Sequence
  Synthetic
auaaaauuaaauaugcaau

SEQ ID NO: 620787 - RNA, 20 nt, Artificial Sequence
  Synthetic
uauaaaauuaaauaugcaau

SEQ ID NO: 620788 - RNA, 21 nt, Artificial Sequence
  Synthetic
cuauaaaauuaaauaugcaau

SEQ ID NO: 620789 - RNA, 22 nt, Artificial Sequence
  Synthetic
acuauaaaauuaaauaugcaau

SEQ ID NO: 620790 - RNA, 23 nt, Artificial Sequence
  Synthetic
cacuauaaaauuaaauaugcaau

SEQ ID NO: 620791 - RNA, 24 nt, Artificial Sequence
  Synthetic
ccacuauaaaauuaaauaugcaau

SEQ ID NO: 620792 - RNA, 18 nt, Artificial Sequence
  Synthetic
uuugucuucagcugcaau

SEQ ID NO: 620793 - RNA, 19 nt, Artificial Sequence
  Synthetic
guuugucuucagcugcaau

SEQ ID NO: 620794 - RNA, 20 nt, Artificial Sequence
  Synthetic
aguuugucuucagcugcaau

SEQ ID NO: 620795 - RNA, 21 nt, Artificial Sequence
  Synthetic
caguuugucuucagcugcaau

SEQ ID NO: 620796 - RNA, 22 nt, Artificial Sequence
  Synthetic
ccaguuugucuucagcugcaau

SEQ ID NO: 620797 - RNA, 23 nt, Artificial Sequence
  Synthetic
cccaguuugucuucagcugcaau

SEQ ID NO: 620798 - RNA, 24 nt, Artificial Sequence
  Synthetic
ccccaguuugucuucagcugcaau

SEQ ID NO: 620799 - RNA, 18 nt, Artificial Sequence
  Synthetic
guaaacuuugucugcaau

SEQ ID NO: 620800 - RNA, 19 nt, Artificial Sequence
  Synthetic
gguaaacuuugucugcaau

SEQ ID NO: 620801 - RNA, 20 nt, Artificial Sequence
  Synthetic
agguaaacuuugucugcaau

SEQ ID NO: 620802 - RNA, 21 nt, Artificial Sequence
  Synthetic
cagguaaacuuugucugcaau

SEQ ID NO: 620803 - RNA, 22 nt, Artificial Sequence
  Synthetic
ucagguaaacuuugucugcaau

SEQ ID NO: 620804 - RNA, 23 nt, Artificial Sequence
  Synthetic
uucagguaaacuuugucugcaau

SEQ ID NO: 620805 - RNA, 24 nt, Artificial Sequence
  Synthetic
auucagguaaacuuugucugcaau

SEQ ID NO: 620806 - RNA, 18 nt, Artificial Sequence
  Synthetic
aaaaggaaauucugcaau

SEQ ID NO: 620807 - RNA, 19 nt, Artificial Sequence
  Synthetic
uaaaaggaaauucugcaau

SEQ ID NO: 620808 - RNA, 20 nt, Artificial Sequence
  Synthetic
auaaaaggaaauucugcaau

SEQ ID NO: 620809 - RNA, 21 nt, Artificial Sequence
  Synthetic
uauaaaaggaaauucugcaau

SEQ ID NO: 620810 - RNA, 22 nt, Artificial Sequence
  Synthetic
uuauaaaaggaaauucugcaau

SEQ ID NO: 620811 - RNA, 23 nt, Artificial Sequence
  Synthetic
uuuauaaaaggaaauucugcaau

SEQ ID NO: 620812 - RNA, 24 nt, Artificial Sequence
  Synthetic
cuuuauaaaaggaaauucugcaau

SEQ ID NO: 620813 - RNA, 18 nt, Artificial Sequence
  Synthetic
uugaaacuccagugcaau

SEQ ID NO: 620814 - RNA, 19 nt, Artificial Sequence
  Synthetic
uuugaaacuccagugcaau

SEQ ID NO: 620815 - RNA, 20 nt, Artificial Sequence
  Synthetic
auuugaaacuccagugcaau

SEQ ID NO: 620816 - RNA, 21 nt, Artificial Sequence
  Synthetic
gauuugaaacuccagugcaau

SEQ ID NO: 620817 - RNA, 22 nt, Artificial Sequence
  Synthetic
ugauuugaaacuccagugcaau

SEQ ID NO: 620818 - RNA, 23 nt, Artificial Sequence
  Synthetic
gugauuugaaacuccagugcaau

SEQ ID NO: 620819 - RNA, 24 nt, Artificial Sequence
  Synthetic
agugauuugaaacuccagugcaau

SEQ ID NO: 620820 - RNA, 18 nt, Artificial Sequence
  Synthetic
gcaguggcgcagugcaau

SEQ ID NO: 620821 - RNA, 19 nt, Artificial Sequence
  Synthetic
ugcaguggcgcagugcaau

SEQ ID NO: 620822 - RNA, 20 nt, Artificial Sequence
  Synthetic
gugcaguggcgcagugcaau

SEQ ID NO: 620823 - RNA, 21 nt, Artificial Sequence
  Synthetic
agugcaguggcgcagugcaau

SEQ ID NO: 620824 - RNA, 22 nt, Artificial Sequence
  Synthetic
aagugcaguggcgcagugcaau

SEQ ID NO: 620825 - RNA, 23 nt, Artificial Sequence
  Synthetic
gaagugcaguggcgcagugcaau

SEQ ID NO: 620826 - RNA, 24 nt, Artificial Sequence
  Synthetic
ugaagugcaguggcgcagugcaau

SEQ ID NO: 620827 - RNA, 18 nt, Artificial Sequence
  Synthetic
acaguucuugggugcaau

SEQ ID NO: 620828 - RNA, 19 nt, Artificial Sequence
  Synthetic
gacaguucuugggugcaau

SEQ ID NO: 620829 - RNA, 20 nt, Artificial Sequence
  Synthetic
ggacaguucuugggugcaau

SEQ ID NO: 620830 - RNA, 21 nt, Artificial Sequence
  Synthetic
aggacaguucuugggugcaau

SEQ ID NO: 620831 - RNA, 22 nt, Artificial Sequence
  Synthetic
aaggacaguucuugggugcaau

SEQ ID NO: 620832 - RNA, 23 nt, Artificial Sequence
  Synthetic
aaaggacaguucuugggugcaau

SEQ ID NO: 620833 - RNA, 24 nt, Artificial Sequence
  Synthetic
caaaggacaguucuugggugcaau

SEQ ID NO: 620834 - RNA, 18 nt, Artificial Sequence
  Synthetic
auaucaguuguuugcaau

SEQ ID NO: 620835 - RNA, 19 nt, Artificial Sequence
  Synthetic
aauaucaguuguuugcaau

SEQ ID NO: 620836 - RNA, 20 nt, Artificial Sequence
  Synthetic
gaauaucaguuguuugcaau

SEQ ID NO: 620837 - RNA, 21 nt, Artificial Sequence
  Synthetic
ugaauaucaguuguuugcaau

SEQ ID NO: 620838 - RNA, 22 nt, Artificial Sequence
  Synthetic
augaauaucaguuguuugcaau

SEQ ID NO: 620839 - RNA, 23 nt, Artificial Sequence
  Synthetic
uaugaauaucaguuguuugcaau

SEQ ID NO: 620840 - RNA, 24 nt, Artificial Sequence
  Synthetic
auaugaauaucaguuguuugcaau

SEQ ID NO: 620841 - RNA, 18 nt, Artificial Sequence
  Synthetic
uuagcuuccaaaaucaau

SEQ ID NO: 620842 - RNA, 19 nt, Artificial Sequence
  Synthetic
auuagcuuccaaaaucaau

SEQ ID NO: 620843 - RNA, 20 nt, Artificial Sequence
  Synthetic
aauuagcuuccaaaaucaau

SEQ ID NO: 620844 - RNA, 21 nt, Artificial Sequence
  Synthetic
aaauuagcuuccaaaaucaau

SEQ ID NO: 620845 - RNA, 22 nt, Artificial Sequence
  Synthetic
caaauuagcuuccaaaaucaau

SEQ ID NO: 620846 - RNA, 23 nt, Artificial Sequence
  Synthetic
acaaauuagcuuccaaaaucaau

SEQ ID NO: 620847 - RNA, 24 nt, Artificial Sequence
  Synthetic
uacaaauuagcuuccaaaaucaau

SEQ ID NO: 620848 - RNA, 18 nt, Artificial Sequence
  Synthetic
uuugagaaugcaaucaau

SEQ ID NO: 620849 - RNA, 19 nt, Artificial Sequence
  Synthetic
auuugagaaugcaaucaau

SEQ ID NO: 620850 - RNA, 20 nt, Artificial Sequence
  Synthetic
aauuugagaaugcaaucaau

SEQ ID NO: 620851 - RNA, 21 nt, Artificial Sequence
  Synthetic
aaauuugagaaugcaaucaau

SEQ ID NO: 620852 - RNA, 22 nt, Artificial Sequence
  Synthetic
uaaauuugagaaugcaaucaau

SEQ ID NO: 620853 - RNA, 23 nt, Artificial Sequence
  Synthetic
cuaaauuugagaaugcaaucaau

SEQ ID NO: 620854 - RNA, 24 nt, Artificial Sequence
  Synthetic
gcuaaauuugagaaugcaaucaau

SEQ ID NO: 620855 - RNA, 18 nt, Artificial Sequence
  Synthetic
cauuauaacaacaucaau

SEQ ID NO: 620856 - RNA, 19 nt, Artificial Sequence
  Synthetic
ucauuauaacaacaucaau

SEQ ID NO: 620857 - RNA, 20 nt, Artificial Sequence
  Synthetic
uucauuauaacaacaucaau

SEQ ID NO: 620858 - RNA, 21 nt, Artificial Sequence
  Synthetic
auucauuauaacaacaucaau

SEQ ID NO: 620859 - RNA, 22 nt, Artificial Sequence
  Synthetic
uauucauuauaacaacaucaau

SEQ ID NO: 620860 - RNA, 23 nt, Artificial Sequence
  Synthetic
guauucauuauaacaacaucaau

SEQ ID NO: 620861 - RNA, 24 nt, Artificial Sequence
  Synthetic
uguauucauuauaacaacaucaau

SEQ ID NO: 620862 - RNA, 18 nt, Artificial Sequence
  Synthetic
uaaauuuguaccaucaau

SEQ ID NO: 620863 - RNA, 19 nt, Artificial Sequence
  Synthetic
uuaaauuuguaccaucaau

SEQ ID NO: 620864 - RNA, 20 nt, Artificial Sequence
  Synthetic
uuuaaauuuguaccaucaau

SEQ ID NO: 620865 - RNA, 21 nt, Artificial Sequence
  Synthetic
uuuuaaauuuguaccaucaau

SEQ ID NO: 620866 - RNA, 22 nt, Artificial Sequence
  Synthetic
uuuuuaaauuuguaccaucaau

SEQ ID NO: 620867 - RNA, 23 nt, Artificial Sequence
  Synthetic
cuuuuuaaauuuguaccaucaau

SEQ ID NO: 620868 - RNA, 24 nt, Artificial Sequence
  Synthetic
ucuuuuuaaauuuguaccaucaau

SEQ ID NO: 620869 - RNA, 18 nt, Artificial Sequence
  Synthetic
uuaaccuucagcaucaau

SEQ ID NO: 620870 - RNA, 19 nt, Artificial Sequence
  Synthetic
auuaaccuucagcaucaau

SEQ ID NO: 620871 - RNA, 20 nt, Artificial Sequence
  Synthetic
aauuaaccuucagcaucaau

SEQ ID NO: 620872 - RNA, 21 nt, Artificial Sequence
  Synthetic
uaauuaaccuucagcaucaau

SEQ ID NO: 620873 - RNA, 22 nt, Artificial Sequence
  Synthetic
auaauuaaccuucagcaucaau

SEQ ID NO: 620874 - RNA, 23 nt, Artificial Sequence
  Synthetic
uauaauuaaccuucagcaucaau

SEQ ID NO: 620875 - RNA, 24 nt, Artificial Sequence
  Synthetic
uuauaauuaaccuucagcaucaau

SEQ ID NO: 620876 - RNA, 18 nt, Artificial Sequence
  Synthetic
aucaugcaagucaucaau

SEQ ID NO: 620877 - RNA, 19 nt, Artificial Sequence
  Synthetic
uaucaugcaagucaucaau

SEQ ID NO: 620878 - RNA, 20 nt, Artificial Sequence
  Synthetic
uuaucaugcaagucaucaau

SEQ ID NO: 620879 - RNA, 21 nt, Artificial Sequence
  Synthetic
auuaucaugcaagucaucaau

SEQ ID NO: 620880 - RNA, 22 nt, Artificial Sequence
  Synthetic
uauuaucaugcaagucaucaau

SEQ ID NO: 620881 - RNA, 23 nt, Artificial Sequence
  Synthetic
auauuaucaugcaagucaucaau

SEQ ID NO: 620882 - RNA, 24 nt, Artificial Sequence
  Synthetic
uauauuaucaugcaagucaucaau

SEQ ID NO: 620883 - RNA, 18 nt, Artificial Sequence
  Synthetic
aagaaaccuuucaucaau

SEQ ID NO: 620884 - RNA, 19 nt, Artificial Sequence
  Synthetic
uaagaaaccuuucaucaau

SEQ ID NO: 620885 - RNA, 20 nt, Artificial Sequence
  Synthetic
auaagaaaccuuucaucaau

SEQ ID NO: 620886 - RNA, 21 nt, Artificial Sequence
  Synthetic
aauaagaaaccuuucaucaau

SEQ ID NO: 620887 - RNA, 22 nt, Artificial Sequence
  Synthetic
aaauaagaaaccuuucaucaau

SEQ ID NO: 620888 - RNA, 23 nt, Artificial Sequence
  Synthetic
caaauaagaaaccuuucaucaau

SEQ ID NO: 620889 - RNA, 24 nt, Artificial Sequence
  Synthetic
ucaaauaagaaaccuuucaucaau

SEQ ID NO: 620890 - RNA, 18 nt, Artificial Sequence
  Synthetic
uagagucuguagaucaau

SEQ ID NO: 620891 - RNA, 19 nt, Artificial Sequence
  Synthetic
auagagucuguagaucaau

SEQ ID NO: 620892 - RNA, 20 nt, Artificial Sequence
  Synthetic
cauagagucuguagaucaau

SEQ ID NO: 620893 - RNA, 21 nt, Artificial Sequence
  Synthetic
ccauagagucuguagaucaau

SEQ ID NO: 620894 - RNA, 22 nt, Artificial Sequence
  Synthetic
uccauagagucuguagaucaau

SEQ ID NO: 620895 - RNA, 23 nt, Artificial Sequence
  Synthetic
uuccauagagucuguagaucaau

SEQ ID NO: 620896 - RNA, 24 nt, Artificial Sequence
  Synthetic
auuccauagagucuguagaucaau

SEQ ID NO: 620897 - RNA, 18 nt, Artificial Sequence
  Synthetic
gacgauuauuagaucaau

SEQ ID NO: 620898 - RNA, 19 nt, Artificial Sequence
  Synthetic
agacgauuauuagaucaau

SEQ ID NO: 620899 - RNA, 20 nt, Artificial Sequence
  Synthetic
gagacgauuauuagaucaau

SEQ ID NO: 620900 - RNA, 21 nt, Artificial Sequence
  Synthetic
agagacgauuauuagaucaau

SEQ ID NO: 620901 - RNA, 22 nt, Artificial Sequence
  Synthetic
gagagacgauuauuagaucaau

SEQ ID NO: 620902 - RNA, 23 nt, Artificial Sequence
  Synthetic
ugagagacgauuauuagaucaau

SEQ ID NO: 620903 - RNA, 24 nt, Artificial Sequence
  Synthetic
augagagacgauuauuagaucaau

SEQ ID NO: 620904 - RNA, 18 nt, Artificial Sequence
  Synthetic
ugacagauuacuaucaau

SEQ ID NO: 620905 - RNA, 19 nt, Artificial Sequence
  Synthetic
augacagauuacuaucaau

SEQ ID NO: 620906 - RNA, 20 nt, Artificial Sequence
  Synthetic
aaugacagauuacuaucaau

SEQ ID NO: 620907 - RNA, 21 nt, Artificial Sequence
  Synthetic
aaaugacagauuacuaucaau

SEQ ID NO: 620908 - RNA, 22 nt, Artificial Sequence
  Synthetic
uaaaugacagauuacuaucaau

SEQ ID NO: 620909 - RNA, 23 nt, Artificial Sequence
  Synthetic
cuaaaugacagauuacuaucaau

SEQ ID NO: 620910 - RNA, 24 nt, Artificial Sequence
  Synthetic
ccuaaaugacagauuacuaucaau

SEQ ID NO: 620911 - RNA, 18 nt, Artificial Sequence
  Synthetic
gguuuuuauaguaucaau

SEQ ID NO: 620912 - RNA, 19 nt, Artificial Sequence
  Synthetic
ggguuuuuauaguaucaau

SEQ ID NO: 620913 - RNA, 20 nt, Artificial Sequence
  Synthetic
gggguuuuuauaguaucaau

SEQ ID NO: 620914 - RNA, 21 nt, Artificial Sequence
  Synthetic
ugggguuuuuauaguaucaau

SEQ ID NO: 620915 - RNA, 22 nt, Artificial Sequence
  Synthetic
augggguuuuuauaguaucaau

SEQ ID NO: 620916 - RNA, 23 nt, Artificial Sequence
  Synthetic
gaugggguuuuuauaguaucaau

SEQ ID NO: 620917 - RNA, 24 nt, Artificial Sequence
  Synthetic
ggaugggguuuuuauaguaucaau

SEQ ID NO: 620918 - RNA, 18 nt, Artificial Sequence
  Synthetic
ucuagagguauuaucaau

SEQ ID NO: 620919 - RNA, 19 nt, Artificial Sequence
  Synthetic
cucuagagguauuaucaau

SEQ ID NO: 620920 - RNA, 20 nt, Artificial Sequence
  Synthetic
ucucuagagguauuaucaau

SEQ ID NO: 620921 - RNA, 21 nt, Artificial Sequence
  Synthetic
cucucuagagguauuaucaau

SEQ ID NO: 620922 - RNA, 22 nt, Artificial Sequence
  Synthetic
ucucucuagagguauuaucaau

SEQ ID NO: 620923 - RNA, 23 nt, Artificial Sequence
  Synthetic
uucucucuagagguauuaucaau

SEQ ID NO: 620924 - RNA, 24 nt, Artificial Sequence
  Synthetic
cuucucucuagagguauuaucaau

SEQ ID NO: 620925 - RNA, 18 nt, Artificial Sequence
  Synthetic
uaugauuucuuccucaau

SEQ ID NO: 620926 - RNA, 19 nt, Artificial Sequence
  Synthetic
auaugauuucuuccucaau

SEQ ID NO: 620927 - RNA, 20 nt, Artificial Sequence
  Synthetic
uauaugauuucuuccucaau

SEQ ID NO: 620928 - RNA, 21 nt, Artificial Sequence
  Synthetic
auauaugauuucuuccucaau

SEQ ID NO: 620929 - RNA, 22 nt, Artificial Sequence
  Synthetic
cauauaugauuucuuccucaau

SEQ ID NO: 620930 - RNA, 23 nt, Artificial Sequence
  Synthetic
acauauaugauuucuuccucaau

SEQ ID NO: 620931 - RNA, 24 nt, Artificial Sequence
  Synthetic
cacauauaugauuucuuccucaau

SEQ ID NO: 620932 - RNA, 18 nt, Artificial Sequence
  Synthetic
gaaagguuagagcucaau

SEQ ID NO: 620933 - RNA, 19 nt, Artificial Sequence
  Synthetic
ugaaagguuagagcucaau

SEQ ID NO: 620934 - RNA, 20 nt, Artificial Sequence
  Synthetic
cugaaagguuagagcucaau

SEQ ID NO: 620935 - RNA, 21 nt, Artificial Sequence
  Synthetic
ucugaaagguuagagcucaau

SEQ ID NO: 620936 - RNA, 22 nt, Artificial Sequence
  Synthetic
uucugaaagguuagagcucaau

SEQ ID NO: 620937 - RNA, 23 nt, Artificial Sequence
  Synthetic
uuucugaaagguuagagcucaau

SEQ ID NO: 620938 - RNA, 24 nt, Artificial Sequence
  Synthetic
uuuucugaaagguuagagcucaau

SEQ ID NO: 620939 - RNA, 18 nt, Artificial Sequence
  Synthetic
gccucauaaugucucaau

SEQ ID NO: 620940 - RNA, 19 nt, Artificial Sequence
  Synthetic
agccucauaaugucucaau

SEQ ID NO: 620941 - RNA, 20 nt, Artificial Sequence
  Synthetic
gagccucauaaugucucaau

SEQ ID NO: 620942 - RNA, 21 nt, Artificial Sequence
  Synthetic
agagccucauaaugucucaau

SEQ ID NO: 620943 - RNA, 22 nt, Artificial Sequence
  Synthetic
cagagccucauaaugucucaau

SEQ ID NO: 620944 - RNA, 23 nt, Artificial Sequence
  Synthetic
gcagagccucauaaugucucaau

SEQ ID NO: 620945 - RNA, 24 nt, Artificial Sequence
  Synthetic
cgcagagccucauaaugucucaau

SEQ ID NO: 620946 - RNA, 18 nt, Artificial Sequence
  Synthetic
aaaggauagugucucaau

SEQ ID NO: 620947 - RNA, 19 nt, Artificial Sequence
  Synthetic
aaaaggauagugucucaau

SEQ ID NO: 620948 - RNA, 20 nt, Artificial Sequence
  Synthetic
caaaaggauagugucucaau

SEQ ID NO: 620949 - RNA, 21 nt, Artificial Sequence
  Synthetic
ucaaaaggauagugucucaau

SEQ ID NO: 620950 - RNA, 22 nt, Artificial Sequence
  Synthetic
uucaaaaggauagugucucaau

SEQ ID NO: 620951 - RNA, 23 nt, Artificial Sequence
  Synthetic
auucaaaaggauagugucucaau

SEQ ID NO: 620952 - RNA, 24 nt, Artificial Sequence
  Synthetic
aauucaaaaggauagugucucaau

SEQ ID NO: 620953 - RNA, 18 nt, Artificial Sequence
  Synthetic
aucagggacaaagucaau

SEQ ID NO: 620954 - RNA, 19 nt, Artificial Sequence
  Synthetic
caucagggacaaagucaau

SEQ ID NO: 620955 - RNA, 20 nt, Artificial Sequence
  Synthetic
ucaucagggacaaagucaau

SEQ ID NO: 620956 - RNA, 21 nt, Artificial Sequence
  Synthetic
gucaucagggacaaagucaau

SEQ ID NO: 620957 - RNA, 22 nt, Artificial Sequence
  Synthetic
ggucaucagggacaaagucaau

SEQ ID NO: 620958 - RNA, 23 nt, Artificial Sequence
  Synthetic
aggucaucagggacaaagucaau

SEQ ID NO: 620959 - RNA, 24 nt, Artificial Sequence
  Synthetic
gaggucaucagggacaaagucaau

SEQ ID NO: 620960 - RNA, 18 nt, Artificial Sequence
  Synthetic
uugacuaauaaagucaau

SEQ ID NO: 620961 - RNA, 19 nt, Artificial Sequence
  Synthetic
uuugacuaauaaagucaau

SEQ ID NO: 620962 - RNA, 20 nt, Artificial Sequence
  Synthetic
uuuugacuaauaaagucaau

SEQ ID NO: 620963 - RNA, 21 nt, Artificial Sequence
  Synthetic
uuuuugacuaauaaagucaau

SEQ ID NO: 620964 - RNA, 22 nt, Artificial Sequence
  Synthetic
uuuuuugacuaauaaagucaau

SEQ ID NO: 620965 - RNA, 23 nt, Artificial Sequence
  Synthetic
uuuuuuugacuaauaaagucaau

SEQ ID NO: 620966 - RNA, 24 nt, Artificial Sequence
  Synthetic
cuuuuuuugacuaauaaagucaau

SEQ ID NO: 620967 - RNA, 18 nt, Artificial Sequence
  Synthetic
uuaaaacgucaagucaau

SEQ ID NO: 620968 - RNA, 19 nt, Artificial Sequence
  Synthetic
uuuaaaacgucaagucaau

SEQ ID NO: 620969 - RNA, 20 nt, Artificial Sequence
  Synthetic
auuuaaaacgucaagucaau

SEQ ID NO: 620970 - RNA, 21 nt, Artificial Sequence
  Synthetic
aauuuaaaacgucaagucaau

SEQ ID NO: 620971 - RNA, 22 nt, Artificial Sequence
  Synthetic
aaauuuaaaacgucaagucaau

SEQ ID NO: 620972 - RNA, 23 nt, Artificial Sequence
  Synthetic
caaauuuaaaacgucaagucaau

SEQ ID NO: 620973 - RNA, 24 nt, Artificial Sequence
  Synthetic
acaaauuuaaaacgucaagucaau

SEQ ID NO: 620974 - RNA, 18 nt, Artificial Sequence
  Synthetic
uuaaacaaguaagucaau

SEQ ID NO: 620975 - RNA, 19 nt, Artificial Sequence
  Synthetic
auuaaacaaguaagucaau

SEQ ID NO: 620976 - RNA, 20 nt, Artificial Sequence
  Synthetic
gauuaaacaaguaagucaau

SEQ ID NO: 620977 - RNA, 21 nt, Artificial Sequence
  Synthetic
agauuaaacaaguaagucaau

SEQ ID NO: 620978 - RNA, 22 nt, Artificial Sequence
  Synthetic
aagauuaaacaaguaagucaau

SEQ ID NO: 620979 - RNA, 23 nt, Artificial Sequence
  Synthetic
aaagauuaaacaaguaagucaau

SEQ ID NO: 620980 - RNA, 24 nt, Artificial Sequence
  Synthetic
aaaagauuaaacaaguaagucaau

SEQ ID NO: 620981 - RNA, 18 nt, Artificial Sequence
  Synthetic
aucuuggagagagucaau

SEQ ID NO: 620982 - RNA, 19 nt, Artificial Sequence
  Synthetic
gaucuuggagagagucaau

SEQ ID NO: 620983 - RNA, 20 nt, Artificial Sequence
  Synthetic
ugaucuuggagagagucaau

SEQ ID NO: 620984 - RNA, 21 nt, Artificial Sequence
  Synthetic
gugaucuuggagagagucaau

SEQ ID NO: 620985 - RNA, 22 nt, Artificial Sequence
  Synthetic
ggugaucuuggagagagucaau

SEQ ID NO: 620986 - RNA, 23 nt, Artificial Sequence
  Synthetic
aggugaucuuggagagagucaau

SEQ ID NO: 620987 - RNA, 24 nt, Artificial Sequence
  Synthetic
gaggugaucuuggagagagucaau

SEQ ID NO: 620988 - RNA, 18 nt, Artificial Sequence
  Synthetic
uuuccaaaacgagucaau

SEQ ID NO: 620989 - RNA, 19 nt, Artificial Sequence
  Synthetic
uuuuccaaaacgagucaau

SEQ ID NO: 620990 - RNA, 20 nt, Artificial Sequence
  Synthetic
cuuuuccaaaacgagucaau

SEQ ID NO: 620991 - RNA, 21 nt, Artificial Sequence
  Synthetic
gcuuuuccaaaacgagucaau

SEQ ID NO: 620992 - RNA, 22 nt, Artificial Sequence
  Synthetic
agcuuuuccaaaacgagucaau

SEQ ID NO: 620993 - RNA, 23 nt, Artificial Sequence
  Synthetic
gagcuuuuccaaaacgagucaau

SEQ ID NO: 620994 - RNA, 24 nt, Artificial Sequence
  Synthetic
agagcuuuuccaaaacgagucaau

SEQ ID NO: 620995 - RNA, 18 nt, Artificial Sequence
  Synthetic
gaggauuucauagucaau

SEQ ID NO: 620996 - RNA, 19 nt, Artificial Sequence
  Synthetic
ugaggauuucauagucaau

SEQ ID NO: 620997 - RNA, 20 nt, Artificial Sequence
  Synthetic
uugaggauuucauagucaau

SEQ ID NO: 620998 - RNA, 21 nt, Artificial Sequence
  Synthetic
cuugaggauuucauagucaau

SEQ ID NO: 620999 - RNA, 22 nt, Artificial Sequence
  Synthetic
ucuugaggauuucauagucaau

SEQ ID NO: 621000 - RNA, 23 nt, Artificial Sequence
  Synthetic
gucuugaggauuucauagucaau

SEQ ID NO: 621001 - RNA, 24 nt, Artificial Sequence
  Synthetic
ugucuugaggauuucauagucaau

SEQ ID NO: 621002 - RNA, 18 nt, Artificial Sequence
  Synthetic
guuccaaguaaggucaau

SEQ ID NO: 621003 - RNA, 19 nt, Artificial Sequence
  Synthetic
gguuccaaguaaggucaau

SEQ ID NO: 621004 - RNA, 20 nt, Artificial Sequence
  Synthetic
ugguuccaaguaaggucaau

SEQ ID NO: 621005 - RNA, 21 nt, Artificial Sequence
  Synthetic
augguuccaaguaaggucaau

SEQ ID NO: 621006 - RNA, 22 nt, Artificial Sequence
  Synthetic
uaugguuccaaguaaggucaau

SEQ ID NO: 621007 - RNA, 23 nt, Artificial Sequence
  Synthetic
uuaugguuccaaguaaggucaau

SEQ ID NO: 621008 - RNA, 24 nt, Artificial Sequence
  Synthetic
cuuaugguuccaaguaaggucaau

SEQ ID NO: 621009 - RNA, 18 nt, Artificial Sequence
  Synthetic
acuaggagggaggucaau

SEQ ID NO: 621010 - RNA, 19 nt, Artificial Sequence
  Synthetic
aacuaggagggaggucaau

SEQ ID NO: 621011 - RNA, 20 nt, Artificial Sequence
  Synthetic
aaacuaggagggaggucaau

SEQ ID NO: 621012 - RNA, 21 nt, Artificial Sequence
  Synthetic
aaaacuaggagggaggucaau

SEQ ID NO: 621013 - RNA, 22 nt, Artificial Sequence
  Synthetic
caaaacuaggagggaggucaau

SEQ ID NO: 621014 - RNA, 23 nt, Artificial Sequence
  Synthetic
acaaaacuaggagggaggucaau

SEQ ID NO: 621015 - RNA, 24 nt, Artificial Sequence
  Synthetic
aacaaaacuaggagggaggucaau

SEQ ID NO: 621016 - RNA, 18 nt, Artificial Sequence
  Synthetic
ggagacuucugggucaau

SEQ ID NO: 621017 - RNA, 19 nt, Artificial Sequence
  Synthetic
aggagacuucugggucaau

SEQ ID NO: 621018 - RNA, 20 nt, Artificial Sequence
  Synthetic
gaggagacuucugggucaau

SEQ ID NO: 621019 - RNA, 21 nt, Artificial Sequence
  Synthetic
ggaggagacuucugggucaau

SEQ ID NO: 621020 - RNA, 22 nt, Artificial Sequence
  Synthetic
cggaggagacuucugggucaau

SEQ ID NO: 621021 - RNA, 23 nt, Artificial Sequence
  Synthetic
gcggaggagacuucugggucaau

SEQ ID NO: 621022 - RNA, 24 nt, Artificial Sequence
  Synthetic
agcggaggagacuucugggucaau

SEQ ID NO: 621023 - RNA, 18 nt, Artificial Sequence
  Synthetic
cccauauguuuggucaau

SEQ ID NO: 621024 - RNA, 19 nt, Artificial Sequence
  Synthetic
ucccauauguuuggucaau

SEQ ID NO: 621025 - RNA, 20 nt, Artificial Sequence
  Synthetic
uucccauauguuuggucaau

SEQ ID NO: 621026 - RNA, 21 nt, Artificial Sequence
  Synthetic
cuucccauauguuuggucaau

SEQ ID NO: 621027 - RNA, 22 nt, Artificial Sequence
  Synthetic
gcuucccauauguuuggucaau

SEQ ID NO: 621028 - RNA, 23 nt, Artificial Sequence
  Synthetic
agcuucccauauguuuggucaau

SEQ ID NO: 621029 - RNA, 24 nt, Artificial Sequence
  Synthetic
aagcuucccauauguuuggucaau

SEQ ID NO: 621030 - RNA, 18 nt, Artificial Sequence
  Synthetic
uccugaauaaaugucaau

SEQ ID NO: 621031 - RNA, 19 nt, Artificial Sequence
  Synthetic
uuccugaauaaaugucaau

SEQ ID NO: 621032 - RNA, 20 nt, Artificial Sequence
  Synthetic
cuuccugaauaaaugucaau

SEQ ID NO: 621033 - RNA, 21 nt, Artificial Sequence
  Synthetic
ccuuccugaauaaaugucaau

SEQ ID NO: 621034 - RNA, 22 nt, Artificial Sequence
  Synthetic
uccuuccugaauaaaugucaau

SEQ ID NO: 621035 - RNA, 23 nt, Artificial Sequence
  Synthetic
uuccuuccugaauaaaugucaau

SEQ ID NO: 621036 - RNA, 24 nt, Artificial Sequence
  Synthetic
uuuccuuccugaauaaaugucaau

SEQ ID NO: 621037 - RNA, 18 nt, Artificial Sequence
  Synthetic
gauuucuuaaaugucaau

SEQ ID NO: 621038 - RNA, 19 nt, Artificial Sequence
  Synthetic
agauuucuuaaaugucaau

SEQ ID NO: 621039 - RNA, 20 nt, Artificial Sequence
  Synthetic
cagauuucuuaaaugucaau

SEQ ID NO: 621040 - RNA, 21 nt, Artificial Sequence
  Synthetic
acagauuucuuaaaugucaau

SEQ ID NO: 621041 - RNA, 22 nt, Artificial Sequence
  Synthetic
aacagauuucuuaaaugucaau

SEQ ID NO: 621042 - RNA, 23 nt, Artificial Sequence
  Synthetic
aaacagauuucuuaaaugucaau

SEQ ID NO: 621043 - RNA, 24 nt, Artificial Sequence
  Synthetic
aaaacagauuucuuaaaugucaau

SEQ ID NO: 621044 - RNA, 18 nt, Artificial Sequence
  Synthetic
aaauaucacacugucaau

SEQ ID NO: 621045 - RNA, 19 nt, Artificial Sequence
  Synthetic
gaaauaucacacugucaau

SEQ ID NO: 621046 - RNA, 20 nt, Artificial Sequence
  Synthetic
agaaauaucacacugucaau

SEQ ID NO: 621047 - RNA, 21 nt, Artificial Sequence
  Synthetic
aagaaauaucacacugucaau

SEQ ID NO: 621048 - RNA, 22 nt, Artificial Sequence
  Synthetic
aaagaaauaucacacugucaau

SEQ ID NO: 621049 - RNA, 23 nt, Artificial Sequence
  Synthetic
uaaagaaauaucacacugucaau

SEQ ID NO: 621050 - RNA, 24 nt, Artificial Sequence
  Synthetic
uuaaagaaauaucacacugucaau

SEQ ID NO: 621051 - RNA, 18 nt, Artificial Sequence
  Synthetic
uaauggaggacugucaau

SEQ ID NO: 621052 - RNA, 19 nt, Artificial Sequence
  Synthetic
guaauggaggacugucaau

SEQ ID NO: 621053 - RNA, 20 nt, Artificial Sequence
  Synthetic
uguaauggaggacugucaau

SEQ ID NO: 621054 - RNA, 21 nt, Artificial Sequence
  Synthetic
guguaauggaggacugucaau

SEQ ID NO: 621055 - RNA, 22 nt, Artificial Sequence
  Synthetic
gguguaauggaggacugucaau

SEQ ID NO: 621056 - RNA, 23 nt, Artificial Sequence
  Synthetic
agguguaauggaggacugucaau

SEQ ID NO: 621057 - RNA, 24 nt, Artificial Sequence
  Synthetic
gagguguaauggaggacugucaau

SEQ ID NO: 621058 - RNA, 18 nt, Artificial Sequence
  Synthetic
aaauacaaauaauucaau

SEQ ID NO: 621059 - RNA, 19 nt, Artificial Sequence
  Synthetic
uaaauacaaauaauucaau

SEQ ID NO: 621060 - RNA, 20 nt, Artificial Sequence
  Synthetic
uuaaauacaaauaauucaau

SEQ ID NO: 621061 - RNA, 21 nt, Artificial Sequence
  Synthetic
uuuaaauacaaauaauucaau

SEQ ID NO: 621062 - RNA, 22 nt, Artificial Sequence
  Synthetic
auuuaaauacaaauaauucaau

SEQ ID NO: 621063 - RNA, 23 nt, Artificial Sequence
  Synthetic
gauuuaaauacaaauaauucaau

SEQ ID NO: 621064 - RNA, 24 nt, Artificial Sequence
  Synthetic
ggauuuaaauacaaauaauucaau

SEQ ID NO: 621065 - RNA, 18 nt, Artificial Sequence
  Synthetic
acaacuuaaauauucaau

SEQ ID NO: 621066 - RNA, 19 nt, Artificial Sequence
  Synthetic
aacaacuuaaauauucaau

SEQ ID NO: 621067 - RNA, 20 nt, Artificial Sequence
  Synthetic
aaacaacuuaaauauucaau

SEQ ID NO: 621068 - RNA, 21 nt, Artificial Sequence
  Synthetic
gaaacaacuuaaauauucaau

SEQ ID NO: 621069 - RNA, 22 nt, Artificial Sequence
  Synthetic
agaaacaacuuaaauauucaau

SEQ ID NO: 621070 - RNA, 23 nt, Artificial Sequence
  Synthetic
cagaaacaacuuaaauauucaau

SEQ ID NO: 621071 - RNA, 24 nt, Artificial Sequence
  Synthetic
acagaaacaacuuaaauauucaau

SEQ ID NO: 621072 - RNA, 18 nt, Artificial Sequence
  Synthetic
aagcccuuccuauucaau

SEQ ID NO: 621073 - RNA, 19 nt, Artificial Sequence
  Synthetic
uaagcccuuccuauucaau

SEQ ID NO: 621074 - RNA, 20 nt, Artificial Sequence
  Synthetic
uuaagcccuuccuauucaau

SEQ ID NO: 621075 - RNA, 21 nt, Artificial Sequence
  Synthetic
cuuaagcccuuccuauucaau

SEQ ID NO: 621076 - RNA, 22 nt, Artificial Sequence
  Synthetic
acuuaagcccuuccuauucaau

SEQ ID NO: 621077 - RNA, 23 nt, Artificial Sequence
  Synthetic
aacuuaagcccuuccuauucaau

SEQ ID NO: 621078 - RNA, 24 nt, Artificial Sequence
  Synthetic
uaacuuaagcccuuccuauucaau

SEQ ID NO: 621079 - RNA, 20 nt, Artificial Sequence
  Synthetic
agaaauaaaggguauucaau

SEQ ID NO: 621080 - RNA, 21 nt, Artificial Sequence
  Synthetic
aagaaauaaaggguauucaau

SEQ ID NO: 621081 - RNA, 22 nt, Artificial Sequence
  Synthetic
aaagaaauaaaggguauucaau

SEQ ID NO: 621082 - RNA, 23 nt, Artificial Sequence
  Synthetic
aaaagaaauaaaggguauucaau

SEQ ID NO: 621083 - RNA, 24 nt, Artificial Sequence
  Synthetic
aaaaagaaauaaaggguauucaau

SEQ ID NO: 621084 - RNA, 21 nt, Artificial Sequence
  Synthetic
aggaaauaaaggguauucaau

SEQ ID NO: 621085 - RNA, 22 nt, Artificial Sequence
  Synthetic
aaggaaauaaaggguauucaau

SEQ ID NO: 621086 - RNA, 23 nt, Artificial Sequence
  Synthetic
gaaggaaauaaaggguauucaau

SEQ ID NO: 621087 - RNA, 24 nt, Artificial Sequence
  Synthetic
agaaggaaauaaaggguauucaau

SEQ ID NO: 621088 - RNA, 18 nt, Artificial Sequence
  Synthetic
ugagaagucaacuucaau

SEQ ID NO: 621089 - RNA, 19 nt, Artificial Sequence
  Synthetic
uugagaagucaacuucaau

SEQ ID NO: 621090 - RNA, 20 nt, Artificial Sequence
  Synthetic
auugagaagucaacuucaau

SEQ ID NO: 621091 - RNA, 21 nt, Artificial Sequence
  Synthetic
cauugagaagucaacuucaau

SEQ ID NO: 621092 - RNA, 22 nt, Artificial Sequence
  Synthetic
acauugagaagucaacuucaau

SEQ ID NO: 621093 - RNA, 23 nt, Artificial Sequence
  Synthetic
uacauugagaagucaacuucaau

SEQ ID NO: 621094 - RNA, 24 nt, Artificial Sequence
  Synthetic
auacauugagaagucaacuucaau

SEQ ID NO: 621095 - RNA, 18 nt, Artificial Sequence
  Synthetic
ccccaacuugacuucaau

SEQ ID NO: 621096 - RNA, 19 nt, Artificial Sequence
  Synthetic
cccccaacuugacuucaau

SEQ ID NO: 621097 - RNA, 20 nt, Artificial Sequence
  Synthetic
ucccccaacuugacuucaau

SEQ ID NO: 621098 - RNA, 21 nt, Artificial Sequence
  Synthetic
uucccccaacuugacuucaau

SEQ ID NO: 621099 - RNA, 22 nt, Artificial Sequence
  Synthetic
uuucccccaacuugacuucaau

SEQ ID NO: 621100 - RNA, 23 nt, Artificial Sequence
  Synthetic
uuuucccccaacuugacuucaau

SEQ ID NO: 621101 - RNA, 24 nt, Artificial Sequence
  Synthetic
cuuuucccccaacuugacuucaau

SEQ ID NO: 621102 - RNA, 18 nt, Artificial Sequence
  Synthetic
auuaaucaauacuucaau

SEQ ID NO: 621103 - RNA, 19 nt, Artificial Sequence
  Synthetic
uauuaaucaauacuucaau

SEQ ID NO: 621104 - RNA, 20 nt, Artificial Sequence
  Synthetic
auauuaaucaauacuucaau

SEQ ID NO: 621105 - RNA, 21 nt, Artificial Sequence
  Synthetic
uauauuaaucaauacuucaau

SEQ ID NO: 621106 - RNA, 22 nt, Artificial Sequence
  Synthetic
auauauuaaucaauacuucaau

SEQ ID NO: 621107 - RNA, 23 nt, Artificial Sequence
  Synthetic
aauauauuaaucaauacuucaau

SEQ ID NO: 621108 - RNA, 24 nt, Artificial Sequence
  Synthetic
caauauauuaaucaauacuucaau

SEQ ID NO: 621109 - RNA, 18 nt, Artificial Sequence
  Synthetic
gcuuuggaccucuucaau

SEQ ID NO: 621110 - RNA, 19 nt, Artificial Sequence
  Synthetic
agcuuuggaccucuucaau

SEQ ID NO: 621111 - RNA, 20 nt, Artificial Sequence
  Synthetic
uagcuuuggaccucuucaau

SEQ ID NO: 621112 - RNA, 21 nt, Artificial Sequence
  Synthetic
uuagcuuuggaccucuucaau

SEQ ID NO: 621113 - RNA, 22 nt, Artificial Sequence
  Synthetic
uuuagcuuuggaccucuucaau

SEQ ID NO: 621114 - RNA, 23 nt, Artificial Sequence
  Synthetic
guuuagcuuuggaccucuucaau

SEQ ID NO: 621115 - RNA, 24 nt, Artificial Sequence
  Synthetic
aguuuagcuuuggaccucuucaau

SEQ ID NO: 621116 - RNA, 18 nt, Artificial Sequence
  Synthetic
cugcaagugaaguucaau

SEQ ID NO: 621117 - RNA, 19 nt, Artificial Sequence
  Synthetic
gcugcaagugaaguucaau

SEQ ID NO: 621118 - RNA, 20 nt, Artificial Sequence
  Synthetic
ggcugcaagugaaguucaau

SEQ ID NO: 621119 - RNA, 21 nt, Artificial Sequence
  Synthetic
gggcugcaagugaaguucaau

SEQ ID NO: 621120 - RNA, 22 nt, Artificial Sequence
  Synthetic
ggggcugcaagugaaguucaau

SEQ ID NO: 621121 - RNA, 23 nt, Artificial Sequence
  Synthetic
gggggcugcaagugaaguucaau

SEQ ID NO: 621122 - RNA, 24 nt, Artificial Sequence
  Synthetic
agggggcugcaagugaaguucaau

SEQ ID NO: 621123 - RNA, 18 nt, Artificial Sequence
  Synthetic
aucccucguaaguucaau

SEQ ID NO: 621124 - RNA, 19 nt, Artificial Sequence
  Synthetic
caucccucguaaguucaau

SEQ ID NO: 621125 - RNA, 20 nt, Artificial Sequence
  Synthetic
acaucccucguaaguucaau

SEQ ID NO: 621126 - RNA, 21 nt, Artificial Sequence
  Synthetic
cacaucccucguaaguucaau

SEQ ID NO: 621127 - RNA, 22 nt, Artificial Sequence
  Synthetic
ccacaucccucguaaguucaau

SEQ ID NO: 621128 - RNA, 23 nt, Artificial Sequence
  Synthetic
uccacaucccucguaaguucaau

SEQ ID NO: 621129 - RNA, 24 nt, Artificial Sequence
  Synthetic
uuccacaucccucguaaguucaau

SEQ ID NO: 621130 - RNA, 18 nt, Artificial Sequence
  Synthetic
ucagucaaaaauuucaau

SEQ ID NO: 621131 - RNA, 19 nt, Artificial Sequence
  Synthetic
cucagucaaaaauuucaau

SEQ ID NO: 621132 - RNA, 20 nt, Artificial Sequence
  Synthetic
ucucagucaaaaauuucaau

SEQ ID NO: 621133 - RNA, 21 nt, Artificial Sequence
  Synthetic
cucucagucaaaaauuucaau

SEQ ID NO: 621134 - RNA, 22 nt, Artificial Sequence
  Synthetic
ucucucagucaaaaauuucaau

SEQ ID NO: 621135 - RNA, 23 nt, Artificial Sequence
  Synthetic
uucucucagucaaaaauuucaau

SEQ ID NO: 621136 - RNA, 24 nt, Artificial Sequence
  Synthetic
guucucucagucaaaaauuucaau

SEQ ID NO: 621137 - RNA, 18 nt, Artificial Sequence
  Synthetic
uaagagaagaauuucaau

SEQ ID NO: 621138 - RNA, 19 nt, Artificial Sequence
  Synthetic
uuaagagaagaauuucaau

SEQ ID NO: 621139 - RNA, 20 nt, Artificial Sequence
  Synthetic
auuaagagaagaauuucaau

SEQ ID NO: 621140 - RNA, 21 nt, Artificial Sequence
  Synthetic
gauuaagagaagaauuucaau

SEQ ID NO: 621141 - RNA, 22 nt, Artificial Sequence
  Synthetic
ugauuaagagaagaauuucaau

SEQ ID NO: 621142 - RNA, 23 nt, Artificial Sequence
  Synthetic
augauuaagagaagaauuucaau

SEQ ID NO: 621143 - RNA, 24 nt, Artificial Sequence
  Synthetic
uaugauuaagagaagaauuucaau

SEQ ID NO: 621144 - RNA, 18 nt, Artificial Sequence
  Synthetic
ccuacaguucauuucaau

SEQ ID NO: 621145 - RNA, 19 nt, Artificial Sequence
  Synthetic
uccuacaguucauuucaau

SEQ ID NO: 621146 - RNA, 20 nt, Artificial Sequence
  Synthetic
auccuacaguucauuucaau

SEQ ID NO: 621147 - RNA, 21 nt, Artificial Sequence
  Synthetic
cauccuacaguucauuucaau

SEQ ID NO: 621148 - RNA, 22 nt, Artificial Sequence
  Synthetic
acauccuacaguucauuucaau

SEQ ID NO: 621149 - RNA, 23 nt, Artificial Sequence
  Synthetic
uacauccuacaguucauuucaau

SEQ ID NO: 621150 - RNA, 24 nt, Artificial Sequence
  Synthetic
guacauccuacaguucauuucaau

SEQ ID NO: 621151 - RNA, 18 nt, Artificial Sequence
  Synthetic
uauaaguuuuguuucaau

SEQ ID NO: 621152 - RNA, 19 nt, Artificial Sequence
  Synthetic
uuauaaguuuuguuucaau

SEQ ID NO: 621153 - RNA, 20 nt, Artificial Sequence
  Synthetic
cuuauaaguuuuguuucaau

SEQ ID NO: 621154 - RNA, 21 nt, Artificial Sequence
  Synthetic
gcuuauaaguuuuguuucaau

SEQ ID NO: 621155 - RNA, 22 nt, Artificial Sequence
  Synthetic
ugcuuauaaguuuuguuucaau

SEQ ID NO: 621156 - RNA, 23 nt, Artificial Sequence
  Synthetic
gugcuuauaaguuuuguuucaau

SEQ ID NO: 621157 - RNA, 24 nt, Artificial Sequence
  Synthetic
ugugcuuauaaguuuuguuucaau

SEQ ID NO: 621158 - RNA, 18 nt, Artificial Sequence
  Synthetic
gaggaugaaauuuucaau

SEQ ID NO: 621159 - RNA, 19 nt, Artificial Sequence
  Synthetic
agaggaugaaauuuucaau

SEQ ID NO: 621160 - RNA, 20 nt, Artificial Sequence
  Synthetic
uagaggaugaaauuuucaau

SEQ ID NO: 621161 - RNA, 21 nt, Artificial Sequence
  Synthetic
uuagaggaugaaauuuucaau

SEQ ID NO: 621162 - RNA, 22 nt, Artificial Sequence
  Synthetic
uuuagaggaugaaauuuucaau

SEQ ID NO: 621163 - RNA, 23 nt, Artificial Sequence
  Synthetic
uuuuagaggaugaaauuuucaau

SEQ ID NO: 621164 - RNA, 24 nt, Artificial Sequence
  Synthetic
auuuuagaggaugaaauuuucaau

SEQ ID NO: 621165 - RNA, 18 nt, Artificial Sequence
  Synthetic
aguaaacuaguuuucaau

SEQ ID NO: 621166 - RNA, 19 nt, Artificial Sequence
  Synthetic
uaguaaacuaguuuucaau

SEQ ID NO: 621167 - RNA, 20 nt, Artificial Sequence
  Synthetic
uuaguaaacuaguuuucaau

SEQ ID NO: 621168 - RNA, 21 nt, Artificial Sequence
  Synthetic
uuuaguaaacuaguuuucaau

SEQ ID NO: 621169 - RNA, 22 nt, Artificial Sequence
  Synthetic
auuuaguaaacuaguuuucaau

SEQ ID NO: 621170 - RNA, 23 nt, Artificial Sequence
  Synthetic
cauuuaguaaacuaguuuucaau

SEQ ID NO: 621171 - RNA, 24 nt, Artificial Sequence
  Synthetic
gcauuuaguaaacuaguuuucaau

SEQ ID NO: 621172 - RNA, 18 nt, Artificial Sequence
  Synthetic
guuccuaaguuuuucaau

SEQ ID NO: 621173 - RNA, 19 nt, Artificial Sequence
  Synthetic
cguuccuaaguuuuucaau

SEQ ID NO: 621174 - RNA, 20 nt, Artificial Sequence
  Synthetic
gcguuccuaaguuuuucaau

SEQ ID NO: 621175 - RNA, 21 nt, Artificial Sequence
  Synthetic
ggcguuccuaaguuuuucaau

SEQ ID NO: 621176 - RNA, 22 nt, Artificial Sequence
  Synthetic
uggcguuccuaaguuuuucaau

SEQ ID NO: 621177 - RNA, 23 nt, Artificial Sequence
  Synthetic
cuggcguuccuaaguuuuucaau

SEQ ID NO: 621178 - RNA, 24 nt, Artificial Sequence
  Synthetic
acuggcguuccuaaguuuuucaau

SEQ ID NO: 621179 - RNA, 18 nt, Artificial Sequence
  Synthetic
uugaauggguuuuucaau

SEQ ID NO: 621180 - RNA, 19 nt, Artificial Sequence
  Synthetic
cuugaauggguuuuucaau

SEQ ID NO: 621181 - RNA, 20 nt, Artificial Sequence
  Synthetic
acuugaauggguuuuucaau

SEQ ID NO: 621182 - RNA, 21 nt, Artificial Sequence
  Synthetic
gacuugaauggguuuuucaau

SEQ ID NO: 621183 - RNA, 22 nt, Artificial Sequence
  Synthetic
agacuugaauggguuuuucaau

SEQ ID NO: 621184 - RNA, 23 nt, Artificial Sequence
  Synthetic
uagacuugaauggguuuuucaau

SEQ ID NO: 621185 - RNA, 24 nt, Artificial Sequence
  Synthetic
auagacuugaauggguuuuucaau

SEQ ID NO: 621186 - RNA, 18 nt, Artificial Sequence
  Synthetic
agcaccccuuuuuucaau

SEQ ID NO: 621187 - RNA, 19 nt, Artificial Sequence
  Synthetic
aagcaccccuuuuuucaau

SEQ ID NO: 621188 - RNA, 20 nt, Artificial Sequence
  Synthetic
aaagcaccccuuuuuucaau

SEQ ID NO: 621189 - RNA, 21 nt, Artificial Sequence
  Synthetic
uaaagcaccccuuuuuucaau

SEQ ID NO: 621190 - RNA, 22 nt, Artificial Sequence
  Synthetic
uuaaagcaccccuuuuuucaau

SEQ ID NO: 621191 - RNA, 23 nt, Artificial Sequence
  Synthetic
guuaaagcaccccuuuuuucaau

SEQ ID NO: 621192 - RNA, 24 nt, Artificial Sequence
  Synthetic
uguuaaagcaccccuuuuuucaau

SEQ ID NO: 621193 - RNA, 18 nt, Artificial Sequence
  Synthetic
ggauuuauuuuuuucaau

SEQ ID NO: 621194 - RNA, 19 nt, Artificial Sequence
  Synthetic
aggauuuauuuuuuucaau

SEQ ID NO: 621195 - RNA, 20 nt, Artificial Sequence
  Synthetic
uaggauuuauuuuuuucaau

SEQ ID NO: 621196 - RNA, 21 nt, Artificial Sequence
  Synthetic
uuaggauuuauuuuuuucaau

SEQ ID NO: 621197 - RNA, 22 nt, Artificial Sequence
  Synthetic
uuuaggauuuauuuuuuucaau

SEQ ID NO: 621198 - RNA, 23 nt, Artificial Sequence
  Synthetic
auuuaggauuuauuuuuuucaau

SEQ ID NO: 621199 - RNA, 24 nt, Artificial Sequence
  Synthetic
aauuuaggauuuauuuuuuucaau

SEQ ID NO: 621200 - RNA, 18 nt, Artificial Sequence
  Synthetic
gaaauccaaaaaaagaau

SEQ ID NO: 621201 - RNA, 19 nt, Artificial Sequence
  Synthetic
ugaaauccaaaaaaagaau

SEQ ID NO: 621202 - RNA, 20 nt, Artificial Sequence
  Synthetic
cugaaauccaaaaaaagaau

SEQ ID NO: 621203 - RNA, 21 nt, Artificial Sequence
  Synthetic
ucugaaauccaaaaaaagaau

SEQ ID NO: 621204 - RNA, 22 nt, Artificial Sequence
  Synthetic
aucugaaauccaaaaaaagaau

SEQ ID NO: 621205 - RNA, 23 nt, Artificial Sequence
  Synthetic
aaucugaaauccaaaaaaagaau

SEQ ID NO: 621206 - RNA, 24 nt, Artificial Sequence
  Synthetic
aaaucugaaauccaaaaaaagaau

SEQ ID NO: 621207 - RNA, 18 nt, Artificial Sequence
  Synthetic
uguggaucaaaaaagaau

SEQ ID NO: 621208 - RNA, 19 nt, Artificial Sequence
  Synthetic
auguggaucaaaaaagaau

SEQ ID NO: 621209 - RNA, 20 nt, Artificial Sequence
  Synthetic
aauguggaucaaaaaagaau

SEQ ID NO: 621210 - RNA, 21 nt, Artificial Sequence
  Synthetic
caauguggaucaaaaaagaau

SEQ ID NO: 621211 - RNA, 22 nt, Artificial Sequence
  Synthetic
acaauguggaucaaaaaagaau

SEQ ID NO: 621212 - RNA, 23 nt, Artificial Sequence
  Synthetic
aacaauguggaucaaaaaagaau

SEQ ID NO: 621213 - RNA, 24 nt, Artificial Sequence
  Synthetic
aaacaauguggaucaaaaaagaau

SEQ ID NO: 621214 - RNA, 18 nt, Artificial Sequence
  Synthetic
auuggaacuccaaagaau

SEQ ID NO: 621215 - RNA, 19 nt, Artificial Sequence
  Synthetic
aauuggaacuccaaagaau

SEQ ID NO: 621216 - RNA, 20 nt, Artificial Sequence
  Synthetic
uaauuggaacuccaaagaau

SEQ ID NO: 621217 - RNA, 21 nt, Artificial Sequence
  Synthetic
uuaauuggaacuccaaagaau

SEQ ID NO: 621218 - RNA, 22 nt, Artificial Sequence
  Synthetic
uuuaauuggaacuccaaagaau

SEQ ID NO: 621219 - RNA, 23 nt, Artificial Sequence
  Synthetic
auuuaauuggaacuccaaagaau

SEQ ID NO: 621220 - RNA, 24 nt, Artificial Sequence
  Synthetic
uauuuaauuggaacuccaaagaau

SEQ ID NO: 621221 - RNA, 18 nt, Artificial Sequence
  Synthetic
guuacuguuucaaagaau

SEQ ID NO: 621222 - RNA, 19 nt, Artificial Sequence
  Synthetic
aguuacuguuucaaagaau

SEQ ID NO: 621223 - RNA, 20 nt, Artificial Sequence
  Synthetic
gaguuacuguuucaaagaau

SEQ ID NO: 621224 - RNA, 21 nt, Artificial Sequence
  Synthetic
ugaguuacuguuucaaagaau

SEQ ID NO: 621225 - RNA, 22 nt, Artificial Sequence
  Synthetic
augaguuacuguuucaaagaau

SEQ ID NO: 621226 - RNA, 23 nt, Artificial Sequence
  Synthetic
aaugaguuacuguuucaaagaau

SEQ ID NO: 621227 - RNA, 24 nt, Artificial Sequence
  Synthetic
gaaugaguuacuguuucaaagaau

SEQ ID NO: 621228 - RNA, 18 nt, Artificial Sequence
  Synthetic
uuaaacauaggaaagaau

SEQ ID NO: 621229 - RNA, 19 nt, Artificial Sequence
  Synthetic
uuuaaacauaggaaagaau

SEQ ID NO: 621230 - RNA, 20 nt, Artificial Sequence
  Synthetic
guuuaaacauaggaaagaau

SEQ ID NO: 621231 - RNA, 21 nt, Artificial Sequence
  Synthetic
cguuuaaacauaggaaagaau

SEQ ID NO: 621232 - RNA, 22 nt, Artificial Sequence
  Synthetic
acguuuaaacauaggaaagaau

SEQ ID NO: 621233 - RNA, 23 nt, Artificial Sequence
  Synthetic
cacguuuaaacauaggaaagaau

SEQ ID NO: 621234 - RNA, 24 nt, Artificial Sequence
  Synthetic
gcacguuuaaacauaggaaagaau

SEQ ID NO: 621235 - RNA, 18 nt, Artificial Sequence
  Synthetic
cacugggaaauaaagaau

SEQ ID NO: 621236 - RNA, 19 nt, Artificial Sequence
  Synthetic
ucacugggaaauaaagaau

SEQ ID NO: 621237 - RNA, 20 nt, Artificial Sequence
  Synthetic
aucacugggaaauaaagaau

SEQ ID NO: 621238 - RNA, 21 nt, Artificial Sequence
  Synthetic
gaucacugggaaauaaagaau

SEQ ID NO: 621239 - RNA, 22 nt, Artificial Sequence
  Synthetic
ugaucacugggaaauaaagaau

SEQ ID NO: 621240 - RNA, 23 nt, Artificial Sequence
  Synthetic
augaucacugggaaauaaagaau

SEQ ID NO: 621241 - RNA, 24 nt, Artificial Sequence
  Synthetic
uaugaucacugggaaauaaagaau

SEQ ID NO: 621242 - RNA, 18 nt, Artificial Sequence
  Synthetic
ggaauggucauaaagaau

SEQ ID NO: 621243 - RNA, 19 nt, Artificial Sequence
  Synthetic
aggaauggucauaaagaau

SEQ ID NO: 621244 - RNA, 20 nt, Artificial Sequence
  Synthetic
aaggaauggucauaaagaau

SEQ ID NO: 621245 - RNA, 21 nt, Artificial Sequence
  Synthetic
aaaggaauggucauaaagaau

SEQ ID NO: 621246 - RNA, 22 nt, Artificial Sequence
  Synthetic
gaaaggaauggucauaaagaau

SEQ ID NO: 621247 - RNA, 23 nt, Artificial Sequence
  Synthetic
agaaaggaauggucauaaagaau

SEQ ID NO: 621248 - RNA, 24 nt, Artificial Sequence
  Synthetic
gagaaaggaauggucauaaagaau

SEQ ID NO: 621249 - RNA, 18 nt, Artificial Sequence
  Synthetic
uacaaggugauaaagaau

SEQ ID NO: 621250 - RNA, 19 nt, Artificial Sequence
  Synthetic
auacaaggugauaaagaau

SEQ ID NO: 621251 - RNA, 20 nt, Artificial Sequence
  Synthetic
gauacaaggugauaaagaau

SEQ ID NO: 621252 - RNA, 21 nt, Artificial Sequence
  Synthetic
ugauacaaggugauaaagaau

SEQ ID NO: 621253 - RNA, 22 nt, Artificial Sequence
  Synthetic
augauacaaggugauaaagaau

SEQ ID NO: 621254 - RNA, 23 nt, Artificial Sequence
  Synthetic
caugauacaaggugauaaagaau

SEQ ID NO: 621255 - RNA, 24 nt, Artificial Sequence
  Synthetic
gcaugauacaaggugauaaagaau

SEQ ID NO: 621256 - RNA, 18 nt, Artificial Sequence
  Synthetic
aaaacauuguuaaagaau

SEQ ID NO: 621257 - RNA, 19 nt, Artificial Sequence
  Synthetic
aaaaacauuguuaaagaau

SEQ ID NO: 621258 - RNA, 20 nt, Artificial Sequence
  Synthetic
gaaaaacauuguuaaagaau

SEQ ID NO: 621259 - RNA, 21 nt, Artificial Sequence
  Synthetic
agaaaaacauuguuaaagaau

SEQ ID NO: 621260 - RNA, 22 nt, Artificial Sequence
  Synthetic
aagaaaaacauuguuaaagaau

SEQ ID NO: 621261 - RNA, 23 nt, Artificial Sequence
  Synthetic
uaagaaaaacauuguuaaagaau

SEQ ID NO: 621262 - RNA, 24 nt, Artificial Sequence
  Synthetic
auaagaaaaacauuguuaaagaau

SEQ ID NO: 621263 - RNA, 18 nt, Artificial Sequence
  Synthetic
gauuuguaauccaagaau

SEQ ID NO: 621264 - RNA, 19 nt, Artificial Sequence
  Synthetic
agauuuguaauccaagaau

SEQ ID NO: 621265 - RNA, 20 nt, Artificial Sequence
  Synthetic
cagauuuguaauccaagaau

SEQ ID NO: 621266 - RNA, 21 nt, Artificial Sequence
  Synthetic
acagauuuguaauccaagaau

SEQ ID NO: 621267 - RNA, 22 nt, Artificial Sequence
  Synthetic
cacagauuuguaauccaagaau

SEQ ID NO: 621268 - RNA, 23 nt, Artificial Sequence
  Synthetic
ucacagauuuguaauccaagaau

SEQ ID NO: 621269 - RNA, 24 nt, Artificial Sequence
  Synthetic
uucacagauuuguaauccaagaau

SEQ ID NO: 621270 - RNA, 18 nt, Artificial Sequence
  Synthetic
aaaaguguuggcaagaau

SEQ ID NO: 621271 - RNA, 19 nt, Artificial Sequence
  Synthetic
aaaaaguguuggcaagaau

SEQ ID NO: 621272 - RNA, 20 nt, Artificial Sequence
  Synthetic
uaaaaaguguuggcaagaau

SEQ ID NO: 621273 - RNA, 21 nt, Artificial Sequence
  Synthetic
auaaaaaguguuggcaagaau

SEQ ID NO: 621274 - RNA, 22 nt, Artificial Sequence
  Synthetic
gauaaaaaguguuggcaagaau

SEQ ID NO: 621275 - RNA, 23 nt, Artificial Sequence
  Synthetic
agauaaaaaguguuggcaagaau

SEQ ID NO: 621276 - RNA, 24 nt, Artificial Sequence
  Synthetic
aagauaaaaaguguuggcaagaau

SEQ ID NO: 621277 - RNA, 18 nt, Artificial Sequence
  Synthetic
uuucugaaggucaagaau

SEQ ID NO: 621278 - RNA, 19 nt, Artificial Sequence
  Synthetic
guuucugaaggucaagaau

SEQ ID NO: 621279 - RNA, 20 nt, Artificial Sequence
  Synthetic
aguuucugaaggucaagaau

SEQ ID NO: 621280 - RNA, 21 nt, Artificial Sequence
  Synthetic
caguuucugaaggucaagaau

SEQ ID NO: 621281 - RNA, 22 nt, Artificial Sequence
  Synthetic
gcaguuucugaaggucaagaau

SEQ ID NO: 621282 - RNA, 23 nt, Artificial Sequence
  Synthetic
ggcaguuucugaaggucaagaau

SEQ ID NO: 621283 - RNA, 24 nt, Artificial Sequence
  Synthetic
uggcaguuucugaaggucaagaau

SEQ ID NO: 621284 - RNA, 18 nt, Artificial Sequence
  Synthetic
aagcaaggcgagaagaau

SEQ ID NO: 621285 - RNA, 19 nt, Artificial Sequence
  Synthetic
aaagcaaggcgagaagaau

SEQ ID NO: 621286 - RNA, 20 nt, Artificial Sequence
  Synthetic
gaaagcaaggcgagaagaau

SEQ ID NO: 621287 - RNA, 21 nt, Artificial Sequence
  Synthetic
ugaaagcaaggcgagaagaau

SEQ ID NO: 621288 - RNA, 22 nt, Artificial Sequence
  Synthetic
cugaaagcaaggcgagaagaau

SEQ ID NO: 621289 - RNA, 23 nt, Artificial Sequence
  Synthetic
gcugaaagcaaggcgagaagaau

SEQ ID NO: 621290 - RNA, 24 nt, Artificial Sequence
  Synthetic
ugcugaaagcaaggcgagaagaau

SEQ ID NO: 621291 - RNA, 18 nt, Artificial Sequence
  Synthetic
aggagggucaggaagaau

SEQ ID NO: 621292 - RNA, 19 nt, Artificial Sequence
  Synthetic
aaggagggucaggaagaau

SEQ ID NO: 621293 - RNA, 20 nt, Artificial Sequence
  Synthetic
aaaggagggucaggaagaau

SEQ ID NO: 621294 - RNA, 21 nt, Artificial Sequence
  Synthetic
caaaggagggucaggaagaau

SEQ ID NO: 621295 - RNA, 22 nt, Artificial Sequence
  Synthetic
ucaaaggagggucaggaagaau

SEQ ID NO: 621296 - RNA, 23 nt, Artificial Sequence
  Synthetic
cucaaaggagggucaggaagaau

SEQ ID NO: 621297 - RNA, 24 nt, Artificial Sequence
  Synthetic
gcucaaaggagggucaggaagaau

SEQ ID NO: 621298 - RNA, 18 nt, Artificial Sequence
  Synthetic
cuaccccaagggaagaau

SEQ ID NO: 621299 - RNA, 19 nt, Artificial Sequence
  Synthetic
ccuaccccaagggaagaau

SEQ ID NO: 621300 - RNA, 20 nt, Artificial Sequence
  Synthetic
cccuaccccaagggaagaau

SEQ ID NO: 621301 - RNA, 21 nt, Artificial Sequence
  Synthetic
ccccuaccccaagggaagaau

SEQ ID NO: 621302 - RNA, 22 nt, Artificial Sequence
  Synthetic
cccccuaccccaagggaagaau

SEQ ID NO: 621303 - RNA, 23 nt, Artificial Sequence
  Synthetic
gcccccuaccccaagggaagaau

SEQ ID NO: 621304 - RNA, 24 nt, Artificial Sequence
  Synthetic
agcccccuaccccaagggaagaau

SEQ ID NO: 621305 - RNA, 18 nt, Artificial Sequence
  Synthetic
auacaacuggggaagaau

SEQ ID NO: 621306 - RNA, 19 nt, Artificial Sequence
  Synthetic
aauacaacuggggaagaau

SEQ ID NO: 621307 - RNA, 20 nt, Artificial Sequence
  Synthetic
uaauacaacuggggaagaau

SEQ ID NO: 621308 - RNA, 21 nt, Artificial Sequence
  Synthetic
auaauacaacuggggaagaau

SEQ ID NO: 621309 - RNA, 22 nt, Artificial Sequence
  Synthetic
aauaauacaacuggggaagaau

SEQ ID NO: 621310 - RNA, 23 nt, Artificial Sequence
  Synthetic
uaauaauacaacuggggaagaau

SEQ ID NO: 621311 - RNA, 24 nt, Artificial Sequence
  Synthetic
guaauaauacaacuggggaagaau

SEQ ID NO: 621312 - RNA, 18 nt, Artificial Sequence
  Synthetic
caaagagcaaugaagaau

SEQ ID NO: 621313 - RNA, 19 nt, Artificial Sequence
  Synthetic
acaaagagcaaugaagaau

SEQ ID NO: 621314 - RNA, 20 nt, Artificial Sequence
  Synthetic
uacaaagagcaaugaagaau

SEQ ID NO: 621315 - RNA, 21 nt, Artificial Sequence
  Synthetic
auacaaagagcaaugaagaau

SEQ ID NO: 621316 - RNA, 22 nt, Artificial Sequence
  Synthetic
uauacaaagagcaaugaagaau

SEQ ID NO: 621317 - RNA, 23 nt, Artificial Sequence
  Synthetic
auauacaaagagcaaugaagaau

SEQ ID NO: 621318 - RNA, 24 nt, Artificial Sequence
  Synthetic
cauauacaaagagcaaugaagaau

SEQ ID NO: 621319 - RNA, 18 nt, Artificial Sequence
  Synthetic
guuauggccaugaagaau

SEQ ID NO: 621320 - RNA, 19 nt, Artificial Sequence
  Synthetic
uguuauggccaugaagaau

SEQ ID NO: 621321 - RNA, 20 nt, Artificial Sequence
  Synthetic
uuguuauggccaugaagaau

SEQ ID NO: 621322 - RNA, 21 nt, Artificial Sequence
  Synthetic
auuguuauggccaugaagaau

SEQ ID NO: 621323 - RNA, 22 nt, Artificial Sequence
  Synthetic
aauuguuauggccaugaagaau

SEQ ID NO: 621324 - RNA, 23 nt, Artificial Sequence
  Synthetic
aaauuguuauggccaugaagaau

SEQ ID NO: 621325 - RNA, 24 nt, Artificial Sequence
  Synthetic
gaaauuguuauggccaugaagaau

SEQ ID NO: 621326 - RNA, 18 nt, Artificial Sequence
  Synthetic
gugaagauuuauaagaau

SEQ ID NO: 621327 - RNA, 19 nt, Artificial Sequence
  Synthetic
ugugaagauuuauaagaau

SEQ ID NO: 621328 - RNA, 20 nt, Artificial Sequence
  Synthetic
cugugaagauuuauaagaau

SEQ ID NO: 621329 - RNA, 21 nt, Artificial Sequence
  Synthetic
acugugaagauuuauaagaau

SEQ ID NO: 621330 - RNA, 22 nt, Artificial Sequence
  Synthetic
aacugugaagauuuauaagaau

SEQ ID NO: 621331 - RNA, 23 nt, Artificial Sequence
  Synthetic
gaacugugaagauuuauaagaau

SEQ ID NO: 621332 - RNA, 24 nt, Artificial Sequence
  Synthetic
ugaacugugaagauuuauaagaau

SEQ ID NO: 621333 - RNA, 18 nt, Artificial Sequence
  Synthetic
uaaggaacaccuaagaau

SEQ ID NO: 621334 - RNA, 19 nt, Artificial Sequence
  Synthetic
auaaggaacaccuaagaau

SEQ ID NO: 621335 - RNA, 20 nt, Artificial Sequence
  Synthetic
aauaaggaacaccuaagaau

SEQ ID NO: 621336 - RNA, 21 nt, Artificial Sequence
  Synthetic
aaauaaggaacaccuaagaau

SEQ ID NO: 621337 - RNA, 22 nt, Artificial Sequence
  Synthetic
gaaauaaggaacaccuaagaau

SEQ ID NO: 621338 - RNA, 23 nt, Artificial Sequence
  Synthetic
ggaaauaaggaacaccuaagaau

SEQ ID NO: 621339 - RNA, 24 nt, Artificial Sequence
  Synthetic
gggaaauaaggaacaccuaagaau

SEQ ID NO: 621340 - RNA, 18 nt, Artificial Sequence
  Synthetic
acucuagggcguaagaau

SEQ ID NO: 621341 - RNA, 19 nt, Artificial Sequence
  Synthetic
gacucuagggcguaagaau

SEQ ID NO: 621342 - RNA, 20 nt, Artificial Sequence
  Synthetic
ugacucuagggcguaagaau

SEQ ID NO: 621343 - RNA, 21 nt, Artificial Sequence
  Synthetic
augacucuagggcguaagaau

SEQ ID NO: 621344 - RNA, 22 nt, Artificial Sequence
  Synthetic
aaugacucuagggcguaagaau

SEQ ID NO: 621345 - RNA, 23 nt, Artificial Sequence
  Synthetic
aaaugacucuagggcguaagaau

SEQ ID NO: 621346 - RNA, 24 nt, Artificial Sequence
  Synthetic
caaaugacucuagggcguaagaau

SEQ ID NO: 621347 - RNA, 18 nt, Artificial Sequence
  Synthetic
uuuauaggugguaagaau

SEQ ID NO: 621348 - RNA, 19 nt, Artificial Sequence
  Synthetic
auuuauaggugguaagaau

SEQ ID NO: 621349 - RNA, 20 nt, Artificial Sequence
  Synthetic
gauuuauaggugguaagaau

SEQ ID NO: 621350 - RNA, 21 nt, Artificial Sequence
  Synthetic
agauuuauaggugguaagaau

SEQ ID NO: 621351 - RNA, 22 nt, Artificial Sequence
  Synthetic
aagauuuauaggugguaagaau

SEQ ID NO: 621352 - RNA, 23 nt, Artificial Sequence
  Synthetic
gaagauuuauaggugguaagaau

SEQ ID NO: 621353 - RNA, 24 nt, Artificial Sequence
  Synthetic
ggaagauuuauaggugguaagaau

SEQ ID NO: 621354 - RNA, 18 nt, Artificial Sequence
  Synthetic
uuugaaaauauuaagaau

SEQ ID NO: 621355 - RNA, 19 nt, Artificial Sequence
  Synthetic
auuugaaaauauuaagaau

SEQ ID NO: 621356 - RNA, 20 nt, Artificial Sequence
  Synthetic
aauuugaaaauauuaagaau

SEQ ID NO: 621357 - RNA, 21 nt, Artificial Sequence
  Synthetic
uaauuugaaaauauuaagaau

SEQ ID NO: 621358 - RNA, 22 nt, Artificial Sequence
  Synthetic
auaauuugaaaauauuaagaau

SEQ ID NO: 621359 - RNA, 23 nt, Artificial Sequence
  Synthetic
cauaauuugaaaauauuaagaau

SEQ ID NO: 621360 - RNA, 24 nt, Artificial Sequence
  Synthetic
acauaauuugaaaauauuaagaau

SEQ ID NO: 621361 - RNA, 18 nt, Artificial Sequence
  Synthetic
gaagaaacauuuaagaau

SEQ ID NO: 621362 - RNA, 19 nt, Artificial Sequence
  Synthetic
ggaagaaacauuuaagaau

SEQ ID NO: 621363 - RNA, 20 nt, Artificial Sequence
  Synthetic
aggaagaaacauuuaagaau

SEQ ID NO: 621364 - RNA, 21 nt, Artificial Sequence
  Synthetic
gaggaagaaacauuuaagaau

SEQ ID NO: 621365 - RNA, 22 nt, Artificial Sequence
  Synthetic
ggaggaagaaacauuuaagaau

SEQ ID NO: 621366 - RNA, 23 nt, Artificial Sequence
  Synthetic
uggaggaagaaacauuuaagaau

SEQ ID NO: 621367 - RNA, 24 nt, Artificial Sequence
  Synthetic
cuggaggaagaaacauuuaagaau

SEQ ID NO: 621368 - RNA, 18 nt, Artificial Sequence
  Synthetic
uuuuacuucaaacagaau

SEQ ID NO: 621369 - RNA, 19 nt, Artificial Sequence
  Synthetic
cuuuuacuucaaacagaau

SEQ ID NO: 621370 - RNA, 20 nt, Artificial Sequence
  Synthetic
acuuuuacuucaaacagaau

SEQ ID NO: 621371 - RNA, 21 nt, Artificial Sequence
  Synthetic
gacuuuuacuucaaacagaau

SEQ ID NO: 621372 - RNA, 22 nt, Artificial Sequence
  Synthetic
ugacuuuuacuucaaacagaau

SEQ ID NO: 621373 - RNA, 23 nt, Artificial Sequence
  Synthetic
uugacuuuuacuucaaacagaau

SEQ ID NO: 621374 - RNA, 24 nt, Artificial Sequence
  Synthetic
uuugacuuuuacuucaaacagaau

SEQ ID NO: 621375 - RNA, 18 nt, Artificial Sequence
  Synthetic
guagcaaauaaacagaau

SEQ ID NO: 621376 - RNA, 19 nt, Artificial Sequence
  Synthetic
uguagcaaauaaacagaau

SEQ ID NO: 621377 - RNA, 20 nt, Artificial Sequence
  Synthetic
auguagcaaauaaacagaau

SEQ ID NO: 621378 - RNA, 21 nt, Artificial Sequence
  Synthetic
aauguagcaaauaaacagaau

SEQ ID NO: 621379 - RNA, 22 nt, Artificial Sequence
  Synthetic
aaauguagcaaauaaacagaau

SEQ ID NO: 621380 - RNA, 23 nt, Artificial Sequence
  Synthetic
aaaauguagcaaauaaacagaau

SEQ ID NO: 621381 - RNA, 24 nt, Artificial Sequence
  Synthetic
aaaaauguagcaaauaaacagaau

SEQ ID NO: 621382 - RNA, 18 nt, Artificial Sequence
  Synthetic
agauccauccaacagaau

SEQ ID NO: 621383 - RNA, 19 nt, Artificial Sequence
  Synthetic
aagauccauccaacagaau

SEQ ID NO: 621384 - RNA, 20 nt, Artificial Sequence
  Synthetic
caagauccauccaacagaau

SEQ ID NO: 621385 - RNA, 21 nt, Artificial Sequence
  Synthetic
acaagauccauccaacagaau

SEQ ID NO: 621386 - RNA, 22 nt, Artificial Sequence
  Synthetic
gacaagauccauccaacagaau

SEQ ID NO: 621387 - RNA, 23 nt, Artificial Sequence
  Synthetic
ugacaagauccauccaacagaau

SEQ ID NO: 621388 - RNA, 24 nt, Artificial Sequence
  Synthetic
gugacaagauccauccaacagaau

SEQ ID NO: 621389 - RNA, 18 nt, Artificial Sequence
  Synthetic
uucuccuccacacagaau

SEQ ID NO: 621390 - RNA, 19 nt, Artificial Sequence
  Synthetic
uuucuccuccacacagaau

SEQ ID NO: 621391 - RNA, 20 nt, Artificial Sequence
  Synthetic
uuuucuccuccacacagaau

SEQ ID NO: 621392 - RNA, 21 nt, Artificial Sequence
  Synthetic
uuuuucuccuccacacagaau

SEQ ID NO: 621393 - RNA, 22 nt, Artificial Sequence
  Synthetic
auuuuucuccuccacacagaau

SEQ ID NO: 621394 - RNA, 23 nt, Artificial Sequence
  Synthetic
cauuuuucuccuccacacagaau

SEQ ID NO: 621395 - RNA, 24 nt, Artificial Sequence
  Synthetic
ccauuuuucuccuccacacagaau

SEQ ID NO: 621396 - RNA, 18 nt, Artificial Sequence
  Synthetic
augugugauacacagaau

SEQ ID NO: 621397 - RNA, 19 nt, Artificial Sequence
  Synthetic
gaugugugauacacagaau

SEQ ID NO: 621398 - RNA, 20 nt, Artificial Sequence
  Synthetic
ggaugugugauacacagaau

SEQ ID NO: 621399 - RNA, 21 nt, Artificial Sequence
  Synthetic
aggaugugugauacacagaau

SEQ ID NO: 621400 - RNA, 22 nt, Artificial Sequence
  Synthetic
caggaugugugauacacagaau

SEQ ID NO: 621401 - RNA, 23 nt, Artificial Sequence
  Synthetic
acaggaugugugauacacagaau

SEQ ID NO: 621402 - RNA, 24 nt, Artificial Sequence
  Synthetic
cacaggaugugugauacacagaau

SEQ ID NO: 621403 - RNA, 18 nt, Artificial Sequence
  Synthetic
aaguagaauucacagaau

SEQ ID NO: 621404 - RNA, 19 nt, Artificial Sequence
  Synthetic
gaaguagaauucacagaau

SEQ ID NO: 621405 - RNA, 20 nt, Artificial Sequence
  Synthetic
ugaaguagaauucacagaau

SEQ ID NO: 621406 - RNA, 21 nt, Artificial Sequence
  Synthetic
uugaaguagaauucacagaau

SEQ ID NO: 621407 - RNA, 22 nt, Artificial Sequence
  Synthetic
uuugaaguagaauucacagaau

SEQ ID NO: 621408 - RNA, 23 nt, Artificial Sequence
  Synthetic
uuuugaaguagaauucacagaau

SEQ ID NO: 621409 - RNA, 24 nt, Artificial Sequence
  Synthetic
uuuuugaaguagaauucacagaau

SEQ ID NO: 621410 - RNA, 18 nt, Artificial Sequence
  Synthetic
ugacuuucuucacagaau

SEQ ID NO: 621411 - RNA, 19 nt, Artificial Sequence
  Synthetic
augacuuucuucacagaau

SEQ ID NO: 621412 - RNA, 20 nt, Artificial Sequence
  Synthetic
aaugacuuucuucacagaau

SEQ ID NO: 621413 - RNA, 21 nt, Artificial Sequence
  Synthetic
caaugacuuucuucacagaau

SEQ ID NO: 621414 - RNA, 22 nt, Artificial Sequence
  Synthetic
ccaaugacuuucuucacagaau

SEQ ID NO: 621415 - RNA, 23 nt, Artificial Sequence
  Synthetic
accaaugacuuucuucacagaau

SEQ ID NO: 621416 - RNA, 24 nt, Artificial Sequence
  Synthetic
uaccaaugacuuucuucacagaau

SEQ ID NO: 621417 - RNA, 19 nt, Artificial Sequence
  Synthetic
uugacuuucuucacagaau

SEQ ID NO: 621418 - RNA, 20 nt, Artificial Sequence
  Synthetic
auugacuuucuucacagaau

SEQ ID NO: 621419 - RNA, 21 nt, Artificial Sequence
  Synthetic
cauugacuuucuucacagaau

SEQ ID NO: 621420 - RNA, 22 nt, Artificial Sequence
  Synthetic
ccauugacuuucuucacagaau

SEQ ID NO: 621421 - RNA, 23 nt, Artificial Sequence
  Synthetic
accauugacuuucuucacagaau

SEQ ID NO: 621422 - RNA, 24 nt, Artificial Sequence
  Synthetic
uaccauugacuuucuucacagaau

SEQ ID NO: 621423 - RNA, 18 nt, Artificial Sequence
  Synthetic
acaggcaaccuacagaau

SEQ ID NO: 621424 - RNA, 19 nt, Artificial Sequence
  Synthetic
aacaggcaaccuacagaau

SEQ ID NO: 621425 - RNA, 20 nt, Artificial Sequence
  Synthetic
caacaggcaaccuacagaau

SEQ ID NO: 621426 - RNA, 21 nt, Artificial Sequence
  Synthetic
ucaacaggcaaccuacagaau

SEQ ID NO: 621427 - RNA, 22 nt, Artificial Sequence
  Synthetic
gucaacaggcaaccuacagaau

SEQ ID NO: 621428 - RNA, 23 nt, Artificial Sequence
  Synthetic
agucaacaggcaaccuacagaau

SEQ ID NO: 621429 - RNA, 24 nt, Artificial Sequence
  Synthetic
gagucaacaggcaaccuacagaau

SEQ ID NO: 621430 - RNA, 18 nt, Artificial Sequence
  Synthetic
acaggcagccuacagaau

SEQ ID NO: 621431 - RNA, 19 nt, Artificial Sequence
  Synthetic
aacaggcagccuacagaau

SEQ ID NO: 621432 - RNA, 20 nt, Artificial Sequence
  Synthetic
gaacaggcagccuacagaau

SEQ ID NO: 621433 - RNA, 21 nt, Artificial Sequence
  Synthetic
ugaacaggcagccuacagaau

SEQ ID NO: 621434 - RNA, 22 nt, Artificial Sequence
  Synthetic
gugaacaggcagccuacagaau

SEQ ID NO: 621435 - RNA, 23 nt, Artificial Sequence
  Synthetic
agugaacaggcagccuacagaau

SEQ ID NO: 621436 - RNA, 24 nt, Artificial Sequence
  Synthetic
gagugaacaggcagccuacagaau

SEQ ID NO: 621437 - RNA, 18 nt, Artificial Sequence
  Synthetic
acagacagucuacagaau

SEQ ID NO: 621438 - RNA, 19 nt, Artificial Sequence
  Synthetic
aacagacagucuacagaau

SEQ ID NO: 621439 - RNA, 20 nt, Artificial Sequence
  Synthetic
aaacagacagucuacagaau

SEQ ID NO: 621440 - RNA, 21 nt, Artificial Sequence
  Synthetic
uaaacagacagucuacagaau

SEQ ID NO: 621441 - RNA, 22 nt, Artificial Sequence
  Synthetic
guaaacagacagucuacagaau

SEQ ID NO: 621442 - RNA, 23 nt, Artificial Sequence
  Synthetic
aguaaacagacagucuacagaau

SEQ ID NO: 621443 - RNA, 24 nt, Artificial Sequence
  Synthetic
gaguaaacagacagucuacagaau

SEQ ID NO: 621444 - RNA, 18 nt, Artificial Sequence
  Synthetic
ugacuuucuuuacagaau

SEQ ID NO: 621445 - RNA, 19 nt, Artificial Sequence
  Synthetic
cugacuuucuuuacagaau

SEQ ID NO: 621446 - RNA, 20 nt, Artificial Sequence
  Synthetic
acugacuuucuuuacagaau

SEQ ID NO: 621447 - RNA, 21 nt, Artificial Sequence
  Synthetic
cacugacuuucuuuacagaau

SEQ ID NO: 621448 - RNA, 22 nt, Artificial Sequence
  Synthetic
ccacugacuuucuuuacagaau

SEQ ID NO: 621449 - RNA, 23 nt, Artificial Sequence
  Synthetic
accacugacuuucuuuacagaau

SEQ ID NO: 621450 - RNA, 24 nt, Artificial Sequence
  Synthetic
uaccacugacuuucuuuacagaau

SEQ ID NO: 621451 - RNA, 18 nt, Artificial Sequence
  Synthetic
agauuuuuaaaccagaau

SEQ ID NO: 621452 - RNA, 19 nt, Artificial Sequence
  Synthetic
uagauuuuuaaaccagaau

SEQ ID NO: 621453 - RNA, 20 nt, Artificial Sequence
  Synthetic
uuagauuuuuaaaccagaau

SEQ ID NO: 621454 - RNA, 21 nt, Artificial Sequence
  Synthetic
auuagauuuuuaaaccagaau

SEQ ID NO: 621455 - RNA, 22 nt, Artificial Sequence
  Synthetic
cauuagauuuuuaaaccagaau

SEQ ID NO: 621456 - RNA, 23 nt, Artificial Sequence
  Synthetic
acauuagauuuuuaaaccagaau

SEQ ID NO: 621457 - RNA, 24 nt, Artificial Sequence
  Synthetic
uacauuagauuuuuaaaccagaau

SEQ ID NO: 621458 - RNA, 18 nt, Artificial Sequence
  Synthetic
gagaagucucaccagaau

SEQ ID NO: 621459 - RNA, 19 nt, Artificial Sequence
  Synthetic
agagaagucucaccagaau

SEQ ID NO: 621460 - RNA, 20 nt, Artificial Sequence
  Synthetic
gagagaagucucaccagaau

SEQ ID NO: 621461 - RNA, 21 nt, Artificial Sequence
  Synthetic
agagagaagucucaccagaau

SEQ ID NO: 621462 - RNA, 22 nt, Artificial Sequence
  Synthetic
aagagagaagucucaccagaau

SEQ ID NO: 621463 - RNA, 23 nt, Artificial Sequence
  Synthetic
aaagagagaagucucaccagaau

SEQ ID NO: 621464 - RNA, 24 nt, Artificial Sequence
  Synthetic
aaaagagagaagucucaccagaau

SEQ ID NO: 621465 - RNA, 18 nt, Artificial Sequence
  Synthetic
uuuggggaggaccagaau

SEQ ID NO: 621466 - RNA, 19 nt, Artificial Sequence
  Synthetic
uuuuggggaggaccagaau

SEQ ID NO: 621467 - RNA, 20 nt, Artificial Sequence
  Synthetic
guuuuggggaggaccagaau

SEQ ID NO: 621468 - RNA, 21 nt, Artificial Sequence
  Synthetic
uguuuuggggaggaccagaau

SEQ ID NO: 621469 - RNA, 22 nt, Artificial Sequence
  Synthetic
guguuuuggggaggaccagaau

SEQ ID NO: 621470 - RNA, 23 nt, Artificial Sequence
  Synthetic
uguguuuuggggaggaccagaau

SEQ ID NO: 621471 - RNA, 24 nt, Artificial Sequence
  Synthetic
cuguguuuuggggaggaccagaau

SEQ ID NO: 621472 - RNA, 18 nt, Artificial Sequence
  Synthetic
uuaaacuucuaccagaau

SEQ ID NO: 621473 - RNA, 19 nt, Artificial Sequence
  Synthetic
cuuaaacuucuaccagaau

SEQ ID NO: 621474 - RNA, 20 nt, Artificial Sequence
  Synthetic
ccuuaaacuucuaccagaau

SEQ ID NO: 621475 - RNA, 21 nt, Artificial Sequence
  Synthetic
uccuuaaacuucuaccagaau

SEQ ID NO: 621476 - RNA, 22 nt, Artificial Sequence
  Synthetic
guccuuaaacuucuaccagaau

SEQ ID NO: 621477 - RNA, 23 nt, Artificial Sequence
  Synthetic
aguccuuaaacuucuaccagaau

SEQ ID NO: 621478 - RNA, 24 nt, Artificial Sequence
  Synthetic
aaguccuuaaacuucuaccagaau

SEQ ID NO: 621479 - RNA, 18 nt, Artificial Sequence
  Synthetic
aaugauaaguaccagaau

SEQ ID NO: 621480 - RNA, 19 nt, Artificial Sequence
  Synthetic
caaugauaaguaccagaau

SEQ ID NO: 621481 - RNA, 20 nt, Artificial Sequence
  Synthetic
gcaaugauaaguaccagaau

SEQ ID NO: 621482 - RNA, 21 nt, Artificial Sequence
  Synthetic
agcaaugauaaguaccagaau

SEQ ID NO: 621483 - RNA, 22 nt, Artificial Sequence
  Synthetic
aagcaaugauaaguaccagaau

SEQ ID NO: 621484 - RNA, 23 nt, Artificial Sequence
  Synthetic
uaagcaaugauaaguaccagaau

SEQ ID NO: 621485 - RNA, 24 nt, Artificial Sequence
  Synthetic
uuaagcaaugauaaguaccagaau

SEQ ID NO: 621486 - RNA, 18 nt, Artificial Sequence
  Synthetic
uuugcaugaacccagaau

SEQ ID NO: 621487 - RNA, 19 nt, Artificial Sequence
  Synthetic
guuugcaugaacccagaau

SEQ ID NO: 621488 - RNA, 20 nt, Artificial Sequence
  Synthetic
aguuugcaugaacccagaau

SEQ ID NO: 621489 - RNA, 21 nt, Artificial Sequence
  Synthetic
aaguuugcaugaacccagaau

SEQ ID NO: 621490 - RNA, 22 nt, Artificial Sequence
  Synthetic
aaaguuugcaugaacccagaau

SEQ ID NO: 621491 - RNA, 23 nt, Artificial Sequence
  Synthetic
aaaaguuugcaugaacccagaau

SEQ ID NO: 621492 - RNA, 24 nt, Artificial Sequence
  Synthetic
gaaaaguuugcaugaacccagaau

SEQ ID NO: 621493 - RNA, 18 nt, Artificial Sequence
  Synthetic
uacauggaggcccagaau

SEQ ID NO: 621494 - RNA, 19 nt, Artificial Sequence
  Synthetic
cuacauggaggcccagaau

SEQ ID NO: 621495 - RNA, 20 nt, Artificial Sequence
  Synthetic
acuacauggaggcccagaau

SEQ ID NO: 621496 - RNA, 21 nt, Artificial Sequence
  Synthetic
aacuacauggaggcccagaau

SEQ ID NO: 621497 - RNA, 22 nt, Artificial Sequence
  Synthetic
aaacuacauggaggcccagaau

SEQ ID NO: 621498 - RNA, 23 nt, Artificial Sequence
  Synthetic
aaaacuacauggaggcccagaau

SEQ ID NO: 621499 - RNA, 24 nt, Artificial Sequence
  Synthetic
uaaaacuacauggaggcccagaau

SEQ ID NO: 621500 - RNA, 18 nt, Artificial Sequence
  Synthetic
ggaagcuggggccagaau

SEQ ID NO: 621501 - RNA, 19 nt, Artificial Sequence
  Synthetic
gggaagcuggggccagaau

SEQ ID NO: 621502 - RNA, 20 nt, Artificial Sequence
  Synthetic
agggaagcuggggccagaau

SEQ ID NO: 621503 - RNA, 21 nt, Artificial Sequence
  Synthetic
aagggaagcuggggccagaau

SEQ ID NO: 621504 - RNA, 22 nt, Artificial Sequence
  Synthetic
gaagggaagcuggggccagaau

SEQ ID NO: 621505 - RNA, 23 nt, Artificial Sequence
  Synthetic
agaagggaagcuggggccagaau

SEQ ID NO: 621506 - RNA, 24 nt, Artificial Sequence
  Synthetic
gagaagggaagcuggggccagaau

SEQ ID NO: 621507 - RNA, 18 nt, Artificial Sequence
  Synthetic
aaaaguguuggccagaau

SEQ ID NO: 621508 - RNA, 19 nt, Artificial Sequence
  Synthetic
gaaaaguguuggccagaau

SEQ ID NO: 621509 - RNA, 20 nt, Artificial Sequence
  Synthetic
agaaaaguguuggccagaau

SEQ ID NO: 621510 - RNA, 21 nt, Artificial Sequence
  Synthetic
aagaaaaguguuggccagaau

SEQ ID NO: 621511 - RNA, 22 nt, Artificial Sequence
  Synthetic
aaagaaaaguguuggccagaau

SEQ ID NO: 621512 - RNA, 23 nt, Artificial Sequence
  Synthetic
aaaagaaaaguguuggccagaau

SEQ ID NO: 621513 - RNA, 24 nt, Artificial Sequence
  Synthetic
caaaagaaaaguguuggccagaau

SEQ ID NO: 621514 - RNA, 18 nt, Artificial Sequence
  Synthetic
aaguguucucuccagaau

SEQ ID NO: 621515 - RNA, 19 nt, Artificial Sequence
  Synthetic
caaguguucucuccagaau

SEQ ID NO: 621516 - RNA, 20 nt, Artificial Sequence
  Synthetic
ucaaguguucucuccagaau

SEQ ID NO: 621517 - RNA, 21 nt, Artificial Sequence
  Synthetic
uucaaguguucucuccagaau

SEQ ID NO: 621518 - RNA, 22 nt, Artificial Sequence
  Synthetic
cuucaaguguucucuccagaau

SEQ ID NO: 621519 - RNA, 23 nt, Artificial Sequence
  Synthetic
ucuucaaguguucucuccagaau

SEQ ID NO: 621520 - RNA, 24 nt, Artificial Sequence
  Synthetic
uucuucaaguguucucuccagaau

SEQ ID NO: 621521 - RNA, 18 nt, Artificial Sequence
  Synthetic
auuuauagccagcagaau

SEQ ID NO: 621522 - RNA, 19 nt, Artificial Sequence
  Synthetic
aauuuauagccagcagaau

SEQ ID NO: 621523 - RNA, 20 nt, Artificial Sequence
  Synthetic
uaauuuauagccagcagaau

SEQ ID NO: 621524 - RNA, 21 nt, Artificial Sequence
  Synthetic
auaauuuauagccagcagaau

SEQ ID NO: 621525 - RNA, 22 nt, Artificial Sequence
  Synthetic
gauaauuuauagccagcagaau

SEQ ID NO: 621526 - RNA, 23 nt, Artificial Sequence
  Synthetic
cgauaauuuauagccagcagaau

SEQ ID NO: 621527 - RNA, 24 nt, Artificial Sequence
  Synthetic
acgauaauuuauagccagcagaau

SEQ ID NO: 621528 - RNA, 18 nt, Artificial Sequence
  Synthetic
aagagggacacgcagaau

SEQ ID NO: 621529 - RNA, 19 nt, Artificial Sequence
  Synthetic
uaagagggacacgcagaau

SEQ ID NO: 621530 - RNA, 20 nt, Artificial Sequence
  Synthetic
auaagagggacacgcagaau

SEQ ID NO: 621531 - RNA, 21 nt, Artificial Sequence
  Synthetic
cauaagagggacacgcagaau

SEQ ID NO: 621532 - RNA, 22 nt, Artificial Sequence
  Synthetic
acauaagagggacacgcagaau

SEQ ID NO: 621533 - RNA, 23 nt, Artificial Sequence
  Synthetic
cacauaagagggacacgcagaau

SEQ ID NO: 621534 - RNA, 24 nt, Artificial Sequence
  Synthetic
ccacauaagagggacacgcagaau

SEQ ID NO: 621535 - RNA, 18 nt, Artificial Sequence
  Synthetic
ggagauugcuggcagaau

SEQ ID NO: 621536 - RNA, 19 nt, Artificial Sequence
  Synthetic
gggagauugcuggcagaau

SEQ ID NO: 621537 - RNA, 20 nt, Artificial Sequence
  Synthetic
ggggagauugcuggcagaau

SEQ ID NO: 621538 - RNA, 21 nt, Artificial Sequence
  Synthetic
cggggagauugcuggcagaau

SEQ ID NO: 621539 - RNA, 22 nt, Artificial Sequence
  Synthetic
acggggagauugcuggcagaau

SEQ ID NO: 621540 - RNA, 23 nt, Artificial Sequence
  Synthetic
uacggggagauugcuggcagaau

SEQ ID NO: 621541 - RNA, 24 nt, Artificial Sequence
  Synthetic
auacggggagauugcuggcagaau

SEQ ID NO: 621542 - RNA, 18 nt, Artificial Sequence
  Synthetic
ggcugucugaugcagaau

SEQ ID NO: 621543 - RNA, 19 nt, Artificial Sequence
  Synthetic
aggcugucugaugcagaau

SEQ ID NO: 621544 - RNA, 20 nt, Artificial Sequence
  Synthetic
caggcugucugaugcagaau

SEQ ID NO: 621545 - RNA, 21 nt, Artificial Sequence
  Synthetic
acaggcugucugaugcagaau

SEQ ID NO: 621546 - RNA, 22 nt, Artificial Sequence
  Synthetic
gacaggcugucugaugcagaau

SEQ ID NO: 621547 - RNA, 23 nt, Artificial Sequence
  Synthetic
agacaggcugucugaugcagaau

SEQ ID NO: 621548 - RNA, 24 nt, Artificial Sequence
  Synthetic
cagacaggcugucugaugcagaau

SEQ ID NO: 621549 - RNA, 18 nt, Artificial Sequence
  Synthetic
guugggagucaucagaau

SEQ ID NO: 621550 - RNA, 19 nt, Artificial Sequence
  Synthetic
aguugggagucaucagaau

SEQ ID NO: 621551 - RNA, 20 nt, Artificial Sequence
  Synthetic
uaguugggagucaucagaau

SEQ ID NO: 621552 - RNA, 21 nt, Artificial Sequence
  Synthetic
cuaguugggagucaucagaau

SEQ ID NO: 621553 - RNA, 22 nt, Artificial Sequence
  Synthetic
ccuaguugggagucaucagaau

SEQ ID NO: 621554 - RNA, 23 nt, Artificial Sequence
  Synthetic
uccuaguugggagucaucagaau

SEQ ID NO: 621555 - RNA, 24 nt, Artificial Sequence
  Synthetic
cuccuaguugggagucaucagaau

SEQ ID NO: 621556 - RNA, 18 nt, Artificial Sequence
  Synthetic
gauuaaaaguaucagaau

SEQ ID NO: 621557 - RNA, 19 nt, Artificial Sequence
  Synthetic
ggauuaaaaguaucagaau

SEQ ID NO: 621558 - RNA, 20 nt, Artificial Sequence
  Synthetic
uggauuaaaaguaucagaau

SEQ ID NO: 621559 - RNA, 21 nt, Artificial Sequence
  Synthetic
auggauuaaaaguaucagaau

SEQ ID NO: 621560 - RNA, 22 nt, Artificial Sequence
  Synthetic
cauggauuaaaaguaucagaau

SEQ ID NO: 621561 - RNA, 23 nt, Artificial Sequence
  Synthetic
acauggauuaaaaguaucagaau

SEQ ID NO: 621562 - RNA, 24 nt, Artificial Sequence
  Synthetic
uacauggauuaaaaguaucagaau

SEQ ID NO: 621563 - RNA, 18 nt, Artificial Sequence
  Synthetic
guaggucauuaucagaau

SEQ ID NO: 621564 - RNA, 19 nt, Artificial Sequence
  Synthetic
cguaggucauuaucagaau

SEQ ID NO: 621565 - RNA, 20 nt, Artificial Sequence
  Synthetic
ccguaggucauuaucagaau

SEQ ID NO: 621566 - RNA, 21 nt, Artificial Sequence
  Synthetic
uccguaggucauuaucagaau

SEQ ID NO: 621567 - RNA, 22 nt, Artificial Sequence
  Synthetic
cuccguaggucauuaucagaau

SEQ ID NO: 621568 - RNA, 23 nt, Artificial Sequence
  Synthetic
ccuccguaggucauuaucagaau

SEQ ID NO: 621569 - RNA, 24 nt, Artificial Sequence
  Synthetic
cccuccguaggucauuaucagaau

SEQ ID NO: 621570 - RNA, 18 nt, Artificial Sequence
  Synthetic
augcucuguacucagaau

SEQ ID NO: 621571 - RNA, 19 nt, Artificial Sequence
  Synthetic
uaugcucuguacucagaau

SEQ ID NO: 621572 - RNA, 20 nt, Artificial Sequence
  Synthetic
guaugcucuguacucagaau

SEQ ID NO: 621573 - RNA, 21 nt, Artificial Sequence
  Synthetic
uguaugcucuguacucagaau

SEQ ID NO: 621574 - RNA, 22 nt, Artificial Sequence
  Synthetic
cuguaugcucuguacucagaau

SEQ ID NO: 621575 - RNA, 23 nt, Artificial Sequence
  Synthetic
ucuguaugcucuguacucagaau

SEQ ID NO: 621576 - RNA, 24 nt, Artificial Sequence
  Synthetic
cucuguaugcucuguacucagaau

SEQ ID NO: 621577 - RNA, 18 nt, Artificial Sequence
  Synthetic
ucaaggagagcucagaau

SEQ ID NO: 621578 - RNA, 19 nt, Artificial Sequence
  Synthetic
gucaaggagagcucagaau

SEQ ID NO: 621579 - RNA, 20 nt, Artificial Sequence
  Synthetic
ggucaaggagagcucagaau

SEQ ID NO: 621580 - RNA, 21 nt, Artificial Sequence
  Synthetic
aggucaaggagagcucagaau

SEQ ID NO: 621581 - RNA, 22 nt, Artificial Sequence
  Synthetic
aaggucaaggagagcucagaau

SEQ ID NO: 621582 - RNA, 23 nt, Artificial Sequence
  Synthetic
caaggucaaggagagcucagaau

SEQ ID NO: 621583 - RNA, 24 nt, Artificial Sequence
  Synthetic
ucaaggucaaggagagcucagaau

SEQ ID NO: 621584 - RNA, 18 nt, Artificial Sequence
  Synthetic
ggaaaauaaauucagaau

SEQ ID NO: 621585 - RNA, 19 nt, Artificial Sequence
  Synthetic
uggaaaauaaauucagaau

SEQ ID NO: 621586 - RNA, 20 nt, Artificial Sequence
  Synthetic
auggaaaauaaauucagaau

SEQ ID NO: 621587 - RNA, 21 nt, Artificial Sequence
  Synthetic
aauggaaaauaaauucagaau

SEQ ID NO: 621588 - RNA, 22 nt, Artificial Sequence
  Synthetic
caauggaaaauaaauucagaau

SEQ ID NO: 621589 - RNA, 23 nt, Artificial Sequence
  Synthetic
ucaauggaaaauaaauucagaau

SEQ ID NO: 621590 - RNA, 24 nt, Artificial Sequence
  Synthetic
uucaauggaaaauaaauucagaau

SEQ ID NO: 621591 - RNA, 18 nt, Artificial Sequence
  Synthetic
cucuuuacacuucagaau

SEQ ID NO: 621592 - RNA, 19 nt, Artificial Sequence
  Synthetic
acucuuuacacuucagaau

SEQ ID NO: 621593 - RNA, 20 nt, Artificial Sequence
  Synthetic
cacucuuuacacuucagaau

SEQ ID NO: 621594 - RNA, 21 nt, Artificial Sequence
  Synthetic
ccacucuuuacacuucagaau

SEQ ID NO: 621595 - RNA, 22 nt, Artificial Sequence
  Synthetic
uccacucuuuacacuucagaau

SEQ ID NO: 621596 - RNA, 23 nt, Artificial Sequence
  Synthetic
auccacucuuuacacuucagaau

SEQ ID NO: 621597 - RNA, 24 nt, Artificial Sequence
  Synthetic
uauccacucuuuacacuucagaau

SEQ ID NO: 621598 - RNA, 18 nt, Artificial Sequence
  Synthetic
gauuccuuacuucagaau

SEQ ID NO: 621599 - RNA, 19 nt, Artificial Sequence
  Synthetic
agauuccuuacuucagaau

SEQ ID NO: 621600 - RNA, 20 nt, Artificial Sequence
  Synthetic
aagauuccuuacuucagaau

SEQ ID NO: 621601 - RNA, 21 nt, Artificial Sequence
  Synthetic
aaagauuccuuacuucagaau

SEQ ID NO: 621602 - RNA, 22 nt, Artificial Sequence
  Synthetic
gaaagauuccuuacuucagaau

SEQ ID NO: 621603 - RNA, 23 nt, Artificial Sequence
  Synthetic
ugaaagauuccuuacuucagaau

SEQ ID NO: 621604 - RNA, 24 nt, Artificial Sequence
  Synthetic
cugaaagauuccuuacuucagaau

SEQ ID NO: 621605 - RNA, 18 nt, Artificial Sequence
  Synthetic
cagcaguggcuucagaau

SEQ ID NO: 621606 - RNA, 19 nt, Artificial Sequence
  Synthetic
acagcaguggcuucagaau

SEQ ID NO: 621607 - RNA, 20 nt, Artificial Sequence
  Synthetic
aacagcaguggcuucagaau

SEQ ID NO: 621608 - RNA, 21 nt, Artificial Sequence
  Synthetic
aaacagcaguggcuucagaau

SEQ ID NO: 621609 - RNA, 22 nt, Artificial Sequence
  Synthetic
aaaacagcaguggcuucagaau

SEQ ID NO: 621610 - RNA, 23 nt, Artificial Sequence
  Synthetic
caaaacagcaguggcuucagaau

SEQ ID NO: 621611 - RNA, 24 nt, Artificial Sequence
  Synthetic
ccaaaacagcaguggcuucagaau

SEQ ID NO: 621612 - RNA, 18 nt, Artificial Sequence
  Synthetic
caccaaaguguucagaau

SEQ ID NO: 621613 - RNA, 19 nt, Artificial Sequence
  Synthetic
ucaccaaaguguucagaau

SEQ ID NO: 621614 - RNA, 20 nt, Artificial Sequence
  Synthetic
gucaccaaaguguucagaau

SEQ ID NO: 621615 - RNA, 21 nt, Artificial Sequence
  Synthetic
ggucaccaaaguguucagaau

SEQ ID NO: 621616 - RNA, 22 nt, Artificial Sequence
  Synthetic
gggucaccaaaguguucagaau

SEQ ID NO: 621617 - RNA, 23 nt, Artificial Sequence
  Synthetic
ggggucaccaaaguguucagaau

SEQ ID NO: 621618 - RNA, 24 nt, Artificial Sequence
  Synthetic
gggggucaccaaaguguucagaau

SEQ ID NO: 621619 - RNA, 18 nt, Artificial Sequence
  Synthetic
cagagaaccuuucagaau

SEQ ID NO: 621620 - RNA, 19 nt, Artificial Sequence
  Synthetic
acagagaaccuuucagaau

SEQ ID NO: 621621 - RNA, 20 nt, Artificial Sequence
  Synthetic
cacagagaaccuuucagaau

SEQ ID NO: 621622 - RNA, 21 nt, Artificial Sequence
  Synthetic
ccacagagaaccuuucagaau

SEQ ID NO: 621623 - RNA, 22 nt, Artificial Sequence
  Synthetic
uccacagagaaccuuucagaau

SEQ ID NO: 621624 - RNA, 23 nt, Artificial Sequence
  Synthetic
uuccacagagaaccuuucagaau

SEQ ID NO: 621625 - RNA, 24 nt, Artificial Sequence
  Synthetic
uuuccacagagaaccuuucagaau

SEQ ID NO: 621626 - RNA, 18 nt, Artificial Sequence
  Synthetic
cauuagaggcaagagaau

SEQ ID NO: 621627 - RNA, 19 nt, Artificial Sequence
  Synthetic
acauuagaggcaagagaau

SEQ ID NO: 621628 - RNA, 20 nt, Artificial Sequence
  Synthetic
aacauuagaggcaagagaau

SEQ ID NO: 621629 - RNA, 21 nt, Artificial Sequence
  Synthetic
gaacauuagaggcaagagaau

SEQ ID NO: 621630 - RNA, 22 nt, Artificial Sequence
  Synthetic
agaacauuagaggcaagagaau

SEQ ID NO: 621631 - RNA, 23 nt, Artificial Sequence
  Synthetic
aagaacauuagaggcaagagaau

SEQ ID NO: 621632 - RNA, 24 nt, Artificial Sequence
  Synthetic
caagaacauuagaggcaagagaau

SEQ ID NO: 621633 - RNA, 18 nt, Artificial Sequence
  Synthetic
augcgagaagaagagaau

SEQ ID NO: 621634 - RNA, 19 nt, Artificial Sequence
  Synthetic
uaugcgagaagaagagaau

SEQ ID NO: 621635 - RNA, 20 nt, Artificial Sequence
  Synthetic
cuaugcgagaagaagagaau

SEQ ID NO: 621636 - RNA, 21 nt, Artificial Sequence
  Synthetic
ucuaugcgagaagaagagaau

SEQ ID NO: 621637 - RNA, 22 nt, Artificial Sequence
  Synthetic
aucuaugcgagaagaagagaau

SEQ ID NO: 621638 - RNA, 23 nt, Artificial Sequence
  Synthetic
uaucuaugcgagaagaagagaau

SEQ ID NO: 621639 - RNA, 24 nt, Artificial Sequence
  Synthetic
uuaucuaugcgagaagaagagaau

SEQ ID NO: 621640 - RNA, 18 nt, Artificial Sequence
  Synthetic
ggcuggagguaagagaau

SEQ ID NO: 621641 - RNA, 19 nt, Artificial Sequence
  Synthetic
gggcuggagguaagagaau

SEQ ID NO: 621642 - RNA, 20 nt, Artificial Sequence
  Synthetic
ugggcuggagguaagagaau

SEQ ID NO: 621643 - RNA, 21 nt, Artificial Sequence
  Synthetic
cugggcuggagguaagagaau

SEQ ID NO: 621644 - RNA, 22 nt, Artificial Sequence
  Synthetic
gcugggcuggagguaagagaau

SEQ ID NO: 621645 - RNA, 23 nt, Artificial Sequence
  Synthetic
agcugggcuggagguaagagaau

SEQ ID NO: 621646 - RNA, 24 nt, Artificial Sequence
  Synthetic
gagcugggcuggagguaagagaau

SEQ ID NO: 621647 - RNA, 18 nt, Artificial Sequence
  Synthetic
caugaggauacagagaau

SEQ ID NO: 621648 - RNA, 19 nt, Artificial Sequence
  Synthetic
ucaugaggauacagagaau

SEQ ID NO: 621649 - RNA, 20 nt, Artificial Sequence
  Synthetic
uucaugaggauacagagaau

SEQ ID NO: 621650 - RNA, 21 nt, Artificial Sequence
  Synthetic
guucaugaggauacagagaau

SEQ ID NO: 621651 - RNA, 22 nt, Artificial Sequence
  Synthetic
uguucaugaggauacagagaau

SEQ ID NO: 621652 - RNA, 23 nt, Artificial Sequence
  Synthetic
guguucaugaggauacagagaau

SEQ ID NO: 621653 - RNA, 24 nt, Artificial Sequence
  Synthetic
aguguucaugaggauacagagaau

SEQ ID NO: 621654 - RNA, 18 nt, Artificial Sequence
  Synthetic
ugacaccuuacagagaau

SEQ ID NO: 621655 - RNA, 19 nt, Artificial Sequence
  Synthetic
gugacaccuuacagagaau

SEQ ID NO: 621656 - RNA, 20 nt, Artificial Sequence
  Synthetic
agugacaccuuacagagaau

SEQ ID NO: 621657 - RNA, 21 nt, Artificial Sequence
  Synthetic
aagugacaccuuacagagaau

SEQ ID NO: 621658 - RNA, 22 nt, Artificial Sequence
  Synthetic
gaagugacaccuuacagagaau

SEQ ID NO: 621659 - RNA, 23 nt, Artificial Sequence
  Synthetic
agaagugacaccuuacagagaau

SEQ ID NO: 621660 - RNA, 24 nt, Artificial Sequence
  Synthetic
aagaagugacaccuuacagagaau

SEQ ID NO: 621661 - RNA, 18 nt, Artificial Sequence
  Synthetic
gccugggcuggagagaau

SEQ ID NO: 621662 - RNA, 19 nt, Artificial Sequence
  Synthetic
ugccugggcuggagagaau

SEQ ID NO: 621663 - RNA, 20 nt, Artificial Sequence
  Synthetic
gugccugggcuggagagaau

SEQ ID NO: 621664 - RNA, 21 nt, Artificial Sequence
  Synthetic
ugugccugggcuggagagaau

SEQ ID NO: 621665 - RNA, 22 nt, Artificial Sequence
  Synthetic
uugugccugggcuggagagaau

SEQ ID NO: 621666 - RNA, 23 nt, Artificial Sequence
  Synthetic
uuugugccugggcuggagagaau

SEQ ID NO: 621667 - RNA, 24 nt, Artificial Sequence
  Synthetic
cuuugugccugggcuggagagaau

SEQ ID NO: 621668 - RNA, 18 nt, Artificial Sequence
  Synthetic
auagugauaugagagaau

SEQ ID NO: 621669 - RNA, 19 nt, Artificial Sequence
  Synthetic
aauagugauaugagagaau

SEQ ID NO: 621670 - RNA, 20 nt, Artificial Sequence
  Synthetic
aaauagugauaugagagaau

SEQ ID NO: 621671 - RNA, 21 nt, Artificial Sequence
  Synthetic
aaaauagugauaugagagaau

SEQ ID NO: 621672 - RNA, 22 nt, Artificial Sequence
  Synthetic
caaaauagugauaugagagaau

SEQ ID NO: 621673 - RNA, 23 nt, Artificial Sequence
  Synthetic
ccaaaauagugauaugagagaau

SEQ ID NO: 621674 - RNA, 24 nt, Artificial Sequence
  Synthetic
uccaaaauagugauaugagagaau

SEQ ID NO: 621675 - RNA, 18 nt, Artificial Sequence
  Synthetic
uggaacuuccuagagaau

SEQ ID NO: 621676 - RNA, 19 nt, Artificial Sequence
  Synthetic
cuggaacuuccuagagaau

SEQ ID NO: 621677 - RNA, 20 nt, Artificial Sequence
  Synthetic
ucuggaacuuccuagagaau

SEQ ID NO: 621678 - RNA, 21 nt, Artificial Sequence
  Synthetic
cucuggaacuuccuagagaau

SEQ ID NO: 621679 - RNA, 22 nt, Artificial Sequence
  Synthetic
acucuggaacuuccuagagaau

SEQ ID NO: 621680 - RNA, 23 nt, Artificial Sequence
  Synthetic
aacucuggaacuuccuagagaau

SEQ ID NO: 621681 - RNA, 24 nt, Artificial Sequence
  Synthetic
aaacucuggaacuuccuagagaau

SEQ ID NO: 621682 - RNA, 18 nt, Artificial Sequence
  Synthetic
cagauuuggcuagagaau

SEQ ID NO: 621683 - RNA, 19 nt, Artificial Sequence
  Synthetic
gcagauuuggcuagagaau

SEQ ID NO: 621684 - RNA, 20 nt, Artificial Sequence
  Synthetic
ggcagauuuggcuagagaau

SEQ ID NO: 621685 - RNA, 21 nt, Artificial Sequence
  Synthetic
uggcagauuuggcuagagaau

SEQ ID NO: 621686 - RNA, 22 nt, Artificial Sequence
  Synthetic
uuggcagauuuggcuagagaau

SEQ ID NO: 621687 - RNA, 23 nt, Artificial Sequence
  Synthetic
uuuggcagauuuggcuagagaau

SEQ ID NO: 621688 - RNA, 24 nt, Artificial Sequence
  Synthetic
cuuuggcagauuuggcuagagaau

SEQ ID NO: 621689 - RNA, 18 nt, Artificial Sequence
  Synthetic
acuguacagcacgagaau

SEQ ID NO: 621690 - RNA, 19 nt, Artificial Sequence
  Synthetic
gacuguacagcacgagaau

SEQ ID NO: 621691 - RNA, 20 nt, Artificial Sequence
  Synthetic
ugacuguacagcacgagaau

SEQ ID NO: 621692 - RNA, 21 nt, Artificial Sequence
  Synthetic
cugacuguacagcacgagaau

SEQ ID NO: 621693 - RNA, 22 nt, Artificial Sequence
  Synthetic
acugacuguacagcacgagaau

SEQ ID NO: 621694 - RNA, 23 nt, Artificial Sequence
  Synthetic
cacugacuguacagcacgagaau

SEQ ID NO: 621695 - RNA, 24 nt, Artificial Sequence
  Synthetic
gcacugacuguacagcacgagaau

SEQ ID NO: 621696 - RNA, 18 nt, Artificial Sequence
  Synthetic
ugaaggaacagcgagaau

SEQ ID NO: 621697 - RNA, 19 nt, Artificial Sequence
  Synthetic
augaaggaacagcgagaau

SEQ ID NO: 621698 - RNA, 20 nt, Artificial Sequence
  Synthetic
caugaaggaacagcgagaau

SEQ ID NO: 621699 - RNA, 21 nt, Artificial Sequence
  Synthetic
acaugaaggaacagcgagaau

SEQ ID NO: 621700 - RNA, 22 nt, Artificial Sequence
  Synthetic
uacaugaaggaacagcgagaau

SEQ ID NO: 621701 - RNA, 23 nt, Artificial Sequence
  Synthetic
uuacaugaaggaacagcgagaau

SEQ ID NO: 621702 - RNA, 24 nt, Artificial Sequence
  Synthetic
auuacaugaaggaacagcgagaau

SEQ ID NO: 621703 - RNA, 18 nt, Artificial Sequence
  Synthetic
auucaccaacaggagaau

SEQ ID NO: 621704 - RNA, 19 nt, Artificial Sequence
  Synthetic
uauucaccaacaggagaau

SEQ ID NO: 621705 - RNA, 20 nt, Artificial Sequence
  Synthetic
auauucaccaacaggagaau

SEQ ID NO: 621706 - RNA, 21 nt, Artificial Sequence
  Synthetic
aauauucaccaacaggagaau

SEQ ID NO: 621707 - RNA, 22 nt, Artificial Sequence
  Synthetic
aaauauucaccaacaggagaau

SEQ ID NO: 621708 - RNA, 23 nt, Artificial Sequence
  Synthetic
aaaauauucaccaacaggagaau

SEQ ID NO: 621709 - RNA, 24 nt, Artificial Sequence
  Synthetic
aaaaauauucaccaacaggagaau

SEQ ID NO: 621710 - RNA, 18 nt, Artificial Sequence
  Synthetic
agaugaggcauggagaau

SEQ ID NO: 621711 - RNA, 19 nt, Artificial Sequence
  Synthetic
gagaugaggcauggagaau

SEQ ID NO: 621712 - RNA, 20 nt, Artificial Sequence
  Synthetic
ugagaugaggcauggagaau

SEQ ID NO: 621713 - RNA, 21 nt, Artificial Sequence
  Synthetic
cugagaugaggcauggagaau

SEQ ID NO: 621714 - RNA, 22 nt, Artificial Sequence
  Synthetic
acugagaugaggcauggagaau

SEQ ID NO: 621715 - RNA, 23 nt, Artificial Sequence
  Synthetic
gacugagaugaggcauggagaau

SEQ ID NO: 621716 - RNA, 24 nt, Artificial Sequence
  Synthetic
ggacugagaugaggcauggagaau

SEQ ID NO: 621717 - RNA, 18 nt, Artificial Sequence
  Synthetic
uuaaauggucuggagaau

SEQ ID NO: 621718 - RNA, 19 nt, Artificial Sequence
  Synthetic
auuaaauggucuggagaau

SEQ ID NO: 621719 - RNA, 20 nt, Artificial Sequence
  Synthetic
uauuaaauggucuggagaau

SEQ ID NO: 621720 - RNA, 21 nt, Artificial Sequence
  Synthetic
guauuaaauggucuggagaau

SEQ ID NO: 621721 - RNA, 22 nt, Artificial Sequence
  Synthetic
uguauuaaauggucuggagaau

SEQ ID NO: 621722 - RNA, 23 nt, Artificial Sequence
  Synthetic
guguauuaaauggucuggagaau

SEQ ID NO: 621723 - RNA, 24 nt, Artificial Sequence
  Synthetic
aguguauuaaauggucuggagaau

SEQ ID NO: 621724 - RNA, 18 nt, Artificial Sequence
  Synthetic
aaucaaaauuuggagaau

SEQ ID NO: 621725 - RNA, 19 nt, Artificial Sequence
  Synthetic
gaaucaaaauuuggagaau

SEQ ID NO: 621726 - RNA, 20 nt, Artificial Sequence
  Synthetic
ugaaucaaaauuuggagaau

SEQ ID NO: 621727 - RNA, 21 nt, Artificial Sequence
  Synthetic
augaaucaaaauuuggagaau

SEQ ID NO: 621728 - RNA, 22 nt, Artificial Sequence
  Synthetic
uaugaaucaaaauuuggagaau

SEQ ID NO: 621729 - RNA, 23 nt, Artificial Sequence
  Synthetic
auaugaaucaaaauuuggagaau

SEQ ID NO: 621730 - RNA, 24 nt, Artificial Sequence
  Synthetic
aauaugaaucaaaauuuggagaau

SEQ ID NO: 621731 - RNA, 18 nt, Artificial Sequence
  Synthetic
gugagacuuuuggagaau

SEQ ID NO: 621732 - RNA, 19 nt, Artificial Sequence
  Synthetic
ggugagacuuuuggagaau

SEQ ID NO: 621733 - RNA, 20 nt, Artificial Sequence
  Synthetic
aggugagacuuuuggagaau

SEQ ID NO: 621734 - RNA, 21 nt, Artificial Sequence
  Synthetic
aaggugagacuuuuggagaau

SEQ ID NO: 621735 - RNA, 22 nt, Artificial Sequence
  Synthetic
gaaggugagacuuuuggagaau

SEQ ID NO: 621736 - RNA, 23 nt, Artificial Sequence
  Synthetic
agaaggugagacuuuuggagaau

SEQ ID NO: 621737 - RNA, 24 nt, Artificial Sequence
  Synthetic
aagaaggugagacuuuuggagaau

SEQ ID NO: 621738 - RNA, 18 nt, Artificial Sequence
  Synthetic
gaauuuggaggugagaau

SEQ ID NO: 621739 - RNA, 19 nt, Artificial Sequence
  Synthetic
agaauuuggaggugagaau

SEQ ID NO: 621740 - RNA, 20 nt, Artificial Sequence
  Synthetic
gagaauuuggaggugagaau

SEQ ID NO: 621741 - RNA, 21 nt, Artificial Sequence
  Synthetic
ggagaauuuggaggugagaau

SEQ ID NO: 621742 - RNA, 22 nt, Artificial Sequence
  Synthetic
uggagaauuuggaggugagaau

SEQ ID NO: 621743 - RNA, 23 nt, Artificial Sequence
  Synthetic
uuggagaauuuggaggugagaau

SEQ ID NO: 621744 - RNA, 24 nt, Artificial Sequence
  Synthetic
uuuggagaauuuggaggugagaau

SEQ ID NO: 621745 - RNA, 18 nt, Artificial Sequence
  Synthetic
ucucaggcucuugagaau

SEQ ID NO: 621746 - RNA, 19 nt, Artificial Sequence
  Synthetic
uucucaggcucuugagaau

SEQ ID NO: 621747 - RNA, 20 nt, Artificial Sequence
  Synthetic
uuucucaggcucuugagaau

SEQ ID NO: 621748 - RNA, 21 nt, Artificial Sequence
  Synthetic
guuucucaggcucuugagaau

SEQ ID NO: 621749 - RNA, 22 nt, Artificial Sequence
  Synthetic
cguuucucaggcucuugagaau

SEQ ID NO: 621750 - RNA, 23 nt, Artificial Sequence
  Synthetic
ucguuucucaggcucuugagaau

SEQ ID NO: 621751 - RNA, 24 nt, Artificial Sequence
  Synthetic
gucguuucucaggcucuugagaau

SEQ ID NO: 621752 - RNA, 18 nt, Artificial Sequence
  Synthetic
agaaauuacuuugagaau

SEQ ID NO: 621753 - RNA, 19 nt, Artificial Sequence
  Synthetic
gagaaauuacuuugagaau

SEQ ID NO: 621754 - RNA, 20 nt, Artificial Sequence
  Synthetic
ugagaaauuacuuugagaau

SEQ ID NO: 621755 - RNA, 21 nt, Artificial Sequence
  Synthetic
augagaaauuacuuugagaau

SEQ ID NO: 621756 - RNA, 22 nt, Artificial Sequence
  Synthetic
aaugagaaauuacuuugagaau

SEQ ID NO: 621757 - RNA, 23 nt, Artificial Sequence
  Synthetic
gaaugagaaauuacuuugagaau

SEQ ID NO: 621758 - RNA, 24 nt, Artificial Sequence
  Synthetic
ugaaugagaaauuacuuugagaau

SEQ ID NO: 621759 - RNA, 18 nt, Artificial Sequence
  Synthetic
cugauugacaaauagaau

SEQ ID NO: 621760 - RNA, 19 nt, Artificial Sequence
  Synthetic
acugauugacaaauagaau

SEQ ID NO: 621761 - RNA, 20 nt, Artificial Sequence
  Synthetic
cacugauugacaaauagaau

SEQ ID NO: 621762 - RNA, 21 nt, Artificial Sequence
  Synthetic
ucacugauugacaaauagaau

SEQ ID NO: 621763 - RNA, 22 nt, Artificial Sequence
  Synthetic
gucacugauugacaaauagaau

SEQ ID NO: 621764 - RNA, 23 nt, Artificial Sequence
  Synthetic
ugucacugauugacaaauagaau

SEQ ID NO: 621765 - RNA, 24 nt, Artificial Sequence
  Synthetic
cugucacugauugacaaauagaau

SEQ ID NO: 621766 - RNA, 18 nt, Artificial Sequence
  Synthetic
aaaaaauaauaauagaau

SEQ ID NO: 621767 - RNA, 19 nt, Artificial Sequence
  Synthetic
gaaaaaauaauaauagaau

SEQ ID NO: 621768 - RNA, 20 nt, Artificial Sequence
  Synthetic
agaaaaaauaauaauagaau

SEQ ID NO: 621769 - RNA, 21 nt, Artificial Sequence
  Synthetic
uagaaaaaauaauaauagaau

SEQ ID NO: 621770 - RNA, 22 nt, Artificial Sequence
  Synthetic
cuagaaaaaauaauaauagaau

SEQ ID NO: 621771 - RNA, 23 nt, Artificial Sequence
  Synthetic
ucuagaaaaaauaauaauagaau

SEQ ID NO: 621772 - RNA, 24 nt, Artificial Sequence
  Synthetic
aucuagaaaaaauaauaauagaau

SEQ ID NO: 621773 - RNA, 18 nt, Artificial Sequence
  Synthetic
gauugcuucuaauagaau

SEQ ID NO: 621774 - RNA, 19 nt, Artificial Sequence
  Synthetic
agauugcuucuaauagaau

SEQ ID NO: 621775 - RNA, 20 nt, Artificial Sequence
  Synthetic
aagauugcuucuaauagaau

SEQ ID NO: 621776 - RNA, 21 nt, Artificial Sequence
  Synthetic
uaagauugcuucuaauagaau

SEQ ID NO: 621777 - RNA, 22 nt, Artificial Sequence
  Synthetic
cuaagauugcuucuaauagaau

SEQ ID NO: 621778 - RNA, 23 nt, Artificial Sequence
  Synthetic
ucuaagauugcuucuaauagaau

SEQ ID NO: 621779 - RNA, 24 nt, Artificial Sequence
  Synthetic
uucuaagauugcuucuaauagaau

SEQ ID NO: 621780 - RNA, 18 nt, Artificial Sequence
  Synthetic
aaaugaccaacauagaau

SEQ ID NO: 621781 - RNA, 19 nt, Artificial Sequence
  Synthetic
aaaaugaccaacauagaau

SEQ ID NO: 621782 - RNA, 20 nt, Artificial Sequence
  Synthetic
uaaaaugaccaacauagaau

SEQ ID NO: 621783 - RNA, 21 nt, Artificial Sequence
  Synthetic
auaaaaugaccaacauagaau

SEQ ID NO: 621784 - RNA, 22 nt, Artificial Sequence
  Synthetic
aauaaaaugaccaacauagaau

SEQ ID NO: 621785 - RNA, 23 nt, Artificial Sequence
  Synthetic
aaauaaaaugaccaacauagaau

SEQ ID NO: 621786 - RNA, 24 nt, Artificial Sequence
  Synthetic
caaauaaaaugaccaacauagaau

SEQ ID NO: 621787 - RNA, 18 nt, Artificial Sequence
  Synthetic
cuaucuaugacauagaau

SEQ ID NO: 621788 - RNA, 19 nt, Artificial Sequence
  Synthetic
ccuaucuaugacauagaau

SEQ ID NO: 621789 - RNA, 20 nt, Artificial Sequence
  Synthetic
cccuaucuaugacauagaau

SEQ ID NO: 621790 - RNA, 21 nt, Artificial Sequence
  Synthetic
ccccuaucuaugacauagaau

SEQ ID NO: 621791 - RNA, 22 nt, Artificial Sequence
  Synthetic
cccccuaucuaugacauagaau

SEQ ID NO: 621792 - RNA, 23 nt, Artificial Sequence
  Synthetic
gcccccuaucuaugacauagaau

SEQ ID NO: 621793 - RNA, 24 nt, Artificial Sequence
  Synthetic
agcccccuaucuaugacauagaau

SEQ ID NO: 621794 - RNA, 18 nt, Artificial Sequence
  Synthetic
ugaagaucaccauagaau

SEQ ID NO: 621795 - RNA, 19 nt, Artificial Sequence
  Synthetic
uugaagaucaccauagaau

SEQ ID NO: 621796 - RNA, 20 nt, Artificial Sequence
  Synthetic
uuugaagaucaccauagaau

SEQ ID NO: 621797 - RNA, 21 nt, Artificial Sequence
  Synthetic
uuuugaagaucaccauagaau

SEQ ID NO: 621798 - RNA, 22 nt, Artificial Sequence
  Synthetic
auuuugaagaucaccauagaau

SEQ ID NO: 621799 - RNA, 23 nt, Artificial Sequence
  Synthetic
uauuuugaagaucaccauagaau

SEQ ID NO: 621800 - RNA, 24 nt, Artificial Sequence
  Synthetic
cuauuuugaagaucaccauagaau

SEQ ID NO: 621801 - RNA, 18 nt, Artificial Sequence
  Synthetic
acagaaauugcauagaau

SEQ ID NO: 621802 - RNA, 19 nt, Artificial Sequence
  Synthetic
aacagaaauugcauagaau

SEQ ID NO: 621803 - RNA, 20 nt, Artificial Sequence
  Synthetic
caacagaaauugcauagaau

SEQ ID NO: 621804 - RNA, 21 nt, Artificial Sequence
  Synthetic
ucaacagaaauugcauagaau

SEQ ID NO: 621805 - RNA, 22 nt, Artificial Sequence
  Synthetic
aucaacagaaauugcauagaau

SEQ ID NO: 621806 - RNA, 23 nt, Artificial Sequence
  Synthetic
aaucaacagaaauugcauagaau

SEQ ID NO: 621807 - RNA, 24 nt, Artificial Sequence
  Synthetic
aaaucaacagaaauugcauagaau

SEQ ID NO: 621808 - RNA, 18 nt, Artificial Sequence
  Synthetic
auuucugcaucauagaau

SEQ ID NO: 621809 - RNA, 19 nt, Artificial Sequence
  Synthetic
aauuucugcaucauagaau

SEQ ID NO: 621810 - RNA, 20 nt, Artificial Sequence
  Synthetic
caauuucugcaucauagaau

SEQ ID NO: 621811 - RNA, 21 nt, Artificial Sequence
  Synthetic
ucaauuucugcaucauagaau

SEQ ID NO: 621812 - RNA, 22 nt, Artificial Sequence
  Synthetic
gucaauuucugcaucauagaau

SEQ ID NO: 621813 - RNA, 23 nt, Artificial Sequence
  Synthetic
ugucaauuucugcaucauagaau

SEQ ID NO: 621814 - RNA, 24 nt, Artificial Sequence
  Synthetic
cugucaauuucugcaucauagaau

SEQ ID NO: 621815 - RNA, 18 nt, Artificial Sequence
  Synthetic
uucaaaugcucauagaau

SEQ ID NO: 621816 - RNA, 19 nt, Artificial Sequence
  Synthetic
guucaaaugcucauagaau

SEQ ID NO: 621817 - RNA, 20 nt, Artificial Sequence
  Synthetic
uguucaaaugcucauagaau

SEQ ID NO: 621818 - RNA, 21 nt, Artificial Sequence
  Synthetic
auguucaaaugcucauagaau

SEQ ID NO: 621819 - RNA, 22 nt, Artificial Sequence
  Synthetic
aauguucaaaugcucauagaau

SEQ ID NO: 621820 - RNA, 23 nt, Artificial Sequence
  Synthetic
gaauguucaaaugcucauagaau

SEQ ID NO: 621821 - RNA, 24 nt, Artificial Sequence
  Synthetic
agaauguucaaaugcucauagaau

SEQ ID NO: 621822 - RNA, 18 nt, Artificial Sequence
  Synthetic
auuauacuuucauagaau

SEQ ID NO: 621823 - RNA, 19 nt, Artificial Sequence
  Synthetic
cauuauacuuucauagaau

SEQ ID NO: 621824 - RNA, 20 nt, Artificial Sequence
  Synthetic
acauuauacuuucauagaau

SEQ ID NO: 621825 - RNA, 21 nt, Artificial Sequence
  Synthetic
aacauuauacuuucauagaau

SEQ ID NO: 621826 - RNA, 22 nt, Artificial Sequence
  Synthetic
aaacauuauacuuucauagaau

SEQ ID NO: 621827 - RNA, 23 nt, Artificial Sequence
  Synthetic
aaaacauuauacuuucauagaau

SEQ ID NO: 621828 - RNA, 24 nt, Artificial Sequence
  Synthetic
aaaaacauuauacuuucauagaau

SEQ ID NO: 621829 - RNA, 18 nt, Artificial Sequence
  Synthetic
agcuauaaaagauagaau

SEQ ID NO: 621830 - RNA, 19 nt, Artificial Sequence
  Synthetic
gagcuauaaaagauagaau

SEQ ID NO: 621831 - RNA, 20 nt, Artificial Sequence
  Synthetic
agagcuauaaaagauagaau

SEQ ID NO: 621832 - RNA, 21 nt, Artificial Sequence
  Synthetic
uagagcuauaaaagauagaau

SEQ ID NO: 621833 - RNA, 22 nt, Artificial Sequence
  Synthetic
uuagagcuauaaaagauagaau

SEQ ID NO: 621834 - RNA, 23 nt, Artificial Sequence
  Synthetic
cuuagagcuauaaaagauagaau

SEQ ID NO: 621835 - RNA, 24 nt, Artificial Sequence
  Synthetic
ucuuagagcuauaaaagauagaau

SEQ ID NO: 621836 - RNA, 18 nt, Artificial Sequence
  Synthetic
gugaaaugaggauagaau

SEQ ID NO: 621837 - RNA, 19 nt, Artificial Sequence
  Synthetic
cgugaaaugaggauagaau

SEQ ID NO: 621838 - RNA, 20 nt, Artificial Sequence
  Synthetic
ccgugaaaugaggauagaau

SEQ ID NO: 621839 - RNA, 21 nt, Artificial Sequence
  Synthetic
uccgugaaaugaggauagaau

SEQ ID NO: 621840 - RNA, 22 nt, Artificial Sequence
  Synthetic
guccgugaaaugaggauagaau

SEQ ID NO: 621841 - RNA, 23 nt, Artificial Sequence
  Synthetic
gguccgugaaaugaggauagaau

SEQ ID NO: 621842 - RNA, 24 nt, Artificial Sequence
  Synthetic
ggguccgugaaaugaggauagaau

SEQ ID NO: 621843 - RNA, 18 nt, Artificial Sequence
  Synthetic
aaaagcaaccuauagaau

SEQ ID NO: 621844 - RNA, 19 nt, Artificial Sequence
  Synthetic
uaaaagcaaccuauagaau

SEQ ID NO: 621845 - RNA, 20 nt, Artificial Sequence
  Synthetic
uuaaaagcaaccuauagaau

SEQ ID NO: 621846 - RNA, 21 nt, Artificial Sequence
  Synthetic
auuaaaagcaaccuauagaau

SEQ ID NO: 621847 - RNA, 22 nt, Artificial Sequence
  Synthetic
aauuaaaagcaaccuauagaau

SEQ ID NO: 621848 - RNA, 23 nt, Artificial Sequence
  Synthetic
gaauuaaaagcaaccuauagaau

SEQ ID NO: 621849 - RNA, 24 nt, Artificial Sequence
  Synthetic
agaauuaaaagcaaccuauagaau

SEQ ID NO: 621850 - RNA, 18 nt, Artificial Sequence
  Synthetic
aauuugaagcuauagaau

SEQ ID NO: 621851 - RNA, 19 nt, Artificial Sequence
  Synthetic
gaauuugaagcuauagaau

SEQ ID NO: 621852 - RNA, 20 nt, Artificial Sequence
  Synthetic
agaauuugaagcuauagaau

SEQ ID NO: 621853 - RNA, 21 nt, Artificial Sequence
  Synthetic
aagaauuugaagcuauagaau

SEQ ID NO: 621854 - RNA, 22 nt, Artificial Sequence
  Synthetic
uaagaauuugaagcuauagaau

SEQ ID NO: 621855 - RNA, 23 nt, Artificial Sequence
  Synthetic
uuaagaauuugaagcuauagaau

SEQ ID NO: 621856 - RNA, 24 nt, Artificial Sequence
  Synthetic
auuaagaauuugaagcuauagaau

SEQ ID NO: 621857 - RNA, 18 nt, Artificial Sequence
  Synthetic
agggaaaccguauagaau

SEQ ID NO: 621858 - RNA, 19 nt, Artificial Sequence
  Synthetic
cagggaaaccguauagaau

SEQ ID NO: 621859 - RNA, 20 nt, Artificial Sequence
  Synthetic
ucagggaaaccguauagaau

SEQ ID NO: 621860 - RNA, 21 nt, Artificial Sequence
  Synthetic
aucagggaaaccguauagaau

SEQ ID NO: 621861 - RNA, 22 nt, Artificial Sequence
  Synthetic
aaucagggaaaccguauagaau

SEQ ID NO: 621862 - RNA, 23 nt, Artificial Sequence
  Synthetic
caaucagggaaaccguauagaau

SEQ ID NO: 621863 - RNA, 24 nt, Artificial Sequence
  Synthetic
acaaucagggaaaccguauagaau

SEQ ID NO: 621864 - RNA, 18 nt, Artificial Sequence
  Synthetic
uaccgcuacuuauagaau

SEQ ID NO: 621865 - RNA, 19 nt, Artificial Sequence
  Synthetic
cuaccgcuacuuauagaau

SEQ ID NO: 621866 - RNA, 20 nt, Artificial Sequence
  Synthetic
ucuaccgcuacuuauagaau

SEQ ID NO: 621867 - RNA, 21 nt, Artificial Sequence
  Synthetic
cucuaccgcuacuuauagaau

SEQ ID NO: 621868 - RNA, 22 nt, Artificial Sequence
  Synthetic
ccucuaccgcuacuuauagaau

SEQ ID NO: 621869 - RNA, 23 nt, Artificial Sequence
  Synthetic
accucuaccgcuacuuauagaau

SEQ ID NO: 621870 - RNA, 24 nt, Artificial Sequence
  Synthetic
caccucuaccgcuacuuauagaau

SEQ ID NO: 621871 - RNA, 18 nt, Artificial Sequence
  Synthetic
ugauucaggaaguagaau

SEQ ID NO: 621872 - RNA, 19 nt, Artificial Sequence
  Synthetic
gugauucaggaaguagaau

SEQ ID NO: 621873 - RNA, 20 nt, Artificial Sequence
  Synthetic
agugauucaggaaguagaau

SEQ ID NO: 621874 - RNA, 21 nt, Artificial Sequence
  Synthetic
uagugauucaggaaguagaau

SEQ ID NO: 621875 - RNA, 22 nt, Artificial Sequence
  Synthetic
cuagugauucaggaaguagaau

SEQ ID NO: 621876 - RNA, 23 nt, Artificial Sequence
  Synthetic
gcuagugauucaggaaguagaau

SEQ ID NO: 621877 - RNA, 24 nt, Artificial Sequence
  Synthetic
ugcuagugauucaggaaguagaau

SEQ ID NO: 621878 - RNA, 18 nt, Artificial Sequence
  Synthetic
gauaggauauaguagaau

SEQ ID NO: 621879 - RNA, 19 nt, Artificial Sequence
  Synthetic
agauaggauauaguagaau

SEQ ID NO: 621880 - RNA, 20 nt, Artificial Sequence
  Synthetic
uagauaggauauaguagaau

SEQ ID NO: 621881 - RNA, 21 nt, Artificial Sequence
  Synthetic
cuagauaggauauaguagaau

SEQ ID NO: 621882 - RNA, 22 nt, Artificial Sequence
  Synthetic
ucuagauaggauauaguagaau

SEQ ID NO: 621883 - RNA, 23 nt, Artificial Sequence
  Synthetic
cucuagauaggauauaguagaau

SEQ ID NO: 621884 - RNA, 24 nt, Artificial Sequence
  Synthetic
gcucuagauaggauauaguagaau

SEQ ID NO: 621885 - RNA, 18 nt, Artificial Sequence
  Synthetic
ggguauaguuaguagaau

SEQ ID NO: 621886 - RNA, 19 nt, Artificial Sequence
  Synthetic
aggguauaguuaguagaau

SEQ ID NO: 621887 - RNA, 20 nt, Artificial Sequence
  Synthetic
gaggguauaguuaguagaau

SEQ ID NO: 621888 - RNA, 21 nt, Artificial Sequence
  Synthetic
ggaggguauaguuaguagaau

SEQ ID NO: 621889 - RNA, 22 nt, Artificial Sequence
  Synthetic
gggaggguauaguuaguagaau

SEQ ID NO: 621890 - RNA, 23 nt, Artificial Sequence
  Synthetic
ggggaggguauaguuaguagaau

SEQ ID NO: 621891 - RNA, 24 nt, Artificial Sequence
  Synthetic
aggggaggguauaguuaguagaau

SEQ ID NO: 621892 - RNA, 18 nt, Artificial Sequence
  Synthetic
cucauucucauguagaau

SEQ ID NO: 621893 - RNA, 19 nt, Artificial Sequence
  Synthetic
ucucauucucauguagaau

SEQ ID NO: 621894 - RNA, 20 nt, Artificial Sequence
  Synthetic
uucucauucucauguagaau

SEQ ID NO: 621895 - RNA, 21 nt, Artificial Sequence
  Synthetic
auucucauucucauguagaau

SEQ ID NO: 621896 - RNA, 22 nt, Artificial Sequence
  Synthetic
aauucucauucucauguagaau

SEQ ID NO: 621897 - RNA, 23 nt, Artificial Sequence
  Synthetic
gaauucucauucucauguagaau

SEQ ID NO: 621898 - RNA, 24 nt, Artificial Sequence
  Synthetic
agaauucucauucucauguagaau

SEQ ID NO: 621899 - RNA, 18 nt, Artificial Sequence
  Synthetic
caaaagccacuguagaau

SEQ ID NO: 621900 - RNA, 19 nt, Artificial Sequence
  Synthetic
ucaaaagccacuguagaau

SEQ ID NO: 621901 - RNA, 20 nt, Artificial Sequence
  Synthetic
aucaaaagccacuguagaau

SEQ ID NO: 621902 - RNA, 21 nt, Artificial Sequence
  Synthetic
uaucaaaagccacuguagaau

SEQ ID NO: 621903 - RNA, 22 nt, Artificial Sequence
  Synthetic
auaucaaaagccacuguagaau

SEQ ID NO: 621904 - RNA, 23 nt, Artificial Sequence
  Synthetic
cauaucaaaagccacuguagaau

SEQ ID NO: 621905 - RNA, 24 nt, Artificial Sequence
  Synthetic
ucauaucaaaagccacuguagaau

SEQ ID NO: 621906 - RNA, 18 nt, Artificial Sequence
  Synthetic
gaaacaaguaauuagaau

SEQ ID NO: 621907 - RNA, 19 nt, Artificial Sequence
  Synthetic
agaaacaaguaauuagaau

SEQ ID NO: 621908 - RNA, 20 nt, Artificial Sequence
  Synthetic
aagaaacaaguaauuagaau

SEQ ID NO: 621909 - RNA, 21 nt, Artificial Sequence
  Synthetic
aaagaaacaaguaauuagaau

SEQ ID NO: 621910 - RNA, 22 nt, Artificial Sequence
  Synthetic
aaaagaaacaaguaauuagaau

SEQ ID NO: 621911 - RNA, 23 nt, Artificial Sequence
  Synthetic
aaaaagaaacaaguaauuagaau

SEQ ID NO: 621912 - RNA, 24 nt, Artificial Sequence
  Synthetic
caaaaagaaacaaguaauuagaau

SEQ ID NO: 621913 - RNA, 18 nt, Artificial Sequence
  Synthetic
guuucuucuccuuagaau

SEQ ID NO: 621914 - RNA, 19 nt, Artificial Sequence
  Synthetic
gguuucuucuccuuagaau

SEQ ID NO: 621915 - RNA, 20 nt, Artificial Sequence
  Synthetic
agguuucuucuccuuagaau

SEQ ID NO: 621916 - RNA, 21 nt, Artificial Sequence
  Synthetic
aagguuucuucuccuuagaau

SEQ ID NO: 621917 - RNA, 22 nt, Artificial Sequence
  Synthetic
aaagguuucuucuccuuagaau

SEQ ID NO: 621918 - RNA, 23 nt, Artificial Sequence
  Synthetic
uaaagguuucuucuccuuagaau

SEQ ID NO: 621919 - RNA, 24 nt, Artificial Sequence
  Synthetic
cuaaagguuucuucuccuuagaau

SEQ ID NO: 621920 - RNA, 18 nt, Artificial Sequence
  Synthetic
cuauguaccucuuagaau

SEQ ID NO: 621921 - RNA, 19 nt, Artificial Sequence
  Synthetic
acuauguaccucuuagaau

SEQ ID NO: 621922 - RNA, 20 nt, Artificial Sequence
  Synthetic
cacuauguaccucuuagaau

SEQ ID NO: 621923 - RNA, 21 nt, Artificial Sequence
  Synthetic
acacuauguaccucuuagaau

SEQ ID NO: 621924 - RNA, 22 nt, Artificial Sequence
  Synthetic
uacacuauguaccucuuagaau

SEQ ID NO: 621925 - RNA, 23 nt, Artificial Sequence
  Synthetic
guacacuauguaccucuuagaau

SEQ ID NO: 621926 - RNA, 24 nt, Artificial Sequence
  Synthetic
aguacacuauguaccucuuagaau

SEQ ID NO: 621927 - RNA, 18 nt, Artificial Sequence
  Synthetic
uuauaacuuucuuagaau

SEQ ID NO: 621928 - RNA, 19 nt, Artificial Sequence
  Synthetic
uuuauaacuuucuuagaau

SEQ ID NO: 621929 - RNA, 20 nt, Artificial Sequence
  Synthetic
auuuauaacuuucuuagaau

SEQ ID NO: 621930 - RNA, 21 nt, Artificial Sequence
  Synthetic
aauuuauaacuuucuuagaau

SEQ ID NO: 621931 - RNA, 22 nt, Artificial Sequence
  Synthetic
aaauuuauaacuuucuuagaau

SEQ ID NO: 621932 - RNA, 23 nt, Artificial Sequence
  Synthetic
gaaauuuauaacuuucuuagaau

SEQ ID NO: 621933 - RNA, 24 nt, Artificial Sequence
  Synthetic
ggaaauuuauaacuuucuuagaau

SEQ ID NO: 621934 - RNA, 18 nt, Artificial Sequence
  Synthetic
guuuuccaguguuagaau

SEQ ID NO: 621935 - RNA, 19 nt, Artificial Sequence
  Synthetic
uguuuuccaguguuagaau

SEQ ID NO: 621936 - RNA, 20 nt, Artificial Sequence
  Synthetic
auguuuuccaguguuagaau

SEQ ID NO: 621937 - RNA, 21 nt, Artificial Sequence
  Synthetic
gauguuuuccaguguuagaau

SEQ ID NO: 621938 - RNA, 22 nt, Artificial Sequence
  Synthetic
agauguuuuccaguguuagaau

SEQ ID NO: 621939 - RNA, 23 nt, Artificial Sequence
  Synthetic
aagauguuuuccaguguuagaau

SEQ ID NO: 621940 - RNA, 24 nt, Artificial Sequence
  Synthetic
uaagauguuuuccaguguuagaau

SEQ ID NO: 621941 - RNA, 18 nt, Artificial Sequence
  Synthetic
gucacguucauuuagaau

SEQ ID NO: 621942 - RNA, 19 nt, Artificial Sequence
  Synthetic
ugucacguucauuuagaau

SEQ ID NO: 621943 - RNA, 20 nt, Artificial Sequence
  Synthetic
augucacguucauuuagaau

SEQ ID NO: 621944 - RNA, 21 nt, Artificial Sequence
  Synthetic
aaugucacguucauuuagaau

SEQ ID NO: 621945 - RNA, 22 nt, Artificial Sequence
  Synthetic
gaaugucacguucauuuagaau

SEQ ID NO: 621946 - RNA, 23 nt, Artificial Sequence
  Synthetic
agaaugucacguucauuuagaau

SEQ ID NO: 621947 - RNA, 24 nt, Artificial Sequence
  Synthetic
uagaaugucacguucauuuagaau

SEQ ID NO: 621948 - RNA, 18 nt, Artificial Sequence
  Synthetic
uacauugugauuuagaau

SEQ ID NO: 621949 - RNA, 19 nt, Artificial Sequence
  Synthetic
uuacauugugauuuagaau

SEQ ID NO: 621950 - RNA, 20 nt, Artificial Sequence
  Synthetic
uuuacauugugauuuagaau

SEQ ID NO: 621951 - RNA, 21 nt, Artificial Sequence
  Synthetic
auuuacauugugauuuagaau

SEQ ID NO: 621952 - RNA, 22 nt, Artificial Sequence
  Synthetic
aauuuacauugugauuuagaau

SEQ ID NO: 621953 - RNA, 23 nt, Artificial Sequence
  Synthetic
uaauuuacauugugauuuagaau

SEQ ID NO: 621954 - RNA, 24 nt, Artificial Sequence
  Synthetic
uuaauuuacauugugauuuagaau

SEQ ID NO: 621955 - RNA, 18 nt, Artificial Sequence
  Synthetic
caggcacauauuuagaau

SEQ ID NO: 621956 - RNA, 19 nt, Artificial Sequence
  Synthetic
gcaggcacauauuuagaau

SEQ ID NO: 621957 - RNA, 20 nt, Artificial Sequence
  Synthetic
ggcaggcacauauuuagaau

SEQ ID NO: 621958 - RNA, 21 nt, Artificial Sequence
  Synthetic
aggcaggcacauauuuagaau

SEQ ID NO: 621959 - RNA, 22 nt, Artificial Sequence
  Synthetic
aaggcaggcacauauuuagaau

SEQ ID NO: 621960 - RNA, 23 nt, Artificial Sequence
  Synthetic
aaaggcaggcacauauuuagaau

SEQ ID NO: 621961 - RNA, 24 nt, Artificial Sequence
  Synthetic
aaaaggcaggcacauauuuagaau

SEQ ID NO: 621962 - RNA, 18 nt, Artificial Sequence
  Synthetic
gacguauauauuuagaau

SEQ ID NO: 621963 - RNA, 19 nt, Artificial Sequence
  Synthetic
ugacguauauauuuagaau

SEQ ID NO: 621964 - RNA, 20 nt, Artificial Sequence
  Synthetic
uugacguauauauuuagaau

SEQ ID NO: 621965 - RNA, 21 nt, Artificial Sequence
  Synthetic
guugacguauauauuuagaau

SEQ ID NO: 621966 - RNA, 22 nt, Artificial Sequence
  Synthetic
uguugacguauauauuuagaau

SEQ ID NO: 621967 - RNA, 23 nt, Artificial Sequence
  Synthetic
uuguugacguauauauuuagaau

SEQ ID NO: 621968 - RNA, 24 nt, Artificial Sequence
  Synthetic
cuuguugacguauauauuuagaau

SEQ ID NO: 621969 - RNA, 18 nt, Artificial Sequence
  Synthetic
aauggauuacuuuagaau

SEQ ID NO: 621970 - RNA, 19 nt, Artificial Sequence
  Synthetic
aaauggauuacuuuagaau

SEQ ID NO: 621971 - RNA, 20 nt, Artificial Sequence
  Synthetic
aaaauggauuacuuuagaau

SEQ ID NO: 621972 - RNA, 21 nt, Artificial Sequence
  Synthetic
aaaaauggauuacuuuagaau

SEQ ID NO: 621973 - RNA, 22 nt, Artificial Sequence
  Synthetic
aaaaaauggauuacuuuagaau

SEQ ID NO: 621974 - RNA, 23 nt, Artificial Sequence
  Synthetic
aaaaaaauggauuacuuuagaau

SEQ ID NO: 621975 - RNA, 24 nt, Artificial Sequence
  Synthetic
aaaaaaaauggauuacuuuagaau

SEQ ID NO: 621976 - RNA, 18 nt, Artificial Sequence
  Synthetic
ggcaguuuguuuuagaau

SEQ ID NO: 621977 - RNA, 19 nt, Artificial Sequence
  Synthetic
uggcaguuuguuuuagaau

SEQ ID NO: 621978 - RNA, 20 nt, Artificial Sequence
  Synthetic
cuggcaguuuguuuuagaau

SEQ ID NO: 621979 - RNA, 21 nt, Artificial Sequence
  Synthetic
gcuggcaguuuguuuuagaau

SEQ ID NO: 621980 - RNA, 22 nt, Artificial Sequence
  Synthetic
ugcuggcaguuuguuuuagaau

SEQ ID NO: 621981 - RNA, 23 nt, Artificial Sequence
  Synthetic
uugcuggcaguuuguuuuagaau

SEQ ID NO: 621982 - RNA, 24 nt, Artificial Sequence
  Synthetic
auugcuggcaguuuguuuuagaau

SEQ ID NO: 621983 - RNA, 18 nt, Artificial Sequence
  Synthetic
aacaccuauuuuuagaau

SEQ ID NO: 621984 - RNA, 19 nt, Artificial Sequence
  Synthetic
uaacaccuauuuuuagaau

SEQ ID NO: 621985 - RNA, 20 nt, Artificial Sequence
  Synthetic
cuaacaccuauuuuuagaau

SEQ ID NO: 621986 - RNA, 21 nt, Artificial Sequence
  Synthetic
ucuaacaccuauuuuuagaau

SEQ ID NO: 621987 - RNA, 22 nt, Artificial Sequence
  Synthetic
aucuaacaccuauuuuuagaau

SEQ ID NO: 621988 - RNA, 23 nt, Artificial Sequence
  Synthetic
caucuaacaccuauuuuuagaau

SEQ ID NO: 621989 - RNA, 24 nt, Artificial Sequence
  Synthetic
ccaucuaacaccuauuuuuagaau

SEQ ID NO: 621990 - RNA, 18 nt, Artificial Sequence
  Synthetic
aauuggcucauuacgaau

SEQ ID NO: 621991 - RNA, 19 nt, Artificial Sequence
  Synthetic
aaauuggcucauuacgaau

SEQ ID NO: 621992 - RNA, 20 nt, Artificial Sequence
  Synthetic
uaaauuggcucauuacgaau

SEQ ID NO: 621993 - RNA, 21 nt, Artificial Sequence
  Synthetic
auaaauuggcucauuacgaau

SEQ ID NO: 621994 - RNA, 22 nt, Artificial Sequence
  Synthetic
aauaaauuggcucauuacgaau

SEQ ID NO: 621995 - RNA, 23 nt, Artificial Sequence
  Synthetic
uaauaaauuggcucauuacgaau

SEQ ID NO: 621996 - RNA, 24 nt, Artificial Sequence
  Synthetic
guaauaaauuggcucauuacgaau

SEQ ID NO: 621997 - RNA, 18 nt, Artificial Sequence
  Synthetic
uauuaagcaugaccgaau

SEQ ID NO: 621998 - RNA, 19 nt, Artificial Sequence
  Synthetic
auauuaagcaugaccgaau

SEQ ID NO: 621999 - RNA, 20 nt, Artificial Sequence
  Synthetic
aauauuaagcaugaccgaau

SEQ ID NO: 622000 - RNA, 21 nt, Artificial Sequence
  Synthetic
gaauauuaagcaugaccgaau

SEQ ID NO: 622001 - RNA, 22 nt, Artificial Sequence
  Synthetic
ugaauauuaagcaugaccgaau

SEQ ID NO: 622002 - RNA, 23 nt, Artificial Sequence
  Synthetic
cugaauauuaagcaugaccgaau

SEQ ID NO: 622003 - RNA, 24 nt, Artificial Sequence
  Synthetic
gcugaauauuaagcaugaccgaau

SEQ ID NO: 622004 - RNA, 18 nt, Artificial Sequence
  Synthetic
auguuauaaauuccgaau

SEQ ID NO: 622005 - RNA, 19 nt, Artificial Sequence
  Synthetic
aauguuauaaauuccgaau

SEQ ID NO: 622006 - RNA, 20 nt, Artificial Sequence
  Synthetic
caauguuauaaauuccgaau

SEQ ID NO: 622007 - RNA, 21 nt, Artificial Sequence
  Synthetic
acaauguuauaaauuccgaau

SEQ ID NO: 622008 - RNA, 22 nt, Artificial Sequence
  Synthetic
uacaauguuauaaauuccgaau

SEQ ID NO: 622009 - RNA, 23 nt, Artificial Sequence
  Synthetic
auacaauguuauaaauuccgaau

SEQ ID NO: 622010 - RNA, 24 nt, Artificial Sequence
  Synthetic
gauacaauguuauaaauuccgaau

SEQ ID NO: 622011 - RNA, 18 nt, Artificial Sequence
  Synthetic
aauacaccuguuccgaau

SEQ ID NO: 622012 - RNA, 19 nt, Artificial Sequence
  Synthetic
aaauacaccuguuccgaau

SEQ ID NO: 622013 - RNA, 20 nt, Artificial Sequence
  Synthetic
uaaauacaccuguuccgaau

SEQ ID NO: 622014 - RNA, 21 nt, Artificial Sequence
  Synthetic
guaaauacaccuguuccgaau

SEQ ID NO: 622015 - RNA, 22 nt, Artificial Sequence
  Synthetic
gguaaauacaccuguuccgaau

SEQ ID NO: 622016 - RNA, 23 nt, Artificial Sequence
  Synthetic
ggguaaauacaccuguuccgaau

SEQ ID NO: 622017 - RNA, 24 nt, Artificial Sequence
  Synthetic
uggguaaauacaccuguuccgaau

SEQ ID NO: 622018 - RNA, 18 nt, Artificial Sequence
  Synthetic
uauuuuuauaaaucgaau

SEQ ID NO: 622019 - RNA, 19 nt, Artificial Sequence
  Synthetic
uuauuuuuauaaaucgaau

SEQ ID NO: 622020 - RNA, 20 nt, Artificial Sequence
  Synthetic
guuauuuuuauaaaucgaau

SEQ ID NO: 622021 - RNA, 21 nt, Artificial Sequence
  Synthetic
aguuauuuuuauaaaucgaau

SEQ ID NO: 622022 - RNA, 22 nt, Artificial Sequence
  Synthetic
aaguuauuuuuauaaaucgaau

SEQ ID NO: 622023 - RNA, 23 nt, Artificial Sequence
  Synthetic
aaaguuauuuuuauaaaucgaau

SEQ ID NO: 622024 - RNA, 24 nt, Artificial Sequence
  Synthetic
caaaguuauuuuuauaaaucgaau

SEQ ID NO: 622025 - RNA, 18 nt, Artificial Sequence
  Synthetic
auuaaugacauaucgaau

SEQ ID NO: 622026 - RNA, 19 nt, Artificial Sequence
  Synthetic
cauuaaugacauaucgaau

SEQ ID NO: 622027 - RNA, 20 nt, Artificial Sequence
  Synthetic
acauuaaugacauaucgaau

SEQ ID NO: 622028 - RNA, 21 nt, Artificial Sequence
  Synthetic
uacauuaaugacauaucgaau

SEQ ID NO: 622029 - RNA, 22 nt, Artificial Sequence
  Synthetic
cuacauuaaugacauaucgaau

SEQ ID NO: 622030 - RNA, 23 nt, Artificial Sequence
  Synthetic
acuacauuaaugacauaucgaau

SEQ ID NO: 622031 - RNA, 24 nt, Artificial Sequence
  Synthetic
cacuacauuaaugacauaucgaau

SEQ ID NO: 622032 - RNA, 18 nt, Artificial Sequence
  Synthetic
aaaaaaaaaaaaaggaau

SEQ ID NO: 622033 - RNA, 19 nt, Artificial Sequence
  Synthetic
aaaaaaaaaaaaaaggaau

SEQ ID NO: 622034 - RNA, 20 nt, Artificial Sequence
  Synthetic
aaaaaaaaaaaaaaaggaau

SEQ ID NO: 622035 - RNA, 21 nt, Artificial Sequence
  Synthetic
aaaaaaaaaaaaaaaaggaau

SEQ ID NO: 622036 - RNA, 22 nt, Artificial Sequence
  Synthetic
aaaaaaaaaaaaaaaaaggaau

SEQ ID NO: 622037 - RNA, 23 nt, Artificial Sequence
  Synthetic
aaaaaaaaaaaaaaaaaaggaau

SEQ ID NO: 622038 - RNA, 24 nt, Artificial Sequence
  Synthetic
aaaaaaaaaaaaaaaaaaaggaau

SEQ ID NO: 622039 - RNA, 18 nt, Artificial Sequence
  Synthetic
aauaaaacaaaaaggaau

SEQ ID NO: 622040 - RNA, 19 nt, Artificial Sequence
  Synthetic
caauaaaacaaaaaggaau

SEQ ID NO: 622041 - RNA, 20 nt, Artificial Sequence
  Synthetic
ucaauaaaacaaaaaggaau

SEQ ID NO: 622042 - RNA, 21 nt, Artificial Sequence
  Synthetic
cucaauaaaacaaaaaggaau

SEQ ID NO: 622043 - RNA, 22 nt, Artificial Sequence
  Synthetic
ccucaauaaaacaaaaaggaau

SEQ ID NO: 622044 - RNA, 23 nt, Artificial Sequence
  Synthetic
accucaauaaaacaaaaaggaau

SEQ ID NO: 622045 - RNA, 24 nt, Artificial Sequence
  Synthetic
uaccucaauaaaacaaaaaggaau

SEQ ID NO: 622046 - RNA, 18 nt, Artificial Sequence
  Synthetic
uagagaaacaaaaggaau

SEQ ID NO: 622047 - RNA, 19 nt, Artificial Sequence
  Synthetic
uuagagaaacaaaaggaau

SEQ ID NO: 622048 - RNA, 20 nt, Artificial Sequence
  Synthetic
cuuagagaaacaaaaggaau

SEQ ID NO: 622049 - RNA, 21 nt, Artificial Sequence
  Synthetic
ccuuagagaaacaaaaggaau

SEQ ID NO: 622050 - RNA, 22 nt, Artificial Sequence
  Synthetic
uccuuagagaaacaaaaggaau

SEQ ID NO: 622051 - RNA, 23 nt, Artificial Sequence
  Synthetic
uuccuuagagaaacaaaaggaau

SEQ ID NO: 622052 - RNA, 24 nt, Artificial Sequence
  Synthetic
guuccuuagagaaacaaaaggaau

SEQ ID NO: 622053 - RNA, 18 nt, Artificial Sequence
  Synthetic
uuaaugugaggaaggaau

SEQ ID NO: 622054 - RNA, 19 nt, Artificial Sequence
  Synthetic
auuaaugugaggaaggaau

SEQ ID NO: 622055 - RNA, 20 nt, Artificial Sequence
  Synthetic
aauuaaugugaggaaggaau

SEQ ID NO: 622056 - RNA, 21 nt, Artificial Sequence
  Synthetic
gaauuaaugugaggaaggaau

SEQ ID NO: 622057 - RNA, 22 nt, Artificial Sequence
  Synthetic
ugaauuaaugugaggaaggaau

SEQ ID NO: 622058 - RNA, 23 nt, Artificial Sequence
  Synthetic
gugaauuaaugugaggaaggaau

SEQ ID NO: 622059 - RNA, 24 nt, Artificial Sequence
  Synthetic
ugugaauuaaugugaggaaggaau

SEQ ID NO: 622060 - RNA, 18 nt, Artificial Sequence
  Synthetic
aaagggaauggaaggaau

SEQ ID NO: 622061 - RNA, 19 nt, Artificial Sequence
  Synthetic
aaaagggaauggaaggaau

SEQ ID NO: 622062 - RNA, 20 nt, Artificial Sequence
  Synthetic
gaaaagggaauggaaggaau

SEQ ID NO: 622063 - RNA, 21 nt, Artificial Sequence
  Synthetic
agaaaagggaauggaaggaau

SEQ ID NO: 622064 - RNA, 22 nt, Artificial Sequence
  Synthetic
aagaaaagggaauggaaggaau

SEQ ID NO: 622065 - RNA, 23 nt, Artificial Sequence
  Synthetic
uaagaaaagggaauggaaggaau

SEQ ID NO: 622066 - RNA, 24 nt, Artificial Sequence
  Synthetic
cuaagaaaagggaauggaaggaau

SEQ ID NO: 622067 - RNA, 18 nt, Artificial Sequence
  Synthetic
auaaauauauuaaggaau

SEQ ID NO: 622068 - RNA, 19 nt, Artificial Sequence
  Synthetic
gauaaauauauuaaggaau

SEQ ID NO: 622069 - RNA, 20 nt, Artificial Sequence
  Synthetic
agauaaauauauuaaggaau

SEQ ID NO: 622070 - RNA, 21 nt, Artificial Sequence
  Synthetic
uagauaaauauauuaaggaau

SEQ ID NO: 622071 - RNA, 22 nt, Artificial Sequence
  Synthetic
guagauaaauauauuaaggaau

SEQ ID NO: 622072 - RNA, 23 nt, Artificial Sequence
  Synthetic
gguagauaaauauauuaaggaau

SEQ ID NO: 622073 - RNA, 24 nt, Artificial Sequence
  Synthetic
ugguagauaaauauauuaaggaau

SEQ ID NO: 622074 - RNA, 18 nt, Artificial Sequence
  Synthetic
acaggaaacuuaaggaau

SEQ ID NO: 622075 - RNA, 19 nt, Artificial Sequence
  Synthetic
gacaggaaacuuaaggaau

SEQ ID NO: 622076 - RNA, 20 nt, Artificial Sequence
  Synthetic
agacaggaaacuuaaggaau

SEQ ID NO: 622077 - RNA, 21 nt, Artificial Sequence
  Synthetic
cagacaggaaacuuaaggaau

SEQ ID NO: 622078 - RNA, 22 nt, Artificial Sequence
  Synthetic
ccagacaggaaacuuaaggaau

SEQ ID NO: 622079 - RNA, 23 nt, Artificial Sequence
  Synthetic
accagacaggaaacuuaaggaau

SEQ ID NO: 622080 - RNA, 24 nt, Artificial Sequence
  Synthetic
aaccagacaggaaacuuaaggaau

SEQ ID NO: 622081 - RNA, 18 nt, Artificial Sequence
  Synthetic
auaaauggacacaggaau

SEQ ID NO: 622082 - RNA, 19 nt, Artificial Sequence
  Synthetic
gauaaauggacacaggaau

SEQ ID NO: 622083 - RNA, 20 nt, Artificial Sequence
  Synthetic
ugauaaauggacacaggaau

SEQ ID NO: 622084 - RNA, 21 nt, Artificial Sequence
  Synthetic
uugauaaauggacacaggaau

SEQ ID NO: 622085 - RNA, 22 nt, Artificial Sequence
  Synthetic
auugauaaauggacacaggaau

SEQ ID NO: 622086 - RNA, 23 nt, Artificial Sequence
  Synthetic
cauugauaaauggacacaggaau

SEQ ID NO: 622087 - RNA, 24 nt, Artificial Sequence
  Synthetic
ucauugauaaauggacacaggaau

SEQ ID NO: 622088 - RNA, 18 nt, Artificial Sequence
  Synthetic
acacauggacacaggaau

SEQ ID NO: 622089 - RNA, 19 nt, Artificial Sequence
  Synthetic
aacacauggacacaggaau

SEQ ID NO: 622090 - RNA, 20 nt, Artificial Sequence
  Synthetic
gaacacauggacacaggaau

SEQ ID NO: 622091 - RNA, 21 nt, Artificial Sequence
  Synthetic
agaacacauggacacaggaau

SEQ ID NO: 622092 - RNA, 22 nt, Artificial Sequence
  Synthetic
gagaacacauggacacaggaau

SEQ ID NO: 622093 - RNA, 23 nt, Artificial Sequence
  Synthetic
ugagaacacauggacacaggaau

SEQ ID NO: 622094 - RNA, 24 nt, Artificial Sequence
  Synthetic
augagaacacauggacacaggaau

SEQ ID NO: 622095 - RNA, 18 nt, Artificial Sequence
  Synthetic
cauagucagaccaggaau

SEQ ID NO: 622096 - RNA, 19 nt, Artificial Sequence
  Synthetic
acauagucagaccaggaau

SEQ ID NO: 622097 - RNA, 20 nt, Artificial Sequence
  Synthetic
uacauagucagaccaggaau

SEQ ID NO: 622098 - RNA, 21 nt, Artificial Sequence
  Synthetic
uuacauagucagaccaggaau

SEQ ID NO: 622099 - RNA, 22 nt, Artificial Sequence
  Synthetic
auuacauagucagaccaggaau

SEQ ID NO: 622100 - RNA, 23 nt, Artificial Sequence
  Synthetic
uauuacauagucagaccaggaau

SEQ ID NO: 622101 - RNA, 24 nt, Artificial Sequence
  Synthetic
auauuacauagucagaccaggaau

SEQ ID NO: 622102 - RNA, 18 nt, Artificial Sequence
  Synthetic
ucacuucagcccaggaau

SEQ ID NO: 622103 - RNA, 19 nt, Artificial Sequence
  Synthetic
aucacuucagcccaggaau

SEQ ID NO: 622104 - RNA, 20 nt, Artificial Sequence
  Synthetic
gaucacuucagcccaggaau

SEQ ID NO: 622105 - RNA, 21 nt, Artificial Sequence
  Synthetic
ggaucacuucagcccaggaau

SEQ ID NO: 622106 - RNA, 22 nt, Artificial Sequence
  Synthetic
uggaucacuucagcccaggaau

SEQ ID NO: 622107 - RNA, 23 nt, Artificial Sequence
  Synthetic
guggaucacuucagcccaggaau

SEQ ID NO: 622108 - RNA, 24 nt, Artificial Sequence
  Synthetic
gguggaucacuucagcccaggaau

SEQ ID NO: 622109 - RNA, 18 nt, Artificial Sequence
  Synthetic
auuuuacuuaucaggaau

SEQ ID NO: 622110 - RNA, 19 nt, Artificial Sequence
  Synthetic
aauuuuacuuaucaggaau

SEQ ID NO: 622111 - RNA, 20 nt, Artificial Sequence
  Synthetic
uaauuuuacuuaucaggaau

SEQ ID NO: 622112 - RNA, 21 nt, Artificial Sequence
  Synthetic
guaauuuuacuuaucaggaau

SEQ ID NO: 622113 - RNA, 22 nt, Artificial Sequence
  Synthetic
uguaauuuuacuuaucaggaau

SEQ ID NO: 622114 - RNA, 23 nt, Artificial Sequence
  Synthetic
uuguaauuuuacuuaucaggaau

SEQ ID NO: 622115 - RNA, 24 nt, Artificial Sequence
  Synthetic
guuguaauuuuacuuaucaggaau

SEQ ID NO: 622116 - RNA, 18 nt, Artificial Sequence
  Synthetic
gauauuuucaagaggaau

SEQ ID NO: 622117 - RNA, 19 nt, Artificial Sequence
  Synthetic
ugauauuuucaagaggaau

SEQ ID NO: 622118 - RNA, 20 nt, Artificial Sequence
  Synthetic
cugauauuuucaagaggaau

SEQ ID NO: 622119 - RNA, 21 nt, Artificial Sequence
  Synthetic
acugauauuuucaagaggaau

SEQ ID NO: 622120 - RNA, 22 nt, Artificial Sequence
  Synthetic
cacugauauuuucaagaggaau

SEQ ID NO: 622121 - RNA, 23 nt, Artificial Sequence
  Synthetic
acacugauauuuucaagaggaau

SEQ ID NO: 622122 - RNA, 24 nt, Artificial Sequence
  Synthetic
aacacugauauuuucaagaggaau

SEQ ID NO: 622123 - RNA, 18 nt, Artificial Sequence
  Synthetic
aggguaaagacgaggaau

SEQ ID NO: 622124 - RNA, 19 nt, Artificial Sequence
  Synthetic
uaggguaaagacgaggaau

SEQ ID NO: 622125 - RNA, 20 nt, Artificial Sequence
  Synthetic
cuaggguaaagacgaggaau

SEQ ID NO: 622126 - RNA, 21 nt, Artificial Sequence
  Synthetic
ccuaggguaaagacgaggaau

SEQ ID NO: 622127 - RNA, 22 nt, Artificial Sequence
  Synthetic
uccuaggguaaagacgaggaau

SEQ ID NO: 622128 - RNA, 23 nt, Artificial Sequence
  Synthetic
uuccuaggguaaagacgaggaau

SEQ ID NO: 622129 - RNA, 24 nt, Artificial Sequence
  Synthetic
auuccuaggguaaagacgaggaau

SEQ ID NO: 622130 - RNA, 18 nt, Artificial Sequence
  Synthetic
uaccuaccuccgaggaau

SEQ ID NO: 622131 - RNA, 19 nt, Artificial Sequence
  Synthetic
auaccuaccuccgaggaau

SEQ ID NO: 622132 - RNA, 20 nt, Artificial Sequence
  Synthetic
cauaccuaccuccgaggaau

SEQ ID NO: 622133 - RNA, 21 nt, Artificial Sequence
  Synthetic
acauaccuaccuccgaggaau

SEQ ID NO: 622134 - RNA, 22 nt, Artificial Sequence
  Synthetic
gacauaccuaccuccgaggaau

SEQ ID NO: 622135 - RNA, 23 nt, Artificial Sequence
  Synthetic
ugacauaccuaccuccgaggaau

SEQ ID NO: 622136 - RNA, 24 nt, Artificial Sequence
  Synthetic
gugacauaccuaccuccgaggaau

SEQ ID NO: 622137 - RNA, 18 nt, Artificial Sequence
  Synthetic
ugaucucagaugaggaau

SEQ ID NO: 622138 - RNA, 19 nt, Artificial Sequence
  Synthetic
cugaucucagaugaggaau

SEQ ID NO: 622139 - RNA, 20 nt, Artificial Sequence
  Synthetic
ucugaucucagaugaggaau

SEQ ID NO: 622140 - RNA, 21 nt, Artificial Sequence
  Synthetic
cucugaucucagaugaggaau

SEQ ID NO: 622141 - RNA, 22 nt, Artificial Sequence
  Synthetic
gcucugaucucagaugaggaau

SEQ ID NO: 622142 - RNA, 23 nt, Artificial Sequence
  Synthetic
agcucugaucucagaugaggaau

SEQ ID NO: 622143 - RNA, 24 nt, Artificial Sequence
  Synthetic
uagcucugaucucagaugaggaau

SEQ ID NO: 622144 - RNA, 18 nt, Artificial Sequence
  Synthetic
aagccgauucugaggaau

SEQ ID NO: 622145 - RNA, 19 nt, Artificial Sequence
  Synthetic
gaagccgauucugaggaau

SEQ ID NO: 622146 - RNA, 20 nt, Artificial Sequence
  Synthetic
ugaagccgauucugaggaau

SEQ ID NO: 622147 - RNA, 21 nt, Artificial Sequence
  Synthetic
augaagccgauucugaggaau

SEQ ID NO: 622148 - RNA, 22 nt, Artificial Sequence
  Synthetic
aaugaagccgauucugaggaau

SEQ ID NO: 622149 - RNA, 23 nt, Artificial Sequence
  Synthetic
aaaugaagccgauucugaggaau

SEQ ID NO: 622150 - RNA, 24 nt, Artificial Sequence
  Synthetic
caaaugaagccgauucugaggaau

SEQ ID NO: 622151 - RNA, 18 nt, Artificial Sequence
  Synthetic
aaagcacuggauaggaau

SEQ ID NO: 622152 - RNA, 19 nt, Artificial Sequence
  Synthetic
uaaagcacuggauaggaau

SEQ ID NO: 622153 - RNA, 20 nt, Artificial Sequence
  Synthetic
guaaagcacuggauaggaau

SEQ ID NO: 622154 - RNA, 21 nt, Artificial Sequence
  Synthetic
uguaaagcacuggauaggaau

SEQ ID NO: 622155 - RNA, 22 nt, Artificial Sequence
  Synthetic
auguaaagcacuggauaggaau

SEQ ID NO: 622156 - RNA, 23 nt, Artificial Sequence
  Synthetic
aauguaaagcacuggauaggaau

SEQ ID NO: 622157 - RNA, 24 nt, Artificial Sequence
  Synthetic
aaauguaaagcacuggauaggaau

SEQ ID NO: 622158 - RNA, 18 nt, Artificial Sequence
  Synthetic
gaaaaauggacuaggaau

SEQ ID NO: 622159 - RNA, 19 nt, Artificial Sequence
  Synthetic
agaaaaauggacuaggaau

SEQ ID NO: 622160 - RNA, 20 nt, Artificial Sequence
  Synthetic
aagaaaaauggacuaggaau

SEQ ID NO: 622161 - RNA, 21 nt, Artificial Sequence
  Synthetic
gaagaaaaauggacuaggaau

SEQ ID NO: 622162 - RNA, 22 nt, Artificial Sequence
  Synthetic
agaagaaaaauggacuaggaau

SEQ ID NO: 622163 - RNA, 23 nt, Artificial Sequence
  Synthetic
uagaagaaaaauggacuaggaau

SEQ ID NO: 622164 - RNA, 24 nt, Artificial Sequence
  Synthetic
uuagaagaaaaauggacuaggaau

SEQ ID NO: 622165 - RNA, 18 nt, Artificial Sequence
  Synthetic
cucagauaaaguaggaau

SEQ ID NO: 622166 - RNA, 19 nt, Artificial Sequence
  Synthetic
gcucagauaaaguaggaau

SEQ ID NO: 622167 - RNA, 20 nt, Artificial Sequence
  Synthetic
agcucagauaaaguaggaau

SEQ ID NO: 622168 - RNA, 21 nt, Artificial Sequence
  Synthetic
aagcucagauaaaguaggaau

SEQ ID NO: 622169 - RNA, 22 nt, Artificial Sequence
  Synthetic
uaagcucagauaaaguaggaau

SEQ ID NO: 622170 - RNA, 23 nt, Artificial Sequence
  Synthetic
auaagcucagauaaaguaggaau

SEQ ID NO: 622171 - RNA, 24 nt, Artificial Sequence
  Synthetic
gauaagcucagauaaaguaggaau

SEQ ID NO: 622172 - RNA, 18 nt, Artificial Sequence
  Synthetic
uuucacugggguaggaau

SEQ ID NO: 622173 - RNA, 19 nt, Artificial Sequence
  Synthetic
guuucacugggguaggaau

SEQ ID NO: 622174 - RNA, 20 nt, Artificial Sequence
  Synthetic
uguuucacugggguaggaau

SEQ ID NO: 622175 - RNA, 21 nt, Artificial Sequence
  Synthetic
auguuucacugggguaggaau

SEQ ID NO: 622176 - RNA, 22 nt, Artificial Sequence
  Synthetic
uauguuucacugggguaggaau

SEQ ID NO: 622177 - RNA, 23 nt, Artificial Sequence
  Synthetic
cuauguuucacugggguaggaau

SEQ ID NO: 622178 - RNA, 24 nt, Artificial Sequence
  Synthetic
acuauguuucacugggguaggaau

SEQ ID NO: 622179 - RNA, 18 nt, Artificial Sequence
  Synthetic
aucccuuuguuuaggaau

SEQ ID NO: 622180 - RNA, 19 nt, Artificial Sequence
  Synthetic
uaucccuuuguuuaggaau

SEQ ID NO: 622181 - RNA, 20 nt, Artificial Sequence
  Synthetic
cuaucccuuuguuuaggaau

SEQ ID NO: 622182 - RNA, 21 nt, Artificial Sequence
  Synthetic
ucuaucccuuuguuuaggaau

SEQ ID NO: 622183 - RNA, 22 nt, Artificial Sequence
  Synthetic
uucuaucccuuuguuuaggaau

SEQ ID NO: 622184 - RNA, 23 nt, Artificial Sequence
  Synthetic
uuucuaucccuuuguuuaggaau

SEQ ID NO: 622185 - RNA, 24 nt, Artificial Sequence
  Synthetic
uuuucuaucccuuuguuuaggaau

SEQ ID NO: 622186 - RNA, 18 nt, Artificial Sequence
  Synthetic
aaguaauaucagcggaau

SEQ ID NO: 622187 - RNA, 19 nt, Artificial Sequence
  Synthetic
aaaguaauaucagcggaau

SEQ ID NO: 622188 - RNA, 20 nt, Artificial Sequence
  Synthetic
gaaaguaauaucagcggaau

SEQ ID NO: 622189 - RNA, 21 nt, Artificial Sequence
  Synthetic
ugaaaguaauaucagcggaau

SEQ ID NO: 622190 - RNA, 22 nt, Artificial Sequence
  Synthetic
augaaaguaauaucagcggaau

SEQ ID NO: 622191 - RNA, 23 nt, Artificial Sequence
  Synthetic
aaugaaaguaauaucagcggaau

SEQ ID NO: 622192 - RNA, 24 nt, Artificial Sequence
  Synthetic
aaaugaaaguaauaucagcggaau

SEQ ID NO: 622193 - RNA, 18 nt, Artificial Sequence
  Synthetic
uaauuaaagacagggaau

SEQ ID NO: 622194 - RNA, 19 nt, Artificial Sequence
  Synthetic
uuaauuaaagacagggaau

SEQ ID NO: 622195 - RNA, 20 nt, Artificial Sequence
  Synthetic
auuaauuaaagacagggaau

SEQ ID NO: 622196 - RNA, 21 nt, Artificial Sequence
  Synthetic
uauuaauuaaagacagggaau

SEQ ID NO: 622197 - RNA, 22 nt, Artificial Sequence
  Synthetic
cuauuaauuaaagacagggaau

SEQ ID NO: 622198 - RNA, 23 nt, Artificial Sequence
  Synthetic
ucuauuaauuaaagacagggaau

SEQ ID NO: 622199 - RNA, 24 nt, Artificial Sequence
  Synthetic
gucuauuaauuaaagacagggaau

SEQ ID NO: 622200 - RNA, 18 nt, Artificial Sequence
  Synthetic
guggaccaggcagggaau

SEQ ID NO: 622201 - RNA, 19 nt, Artificial Sequence
  Synthetic
aguggaccaggcagggaau

SEQ ID NO: 622202 - RNA, 20 nt, Artificial Sequence
  Synthetic
aaguggaccaggcagggaau

SEQ ID NO: 622203 - RNA, 21 nt, Artificial Sequence
  Synthetic
uaaguggaccaggcagggaau

SEQ ID NO: 622204 - RNA, 22 nt, Artificial Sequence
  Synthetic
cuaaguggaccaggcagggaau

SEQ ID NO: 622205 - RNA, 23 nt, Artificial Sequence
  Synthetic
ucuaaguggaccaggcagggaau

SEQ ID NO: 622206 - RNA, 24 nt, Artificial Sequence
  Synthetic
uucuaaguggaccaggcagggaau

SEQ ID NO: 622207 - RNA, 18 nt, Artificial Sequence
  Synthetic
uguugugucucagggaau

SEQ ID NO: 622208 - RNA, 19 nt, Artificial Sequence
  Synthetic
uuguugugucucagggaau

SEQ ID NO: 622209 - RNA, 20 nt, Artificial Sequence
  Synthetic
auuguugugucucagggaau

SEQ ID NO: 622210 - RNA, 21 nt, Artificial Sequence
  Synthetic
uauuguugugucucagggaau

SEQ ID NO: 622211 - RNA, 22 nt, Artificial Sequence
  Synthetic
auauuguugugucucagggaau

SEQ ID NO: 622212 - RNA, 23 nt, Artificial Sequence
  Synthetic
aauauuguugugucucagggaau

SEQ ID NO: 622213 - RNA, 24 nt, Artificial Sequence
  Synthetic
caauauuguugugucucagggaau

SEQ ID NO: 622214 - RNA, 18 nt, Artificial Sequence
  Synthetic
accucaaagggagggaau

SEQ ID NO: 622215 - RNA, 19 nt, Artificial Sequence
  Synthetic
aaccucaaagggagggaau

SEQ ID NO: 622216 - RNA, 20 nt, Artificial Sequence
  Synthetic
caaccucaaagggagggaau

SEQ ID NO: 622217 - RNA, 21 nt, Artificial Sequence
  Synthetic
gcaaccucaaagggagggaau

SEQ ID NO: 622218 - RNA, 22 nt, Artificial Sequence
  Synthetic
ggcaaccucaaagggagggaau

SEQ ID NO: 622219 - RNA, 23 nt, Artificial Sequence
  Synthetic
uggcaaccucaaagggagggaau

SEQ ID NO: 622220 - RNA, 24 nt, Artificial Sequence
  Synthetic
guggcaaccucaaagggagggaau

SEQ ID NO: 622221 - RNA, 18 nt, Artificial Sequence
  Synthetic
gcuaucacguaggggaau

SEQ ID NO: 622222 - RNA, 19 nt, Artificial Sequence
  Synthetic
agcuaucacguaggggaau

SEQ ID NO: 622223 - RNA, 20 nt, Artificial Sequence
  Synthetic
gagcuaucacguaggggaau

SEQ ID NO: 622224 - RNA, 21 nt, Artificial Sequence
  Synthetic
ggagcuaucacguaggggaau

SEQ ID NO: 622225 - RNA, 22 nt, Artificial Sequence
  Synthetic
cggagcuaucacguaggggaau

SEQ ID NO: 622226 - RNA, 23 nt, Artificial Sequence
  Synthetic
acggagcuaucacguaggggaau

SEQ ID NO: 622227 - RNA, 24 nt, Artificial Sequence
  Synthetic
uacggagcuaucacguaggggaau

SEQ ID NO: 622228 - RNA, 18 nt, Artificial Sequence
  Synthetic
ugcauuguuggugggaau

SEQ ID NO: 622229 - RNA, 19 nt, Artificial Sequence
  Synthetic
cugcauuguuggugggaau

SEQ ID NO: 622230 - RNA, 20 nt, Artificial Sequence
  Synthetic
ucugcauuguuggugggaau

SEQ ID NO: 622231 - RNA, 21 nt, Artificial Sequence
  Synthetic
uucugcauuguuggugggaau

SEQ ID NO: 622232 - RNA, 22 nt, Artificial Sequence
  Synthetic
cuucugcauuguuggugggaau

SEQ ID NO: 622233 - RNA, 23 nt, Artificial Sequence
  Synthetic
acuucugcauuguuggugggaau

SEQ ID NO: 622234 - RNA, 24 nt, Artificial Sequence
  Synthetic
cacuucugcauuguuggugggaau

SEQ ID NO: 622235 - RNA, 18 nt, Artificial Sequence
  Synthetic
uauucaaccaaauggaau

SEQ ID NO: 622236 - RNA, 19 nt, Artificial Sequence
  Synthetic
cuauucaaccaaauggaau

SEQ ID NO: 622237 - RNA, 20 nt, Artificial Sequence
  Synthetic
ucuauucaaccaaauggaau

SEQ ID NO: 622238 - RNA, 21 nt, Artificial Sequence
  Synthetic
gucuauucaaccaaauggaau

SEQ ID NO: 622239 - RNA, 22 nt, Artificial Sequence
  Synthetic
ugucuauucaaccaaauggaau

SEQ ID NO: 622240 - RNA, 23 nt, Artificial Sequence
  Synthetic
augucuauucaaccaaauggaau

SEQ ID NO: 622241 - RNA, 24 nt, Artificial Sequence
  Synthetic
gaugucuauucaaccaaauggaau

SEQ ID NO: 622242 - RNA, 18 nt, Artificial Sequence
  Synthetic
gaagaacagaaauggaau

SEQ ID NO: 622243 - RNA, 19 nt, Artificial Sequence
  Synthetic
agaagaacagaaauggaau

SEQ ID NO: 622244 - RNA, 20 nt, Artificial Sequence
  Synthetic
gagaagaacagaaauggaau

SEQ ID NO: 622245 - RNA, 21 nt, Artificial Sequence
  Synthetic
ugagaagaacagaaauggaau

SEQ ID NO: 622246 - RNA, 22 nt, Artificial Sequence
  Synthetic
uugagaagaacagaaauggaau

SEQ ID NO: 622247 - RNA, 23 nt, Artificial Sequence
  Synthetic
uuugagaagaacagaaauggaau

SEQ ID NO: 622248 - RNA, 24 nt, Artificial Sequence
  Synthetic
auuugagaagaacagaaauggaau

SEQ ID NO: 622249 - RNA, 18 nt, Artificial Sequence
  Synthetic
ccuaguuaugacuggaau

SEQ ID NO: 622250 - RNA, 19 nt, Artificial Sequence
  Synthetic
uccuaguuaugacuggaau

SEQ ID NO: 622251 - RNA, 20 nt, Artificial Sequence
  Synthetic
auccuaguuaugacuggaau

SEQ ID NO: 622252 - RNA, 21 nt, Artificial Sequence
  Synthetic
gauccuaguuaugacuggaau

SEQ ID NO: 622253 - RNA, 22 nt, Artificial Sequence
  Synthetic
ggauccuaguuaugacuggaau

SEQ ID NO: 622254 - RNA, 23 nt, Artificial Sequence
  Synthetic
gggauccuaguuaugacuggaau

SEQ ID NO: 622255 - RNA, 24 nt, Artificial Sequence
  Synthetic
ugggauccuaguuaugacuggaau

SEQ ID NO: 622256 - RNA, 18 nt, Artificial Sequence
  Synthetic
aaacaugucuccuggaau

SEQ ID NO: 622257 - RNA, 19 nt, Artificial Sequence
  Synthetic
caaacaugucuccuggaau

SEQ ID NO: 622258 - RNA, 20 nt, Artificial Sequence
  Synthetic
ccaaacaugucuccuggaau

SEQ ID NO: 622259 - RNA, 21 nt, Artificial Sequence
  Synthetic
cccaaacaugucuccuggaau

SEQ ID NO: 622260 - RNA, 22 nt, Artificial Sequence
  Synthetic
ucccaaacaugucuccuggaau

SEQ ID NO: 622261 - RNA, 23 nt, Artificial Sequence
  Synthetic
uucccaaacaugucuccuggaau

SEQ ID NO: 622262 - RNA, 24 nt, Artificial Sequence
  Synthetic
auucccaaacaugucuccuggaau

SEQ ID NO: 622263 - RNA, 18 nt, Artificial Sequence
  Synthetic
uucugcagaagcuggaau

SEQ ID NO: 622264 - RNA, 19 nt, Artificial Sequence
  Synthetic
uuucugcagaagcuggaau

SEQ ID NO: 622265 - RNA, 20 nt, Artificial Sequence
  Synthetic
guuucugcagaagcuggaau

SEQ ID NO: 622266 - RNA, 21 nt, Artificial Sequence
  Synthetic
gguuucugcagaagcuggaau

SEQ ID NO: 622267 - RNA, 22 nt, Artificial Sequence
  Synthetic
ugguuucugcagaagcuggaau

SEQ ID NO: 622268 - RNA, 23 nt, Artificial Sequence
  Synthetic
cugguuucugcagaagcuggaau

SEQ ID NO: 622269 - RNA, 24 nt, Artificial Sequence
  Synthetic
gcugguuucugcagaagcuggaau

SEQ ID NO: 622270 - RNA, 18 nt, Artificial Sequence
  Synthetic
agagauucuaucuggaau

SEQ ID NO: 622271 - RNA, 19 nt, Artificial Sequence
  Synthetic
cagagauucuaucuggaau

SEQ ID NO: 622272 - RNA, 20 nt, Artificial Sequence
  Synthetic
ucagagauucuaucuggaau

SEQ ID NO: 622273 - RNA, 21 nt, Artificial Sequence
  Synthetic
uucagagauucuaucuggaau

SEQ ID NO: 622274 - RNA, 22 nt, Artificial Sequence
  Synthetic
auucagagauucuaucuggaau

SEQ ID NO: 622275 - RNA, 23 nt, Artificial Sequence
  Synthetic
uauucagagauucuaucuggaau

SEQ ID NO: 622276 - RNA, 24 nt, Artificial Sequence
  Synthetic
cuauucagagauucuaucuggaau

SEQ ID NO: 622277 - RNA, 18 nt, Artificial Sequence
  Synthetic
ugucuucaccucuggaau

SEQ ID NO: 622278 - RNA, 19 nt, Artificial Sequence
  Synthetic
augucuucaccucuggaau

SEQ ID NO: 622279 - RNA, 20 nt, Artificial Sequence
  Synthetic
uaugucuucaccucuggaau

SEQ ID NO: 622280 - RNA, 21 nt, Artificial Sequence
  Synthetic
guaugucuucaccucuggaau

SEQ ID NO: 622281 - RNA, 22 nt, Artificial Sequence
  Synthetic
uguaugucuucaccucuggaau

SEQ ID NO: 622282 - RNA, 23 nt, Artificial Sequence
  Synthetic
auguaugucuucaccucuggaau

SEQ ID NO: 622283 - RNA, 24 nt, Artificial Sequence
  Synthetic
gauguaugucuucaccucuggaau

SEQ ID NO: 622284 - RNA, 18 nt, Artificial Sequence
  Synthetic
gcagaucuacaguggaau

SEQ ID NO: 622285 - RNA, 19 nt, Artificial Sequence
  Synthetic
ggcagaucuacaguggaau

SEQ ID NO: 622286 - RNA, 20 nt, Artificial Sequence
  Synthetic
aggcagaucuacaguggaau

SEQ ID NO: 622287 - RNA, 21 nt, Artificial Sequence
  Synthetic
gaggcagaucuacaguggaau

SEQ ID NO: 622288 - RNA, 22 nt, Artificial Sequence
  Synthetic
ggaggcagaucuacaguggaau

SEQ ID NO: 622289 - RNA, 23 nt, Artificial Sequence
  Synthetic
cggaggcagaucuacaguggaau

SEQ ID NO: 622290 - RNA, 24 nt, Artificial Sequence
  Synthetic
ucggaggcagaucuacaguggaau

SEQ ID NO: 622291 - RNA, 18 nt, Artificial Sequence
  Synthetic
gaguccugucaguggaau

SEQ ID NO: 622292 - RNA, 19 nt, Artificial Sequence
  Synthetic
agaguccugucaguggaau

SEQ ID NO: 622293 - RNA, 20 nt, Artificial Sequence
  Synthetic
uagaguccugucaguggaau

SEQ ID NO: 622294 - RNA, 21 nt, Artificial Sequence
  Synthetic
guagaguccugucaguggaau

SEQ ID NO: 622295 - RNA, 22 nt, Artificial Sequence
  Synthetic
aguagaguccugucaguggaau

SEQ ID NO: 622296 - RNA, 23 nt, Artificial Sequence
  Synthetic
uaguagaguccugucaguggaau

SEQ ID NO: 622297 - RNA, 24 nt, Artificial Sequence
  Synthetic
auaguagaguccugucaguggaau

SEQ ID NO: 622298 - RNA, 18 nt, Artificial Sequence
  Synthetic
auauugcagaauuggaau

SEQ ID NO: 622299 - RNA, 19 nt, Artificial Sequence
  Synthetic
aauauugcagaauuggaau

SEQ ID NO: 622300 - RNA, 20 nt, Artificial Sequence
  Synthetic
aaauauugcagaauuggaau

SEQ ID NO: 622301 - RNA, 21 nt, Artificial Sequence
  Synthetic
aaaauauugcagaauuggaau

SEQ ID NO: 622302 - RNA, 22 nt, Artificial Sequence
  Synthetic
gaaaauauugcagaauuggaau

SEQ ID NO: 622303 - RNA, 23 nt, Artificial Sequence
  Synthetic
ugaaaauauugcagaauuggaau

SEQ ID NO: 622304 - RNA, 24 nt, Artificial Sequence
  Synthetic
augaaaauauugcagaauuggaau

SEQ ID NO: 622305 - RNA, 18 nt, Artificial Sequence
  Synthetic
aaagcagagaauuggaau

SEQ ID NO: 622306 - RNA, 19 nt, Artificial Sequence
  Synthetic
aaaagcagagaauuggaau

SEQ ID NO: 622307 - RNA, 20 nt, Artificial Sequence
  Synthetic
caaaagcagagaauuggaau

SEQ ID NO: 622308 - RNA, 21 nt, Artificial Sequence
  Synthetic
ccaaaagcagagaauuggaau

SEQ ID NO: 622309 - RNA, 22 nt, Artificial Sequence
  Synthetic
gccaaaagcagagaauuggaau

SEQ ID NO: 622310 - RNA, 23 nt, Artificial Sequence
  Synthetic
ggccaaaagcagagaauuggaau

SEQ ID NO: 622311 - RNA, 24 nt, Artificial Sequence
  Synthetic
uggccaaaagcagagaauuggaau

SEQ ID NO: 622312 - RNA, 18 nt, Artificial Sequence
  Synthetic
aggaguuuggauuggaau

SEQ ID NO: 622313 - RNA, 19 nt, Artificial Sequence
  Synthetic
aaggaguuuggauuggaau

SEQ ID NO: 622314 - RNA, 20 nt, Artificial Sequence
  Synthetic
caaggaguuuggauuggaau

SEQ ID NO: 622315 - RNA, 21 nt, Artificial Sequence
  Synthetic
gcaaggaguuuggauuggaau

SEQ ID NO: 622316 - RNA, 22 nt, Artificial Sequence
  Synthetic
cgcaaggaguuuggauuggaau

SEQ ID NO: 622317 - RNA, 23 nt, Artificial Sequence
  Synthetic
ccgcaaggaguuuggauuggaau

SEQ ID NO: 622318 - RNA, 24 nt, Artificial Sequence
  Synthetic
cccgcaaggaguuuggauuggaau

SEQ ID NO: 622319 - RNA, 18 nt, Artificial Sequence
  Synthetic
auuuuuacuuauuggaau

SEQ ID NO: 622320 - RNA, 19 nt, Artificial Sequence
  Synthetic
uauuuuuacuuauuggaau

SEQ ID NO: 622321 - RNA, 20 nt, Artificial Sequence
  Synthetic
uuauuuuuacuuauuggaau

SEQ ID NO: 622322 - RNA, 21 nt, Artificial Sequence
  Synthetic
uuuauuuuuacuuauuggaau

SEQ ID NO: 622323 - RNA, 22 nt, Artificial Sequence
  Synthetic
auuuauuuuuacuuauuggaau

SEQ ID NO: 622324 - RNA, 23 nt, Artificial Sequence
  Synthetic
cauuuauuuuuacuuauuggaau

SEQ ID NO: 622325 - RNA, 24 nt, Artificial Sequence
  Synthetic
acauuuauuuuuacuuauuggaau

SEQ ID NO: 622326 - RNA, 18 nt, Artificial Sequence
  Synthetic
aauuguuuuuguuggaau

SEQ ID NO: 622327 - RNA, 19 nt, Artificial Sequence
  Synthetic
caauuguuuuuguuggaau

SEQ ID NO: 622328 - RNA, 20 nt, Artificial Sequence
  Synthetic
gcaauuguuuuuguuggaau

SEQ ID NO: 622329 - RNA, 21 nt, Artificial Sequence
  Synthetic
ugcaauuguuuuuguuggaau

SEQ ID NO: 622330 - RNA, 22 nt, Artificial Sequence
  Synthetic
uugcaauuguuuuuguuggaau

SEQ ID NO: 622331 - RNA, 23 nt, Artificial Sequence
  Synthetic
uuugcaauuguuuuuguuggaau

SEQ ID NO: 622332 - RNA, 24 nt, Artificial Sequence
  Synthetic
cuuugcaauuguuuuuguuggaau

SEQ ID NO: 622333 - RNA, 18 nt, Artificial Sequence
  Synthetic
aaagauaugguuuggaau

SEQ ID NO: 622334 - RNA, 19 nt, Artificial Sequence
  Synthetic
caaagauaugguuuggaau

SEQ ID NO: 622335 - RNA, 20 nt, Artificial Sequence
  Synthetic
acaaagauaugguuuggaau

SEQ ID NO: 622336 - RNA, 21 nt, Artificial Sequence
  Synthetic
cacaaagauaugguuuggaau

SEQ ID NO: 622337 - RNA, 22 nt, Artificial Sequence
  Synthetic
ccacaaagauaugguuuggaau

SEQ ID NO: 622338 - RNA, 23 nt, Artificial Sequence
  Synthetic
uccacaaagauaugguuuggaau

SEQ ID NO: 622339 - RNA, 24 nt, Artificial Sequence
  Synthetic
auccacaaagauaugguuuggaau

SEQ ID NO: 622340 - RNA, 18 nt, Artificial Sequence
  Synthetic
accuaaauauuuuggaau

SEQ ID NO: 622341 - RNA, 19 nt, Artificial Sequence
  Synthetic
gaccuaaauauuuuggaau

SEQ ID NO: 622342 - RNA, 20 nt, Artificial Sequence
  Synthetic
agaccuaaauauuuuggaau

SEQ ID NO: 622343 - RNA, 21 nt, Artificial Sequence
  Synthetic
gagaccuaaauauuuuggaau

SEQ ID NO: 622344 - RNA, 22 nt, Artificial Sequence
  Synthetic
ggagaccuaaauauuuuggaau

SEQ ID NO: 622345 - RNA, 23 nt, Artificial Sequence
  Synthetic
aggagaccuaaauauuuuggaau

SEQ ID NO: 622346 - RNA, 24 nt, Artificial Sequence
  Synthetic
aaggagaccuaaauauuuuggaau

SEQ ID NO: 622347 - RNA, 18 nt, Artificial Sequence
  Synthetic
uucaaacaguuuuggaau

SEQ ID NO: 622348 - RNA, 19 nt, Artificial Sequence
  Synthetic
auucaaacaguuuuggaau

SEQ ID NO: 622349 - RNA, 20 nt, Artificial Sequence
  Synthetic
cauucaaacaguuuuggaau

SEQ ID NO: 622350 - RNA, 21 nt, Artificial Sequence
  Synthetic
gcauucaaacaguuuuggaau

SEQ ID NO: 622351 - RNA, 22 nt, Artificial Sequence
  Synthetic
agcauucaaacaguuuuggaau

SEQ ID NO: 622352 - RNA, 23 nt, Artificial Sequence
  Synthetic
cagcauucaaacaguuuuggaau

SEQ ID NO: 622353 - RNA, 24 nt, Artificial Sequence
  Synthetic
ucagcauucaaacaguuuuggaau

SEQ ID NO: 622354 - RNA, 18 nt, Artificial Sequence
  Synthetic
uagccaaauaaaaugaau

SEQ ID NO: 622355 - RNA, 19 nt, Artificial Sequence
  Synthetic
cuagccaaauaaaaugaau

SEQ ID NO: 622356 - RNA, 20 nt, Artificial Sequence
  Synthetic
ucuagccaaauaaaaugaau

SEQ ID NO: 622357 - RNA, 21 nt, Artificial Sequence
  Synthetic
gucuagccaaauaaaaugaau

SEQ ID NO: 622358 - RNA, 22 nt, Artificial Sequence
  Synthetic
ugucuagccaaauaaaaugaau

SEQ ID NO: 622359 - RNA, 23 nt, Artificial Sequence
  Synthetic
cugucuagccaaauaaaaugaau

SEQ ID NO: 622360 - RNA, 24 nt, Artificial Sequence
  Synthetic
ccugucuagccaaauaaaaugaau

SEQ ID NO: 622361 - RNA, 18 nt, Artificial Sequence
  Synthetic
ugaguaaaacaaaugaau

SEQ ID NO: 622362 - RNA, 19 nt, Artificial Sequence
  Synthetic
gugaguaaaacaaaugaau

SEQ ID NO: 622363 - RNA, 20 nt, Artificial Sequence
  Synthetic
ggugaguaaaacaaaugaau

SEQ ID NO: 622364 - RNA, 21 nt, Artificial Sequence
  Synthetic
aggugaguaaaacaaaugaau

SEQ ID NO: 622365 - RNA, 22 nt, Artificial Sequence
  Synthetic
aaggugaguaaaacaaaugaau

SEQ ID NO: 622366 - RNA, 23 nt, Artificial Sequence
  Synthetic
caaggugaguaaaacaaaugaau

SEQ ID NO: 622367 - RNA, 24 nt, Artificial Sequence
  Synthetic
acaaggugaguaaaacaaaugaau

SEQ ID NO: 622368 - RNA, 18 nt, Artificial Sequence
  Synthetic
accuuuggucaaaugaau

SEQ ID NO: 622369 - RNA, 19 nt, Artificial Sequence
  Synthetic
caccuuuggucaaaugaau

SEQ ID NO: 622370 - RNA, 20 nt, Artificial Sequence
  Synthetic
ccaccuuuggucaaaugaau

SEQ ID NO: 622371 - RNA, 21 nt, Artificial Sequence
  Synthetic
gccaccuuuggucaaaugaau

SEQ ID NO: 622372 - RNA, 22 nt, Artificial Sequence
  Synthetic
ugccaccuuuggucaaaugaau

SEQ ID NO: 622373 - RNA, 23 nt, Artificial Sequence
  Synthetic
uugccaccuuuggucaaaugaau

SEQ ID NO: 622374 - RNA, 24 nt, Artificial Sequence
  Synthetic
uuugccaccuuuggucaaaugaau

SEQ ID NO: 622375 - RNA, 18 nt, Artificial Sequence
  Synthetic
aggagagaagaaaugaau

SEQ ID NO: 622376 - RNA, 19 nt, Artificial Sequence
  Synthetic
uaggagagaagaaaugaau

SEQ ID NO: 622377 - RNA, 20 nt, Artificial Sequence
  Synthetic
auaggagagaagaaaugaau

SEQ ID NO: 622378 - RNA, 21 nt, Artificial Sequence
  Synthetic
cauaggagagaagaaaugaau

SEQ ID NO: 622379 - RNA, 22 nt, Artificial Sequence
  Synthetic
gcauaggagagaagaaaugaau

SEQ ID NO: 622380 - RNA, 23 nt, Artificial Sequence
  Synthetic
ugcauaggagagaagaaaugaau

SEQ ID NO: 622381 - RNA, 24 nt, Artificial Sequence
  Synthetic
augcauaggagagaagaaaugaau

SEQ ID NO: 622382 - RNA, 18 nt, Artificial Sequence
  Synthetic
acuauugcugaaaugaau

SEQ ID NO: 622383 - RNA, 19 nt, Artificial Sequence
  Synthetic
uacuauugcugaaaugaau

SEQ ID NO: 622384 - RNA, 20 nt, Artificial Sequence
  Synthetic
uuacuauugcugaaaugaau

SEQ ID NO: 622385 - RNA, 21 nt, Artificial Sequence
  Synthetic
auuacuauugcugaaaugaau

SEQ ID NO: 622386 - RNA, 22 nt, Artificial Sequence
  Synthetic
uauuacuauugcugaaaugaau

SEQ ID NO: 622387 - RNA, 23 nt, Artificial Sequence
  Synthetic
uuauuacuauugcugaaaugaau

SEQ ID NO: 622388 - RNA, 24 nt, Artificial Sequence
  Synthetic
auuauuacuauugcugaaaugaau

SEQ ID NO: 622389 - RNA, 18 nt, Artificial Sequence
  Synthetic
augaacaaauaaaugaau

SEQ ID NO: 622390 - RNA, 19 nt, Artificial Sequence
  Synthetic
aaugaacaaauaaaugaau

SEQ ID NO: 622391 - RNA, 20 nt, Artificial Sequence
  Synthetic
gaaugaacaaauaaaugaau

SEQ ID NO: 622392 - RNA, 21 nt, Artificial Sequence
  Synthetic
ugaaugaacaaauaaaugaau

SEQ ID NO: 622393 - RNA, 22 nt, Artificial Sequence
  Synthetic
uugaaugaacaaauaaaugaau

SEQ ID NO: 622394 - RNA, 23 nt, Artificial Sequence
  Synthetic
guugaaugaacaaauaaaugaau

SEQ ID NO: 622395 - RNA, 24 nt, Artificial Sequence
  Synthetic
uguugaaugaacaaauaaaugaau

SEQ ID NO: 622396 - RNA, 18 nt, Artificial Sequence
  Synthetic
uauuuguucucaaugaau

SEQ ID NO: 622397 - RNA, 19 nt, Artificial Sequence
  Synthetic
uuauuuguucucaaugaau

SEQ ID NO: 622398 - RNA, 20 nt, Artificial Sequence
  Synthetic
uuuauuuguucucaaugaau

SEQ ID NO: 622399 - RNA, 21 nt, Artificial Sequence
  Synthetic
cuuuauuuguucucaaugaau

SEQ ID NO: 622400 - RNA, 22 nt, Artificial Sequence
  Synthetic
ccuuuauuuguucucaaugaau

SEQ ID NO: 622401 - RNA, 23 nt, Artificial Sequence
  Synthetic
gccuuuauuuguucucaaugaau

SEQ ID NO: 622402 - RNA, 24 nt, Artificial Sequence
  Synthetic
ggccuuuauuuguucucaaugaau

SEQ ID NO: 622403 - RNA, 18 nt, Artificial Sequence
  Synthetic
aacaugaaaggaaugaau

SEQ ID NO: 622404 - RNA, 19 nt, Artificial Sequence
  Synthetic
caacaugaaaggaaugaau

SEQ ID NO: 622405 - RNA, 20 nt, Artificial Sequence
  Synthetic
acaacaugaaaggaaugaau

SEQ ID NO: 622406 - RNA, 21 nt, Artificial Sequence
  Synthetic
uacaacaugaaaggaaugaau

SEQ ID NO: 622407 - RNA, 22 nt, Artificial Sequence
  Synthetic
guacaacaugaaaggaaugaau

SEQ ID NO: 622408 - RNA, 23 nt, Artificial Sequence
  Synthetic
aguacaacaugaaaggaaugaau

SEQ ID NO: 622409 - RNA, 24 nt, Artificial Sequence
  Synthetic
aaguacaacaugaaaggaaugaau

SEQ ID NO: 622410 - RNA, 18 nt, Artificial Sequence
  Synthetic
gaugcuaucugaaugaau

SEQ ID NO: 622411 - RNA, 19 nt, Artificial Sequence
  Synthetic
agaugcuaucugaaugaau

SEQ ID NO: 622412 - RNA, 20 nt, Artificial Sequence
  Synthetic
aagaugcuaucugaaugaau

SEQ ID NO: 622413 - RNA, 21 nt, Artificial Sequence
  Synthetic
gaagaugcuaucugaaugaau

SEQ ID NO: 622414 - RNA, 22 nt, Artificial Sequence
  Synthetic
agaagaugcuaucugaaugaau

SEQ ID NO: 622415 - RNA, 23 nt, Artificial Sequence
  Synthetic
uagaagaugcuaucugaaugaau

SEQ ID NO: 622416 - RNA, 24 nt, Artificial Sequence
  Synthetic
guagaagaugcuaucugaaugaau

SEQ ID NO: 622417 - RNA, 18 nt, Artificial Sequence
  Synthetic
uuacagacugacaugaau

SEQ ID NO: 622418 - RNA, 19 nt, Artificial Sequence
  Synthetic
uuuacagacugacaugaau

SEQ ID NO: 622419 - RNA, 20 nt, Artificial Sequence
  Synthetic
uuuuacagacugacaugaau

SEQ ID NO: 622420 - RNA, 21 nt, Artificial Sequence
  Synthetic
auuuuacagacugacaugaau

SEQ ID NO: 622421 - RNA, 22 nt, Artificial Sequence
  Synthetic
aauuuuacagacugacaugaau

SEQ ID NO: 622422 - RNA, 23 nt, Artificial Sequence
  Synthetic
uaauuuuacagacugacaugaau

SEQ ID NO: 622423 - RNA, 24 nt, Artificial Sequence
  Synthetic
auaauuuuacagacugacaugaau

SEQ ID NO: 622424 - RNA, 18 nt, Artificial Sequence
  Synthetic
aaagugaugcucaugaau

SEQ ID NO: 622425 - RNA, 19 nt, Artificial Sequence
  Synthetic
aaaagugaugcucaugaau

SEQ ID NO: 622426 - RNA, 20 nt, Artificial Sequence
  Synthetic
caaaagugaugcucaugaau

SEQ ID NO: 622427 - RNA, 21 nt, Artificial Sequence
  Synthetic
gcaaaagugaugcucaugaau

SEQ ID NO: 622428 - RNA, 22 nt, Artificial Sequence
  Synthetic
agcaaaagugaugcucaugaau

SEQ ID NO: 622429 - RNA, 23 nt, Artificial Sequence
  Synthetic
gagcaaaagugaugcucaugaau

SEQ ID NO: 622430 - RNA, 24 nt, Artificial Sequence
  Synthetic
ugagcaaaagugaugcucaugaau

SEQ ID NO: 622431 - RNA, 18 nt, Artificial Sequence
  Synthetic
acuaccuucuucaugaau

SEQ ID NO: 622432 - RNA, 19 nt, Artificial Sequence
  Synthetic
gacuaccuucuucaugaau

SEQ ID NO: 622433 - RNA, 20 nt, Artificial Sequence
  Synthetic
ggacuaccuucuucaugaau

SEQ ID NO: 622434 - RNA, 21 nt, Artificial Sequence
  Synthetic
aggacuaccuucuucaugaau

SEQ ID NO: 622435 - RNA, 22 nt, Artificial Sequence
  Synthetic
gaggacuaccuucuucaugaau

SEQ ID NO: 622436 - RNA, 23 nt, Artificial Sequence
  Synthetic
agaggacuaccuucuucaugaau

SEQ ID NO: 622437 - RNA, 24 nt, Artificial Sequence
  Synthetic
uagaggacuaccuucuucaugaau

SEQ ID NO: 622438 - RNA, 18 nt, Artificial Sequence
  Synthetic
aauaauagguucaugaau

SEQ ID NO: 622439 - RNA, 19 nt, Artificial Sequence
  Synthetic
aaauaauagguucaugaau

SEQ ID NO: 622440 - RNA, 20 nt, Artificial Sequence
  Synthetic
gaaauaauagguucaugaau

SEQ ID NO: 622441 - RNA, 21 nt, Artificial Sequence
  Synthetic
ggaaauaauagguucaugaau

SEQ ID NO: 622442 - RNA, 22 nt, Artificial Sequence
  Synthetic
aggaaauaauagguucaugaau

SEQ ID NO: 622443 - RNA, 23 nt, Artificial Sequence
  Synthetic
aaggaaauaauagguucaugaau

SEQ ID NO: 622444 - RNA, 24 nt, Artificial Sequence
  Synthetic
aaaggaaauaauagguucaugaau

SEQ ID NO: 622445 - RNA, 18 nt, Artificial Sequence
  Synthetic
acuaacuuuaagaugaau

SEQ ID NO: 622446 - RNA, 19 nt, Artificial Sequence
  Synthetic
cacuaacuuuaagaugaau

SEQ ID NO: 622447 - RNA, 20 nt, Artificial Sequence
  Synthetic
acacuaacuuuaagaugaau

SEQ ID NO: 622448 - RNA, 21 nt, Artificial Sequence
  Synthetic
aacacuaacuuuaagaugaau

SEQ ID NO: 622449 - RNA, 22 nt, Artificial Sequence
  Synthetic
aaacacuaacuuuaagaugaau

SEQ ID NO: 622450 - RNA, 23 nt, Artificial Sequence
  Synthetic
gaaacacuaacuuuaagaugaau

SEQ ID NO: 622451 - RNA, 24 nt, Artificial Sequence
  Synthetic
ggaaacacuaacuuuaagaugaau

SEQ ID NO: 622452 - RNA, 18 nt, Artificial Sequence
  Synthetic
gaaguaacccagaugaau

SEQ ID NO: 622453 - RNA, 19 nt, Artificial Sequence
  Synthetic
ugaaguaacccagaugaau

SEQ ID NO: 622454 - RNA, 20 nt, Artificial Sequence
  Synthetic
augaaguaacccagaugaau

SEQ ID NO: 622455 - RNA, 21 nt, Artificial Sequence
  Synthetic
gaugaaguaacccagaugaau

SEQ ID NO: 622456 - RNA, 22 nt, Artificial Sequence
  Synthetic
ggaugaaguaacccagaugaau

SEQ ID NO: 622457 - RNA, 23 nt, Artificial Sequence
  Synthetic
gggaugaaguaacccagaugaau

SEQ ID NO: 622458 - RNA, 24 nt, Artificial Sequence
  Synthetic
ggggaugaaguaacccagaugaau

SEQ ID NO: 622459 - RNA, 18 nt, Artificial Sequence
  Synthetic
acccaucuucugaugaau

SEQ ID NO: 622460 - RNA, 19 nt, Artificial Sequence
  Synthetic
aacccaucuucugaugaau

SEQ ID NO: 622461 - RNA, 20 nt, Artificial Sequence
  Synthetic
gaacccaucuucugaugaau

SEQ ID NO: 622462 - RNA, 21 nt, Artificial Sequence
  Synthetic
ugaacccaucuucugaugaau

SEQ ID NO: 622463 - RNA, 22 nt, Artificial Sequence
  Synthetic
augaacccaucuucugaugaau

SEQ ID NO: 622464 - RNA, 23 nt, Artificial Sequence
  Synthetic
gaugaacccaucuucugaugaau

SEQ ID NO: 622465 - RNA, 24 nt, Artificial Sequence
  Synthetic
ugaugaacccaucuucugaugaau

SEQ ID NO: 622466 - RNA, 18 nt, Artificial Sequence
  Synthetic
agacaaaaguugaugaau

SEQ ID NO: 622467 - RNA, 19 nt, Artificial Sequence
  Synthetic
cagacaaaaguugaugaau

SEQ ID NO: 622468 - RNA, 20 nt, Artificial Sequence
  Synthetic
ucagacaaaaguugaugaau

SEQ ID NO: 622469 - RNA, 21 nt, Artificial Sequence
  Synthetic
gucagacaaaaguugaugaau

SEQ ID NO: 622470 - RNA, 22 nt, Artificial Sequence
  Synthetic
agucagacaaaaguugaugaau

SEQ ID NO: 622471 - RNA, 23 nt, Artificial Sequence
  Synthetic
aagucagacaaaaguugaugaau

SEQ ID NO: 622472 - RNA, 24 nt, Artificial Sequence
  Synthetic
uaagucagacaaaaguugaugaau

SEQ ID NO: 622473 - RNA, 18 nt, Artificial Sequence
  Synthetic
uauuaaggaaauaugaau

SEQ ID NO: 622474 - RNA, 19 nt, Artificial Sequence
  Synthetic
cuauuaaggaaauaugaau

SEQ ID NO: 622475 - RNA, 20 nt, Artificial Sequence
  Synthetic
acuauuaaggaaauaugaau

SEQ ID NO: 622476 - RNA, 21 nt, Artificial Sequence
  Synthetic
aacuauuaaggaaauaugaau

SEQ ID NO: 622477 - RNA, 22 nt, Artificial Sequence
  Synthetic
gaacuauuaaggaaauaugaau

SEQ ID NO: 622478 - RNA, 23 nt, Artificial Sequence
  Synthetic
ugaacuauuaaggaaauaugaau

SEQ ID NO: 622479 - RNA, 24 nt, Artificial Sequence
  Synthetic
uugaacuauuaaggaaauaugaau

SEQ ID NO: 622480 - RNA, 18 nt, Artificial Sequence
  Synthetic
uagauugugcauaugaau

SEQ ID NO: 622481 - RNA, 19 nt, Artificial Sequence
  Synthetic
uuagauugugcauaugaau

SEQ ID NO: 622482 - RNA, 20 nt, Artificial Sequence
  Synthetic
uuuagauugugcauaugaau

SEQ ID NO: 622483 - RNA, 21 nt, Artificial Sequence
  Synthetic
uuuuagauugugcauaugaau

SEQ ID NO: 622484 - RNA, 22 nt, Artificial Sequence
  Synthetic
uuuuuagauugugcauaugaau

SEQ ID NO: 622485 - RNA, 23 nt, Artificial Sequence
  Synthetic
guuuuuagauugugcauaugaau

SEQ ID NO: 622486 - RNA, 24 nt, Artificial Sequence
  Synthetic
uguuuuuagauugugcauaugaau

SEQ ID NO: 622487 - RNA, 18 nt, Artificial Sequence
  Synthetic
cucaagaaguauaugaau

SEQ ID NO: 622488 - RNA, 19 nt, Artificial Sequence
  Synthetic
ccucaagaaguauaugaau

SEQ ID NO: 622489 - RNA, 20 nt, Artificial Sequence
  Synthetic
cccucaagaaguauaugaau

SEQ ID NO: 622490 - RNA, 21 nt, Artificial Sequence
  Synthetic
ccccucaagaaguauaugaau

SEQ ID NO: 622491 - RNA, 22 nt, Artificial Sequence
  Synthetic
cccccucaagaaguauaugaau

SEQ ID NO: 622492 - RNA, 23 nt, Artificial Sequence
  Synthetic
ucccccucaagaaguauaugaau

SEQ ID NO: 622493 - RNA, 24 nt, Artificial Sequence
  Synthetic
uucccccucaagaaguauaugaau

SEQ ID NO: 622494 - RNA, 18 nt, Artificial Sequence
  Synthetic
ugagagccuacuaugaau

SEQ ID NO: 622495 - RNA, 19 nt, Artificial Sequence
  Synthetic
uugagagccuacuaugaau

SEQ ID NO: 622496 - RNA, 20 nt, Artificial Sequence
  Synthetic
guugagagccuacuaugaau

SEQ ID NO: 622497 - RNA, 21 nt, Artificial Sequence
  Synthetic
uguugagagccuacuaugaau

SEQ ID NO: 622498 - RNA, 22 nt, Artificial Sequence
  Synthetic
uuguugagagccuacuaugaau

SEQ ID NO: 622499 - RNA, 23 nt, Artificial Sequence
  Synthetic
uuuguugagagccuacuaugaau

SEQ ID NO: 622500 - RNA, 24 nt, Artificial Sequence
  Synthetic
auuuguugagagccuacuaugaau

SEQ ID NO: 622501 - RNA, 18 nt, Artificial Sequence
  Synthetic
acgcaugaaucuaugaau

SEQ ID NO: 622502 - RNA, 19 nt, Artificial Sequence
  Synthetic
aacgcaugaaucuaugaau

SEQ ID NO: 622503 - RNA, 20 nt, Artificial Sequence
  Synthetic
gaacgcaugaaucuaugaau

SEQ ID NO: 622504 - RNA, 21 nt, Artificial Sequence
  Synthetic
ugaacgcaugaaucuaugaau

SEQ ID NO: 622505 - RNA, 22 nt, Artificial Sequence
  Synthetic
gugaacgcaugaaucuaugaau

SEQ ID NO: 622506 - RNA, 23 nt, Artificial Sequence
  Synthetic
agugaacgcaugaaucuaugaau

SEQ ID NO: 622507 - RNA, 24 nt, Artificial Sequence
  Synthetic
gagugaacgcaugaaucuaugaau

SEQ ID NO: 622508 - RNA, 18 nt, Artificial Sequence
  Synthetic
uuuucaauaucuaugaau

SEQ ID NO: 622509 - RNA, 19 nt, Artificial Sequence
  Synthetic
auuuucaauaucuaugaau

SEQ ID NO: 622510 - RNA, 20 nt, Artificial Sequence
  Synthetic
uauuuucaauaucuaugaau

SEQ ID NO: 622511 - RNA, 21 nt, Artificial Sequence
  Synthetic
auauuuucaauaucuaugaau

SEQ ID NO: 622512 - RNA, 22 nt, Artificial Sequence
  Synthetic
aauauuuucaauaucuaugaau

SEQ ID NO: 622513 - RNA, 23 nt, Artificial Sequence
  Synthetic
gaauauuuucaauaucuaugaau

SEQ ID NO: 622514 - RNA, 24 nt, Artificial Sequence
  Synthetic
ugaauauuuucaauaucuaugaau

SEQ ID NO: 622515 - RNA, 18 nt, Artificial Sequence
  Synthetic
gaaaguuuuaguaugaau

SEQ ID NO: 622516 - RNA, 19 nt, Artificial Sequence
  Synthetic
ugaaaguuuuaguaugaau

SEQ ID NO: 622517 - RNA, 20 nt, Artificial Sequence
  Synthetic
uugaaaguuuuaguaugaau

SEQ ID NO: 622518 - RNA, 21 nt, Artificial Sequence
  Synthetic
cuugaaaguuuuaguaugaau

SEQ ID NO: 622519 - RNA, 22 nt, Artificial Sequence
  Synthetic
acuugaaaguuuuaguaugaau

SEQ ID NO: 622520 - RNA, 23 nt, Artificial Sequence
  Synthetic
gacuugaaaguuuuaguaugaau

SEQ ID NO: 622521 - RNA, 24 nt, Artificial Sequence
  Synthetic
agacuugaaaguuuuaguaugaau

SEQ ID NO: 622522 - RNA, 18 nt, Artificial Sequence
  Synthetic
uaagcugauaaacugaau

SEQ ID NO: 622523 - RNA, 19 nt, Artificial Sequence
  Synthetic
uuaagcugauaaacugaau

SEQ ID NO: 622524 - RNA, 20 nt, Artificial Sequence
  Synthetic
auuaagcugauaaacugaau

SEQ ID NO: 622525 - RNA, 21 nt, Artificial Sequence
  Synthetic
aauuaagcugauaaacugaau

SEQ ID NO: 622526 - RNA, 22 nt, Artificial Sequence
  Synthetic
aaauuaagcugauaaacugaau

SEQ ID NO: 622527 - RNA, 23 nt, Artificial Sequence
  Synthetic
caaauuaagcugauaaacugaau

SEQ ID NO: 622528 - RNA, 24 nt, Artificial Sequence
  Synthetic
ucaaauuaagcugauaaacugaau

SEQ ID NO: 622529 - RNA, 18 nt, Artificial Sequence
  Synthetic
uacuucaaugcacugaau

SEQ ID NO: 622530 - RNA, 19 nt, Artificial Sequence
  Synthetic
auacuucaaugcacugaau

SEQ ID NO: 622531 - RNA, 20 nt, Artificial Sequence
  Synthetic
gauacuucaaugcacugaau

SEQ ID NO: 622532 - RNA, 21 nt, Artificial Sequence
  Synthetic
ggauacuucaaugcacugaau

SEQ ID NO: 622533 - RNA, 22 nt, Artificial Sequence
  Synthetic
uggauacuucaaugcacugaau

SEQ ID NO: 622534 - RNA, 23 nt, Artificial Sequence
  Synthetic
auggauacuucaaugcacugaau

SEQ ID NO: 622535 - RNA, 24 nt, Artificial Sequence
  Synthetic
aauggauacuucaaugcacugaau

SEQ ID NO: 622536 - RNA, 18 nt, Artificial Sequence
  Synthetic
auagugucaggacugaau

SEQ ID NO: 622537 - RNA, 19 nt, Artificial Sequence
  Synthetic
gauagugucaggacugaau

SEQ ID NO: 622538 - RNA, 20 nt, Artificial Sequence
  Synthetic
ggauagugucaggacugaau

SEQ ID NO: 622539 - RNA, 21 nt, Artificial Sequence
  Synthetic
uggauagugucaggacugaau

SEQ ID NO: 622540 - RNA, 22 nt, Artificial Sequence
  Synthetic
guggauagugucaggacugaau

SEQ ID NO: 622541 - RNA, 23 nt, Artificial Sequence
  Synthetic
gguggauagugucaggacugaau

SEQ ID NO: 622542 - RNA, 24 nt, Artificial Sequence
  Synthetic
ggguggauagugucaggacugaau

SEQ ID NO: 622543 - RNA, 18 nt, Artificial Sequence
  Synthetic
aucccagaucuacugaau

SEQ ID NO: 622544 - RNA, 19 nt, Artificial Sequence
  Synthetic
caucccagaucuacugaau

SEQ ID NO: 622545 - RNA, 20 nt, Artificial Sequence
  Synthetic
ccaucccagaucuacugaau

SEQ ID NO: 622546 - RNA, 21 nt, Artificial Sequence
  Synthetic
cccaucccagaucuacugaau

SEQ ID NO: 622547 - RNA, 22 nt, Artificial Sequence
  Synthetic
ccccaucccagaucuacugaau

SEQ ID NO: 622548 - RNA, 23 nt, Artificial Sequence
  Synthetic
gccccaucccagaucuacugaau

SEQ ID NO: 622549 - RNA, 24 nt, Artificial Sequence
  Synthetic
ggccccaucccagaucuacugaau

SEQ ID NO: 622550 - RNA, 18 nt, Artificial Sequence
  Synthetic
agccuagcucuacugaau

SEQ ID NO: 622551 - RNA, 19 nt, Artificial Sequence
  Synthetic
cagccuagcucuacugaau

SEQ ID NO: 622552 - RNA, 20 nt, Artificial Sequence
  Synthetic
ucagccuagcucuacugaau

SEQ ID NO: 622553 - RNA, 21 nt, Artificial Sequence
  Synthetic
cucagccuagcucuacugaau

SEQ ID NO: 622554 - RNA, 22 nt, Artificial Sequence
  Synthetic
ccucagccuagcucuacugaau

SEQ ID NO: 622555 - RNA, 23 nt, Artificial Sequence
  Synthetic
gccucagccuagcucuacugaau

SEQ ID NO: 622556 - RNA, 24 nt, Artificial Sequence
  Synthetic
ggccucagccuagcucuacugaau

SEQ ID NO: 622557 - RNA, 18 nt, Artificial Sequence
  Synthetic
cagcaccauuuacugaau

SEQ ID NO: 622558 - RNA, 19 nt, Artificial Sequence
  Synthetic
ccagcaccauuuacugaau

SEQ ID NO: 622559 - RNA, 20 nt, Artificial Sequence
  Synthetic
cccagcaccauuuacugaau

SEQ ID NO: 622560 - RNA, 21 nt, Artificial Sequence
  Synthetic
acccagcaccauuuacugaau

SEQ ID NO: 622561 - RNA, 22 nt, Artificial Sequence
  Synthetic
uacccagcaccauuuacugaau

SEQ ID NO: 622562 - RNA, 23 nt, Artificial Sequence
  Synthetic
uuacccagcaccauuuacugaau

SEQ ID NO: 622563 - RNA, 24 nt, Artificial Sequence
  Synthetic
uuuacccagcaccauuuacugaau

SEQ ID NO: 622564 - RNA, 18 nt, Artificial Sequence
  Synthetic
cauuaucgacaccugaau

SEQ ID NO: 622565 - RNA, 19 nt, Artificial Sequence
  Synthetic
acauuaucgacaccugaau

SEQ ID NO: 622566 - RNA, 20 nt, Artificial Sequence
  Synthetic
cacauuaucgacaccugaau

SEQ ID NO: 622567 - RNA, 21 nt, Artificial Sequence
  Synthetic
gcacauuaucgacaccugaau

SEQ ID NO: 622568 - RNA, 22 nt, Artificial Sequence
  Synthetic
agcacauuaucgacaccugaau

SEQ ID NO: 622569 - RNA, 23 nt, Artificial Sequence
  Synthetic
uagcacauuaucgacaccugaau

SEQ ID NO: 622570 - RNA, 24 nt, Artificial Sequence
  Synthetic
cuagcacauuaucgacaccugaau

SEQ ID NO: 622571 - RNA, 18 nt, Artificial Sequence
  Synthetic
uuucccuaaucccugaau

SEQ ID NO: 622572 - RNA, 19 nt, Artificial Sequence
  Synthetic
auuucccuaaucccugaau

SEQ ID NO: 622573 - RNA, 20 nt, Artificial Sequence
  Synthetic
uauuucccuaaucccugaau

SEQ ID NO: 622574 - RNA, 21 nt, Artificial Sequence
  Synthetic
cuauuucccuaaucccugaau

SEQ ID NO: 622575 - RNA, 22 nt, Artificial Sequence
  Synthetic
ccuauuucccuaaucccugaau

SEQ ID NO: 622576 - RNA, 23 nt, Artificial Sequence
  Synthetic
accuauuucccuaaucccugaau

SEQ ID NO: 622577 - RNA, 24 nt, Artificial Sequence
  Synthetic
aaccuauuucccuaaucccugaau

SEQ ID NO: 622578 - RNA, 18 nt, Artificial Sequence
  Synthetic
gcuaaggauucccugaau

SEQ ID NO: 622579 - RNA, 19 nt, Artificial Sequence
  Synthetic
agcuaaggauucccugaau

SEQ ID NO: 622580 - RNA, 20 nt, Artificial Sequence
  Synthetic
cagcuaaggauucccugaau

SEQ ID NO: 622581 - RNA, 21 nt, Artificial Sequence
  Synthetic
acagcuaaggauucccugaau

SEQ ID NO: 622582 - RNA, 22 nt, Artificial Sequence
  Synthetic
aacagcuaaggauucccugaau

SEQ ID NO: 622583 - RNA, 23 nt, Artificial Sequence
  Synthetic
gaacagcuaaggauucccugaau

SEQ ID NO: 622584 - RNA, 24 nt, Artificial Sequence
  Synthetic
ugaacagcuaaggauucccugaau

SEQ ID NO: 622585 - RNA, 18 nt, Artificial Sequence
  Synthetic
uuauaauaaaagcugaau

SEQ ID NO: 622586 - RNA, 19 nt, Artificial Sequence
  Synthetic
guuauaauaaaagcugaau

SEQ ID NO: 622587 - RNA, 20 nt, Artificial Sequence
  Synthetic
uguuauaauaaaagcugaau

SEQ ID NO: 622588 - RNA, 21 nt, Artificial Sequence
  Synthetic
auguuauaauaaaagcugaau

SEQ ID NO: 622589 - RNA, 22 nt, Artificial Sequence
  Synthetic
aauguuauaauaaaagcugaau

SEQ ID NO: 622590 - RNA, 23 nt, Artificial Sequence
  Synthetic
caauguuauaauaaaagcugaau

SEQ ID NO: 622591 - RNA, 24 nt, Artificial Sequence
  Synthetic
ccaauguuauaauaaaagcugaau

SEQ ID NO: 622592 - RNA, 18 nt, Artificial Sequence
  Synthetic
uuaauguaaaugcugaau

SEQ ID NO: 622593 - RNA, 19 nt, Artificial Sequence
  Synthetic
uuuaauguaaaugcugaau

SEQ ID NO: 622594 - RNA, 20 nt, Artificial Sequence
  Synthetic
auuuaauguaaaugcugaau

SEQ ID NO: 622595 - RNA, 21 nt, Artificial Sequence
  Synthetic
aauuuaauguaaaugcugaau

SEQ ID NO: 622596 - RNA, 22 nt, Artificial Sequence
  Synthetic
aaauuuaauguaaaugcugaau

SEQ ID NO: 622597 - RNA, 23 nt, Artificial Sequence
  Synthetic
aaaauuuaauguaaaugcugaau

SEQ ID NO: 622598 - RNA, 24 nt, Artificial Sequence
  Synthetic
aaaaauuuaauguaaaugcugaau

SEQ ID NO: 622599 - RNA, 18 nt, Artificial Sequence
  Synthetic
auacuucacaugcugaau

SEQ ID NO: 622600 - RNA, 19 nt, Artificial Sequence
  Synthetic
cauacuucacaugcugaau

SEQ ID NO: 622601 - RNA, 20 nt, Artificial Sequence
  Synthetic
gcauacuucacaugcugaau

SEQ ID NO: 622602 - RNA, 21 nt, Artificial Sequence
  Synthetic
ugcauacuucacaugcugaau

SEQ ID NO: 622603 - RNA, 22 nt, Artificial Sequence
  Synthetic
cugcauacuucacaugcugaau

SEQ ID NO: 622604 - RNA, 23 nt, Artificial Sequence
  Synthetic
gcugcauacuucacaugcugaau

SEQ ID NO: 622605 - RNA, 24 nt, Artificial Sequence
  Synthetic
ugcugcauacuucacaugcugaau

SEQ ID NO: 622606 - RNA, 18 nt, Artificial Sequence
  Synthetic
cuuuagaaaaaucugaau

SEQ ID NO: 622607 - RNA, 19 nt, Artificial Sequence
  Synthetic
acuuuagaaaaaucugaau

SEQ ID NO: 622608 - RNA, 20 nt, Artificial Sequence
  Synthetic
uacuuuagaaaaaucugaau

SEQ ID NO: 622609 - RNA, 21 nt, Artificial Sequence
  Synthetic
uuacuuuagaaaaaucugaau

SEQ ID NO: 622610 - RNA, 22 nt, Artificial Sequence
  Synthetic
auuacuuuagaaaaaucugaau

SEQ ID NO: 622611 - RNA, 23 nt, Artificial Sequence
  Synthetic
uauuacuuuagaaaaaucugaau

SEQ ID NO: 622612 - RNA, 24 nt, Artificial Sequence
  Synthetic
uuauuacuuuagaaaaaucugaau

SEQ ID NO: 622613 - RNA, 18 nt, Artificial Sequence
  Synthetic
uauaaccaacaucugaau

SEQ ID NO: 622614 - RNA, 19 nt, Artificial Sequence
  Synthetic
auauaaccaacaucugaau

SEQ ID NO: 622615 - RNA, 20 nt, Artificial Sequence
  Synthetic
uauauaaccaacaucugaau

SEQ ID NO: 622616 - RNA, 21 nt, Artificial Sequence
  Synthetic
uuauauaaccaacaucugaau

SEQ ID NO: 622617 - RNA, 22 nt, Artificial Sequence
  Synthetic
uuuauauaaccaacaucugaau

SEQ ID NO: 622618 - RNA, 23 nt, Artificial Sequence
  Synthetic
uuuuauauaaccaacaucugaau

SEQ ID NO: 622619 - RNA, 24 nt, Artificial Sequence
  Synthetic
auuuuauauaaccaacaucugaau

SEQ ID NO: 622620 - RNA, 18 nt, Artificial Sequence
  Synthetic
caggaaauagcucugaau

SEQ ID NO: 622621 - RNA, 19 nt, Artificial Sequence
  Synthetic
gcaggaaauagcucugaau

SEQ ID NO: 622622 - RNA, 20 nt, Artificial Sequence
  Synthetic
agcaggaaauagcucugaau

SEQ ID NO: 622623 - RNA, 21 nt, Artificial Sequence
  Synthetic
aagcaggaaauagcucugaau

SEQ ID NO: 622624 - RNA, 22 nt, Artificial Sequence
  Synthetic
aaagcaggaaauagcucugaau

SEQ ID NO: 622625 - RNA, 23 nt, Artificial Sequence
  Synthetic
aaaagcaggaaauagcucugaau

SEQ ID NO: 622626 - RNA, 24 nt, Artificial Sequence
  Synthetic
gaaaagcaggaaauagcucugaau

SEQ ID NO: 622627 - RNA, 18 nt, Artificial Sequence
  Synthetic
uacagucagauucugaau

SEQ ID NO: 622628 - RNA, 19 nt, Artificial Sequence
  Synthetic
cuacagucagauucugaau

SEQ ID NO: 622629 - RNA, 20 nt, Artificial Sequence
  Synthetic
ccuacagucagauucugaau

SEQ ID NO: 622630 - RNA, 21 nt, Artificial Sequence
  Synthetic
accuacagucagauucugaau

SEQ ID NO: 622631 - RNA, 22 nt, Artificial Sequence
  Synthetic
aaccuacagucagauucugaau

SEQ ID NO: 622632 - RNA, 23 nt, Artificial Sequence
  Synthetic
caaccuacagucagauucugaau

SEQ ID NO: 622633 - RNA, 24 nt, Artificial Sequence
  Synthetic
ucaaccuacagucagauucugaau

SEQ ID NO: 622634 - RNA, 18 nt, Artificial Sequence
  Synthetic
uucaaauacaaagugaau

SEQ ID NO: 622635 - RNA, 19 nt, Artificial Sequence
  Synthetic
cuucaaauacaaagugaau

SEQ ID NO: 622636 - RNA, 20 nt, Artificial Sequence
  Synthetic
ucuucaaauacaaagugaau

SEQ ID NO: 622637 - RNA, 21 nt, Artificial Sequence
  Synthetic
uucuucaaauacaaagugaau

SEQ ID NO: 622638 - RNA, 22 nt, Artificial Sequence
  Synthetic
auucuucaaauacaaagugaau

SEQ ID NO: 622639 - RNA, 23 nt, Artificial Sequence
  Synthetic
aauucuucaaauacaaagugaau

SEQ ID NO: 622640 - RNA, 24 nt, Artificial Sequence
  Synthetic
aaauucuucaaauacaaagugaau

SEQ ID NO: 622641 - RNA, 18 nt, Artificial Sequence
  Synthetic
aggguaaucauagugaau

SEQ ID NO: 622642 - RNA, 19 nt, Artificial Sequence
  Synthetic
caggguaaucauagugaau

SEQ ID NO: 622643 - RNA, 20 nt, Artificial Sequence
  Synthetic
ucaggguaaucauagugaau

SEQ ID NO: 622644 - RNA, 21 nt, Artificial Sequence
  Synthetic
cucaggguaaucauagugaau

SEQ ID NO: 622645 - RNA, 22 nt, Artificial Sequence
  Synthetic
ucucaggguaaucauagugaau

SEQ ID NO: 622646 - RNA, 23 nt, Artificial Sequence
  Synthetic
uucucaggguaaucauagugaau

SEQ ID NO: 622647 - RNA, 24 nt, Artificial Sequence
  Synthetic
cuucucaggguaaucauagugaau

SEQ ID NO: 622648 - RNA, 18 nt, Artificial Sequence
  Synthetic
gauugaaaccuagugaau

SEQ ID NO: 622649 - RNA, 19 nt, Artificial Sequence
  Synthetic
ggauugaaaccuagugaau

SEQ ID NO: 622650 - RNA, 20 nt, Artificial Sequence
  Synthetic
aggauugaaaccuagugaau

SEQ ID NO: 622651 - RNA, 21 nt, Artificial Sequence
  Synthetic
caggauugaaaccuagugaau

SEQ ID NO: 622652 - RNA, 22 nt, Artificial Sequence
  Synthetic
gcaggauugaaaccuagugaau

SEQ ID NO: 622653 - RNA, 23 nt, Artificial Sequence
  Synthetic
ggcaggauugaaaccuagugaau

SEQ ID NO: 622654 - RNA, 24 nt, Artificial Sequence
  Synthetic
aggcaggauugaaaccuagugaau

SEQ ID NO: 622655 - RNA, 18 nt, Artificial Sequence
  Synthetic
uaaggaguaaacgugaau

SEQ ID NO: 622656 - RNA, 19 nt, Artificial Sequence
  Synthetic
guaaggaguaaacgugaau

SEQ ID NO: 622657 - RNA, 20 nt, Artificial Sequence
  Synthetic
aguaaggaguaaacgugaau

SEQ ID NO: 622658 - RNA, 21 nt, Artificial Sequence
  Synthetic
aaguaaggaguaaacgugaau

SEQ ID NO: 622659 - RNA, 22 nt, Artificial Sequence
  Synthetic
aaaguaaggaguaaacgugaau

SEQ ID NO: 622660 - RNA, 23 nt, Artificial Sequence
  Synthetic
caaaguaaggaguaaacgugaau

SEQ ID NO: 622661 - RNA, 24 nt, Artificial Sequence
  Synthetic
acaaaguaaggaguaaacgugaau

SEQ ID NO: 622662 - RNA, 18 nt, Artificial Sequence
  Synthetic
accuaacauauggugaau

SEQ ID NO: 622663 - RNA, 19 nt, Artificial Sequence
  Synthetic
aaccuaacauauggugaau

SEQ ID NO: 622664 - RNA, 20 nt, Artificial Sequence
  Synthetic
caaccuaacauauggugaau

SEQ ID NO: 622665 - RNA, 21 nt, Artificial Sequence
  Synthetic
acaaccuaacauauggugaau

SEQ ID NO: 622666 - RNA, 22 nt, Artificial Sequence
  Synthetic
cacaaccuaacauauggugaau

SEQ ID NO: 622667 - RNA, 23 nt, Artificial Sequence
  Synthetic
gcacaaccuaacauauggugaau

SEQ ID NO: 622668 - RNA, 24 nt, Artificial Sequence
  Synthetic
ggcacaaccuaacauauggugaau

SEQ ID NO: 622669 - RNA, 18 nt, Artificial Sequence
  Synthetic
guaauuguacuggugaau

SEQ ID NO: 622670 - RNA, 19 nt, Artificial Sequence
  Synthetic
uguaauuguacuggugaau

SEQ ID NO: 622671 - RNA, 20 nt, Artificial Sequence
  Synthetic
auguaauuguacuggugaau

SEQ ID NO: 622672 - RNA, 21 nt, Artificial Sequence
  Synthetic
gauguaauuguacuggugaau

SEQ ID NO: 622673 - RNA, 22 nt, Artificial Sequence
  Synthetic
agauguaauuguacuggugaau

SEQ ID NO: 622674 - RNA, 23 nt, Artificial Sequence
  Synthetic
gagauguaauuguacuggugaau

SEQ ID NO: 622675 - RNA, 24 nt, Artificial Sequence
  Synthetic
ugagauguaauuguacuggugaau

SEQ ID NO: 622676 - RNA, 18 nt, Artificial Sequence
  Synthetic
caagcgaugaaugugaau

SEQ ID NO: 622677 - RNA, 19 nt, Artificial Sequence
  Synthetic
acaagcgaugaaugugaau

SEQ ID NO: 622678 - RNA, 20 nt, Artificial Sequence
  Synthetic
aacaagcgaugaaugugaau

SEQ ID NO: 622679 - RNA, 21 nt, Artificial Sequence
  Synthetic
aaacaagcgaugaaugugaau

SEQ ID NO: 622680 - RNA, 22 nt, Artificial Sequence
  Synthetic
gaaacaagcgaugaaugugaau

SEQ ID NO: 622681 - RNA, 23 nt, Artificial Sequence
  Synthetic
agaaacaagcgaugaaugugaau

SEQ ID NO: 622682 - RNA, 24 nt, Artificial Sequence
  Synthetic
aagaaacaagcgaugaaugugaau

SEQ ID NO: 622683 - RNA, 18 nt, Artificial Sequence
  Synthetic
ggggaaaaugaugugaau

SEQ ID NO: 622684 - RNA, 19 nt, Artificial Sequence
  Synthetic
gggggaaaaugaugugaau

SEQ ID NO: 622685 - RNA, 20 nt, Artificial Sequence
  Synthetic
ggggggaaaaugaugugaau

SEQ ID NO: 622686 - RNA, 21 nt, Artificial Sequence
  Synthetic
aggggggaaaaugaugugaau

SEQ ID NO: 622687 - RNA, 22 nt, Artificial Sequence
  Synthetic
uaggggggaaaaugaugugaau

SEQ ID NO: 622688 - RNA, 23 nt, Artificial Sequence
  Synthetic
auaggggggaaaaugaugugaau

SEQ ID NO: 622689 - RNA, 24 nt, Artificial Sequence
  Synthetic
aauaggggggaaaaugaugugaau

SEQ ID NO: 622690 - RNA, 18 nt, Artificial Sequence
  Synthetic
caaaguaggccugugaau

SEQ ID NO: 622691 - RNA, 19 nt, Artificial Sequence
  Synthetic
ucaaaguaggccugugaau

SEQ ID NO: 622692 - RNA, 20 nt, Artificial Sequence
  Synthetic
cucaaaguaggccugugaau

SEQ ID NO: 622693 - RNA, 21 nt, Artificial Sequence
  Synthetic
acucaaaguaggccugugaau

SEQ ID NO: 622694 - RNA, 22 nt, Artificial Sequence
  Synthetic
uacucaaaguaggccugugaau

SEQ ID NO: 622695 - RNA, 23 nt, Artificial Sequence
  Synthetic
uuacucaaaguaggccugugaau

SEQ ID NO: 622696 - RNA, 24 nt, Artificial Sequence
  Synthetic
auuacucaaaguaggccugugaau

SEQ ID NO: 622697 - RNA, 18 nt, Artificial Sequence
  Synthetic
ccugcuauuauugugaau

SEQ ID NO: 622698 - RNA, 19 nt, Artificial Sequence
  Synthetic
uccugcuauuauugugaau

SEQ ID NO: 622699 - RNA, 20 nt, Artificial Sequence
  Synthetic
uuccugcuauuauugugaau

SEQ ID NO: 622700 - RNA, 21 nt, Artificial Sequence
  Synthetic
uuuccugcuauuauugugaau

SEQ ID NO: 622701 - RNA, 22 nt, Artificial Sequence
  Synthetic
auuuccugcuauuauugugaau

SEQ ID NO: 622702 - RNA, 23 nt, Artificial Sequence
  Synthetic
uauuuccugcuauuauugugaau

SEQ ID NO: 622703 - RNA, 24 nt, Artificial Sequence
  Synthetic
guauuuccugcuauuauugugaau

SEQ ID NO: 622704 - RNA, 18 nt, Artificial Sequence
  Synthetic
gcaggcagcaaauugaau

SEQ ID NO: 622705 - RNA, 19 nt, Artificial Sequence
  Synthetic
ugcaggcagcaaauugaau

SEQ ID NO: 622706 - RNA, 20 nt, Artificial Sequence
  Synthetic
augcaggcagcaaauugaau

SEQ ID NO: 622707 - RNA, 21 nt, Artificial Sequence
  Synthetic
uaugcaggcagcaaauugaau

SEQ ID NO: 622708 - RNA, 22 nt, Artificial Sequence
  Synthetic
guaugcaggcagcaaauugaau

SEQ ID NO: 622709 - RNA, 23 nt, Artificial Sequence
  Synthetic
uguaugcaggcagcaaauugaau

SEQ ID NO: 622710 - RNA, 24 nt, Artificial Sequence
  Synthetic
cuguaugcaggcagcaaauugaau

SEQ ID NO: 622711 - RNA, 18 nt, Artificial Sequence
  Synthetic
aaguugaguuaauugaau

SEQ ID NO: 622712 - RNA, 19 nt, Artificial Sequence
  Synthetic
aaaguugaguuaauugaau

SEQ ID NO: 622713 - RNA, 20 nt, Artificial Sequence
  Synthetic
aaaaguugaguuaauugaau

SEQ ID NO: 622714 - RNA, 21 nt, Artificial Sequence
  Synthetic
gaaaaguugaguuaauugaau

SEQ ID NO: 622715 - RNA, 22 nt, Artificial Sequence
  Synthetic
ugaaaaguugaguuaauugaau

SEQ ID NO: 622716 - RNA, 23 nt, Artificial Sequence
  Synthetic
uugaaaaguugaguuaauugaau

SEQ ID NO: 622717 - RNA, 24 nt, Artificial Sequence
  Synthetic
uuugaaaaguugaguuaauugaau

SEQ ID NO: 622718 - RNA, 18 nt, Artificial Sequence
  Synthetic
uaccccaacacauugaau

SEQ ID NO: 622719 - RNA, 19 nt, Artificial Sequence
  Synthetic
guaccccaacacauugaau

SEQ ID NO: 622720 - RNA, 20 nt, Artificial Sequence
  Synthetic
aguaccccaacacauugaau

SEQ ID NO: 622721 - RNA, 21 nt, Artificial Sequence
  Synthetic
aaguaccccaacacauugaau

SEQ ID NO: 622722 - RNA, 22 nt, Artificial Sequence
  Synthetic
aaaguaccccaacacauugaau

SEQ ID NO: 622723 - RNA, 23 nt, Artificial Sequence
  Synthetic
aaaaguaccccaacacauugaau

SEQ ID NO: 622724 - RNA, 24 nt, Artificial Sequence
  Synthetic
uaaaaguaccccaacacauugaau

SEQ ID NO: 622725 - RNA, 18 nt, Artificial Sequence
  Synthetic
uuuguuuccacauugaau

SEQ ID NO: 622726 - RNA, 19 nt, Artificial Sequence
  Synthetic
cuuuguuuccacauugaau

SEQ ID NO: 622727 - RNA, 20 nt, Artificial Sequence
  Synthetic
gcuuuguuuccacauugaau

SEQ ID NO: 622728 - RNA, 21 nt, Artificial Sequence
  Synthetic
ugcuuuguuuccacauugaau

SEQ ID NO: 622729 - RNA, 22 nt, Artificial Sequence
  Synthetic
augcuuuguuuccacauugaau

SEQ ID NO: 622730 - RNA, 23 nt, Artificial Sequence
  Synthetic
uaugcuuuguuuccacauugaau

SEQ ID NO: 622731 - RNA, 24 nt, Artificial Sequence
  Synthetic
cuaugcuuuguuuccacauugaau

SEQ ID NO: 622732 - RNA, 18 nt, Artificial Sequence
  Synthetic
aguguagauucauugaau

SEQ ID NO: 622733 - RNA, 19 nt, Artificial Sequence
  Synthetic
uaguguagauucauugaau

SEQ ID NO: 622734 - RNA, 20 nt, Artificial Sequence
  Synthetic
auaguguagauucauugaau

SEQ ID NO: 622735 - RNA, 21 nt, Artificial Sequence
  Synthetic
cauaguguagauucauugaau

SEQ ID NO: 622736 - RNA, 22 nt, Artificial Sequence
  Synthetic
acauaguguagauucauugaau

SEQ ID NO: 622737 - RNA, 23 nt, Artificial Sequence
  Synthetic
cacauaguguagauucauugaau

SEQ ID NO: 622738 - RNA, 24 nt, Artificial Sequence
  Synthetic
ccacauaguguagauucauugaau

SEQ ID NO: 622739 - RNA, 18 nt, Artificial Sequence
  Synthetic
ugcgguguaggauugaau

SEQ ID NO: 622740 - RNA, 19 nt, Artificial Sequence
  Synthetic
cugcgguguaggauugaau

SEQ ID NO: 622741 - RNA, 20 nt, Artificial Sequence
  Synthetic
gcugcgguguaggauugaau

SEQ ID NO: 622742 - RNA, 21 nt, Artificial Sequence
  Synthetic
ugcugcgguguaggauugaau

SEQ ID NO: 622743 - RNA, 22 nt, Artificial Sequence
  Synthetic
uugcugcgguguaggauugaau

SEQ ID NO: 622744 - RNA, 23 nt, Artificial Sequence
  Synthetic
uuugcugcgguguaggauugaau

SEQ ID NO: 622745 - RNA, 24 nt, Artificial Sequence
  Synthetic
uuuugcugcgguguaggauugaau

SEQ ID NO: 622746 - RNA, 18 nt, Artificial Sequence
  Synthetic
caguucaguugauugaau

SEQ ID NO: 622747 - RNA, 19 nt, Artificial Sequence
  Synthetic
acaguucaguugauugaau

SEQ ID NO: 622748 - RNA, 20 nt, Artificial Sequence
  Synthetic
aacaguucaguugauugaau

SEQ ID NO: 622749 - RNA, 21 nt, Artificial Sequence
  Synthetic
aaacaguucaguugauugaau

SEQ ID NO: 622750 - RNA, 22 nt, Artificial Sequence
  Synthetic
gaaacaguucaguugauugaau

SEQ ID NO: 622751 - RNA, 23 nt, Artificial Sequence
  Synthetic
agaaacaguucaguugauugaau

SEQ ID NO: 622752 - RNA, 24 nt, Artificial Sequence
  Synthetic
aagaaacaguucaguugauugaau

SEQ ID NO: 622753 - RNA, 18 nt, Artificial Sequence
  Synthetic
gguugaccuuuauugaau

SEQ ID NO: 622754 - RNA, 19 nt, Artificial Sequence
  Synthetic
ugguugaccuuuauugaau

SEQ ID NO: 622755 - RNA, 20 nt, Artificial Sequence
  Synthetic
uugguugaccuuuauugaau

SEQ ID NO: 622756 - RNA, 21 nt, Artificial Sequence
  Synthetic
guugguugaccuuuauugaau

SEQ ID NO: 622757 - RNA, 22 nt, Artificial Sequence
  Synthetic
cguugguugaccuuuauugaau

SEQ ID NO: 622758 - RNA, 23 nt, Artificial Sequence
  Synthetic
acguugguugaccuuuauugaau

SEQ ID NO: 622759 - RNA, 24 nt, Artificial Sequence
  Synthetic
cacguugguugaccuuuauugaau

SEQ ID NO: 622760 - RNA, 18 nt, Artificial Sequence
  Synthetic
guucucauccccuugaau

SEQ ID NO: 622761 - RNA, 19 nt, Artificial Sequence
  Synthetic
uguucucauccccuugaau

SEQ ID NO: 622762 - RNA, 20 nt, Artificial Sequence
  Synthetic
auguucucauccccuugaau

SEQ ID NO: 622763 - RNA, 21 nt, Artificial Sequence
  Synthetic
uauguucucauccccuugaau

SEQ ID NO: 622764 - RNA, 22 nt, Artificial Sequence
  Synthetic
uuauguucucauccccuugaau

SEQ ID NO: 622765 - RNA, 23 nt, Artificial Sequence
  Synthetic
uuuauguucucauccccuugaau

SEQ ID NO: 622766 - RNA, 24 nt, Artificial Sequence
  Synthetic
guuuauguucucauccccuugaau

SEQ ID NO: 622767 - RNA, 18 nt, Artificial Sequence
  Synthetic
uuuaaaauucccuugaau

SEQ ID NO: 622768 - RNA, 19 nt, Artificial Sequence
  Synthetic
auuuaaaauucccuugaau

SEQ ID NO: 622769 - RNA, 20 nt, Artificial Sequence
  Synthetic
gauuuaaaauucccuugaau

SEQ ID NO: 622770 - RNA, 21 nt, Artificial Sequence
  Synthetic
ugauuuaaaauucccuugaau

SEQ ID NO: 622771 - RNA, 22 nt, Artificial Sequence
  Synthetic
cugauuuaaaauucccuugaau

SEQ ID NO: 622772 - RNA, 23 nt, Artificial Sequence
  Synthetic
ucugauuuaaaauucccuugaau

SEQ ID NO: 622773 - RNA, 24 nt, Artificial Sequence
  Synthetic
uucugauuuaaaauucccuugaau

SEQ ID NO: 622774 - RNA, 18 nt, Artificial Sequence
  Synthetic
caagagaauagcuugaau

SEQ ID NO: 622775 - RNA, 19 nt, Artificial Sequence
  Synthetic
gcaagagaauagcuugaau

SEQ ID NO: 622776 - RNA, 20 nt, Artificial Sequence
  Synthetic
ggcaagagaauagcuugaau

SEQ ID NO: 622777 - RNA, 21 nt, Artificial Sequence
  Synthetic
aggcaagagaauagcuugaau

SEQ ID NO: 622778 - RNA, 22 nt, Artificial Sequence
  Synthetic
gaggcaagagaauagcuugaau

SEQ ID NO: 622779 - RNA, 23 nt, Artificial Sequence
  Synthetic
ugaggcaagagaauagcuugaau

SEQ ID NO: 622780 - RNA, 24 nt, Artificial Sequence
  Synthetic
cugaggcaagagaauagcuugaau

SEQ ID NO: 622781 - RNA, 18 nt, Artificial Sequence
  Synthetic
caggagaaucgcuugaau

SEQ ID NO: 622782 - RNA, 19 nt, Artificial Sequence
  Synthetic
gcaggagaaucgcuugaau

SEQ ID NO: 622783 - RNA, 20 nt, Artificial Sequence
  Synthetic
ggcaggagaaucgcuugaau

SEQ ID NO: 622784 - RNA, 21 nt, Artificial Sequence
  Synthetic
aggcaggagaaucgcuugaau

SEQ ID NO: 622785 - RNA, 22 nt, Artificial Sequence
  Synthetic
gaggcaggagaaucgcuugaau

SEQ ID NO: 622786 - RNA, 23 nt, Artificial Sequence
  Synthetic
ugaggcaggagaaucgcuugaau

SEQ ID NO: 622787 - RNA, 24 nt, Artificial Sequence
  Synthetic
cugaggcaggagaaucgcuugaau

SEQ ID NO: 622788 - RNA, 18 nt, Artificial Sequence
  Synthetic
gccaaggcaaucuugaau

SEQ ID NO: 622789 - RNA, 19 nt, Artificial Sequence
  Synthetic
agccaaggcaaucuugaau

SEQ ID NO: 622790 - RNA, 20 nt, Artificial Sequence
  Synthetic
uagccaaggcaaucuugaau

SEQ ID NO: 622791 - RNA, 21 nt, Artificial Sequence
  Synthetic
guagccaaggcaaucuugaau

SEQ ID NO: 622792 - RNA, 22 nt, Artificial Sequence
  Synthetic
aguagccaaggcaaucuugaau

SEQ ID NO: 622793 - RNA, 23 nt, Artificial Sequence
  Synthetic
aaguagccaaggcaaucuugaau

SEQ ID NO: 622794 - RNA, 24 nt, Artificial Sequence
  Synthetic
aaaguagccaaggcaaucuugaau

SEQ ID NO: 622795 - RNA, 18 nt, Artificial Sequence
  Synthetic
aacaacuccaucuugaau

SEQ ID NO: 622796 - RNA, 19 nt, Artificial Sequence
  Synthetic
gaacaacuccaucuugaau

SEQ ID NO: 622797 - RNA, 20 nt, Artificial Sequence
  Synthetic
agaacaacuccaucuugaau

SEQ ID NO: 622798 - RNA, 21 nt, Artificial Sequence
  Synthetic
uagaacaacuccaucuugaau

SEQ ID NO: 622799 - RNA, 22 nt, Artificial Sequence
  Synthetic
cuagaacaacuccaucuugaau

SEQ ID NO: 622800 - RNA, 23 nt, Artificial Sequence
  Synthetic
acuagaacaacuccaucuugaau

SEQ ID NO: 622801 - RNA, 24 nt, Artificial Sequence
  Synthetic
aacuagaacaacuccaucuugaau

SEQ ID NO: 622802 - RNA, 18 nt, Artificial Sequence
  Synthetic
acagaaagcaucuugaau

SEQ ID NO: 622803 - RNA, 19 nt, Artificial Sequence
  Synthetic
gacagaaagcaucuugaau

SEQ ID NO: 622804 - RNA, 20 nt, Artificial Sequence
  Synthetic
agacagaaagcaucuugaau

SEQ ID NO: 622805 - RNA, 21 nt, Artificial Sequence
  Synthetic
aagacagaaagcaucuugaau

SEQ ID NO: 622806 - RNA, 22 nt, Artificial Sequence
  Synthetic
aaagacagaaagcaucuugaau

SEQ ID NO: 622807 - RNA, 23 nt, Artificial Sequence
  Synthetic
uaaagacagaaagcaucuugaau

SEQ ID NO: 622808 - RNA, 24 nt, Artificial Sequence
  Synthetic
uuaaagacagaaagcaucuugaau

SEQ ID NO: 622809 - RNA, 18 nt, Artificial Sequence
  Synthetic
uuuccucaucucuugaau

SEQ ID NO: 622810 - RNA, 19 nt, Artificial Sequence
  Synthetic
auuuccucaucucuugaau

SEQ ID NO: 622811 - RNA, 20 nt, Artificial Sequence
  Synthetic
aauuuccucaucucuugaau

SEQ ID NO: 622812 - RNA, 21 nt, Artificial Sequence
  Synthetic
uaauuuccucaucucuugaau

SEQ ID NO: 622813 - RNA, 22 nt, Artificial Sequence
  Synthetic
guaauuuccucaucucuugaau

SEQ ID NO: 622814 - RNA, 23 nt, Artificial Sequence
  Synthetic
aguaauuuccucaucucuugaau

SEQ ID NO: 622815 - RNA, 24 nt, Artificial Sequence
  Synthetic
aaguaauuuccucaucucuugaau

SEQ ID NO: 622816 - RNA, 18 nt, Artificial Sequence
  Synthetic
aaaaaagccaaguugaau

SEQ ID NO: 622817 - RNA, 19 nt, Artificial Sequence
  Synthetic
aaaaaaagccaaguugaau

SEQ ID NO: 622818 - RNA, 20 nt, Artificial Sequence
  Synthetic
uaaaaaaagccaaguugaau

SEQ ID NO: 622819 - RNA, 21 nt, Artificial Sequence
  Synthetic
uuaaaaaaagccaaguugaau

SEQ ID NO: 622820 - RNA, 22 nt, Artificial Sequence
  Synthetic
auuaaaaaaagccaaguugaau

SEQ ID NO: 622821 - RNA, 23 nt, Artificial Sequence
  Synthetic
cauuaaaaaaagccaaguugaau

SEQ ID NO: 622822 - RNA, 24 nt, Artificial Sequence
  Synthetic
gcauuaaaaaaagccaaguugaau

SEQ ID NO: 622823 - RNA, 18 nt, Artificial Sequence
  Synthetic
aucuccaagaaguugaau

SEQ ID NO: 622824 - RNA, 19 nt, Artificial Sequence
  Synthetic
aaucuccaagaaguugaau

SEQ ID NO: 622825 - RNA, 20 nt, Artificial Sequence
  Synthetic
gaaucuccaagaaguugaau

SEQ ID NO: 622826 - RNA, 21 nt, Artificial Sequence
  Synthetic
agaaucuccaagaaguugaau

SEQ ID NO: 622827 - RNA, 22 nt, Artificial Sequence
  Synthetic
uagaaucuccaagaaguugaau

SEQ ID NO: 622828 - RNA, 23 nt, Artificial Sequence
  Synthetic
auagaaucuccaagaaguugaau

SEQ ID NO: 622829 - RNA, 24 nt, Artificial Sequence
  Synthetic
gauagaaucuccaagaaguugaau

SEQ ID NO: 622830 - RNA, 18 nt, Artificial Sequence
  Synthetic
gacuaguauugguugaau

SEQ ID NO: 622831 - RNA, 19 nt, Artificial Sequence
  Synthetic
ugacuaguauugguugaau

SEQ ID NO: 622832 - RNA, 20 nt, Artificial Sequence
  Synthetic
uugacuaguauugguugaau

SEQ ID NO: 622833 - RNA, 21 nt, Artificial Sequence
  Synthetic
auugacuaguauugguugaau

SEQ ID NO: 622834 - RNA, 22 nt, Artificial Sequence
  Synthetic
gauugacuaguauugguugaau

SEQ ID NO: 622835 - RNA, 23 nt, Artificial Sequence
  Synthetic
ugauugacuaguauugguugaau

SEQ ID NO: 622836 - RNA, 24 nt, Artificial Sequence
  Synthetic
cugauugacuaguauugguugaau

SEQ ID NO: 622837 - RNA, 21 nt, Artificial Sequence
  Synthetic
acuuccaacacuauguugaau

SEQ ID NO: 622838 - RNA, 22 nt, Artificial Sequence
  Synthetic
aacuuccaacacuauguugaau

SEQ ID NO: 622839 - RNA, 23 nt, Artificial Sequence
  Synthetic
gaacuuccaacacuauguugaau

SEQ ID NO: 622840 - RNA, 24 nt, Artificial Sequence
  Synthetic
agaacuuccaacacuauguugaau

SEQ ID NO: 622841 - RNA, 18 nt, Artificial Sequence
  Synthetic
gcuagcaguguguugaau

SEQ ID NO: 622842 - RNA, 19 nt, Artificial Sequence
  Synthetic
ggcuagcaguguguugaau

SEQ ID NO: 622843 - RNA, 20 nt, Artificial Sequence
  Synthetic
aggcuagcaguguguugaau

SEQ ID NO: 622844 - RNA, 21 nt, Artificial Sequence
  Synthetic
gaggcuagcaguguguugaau

SEQ ID NO: 622845 - RNA, 22 nt, Artificial Sequence
  Synthetic
ugaggcuagcaguguguugaau

SEQ ID NO: 622846 - RNA, 23 nt, Artificial Sequence
  Synthetic
cugaggcuagcaguguguugaau

SEQ ID NO: 622847 - RNA, 24 nt, Artificial Sequence
  Synthetic
ccugaggcuagcaguguguugaau

SEQ ID NO: 622848 - RNA, 18 nt, Artificial Sequence
  Synthetic
aauauugaauuguugaau

SEQ ID NO: 622849 - RNA, 19 nt, Artificial Sequence
  Synthetic
caauauugaauuguugaau

SEQ ID NO: 622850 - RNA, 20 nt, Artificial Sequence
  Synthetic
ccaauauugaauuguugaau

SEQ ID NO: 622851 - RNA, 21 nt, Artificial Sequence
  Synthetic
uccaauauugaauuguugaau

SEQ ID NO: 622852 - RNA, 22 nt, Artificial Sequence
  Synthetic
auccaauauugaauuguugaau

SEQ ID NO: 622853 - RNA, 23 nt, Artificial Sequence
  Synthetic
aauccaauauugaauuguugaau

SEQ ID NO: 622854 - RNA, 24 nt, Artificial Sequence
  Synthetic
uaauccaauauugaauuguugaau

SEQ ID NO: 622855 - RNA, 18 nt, Artificial Sequence
  Synthetic
uucugucuauuguugaau

SEQ ID NO: 622856 - RNA, 19 nt, Artificial Sequence
  Synthetic
uuucugucuauuguugaau

SEQ ID NO: 622857 - RNA, 20 nt, Artificial Sequence
  Synthetic
uuuucugucuauuguugaau

SEQ ID NO: 622858 - RNA, 21 nt, Artificial Sequence
  Synthetic
auuuucugucuauuguugaau

SEQ ID NO: 622859 - RNA, 22 nt, Artificial Sequence
  Synthetic
gauuuucugucuauuguugaau

SEQ ID NO: 622860 - RNA, 23 nt, Artificial Sequence
  Synthetic
ggauuuucugucuauuguugaau

SEQ ID NO: 622861 - RNA, 24 nt, Artificial Sequence
  Synthetic
uggauuuucugucuauuguugaau

SEQ ID NO: 622862 - RNA, 18 nt, Artificial Sequence
  Synthetic
cacaauuucuuguugaau

SEQ ID NO: 622863 - RNA, 19 nt, Artificial Sequence
  Synthetic
ccacaauuucuuguugaau

SEQ ID NO: 622864 - RNA, 20 nt, Artificial Sequence
  Synthetic
cccacaauuucuuguugaau

SEQ ID NO: 622865 - RNA, 21 nt, Artificial Sequence
  Synthetic
acccacaauuucuuguugaau

SEQ ID NO: 622866 - RNA, 22 nt, Artificial Sequence
  Synthetic
gacccacaauuucuuguugaau

SEQ ID NO: 622867 - RNA, 23 nt, Artificial Sequence
  Synthetic
ggacccacaauuucuuguugaau

SEQ ID NO: 622868 - RNA, 24 nt, Artificial Sequence
  Synthetic
cggacccacaauuucuuguugaau

SEQ ID NO: 622869 - RNA, 18 nt, Artificial Sequence
  Synthetic
uucucucauuuguugaau

SEQ ID NO: 622870 - RNA, 19 nt, Artificial Sequence
  Synthetic
cuucucucauuuguugaau

SEQ ID NO: 622871 - RNA, 20 nt, Artificial Sequence
  Synthetic
acuucucucauuuguugaau

SEQ ID NO: 622872 - RNA, 21 nt, Artificial Sequence
  Synthetic
aacuucucucauuuguugaau

SEQ ID NO: 622873 - RNA, 22 nt, Artificial Sequence
  Synthetic
uaacuucucucauuuguugaau

SEQ ID NO: 622874 - RNA, 23 nt, Artificial Sequence
  Synthetic
auaacuucucucauuuguugaau

SEQ ID NO: 622875 - RNA, 24 nt, Artificial Sequence
  Synthetic
uauaacuucucucauuuguugaau

SEQ ID NO: 622876 - RNA, 18 nt, Artificial Sequence
  Synthetic
uuccagucuuuguugaau

SEQ ID NO: 622877 - RNA, 19 nt, Artificial Sequence
  Synthetic
auuccagucuuuguugaau

SEQ ID NO: 622878 - RNA, 20 nt, Artificial Sequence
  Synthetic
cauuccagucuuuguugaau

SEQ ID NO: 622879 - RNA, 21 nt, Artificial Sequence
  Synthetic
acauuccagucuuuguugaau

SEQ ID NO: 622880 - RNA, 22 nt, Artificial Sequence
  Synthetic
cacauuccagucuuuguugaau

SEQ ID NO: 622881 - RNA, 23 nt, Artificial Sequence
  Synthetic
ucacauuccagucuuuguugaau

SEQ ID NO: 622882 - RNA, 24 nt, Artificial Sequence
  Synthetic
cucacauuccagucuuuguugaau

SEQ ID NO: 622883 - RNA, 18 nt, Artificial Sequence
  Synthetic
aaaaauggaaauuugaau

SEQ ID NO: 622884 - RNA, 19 nt, Artificial Sequence
  Synthetic
gaaaaauggaaauuugaau

SEQ ID NO: 622885 - RNA, 20 nt, Artificial Sequence
  Synthetic
agaaaaauggaaauuugaau

SEQ ID NO: 622886 - RNA, 21 nt, Artificial Sequence
  Synthetic
gagaaaaauggaaauuugaau

SEQ ID NO: 622887 - RNA, 22 nt, Artificial Sequence
  Synthetic
ugagaaaaauggaaauuugaau

SEQ ID NO: 622888 - RNA, 23 nt, Artificial Sequence
  Synthetic
augagaaaaauggaaauuugaau

SEQ ID NO: 622889 - RNA, 24 nt, Artificial Sequence
  Synthetic
uaugagaaaaauggaaauuugaau

SEQ ID NO: 622890 - RNA, 18 nt, Artificial Sequence
  Synthetic
ucagcaggcuauuugaau

SEQ ID NO: 622891 - RNA, 19 nt, Artificial Sequence
  Synthetic
cucagcaggcuauuugaau

SEQ ID NO: 622892 - RNA, 20 nt, Artificial Sequence
  Synthetic
acucagcaggcuauuugaau

SEQ ID NO: 622893 - RNA, 21 nt, Artificial Sequence
  Synthetic
aacucagcaggcuauuugaau

SEQ ID NO: 622894 - RNA, 22 nt, Artificial Sequence
  Synthetic
uaacucagcaggcuauuugaau

SEQ ID NO: 622895 - RNA, 23 nt, Artificial Sequence
  Synthetic
auaacucagcaggcuauuugaau

SEQ ID NO: 622896 - RNA, 24 nt, Artificial Sequence
  Synthetic
aauaacucagcaggcuauuugaau

SEQ ID NO: 622897 - RNA, 18 nt, Artificial Sequence
  Synthetic
acaacuacugcuuugaau

SEQ ID NO: 622898 - RNA, 19 nt, Artificial Sequence
  Synthetic
cacaacuacugcuuugaau

SEQ ID NO: 622899 - RNA, 20 nt, Artificial Sequence
  Synthetic
acacaacuacugcuuugaau

SEQ ID NO: 622900 - RNA, 21 nt, Artificial Sequence
  Synthetic
cacacaacuacugcuuugaau

SEQ ID NO: 622901 - RNA, 22 nt, Artificial Sequence
  Synthetic
acacacaacuacugcuuugaau

SEQ ID NO: 622902 - RNA, 23 nt, Artificial Sequence
  Synthetic
aacacacaacuacugcuuugaau

SEQ ID NO: 622903 - RNA, 24 nt, Artificial Sequence
  Synthetic
aaacacacaacuacugcuuugaau

SEQ ID NO: 622904 - RNA, 18 nt, Artificial Sequence
  Synthetic
acuacauauucuuugaau

SEQ ID NO: 622905 - RNA, 19 nt, Artificial Sequence
  Synthetic
uacuacauauucuuugaau

SEQ ID NO: 622906 - RNA, 20 nt, Artificial Sequence
  Synthetic
guacuacauauucuuugaau

SEQ ID NO: 622907 - RNA, 21 nt, Artificial Sequence
  Synthetic
uguacuacauauucuuugaau

SEQ ID NO: 622908 - RNA, 22 nt, Artificial Sequence
  Synthetic
uuguacuacauauucuuugaau

SEQ ID NO: 622909 - RNA, 23 nt, Artificial Sequence
  Synthetic
uuuguacuacauauucuuugaau

SEQ ID NO: 622910 - RNA, 24 nt, Artificial Sequence
  Synthetic
uuuuguacuacauauucuuugaau

SEQ ID NO: 622911 - RNA, 18 nt, Artificial Sequence
  Synthetic
gccccagacauuuugaau

SEQ ID NO: 622912 - RNA, 19 nt, Artificial Sequence
  Synthetic
ugccccagacauuuugaau

SEQ ID NO: 622913 - RNA, 20 nt, Artificial Sequence
  Synthetic
uugccccagacauuuugaau

SEQ ID NO: 622914 - RNA, 21 nt, Artificial Sequence
  Synthetic
cuugccccagacauuuugaau

SEQ ID NO: 622915 - RNA, 22 nt, Artificial Sequence
  Synthetic
ccuugccccagacauuuugaau

SEQ ID NO: 622916 - RNA, 23 nt, Artificial Sequence
  Synthetic
gccuugccccagacauuuugaau

SEQ ID NO: 622917 - RNA, 24 nt, Artificial Sequence
  Synthetic
agccuugccccagacauuuugaau

SEQ ID NO: 622918 - RNA, 18 nt, Artificial Sequence
  Synthetic
gaaguucaguuuuugaau

SEQ ID NO: 622919 - RNA, 19 nt, Artificial Sequence
  Synthetic
ggaaguucaguuuuugaau

SEQ ID NO: 622920 - RNA, 20 nt, Artificial Sequence
  Synthetic
gggaaguucaguuuuugaau

SEQ ID NO: 622921 - RNA, 21 nt, Artificial Sequence
  Synthetic
ggggaaguucaguuuuugaau

SEQ ID NO: 622922 - RNA, 22 nt, Artificial Sequence
  Synthetic
gggggaaguucaguuuuugaau

SEQ ID NO: 622923 - RNA, 23 nt, Artificial Sequence
  Synthetic
ugggggaaguucaguuuuugaau

SEQ ID NO: 622924 - RNA, 24 nt, Artificial Sequence
  Synthetic
augggggaaguucaguuuuugaau

SEQ ID NO: 622925 - RNA, 18 nt, Artificial Sequence
  Synthetic
uccaagaaaaaaaauaau

SEQ ID NO: 622926 - RNA, 19 nt, Artificial Sequence
  Synthetic
auccaagaaaaaaaauaau

SEQ ID NO: 622927 - RNA, 20 nt, Artificial Sequence
  Synthetic
cauccaagaaaaaaaauaau

SEQ ID NO: 622928 - RNA, 21 nt, Artificial Sequence
  Synthetic
ccauccaagaaaaaaaauaau

SEQ ID NO: 622929 - RNA, 22 nt, Artificial Sequence
  Synthetic
gccauccaagaaaaaaaauaau

SEQ ID NO: 622930 - RNA, 23 nt, Artificial Sequence
  Synthetic
ggccauccaagaaaaaaaauaau

SEQ ID NO: 622931 - RNA, 24 nt, Artificial Sequence
  Synthetic
gggccauccaagaaaaaaaauaau

SEQ ID NO: 622932 - RNA, 18 nt, Artificial Sequence
  Synthetic
acaaaagaaaaaaauaau

SEQ ID NO: 622933 - RNA, 19 nt, Artificial Sequence
  Synthetic
gacaaaagaaaaaaauaau

SEQ ID NO: 622934 - RNA, 20 nt, Artificial Sequence
  Synthetic
agacaaaagaaaaaaauaau

SEQ ID NO: 622935 - RNA, 21 nt, Artificial Sequence
  Synthetic
aagacaaaagaaaaaaauaau

SEQ ID NO: 622936 - RNA, 22 nt, Artificial Sequence
  Synthetic
gaagacaaaagaaaaaaauaau

SEQ ID NO: 622937 - RNA, 23 nt, Artificial Sequence
  Synthetic
agaagacaaaagaaaaaaauaau

SEQ ID NO: 622938 - RNA, 24 nt, Artificial Sequence
  Synthetic
gagaagacaaaagaaaaaaauaau

SEQ ID NO: 622939 - RNA, 18 nt, Artificial Sequence
  Synthetic
aaguuuguaaaaaauaau

SEQ ID NO: 622940 - RNA, 19 nt, Artificial Sequence
  Synthetic
aaaguuuguaaaaaauaau

SEQ ID NO: 622941 - RNA, 20 nt, Artificial Sequence
  Synthetic
uaaaguuuguaaaaaauaau

SEQ ID NO: 622942 - RNA, 21 nt, Artificial Sequence
  Synthetic
guaaaguuuguaaaaaauaau

SEQ ID NO: 622943 - RNA, 22 nt, Artificial Sequence
  Synthetic
aguaaaguuuguaaaaaauaau

SEQ ID NO: 622944 - RNA, 23 nt, Artificial Sequence
  Synthetic
uaguaaaguuuguaaaaaauaau

SEQ ID NO: 622945 - RNA, 24 nt, Artificial Sequence
  Synthetic
cuaguaaaguuuguaaaaaauaau

SEQ ID NO: 622946 - RNA, 18 nt, Artificial Sequence
  Synthetic
gacguauuucaaaauaau

SEQ ID NO: 622947 - RNA, 19 nt, Artificial Sequence
  Synthetic
ggacguauuucaaaauaau

SEQ ID NO: 622948 - RNA, 20 nt, Artificial Sequence
  Synthetic
gggacguauuucaaaauaau

SEQ ID NO: 622949 - RNA, 21 nt, Artificial Sequence
  Synthetic
ugggacguauuucaaaauaau

SEQ ID NO: 622950 - RNA, 22 nt, Artificial Sequence
  Synthetic
augggacguauuucaaaauaau

SEQ ID NO: 622951 - RNA, 23 nt, Artificial Sequence
  Synthetic
gaugggacguauuucaaaauaau

SEQ ID NO: 622952 - RNA, 24 nt, Artificial Sequence
  Synthetic
ugaugggacguauuucaaaauaau

SEQ ID NO: 622953 - RNA, 18 nt, Artificial Sequence
  Synthetic
ccuuugauugaaaauaau

SEQ ID NO: 622954 - RNA, 19 nt, Artificial Sequence
  Synthetic
gccuuugauugaaaauaau

SEQ ID NO: 622955 - RNA, 20 nt, Artificial Sequence
  Synthetic
ugccuuugauugaaaauaau

SEQ ID NO: 622956 - RNA, 21 nt, Artificial Sequence
  Synthetic
uugccuuugauugaaaauaau

SEQ ID NO: 622957 - RNA, 22 nt, Artificial Sequence
  Synthetic
uuugccuuugauugaaaauaau

SEQ ID NO: 622958 - RNA, 23 nt, Artificial Sequence
  Synthetic
uuuugccuuugauugaaaauaau

SEQ ID NO: 622959 - RNA, 24 nt, Artificial Sequence
  Synthetic
auuuugccuuugauugaaaauaau

SEQ ID NO: 622960 - RNA, 18 nt, Artificial Sequence
  Synthetic
ccuuuuuaguaaaauaau

SEQ ID NO: 622961 - RNA, 19 nt, Artificial Sequence
  Synthetic
cccuuuuuaguaaaauaau

SEQ ID NO: 622962 - RNA, 20 nt, Artificial Sequence
  Synthetic
ucccuuuuuaguaaaauaau

SEQ ID NO: 622963 - RNA, 21 nt, Artificial Sequence
  Synthetic
cucccuuuuuaguaaaauaau

SEQ ID NO: 622964 - RNA, 22 nt, Artificial Sequence
  Synthetic
ucucccuuuuuaguaaaauaau

SEQ ID NO: 622965 - RNA, 23 nt, Artificial Sequence
  Synthetic
gucucccuuuuuaguaaaauaau

SEQ ID NO: 622966 - RNA, 24 nt, Artificial Sequence
  Synthetic
ugucucccuuuuuaguaaaauaau

SEQ ID NO: 622967 - RNA, 18 nt, Artificial Sequence
  Synthetic
uaauuccuguaaaauaau

SEQ ID NO: 622968 - RNA, 19 nt, Artificial Sequence
  Synthetic
uuaauuccuguaaaauaau

SEQ ID NO: 622969 - RNA, 20 nt, Artificial Sequence
  Synthetic
uuuaauuccuguaaaauaau

SEQ ID NO: 622970 - RNA, 21 nt, Artificial Sequence
  Synthetic
uuuuaauuccuguaaaauaau

SEQ ID NO: 622971 - RNA, 22 nt, Artificial Sequence
  Synthetic
auuuuaauuccuguaaaauaau

SEQ ID NO: 622972 - RNA, 23 nt, Artificial Sequence
  Synthetic
uauuuuaauuccuguaaaauaau

SEQ ID NO: 622973 - RNA, 24 nt, Artificial Sequence
  Synthetic
auauuuuaauuccuguaaaauaau

SEQ ID NO: 622974 - RNA, 18 nt, Artificial Sequence
  Synthetic
guaucauucacaaauaau

SEQ ID NO: 622975 - RNA, 19 nt, Artificial Sequence
  Synthetic
uguaucauucacaaauaau

SEQ ID NO: 622976 - RNA, 20 nt, Artificial Sequence
  Synthetic
guguaucauucacaaauaau

SEQ ID NO: 622977 - RNA, 21 nt, Artificial Sequence
  Synthetic
uguguaucauucacaaauaau

SEQ ID NO: 622978 - RNA, 22 nt, Artificial Sequence
  Synthetic
auguguaucauucacaaauaau

SEQ ID NO: 622979 - RNA, 23 nt, Artificial Sequence
  Synthetic
gauguguaucauucacaaauaau

SEQ ID NO: 622980 - RNA, 24 nt, Artificial Sequence
  Synthetic
cgauguguaucauucacaaauaau

SEQ ID NO: 622981 - RNA, 18 nt, Artificial Sequence
  Synthetic
gacagagagccaaauaau

SEQ ID NO: 622982 - RNA, 19 nt, Artificial Sequence
  Synthetic
agacagagagccaaauaau

SEQ ID NO: 622983 - RNA, 20 nt, Artificial Sequence
  Synthetic
cagacagagagccaaauaau

SEQ ID NO: 622984 - RNA, 21 nt, Artificial Sequence
  Synthetic
acagacagagagccaaauaau

SEQ ID NO: 622985 - RNA, 22 nt, Artificial Sequence
  Synthetic
aacagacagagagccaaauaau

SEQ ID NO: 622986 - RNA, 23 nt, Artificial Sequence
  Synthetic
uaacagacagagagccaaauaau

SEQ ID NO: 622987 - RNA, 24 nt, Artificial Sequence
  Synthetic
auaacagacagagagccaaauaau

SEQ ID NO: 622988 - RNA, 18 nt, Artificial Sequence
  Synthetic
ucaaccacaagaaauaau

SEQ ID NO: 622989 - RNA, 19 nt, Artificial Sequence
  Synthetic
uucaaccacaagaaauaau

SEQ ID NO: 622990 - RNA, 20 nt, Artificial Sequence
  Synthetic
uuucaaccacaagaaauaau

SEQ ID NO: 622991 - RNA, 21 nt, Artificial Sequence
  Synthetic
auuucaaccacaagaaauaau

SEQ ID NO: 622992 - RNA, 22 nt, Artificial Sequence
  Synthetic
uauuucaaccacaagaaauaau

SEQ ID NO: 622993 - RNA, 23 nt, Artificial Sequence
  Synthetic
guauuucaaccacaagaaauaau

SEQ ID NO: 622994 - RNA, 24 nt, Artificial Sequence
  Synthetic
gguauuucaaccacaagaaauaau

SEQ ID NO: 622995 - RNA, 18 nt, Artificial Sequence
  Synthetic
gacacauacagaaauaau

SEQ ID NO: 622996 - RNA, 19 nt, Artificial Sequence
  Synthetic
agacacauacagaaauaau

SEQ ID NO: 622997 - RNA, 20 nt, Artificial Sequence
  Synthetic
gagacacauacagaaauaau

SEQ ID NO: 622998 - RNA, 21 nt, Artificial Sequence
  Synthetic
ggagacacauacagaaauaau

SEQ ID NO: 622999 - RNA, 22 nt, Artificial Sequence
  Synthetic
aggagacacauacagaaauaau

SEQ ID NO: 623000 - RNA, 23 nt, Artificial Sequence
  Synthetic
aaggagacacauacagaaauaau

SEQ ID NO: 623001 - RNA, 24 nt, Artificial Sequence
  Synthetic
aaaggagacacauacagaaauaau

SEQ ID NO: 623002 - RNA, 18 nt, Artificial Sequence
  Synthetic
gacugaggcagaaauaau

SEQ ID NO: 623003 - RNA, 19 nt, Artificial Sequence
  Synthetic
agacugaggcagaaauaau

SEQ ID NO: 623004 - RNA, 20 nt, Artificial Sequence
  Synthetic
gagacugaggcagaaauaau

SEQ ID NO: 623005 - RNA, 21 nt, Artificial Sequence
  Synthetic
agagacugaggcagaaauaau

SEQ ID NO: 623006 - RNA, 22 nt, Artificial Sequence
  Synthetic
aagagacugaggcagaaauaau

SEQ ID NO: 623007 - RNA, 23 nt, Artificial Sequence
  Synthetic
aaagagacugaggcagaaauaau

SEQ ID NO: 623008 - RNA, 24 nt, Artificial Sequence
  Synthetic
aaaagagacugaggcagaaauaau

SEQ ID NO: 623009 - RNA, 18 nt, Artificial Sequence
  Synthetic
uauguuucaauaaauaau

SEQ ID NO: 623010 - RNA, 19 nt, Artificial Sequence
  Synthetic
guauguuucaauaaauaau

SEQ ID NO: 623011 - RNA, 20 nt, Artificial Sequence
  Synthetic
aguauguuucaauaaauaau

SEQ ID NO: 623012 - RNA, 21 nt, Artificial Sequence
  Synthetic
uaguauguuucaauaaauaau

SEQ ID NO: 623013 - RNA, 22 nt, Artificial Sequence
  Synthetic
cuaguauguuucaauaaauaau

SEQ ID NO: 623014 - RNA, 23 nt, Artificial Sequence
  Synthetic
acuaguauguuucaauaaauaau

SEQ ID NO: 623015 - RNA, 24 nt, Artificial Sequence
  Synthetic
aacuaguauguuucaauaaauaau

SEQ ID NO: 623016 - RNA, 18 nt, Artificial Sequence
  Synthetic
uguucuauuuuaaauaau

SEQ ID NO: 623017 - RNA, 19 nt, Artificial Sequence
  Synthetic
guguucuauuuuaaauaau

SEQ ID NO: 623018 - RNA, 20 nt, Artificial Sequence
  Synthetic
uguguucuauuuuaaauaau

SEQ ID NO: 623019 - RNA, 21 nt, Artificial Sequence
  Synthetic
auguguucuauuuuaaauaau

SEQ ID NO: 623020 - RNA, 22 nt, Artificial Sequence
  Synthetic
aauguguucuauuuuaaauaau

SEQ ID NO: 623021 - RNA, 23 nt, Artificial Sequence
  Synthetic
caauguguucuauuuuaaauaau

SEQ ID NO: 623022 - RNA, 24 nt, Artificial Sequence
  Synthetic
acaauguguucuauuuuaaauaau

SEQ ID NO: 623023 - RNA, 18 nt, Artificial Sequence
  Synthetic
gucccaaugcccaauaau

SEQ ID NO: 623024 - RNA, 19 nt, Artificial Sequence
  Synthetic
agucccaaugcccaauaau

SEQ ID NO: 623025 - RNA, 20 nt, Artificial Sequence
  Synthetic
cagucccaaugcccaauaau

SEQ ID NO: 623026 - RNA, 21 nt, Artificial Sequence
  Synthetic
gcagucccaaugcccaauaau

SEQ ID NO: 623027 - RNA, 22 nt, Artificial Sequence
  Synthetic
agcagucccaaugcccaauaau

SEQ ID NO: 623028 - RNA, 23 nt, Artificial Sequence
  Synthetic
aagcagucccaaugcccaauaau

SEQ ID NO: 623029 - RNA, 24 nt, Artificial Sequence
  Synthetic
gaagcagucccaaugcccaauaau

SEQ ID NO: 623030 - RNA, 18 nt, Artificial Sequence
  Synthetic
cuaaacuaauucaauaau

SEQ ID NO: 623031 - RNA, 19 nt, Artificial Sequence
  Synthetic
ucuaaacuaauucaauaau

SEQ ID NO: 623032 - RNA, 20 nt, Artificial Sequence
  Synthetic
cucuaaacuaauucaauaau

SEQ ID NO: 623033 - RNA, 21 nt, Artificial Sequence
  Synthetic
gcucuaaacuaauucaauaau

SEQ ID NO: 623034 - RNA, 22 nt, Artificial Sequence
  Synthetic
ugcucuaaacuaauucaauaau

SEQ ID NO: 623035 - RNA, 23 nt, Artificial Sequence
  Synthetic
uugcucuaaacuaauucaauaau

SEQ ID NO: 623036 - RNA, 24 nt, Artificial Sequence
  Synthetic
uuugcucuaaacuaauucaauaau

SEQ ID NO: 623037 - RNA, 18 nt, Artificial Sequence
  Synthetic
aaauguuuauucaauaau

SEQ ID NO: 623038 - RNA, 19 nt, Artificial Sequence
  Synthetic
gaaauguuuauucaauaau

SEQ ID NO: 623039 - RNA, 20 nt, Artificial Sequence
  Synthetic
agaaauguuuauucaauaau

SEQ ID NO: 623040 - RNA, 21 nt, Artificial Sequence
  Synthetic
uagaaauguuuauucaauaau

SEQ ID NO: 623041 - RNA, 22 nt, Artificial Sequence
  Synthetic
uuagaaauguuuauucaauaau

SEQ ID NO: 623042 - RNA, 23 nt, Artificial Sequence
  Synthetic
cuuagaaauguuuauucaauaau

SEQ ID NO: 623043 - RNA, 24 nt, Artificial Sequence
  Synthetic
ccuuagaaauguuuauucaauaau

SEQ ID NO: 623044 - RNA, 18 nt, Artificial Sequence
  Synthetic
gcguaacauuucaauaau

SEQ ID NO: 623045 - RNA, 19 nt, Artificial Sequence
  Synthetic
agcguaacauuucaauaau

SEQ ID NO: 623046 - RNA, 20 nt, Artificial Sequence
  Synthetic
cagcguaacauuucaauaau

SEQ ID NO: 623047 - RNA, 21 nt, Artificial Sequence
  Synthetic
acagcguaacauuucaauaau

SEQ ID NO: 623048 - RNA, 22 nt, Artificial Sequence
  Synthetic
cacagcguaacauuucaauaau

SEQ ID NO: 623049 - RNA, 23 nt, Artificial Sequence
  Synthetic
acacagcguaacauuucaauaau

SEQ ID NO: 623050 - RNA, 24 nt, Artificial Sequence
  Synthetic
uacacagcguaacauuucaauaau

SEQ ID NO: 623051 - RNA, 18 nt, Artificial Sequence
  Synthetic
ucccugacuuagaauaau

SEQ ID NO: 623052 - RNA, 19 nt, Artificial Sequence
  Synthetic
cucccugacuuagaauaau

SEQ ID NO: 623053 - RNA, 20 nt, Artificial Sequence
  Synthetic
ucucccugacuuagaauaau

SEQ ID NO: 623054 - RNA, 21 nt, Artificial Sequence
  Synthetic
aucucccugacuuagaauaau

SEQ ID NO: 623055 - RNA, 22 nt, Artificial Sequence
  Synthetic
aaucucccugacuuagaauaau

SEQ ID NO: 623056 - RNA, 23 nt, Artificial Sequence
  Synthetic
aaaucucccugacuuagaauaau

SEQ ID NO: 623057 - RNA, 24 nt, Artificial Sequence
  Synthetic
aaaaucucccugacuuagaauaau

SEQ ID NO: 623058 - RNA, 18 nt, Artificial Sequence
  Synthetic
uauaaauugaugaauaau

SEQ ID NO: 623059 - RNA, 19 nt, Artificial Sequence
  Synthetic
guauaaauugaugaauaau

SEQ ID NO: 623060 - RNA, 20 nt, Artificial Sequence
  Synthetic
uguauaaauugaugaauaau

SEQ ID NO: 623061 - RNA, 21 nt, Artificial Sequence
  Synthetic
auguauaaauugaugaauaau

SEQ ID NO: 623062 - RNA, 22 nt, Artificial Sequence
  Synthetic
aauguauaaauugaugaauaau

SEQ ID NO: 623063 - RNA, 23 nt, Artificial Sequence
  Synthetic
aaauguauaaauugaugaauaau

SEQ ID NO: 623064 - RNA, 24 nt, Artificial Sequence
  Synthetic
aaaauguauaaauugaugaauaau

SEQ ID NO: 623065 - RNA, 18 nt, Artificial Sequence
  Synthetic
aagauuaaaaauaauaau

SEQ ID NO: 623066 - RNA, 19 nt, Artificial Sequence
  Synthetic
aaagauuaaaaauaauaau

SEQ ID NO: 623067 - RNA, 20 nt, Artificial Sequence
  Synthetic
uaaagauuaaaaauaauaau

SEQ ID NO: 623068 - RNA, 21 nt, Artificial Sequence
  Synthetic
auaaagauuaaaaauaauaau

SEQ ID NO: 623069 - RNA, 22 nt, Artificial Sequence
  Synthetic
uauaaagauuaaaaauaauaau

SEQ ID NO: 623070 - RNA, 23 nt, Artificial Sequence
  Synthetic
uuauaaagauuaaaaauaauaau

SEQ ID NO: 623071 - RNA, 24 nt, Artificial Sequence
  Synthetic
guuauaaagauuaaaaauaauaau

SEQ ID NO: 623072 - RNA, 18 nt, Artificial Sequence
  Synthetic
guugaaccucauaauaau

SEQ ID NO: 623073 - RNA, 19 nt, Artificial Sequence
  Synthetic
aguugaaccucauaauaau

SEQ ID NO: 623074 - RNA, 20 nt, Artificial Sequence
  Synthetic
caguugaaccucauaauaau

SEQ ID NO: 623075 - RNA, 21 nt, Artificial Sequence
  Synthetic
ucaguugaaccucauaauaau

SEQ ID NO: 623076 - RNA, 22 nt, Artificial Sequence
  Synthetic
uucaguugaaccucauaauaau

SEQ ID NO: 623077 - RNA, 23 nt, Artificial Sequence
  Synthetic
uuucaguugaaccucauaauaau

SEQ ID NO: 623078 - RNA, 24 nt, Artificial Sequence
  Synthetic
auuucaguugaaccucauaauaau

SEQ ID NO: 623079 - RNA, 18 nt, Artificial Sequence
  Synthetic
uagauguagccuaauaau

SEQ ID NO: 623080 - RNA, 19 nt, Artificial Sequence
  Synthetic
uuagauguagccuaauaau

SEQ ID NO: 623081 - RNA, 20 nt, Artificial Sequence
  Synthetic
auuagauguagccuaauaau

SEQ ID NO: 623082 - RNA, 21 nt, Artificial Sequence
  Synthetic
gauuagauguagccuaauaau

SEQ ID NO: 623083 - RNA, 22 nt, Artificial Sequence
  Synthetic
agauuagauguagccuaauaau

SEQ ID NO: 623084 - RNA, 23 nt, Artificial Sequence
  Synthetic
uagauuagauguagccuaauaau

SEQ ID NO: 623085 - RNA, 24 nt, Artificial Sequence
  Synthetic
auagauuagauguagccuaauaau

SEQ ID NO: 623086 - RNA, 18 nt, Artificial Sequence
  Synthetic
aacauuaaagguaauaau

SEQ ID NO: 623087 - RNA, 19 nt, Artificial Sequence
  Synthetic
uaacauuaaagguaauaau

SEQ ID NO: 623088 - RNA, 20 nt, Artificial Sequence
  Synthetic
cuaacauuaaagguaauaau

SEQ ID NO: 623089 - RNA, 21 nt, Artificial Sequence
  Synthetic
ccuaacauuaaagguaauaau

SEQ ID NO: 623090 - RNA, 22 nt, Artificial Sequence
  Synthetic
cccuaacauuaaagguaauaau

SEQ ID NO: 623091 - RNA, 23 nt, Artificial Sequence
  Synthetic
acccuaacauuaaagguaauaau

SEQ ID NO: 623092 - RNA, 24 nt, Artificial Sequence
  Synthetic
uacccuaacauuaaagguaauaau

SEQ ID NO: 623093 - RNA, 18 nt, Artificial Sequence
  Synthetic
cuuagccuugguaauaau

SEQ ID NO: 623094 - RNA, 19 nt, Artificial Sequence
  Synthetic
gcuuagccuugguaauaau

SEQ ID NO: 623095 - RNA, 20 nt, Artificial Sequence
  Synthetic
agcuuagccuugguaauaau

SEQ ID NO: 623096 - RNA, 21 nt, Artificial Sequence
  Synthetic
aagcuuagccuugguaauaau

SEQ ID NO: 623097 - RNA, 22 nt, Artificial Sequence
  Synthetic
gaagcuuagccuugguaauaau

SEQ ID NO: 623098 - RNA, 23 nt, Artificial Sequence
  Synthetic
agaagcuuagccuugguaauaau

SEQ ID NO: 623099 - RNA, 24 nt, Artificial Sequence
  Synthetic
cagaagcuuagccuugguaauaau

SEQ ID NO: 623100 - RNA, 18 nt, Artificial Sequence
  Synthetic
aguagaguauguaauaau

SEQ ID NO: 623101 - RNA, 19 nt, Artificial Sequence
  Synthetic
aaguagaguauguaauaau

SEQ ID NO: 623102 - RNA, 20 nt, Artificial Sequence
  Synthetic
aaaguagaguauguaauaau

SEQ ID NO: 623103 - RNA, 21 nt, Artificial Sequence
  Synthetic
aaaaguagaguauguaauaau

SEQ ID NO: 623104 - RNA, 22 nt, Artificial Sequence
  Synthetic
aaaaaguagaguauguaauaau

SEQ ID NO: 623105 - RNA, 23 nt, Artificial Sequence
  Synthetic
aaaaaaguagaguauguaauaau

SEQ ID NO: 623106 - RNA, 24 nt, Artificial Sequence
  Synthetic
gaaaaaaguagaguauguaauaau

SEQ ID NO: 623107 - RNA, 18 nt, Artificial Sequence
  Synthetic
cucccacacauuaauaau

SEQ ID NO: 623108 - RNA, 19 nt, Artificial Sequence
  Synthetic
acucccacacauuaauaau

SEQ ID NO: 623109 - RNA, 20 nt, Artificial Sequence
  Synthetic
gacucccacacauuaauaau

SEQ ID NO: 623110 - RNA, 21 nt, Artificial Sequence
  Synthetic
agacucccacacauuaauaau

SEQ ID NO: 623111 - RNA, 22 nt, Artificial Sequence
  Synthetic
uagacucccacacauuaauaau

SEQ ID NO: 623112 - RNA, 23 nt, Artificial Sequence
  Synthetic
uuagacucccacacauuaauaau

SEQ ID NO: 623113 - RNA, 24 nt, Artificial Sequence
  Synthetic
cuuagacucccacacauuaauaau

SEQ ID NO: 623114 - RNA, 18 nt, Artificial Sequence
  Synthetic
accuaauauauuaauaau

SEQ ID NO: 623115 - RNA, 19 nt, Artificial Sequence
  Synthetic
gaccuaauauauuaauaau

SEQ ID NO: 623116 - RNA, 20 nt, Artificial Sequence
  Synthetic
ugaccuaauauauuaauaau

SEQ ID NO: 623117 - RNA, 21 nt, Artificial Sequence
  Synthetic
uugaccuaauauauuaauaau

SEQ ID NO: 623118 - RNA, 22 nt, Artificial Sequence
  Synthetic
cuugaccuaauauauuaauaau

SEQ ID NO: 623119 - RNA, 23 nt, Artificial Sequence
  Synthetic
acuugaccuaauauauuaauaau

SEQ ID NO: 623120 - RNA, 24 nt, Artificial Sequence
  Synthetic
uacuugaccuaauauauuaauaau

SEQ ID NO: 623121 - RNA, 18 nt, Artificial Sequence
  Synthetic
cuuacaaguguuaauaau

SEQ ID NO: 623122 - RNA, 19 nt, Artificial Sequence
  Synthetic
ucuuacaaguguuaauaau

SEQ ID NO: 623123 - RNA, 20 nt, Artificial Sequence
  Synthetic
aucuuacaaguguuaauaau

SEQ ID NO: 623124 - RNA, 21 nt, Artificial Sequence
  Synthetic
caucuuacaaguguuaauaau

SEQ ID NO: 623125 - RNA, 22 nt, Artificial Sequence
  Synthetic
ucaucuuacaaguguuaauaau

SEQ ID NO: 623126 - RNA, 23 nt, Artificial Sequence
  Synthetic
uucaucuuacaaguguuaauaau

SEQ ID NO: 623127 - RNA, 24 nt, Artificial Sequence
  Synthetic
cuucaucuuacaaguguuaauaau

SEQ ID NO: 623128 - RNA, 18 nt, Artificial Sequence
  Synthetic
gagacaaaguuuaauaau

SEQ ID NO: 623129 - RNA, 19 nt, Artificial Sequence
  Synthetic
agagacaaaguuuaauaau

SEQ ID NO: 623130 - RNA, 20 nt, Artificial Sequence
  Synthetic
aagagacaaaguuuaauaau

SEQ ID NO: 623131 - RNA, 21 nt, Artificial Sequence
  Synthetic
gaagagacaaaguuuaauaau

SEQ ID NO: 623132 - RNA, 22 nt, Artificial Sequence
  Synthetic
ugaagagacaaaguuuaauaau

SEQ ID NO: 623133 - RNA, 23 nt, Artificial Sequence
  Synthetic
augaagagacaaaguuuaauaau

SEQ ID NO: 623134 - RNA, 24 nt, Artificial Sequence
  Synthetic
uaugaagagacaaaguuuaauaau

SEQ ID NO: 623135 - RNA, 18 nt, Artificial Sequence
  Synthetic
ggauauccagaacauaau

SEQ ID NO: 623136 - RNA, 19 nt, Artificial Sequence
  Synthetic
uggauauccagaacauaau

SEQ ID NO: 623137 - RNA, 20 nt, Artificial Sequence
  Synthetic
guggauauccagaacauaau

SEQ ID NO: 623138 - RNA, 21 nt, Artificial Sequence
  Synthetic
aguggauauccagaacauaau

SEQ ID NO: 623139 - RNA, 22 nt, Artificial Sequence
  Synthetic
uaguggauauccagaacauaau

SEQ ID NO: 623140 - RNA, 23 nt, Artificial Sequence
  Synthetic
auaguggauauccagaacauaau

SEQ ID NO: 623141 - RNA, 24 nt, Artificial Sequence
  Synthetic
aauaguggauauccagaacauaau

SEQ ID NO: 623142 - RNA, 18 nt, Artificial Sequence
  Synthetic
auaucgcuagaacauaau

SEQ ID NO: 623143 - RNA, 19 nt, Artificial Sequence
  Synthetic
aauaucgcuagaacauaau

SEQ ID NO: 623144 - RNA, 20 nt, Artificial Sequence
  Synthetic
uaauaucgcuagaacauaau

SEQ ID NO: 623145 - RNA, 21 nt, Artificial Sequence
  Synthetic
uuaauaucgcuagaacauaau

SEQ ID NO: 623146 - RNA, 22 nt, Artificial Sequence
  Synthetic
uuuaauaucgcuagaacauaau

SEQ ID NO: 623147 - RNA, 23 nt, Artificial Sequence
  Synthetic
auuuaauaucgcuagaacauaau

SEQ ID NO: 623148 - RNA, 24 nt, Artificial Sequence
  Synthetic
gauuuaauaucgcuagaacauaau

SEQ ID NO: 623149 - RNA, 18 nt, Artificial Sequence
  Synthetic
gacauaagcucacauaau

SEQ ID NO: 623150 - RNA, 19 nt, Artificial Sequence
  Synthetic
ugacauaagcucacauaau

SEQ ID NO: 623151 - RNA, 20 nt, Artificial Sequence
  Synthetic
uugacauaagcucacauaau

SEQ ID NO: 623152 - RNA, 21 nt, Artificial Sequence
  Synthetic
uuugacauaagcucacauaau

SEQ ID NO: 623153 - RNA, 22 nt, Artificial Sequence
  Synthetic
uuuugacauaagcucacauaau

SEQ ID NO: 623154 - RNA, 23 nt, Artificial Sequence
  Synthetic
guuuugacauaagcucacauaau

SEQ ID NO: 623155 - RNA, 24 nt, Artificial Sequence
  Synthetic
uguuuugacauaagcucacauaau

SEQ ID NO: 623156 - RNA, 18 nt, Artificial Sequence
  Synthetic
acaagcaaccuacauaau

SEQ ID NO: 623157 - RNA, 19 nt, Artificial Sequence
  Synthetic
aacaagcaaccuacauaau

SEQ ID NO: 623158 - RNA, 20 nt, Artificial Sequence
  Synthetic
gaacaagcaaccuacauaau

SEQ ID NO: 623159 - RNA, 21 nt, Artificial Sequence
  Synthetic
ugaacaagcaaccuacauaau

SEQ ID NO: 623160 - RNA, 22 nt, Artificial Sequence
  Synthetic
gugaacaagcaaccuacauaau

SEQ ID NO: 623161 - RNA, 23 nt, Artificial Sequence
  Synthetic
agugaacaagcaaccuacauaau

SEQ ID NO: 623162 - RNA, 24 nt, Artificial Sequence
  Synthetic
gagugaacaagcaaccuacauaau

SEQ ID NO: 623163 - RNA, 18 nt, Artificial Sequence
  Synthetic
uuaacuuauuuacauaau

SEQ ID NO: 623164 - RNA, 19 nt, Artificial Sequence
  Synthetic
guuaacuuauuuacauaau

SEQ ID NO: 623165 - RNA, 20 nt, Artificial Sequence
  Synthetic
aguuaacuuauuuacauaau

SEQ ID NO: 623166 - RNA, 21 nt, Artificial Sequence
  Synthetic
aaguuaacuuauuuacauaau

SEQ ID NO: 623167 - RNA, 22 nt, Artificial Sequence
  Synthetic
gaaguuaacuuauuuacauaau

SEQ ID NO: 623168 - RNA, 23 nt, Artificial Sequence
  Synthetic
ggaaguuaacuuauuuacauaau

SEQ ID NO: 623169 - RNA, 24 nt, Artificial Sequence
  Synthetic
uggaaguuaacuuauuuacauaau

SEQ ID NO: 623170 - RNA, 18 nt, Artificial Sequence
  Synthetic
uuguaagcacaccauaau

SEQ ID NO: 623171 - RNA, 19 nt, Artificial Sequence
  Synthetic
cuuguaagcacaccauaau

SEQ ID NO: 623172 - RNA, 20 nt, Artificial Sequence
  Synthetic
ccuuguaagcacaccauaau

SEQ ID NO: 623173 - RNA, 21 nt, Artificial Sequence
  Synthetic
uccuuguaagcacaccauaau

SEQ ID NO: 623174 - RNA, 22 nt, Artificial Sequence
  Synthetic
guccuuguaagcacaccauaau

SEQ ID NO: 623175 - RNA, 23 nt, Artificial Sequence
  Synthetic
gguccuuguaagcacaccauaau

SEQ ID NO: 623176 - RNA, 24 nt, Artificial Sequence
  Synthetic
ugguccuuguaagcacaccauaau

SEQ ID NO: 623177 - RNA, 18 nt, Artificial Sequence
  Synthetic
gagaucacccaccauaau

SEQ ID NO: 623178 - RNA, 19 nt, Artificial Sequence
  Synthetic
ugagaucacccaccauaau

SEQ ID NO: 623179 - RNA, 20 nt, Artificial Sequence
  Synthetic
cugagaucacccaccauaau

SEQ ID NO: 623180 - RNA, 21 nt, Artificial Sequence
  Synthetic
ucugagaucacccaccauaau

SEQ ID NO: 623181 - RNA, 22 nt, Artificial Sequence
  Synthetic
aucugagaucacccaccauaau

SEQ ID NO: 623182 - RNA, 23 nt, Artificial Sequence
  Synthetic
aaucugagaucacccaccauaau

SEQ ID NO: 623183 - RNA, 24 nt, Artificial Sequence
  Synthetic
uaaucugagaucacccaccauaau

SEQ ID NO: 623184 - RNA, 18 nt, Artificial Sequence
  Synthetic
auuucauaaucccauaau

SEQ ID NO: 623185 - RNA, 19 nt, Artificial Sequence
  Synthetic
uauuucauaaucccauaau

SEQ ID NO: 623186 - RNA, 20 nt, Artificial Sequence
  Synthetic
auauuucauaaucccauaau

SEQ ID NO: 623187 - RNA, 21 nt, Artificial Sequence
  Synthetic
cauauuucauaaucccauaau

SEQ ID NO: 623188 - RNA, 22 nt, Artificial Sequence
  Synthetic
ccauauuucauaaucccauaau

SEQ ID NO: 623189 - RNA, 23 nt, Artificial Sequence
  Synthetic
accauauuucauaaucccauaau

SEQ ID NO: 623190 - RNA, 24 nt, Artificial Sequence
  Synthetic
aaccauauuucauaaucccauaau

SEQ ID NO: 623191 - RNA, 18 nt, Artificial Sequence
  Synthetic
aaaucuaugagccauaau

SEQ ID NO: 623192 - RNA, 19 nt, Artificial Sequence
  Synthetic
aaaaucuaugagccauaau

SEQ ID NO: 623193 - RNA, 20 nt, Artificial Sequence
  Synthetic
gaaaaucuaugagccauaau

SEQ ID NO: 623194 - RNA, 21 nt, Artificial Sequence
  Synthetic
ugaaaaucuaugagccauaau

SEQ ID NO: 623195 - RNA, 22 nt, Artificial Sequence
  Synthetic
augaaaaucuaugagccauaau

SEQ ID NO: 623196 - RNA, 23 nt, Artificial Sequence
  Synthetic
uaugaaaaucuaugagccauaau

SEQ ID NO: 623197 - RNA, 24 nt, Artificial Sequence
  Synthetic
auaugaaaaucuaugagccauaau

SEQ ID NO: 623198 - RNA, 18 nt, Artificial Sequence
  Synthetic
aaaccuaaaauccauaau

SEQ ID NO: 623199 - RNA, 19 nt, Artificial Sequence
  Synthetic
uaaaccuaaaauccauaau

SEQ ID NO: 623200 - RNA, 20 nt, Artificial Sequence
  Synthetic
uuaaaccuaaaauccauaau

SEQ ID NO: 623201 - RNA, 21 nt, Artificial Sequence
  Synthetic
uuuaaaccuaaaauccauaau

SEQ ID NO: 623202 - RNA, 22 nt, Artificial Sequence
  Synthetic
guuuaaaccuaaaauccauaau

SEQ ID NO: 623203 - RNA, 23 nt, Artificial Sequence
  Synthetic
gguuuaaaccuaaaauccauaau

SEQ ID NO: 623204 - RNA, 24 nt, Artificial Sequence
  Synthetic
ugguuuaaaccuaaaauccauaau

SEQ ID NO: 623205 - RNA, 18 nt, Artificial Sequence
  Synthetic
ugauuuaugcuccauaau

SEQ ID NO: 623206 - RNA, 19 nt, Artificial Sequence
  Synthetic
uugauuuaugcuccauaau

SEQ ID NO: 623207 - RNA, 20 nt, Artificial Sequence
  Synthetic
uuugauuuaugcuccauaau

SEQ ID NO: 623208 - RNA, 21 nt, Artificial Sequence
  Synthetic
uuuugauuuaugcuccauaau

SEQ ID NO: 623209 - RNA, 22 nt, Artificial Sequence
  Synthetic
cuuuugauuuaugcuccauaau

SEQ ID NO: 623210 - RNA, 23 nt, Artificial Sequence
  Synthetic
acuuuugauuuaugcuccauaau

SEQ ID NO: 623211 - RNA, 24 nt, Artificial Sequence
  Synthetic
uacuuuugauuuaugcuccauaau

SEQ ID NO: 623212 - RNA, 18 nt, Artificial Sequence
  Synthetic
gccuagauuuagcauaau

SEQ ID NO: 623213 - RNA, 19 nt, Artificial Sequence
  Synthetic
ggccuagauuuagcauaau

SEQ ID NO: 623214 - RNA, 20 nt, Artificial Sequence
  Synthetic
uggccuagauuuagcauaau

SEQ ID NO: 623215 - RNA, 21 nt, Artificial Sequence
  Synthetic
auggccuagauuuagcauaau

SEQ ID NO: 623216 - RNA, 22 nt, Artificial Sequence
  Synthetic
aauggccuagauuuagcauaau

SEQ ID NO: 623217 - RNA, 23 nt, Artificial Sequence
  Synthetic
uaauggccuagauuuagcauaau

SEQ ID NO: 623218 - RNA, 24 nt, Artificial Sequence
  Synthetic
cuaauggccuagauuuagcauaau

SEQ ID NO: 623219 - RNA, 18 nt, Artificial Sequence
  Synthetic
ugcuagguucugcauaau

SEQ ID NO: 623220 - RNA, 19 nt, Artificial Sequence
  Synthetic
uugcuagguucugcauaau

SEQ ID NO: 623221 - RNA, 20 nt, Artificial Sequence
  Synthetic
auugcuagguucugcauaau

SEQ ID NO: 623222 - RNA, 21 nt, Artificial Sequence
  Synthetic
gauugcuagguucugcauaau

SEQ ID NO: 623223 - RNA, 22 nt, Artificial Sequence
  Synthetic
ugauugcuagguucugcauaau

SEQ ID NO: 623224 - RNA, 23 nt, Artificial Sequence
  Synthetic
gugauugcuagguucugcauaau

SEQ ID NO: 623225 - RNA, 24 nt, Artificial Sequence
  Synthetic
ggugauugcuagguucugcauaau

SEQ ID NO: 623226 - RNA, 18 nt, Artificial Sequence
  Synthetic
gugagagauuugcauaau

SEQ ID NO: 623227 - RNA, 19 nt, Artificial Sequence
  Synthetic
ggugagagauuugcauaau

SEQ ID NO: 623228 - RNA, 20 nt, Artificial Sequence
  Synthetic
uggugagagauuugcauaau

SEQ ID NO: 623229 - RNA, 21 nt, Artificial Sequence
  Synthetic
auggugagagauuugcauaau

SEQ ID NO: 623230 - RNA, 22 nt, Artificial Sequence
  Synthetic
gauggugagagauuugcauaau

SEQ ID NO: 623231 - RNA, 23 nt, Artificial Sequence
  Synthetic
cgauggugagagauuugcauaau

SEQ ID NO: 623232 - RNA, 24 nt, Artificial Sequence
  Synthetic
acgauggugagagauuugcauaau

SEQ ID NO: 623233 - RNA, 18 nt, Artificial Sequence
  Synthetic
aggaaccuucaucauaau

SEQ ID NO: 623234 - RNA, 19 nt, Artificial Sequence
  Synthetic
caggaaccuucaucauaau

SEQ ID NO: 623235 - RNA, 20 nt, Artificial Sequence
  Synthetic
ucaggaaccuucaucauaau

SEQ ID NO: 623236 - RNA, 21 nt, Artificial Sequence
  Synthetic
cucaggaaccuucaucauaau

SEQ ID NO: 623237 - RNA, 22 nt, Artificial Sequence
  Synthetic
ucucaggaaccuucaucauaau

SEQ ID NO: 623238 - RNA, 23 nt, Artificial Sequence
  Synthetic
aucucaggaaccuucaucauaau

SEQ ID NO: 623239 - RNA, 24 nt, Artificial Sequence
  Synthetic
gaucucaggaaccuucaucauaau

SEQ ID NO: 623240 - RNA, 18 nt, Artificial Sequence
  Synthetic
uguaaugaguaucauaau

SEQ ID NO: 623241 - RNA, 19 nt, Artificial Sequence
  Synthetic
auguaaugaguaucauaau

SEQ ID NO: 623242 - RNA, 20 nt, Artificial Sequence
  Synthetic
gauguaaugaguaucauaau

SEQ ID NO: 623243 - RNA, 21 nt, Artificial Sequence
  Synthetic
ugauguaaugaguaucauaau

SEQ ID NO: 623244 - RNA, 22 nt, Artificial Sequence
  Synthetic
gugauguaaugaguaucauaau

SEQ ID NO: 623245 - RNA, 23 nt, Artificial Sequence
  Synthetic
agugauguaaugaguaucauaau

SEQ ID NO: 623246 - RNA, 24 nt, Artificial Sequence
  Synthetic
gagugauguaaugaguaucauaau

SEQ ID NO: 623247 - RNA, 18 nt, Artificial Sequence
  Synthetic
aauaacaugauucauaau

SEQ ID NO: 623248 - RNA, 19 nt, Artificial Sequence
  Synthetic
aaauaacaugauucauaau

SEQ ID NO: 623249 - RNA, 20 nt, Artificial Sequence
  Synthetic
caaauaacaugauucauaau

SEQ ID NO: 623250 - RNA, 21 nt, Artificial Sequence
  Synthetic
acaaauaacaugauucauaau

SEQ ID NO: 623251 - RNA, 22 nt, Artificial Sequence
  Synthetic
aacaaauaacaugauucauaau

SEQ ID NO: 623252 - RNA, 23 nt, Artificial Sequence
  Synthetic
uaacaaauaacaugauucauaau

SEQ ID NO: 623253 - RNA, 24 nt, Artificial Sequence
  Synthetic
auaacaaauaacaugauucauaau

SEQ ID NO: 623254 - RNA, 18 nt, Artificial Sequence
  Synthetic
ucuugcauacuucauaau

SEQ ID NO: 623255 - RNA, 19 nt, Artificial Sequence
  Synthetic
gucuugcauacuucauaau

SEQ ID NO: 623256 - RNA, 20 nt, Artificial Sequence
  Synthetic
agucuugcauacuucauaau

SEQ ID NO: 623257 - RNA, 21 nt, Artificial Sequence
  Synthetic
uagucuugcauacuucauaau

SEQ ID NO: 623258 - RNA, 22 nt, Artificial Sequence
  Synthetic
uuagucuugcauacuucauaau

SEQ ID NO: 623259 - RNA, 23 nt, Artificial Sequence
  Synthetic
uuuagucuugcauacuucauaau

SEQ ID NO: 623260 - RNA, 24 nt, Artificial Sequence
  Synthetic
auuuagucuugcauacuucauaau

SEQ ID NO: 623261 - RNA, 18 nt, Artificial Sequence
  Synthetic
auuucaaguuuucauaau

SEQ ID NO: 623262 - RNA, 19 nt, Artificial Sequence
  Synthetic
cauuucaaguuuucauaau

SEQ ID NO: 623263 - RNA, 20 nt, Artificial Sequence
  Synthetic
gcauuucaaguuuucauaau

SEQ ID NO: 623264 - RNA, 21 nt, Artificial Sequence
  Synthetic
ugcauuucaaguuuucauaau

SEQ ID NO: 623265 - RNA, 22 nt, Artificial Sequence
  Synthetic
uugcauuucaaguuuucauaau

SEQ ID NO: 623266 - RNA, 23 nt, Artificial Sequence
  Synthetic
guugcauuucaaguuuucauaau

SEQ ID NO: 623267 - RNA, 24 nt, Artificial Sequence
  Synthetic
uguugcauuucaaguuuucauaau

SEQ ID NO: 623268 - RNA, 18 nt, Artificial Sequence
  Synthetic
guuaaaauauaagauaau

SEQ ID NO: 623269 - RNA, 19 nt, Artificial Sequence
  Synthetic
aguuaaaauauaagauaau

SEQ ID NO: 623270 - RNA, 20 nt, Artificial Sequence
  Synthetic
aaguuaaaauauaagauaau

SEQ ID NO: 623271 - RNA, 21 nt, Artificial Sequence
  Synthetic
uaaguuaaaauauaagauaau

SEQ ID NO: 623272 - RNA, 22 nt, Artificial Sequence
  Synthetic
auaaguuaaaauauaagauaau

SEQ ID NO: 623273 - RNA, 23 nt, Artificial Sequence
  Synthetic
cauaaguuaaaauauaagauaau

SEQ ID NO: 623274 - RNA, 24 nt, Artificial Sequence
  Synthetic
gcauaaguuaaaauauaagauaau

SEQ ID NO: 623275 - RNA, 18 nt, Artificial Sequence
  Synthetic
uguucugugacagauaau

SEQ ID NO: 623276 - RNA, 19 nt, Artificial Sequence
  Synthetic
uuguucugugacagauaau

SEQ ID NO: 623277 - RNA, 20 nt, Artificial Sequence
  Synthetic
auuguucugugacagauaau

SEQ ID NO: 623278 - RNA, 21 nt, Artificial Sequence
  Synthetic
uauuguucugugacagauaau

SEQ ID NO: 623279 - RNA, 22 nt, Artificial Sequence
  Synthetic
auauuguucugugacagauaau

SEQ ID NO: 623280 - RNA, 23 nt, Artificial Sequence
  Synthetic
uauauuguucugugacagauaau

SEQ ID NO: 623281 - RNA, 24 nt, Artificial Sequence
  Synthetic
uuauauuguucugugacagauaau

SEQ ID NO: 623282 - RNA, 18 nt, Artificial Sequence
  Synthetic
aaaaucuuugcagauaau

SEQ ID NO: 623283 - RNA, 19 nt, Artificial Sequence
  Synthetic
uaaaaucuuugcagauaau

SEQ ID NO: 623284 - RNA, 20 nt, Artificial Sequence
  Synthetic
cuaaaaucuuugcagauaau

SEQ ID NO: 623285 - RNA, 21 nt, Artificial Sequence
  Synthetic
ccuaaaaucuuugcagauaau

SEQ ID NO: 623286 - RNA, 22 nt, Artificial Sequence
  Synthetic
uccuaaaaucuuugcagauaau

SEQ ID NO: 623287 - RNA, 23 nt, Artificial Sequence
  Synthetic
uuccuaaaaucuuugcagauaau

SEQ ID NO: 623288 - RNA, 24 nt, Artificial Sequence
  Synthetic
auuccuaaaaucuuugcagauaau

SEQ ID NO: 623289 - RNA, 18 nt, Artificial Sequence
  Synthetic
ugauaauuacuagauaau

SEQ ID NO: 623290 - RNA, 19 nt, Artificial Sequence
  Synthetic
augauaauuacuagauaau

SEQ ID NO: 623291 - RNA, 20 nt, Artificial Sequence
  Synthetic
uaugauaauuacuagauaau

SEQ ID NO: 623292 - RNA, 21 nt, Artificial Sequence
  Synthetic
auaugauaauuacuagauaau

SEQ ID NO: 623293 - RNA, 22 nt, Artificial Sequence
  Synthetic
uauaugauaauuacuagauaau

SEQ ID NO: 623294 - RNA, 23 nt, Artificial Sequence
  Synthetic
uuauaugauaauuacuagauaau

SEQ ID NO: 623295 - RNA, 24 nt, Artificial Sequence
  Synthetic
uuuauaugauaauuacuagauaau

SEQ ID NO: 623296 - RNA, 18 nt, Artificial Sequence
  Synthetic
ugaucuugccuagauaau

SEQ ID NO: 623297 - RNA, 19 nt, Artificial Sequence
  Synthetic
augaucuugccuagauaau

SEQ ID NO: 623298 - RNA, 20 nt, Artificial Sequence
  Synthetic
uaugaucuugccuagauaau

SEQ ID NO: 623299 - RNA, 21 nt, Artificial Sequence
  Synthetic
cuaugaucuugccuagauaau

SEQ ID NO: 623300 - RNA, 22 nt, Artificial Sequence
  Synthetic
ucuaugaucuugccuagauaau

SEQ ID NO: 623301 - RNA, 23 nt, Artificial Sequence
  Synthetic
uucuaugaucuugccuagauaau

SEQ ID NO: 623302 - RNA, 24 nt, Artificial Sequence
  Synthetic
cuucuaugaucuugccuagauaau

SEQ ID NO: 623303 - RNA, 18 nt, Artificial Sequence
  Synthetic
ucaauuaaaaaggauaau

SEQ ID NO: 623304 - RNA, 19 nt, Artificial Sequence
  Synthetic
cucaauuaaaaaggauaau

SEQ ID NO: 623305 - RNA, 20 nt, Artificial Sequence
  Synthetic
acucaauuaaaaaggauaau

SEQ ID NO: 623306 - RNA, 21 nt, Artificial Sequence
  Synthetic
uacucaauuaaaaaggauaau

SEQ ID NO: 623307 - RNA, 22 nt, Artificial Sequence
  Synthetic
auacucaauuaaaaaggauaau

SEQ ID NO: 623308 - RNA, 23 nt, Artificial Sequence
  Synthetic
aauacucaauuaaaaaggauaau

SEQ ID NO: 623309 - RNA, 24 nt, Artificial Sequence
  Synthetic
aaauacucaauuaaaaaggauaau

SEQ ID NO: 623310 - RNA, 18 nt, Artificial Sequence
  Synthetic
cuucuccuucaggauaau

SEQ ID NO: 623311 - RNA, 19 nt, Artificial Sequence
  Synthetic
ucuucuccuucaggauaau

SEQ ID NO: 623312 - RNA, 20 nt, Artificial Sequence
  Synthetic
aucuucuccuucaggauaau

SEQ ID NO: 623313 - RNA, 21 nt, Artificial Sequence
  Synthetic
caucuucuccuucaggauaau

SEQ ID NO: 623314 - RNA, 22 nt, Artificial Sequence
  Synthetic
ucaucuucuccuucaggauaau

SEQ ID NO: 623315 - RNA, 23 nt, Artificial Sequence
  Synthetic
uucaucuucuccuucaggauaau

SEQ ID NO: 623316 - RNA, 24 nt, Artificial Sequence
  Synthetic
auucaucuucuccuucaggauaau

SEQ ID NO: 623317 - RNA, 18 nt, Artificial Sequence
  Synthetic
uuaaauacaguggauaau

SEQ ID NO: 623318 - RNA, 19 nt, Artificial Sequence
  Synthetic
cuuaaauacaguggauaau

SEQ ID NO: 623319 - RNA, 20 nt, Artificial Sequence
  Synthetic
ccuuaaauacaguggauaau

SEQ ID NO: 623320 - RNA, 21 nt, Artificial Sequence
  Synthetic
accuuaaauacaguggauaau

SEQ ID NO: 623321 - RNA, 22 nt, Artificial Sequence
  Synthetic
aaccuuaaauacaguggauaau

SEQ ID NO: 623322 - RNA, 23 nt, Artificial Sequence
  Synthetic
aaaccuuaaauacaguggauaau

SEQ ID NO: 623323 - RNA, 24 nt, Artificial Sequence
  Synthetic
uaaaccuuaaauacaguggauaau

SEQ ID NO: 623324 - RNA, 18 nt, Artificial Sequence
  Synthetic
aaauuuuaaaaugauaau

SEQ ID NO: 623325 - RNA, 19 nt, Artificial Sequence
  Synthetic
uaaauuuuaaaaugauaau

SEQ ID NO: 623326 - RNA, 20 nt, Artificial Sequence
  Synthetic
guaaauuuuaaaaugauaau

SEQ ID NO: 623327 - RNA, 21 nt, Artificial Sequence
  Synthetic
aguaaauuuuaaaaugauaau

SEQ ID NO: 623328 - RNA, 22 nt, Artificial Sequence
  Synthetic
gaguaaauuuuaaaaugauaau

SEQ ID NO: 623329 - RNA, 23 nt, Artificial Sequence
  Synthetic
ggaguaaauuuuaaaaugauaau

SEQ ID NO: 623330 - RNA, 24 nt, Artificial Sequence
  Synthetic
aggaguaaauuuuaaaaugauaau

SEQ ID NO: 623331 - RNA, 18 nt, Artificial Sequence
  Synthetic
gacuaaguccaugauaau

SEQ ID NO: 623332 - RNA, 19 nt, Artificial Sequence
  Synthetic
ugacuaaguccaugauaau

SEQ ID NO: 623333 - RNA, 20 nt, Artificial Sequence
  Synthetic
cugacuaaguccaugauaau

SEQ ID NO: 623334 - RNA, 21 nt, Artificial Sequence
  Synthetic
ucugacuaaguccaugauaau

SEQ ID NO: 623335 - RNA, 22 nt, Artificial Sequence
  Synthetic
aucugacuaaguccaugauaau

SEQ ID NO: 623336 - RNA, 23 nt, Artificial Sequence
  Synthetic
caucugacuaaguccaugauaau

SEQ ID NO: 623337 - RNA, 24 nt, Artificial Sequence
  Synthetic
acaucugacuaaguccaugauaau

SEQ ID NO: 623338 - RNA, 18 nt, Artificial Sequence
  Synthetic
gaaaauaucuaugauaau

SEQ ID NO: 623339 - RNA, 19 nt, Artificial Sequence
  Synthetic
ugaaaauaucuaugauaau

SEQ ID NO: 623340 - RNA, 20 nt, Artificial Sequence
  Synthetic
augaaaauaucuaugauaau

SEQ ID NO: 623341 - RNA, 21 nt, Artificial Sequence
  Synthetic
caugaaaauaucuaugauaau

SEQ ID NO: 623342 - RNA, 22 nt, Artificial Sequence
  Synthetic
ucaugaaaauaucuaugauaau

SEQ ID NO: 623343 - RNA, 23 nt, Artificial Sequence
  Synthetic
gucaugaaaauaucuaugauaau

SEQ ID NO: 623344 - RNA, 24 nt, Artificial Sequence
  Synthetic
agucaugaaaauaucuaugauaau

SEQ ID NO: 623345 - RNA, 18 nt, Artificial Sequence
  Synthetic
ucagcccgugcugauaau

SEQ ID NO: 623346 - RNA, 19 nt, Artificial Sequence
  Synthetic
gucagcccgugcugauaau

SEQ ID NO: 623347 - RNA, 20 nt, Artificial Sequence
  Synthetic
ugucagcccgugcugauaau

SEQ ID NO: 623348 - RNA, 21 nt, Artificial Sequence
  Synthetic
augucagcccgugcugauaau

SEQ ID NO: 623349 - RNA, 22 nt, Artificial Sequence
  Synthetic
gaugucagcccgugcugauaau

SEQ ID NO: 623350 - RNA, 23 nt, Artificial Sequence
  Synthetic
ugaugucagcccgugcugauaau

SEQ ID NO: 623351 - RNA, 24 nt, Artificial Sequence
  Synthetic
cugaugucagcccgugcugauaau

SEQ ID NO: 623352 - RNA, 18 nt, Artificial Sequence
  Synthetic
uaaugagacucugauaau

SEQ ID NO: 623353 - RNA, 19 nt, Artificial Sequence
  Synthetic
cuaaugagacucugauaau

SEQ ID NO: 623354 - RNA, 20 nt, Artificial Sequence
  Synthetic
ucuaaugagacucugauaau

SEQ ID NO: 623355 - RNA, 21 nt, Artificial Sequence
  Synthetic
aucuaaugagacucugauaau

SEQ ID NO: 623356 - RNA, 22 nt, Artificial Sequence
  Synthetic
uaucuaaugagacucugauaau

SEQ ID NO: 623357 - RNA, 23 nt, Artificial Sequence
  Synthetic
auaucuaaugagacucugauaau

SEQ ID NO: 623358 - RNA, 24 nt, Artificial Sequence
  Synthetic
gauaucuaaugagacucugauaau

SEQ ID NO: 623359 - RNA, 18 nt, Artificial Sequence
  Synthetic
caugagcuuaaauauaau

SEQ ID NO: 623360 - RNA, 19 nt, Artificial Sequence
  Synthetic
ccaugagcuuaaauauaau

SEQ ID NO: 623361 - RNA, 20 nt, Artificial Sequence
  Synthetic
accaugagcuuaaauauaau

SEQ ID NO: 623362 - RNA, 21 nt, Artificial Sequence
  Synthetic
aaccaugagcuuaaauauaau

SEQ ID NO: 623363 - RNA, 22 nt, Artificial Sequence
  Synthetic
uaaccaugagcuuaaauauaau

SEQ ID NO: 623364 - RNA, 23 nt, Artificial Sequence
  Synthetic
guaaccaugagcuuaaauauaau

SEQ ID NO: 623365 - RNA, 24 nt, Artificial Sequence
  Synthetic
aguaaccaugagcuuaaauauaau

SEQ ID NO: 623366 - RNA, 18 nt, Artificial Sequence
  Synthetic
uucaucaaagaauauaau

SEQ ID NO: 623367 - RNA, 19 nt, Artificial Sequence
  Synthetic
uuucaucaaagaauauaau

SEQ ID NO: 623368 - RNA, 20 nt, Artificial Sequence
  Synthetic
uuuucaucaaagaauauaau

SEQ ID NO: 623369 - RNA, 21 nt, Artificial Sequence
  Synthetic
uuuuucaucaaagaauauaau

SEQ ID NO: 623370 - RNA, 22 nt, Artificial Sequence
  Synthetic
uuuuuucaucaaagaauauaau

SEQ ID NO: 623371 - RNA, 23 nt, Artificial Sequence
  Synthetic
auuuuuucaucaaagaauauaau

SEQ ID NO: 623372 - RNA, 24 nt, Artificial Sequence
  Synthetic
uauuuuuucaucaaagaauauaau

SEQ ID NO: 623373 - RNA, 18 nt, Artificial Sequence
  Synthetic
gacugaaaauaauauaau

SEQ ID NO: 623374 - RNA, 19 nt, Artificial Sequence
  Synthetic
ugacugaaaauaauauaau

SEQ ID NO: 623375 - RNA, 20 nt, Artificial Sequence
  Synthetic
augacugaaaauaauauaau

SEQ ID NO: 623376 - RNA, 21 nt, Artificial Sequence
  Synthetic
aaugacugaaaauaauauaau

SEQ ID NO: 623377 - RNA, 22 nt, Artificial Sequence
  Synthetic
aaaugacugaaaauaauauaau

SEQ ID NO: 623378 - RNA, 23 nt, Artificial Sequence
  Synthetic
uaaaugacugaaaauaauauaau

SEQ ID NO: 623379 - RNA, 24 nt, Artificial Sequence
  Synthetic
uuaaaugacugaaaauaauauaau

SEQ ID NO: 623380 - RNA, 18 nt, Artificial Sequence
  Synthetic
cagaagagcuaauauaau

SEQ ID NO: 623381 - RNA, 19 nt, Artificial Sequence
  Synthetic
ucagaagagcuaauauaau

SEQ ID NO: 623382 - RNA, 20 nt, Artificial Sequence
  Synthetic
uucagaagagcuaauauaau

SEQ ID NO: 623383 - RNA, 21 nt, Artificial Sequence
  Synthetic
cuucagaagagcuaauauaau

SEQ ID NO: 623384 - RNA, 22 nt, Artificial Sequence
  Synthetic
acuucagaagagcuaauauaau

SEQ ID NO: 623385 - RNA, 23 nt, Artificial Sequence
  Synthetic
aacuucagaagagcuaauauaau

SEQ ID NO: 623386 - RNA, 24 nt, Artificial Sequence
  Synthetic
uaacuucagaagagcuaauauaau

SEQ ID NO: 623387 - RNA, 18 nt, Artificial Sequence
  Synthetic
acacaccaaacauauaau

SEQ ID NO: 623388 - RNA, 19 nt, Artificial Sequence
  Synthetic
cacacaccaaacauauaau

SEQ ID NO: 623389 - RNA, 20 nt, Artificial Sequence
  Synthetic
acacacaccaaacauauaau

SEQ ID NO: 623390 - RNA, 21 nt, Artificial Sequence
  Synthetic
uacacacaccaaacauauaau

SEQ ID NO: 623391 - RNA, 22 nt, Artificial Sequence
  Synthetic
uuacacacaccaaacauauaau

SEQ ID NO: 623392 - RNA, 23 nt, Artificial Sequence
  Synthetic
auuacacacaccaaacauauaau

SEQ ID NO: 623393 - RNA, 24 nt, Artificial Sequence
  Synthetic
uauuacacacaccaaacauauaau

SEQ ID NO: 623394 - RNA, 18 nt, Artificial Sequence
  Synthetic
gguacuguaccauauaau

SEQ ID NO: 623395 - RNA, 19 nt, Artificial Sequence
  Synthetic
ugguacuguaccauauaau

SEQ ID NO: 623396 - RNA, 20 nt, Artificial Sequence
  Synthetic
uugguacuguaccauauaau

SEQ ID NO: 623397 - RNA, 21 nt, Artificial Sequence
  Synthetic
uuugguacuguaccauauaau

SEQ ID NO: 623398 - RNA, 22 nt, Artificial Sequence
  Synthetic
cuuugguacuguaccauauaau

SEQ ID NO: 623399 - RNA, 23 nt, Artificial Sequence
  Synthetic
ccuuugguacuguaccauauaau

SEQ ID NO: 623400 - RNA, 24 nt, Artificial Sequence
  Synthetic
uccuuugguacuguaccauauaau

SEQ ID NO: 623401 - RNA, 18 nt, Artificial Sequence
  Synthetic
acuaugagagcauauaau

SEQ ID NO: 623402 - RNA, 19 nt, Artificial Sequence
  Synthetic
aacuaugagagcauauaau

SEQ ID NO: 623403 - RNA, 20 nt, Artificial Sequence
  Synthetic
aaacuaugagagcauauaau

SEQ ID NO: 623404 - RNA, 21 nt, Artificial Sequence
  Synthetic
gaaacuaugagagcauauaau

SEQ ID NO: 623405 - RNA, 22 nt, Artificial Sequence
  Synthetic
ugaaacuaugagagcauauaau

SEQ ID NO: 623406 - RNA, 23 nt, Artificial Sequence
  Synthetic
cugaaacuaugagagcauauaau

SEQ ID NO: 623407 - RNA, 24 nt, Artificial Sequence
  Synthetic
ccugaaacuaugagagcauauaau

SEQ ID NO: 623408 - RNA, 18 nt, Artificial Sequence
  Synthetic
aucacacacauauauaau

SEQ ID NO: 623409 - RNA, 19 nt, Artificial Sequence
  Synthetic
aaucacacacauauauaau

SEQ ID NO: 623410 - RNA, 20 nt, Artificial Sequence
  Synthetic
uaaucacacacauauauaau

SEQ ID NO: 623411 - RNA, 21 nt, Artificial Sequence
  Synthetic
guaaucacacacauauauaau

SEQ ID NO: 623412 - RNA, 22 nt, Artificial Sequence
  Synthetic
uguaaucacacacauauauaau

SEQ ID NO: 623413 - RNA, 23 nt, Artificial Sequence
  Synthetic
auguaaucacacacauauauaau

SEQ ID NO: 623414 - RNA, 24 nt, Artificial Sequence
  Synthetic
uauguaaucacacacauauauaau

SEQ ID NO: 623415 - RNA, 18 nt, Artificial Sequence
  Synthetic
uuuccauucauauauaau

SEQ ID NO: 623416 - RNA, 19 nt, Artificial Sequence
  Synthetic
auuuccauucauauauaau

SEQ ID NO: 623417 - RNA, 20 nt, Artificial Sequence
  Synthetic
aauuuccauucauauauaau

SEQ ID NO: 623418 - RNA, 21 nt, Artificial Sequence
  Synthetic
uaauuuccauucauauauaau

SEQ ID NO: 623419 - RNA, 22 nt, Artificial Sequence
  Synthetic
uuaauuuccauucauauauaau

SEQ ID NO: 623420 - RNA, 23 nt, Artificial Sequence
  Synthetic
guuaauuuccauucauauauaau

SEQ ID NO: 623421 - RNA, 24 nt, Artificial Sequence
  Synthetic
uguuaauuuccauucauauauaau

SEQ ID NO: 623422 - RNA, 18 nt, Artificial Sequence
  Synthetic
caagauaccuacuauaau

SEQ ID NO: 623423 - RNA, 19 nt, Artificial Sequence
  Synthetic
ccaagauaccuacuauaau

SEQ ID NO: 623424 - RNA, 20 nt, Artificial Sequence
  Synthetic
gccaagauaccuacuauaau

SEQ ID NO: 623425 - RNA, 21 nt, Artificial Sequence
  Synthetic
ggccaagauaccuacuauaau

SEQ ID NO: 623426 - RNA, 22 nt, Artificial Sequence
  Synthetic
uggccaagauaccuacuauaau

SEQ ID NO: 623427 - RNA, 23 nt, Artificial Sequence
  Synthetic
auggccaagauaccuacuauaau

SEQ ID NO: 623428 - RNA, 24 nt, Artificial Sequence
  Synthetic
cauggccaagauaccuacuauaau

SEQ ID NO: 623429 - RNA, 18 nt, Artificial Sequence
  Synthetic
uuuagugugagcuauaau

SEQ ID NO: 623430 - RNA, 19 nt, Artificial Sequence
  Synthetic
auuuagugugagcuauaau

SEQ ID NO: 623431 - RNA, 20 nt, Artificial Sequence
  Synthetic
gauuuagugugagcuauaau

SEQ ID NO: 623432 - RNA, 21 nt, Artificial Sequence
  Synthetic
ugauuuagugugagcuauaau

SEQ ID NO: 623433 - RNA, 22 nt, Artificial Sequence
  Synthetic
augauuuagugugagcuauaau

SEQ ID NO: 623434 - RNA, 23 nt, Artificial Sequence
  Synthetic
aaugauuuagugugagcuauaau

SEQ ID NO: 623435 - RNA, 24 nt, Artificial Sequence
  Synthetic
uaaugauuuagugugagcuauaau

SEQ ID NO: 623436 - RNA, 18 nt, Artificial Sequence
  Synthetic
gucaugcgaaucuauaau

SEQ ID NO: 623437 - RNA, 19 nt, Artificial Sequence
  Synthetic
agucaugcgaaucuauaau

SEQ ID NO: 623438 - RNA, 20 nt, Artificial Sequence
  Synthetic
cagucaugcgaaucuauaau

SEQ ID NO: 623439 - RNA, 21 nt, Artificial Sequence
  Synthetic
acagucaugcgaaucuauaau

SEQ ID NO: 623440 - RNA, 22 nt, Artificial Sequence
  Synthetic
cacagucaugcgaaucuauaau

SEQ ID NO: 623441 - RNA, 23 nt, Artificial Sequence
  Synthetic
acacagucaugcgaaucuauaau

SEQ ID NO: 623442 - RNA, 24 nt, Artificial Sequence
  Synthetic
gacacagucaugcgaaucuauaau

SEQ ID NO: 623443 - RNA, 18 nt, Artificial Sequence
  Synthetic
ccuacuuaauucuauaau

SEQ ID NO: 623444 - RNA, 19 nt, Artificial Sequence
  Synthetic
gccuacuuaauucuauaau

SEQ ID NO: 623445 - RNA, 20 nt, Artificial Sequence
  Synthetic
ugccuacuuaauucuauaau

SEQ ID NO: 623446 - RNA, 21 nt, Artificial Sequence
  Synthetic
cugccuacuuaauucuauaau

SEQ ID NO: 623447 - RNA, 22 nt, Artificial Sequence
  Synthetic
acugccuacuuaauucuauaau

SEQ ID NO: 623448 - RNA, 23 nt, Artificial Sequence
  Synthetic
aacugccuacuuaauucuauaau

SEQ ID NO: 623449 - RNA, 24 nt, Artificial Sequence
  Synthetic
aaacugccuacuuaauucuauaau

SEQ ID NO: 623450 - RNA, 18 nt, Artificial Sequence
  Synthetic
auccaauaaaauuauaau

SEQ ID NO: 623451 - RNA, 19 nt, Artificial Sequence
  Synthetic
cauccaauaaaauuauaau

SEQ ID NO: 623452 - RNA, 20 nt, Artificial Sequence
  Synthetic
acauccaauaaaauuauaau

SEQ ID NO: 623453 - RNA, 21 nt, Artificial Sequence
  Synthetic
gacauccaauaaaauuauaau

SEQ ID NO: 623454 - RNA, 22 nt, Artificial Sequence
  Synthetic
ugacauccaauaaaauuauaau

SEQ ID NO: 623455 - RNA, 23 nt, Artificial Sequence
  Synthetic
augacauccaauaaaauuauaau

SEQ ID NO: 623456 - RNA, 24 nt, Artificial Sequence
  Synthetic
aaugacauccaauaaaauuauaau

SEQ ID NO: 623457 - RNA, 18 nt, Artificial Sequence
  Synthetic
gcuuacacagauuauaau

SEQ ID NO: 623458 - RNA, 19 nt, Artificial Sequence
  Synthetic
agcuuacacagauuauaau

SEQ ID NO: 623459 - RNA, 20 nt, Artificial Sequence
  Synthetic
cagcuuacacagauuauaau

SEQ ID NO: 623460 - RNA, 21 nt, Artificial Sequence
  Synthetic
ucagcuuacacagauuauaau

SEQ ID NO: 623461 - RNA, 22 nt, Artificial Sequence
  Synthetic
aucagcuuacacagauuauaau

SEQ ID NO: 623462 - RNA, 23 nt, Artificial Sequence
  Synthetic
gaucagcuuacacagauuauaau

SEQ ID NO: 623463 - RNA, 24 nt, Artificial Sequence
  Synthetic
ggaucagcuuacacagauuauaau

SEQ ID NO: 623464 - RNA, 18 nt, Artificial Sequence
  Synthetic
agagugauuaguuauaau

SEQ ID NO: 623465 - RNA, 19 nt, Artificial Sequence
  Synthetic
aagagugauuaguuauaau

SEQ ID NO: 623466 - RNA, 20 nt, Artificial Sequence
  Synthetic
aaagagugauuaguuauaau

SEQ ID NO: 623467 - RNA, 21 nt, Artificial Sequence
  Synthetic
uaaagagugauuaguuauaau

SEQ ID NO: 623468 - RNA, 22 nt, Artificial Sequence
  Synthetic
auaaagagugauuaguuauaau

SEQ ID NO: 623469 - RNA, 23 nt, Artificial Sequence
  Synthetic
uauaaagagugauuaguuauaau

SEQ ID NO: 623470 - RNA, 24 nt, Artificial Sequence
  Synthetic
uuauaaagagugauuaguuauaau

SEQ ID NO: 623471 - RNA, 18 nt, Artificial Sequence
  Synthetic
acuuauuaccuuuauaau

SEQ ID NO: 623472 - RNA, 19 nt, Artificial Sequence
  Synthetic
cacuuauuaccuuuauaau

SEQ ID NO: 623473 - RNA, 20 nt, Artificial Sequence
  Synthetic
gcacuuauuaccuuuauaau

SEQ ID NO: 623474 - RNA, 21 nt, Artificial Sequence
  Synthetic
agcacuuauuaccuuuauaau

SEQ ID NO: 623475 - RNA, 22 nt, Artificial Sequence
  Synthetic
gagcacuuauuaccuuuauaau

SEQ ID NO: 623476 - RNA, 23 nt, Artificial Sequence
  Synthetic
ugagcacuuauuaccuuuauaau

SEQ ID NO: 623477 - RNA, 24 nt, Artificial Sequence
  Synthetic
augagcacuuauuaccuuuauaau

SEQ ID NO: 623478 - RNA, 18 nt, Artificial Sequence
  Synthetic
gaagacaauuuuuauaau

SEQ ID NO: 623479 - RNA, 19 nt, Artificial Sequence
  Synthetic
agaagacaauuuuuauaau

SEQ ID NO: 623480 - RNA, 20 nt, Artificial Sequence
  Synthetic
cagaagacaauuuuuauaau

SEQ ID NO: 623481 - RNA, 21 nt, Artificial Sequence
  Synthetic
ucagaagacaauuuuuauaau

SEQ ID NO: 623482 - RNA, 22 nt, Artificial Sequence
  Synthetic
aucagaagacaauuuuuauaau

SEQ ID NO: 623483 - RNA, 23 nt, Artificial Sequence
  Synthetic
caucagaagacaauuuuuauaau

SEQ ID NO: 623484 - RNA, 24 nt, Artificial Sequence
  Synthetic
ucaucagaagacaauuuuuauaau

SEQ ID NO: 623485 - RNA, 18 nt, Artificial Sequence
  Synthetic
guuacaccuuuuuauaau

SEQ ID NO: 623486 - RNA, 19 nt, Artificial Sequence
  Synthetic
aguuacaccuuuuuauaau

SEQ ID NO: 623487 - RNA, 20 nt, Artificial Sequence
  Synthetic
gaguuacaccuuuuuauaau

SEQ ID NO: 623488 - RNA, 21 nt, Artificial Sequence
  Synthetic
ugaguuacaccuuuuuauaau

SEQ ID NO: 623489 - RNA, 22 nt, Artificial Sequence
  Synthetic
gugaguuacaccuuuuuauaau

SEQ ID NO: 623490 - RNA, 23 nt, Artificial Sequence
  Synthetic
agugaguuacaccuuuuuauaau

SEQ ID NO: 623491 - RNA, 24 nt, Artificial Sequence
  Synthetic
aagugaguuacaccuuuuuauaau

SEQ ID NO: 623492 - RNA, 18 nt, Artificial Sequence
  Synthetic
ggauaaacuaaaacuaau

SEQ ID NO: 623493 - RNA, 19 nt, Artificial Sequence
  Synthetic
cggauaaacuaaaacuaau

SEQ ID NO: 623494 - RNA, 20 nt, Artificial Sequence
  Synthetic
acggauaaacuaaaacuaau

SEQ ID NO: 623495 - RNA, 21 nt, Artificial Sequence
  Synthetic
cacggauaaacuaaaacuaau

SEQ ID NO: 623496 - RNA, 22 nt, Artificial Sequence
  Synthetic
ccacggauaaacuaaaacuaau

SEQ ID NO: 623497 - RNA, 23 nt, Artificial Sequence
  Synthetic
uccacggauaaacuaaaacuaau

SEQ ID NO: 623498 - RNA, 24 nt, Artificial Sequence
  Synthetic
auccacggauaaacuaaaacuaau

SEQ ID NO: 623499 - RNA, 18 nt, Artificial Sequence
  Synthetic
gaggcaaaaugaacuaau

SEQ ID NO: 623500 - RNA, 19 nt, Artificial Sequence
  Synthetic
ugaggcaaaaugaacuaau

SEQ ID NO: 623501 - RNA, 20 nt, Artificial Sequence
  Synthetic
augaggcaaaaugaacuaau

SEQ ID NO: 623502 - RNA, 21 nt, Artificial Sequence
  Synthetic
caugaggcaaaaugaacuaau

SEQ ID NO: 623503 - RNA, 22 nt, Artificial Sequence
  Synthetic
ucaugaggcaaaaugaacuaau

SEQ ID NO: 623504 - RNA, 23 nt, Artificial Sequence
  Synthetic
aucaugaggcaaaaugaacuaau

SEQ ID NO: 623505 - RNA, 24 nt, Artificial Sequence
  Synthetic
gaucaugaggcaaaaugaacuaau

SEQ ID NO: 623506 - RNA, 18 nt, Artificial Sequence
  Synthetic
ccgguauauaccacuaau

SEQ ID NO: 623507 - RNA, 19 nt, Artificial Sequence
  Synthetic
gccgguauauaccacuaau

SEQ ID NO: 623508 - RNA, 20 nt, Artificial Sequence
  Synthetic
agccgguauauaccacuaau

SEQ ID NO: 623509 - RNA, 21 nt, Artificial Sequence
  Synthetic
uagccgguauauaccacuaau

SEQ ID NO: 623510 - RNA, 22 nt, Artificial Sequence
  Synthetic
guagccgguauauaccacuaau

SEQ ID NO: 623511 - RNA, 23 nt, Artificial Sequence
  Synthetic
aguagccgguauauaccacuaau

SEQ ID NO: 623512 - RNA, 24 nt, Artificial Sequence
  Synthetic
aaguagccgguauauaccacuaau

SEQ ID NO: 623513 - RNA, 18 nt, Artificial Sequence
  Synthetic
uuaguaacgugcacuaau

SEQ ID NO: 623514 - RNA, 19 nt, Artificial Sequence
  Synthetic
auuaguaacgugcacuaau

SEQ ID NO: 623515 - RNA, 20 nt, Artificial Sequence
  Synthetic
uauuaguaacgugcacuaau

SEQ ID NO: 623516 - RNA, 21 nt, Artificial Sequence
  Synthetic
cuauuaguaacgugcacuaau

SEQ ID NO: 623517 - RNA, 22 nt, Artificial Sequence
  Synthetic
ucuauuaguaacgugcacuaau

SEQ ID NO: 623518 - RNA, 23 nt, Artificial Sequence
  Synthetic
uucuauuaguaacgugcacuaau

SEQ ID NO: 623519 - RNA, 24 nt, Artificial Sequence
  Synthetic
auucuauuaguaacgugcacuaau

SEQ ID NO: 623520 - RNA, 18 nt, Artificial Sequence
  Synthetic
uaaauaaguaucacuaau

SEQ ID NO: 623521 - RNA, 19 nt, Artificial Sequence
  Synthetic
uuaaauaaguaucacuaau

SEQ ID NO: 623522 - RNA, 20 nt, Artificial Sequence
  Synthetic
auuaaauaaguaucacuaau

SEQ ID NO: 623523 - RNA, 21 nt, Artificial Sequence
  Synthetic
aauuaaauaaguaucacuaau

SEQ ID NO: 623524 - RNA, 22 nt, Artificial Sequence
  Synthetic
uaauuaaauaaguaucacuaau

SEQ ID NO: 623525 - RNA, 23 nt, Artificial Sequence
  Synthetic
cuaauuaaauaaguaucacuaau

SEQ ID NO: 623526 - RNA, 24 nt, Artificial Sequence
  Synthetic
acuaauuaaauaaguaucacuaau

SEQ ID NO: 623527 - RNA, 18 nt, Artificial Sequence
  Synthetic
caaaauauuaucacuaau

SEQ ID NO: 623528 - RNA, 19 nt, Artificial Sequence
  Synthetic
acaaaauauuaucacuaau

SEQ ID NO: 623529 - RNA, 20 nt, Artificial Sequence
  Synthetic
uacaaaauauuaucacuaau

SEQ ID NO: 623530 - RNA, 21 nt, Artificial Sequence
  Synthetic
cuacaaaauauuaucacuaau

SEQ ID NO: 623531 - RNA, 22 nt, Artificial Sequence
  Synthetic
gcuacaaaauauuaucacuaau

SEQ ID NO: 623532 - RNA, 23 nt, Artificial Sequence
  Synthetic
ugcuacaaaauauuaucacuaau

SEQ ID NO: 623533 - RNA, 24 nt, Artificial Sequence
  Synthetic
uugcuacaaaauauuaucacuaau

SEQ ID NO: 623534 - RNA, 18 nt, Artificial Sequence
  Synthetic
gcaugaaaaccgacuaau

SEQ ID NO: 623535 - RNA, 19 nt, Artificial Sequence
  Synthetic
agcaugaaaaccgacuaau

SEQ ID NO: 623536 - RNA, 20 nt, Artificial Sequence
  Synthetic
cagcaugaaaaccgacuaau

SEQ ID NO: 623537 - RNA, 21 nt, Artificial Sequence
  Synthetic
gcagcaugaaaaccgacuaau

SEQ ID NO: 623538 - RNA, 22 nt, Artificial Sequence
  Synthetic
agcagcaugaaaaccgacuaau

SEQ ID NO: 623539 - RNA, 23 nt, Artificial Sequence
  Synthetic
cagcagcaugaaaaccgacuaau

SEQ ID NO: 623540 - RNA, 24 nt, Artificial Sequence
  Synthetic
ucagcagcaugaaaaccgacuaau

SEQ ID NO: 623541 - RNA, 18 nt, Artificial Sequence
  Synthetic
aucacagaaaugacuaau

SEQ ID NO: 623542 - RNA, 19 nt, Artificial Sequence
  Synthetic
uaucacagaaaugacuaau

SEQ ID NO: 623543 - RNA, 20 nt, Artificial Sequence
  Synthetic
cuaucacagaaaugacuaau

SEQ ID NO: 623544 - RNA, 21 nt, Artificial Sequence
  Synthetic
gcuaucacagaaaugacuaau

SEQ ID NO: 623545 - RNA, 22 nt, Artificial Sequence
  Synthetic
ugcuaucacagaaaugacuaau

SEQ ID NO: 623546 - RNA, 23 nt, Artificial Sequence
  Synthetic
cugcuaucacagaaaugacuaau

SEQ ID NO: 623547 - RNA, 24 nt, Artificial Sequence
  Synthetic
ucugcuaucacagaaaugacuaau

SEQ ID NO: 623548 - RNA, 18 nt, Artificial Sequence
  Synthetic
uagccuaaccugacuaau

SEQ ID NO: 623549 - RNA, 19 nt, Artificial Sequence
  Synthetic
auagccuaaccugacuaau

SEQ ID NO: 623550 - RNA, 20 nt, Artificial Sequence
  Synthetic
cauagccuaaccugacuaau

SEQ ID NO: 623551 - RNA, 21 nt, Artificial Sequence
  Synthetic
gcauagccuaaccugacuaau

SEQ ID NO: 623552 - RNA, 22 nt, Artificial Sequence
  Synthetic
agcauagccuaaccugacuaau

SEQ ID NO: 623553 - RNA, 23 nt, Artificial Sequence
  Synthetic
uagcauagccuaaccugacuaau

SEQ ID NO: 623554 - RNA, 24 nt, Artificial Sequence
  Synthetic
uuagcauagccuaaccugacuaau

SEQ ID NO: 623555 - RNA, 18 nt, Artificial Sequence
  Synthetic
cugcuuauagauacuaau

SEQ ID NO: 623556 - RNA, 19 nt, Artificial Sequence
  Synthetic
ucugcuuauagauacuaau

SEQ ID NO: 623557 - RNA, 20 nt, Artificial Sequence
  Synthetic
aucugcuuauagauacuaau

SEQ ID NO: 623558 - RNA, 21 nt, Artificial Sequence
  Synthetic
caucugcuuauagauacuaau

SEQ ID NO: 623559 - RNA, 22 nt, Artificial Sequence
  Synthetic
ucaucugcuuauagauacuaau

SEQ ID NO: 623560 - RNA, 23 nt, Artificial Sequence
  Synthetic
gucaucugcuuauagauacuaau

SEQ ID NO: 623561 - RNA, 24 nt, Artificial Sequence
  Synthetic
agucaucugcuuauagauacuaau

SEQ ID NO: 623562 - RNA, 18 nt, Artificial Sequence
  Synthetic
auaugcauuuauacuaau

SEQ ID NO: 623563 - RNA, 19 nt, Artificial Sequence
  Synthetic
cauaugcauuuauacuaau

SEQ ID NO: 623564 - RNA, 20 nt, Artificial Sequence
  Synthetic
ccauaugcauuuauacuaau

SEQ ID NO: 623565 - RNA, 21 nt, Artificial Sequence
  Synthetic
gccauaugcauuuauacuaau

SEQ ID NO: 623566 - RNA, 22 nt, Artificial Sequence
  Synthetic
ugccauaugcauuuauacuaau

SEQ ID NO: 623567 - RNA, 23 nt, Artificial Sequence
  Synthetic
cugccauaugcauuuauacuaau

SEQ ID NO: 623568 - RNA, 24 nt, Artificial Sequence
  Synthetic
acugccauaugcauuuauacuaau

SEQ ID NO: 623569 - RNA, 18 nt, Artificial Sequence
  Synthetic
uugcaauagccuacuaau

SEQ ID NO: 623570 - RNA, 19 nt, Artificial Sequence
  Synthetic
auugcaauagccuacuaau

SEQ ID NO: 623571 - RNA, 20 nt, Artificial Sequence
  Synthetic
uauugcaauagccuacuaau

SEQ ID NO: 623572 - RNA, 21 nt, Artificial Sequence
  Synthetic
auauugcaauagccuacuaau

SEQ ID NO: 623573 - RNA, 22 nt, Artificial Sequence
  Synthetic
aauauugcaauagccuacuaau

SEQ ID NO: 623574 - RNA, 23 nt, Artificial Sequence
  Synthetic
aaauauugcaauagccuacuaau

SEQ ID NO: 623575 - RNA, 24 nt, Artificial Sequence
  Synthetic
gaaauauugcaauagccuacuaau

SEQ ID NO: 623576 - RNA, 18 nt, Artificial Sequence
  Synthetic
uuuaaguauucuacuaau

SEQ ID NO: 623577 - RNA, 19 nt, Artificial Sequence
  Synthetic
uuuuaaguauucuacuaau

SEQ ID NO: 623578 - RNA, 20 nt, Artificial Sequence
  Synthetic
auuuuaaguauucuacuaau

SEQ ID NO: 623579 - RNA, 21 nt, Artificial Sequence
  Synthetic
uauuuuaaguauucuacuaau

SEQ ID NO: 623580 - RNA, 22 nt, Artificial Sequence
  Synthetic
auauuuuaaguauucuacuaau

SEQ ID NO: 623581 - RNA, 23 nt, Artificial Sequence
  Synthetic
gauauuuuaaguauucuacuaau

SEQ ID NO: 623582 - RNA, 24 nt, Artificial Sequence
  Synthetic
agauauuuuaaguauucuacuaau

SEQ ID NO: 623583 - RNA, 18 nt, Artificial Sequence
  Synthetic
auugaguagauuacuaau

SEQ ID NO: 623584 - RNA, 19 nt, Artificial Sequence
  Synthetic
uauugaguagauuacuaau

SEQ ID NO: 623585 - RNA, 20 nt, Artificial Sequence
  Synthetic
uuauugaguagauuacuaau

SEQ ID NO: 623586 - RNA, 21 nt, Artificial Sequence
  Synthetic
uuuauugaguagauuacuaau

SEQ ID NO: 623587 - RNA, 22 nt, Artificial Sequence
  Synthetic
auuuauugaguagauuacuaau

SEQ ID NO: 623588 - RNA, 23 nt, Artificial Sequence
  Synthetic
uauuuauugaguagauuacuaau

SEQ ID NO: 623589 - RNA, 24 nt, Artificial Sequence
  Synthetic
guauuuauugaguagauuacuaau

SEQ ID NO: 623590 - RNA, 18 nt, Artificial Sequence
  Synthetic
auuuauugaacaccuaau

SEQ ID NO: 623591 - RNA, 19 nt, Artificial Sequence
  Synthetic
uauuuauugaacaccuaau

SEQ ID NO: 623592 - RNA, 20 nt, Artificial Sequence
  Synthetic
auauuuauugaacaccuaau

SEQ ID NO: 623593 - RNA, 21 nt, Artificial Sequence
  Synthetic
aauauuuauugaacaccuaau

SEQ ID NO: 623594 - RNA, 22 nt, Artificial Sequence
  Synthetic
aaauauuuauugaacaccuaau

SEQ ID NO: 623595 - RNA, 23 nt, Artificial Sequence
  Synthetic
caaauauuuauugaacaccuaau

SEQ ID NO: 623596 - RNA, 24 nt, Artificial Sequence
  Synthetic
acaaauauuuauugaacaccuaau

SEQ ID NO: 623597 - RNA, 18 nt, Artificial Sequence
  Synthetic
aauuaauaaugaccuaau

SEQ ID NO: 623598 - RNA, 19 nt, Artificial Sequence
  Synthetic
caauuaauaaugaccuaau

SEQ ID NO: 623599 - RNA, 20 nt, Artificial Sequence
  Synthetic
ucaauuaauaaugaccuaau

SEQ ID NO: 623600 - RNA, 21 nt, Artificial Sequence
  Synthetic
cucaauuaauaaugaccuaau

SEQ ID NO: 623601 - RNA, 22 nt, Artificial Sequence
  Synthetic
acucaauuaauaaugaccuaau

SEQ ID NO: 623602 - RNA, 23 nt, Artificial Sequence
  Synthetic
aacucaauuaauaaugaccuaau

SEQ ID NO: 623603 - RNA, 24 nt, Artificial Sequence
  Synthetic
gaacucaauuaauaaugaccuaau

SEQ ID NO: 623604 - RNA, 18 nt, Artificial Sequence
  Synthetic
caaauugcaaucccuaau

SEQ ID NO: 623605 - RNA, 19 nt, Artificial Sequence
  Synthetic
acaaauugcaaucccuaau

SEQ ID NO: 623606 - RNA, 20 nt, Artificial Sequence
  Synthetic
gacaaauugcaaucccuaau

SEQ ID NO: 623607 - RNA, 21 nt, Artificial Sequence
  Synthetic
agacaaauugcaaucccuaau

SEQ ID NO: 623608 - RNA, 22 nt, Artificial Sequence
  Synthetic
cagacaaauugcaaucccuaau

SEQ ID NO: 623609 - RNA, 23 nt, Artificial Sequence
  Synthetic
gcagacaaauugcaaucccuaau

SEQ ID NO: 623610 - RNA, 24 nt, Artificial Sequence
  Synthetic
ggcagacaaauugcaaucccuaau

SEQ ID NO: 623611 - RNA, 18 nt, Artificial Sequence
  Synthetic
uaucuccaauucccuaau

SEQ ID NO: 623612 - RNA, 19 nt, Artificial Sequence
  Synthetic
guaucuccaauucccuaau

SEQ ID NO: 623613 - RNA, 20 nt, Artificial Sequence
  Synthetic
uguaucuccaauucccuaau

SEQ ID NO: 623614 - RNA, 21 nt, Artificial Sequence
  Synthetic
auguaucuccaauucccuaau

SEQ ID NO: 623615 - RNA, 22 nt, Artificial Sequence
  Synthetic
cauguaucuccaauucccuaau

SEQ ID NO: 623616 - RNA, 23 nt, Artificial Sequence
  Synthetic
ucauguaucuccaauucccuaau

SEQ ID NO: 623617 - RNA, 24 nt, Artificial Sequence
  Synthetic
uucauguaucuccaauucccuaau

SEQ ID NO: 623618 - RNA, 18 nt, Artificial Sequence
  Synthetic
gucuggcuaauuccuaau

SEQ ID NO: 623619 - RNA, 19 nt, Artificial Sequence
  Synthetic
ugucuggcuaauuccuaau

SEQ ID NO: 623620 - RNA, 20 nt, Artificial Sequence
  Synthetic
augucuggcuaauuccuaau

SEQ ID NO: 623621 - RNA, 21 nt, Artificial Sequence
  Synthetic
aaugucuggcuaauuccuaau

SEQ ID NO: 623622 - RNA, 22 nt, Artificial Sequence
  Synthetic
aaaugucuggcuaauuccuaau

SEQ ID NO: 623623 - RNA, 23 nt, Artificial Sequence
  Synthetic
aaaaugucuggcuaauuccuaau

SEQ ID NO: 623624 - RNA, 24 nt, Artificial Sequence
  Synthetic
uaaaaugucuggcuaauuccuaau

SEQ ID NO: 623625 - RNA, 18 nt, Artificial Sequence
  Synthetic
agucuagugcuuccuaau

SEQ ID NO: 623626 - RNA, 19 nt, Artificial Sequence
  Synthetic
cagucuagugcuuccuaau

SEQ ID NO: 623627 - RNA, 20 nt, Artificial Sequence
  Synthetic
ccagucuagugcuuccuaau

SEQ ID NO: 623628 - RNA, 21 nt, Artificial Sequence
  Synthetic
uccagucuagugcuuccuaau

SEQ ID NO: 623629 - RNA, 22 nt, Artificial Sequence
  Synthetic
auccagucuagugcuuccuaau

SEQ ID NO: 623630 - RNA, 23 nt, Artificial Sequence
  Synthetic
uauccagucuagugcuuccuaau

SEQ ID NO: 623631 - RNA, 24 nt, Artificial Sequence
  Synthetic
auauccagucuagugcuuccuaau

SEQ ID NO: 623632 - RNA, 18 nt, Artificial Sequence
  Synthetic
gagguugaaaaagcuaau

SEQ ID NO: 623633 - RNA, 19 nt, Artificial Sequence
  Synthetic
ugagguugaaaaagcuaau

SEQ ID NO: 623634 - RNA, 20 nt, Artificial Sequence
  Synthetic
cugagguugaaaaagcuaau

SEQ ID NO: 623635 - RNA, 21 nt, Artificial Sequence
  Synthetic
ccugagguugaaaaagcuaau

SEQ ID NO: 623636 - RNA, 22 nt, Artificial Sequence
  Synthetic
accugagguugaaaaagcuaau

SEQ ID NO: 623637 - RNA, 23 nt, Artificial Sequence
  Synthetic
caccugagguugaaaaagcuaau

SEQ ID NO: 623638 - RNA, 24 nt, Artificial Sequence
  Synthetic
ccaccugagguugaaaaagcuaau

SEQ ID NO: 623639 - RNA, 18 nt, Artificial Sequence
  Synthetic
aaagcugaaauagcuaau

SEQ ID NO: 623640 - RNA, 19 nt, Artificial Sequence
  Synthetic
caaagcugaaauagcuaau

SEQ ID NO: 623641 - RNA, 20 nt, Artificial Sequence
  Synthetic
ccaaagcugaaauagcuaau

SEQ ID NO: 623642 - RNA, 21 nt, Artificial Sequence
  Synthetic
accaaagcugaaauagcuaau

SEQ ID NO: 623643 - RNA, 22 nt, Artificial Sequence
  Synthetic
aaccaaagcugaaauagcuaau

SEQ ID NO: 623644 - RNA, 23 nt, Artificial Sequence
  Synthetic
aaaccaaagcugaaauagcuaau

SEQ ID NO: 623645 - RNA, 24 nt, Artificial Sequence
  Synthetic
aaaaccaaagcugaaauagcuaau

SEQ ID NO: 623646 - RNA, 18 nt, Artificial Sequence
  Synthetic
uguacuucaguagcuaau

SEQ ID NO: 623647 - RNA, 19 nt, Artificial Sequence
  Synthetic
cuguacuucaguagcuaau

SEQ ID NO: 623648 - RNA, 20 nt, Artificial Sequence
  Synthetic
ccuguacuucaguagcuaau

SEQ ID NO: 623649 - RNA, 21 nt, Artificial Sequence
  Synthetic
gccuguacuucaguagcuaau

SEQ ID NO: 623650 - RNA, 22 nt, Artificial Sequence
  Synthetic
ugccuguacuucaguagcuaau

SEQ ID NO: 623651 - RNA, 23 nt, Artificial Sequence
  Synthetic
cugccuguacuucaguagcuaau

SEQ ID NO: 623652 - RNA, 24 nt, Artificial Sequence
  Synthetic
ucugccuguacuucaguagcuaau

SEQ ID NO: 623653 - RNA, 18 nt, Artificial Sequence
  Synthetic
aacucuagcauggcuaau

SEQ ID NO: 623654 - RNA, 19 nt, Artificial Sequence
  Synthetic
aaacucuagcauggcuaau

SEQ ID NO: 623655 - RNA, 20 nt, Artificial Sequence
  Synthetic
aaaacucuagcauggcuaau

SEQ ID NO: 623656 - RNA, 21 nt, Artificial Sequence
  Synthetic
caaaacucuagcauggcuaau

SEQ ID NO: 623657 - RNA, 22 nt, Artificial Sequence
  Synthetic
gcaaaacucuagcauggcuaau

SEQ ID NO: 623658 - RNA, 23 nt, Artificial Sequence
  Synthetic
ugcaaaacucuagcauggcuaau

SEQ ID NO: 623659 - RNA, 24 nt, Artificial Sequence
  Synthetic
uugcaaaacucuagcauggcuaau

SEQ ID NO: 623660 - RNA, 18 nt, Artificial Sequence
  Synthetic
aggcuuucacuggcuaau

SEQ ID NO: 623661 - RNA, 19 nt, Artificial Sequence
  Synthetic
gaggcuuucacuggcuaau

SEQ ID NO: 623662 - RNA, 20 nt, Artificial Sequence
  Synthetic
agaggcuuucacuggcuaau

SEQ ID NO: 623663 - RNA, 21 nt, Artificial Sequence
  Synthetic
uagaggcuuucacuggcuaau

SEQ ID NO: 623664 - RNA, 22 nt, Artificial Sequence
  Synthetic
uuagaggcuuucacuggcuaau

SEQ ID NO: 623665 - RNA, 23 nt, Artificial Sequence
  Synthetic
guuagaggcuuucacuggcuaau

SEQ ID NO: 623666 - RNA, 24 nt, Artificial Sequence
  Synthetic
uguuagaggcuuucacuggcuaau

SEQ ID NO: 623667 - RNA, 18 nt, Artificial Sequence
  Synthetic
ggagaaaaacaugcuaau

SEQ ID NO: 623668 - RNA, 19 nt, Artificial Sequence
  Synthetic
aggagaaaaacaugcuaau

SEQ ID NO: 623669 - RNA, 20 nt, Artificial Sequence
  Synthetic
caggagaaaaacaugcuaau

SEQ ID NO: 623670 - RNA, 21 nt, Artificial Sequence
  Synthetic
acaggagaaaaacaugcuaau

SEQ ID NO: 623671 - RNA, 22 nt, Artificial Sequence
  Synthetic
aacaggagaaaaacaugcuaau

SEQ ID NO: 623672 - RNA, 23 nt, Artificial Sequence
  Synthetic
aaacaggagaaaaacaugcuaau

SEQ ID NO: 623673 - RNA, 24 nt, Artificial Sequence
  Synthetic
aaaacaggagaaaaacaugcuaau

SEQ ID NO: 623674 - RNA, 18 nt, Artificial Sequence
  Synthetic
acugugcuggcugcuaau

SEQ ID NO: 623675 - RNA, 19 nt, Artificial Sequence
  Synthetic
cacugugcuggcugcuaau

SEQ ID NO: 623676 - RNA, 20 nt, Artificial Sequence
  Synthetic
gcacugugcuggcugcuaau

SEQ ID NO: 623677 - RNA, 21 nt, Artificial Sequence
  Synthetic
ggcacugugcuggcugcuaau

SEQ ID NO: 623678 - RNA, 22 nt, Artificial Sequence
  Synthetic
aggcacugugcuggcugcuaau

SEQ ID NO: 623679 - RNA, 23 nt, Artificial Sequence
  Synthetic
aaggcacugugcuggcugcuaau

SEQ ID NO: 623680 - RNA, 24 nt, Artificial Sequence
  Synthetic
caaggcacugugcuggcugcuaau

SEQ ID NO: 623681 - RNA, 18 nt, Artificial Sequence
  Synthetic
uuagccaagucugcuaau

SEQ ID NO: 623682 - RNA, 19 nt, Artificial Sequence
  Synthetic
auuagccaagucugcuaau

SEQ ID NO: 623683 - RNA, 20 nt, Artificial Sequence
  Synthetic
aauuagccaagucugcuaau

SEQ ID NO: 623684 - RNA, 21 nt, Artificial Sequence
  Synthetic
aaauuagccaagucugcuaau

SEQ ID NO: 623685 - RNA, 22 nt, Artificial Sequence
  Synthetic
gaaauuagccaagucugcuaau

SEQ ID NO: 623686 - RNA, 23 nt, Artificial Sequence
  Synthetic
agaaauuagccaagucugcuaau

SEQ ID NO: 623687 - RNA, 24 nt, Artificial Sequence
  Synthetic
aagaaauuagccaagucugcuaau

SEQ ID NO: 623688 - RNA, 18 nt, Artificial Sequence
  Synthetic
auaggaccaagugcuaau

SEQ ID NO: 623689 - RNA, 19 nt, Artificial Sequence
  Synthetic
gauaggaccaagugcuaau

SEQ ID NO: 623690 - RNA, 20 nt, Artificial Sequence
  Synthetic
agauaggaccaagugcuaau

SEQ ID NO: 623691 - RNA, 21 nt, Artificial Sequence
  Synthetic
aagauaggaccaagugcuaau

SEQ ID NO: 623692 - RNA, 22 nt, Artificial Sequence
  Synthetic
uaagauaggaccaagugcuaau

SEQ ID NO: 623693 - RNA, 23 nt, Artificial Sequence
  Synthetic
auaagauaggaccaagugcuaau

SEQ ID NO: 623694 - RNA, 24 nt, Artificial Sequence
  Synthetic
gauaagauaggaccaagugcuaau

SEQ ID NO: 623695 - RNA, 18 nt, Artificial Sequence
  Synthetic
aaagaauuucuugcuaau

SEQ ID NO: 623696 - RNA, 19 nt, Artificial Sequence
  Synthetic
aaaagaauuucuugcuaau

SEQ ID NO: 623697 - RNA, 20 nt, Artificial Sequence
  Synthetic
uaaaagaauuucuugcuaau

SEQ ID NO: 623698 - RNA, 21 nt, Artificial Sequence
  Synthetic
uuaaaagaauuucuugcuaau

SEQ ID NO: 623699 - RNA, 22 nt, Artificial Sequence
  Synthetic
guuaaaagaauuucuugcuaau

SEQ ID NO: 623700 - RNA, 23 nt, Artificial Sequence
  Synthetic
gguuaaaagaauuucuugcuaau

SEQ ID NO: 623701 - RNA, 24 nt, Artificial Sequence
  Synthetic
ugguuaaaagaauuucuugcuaau

SEQ ID NO: 623702 - RNA, 18 nt, Artificial Sequence
  Synthetic
auuagucauguugcuaau

SEQ ID NO: 623703 - RNA, 19 nt, Artificial Sequence
  Synthetic
cauuagucauguugcuaau

SEQ ID NO: 623704 - RNA, 20 nt, Artificial Sequence
  Synthetic
acauuagucauguugcuaau

SEQ ID NO: 623705 - RNA, 21 nt, Artificial Sequence
  Synthetic
aacauuagucauguugcuaau

SEQ ID NO: 623706 - RNA, 22 nt, Artificial Sequence
  Synthetic
aaacauuagucauguugcuaau

SEQ ID NO: 623707 - RNA, 23 nt, Artificial Sequence
  Synthetic
aaaacauuagucauguugcuaau

SEQ ID NO: 623708 - RNA, 24 nt, Artificial Sequence
  Synthetic
gaaaacauuagucauguugcuaau

SEQ ID NO: 623709 - RNA, 18 nt, Artificial Sequence
  Synthetic
acauucauaacaucuaau

SEQ ID NO: 623710 - RNA, 19 nt, Artificial Sequence
  Synthetic
uacauucauaacaucuaau

SEQ ID NO: 623711 - RNA, 20 nt, Artificial Sequence
  Synthetic
uuacauucauaacaucuaau

SEQ ID NO: 623712 - RNA, 21 nt, Artificial Sequence
  Synthetic
auuacauucauaacaucuaau

SEQ ID NO: 623713 - RNA, 22 nt, Artificial Sequence
  Synthetic
cauuacauucauaacaucuaau

SEQ ID NO: 623714 - RNA, 23 nt, Artificial Sequence
  Synthetic
acauuacauucauaacaucuaau

SEQ ID NO: 623715 - RNA, 24 nt, Artificial Sequence
  Synthetic
cacauuacauucauaacaucuaau

SEQ ID NO: 623716 - RNA, 18 nt, Artificial Sequence
  Synthetic
ccauuauuaugaucuaau

SEQ ID NO: 623717 - RNA, 19 nt, Artificial Sequence
  Synthetic
accauuauuaugaucuaau

SEQ ID NO: 623718 - RNA, 20 nt, Artificial Sequence
  Synthetic
aaccauuauuaugaucuaau

SEQ ID NO: 623719 - RNA, 21 nt, Artificial Sequence
  Synthetic
caaccauuauuaugaucuaau

SEQ ID NO: 623720 - RNA, 22 nt, Artificial Sequence
  Synthetic
gcaaccauuauuaugaucuaau

SEQ ID NO: 623721 - RNA, 23 nt, Artificial Sequence
  Synthetic
ugcaaccauuauuaugaucuaau

SEQ ID NO: 623722 - RNA, 24 nt, Artificial Sequence
  Synthetic
gugcaaccauuauuaugaucuaau

SEQ ID NO: 623723 - RNA, 18 nt, Artificial Sequence
  Synthetic
uuuagacaaauaucuaau

SEQ ID NO: 623724 - RNA, 19 nt, Artificial Sequence
  Synthetic
auuuagacaaauaucuaau

SEQ ID NO: 623725 - RNA, 20 nt, Artificial Sequence
  Synthetic
uauuuagacaaauaucuaau

SEQ ID NO: 623726 - RNA, 21 nt, Artificial Sequence
  Synthetic
uuauuuagacaaauaucuaau

SEQ ID NO: 623727 - RNA, 22 nt, Artificial Sequence
  Synthetic
uuuauuuagacaaauaucuaau

SEQ ID NO: 623728 - RNA, 23 nt, Artificial Sequence
  Synthetic
auuuauuuagacaaauaucuaau

SEQ ID NO: 623729 - RNA, 24 nt, Artificial Sequence
  Synthetic
gauuuauuuagacaaauaucuaau

SEQ ID NO: 623730 - RNA, 18 nt, Artificial Sequence
  Synthetic
uaacuuaagcuaucuaau

SEQ ID NO: 623731 - RNA, 19 nt, Artificial Sequence
  Synthetic
cuaacuuaagcuaucuaau

SEQ ID NO: 623732 - RNA, 20 nt, Artificial Sequence
  Synthetic
ucuaacuuaagcuaucuaau

SEQ ID NO: 623733 - RNA, 21 nt, Artificial Sequence
  Synthetic
cucuaacuuaagcuaucuaau

SEQ ID NO: 623734 - RNA, 22 nt, Artificial Sequence
  Synthetic
acucuaacuuaagcuaucuaau

SEQ ID NO: 623735 - RNA, 23 nt, Artificial Sequence
  Synthetic
gacucuaacuuaagcuaucuaau

SEQ ID NO: 623736 - RNA, 24 nt, Artificial Sequence
  Synthetic
cgacucuaacuuaagcuaucuaau

SEQ ID NO: 623737 - RNA, 18 nt, Artificial Sequence
  Synthetic
cucagauaaagcucuaau

SEQ ID NO: 623738 - RNA, 19 nt, Artificial Sequence
  Synthetic
ccucagauaaagcucuaau

SEQ ID NO: 623739 - RNA, 20 nt, Artificial Sequence
  Synthetic
uccucagauaaagcucuaau

SEQ ID NO: 623740 - RNA, 21 nt, Artificial Sequence
  Synthetic
cuccucagauaaagcucuaau

SEQ ID NO: 623741 - RNA, 22 nt, Artificial Sequence
  Synthetic
acuccucagauaaagcucuaau

SEQ ID NO: 623742 - RNA, 23 nt, Artificial Sequence
  Synthetic
aacuccucagauaaagcucuaau

SEQ ID NO: 623743 - RNA, 24 nt, Artificial Sequence
  Synthetic
gaacuccucagauaaagcucuaau

SEQ ID NO: 623744 - RNA, 18 nt, Artificial Sequence
  Synthetic
gaggaggcaagcucuaau

SEQ ID NO: 623745 - RNA, 19 nt, Artificial Sequence
  Synthetic
ggaggaggcaagcucuaau

SEQ ID NO: 623746 - RNA, 20 nt, Artificial Sequence
  Synthetic
gggaggaggcaagcucuaau

SEQ ID NO: 623747 - RNA, 21 nt, Artificial Sequence
  Synthetic
ugggaggaggcaagcucuaau

SEQ ID NO: 623748 - RNA, 22 nt, Artificial Sequence
  Synthetic
gugggaggaggcaagcucuaau

SEQ ID NO: 623749 - RNA, 23 nt, Artificial Sequence
  Synthetic
ugugggaggaggcaagcucuaau

SEQ ID NO: 623750 - RNA, 24 nt, Artificial Sequence
  Synthetic
gugugggaggaggcaagcucuaau

SEQ ID NO: 623751 - RNA, 18 nt, Artificial Sequence
  Synthetic
cagucuuacaagucuaau

SEQ ID NO: 623752 - RNA, 19 nt, Artificial Sequence
  Synthetic
ccagucuuacaagucuaau

SEQ ID NO: 623753 - RNA, 20 nt, Artificial Sequence
  Synthetic
cccagucuuacaagucuaau

SEQ ID NO: 623754 - RNA, 21 nt, Artificial Sequence
  Synthetic
ucccagucuuacaagucuaau

SEQ ID NO: 623755 - RNA, 22 nt, Artificial Sequence
  Synthetic
uucccagucuuacaagucuaau

SEQ ID NO: 623756 - RNA, 23 nt, Artificial Sequence
  Synthetic
cuucccagucuuacaagucuaau

SEQ ID NO: 623757 - RNA, 24 nt, Artificial Sequence
  Synthetic
ucuucccagucuuacaagucuaau

SEQ ID NO: 623758 - RNA, 18 nt, Artificial Sequence
  Synthetic
acacugucccagucuaau

SEQ ID NO: 623759 - RNA, 19 nt, Artificial Sequence
  Synthetic
gacacugucccagucuaau

SEQ ID NO: 623760 - RNA, 20 nt, Artificial Sequence
  Synthetic
agacacugucccagucuaau

SEQ ID NO: 623761 - RNA, 21 nt, Artificial Sequence
  Synthetic
cagacacugucccagucuaau

SEQ ID NO: 623762 - RNA, 22 nt, Artificial Sequence
  Synthetic
acagacacugucccagucuaau

SEQ ID NO: 623763 - RNA, 23 nt, Artificial Sequence
  Synthetic
gacagacacugucccagucuaau

SEQ ID NO: 623764 - RNA, 24 nt, Artificial Sequence
  Synthetic
ugacagacacugucccagucuaau

SEQ ID NO: 623765 - RNA, 18 nt, Artificial Sequence
  Synthetic
gaagugacaccgucuaau

SEQ ID NO: 623766 - RNA, 19 nt, Artificial Sequence
  Synthetic
ggaagugacaccgucuaau

SEQ ID NO: 623767 - RNA, 20 nt, Artificial Sequence
  Synthetic
gggaagugacaccgucuaau

SEQ ID NO: 623768 - RNA, 21 nt, Artificial Sequence
  Synthetic
agggaagugacaccgucuaau

SEQ ID NO: 623769 - RNA, 22 nt, Artificial Sequence
  Synthetic
cagggaagugacaccgucuaau

SEQ ID NO: 623770 - RNA, 23 nt, Artificial Sequence
  Synthetic
gcagggaagugacaccgucuaau

SEQ ID NO: 623771 - RNA, 24 nt, Artificial Sequence
  Synthetic
agcagggaagugacaccgucuaau

SEQ ID NO: 623772 - RNA, 18 nt, Artificial Sequence
  Synthetic
uacauauguaggucuaau

SEQ ID NO: 623773 - RNA, 19 nt, Artificial Sequence
  Synthetic
cuacauauguaggucuaau

SEQ ID NO: 623774 - RNA, 20 nt, Artificial Sequence
  Synthetic
gcuacauauguaggucuaau

SEQ ID NO: 623775 - RNA, 21 nt, Artificial Sequence
  Synthetic
agcuacauauguaggucuaau

SEQ ID NO: 623776 - RNA, 22 nt, Artificial Sequence
  Synthetic
aagcuacauauguaggucuaau

SEQ ID NO: 623777 - RNA, 23 nt, Artificial Sequence
  Synthetic
gaagcuacauauguaggucuaau

SEQ ID NO: 623778 - RNA, 24 nt, Artificial Sequence
  Synthetic
ugaagcuacauauguaggucuaau

SEQ ID NO: 623779 - RNA, 18 nt, Artificial Sequence
  Synthetic
gcuuauaauuugucuaau

SEQ ID NO: 623780 - RNA, 19 nt, Artificial Sequence
  Synthetic
agcuuauaauuugucuaau

SEQ ID NO: 623781 - RNA, 20 nt, Artificial Sequence
  Synthetic
aagcuuauaauuugucuaau

SEQ ID NO: 623782 - RNA, 21 nt, Artificial Sequence
  Synthetic
aaagcuuauaauuugucuaau

SEQ ID NO: 623783 - RNA, 22 nt, Artificial Sequence
  Synthetic
aaaagcuuauaauuugucuaau

SEQ ID NO: 623784 - RNA, 23 nt, Artificial Sequence
  Synthetic
uaaaagcuuauaauuugucuaau

SEQ ID NO: 623785 - RNA, 24 nt, Artificial Sequence
  Synthetic
auaaaagcuuauaauuugucuaau

SEQ ID NO: 623786 - RNA, 18 nt, Artificial Sequence
  Synthetic
uuuucagaucauucuaau

SEQ ID NO: 623787 - RNA, 19 nt, Artificial Sequence
  Synthetic
uuuuucagaucauucuaau

SEQ ID NO: 623788 - RNA, 20 nt, Artificial Sequence
  Synthetic
auuuuucagaucauucuaau

SEQ ID NO: 623789 - RNA, 21 nt, Artificial Sequence
  Synthetic
cauuuuucagaucauucuaau

SEQ ID NO: 623790 - RNA, 22 nt, Artificial Sequence
  Synthetic
acauuuuucagaucauucuaau

SEQ ID NO: 623791 - RNA, 23 nt, Artificial Sequence
  Synthetic
aacauuuuucagaucauucuaau

SEQ ID NO: 623792 - RNA, 24 nt, Artificial Sequence
  Synthetic
aaacauuuuucagaucauucuaau

SEQ ID NO: 623793 - RNA, 18 nt, Artificial Sequence
  Synthetic
gaauuuggcauuucuaau

SEQ ID NO: 623794 - RNA, 19 nt, Artificial Sequence
  Synthetic
agaauuuggcauuucuaau

SEQ ID NO: 623795 - RNA, 20 nt, Artificial Sequence
  Synthetic
gagaauuuggcauuucuaau

SEQ ID NO: 623796 - RNA, 21 nt, Artificial Sequence
  Synthetic
ugagaauuuggcauuucuaau

SEQ ID NO: 623797 - RNA, 22 nt, Artificial Sequence
  Synthetic
cugagaauuuggcauuucuaau

SEQ ID NO: 623798 - RNA, 23 nt, Artificial Sequence
  Synthetic
ccugagaauuuggcauuucuaau

SEQ ID NO: 623799 - RNA, 24 nt, Artificial Sequence
  Synthetic
gccugagaauuuggcauuucuaau

SEQ ID NO: 623800 - RNA, 18 nt, Artificial Sequence
  Synthetic
aaauugaaucuuucuaau

SEQ ID NO: 623801 - RNA, 19 nt, Artificial Sequence
  Synthetic
uaaauugaaucuuucuaau

SEQ ID NO: 623802 - RNA, 20 nt, Artificial Sequence
  Synthetic
uuaaauugaaucuuucuaau

SEQ ID NO: 623803 - RNA, 21 nt, Artificial Sequence
  Synthetic
guuaaauugaaucuuucuaau

SEQ ID NO: 623804 - RNA, 22 nt, Artificial Sequence
  Synthetic
uguuaaauugaaucuuucuaau

SEQ ID NO: 623805 - RNA, 23 nt, Artificial Sequence
  Synthetic
guguuaaauugaaucuuucuaau

SEQ ID NO: 623806 - RNA, 24 nt, Artificial Sequence
  Synthetic
uguguuaaauugaaucuuucuaau

SEQ ID NO: 623807 - RNA, 18 nt, Artificial Sequence
  Synthetic
aacuuguauguuucuaau

SEQ ID NO: 623808 - RNA, 19 nt, Artificial Sequence
  Synthetic
uaacuuguauguuucuaau

SEQ ID NO: 623809 - RNA, 20 nt, Artificial Sequence
  Synthetic
cuaacuuguauguuucuaau

SEQ ID NO: 623810 - RNA, 21 nt, Artificial Sequence
  Synthetic
ucuaacuuguauguuucuaau

SEQ ID NO: 623811 - RNA, 22 nt, Artificial Sequence
  Synthetic
gucuaacuuguauguuucuaau

SEQ ID NO: 623812 - RNA, 23 nt, Artificial Sequence
  Synthetic
agucuaacuuguauguuucuaau

SEQ ID NO: 623813 - RNA, 24 nt, Artificial Sequence
  Synthetic
gagucuaacuuguauguuucuaau

SEQ ID NO: 623814 - RNA, 18 nt, Artificial Sequence
  Synthetic
ggcugaauauuuucuaau

SEQ ID NO: 623815 - RNA, 19 nt, Artificial Sequence
  Synthetic
aggcugaauauuuucuaau

SEQ ID NO: 623816 - RNA, 20 nt, Artificial Sequence
  Synthetic
caggcugaauauuuucuaau

SEQ ID NO: 623817 - RNA, 21 nt, Artificial Sequence
  Synthetic
ucaggcugaauauuuucuaau

SEQ ID NO: 623818 - RNA, 22 nt, Artificial Sequence
  Synthetic
aucaggcugaauauuuucuaau

SEQ ID NO: 623819 - RNA, 23 nt, Artificial Sequence
  Synthetic
caucaggcugaauauuuucuaau

SEQ ID NO: 623820 - RNA, 24 nt, Artificial Sequence
  Synthetic
acaucaggcugaauauuuucuaau

SEQ ID NO: 623821 - RNA, 18 nt, Artificial Sequence
  Synthetic
gaccuucugcaaaguaau

SEQ ID NO: 623822 - RNA, 19 nt, Artificial Sequence
  Synthetic
agaccuucugcaaaguaau

SEQ ID NO: 623823 - RNA, 20 nt, Artificial Sequence
  Synthetic
aagaccuucugcaaaguaau

SEQ ID NO: 623824 - RNA, 21 nt, Artificial Sequence
  Synthetic
aaagaccuucugcaaaguaau

SEQ ID NO: 623825 - RNA, 22 nt, Artificial Sequence
  Synthetic
gaaagaccuucugcaaaguaau

SEQ ID NO: 623826 - RNA, 23 nt, Artificial Sequence
  Synthetic
ugaaagaccuucugcaaaguaau

SEQ ID NO: 623827 - RNA, 24 nt, Artificial Sequence
  Synthetic
augaaagaccuucugcaaaguaau

SEQ ID NO: 623828 - RNA, 18 nt, Artificial Sequence
  Synthetic
guacaagaaacaaguaau

SEQ ID NO: 623829 - RNA, 19 nt, Artificial Sequence
  Synthetic
gguacaagaaacaaguaau

SEQ ID NO: 623830 - RNA, 20 nt, Artificial Sequence
  Synthetic
ugguacaagaaacaaguaau

SEQ ID NO: 623831 - RNA, 21 nt, Artificial Sequence
  Synthetic
gugguacaagaaacaaguaau

SEQ ID NO: 623832 - RNA, 22 nt, Artificial Sequence
  Synthetic
agugguacaagaaacaaguaau

SEQ ID NO: 623833 - RNA, 23 nt, Artificial Sequence
  Synthetic
cagugguacaagaaacaaguaau

SEQ ID NO: 623834 - RNA, 24 nt, Artificial Sequence
  Synthetic
acagugguacaagaaacaaguaau

SEQ ID NO: 623835 - RNA, 18 nt, Artificial Sequence
  Synthetic
ucuagugaggcaaguaau

SEQ ID NO: 623836 - RNA, 19 nt, Artificial Sequence
  Synthetic
gucuagugaggcaaguaau

SEQ ID NO: 623837 - RNA, 20 nt, Artificial Sequence
  Synthetic
agucuagugaggcaaguaau

SEQ ID NO: 623838 - RNA, 21 nt, Artificial Sequence
  Synthetic
cagucuagugaggcaaguaau

SEQ ID NO: 623839 - RNA, 22 nt, Artificial Sequence
  Synthetic
ucagucuagugaggcaaguaau

SEQ ID NO: 623840 - RNA, 23 nt, Artificial Sequence
  Synthetic
gucagucuagugaggcaaguaau

SEQ ID NO: 623841 - RNA, 24 nt, Artificial Sequence
  Synthetic
agucagucuagugaggcaaguaau

SEQ ID NO: 623842 - RNA, 18 nt, Artificial Sequence
  Synthetic
ucuuacacuucaaguaau

SEQ ID NO: 623843 - RNA, 19 nt, Artificial Sequence
  Synthetic
aucuuacacuucaaguaau

SEQ ID NO: 623844 - RNA, 20 nt, Artificial Sequence
  Synthetic
aaucuuacacuucaaguaau

SEQ ID NO: 623845 - RNA, 21 nt, Artificial Sequence
  Synthetic
gaaucuuacacuucaaguaau

SEQ ID NO: 623846 - RNA, 22 nt, Artificial Sequence
  Synthetic
ugaaucuuacacuucaaguaau

SEQ ID NO: 623847 - RNA, 23 nt, Artificial Sequence
  Synthetic
gugaaucuuacacuucaaguaau

SEQ ID NO: 623848 - RNA, 24 nt, Artificial Sequence
  Synthetic
ugugaaucuuacacuucaaguaau

SEQ ID NO: 623849 - RNA, 18 nt, Artificial Sequence
  Synthetic
aacauugcuugaaguaau

SEQ ID NO: 623850 - RNA, 19 nt, Artificial Sequence
  Synthetic
caacauugcuugaaguaau

SEQ ID NO: 623851 - RNA, 20 nt, Artificial Sequence
  Synthetic
ucaacauugcuugaaguaau

SEQ ID NO: 623852 - RNA, 21 nt, Artificial Sequence
  Synthetic
uucaacauugcuugaaguaau

SEQ ID NO: 623853 - RNA, 22 nt, Artificial Sequence
  Synthetic
guucaacauugcuugaaguaau

SEQ ID NO: 623854 - RNA, 23 nt, Artificial Sequence
  Synthetic
uguucaacauugcuugaaguaau

SEQ ID NO: 623855 - RNA, 24 nt, Artificial Sequence
  Synthetic
guguucaacauugcuugaaguaau

SEQ ID NO: 623856 - RNA, 18 nt, Artificial Sequence
  Synthetic
uuuacuuuuugaaguaau

SEQ ID NO: 623857 - RNA, 19 nt, Artificial Sequence
  Synthetic
guuuacuuuuugaaguaau

SEQ ID NO: 623858 - RNA, 20 nt, Artificial Sequence
  Synthetic
aguuuacuuuuugaaguaau

SEQ ID NO: 623859 - RNA, 21 nt, Artificial Sequence
  Synthetic
aaguuuacuuuuugaaguaau

SEQ ID NO: 623860 - RNA, 22 nt, Artificial Sequence
  Synthetic
uaaguuuacuuuuugaaguaau

SEQ ID NO: 623861 - RNA, 23 nt, Artificial Sequence
  Synthetic
cuaaguuuacuuuuugaaguaau

SEQ ID NO: 623862 - RNA, 24 nt, Artificial Sequence
  Synthetic
ccuaaguuuacuuuuugaaguaau

SEQ ID NO: 623863 - RNA, 18 nt, Artificial Sequence
  Synthetic
cuuaugaaaauaaguaau

SEQ ID NO: 623864 - RNA, 19 nt, Artificial Sequence
  Synthetic
ucuuaugaaaauaaguaau

SEQ ID NO: 623865 - RNA, 20 nt, Artificial Sequence
  Synthetic
aucuuaugaaaauaaguaau

SEQ ID NO: 623866 - RNA, 21 nt, Artificial Sequence
  Synthetic
caucuuaugaaaauaaguaau

SEQ ID NO: 623867 - RNA, 22 nt, Artificial Sequence
  Synthetic
ccaucuuaugaaaauaaguaau

SEQ ID NO: 623868 - RNA, 23 nt, Artificial Sequence
  Synthetic
gccaucuuaugaaaauaaguaau

SEQ ID NO: 623869 - RNA, 24 nt, Artificial Sequence
  Synthetic
ugccaucuuaugaaaauaaguaau

SEQ ID NO: 623870 - RNA, 18 nt, Artificial Sequence
  Synthetic
uacauuuccaccaguaau

SEQ ID NO: 623871 - RNA, 19 nt, Artificial Sequence
  Synthetic
uuacauuuccaccaguaau

SEQ ID NO: 623872 - RNA, 20 nt, Artificial Sequence
  Synthetic
uuuacauuuccaccaguaau

SEQ ID NO: 623873 - RNA, 21 nt, Artificial Sequence
  Synthetic
uuuuacauuuccaccaguaau

SEQ ID NO: 623874 - RNA, 22 nt, Artificial Sequence
  Synthetic
auuuuacauuuccaccaguaau

SEQ ID NO: 623875 - RNA, 23 nt, Artificial Sequence
  Synthetic
cauuuuacauuuccaccaguaau

SEQ ID NO: 623876 - RNA, 24 nt, Artificial Sequence
  Synthetic
ccauuuuacauuuccaccaguaau

SEQ ID NO: 623877 - RNA, 18 nt, Artificial Sequence
  Synthetic
gccaaaccaugcaguaau

SEQ ID NO: 623878 - RNA, 19 nt, Artificial Sequence
  Synthetic
agccaaaccaugcaguaau

SEQ ID NO: 623879 - RNA, 20 nt, Artificial Sequence
  Synthetic
aagccaaaccaugcaguaau

SEQ ID NO: 623880 - RNA, 21 nt, Artificial Sequence
  Synthetic
uaagccaaaccaugcaguaau

SEQ ID NO: 623881 - RNA, 22 nt, Artificial Sequence
  Synthetic
auaagccaaaccaugcaguaau

SEQ ID NO: 623882 - RNA, 23 nt, Artificial Sequence
  Synthetic
aauaagccaaaccaugcaguaau

SEQ ID NO: 623883 - RNA, 24 nt, Artificial Sequence
  Synthetic
uaauaagccaaaccaugcaguaau

SEQ ID NO: 623884 - RNA, 18 nt, Artificial Sequence
  Synthetic
ggcaguagaaagaguaau

SEQ ID NO: 623885 - RNA, 19 nt, Artificial Sequence
  Synthetic
aggcaguagaaagaguaau

SEQ ID NO: 623886 - RNA, 20 nt, Artificial Sequence
  Synthetic
aaggcaguagaaagaguaau

SEQ ID NO: 623887 - RNA, 21 nt, Artificial Sequence
  Synthetic
uaaggcaguagaaagaguaau

SEQ ID NO: 623888 - RNA, 22 nt, Artificial Sequence
  Synthetic
cuaaggcaguagaaagaguaau

SEQ ID NO: 623889 - RNA, 23 nt, Artificial Sequence
  Synthetic
ucuaaggcaguagaaagaguaau

SEQ ID NO: 623890 - RNA, 24 nt, Artificial Sequence
  Synthetic
cucuaaggcaguagaaagaguaau

SEQ ID NO: 623891 - RNA, 18 nt, Artificial Sequence
  Synthetic
guucuauugcauaguaau

SEQ ID NO: 623892 - RNA, 19 nt, Artificial Sequence
  Synthetic
uguucuauugcauaguaau

SEQ ID NO: 623893 - RNA, 20 nt, Artificial Sequence
  Synthetic
guguucuauugcauaguaau

SEQ ID NO: 623894 - RNA, 21 nt, Artificial Sequence
  Synthetic
aguguucuauugcauaguaau

SEQ ID NO: 623895 - RNA, 22 nt, Artificial Sequence
  Synthetic
uaguguucuauugcauaguaau

SEQ ID NO: 623896 - RNA, 23 nt, Artificial Sequence
  Synthetic
cuaguguucuauugcauaguaau

SEQ ID NO: 623897 - RNA, 24 nt, Artificial Sequence
  Synthetic
ucuaguguucuauugcauaguaau

SEQ ID NO: 623898 - RNA, 18 nt, Artificial Sequence
  Synthetic
cuuaauagugcuaguaau

SEQ ID NO: 623899 - RNA, 19 nt, Artificial Sequence
  Synthetic
gcuuaauagugcuaguaau

SEQ ID NO: 623900 - RNA, 20 nt, Artificial Sequence
  Synthetic
ugcuuaauagugcuaguaau

SEQ ID NO: 623901 - RNA, 21 nt, Artificial Sequence
  Synthetic
augcuuaauagugcuaguaau

SEQ ID NO: 623902 - RNA, 22 nt, Artificial Sequence
  Synthetic
gaugcuuaauagugcuaguaau

SEQ ID NO: 623903 - RNA, 23 nt, Artificial Sequence
  Synthetic
agaugcuuaauagugcuaguaau

SEQ ID NO: 623904 - RNA, 24 nt, Artificial Sequence
  Synthetic
aagaugcuuaauagugcuaguaau

SEQ ID NO: 623905 - RNA, 18 nt, Artificial Sequence
  Synthetic
agauauuauguuaguaau

SEQ ID NO: 623906 - RNA, 19 nt, Artificial Sequence
  Synthetic
aagauauuauguuaguaau

SEQ ID NO: 623907 - RNA, 20 nt, Artificial Sequence
  Synthetic
gaagauauuauguuaguaau

SEQ ID NO: 623908 - RNA, 21 nt, Artificial Sequence
  Synthetic
agaagauauuauguuaguaau

SEQ ID NO: 623909 - RNA, 22 nt, Artificial Sequence
  Synthetic
cagaagauauuauguuaguaau

SEQ ID NO: 623910 - RNA, 23 nt, Artificial Sequence
  Synthetic
ucagaagauauuauguuaguaau

SEQ ID NO: 623911 - RNA, 24 nt, Artificial Sequence
  Synthetic
aucagaagauauuauguuaguaau

SEQ ID NO: 623912 - RNA, 18 nt, Artificial Sequence
  Synthetic
ccuaaguaguuucguaau

SEQ ID NO: 623913 - RNA, 19 nt, Artificial Sequence
  Synthetic
uccuaaguaguuucguaau

SEQ ID NO: 623914 - RNA, 20 nt, Artificial Sequence
  Synthetic
uuccuaaguaguuucguaau

SEQ ID NO: 623915 - RNA, 21 nt, Artificial Sequence
  Synthetic
uuuccuaaguaguuucguaau

SEQ ID NO: 623916 - RNA, 22 nt, Artificial Sequence
  Synthetic
cuuuccuaaguaguuucguaau

SEQ ID NO: 623917 - RNA, 23 nt, Artificial Sequence
  Synthetic
gcuuuccuaaguaguuucguaau

SEQ ID NO: 623918 - RNA, 24 nt, Artificial Sequence
  Synthetic
ggcuuuccuaaguaguuucguaau

SEQ ID NO: 623919 - RNA, 18 nt, Artificial Sequence
  Synthetic
uuuccauaaaaagguaau

SEQ ID NO: 623920 - RNA, 19 nt, Artificial Sequence
  Synthetic
uuuuccauaaaaagguaau

SEQ ID NO: 623921 - RNA, 20 nt, Artificial Sequence
  Synthetic
auuuuccauaaaaagguaau

SEQ ID NO: 623922 - RNA, 21 nt, Artificial Sequence
  Synthetic
cauuuuccauaaaaagguaau

SEQ ID NO: 623923 - RNA, 22 nt, Artificial Sequence
  Synthetic
ucauuuuccauaaaaagguaau

SEQ ID NO: 623924 - RNA, 23 nt, Artificial Sequence
  Synthetic
aucauuuuccauaaaaagguaau

SEQ ID NO: 623925 - RNA, 24 nt, Artificial Sequence
  Synthetic
uaucauuuuccauaaaaagguaau

SEQ ID NO: 623926 - RNA, 18 nt, Artificial Sequence
  Synthetic
aaucauuuccaagguaau

SEQ ID NO: 623927 - RNA, 19 nt, Artificial Sequence
  Synthetic
gaaucauuuccaagguaau

SEQ ID NO: 623928 - RNA, 20 nt, Artificial Sequence
  Synthetic
agaaucauuuccaagguaau

SEQ ID NO: 623929 - RNA, 21 nt, Artificial Sequence
  Synthetic
aagaaucauuuccaagguaau

SEQ ID NO: 623930 - RNA, 22 nt, Artificial Sequence
  Synthetic
caagaaucauuuccaagguaau

SEQ ID NO: 623931 - RNA, 23 nt, Artificial Sequence
  Synthetic
ucaagaaucauuuccaagguaau

SEQ ID NO: 623932 - RNA, 24 nt, Artificial Sequence
  Synthetic
gucaagaaucauuuccaagguaau

SEQ ID NO: 623933 - RNA, 18 nt, Artificial Sequence
  Synthetic
uguugccuugaagguaau

SEQ ID NO: 623934 - RNA, 19 nt, Artificial Sequence
  Synthetic
guguugccuugaagguaau

SEQ ID NO: 623935 - RNA, 20 nt, Artificial Sequence
  Synthetic
gguguugccuugaagguaau

SEQ ID NO: 623936 - RNA, 21 nt, Artificial Sequence
  Synthetic
agguguugccuugaagguaau

SEQ ID NO: 623937 - RNA, 22 nt, Artificial Sequence
  Synthetic
uagguguugccuugaagguaau

SEQ ID NO: 623938 - RNA, 23 nt, Artificial Sequence
  Synthetic
uuagguguugccuugaagguaau

SEQ ID NO: 623939 - RNA, 24 nt, Artificial Sequence
  Synthetic
cuuagguguugccuugaagguaau

SEQ ID NO: 623940 - RNA, 18 nt, Artificial Sequence
  Synthetic
aaaagaacaguagguaau

SEQ ID NO: 623941 - RNA, 19 nt, Artificial Sequence
  Synthetic
gaaaagaacaguagguaau

SEQ ID NO: 623942 - RNA, 20 nt, Artificial Sequence
  Synthetic
ggaaaagaacaguagguaau

SEQ ID NO: 623943 - RNA, 21 nt, Artificial Sequence
  Synthetic
gggaaaagaacaguagguaau

SEQ ID NO: 623944 - RNA, 22 nt, Artificial Sequence
  Synthetic
agggaaaagaacaguagguaau

SEQ ID NO: 623945 - RNA, 23 nt, Artificial Sequence
  Synthetic
cagggaaaagaacaguagguaau

SEQ ID NO: 623946 - RNA, 24 nt, Artificial Sequence
  Synthetic
acagggaaaagaacaguagguaau

SEQ ID NO: 623947 - RNA, 18 nt, Artificial Sequence
  Synthetic
uuguauuaauuagguaau

SEQ ID NO: 623948 - RNA, 19 nt, Artificial Sequence
  Synthetic
cuuguauuaauuagguaau

SEQ ID NO: 623949 - RNA, 20 nt, Artificial Sequence
  Synthetic
acuuguauuaauuagguaau

SEQ ID NO: 623950 - RNA, 21 nt, Artificial Sequence
  Synthetic
aacuuguauuaauuagguaau

SEQ ID NO: 623951 - RNA, 22 nt, Artificial Sequence
  Synthetic
uaacuuguauuaauuagguaau

SEQ ID NO: 623952 - RNA, 23 nt, Artificial Sequence
  Synthetic
auaacuuguauuaauuagguaau

SEQ ID NO: 623953 - RNA, 24 nt, Artificial Sequence
  Synthetic
aauaacuuguauuaauuagguaau

SEQ ID NO: 623954 - RNA, 18 nt, Artificial Sequence
  Synthetic
aauuauuuucaggguaau

SEQ ID NO: 623955 - RNA, 19 nt, Artificial Sequence
  Synthetic
gaauuauuuucaggguaau

SEQ ID NO: 623956 - RNA, 20 nt, Artificial Sequence
  Synthetic
agaauuauuuucaggguaau

SEQ ID NO: 623957 - RNA, 21 nt, Artificial Sequence
  Synthetic
cagaauuauuuucaggguaau

SEQ ID NO: 623958 - RNA, 22 nt, Artificial Sequence
  Synthetic
gcagaauuauuuucaggguaau

SEQ ID NO: 623959 - RNA, 23 nt, Artificial Sequence
  Synthetic
ugcagaauuauuuucaggguaau

SEQ ID NO: 623960 - RNA, 24 nt, Artificial Sequence
  Synthetic
uugcagaauuauuuucaggguaau

SEQ ID NO: 623961 - RNA, 18 nt, Artificial Sequence
  Synthetic
uuuccuuauauggguaau

SEQ ID NO: 623962 - RNA, 19 nt, Artificial Sequence
  Synthetic
cuuuccuuauauggguaau

SEQ ID NO: 623963 - RNA, 20 nt, Artificial Sequence
  Synthetic
ucuuuccuuauauggguaau

SEQ ID NO: 623964 - RNA, 21 nt, Artificial Sequence
  Synthetic
uucuuuccuuauauggguaau

SEQ ID NO: 623965 - RNA, 22 nt, Artificial Sequence
  Synthetic
auucuuuccuuauauggguaau

SEQ ID NO: 623966 - RNA, 23 nt, Artificial Sequence
  Synthetic
uauucuuuccuuauauggguaau

SEQ ID NO: 623967 - RNA, 24 nt, Artificial Sequence
  Synthetic
cuauucuuuccuuauauggguaau

SEQ ID NO: 623968 - RNA, 18 nt, Artificial Sequence
  Synthetic
uuaaacauacaugguaau

SEQ ID NO: 623969 - RNA, 19 nt, Artificial Sequence
  Synthetic
uuuaaacauacaugguaau

SEQ ID NO: 623970 - RNA, 20 nt, Artificial Sequence
  Synthetic
guuuaaacauacaugguaau

SEQ ID NO: 623971 - RNA, 21 nt, Artificial Sequence
  Synthetic
aguuuaaacauacaugguaau

SEQ ID NO: 623972 - RNA, 22 nt, Artificial Sequence
  Synthetic
caguuuaaacauacaugguaau

SEQ ID NO: 623973 - RNA, 23 nt, Artificial Sequence
  Synthetic
ucaguuuaaacauacaugguaau

SEQ ID NO: 623974 - RNA, 24 nt, Artificial Sequence
  Synthetic
aucaguuuaaacauacaugguaau

SEQ ID NO: 623975 - RNA, 18 nt, Artificial Sequence
  Synthetic
aaaaaacaucaugguaau

SEQ ID NO: 623976 - RNA, 19 nt, Artificial Sequence
  Synthetic
caaaaaacaucaugguaau

SEQ ID NO: 623977 - RNA, 20 nt, Artificial Sequence
  Synthetic
ucaaaaaacaucaugguaau

SEQ ID NO: 623978 - RNA, 21 nt, Artificial Sequence
  Synthetic
cucaaaaaacaucaugguaau

SEQ ID NO: 623979 - RNA, 22 nt, Artificial Sequence
  Synthetic
ucucaaaaaacaucaugguaau

SEQ ID NO: 623980 - RNA, 23 nt, Artificial Sequence
  Synthetic
cucucaaaaaacaucaugguaau

SEQ ID NO: 623981 - RNA, 24 nt, Artificial Sequence
  Synthetic
ccucucaaaaaacaucaugguaau

SEQ ID NO: 623982 - RNA, 18 nt, Artificial Sequence
  Synthetic
aacacauauugugguaau

SEQ ID NO: 623983 - RNA, 19 nt, Artificial Sequence
  Synthetic
aaacacauauugugguaau

SEQ ID NO: 623984 - RNA, 20 nt, Artificial Sequence
  Synthetic
uaaacacauauugugguaau

SEQ ID NO: 623985 - RNA, 21 nt, Artificial Sequence
  Synthetic
auaaacacauauugugguaau

SEQ ID NO: 623986 - RNA, 22 nt, Artificial Sequence
  Synthetic
aauaaacacauauugugguaau

SEQ ID NO: 623987 - RNA, 23 nt, Artificial Sequence
  Synthetic
gaauaaacacauauugugguaau

SEQ ID NO: 623988 - RNA, 24 nt, Artificial Sequence
  Synthetic
ggaauaaacacauauugugguaau

SEQ ID NO: 623989 - RNA, 18 nt, Artificial Sequence
  Synthetic
uagugagagauugguaau

SEQ ID NO: 623990 - RNA, 19 nt, Artificial Sequence
  Synthetic
auagugagagauugguaau

SEQ ID NO: 623991 - RNA, 20 nt, Artificial Sequence
  Synthetic
uauagugagagauugguaau

SEQ ID NO: 623992 - RNA, 21 nt, Artificial Sequence
  Synthetic
guauagugagagauugguaau

SEQ ID NO: 623993 - RNA, 22 nt, Artificial Sequence
  Synthetic
gguauagugagagauugguaau

SEQ ID NO: 623994 - RNA, 23 nt, Artificial Sequence
  Synthetic
cgguauagugagagauugguaau

SEQ ID NO: 623995 - RNA, 24 nt, Artificial Sequence
  Synthetic
gcgguauagugagagauugguaau

SEQ ID NO: 623996 - RNA, 18 nt, Artificial Sequence
  Synthetic
auaaugaauuuugguaau

SEQ ID NO: 623997 - RNA, 19 nt, Artificial Sequence
  Synthetic
aauaaugaauuuugguaau

SEQ ID NO: 623998 - RNA, 20 nt, Artificial Sequence
  Synthetic
gaauaaugaauuuugguaau

SEQ ID NO: 623999 - RNA, 21 nt, Artificial Sequence
  Synthetic
agaauaaugaauuuugguaau

SEQ ID NO: 624000 - RNA, 22 nt, Artificial Sequence
  Synthetic
gagaauaaugaauuuugguaau

SEQ ID NO: 624001 - RNA, 23 nt, Artificial Sequence
  Synthetic
ggagaauaaugaauuuugguaau

SEQ ID NO: 624002 - RNA, 24 nt, Artificial Sequence
  Synthetic
aggagaauaaugaauuuugguaau

SEQ ID NO: 624003 - RNA, 18 nt, Artificial Sequence
  Synthetic
aaaauauacacauguaau

SEQ ID NO: 624004 - RNA, 19 nt, Artificial Sequence
  Synthetic
caaaauauacacauguaau

SEQ ID NO: 624005 - RNA, 20 nt, Artificial Sequence
  Synthetic
ucaaaauauacacauguaau

SEQ ID NO: 624006 - RNA, 21 nt, Artificial Sequence
  Synthetic
uucaaaauauacacauguaau

SEQ ID NO: 624007 - RNA, 22 nt, Artificial Sequence
  Synthetic
uuucaaaauauacacauguaau

SEQ ID NO: 624008 - RNA, 23 nt, Artificial Sequence
  Synthetic
uuuucaaaauauacacauguaau

SEQ ID NO: 624009 - RNA, 24 nt, Artificial Sequence
  Synthetic
auuuucaaaauauacacauguaau

SEQ ID NO: 624010 - RNA, 18 nt, Artificial Sequence
  Synthetic
uagauagggacauguaau

SEQ ID NO: 624011 - RNA, 19 nt, Artificial Sequence
  Synthetic
auagauagggacauguaau

SEQ ID NO: 624012 - RNA, 20 nt, Artificial Sequence
  Synthetic
aauagauagggacauguaau

SEQ ID NO: 624013 - RNA, 21 nt, Artificial Sequence
  Synthetic
uaauagauagggacauguaau

SEQ ID NO: 624014 - RNA, 22 nt, Artificial Sequence
  Synthetic
cuaauagauagggacauguaau

SEQ ID NO: 624015 - RNA, 23 nt, Artificial Sequence
  Synthetic
acuaauagauagggacauguaau

SEQ ID NO: 624016 - RNA, 24 nt, Artificial Sequence
  Synthetic
aacuaauagauagggacauguaau

SEQ ID NO: 624017 - RNA, 18 nt, Artificial Sequence
  Synthetic
ugugagaaaugauguaau

SEQ ID NO: 624018 - RNA, 19 nt, Artificial Sequence
  Synthetic
cugugagaaaugauguaau

SEQ ID NO: 624019 - RNA, 20 nt, Artificial Sequence
  Synthetic
acugugagaaaugauguaau

SEQ ID NO: 624020 - RNA, 21 nt, Artificial Sequence
  Synthetic
aacugugagaaaugauguaau

SEQ ID NO: 624021 - RNA, 22 nt, Artificial Sequence
  Synthetic
gaacugugagaaaugauguaau

SEQ ID NO: 624022 - RNA, 23 nt, Artificial Sequence
  Synthetic
ugaacugugagaaaugauguaau

SEQ ID NO: 624023 - RNA, 24 nt, Artificial Sequence
  Synthetic
cugaacugugagaaaugauguaau

SEQ ID NO: 624024 - RNA, 18 nt, Artificial Sequence
  Synthetic
cucaucuagaacuguaau

SEQ ID NO: 624025 - RNA, 19 nt, Artificial Sequence
  Synthetic
ucucaucuagaacuguaau

SEQ ID NO: 624026 - RNA, 20 nt, Artificial Sequence
  Synthetic
aucucaucuagaacuguaau

SEQ ID NO: 624027 - RNA, 21 nt, Artificial Sequence
  Synthetic
aaucucaucuagaacuguaau

SEQ ID NO: 624028 - RNA, 22 nt, Artificial Sequence
  Synthetic
aaaucucaucuagaacuguaau

SEQ ID NO: 624029 - RNA, 23 nt, Artificial Sequence
  Synthetic
caaaucucaucuagaacuguaau

SEQ ID NO: 624030 - RNA, 24 nt, Artificial Sequence
  Synthetic
ccaaaucucaucuagaacuguaau

SEQ ID NO: 624031 - RNA, 18 nt, Artificial Sequence
  Synthetic
uacuguggucacuguaau

SEQ ID NO: 624032 - RNA, 19 nt, Artificial Sequence
  Synthetic
uuacuguggucacuguaau

SEQ ID NO: 624033 - RNA, 20 nt, Artificial Sequence
  Synthetic
auuacuguggucacuguaau

SEQ ID NO: 624034 - RNA, 21 nt, Artificial Sequence
  Synthetic
uauuacuguggucacuguaau

SEQ ID NO: 624035 - RNA, 22 nt, Artificial Sequence
  Synthetic
auauuacuguggucacuguaau

SEQ ID NO: 624036 - RNA, 23 nt, Artificial Sequence
  Synthetic
uauauuacuguggucacuguaau

SEQ ID NO: 624037 - RNA, 24 nt, Artificial Sequence
  Synthetic
cuauauuacuguggucacuguaau

SEQ ID NO: 624038 - RNA, 18 nt, Artificial Sequence
  Synthetic
caaaggaaagucuguaau

SEQ ID NO: 624039 - RNA, 19 nt, Artificial Sequence
  Synthetic
ccaaaggaaagucuguaau

SEQ ID NO: 624040 - RNA, 20 nt, Artificial Sequence
  Synthetic
accaaaggaaagucuguaau

SEQ ID NO: 624041 - RNA, 21 nt, Artificial Sequence
  Synthetic
gaccaaaggaaagucuguaau

SEQ ID NO: 624042 - RNA, 22 nt, Artificial Sequence
  Synthetic
ugaccaaaggaaagucuguaau

SEQ ID NO: 624043 - RNA, 23 nt, Artificial Sequence
  Synthetic
augaccaaaggaaagucuguaau

SEQ ID NO: 624044 - RNA, 24 nt, Artificial Sequence
  Synthetic
gaugaccaaaggaaagucuguaau

SEQ ID NO: 624045 - RNA, 18 nt, Artificial Sequence
  Synthetic
uuuaaaaaucaguguaau

SEQ ID NO: 624046 - RNA, 19 nt, Artificial Sequence
  Synthetic
auuuaaaaaucaguguaau

SEQ ID NO: 624047 - RNA, 20 nt, Artificial Sequence
  Synthetic
uauuuaaaaaucaguguaau

SEQ ID NO: 624048 - RNA, 21 nt, Artificial Sequence
  Synthetic
uuauuuaaaaaucaguguaau

SEQ ID NO: 624049 - RNA, 22 nt, Artificial Sequence
  Synthetic
guuauuuaaaaaucaguguaau

SEQ ID NO: 624050 - RNA, 23 nt, Artificial Sequence
  Synthetic
aguuauuuaaaaaucaguguaau

SEQ ID NO: 624051 - RNA, 24 nt, Artificial Sequence
  Synthetic
caguuauuuaaaaaucaguguaau

SEQ ID NO: 624052 - RNA, 18 nt, Artificial Sequence
  Synthetic
gaacaugauggguguaau

SEQ ID NO: 624053 - RNA, 19 nt, Artificial Sequence
  Synthetic
agaacaugauggguguaau

SEQ ID NO: 624054 - RNA, 20 nt, Artificial Sequence
  Synthetic
uagaacaugauggguguaau

SEQ ID NO: 624055 - RNA, 21 nt, Artificial Sequence
  Synthetic
cuagaacaugauggguguaau

SEQ ID NO: 624056 - RNA, 22 nt, Artificial Sequence
  Synthetic
ucuagaacaugauggguguaau

SEQ ID NO: 624057 - RNA, 23 nt, Artificial Sequence
  Synthetic
cucuagaacaugauggguguaau

SEQ ID NO: 624058 - RNA, 24 nt, Artificial Sequence
  Synthetic
acucuagaacaugauggguguaau

SEQ ID NO: 624059 - RNA, 18 nt, Artificial Sequence
  Synthetic
uuauuaagaccuuguaau

SEQ ID NO: 624060 - RNA, 19 nt, Artificial Sequence
  Synthetic
uuuauuaagaccuuguaau

SEQ ID NO: 624061 - RNA, 20 nt, Artificial Sequence
  Synthetic
auuuauuaagaccuuguaau

SEQ ID NO: 624062 - RNA, 21 nt, Artificial Sequence
  Synthetic
aauuuauuaagaccuuguaau

SEQ ID NO: 624063 - RNA, 22 nt, Artificial Sequence
  Synthetic
caauuuauuaagaccuuguaau

SEQ ID NO: 624064 - RNA, 23 nt, Artificial Sequence
  Synthetic
gcaauuuauuaagaccuuguaau

SEQ ID NO: 624065 - RNA, 24 nt, Artificial Sequence
  Synthetic
ugcaauuuauuaagaccuuguaau

SEQ ID NO: 624066 - RNA, 18 nt, Artificial Sequence
  Synthetic
aaaugaccaucuuguaau

SEQ ID NO: 624067 - RNA, 19 nt, Artificial Sequence
  Synthetic
uaaaugaccaucuuguaau

SEQ ID NO: 624068 - RNA, 20 nt, Artificial Sequence
  Synthetic
auaaaugaccaucuuguaau

SEQ ID NO: 624069 - RNA, 21 nt, Artificial Sequence
  Synthetic
aauaaaugaccaucuuguaau

SEQ ID NO: 624070 - RNA, 22 nt, Artificial Sequence
  Synthetic
aaauaaaugaccaucuuguaau

SEQ ID NO: 624071 - RNA, 23 nt, Artificial Sequence
  Synthetic
aaaauaaaugaccaucuuguaau

SEQ ID NO: 624072 - RNA, 24 nt, Artificial Sequence
  Synthetic
uaaaauaaaugaccaucuuguaau

SEQ ID NO: 624073 - RNA, 18 nt, Artificial Sequence
  Synthetic
ugaaagacuucuuguaau

SEQ ID NO: 624074 - RNA, 19 nt, Artificial Sequence
  Synthetic
gugaaagacuucuuguaau

SEQ ID NO: 624075 - RNA, 20 nt, Artificial Sequence
  Synthetic
ugugaaagacuucuuguaau

SEQ ID NO: 624076 - RNA, 21 nt, Artificial Sequence
  Synthetic
augugaaagacuucuuguaau

SEQ ID NO: 624077 - RNA, 22 nt, Artificial Sequence
  Synthetic
aaugugaaagacuucuuguaau

SEQ ID NO: 624078 - RNA, 23 nt, Artificial Sequence
  Synthetic
uaaugugaaagacuucuuguaau

SEQ ID NO: 624079 - RNA, 24 nt, Artificial Sequence
  Synthetic
cuaaugugaaagacuucuuguaau

SEQ ID NO: 624080 - RNA, 18 nt, Artificial Sequence
  Synthetic
guaauucauaaaauuaau

SEQ ID NO: 624081 - RNA, 19 nt, Artificial Sequence
  Synthetic
gguaauucauaaaauuaau

SEQ ID NO: 624082 - RNA, 20 nt, Artificial Sequence
  Synthetic
ugguaauucauaaaauuaau

SEQ ID NO: 624083 - RNA, 21 nt, Artificial Sequence
  Synthetic
augguaauucauaaaauuaau

SEQ ID NO: 624084 - RNA, 22 nt, Artificial Sequence
  Synthetic
aaugguaauucauaaaauuaau

SEQ ID NO: 624085 - RNA, 23 nt, Artificial Sequence
  Synthetic
uaaugguaauucauaaaauuaau

SEQ ID NO: 624086 - RNA, 24 nt, Artificial Sequence
  Synthetic
uuaaugguaauucauaaaauuaau

SEQ ID NO: 624087 - RNA, 18 nt, Artificial Sequence
  Synthetic
uuuaaggcuaaaauuaau

SEQ ID NO: 624088 - RNA, 19 nt, Artificial Sequence
  Synthetic
uuuuaaggcuaaaauuaau

SEQ ID NO: 624089 - RNA, 20 nt, Artificial Sequence
  Synthetic
auuuuaaggcuaaaauuaau

SEQ ID NO: 624090 - RNA, 21 nt, Artificial Sequence
  Synthetic
cauuuuaaggcuaaaauuaau

SEQ ID NO: 624091 - RNA, 22 nt, Artificial Sequence
  Synthetic
ccauuuuaaggcuaaaauuaau

SEQ ID NO: 624092 - RNA, 23 nt, Artificial Sequence
  Synthetic
accauuuuaaggcuaaaauuaau

SEQ ID NO: 624093 - RNA, 24 nt, Artificial Sequence
  Synthetic
caccauuuuaaggcuaaaauuaau

SEQ ID NO: 624094 - RNA, 18 nt, Artificial Sequence
  Synthetic
aauaggaaguaaauuaau

SEQ ID NO: 624095 - RNA, 19 nt, Artificial Sequence
  Synthetic
gaauaggaaguaaauuaau

SEQ ID NO: 624096 - RNA, 20 nt, Artificial Sequence
  Synthetic
ugaauaggaaguaaauuaau

SEQ ID NO: 624097 - RNA, 21 nt, Artificial Sequence
  Synthetic
uugaauaggaaguaaauuaau

SEQ ID NO: 624098 - RNA, 22 nt, Artificial Sequence
  Synthetic
cuugaauaggaaguaaauuaau

SEQ ID NO: 624099 - RNA, 23 nt, Artificial Sequence
  Synthetic
ccuugaauaggaaguaaauuaau

SEQ ID NO: 624100 - RNA, 24 nt, Artificial Sequence
  Synthetic
cccuugaauaggaaguaaauuaau

SEQ ID NO: 624101 - RNA, 18 nt, Artificial Sequence
  Synthetic
aaaacuguaagaauuaau

SEQ ID NO: 624102 - RNA, 19 nt, Artificial Sequence
  Synthetic
aaaaacuguaagaauuaau

SEQ ID NO: 624103 - RNA, 20 nt, Artificial Sequence
  Synthetic
uaaaaacuguaagaauuaau

SEQ ID NO: 624104 - RNA, 21 nt, Artificial Sequence
  Synthetic
uuaaaaacuguaagaauuaau

SEQ ID NO: 624105 - RNA, 22 nt, Artificial Sequence
  Synthetic
uuuaaaaacuguaagaauuaau

SEQ ID NO: 624106 - RNA, 23 nt, Artificial Sequence
  Synthetic
uuuuaaaaacuguaagaauuaau

SEQ ID NO: 624107 - RNA, 24 nt, Artificial Sequence
  Synthetic
auuuuaaaaacuguaagaauuaau

SEQ ID NO: 624108 - RNA, 18 nt, Artificial Sequence
  Synthetic
uccuacaugugaauuaau

SEQ ID NO: 624109 - RNA, 19 nt, Artificial Sequence
  Synthetic
guccuacaugugaauuaau

SEQ ID NO: 624110 - RNA, 20 nt, Artificial Sequence
  Synthetic
uguccuacaugugaauuaau

SEQ ID NO: 624111 - RNA, 21 nt, Artificial Sequence
  Synthetic
cuguccuacaugugaauuaau

SEQ ID NO: 624112 - RNA, 22 nt, Artificial Sequence
  Synthetic
ucuguccuacaugugaauuaau

SEQ ID NO: 624113 - RNA, 23 nt, Artificial Sequence
  Synthetic
aucuguccuacaugugaauuaau

SEQ ID NO: 624114 - RNA, 24 nt, Artificial Sequence
  Synthetic
aaucuguccuacaugugaauuaau

SEQ ID NO: 624115 - RNA, 18 nt, Artificial Sequence
  Synthetic
cugaggugaguaauuaau

SEQ ID NO: 624116 - RNA, 19 nt, Artificial Sequence
  Synthetic
ucugaggugaguaauuaau

SEQ ID NO: 624117 - RNA, 20 nt, Artificial Sequence
  Synthetic
cucugaggugaguaauuaau

SEQ ID NO: 624118 - RNA, 21 nt, Artificial Sequence
  Synthetic
gcucugaggugaguaauuaau

SEQ ID NO: 624119 - RNA, 22 nt, Artificial Sequence
  Synthetic
ggcucugaggugaguaauuaau

SEQ ID NO: 624120 - RNA, 23 nt, Artificial Sequence
  Synthetic
aggcucugaggugaguaauuaau

SEQ ID NO: 624121 - RNA, 24 nt, Artificial Sequence
  Synthetic
aaggcucugaggugaguaauuaau

SEQ ID NO: 624122 - RNA, 18 nt, Artificial Sequence
  Synthetic
ucaugcauauuaauuaau

SEQ ID NO: 624123 - RNA, 19 nt, Artificial Sequence
  Synthetic
cucaugcauauuaauuaau

SEQ ID NO: 624124 - RNA, 20 nt, Artificial Sequence
  Synthetic
acucaugcauauuaauuaau

SEQ ID NO: 624125 - RNA, 21 nt, Artificial Sequence
  Synthetic
gacucaugcauauuaauuaau

SEQ ID NO: 624126 - RNA, 22 nt, Artificial Sequence
  Synthetic
agacucaugcauauuaauuaau

SEQ ID NO: 624127 - RNA, 23 nt, Artificial Sequence
  Synthetic
uagacucaugcauauuaauuaau

SEQ ID NO: 624128 - RNA, 24 nt, Artificial Sequence
  Synthetic
auagacucaugcauauuaauuaau

SEQ ID NO: 624129 - RNA, 18 nt, Artificial Sequence
  Synthetic
ucuaaagcugacauuaau

SEQ ID NO: 624130 - RNA, 19 nt, Artificial Sequence
  Synthetic
aucuaaagcugacauuaau

SEQ ID NO: 624131 - RNA, 20 nt, Artificial Sequence
  Synthetic
aaucuaaagcugacauuaau

SEQ ID NO: 624132 - RNA, 21 nt, Artificial Sequence
  Synthetic
aaaucuaaagcugacauuaau

SEQ ID NO: 624133 - RNA, 22 nt, Artificial Sequence
  Synthetic
gaaaucuaaagcugacauuaau

SEQ ID NO: 624134 - RNA, 23 nt, Artificial Sequence
  Synthetic
ggaaaucuaaagcugacauuaau

SEQ ID NO: 624135 - RNA, 24 nt, Artificial Sequence
  Synthetic
aggaaaucuaaagcugacauuaau

SEQ ID NO: 624136 - RNA, 18 nt, Artificial Sequence
  Synthetic
acagguauugacauuaau

SEQ ID NO: 624137 - RNA, 19 nt, Artificial Sequence
  Synthetic
cacagguauugacauuaau

SEQ ID NO: 624138 - RNA, 20 nt, Artificial Sequence
  Synthetic
gcacagguauugacauuaau

SEQ ID NO: 624139 - RNA, 21 nt, Artificial Sequence
  Synthetic
agcacagguauugacauuaau

SEQ ID NO: 624140 - RNA, 22 nt, Artificial Sequence
  Synthetic
uagcacagguauugacauuaau

SEQ ID NO: 624141 - RNA, 23 nt, Artificial Sequence
  Synthetic
auagcacagguauugacauuaau

SEQ ID NO: 624142 - RNA, 24 nt, Artificial Sequence
  Synthetic
uauagcacagguauugacauuaau

SEQ ID NO: 624143 - RNA, 18 nt, Artificial Sequence
  Synthetic
uuauuaaauuucauuaau

SEQ ID NO: 624144 - RNA, 19 nt, Artificial Sequence
  Synthetic
uuuauuaaauuucauuaau

SEQ ID NO: 624145 - RNA, 20 nt, Artificial Sequence
  Synthetic
uuuuauuaaauuucauuaau

SEQ ID NO: 624146 - RNA, 21 nt, Artificial Sequence
  Synthetic
auuuuauuaaauuucauuaau

SEQ ID NO: 624147 - RNA, 22 nt, Artificial Sequence
  Synthetic
cauuuuauuaaauuucauuaau

SEQ ID NO: 624148 - RNA, 23 nt, Artificial Sequence
  Synthetic
ccauuuuauuaaauuucauuaau

SEQ ID NO: 624149 - RNA, 24 nt, Artificial Sequence
  Synthetic
uccauuuuauuaaauuucauuaau

SEQ ID NO: 624150 - RNA, 18 nt, Artificial Sequence
  Synthetic
agaaugcaauagauuaau

SEQ ID NO: 624151 - RNA, 19 nt, Artificial Sequence
  Synthetic
uagaaugcaauagauuaau

SEQ ID NO: 624152 - RNA, 20 nt, Artificial Sequence
  Synthetic
auagaaugcaauagauuaau

SEQ ID NO: 624153 - RNA, 21 nt, Artificial Sequence
  Synthetic
gauagaaugcaauagauuaau

SEQ ID NO: 624154 - RNA, 22 nt, Artificial Sequence
  Synthetic
ggauagaaugcaauagauuaau

SEQ ID NO: 624155 - RNA, 23 nt, Artificial Sequence
  Synthetic
uggauagaaugcaauagauuaau

SEQ ID NO: 624156 - RNA, 24 nt, Artificial Sequence
  Synthetic
auggauagaaugcaauagauuaau

SEQ ID NO: 624157 - RNA, 18 nt, Artificial Sequence
  Synthetic
cacuccugacugauuaau

SEQ ID NO: 624158 - RNA, 19 nt, Artificial Sequence
  Synthetic
acacuccugacugauuaau

SEQ ID NO: 624159 - RNA, 20 nt, Artificial Sequence
  Synthetic
uacacuccugacugauuaau

SEQ ID NO: 624160 - RNA, 21 nt, Artificial Sequence
  Synthetic
guacacuccugacugauuaau

SEQ ID NO: 624161 - RNA, 22 nt, Artificial Sequence
  Synthetic
aguacacuccugacugauuaau

SEQ ID NO: 624162 - RNA, 23 nt, Artificial Sequence
  Synthetic
gaguacacuccugacugauuaau

SEQ ID NO: 624163 - RNA, 24 nt, Artificial Sequence
  Synthetic
ugaguacacuccugacugauuaau

SEQ ID NO: 624164 - RNA, 18 nt, Artificial Sequence
  Synthetic
caaaacuuagugauuaau

SEQ ID NO: 624165 - RNA, 19 nt, Artificial Sequence
  Synthetic
acaaaacuuagugauuaau

SEQ ID NO: 624166 - RNA, 20 nt, Artificial Sequence
  Synthetic
aacaaaacuuagugauuaau

SEQ ID NO: 624167 - RNA, 21 nt, Artificial Sequence
  Synthetic
caacaaaacuuagugauuaau

SEQ ID NO: 624168 - RNA, 22 nt, Artificial Sequence
  Synthetic
acaacaaaacuuagugauuaau

SEQ ID NO: 624169 - RNA, 23 nt, Artificial Sequence
  Synthetic
aacaacaaaacuuagugauuaau

SEQ ID NO: 624170 - RNA, 24 nt, Artificial Sequence
  Synthetic
uaacaacaaaacuuagugauuaau

SEQ ID NO: 624171 - RNA, 18 nt, Artificial Sequence
  Synthetic
ccuucucuuuugauuaau

SEQ ID NO: 624172 - RNA, 19 nt, Artificial Sequence
  Synthetic
accuucucuuuugauuaau

SEQ ID NO: 624173 - RNA, 20 nt, Artificial Sequence
  Synthetic
aaccuucucuuuugauuaau

SEQ ID NO: 624174 - RNA, 21 nt, Artificial Sequence
  Synthetic
aaaccuucucuuuugauuaau

SEQ ID NO: 624175 - RNA, 22 nt, Artificial Sequence
  Synthetic
gaaaccuucucuuuugauuaau

SEQ ID NO: 624176 - RNA, 23 nt, Artificial Sequence
  Synthetic
ugaaaccuucucuuuugauuaau

SEQ ID NO: 624177 - RNA, 24 nt, Artificial Sequence
  Synthetic
uugaaaccuucucuuuugauuaau

SEQ ID NO: 624178 - RNA, 18 nt, Artificial Sequence
  Synthetic
cgccauugucauauuaau

SEQ ID NO: 624179 - RNA, 19 nt, Artificial Sequence
  Synthetic
acgccauugucauauuaau

SEQ ID NO: 624180 - RNA, 20 nt, Artificial Sequence
  Synthetic
aacgccauugucauauuaau

SEQ ID NO: 624181 - RNA, 21 nt, Artificial Sequence
  Synthetic
gaacgccauugucauauuaau

SEQ ID NO: 624182 - RNA, 22 nt, Artificial Sequence
  Synthetic
ugaacgccauugucauauuaau

SEQ ID NO: 624183 - RNA, 23 nt, Artificial Sequence
  Synthetic
uugaacgccauugucauauuaau

SEQ ID NO: 624184 - RNA, 24 nt, Artificial Sequence
  Synthetic
uuugaacgccauugucauauuaau

SEQ ID NO: 624185 - RNA, 18 nt, Artificial Sequence
  Synthetic
uuacuguuuacuauuaau

SEQ ID NO: 624186 - RNA, 19 nt, Artificial Sequence
  Synthetic
cuuacuguuuacuauuaau

SEQ ID NO: 624187 - RNA, 20 nt, Artificial Sequence
  Synthetic
ucuuacuguuuacuauuaau

SEQ ID NO: 624188 - RNA, 21 nt, Artificial Sequence
  Synthetic
cucuuacuguuuacuauuaau

SEQ ID NO: 624189 - RNA, 22 nt, Artificial Sequence
  Synthetic
acucuuacuguuuacuauuaau

SEQ ID NO: 624190 - RNA, 23 nt, Artificial Sequence
  Synthetic
aacucuuacuguuuacuauuaau

SEQ ID NO: 624191 - RNA, 24 nt, Artificial Sequence
  Synthetic
caacucuuacuguuuacuauuaau

SEQ ID NO: 624192 - RNA, 18 nt, Artificial Sequence
  Synthetic
ugccauguuucuauuaau

SEQ ID NO: 624193 - RNA, 19 nt, Artificial Sequence
  Synthetic
cugccauguuucuauuaau

SEQ ID NO: 624194 - RNA, 20 nt, Artificial Sequence
  Synthetic
ccugccauguuucuauuaau

SEQ ID NO: 624195 - RNA, 21 nt, Artificial Sequence
  Synthetic
cccugccauguuucuauuaau

SEQ ID NO: 624196 - RNA, 22 nt, Artificial Sequence
  Synthetic
ccccugccauguuucuauuaau

SEQ ID NO: 624197 - RNA, 23 nt, Artificial Sequence
  Synthetic
uccccugccauguuucuauuaau

SEQ ID NO: 624198 - RNA, 24 nt, Artificial Sequence
  Synthetic
cuccccugccauguuucuauuaau

SEQ ID NO: 624199 - RNA, 18 nt, Artificial Sequence
  Synthetic
uuaugaaauauuauuaau

SEQ ID NO: 624200 - RNA, 19 nt, Artificial Sequence
  Synthetic
uuuaugaaauauuauuaau

SEQ ID NO: 624201 - RNA, 20 nt, Artificial Sequence
  Synthetic
uuuuaugaaauauuauuaau

SEQ ID NO: 624202 - RNA, 21 nt, Artificial Sequence
  Synthetic
auuuuaugaaauauuauuaau

SEQ ID NO: 624203 - RNA, 22 nt, Artificial Sequence
  Synthetic
uauuuuaugaaauauuauuaau

SEQ ID NO: 624204 - RNA, 23 nt, Artificial Sequence
  Synthetic
uuauuuuaugaaauauuauuaau

SEQ ID NO: 624205 - RNA, 24 nt, Artificial Sequence
  Synthetic
uuuauuuuaugaaauauuauuaau

SEQ ID NO: 624206 - RNA, 18 nt, Artificial Sequence
  Synthetic
caacacucucaacuuaau

SEQ ID NO: 624207 - RNA, 19 nt, Artificial Sequence
  Synthetic
ucaacacucucaacuuaau

SEQ ID NO: 624208 - RNA, 20 nt, Artificial Sequence
  Synthetic
gucaacacucucaacuuaau

SEQ ID NO: 624209 - RNA, 21 nt, Artificial Sequence
  Synthetic
ugucaacacucucaacuuaau

SEQ ID NO: 624210 - RNA, 22 nt, Artificial Sequence
  Synthetic
uugucaacacucucaacuuaau

SEQ ID NO: 624211 - RNA, 23 nt, Artificial Sequence
  Synthetic
cuugucaacacucucaacuuaau

SEQ ID NO: 624212 - RNA, 24 nt, Artificial Sequence
  Synthetic
ucuugucaacacucucaacuuaau

SEQ ID NO: 624213 - RNA, 18 nt, Artificial Sequence
  Synthetic
gcugaugcagaacuuaau

SEQ ID NO: 624214 - RNA, 19 nt, Artificial Sequence
  Synthetic
ggcugaugcagaacuuaau

SEQ ID NO: 624215 - RNA, 20 nt, Artificial Sequence
  Synthetic
aggcugaugcagaacuuaau

SEQ ID NO: 624216 - RNA, 21 nt, Artificial Sequence
  Synthetic
gaggcugaugcagaacuuaau

SEQ ID NO: 624217 - RNA, 22 nt, Artificial Sequence
  Synthetic
agaggcugaugcagaacuuaau

SEQ ID NO: 624218 - RNA, 23 nt, Artificial Sequence
  Synthetic
aagaggcugaugcagaacuuaau

SEQ ID NO: 624219 - RNA, 24 nt, Artificial Sequence
  Synthetic
uaagaggcugaugcagaacuuaau

SEQ ID NO: 624220 - RNA, 18 nt, Artificial Sequence
  Synthetic
gagauaagaacacuuaau

SEQ ID NO: 624221 - RNA, 19 nt, Artificial Sequence
  Synthetic
ugagauaagaacacuuaau

SEQ ID NO: 624222 - RNA, 20 nt, Artificial Sequence
  Synthetic
uugagauaagaacacuuaau

SEQ ID NO: 624223 - RNA, 21 nt, Artificial Sequence
  Synthetic
auugagauaagaacacuuaau

SEQ ID NO: 624224 - RNA, 22 nt, Artificial Sequence
  Synthetic
uauugagauaagaacacuuaau

SEQ ID NO: 624225 - RNA, 23 nt, Artificial Sequence
  Synthetic
uuauugagauaagaacacuuaau

SEQ ID NO: 624226 - RNA, 24 nt, Artificial Sequence
  Synthetic
cuuauugagauaagaacacuuaau

SEQ ID NO: 624227 - RNA, 18 nt, Artificial Sequence
  Synthetic
uuaaacaacacacuuaau

SEQ ID NO: 624228 - RNA, 19 nt, Artificial Sequence
  Synthetic
guuaaacaacacacuuaau

SEQ ID NO: 624229 - RNA, 20 nt, Artificial Sequence
  Synthetic
aguuaaacaacacacuuaau

SEQ ID NO: 624230 - RNA, 21 nt, Artificial Sequence
  Synthetic
caguuaaacaacacacuuaau

SEQ ID NO: 624231 - RNA, 22 nt, Artificial Sequence
  Synthetic
gcaguuaaacaacacacuuaau

SEQ ID NO: 624232 - RNA, 23 nt, Artificial Sequence
  Synthetic
agcaguuaaacaacacacuuaau

SEQ ID NO: 624233 - RNA, 24 nt, Artificial Sequence
  Synthetic
aagcaguuaaacaacacacuuaau

SEQ ID NO: 624234 - RNA, 18 nt, Artificial Sequence
  Synthetic
auuacaauaccacuuaau

SEQ ID NO: 624235 - RNA, 19 nt, Artificial Sequence
  Synthetic
uauuacaauaccacuuaau

SEQ ID NO: 624236 - RNA, 20 nt, Artificial Sequence
  Synthetic
cuauuacaauaccacuuaau

SEQ ID NO: 624237 - RNA, 21 nt, Artificial Sequence
  Synthetic
gcuauuacaauaccacuuaau

SEQ ID NO: 624238 - RNA, 22 nt, Artificial Sequence
  Synthetic
agcuauuacaauaccacuuaau

SEQ ID NO: 624239 - RNA, 23 nt, Artificial Sequence
  Synthetic
uagcuauuacaauaccacuuaau

SEQ ID NO: 624240 - RNA, 24 nt, Artificial Sequence
  Synthetic
cuagcuauuacaauaccacuuaau

SEQ ID NO: 624241 - RNA, 18 nt, Artificial Sequence
  Synthetic
uuuacugaagcacuuaau

SEQ ID NO: 624242 - RNA, 19 nt, Artificial Sequence
  Synthetic
uuuuacugaagcacuuaau

SEQ ID NO: 624243 - RNA, 20 nt, Artificial Sequence
  Synthetic
uuuuuacugaagcacuuaau

SEQ ID NO: 624244 - RNA, 21 nt, Artificial Sequence
  Synthetic
auuuuuacugaagcacuuaau

SEQ ID NO: 624245 - RNA, 22 nt, Artificial Sequence
  Synthetic
aauuuuuacugaagcacuuaau

SEQ ID NO: 624246 - RNA, 23 nt, Artificial Sequence
  Synthetic
uaauuuuuacugaagcacuuaau

SEQ ID NO: 624247 - RNA, 24 nt, Artificial Sequence
  Synthetic
uuaauuuuuacugaagcacuuaau

SEQ ID NO: 624248 - RNA, 18 nt, Artificial Sequence
  Synthetic
uucucucauuuacuuaau

SEQ ID NO: 624249 - RNA, 19 nt, Artificial Sequence
  Synthetic
guucucucauuuacuuaau

SEQ ID NO: 624250 - RNA, 20 nt, Artificial Sequence
  Synthetic
gguucucucauuuacuuaau

SEQ ID NO: 624251 - RNA, 21 nt, Artificial Sequence
  Synthetic
ugguucucucauuuacuuaau

SEQ ID NO: 624252 - RNA, 22 nt, Artificial Sequence
  Synthetic
uugguucucucauuuacuuaau

SEQ ID NO: 624253 - RNA, 23 nt, Artificial Sequence
  Synthetic
guugguucucucauuuacuuaau

SEQ ID NO: 624254 - RNA, 24 nt, Artificial Sequence
  Synthetic
aguugguucucucauuuacuuaau

SEQ ID NO: 624255 - RNA, 18 nt, Artificial Sequence
  Synthetic
gaaaaaauaaaccuuaau

SEQ ID NO: 624256 - RNA, 19 nt, Artificial Sequence
  Synthetic
agaaaaaauaaaccuuaau

SEQ ID NO: 624257 - RNA, 20 nt, Artificial Sequence
  Synthetic
aagaaaaaauaaaccuuaau

SEQ ID NO: 624258 - RNA, 21 nt, Artificial Sequence
  Synthetic
uaagaaaaaauaaaccuuaau

SEQ ID NO: 624259 - RNA, 22 nt, Artificial Sequence
  Synthetic
uuaagaaaaaauaaaccuuaau

SEQ ID NO: 624260 - RNA, 23 nt, Artificial Sequence
  Synthetic
auuaagaaaaaauaaaccuuaau

SEQ ID NO: 624261 - RNA, 24 nt, Artificial Sequence
  Synthetic
aauuaagaaaaaauaaaccuuaau

SEQ ID NO: 624262 - RNA, 18 nt, Artificial Sequence
  Synthetic
aaauguacauaccuuaau

SEQ ID NO: 624263 - RNA, 19 nt, Artificial Sequence
  Synthetic
aaaauguacauaccuuaau

SEQ ID NO: 624264 - RNA, 20 nt, Artificial Sequence
  Synthetic
aaaaauguacauaccuuaau

SEQ ID NO: 624265 - RNA, 21 nt, Artificial Sequence
  Synthetic
aaaaaauguacauaccuuaau

SEQ ID NO: 624266 - RNA, 22 nt, Artificial Sequence
  Synthetic
uaaaaaauguacauaccuuaau

SEQ ID NO: 624267 - RNA, 23 nt, Artificial Sequence
  Synthetic
cuaaaaaauguacauaccuuaau

SEQ ID NO: 624268 - RNA, 24 nt, Artificial Sequence
  Synthetic
ucuaaaaaauguacauaccuuaau

SEQ ID NO: 624269 - RNA, 18 nt, Artificial Sequence
  Synthetic
aaacucuucuuccuuaau

SEQ ID NO: 624270 - RNA, 19 nt, Artificial Sequence
  Synthetic
gaaacucuucuuccuuaau

SEQ ID NO: 624271 - RNA, 20 nt, Artificial Sequence
  Synthetic
agaaacucuucuuccuuaau

SEQ ID NO: 624272 - RNA, 21 nt, Artificial Sequence
  Synthetic
aagaaacucuucuuccuuaau

SEQ ID NO: 624273 - RNA, 22 nt, Artificial Sequence
  Synthetic
uaagaaacucuucuuccuuaau

SEQ ID NO: 624274 - RNA, 23 nt, Artificial Sequence
  Synthetic
uuaagaaacucuucuuccuuaau

SEQ ID NO: 624275 - RNA, 24 nt, Artificial Sequence
  Synthetic
auuaagaaacucuucuuccuuaau

SEQ ID NO: 624276 - RNA, 18 nt, Artificial Sequence
  Synthetic
uucuuuguuuuccuuaau

SEQ ID NO: 624277 - RNA, 19 nt, Artificial Sequence
  Synthetic
auucuuuguuuuccuuaau

SEQ ID NO: 624278 - RNA, 20 nt, Artificial Sequence
  Synthetic
aauucuuuguuuuccuuaau

SEQ ID NO: 624279 - RNA, 21 nt, Artificial Sequence
  Synthetic
aaauucuuuguuuuccuuaau

SEQ ID NO: 624280 - RNA, 22 nt, Artificial Sequence
  Synthetic
gaaauucuuuguuuuccuuaau

SEQ ID NO: 624281 - RNA, 23 nt, Artificial Sequence
  Synthetic
agaaauucuuuguuuuccuuaau

SEQ ID NO: 624282 - RNA, 24 nt, Artificial Sequence
  Synthetic
aagaaauucuuuguuuuccuuaau

SEQ ID NO: 624283 - RNA, 18 nt, Artificial Sequence
  Synthetic
caugcagauuggcuuaau

SEQ ID NO: 624284 - RNA, 19 nt, Artificial Sequence
  Synthetic
ucaugcagauuggcuuaau

SEQ ID NO: 624285 - RNA, 20 nt, Artificial Sequence
  Synthetic
gucaugcagauuggcuuaau

SEQ ID NO: 624286 - RNA, 21 nt, Artificial Sequence
  Synthetic
agucaugcagauuggcuuaau

SEQ ID NO: 624287 - RNA, 22 nt, Artificial Sequence
  Synthetic
cagucaugcagauuggcuuaau

SEQ ID NO: 624288 - RNA, 23 nt, Artificial Sequence
  Synthetic
acagucaugcagauuggcuuaau

SEQ ID NO: 624289 - RNA, 24 nt, Artificial Sequence
  Synthetic
aacagucaugcagauuggcuuaau

SEQ ID NO: 624290 - RNA, 18 nt, Artificial Sequence
  Synthetic
uacaaaaagaugcuuaau

SEQ ID NO: 624291 - RNA, 19 nt, Artificial Sequence
  Synthetic
uuacaaaaagaugcuuaau

SEQ ID NO: 624292 - RNA, 20 nt, Artificial Sequence
  Synthetic
uuuacaaaaagaugcuuaau

SEQ ID NO: 624293 - RNA, 21 nt, Artificial Sequence
  Synthetic
cuuuacaaaaagaugcuuaau

SEQ ID NO: 624294 - RNA, 22 nt, Artificial Sequence
  Synthetic
acuuuacaaaaagaugcuuaau

SEQ ID NO: 624295 - RNA, 23 nt, Artificial Sequence
  Synthetic
cacuuuacaaaaagaugcuuaau

SEQ ID NO: 624296 - RNA, 24 nt, Artificial Sequence
  Synthetic
acacuuuacaaaaagaugcuuaau

SEQ ID NO: 624297 - RNA, 18 nt, Artificial Sequence
  Synthetic
aaguuaccuaugcuuaau

SEQ ID NO: 624298 - RNA, 19 nt, Artificial Sequence
  Synthetic
aaaguuaccuaugcuuaau

SEQ ID NO: 624299 - RNA, 20 nt, Artificial Sequence
  Synthetic
caaaguuaccuaugcuuaau

SEQ ID NO: 624300 - RNA, 21 nt, Artificial Sequence
  Synthetic
ucaaaguuaccuaugcuuaau

SEQ ID NO: 624301 - RNA, 22 nt, Artificial Sequence
  Synthetic
aucaaaguuaccuaugcuuaau

SEQ ID NO: 624302 - RNA, 23 nt, Artificial Sequence
  Synthetic
uaucaaaguuaccuaugcuuaau

SEQ ID NO: 624303 - RNA, 24 nt, Artificial Sequence
  Synthetic
auaucaaaguuaccuaugcuuaau

SEQ ID NO: 624304 - RNA, 18 nt, Artificial Sequence
  Synthetic
ggagacuaagugcuuaau

SEQ ID NO: 624305 - RNA, 19 nt, Artificial Sequence
  Synthetic
uggagacuaagugcuuaau

SEQ ID NO: 624306 - RNA, 20 nt, Artificial Sequence
  Synthetic
auggagacuaagugcuuaau

SEQ ID NO: 624307 - RNA, 21 nt, Artificial Sequence
  Synthetic
gauggagacuaagugcuuaau

SEQ ID NO: 624308 - RNA, 22 nt, Artificial Sequence
  Synthetic
ugauggagacuaagugcuuaau

SEQ ID NO: 624309 - RNA, 23 nt, Artificial Sequence
  Synthetic
cugauggagacuaagugcuuaau

SEQ ID NO: 624310 - RNA, 24 nt, Artificial Sequence
  Synthetic
ucugauggagacuaagugcuuaau

SEQ ID NO: 624311 - RNA, 18 nt, Artificial Sequence
  Synthetic
uauuggucuucucuuaau

SEQ ID NO: 624312 - RNA, 19 nt, Artificial Sequence
  Synthetic
cuauuggucuucucuuaau

SEQ ID NO: 624313 - RNA, 20 nt, Artificial Sequence
  Synthetic
ucuauuggucuucucuuaau

SEQ ID NO: 624314 - RNA, 21 nt, Artificial Sequence
  Synthetic
uucuauuggucuucucuuaau

SEQ ID NO: 624315 - RNA, 22 nt, Artificial Sequence
  Synthetic
uuucuauuggucuucucuuaau

SEQ ID NO: 624316 - RNA, 23 nt, Artificial Sequence
  Synthetic
uuuucuauuggucuucucuuaau

SEQ ID NO: 624317 - RNA, 24 nt, Artificial Sequence
  Synthetic
cuuuucuauuggucuucucuuaau

SEQ ID NO: 624318 - RNA, 18 nt, Artificial Sequence
  Synthetic
uaagcauucauucuuaau

SEQ ID NO: 624319 - RNA, 19 nt, Artificial Sequence
  Synthetic
uuaagcauucauucuuaau

SEQ ID NO: 624320 - RNA, 20 nt, Artificial Sequence
  Synthetic
auuaagcauucauucuuaau

SEQ ID NO: 624321 - RNA, 21 nt, Artificial Sequence
  Synthetic
uauuaagcauucauucuuaau

SEQ ID NO: 624322 - RNA, 22 nt, Artificial Sequence
  Synthetic
auauuaagcauucauucuuaau

SEQ ID NO: 624323 - RNA, 23 nt, Artificial Sequence
  Synthetic
aauauuaagcauucauucuuaau

SEQ ID NO: 624324 - RNA, 24 nt, Artificial Sequence
  Synthetic
caauauuaagcauucauucuuaau

SEQ ID NO: 624325 - RNA, 18 nt, Artificial Sequence
  Synthetic
auguaucuaguucuuaau

SEQ ID NO: 624326 - RNA, 19 nt, Artificial Sequence
  Synthetic
aauguaucuaguucuuaau

SEQ ID NO: 624327 - RNA, 20 nt, Artificial Sequence
  Synthetic
gaauguaucuaguucuuaau

SEQ ID NO: 624328 - RNA, 21 nt, Artificial Sequence
  Synthetic
ggaauguaucuaguucuuaau

SEQ ID NO: 624329 - RNA, 22 nt, Artificial Sequence
  Synthetic
aggaauguaucuaguucuuaau

SEQ ID NO: 624330 - RNA, 23 nt, Artificial Sequence
  Synthetic
gaggaauguaucuaguucuuaau

SEQ ID NO: 624331 - RNA, 24 nt, Artificial Sequence
  Synthetic
agaggaauguaucuaguucuuaau

SEQ ID NO: 624332 - RNA, 18 nt, Artificial Sequence
  Synthetic
uuaucccuuccaguuaau

SEQ ID NO: 624333 - RNA, 19 nt, Artificial Sequence
  Synthetic
uuuaucccuuccaguuaau

SEQ ID NO: 624334 - RNA, 20 nt, Artificial Sequence
  Synthetic
cuuuaucccuuccaguuaau

SEQ ID NO: 624335 - RNA, 21 nt, Artificial Sequence
  Synthetic
acuuuaucccuuccaguuaau

SEQ ID NO: 624336 - RNA, 22 nt, Artificial Sequence
  Synthetic
aacuuuaucccuuccaguuaau

SEQ ID NO: 624337 - RNA, 23 nt, Artificial Sequence
  Synthetic
caacuuuaucccuuccaguuaau

SEQ ID NO: 624338 - RNA, 24 nt, Artificial Sequence
  Synthetic
gcaacuuuaucccuuccaguuaau

SEQ ID NO: 624339 - RNA, 18 nt, Artificial Sequence
  Synthetic
agagaaacaagaguuaau

SEQ ID NO: 624340 - RNA, 19 nt, Artificial Sequence
  Synthetic
aagagaaacaagaguuaau

SEQ ID NO: 624341 - RNA, 20 nt, Artificial Sequence
  Synthetic
caagagaaacaagaguuaau

SEQ ID NO: 624342 - RNA, 21 nt, Artificial Sequence
  Synthetic
ccaagagaaacaagaguuaau

SEQ ID NO: 624343 - RNA, 22 nt, Artificial Sequence
  Synthetic
cccaagagaaacaagaguuaau

SEQ ID NO: 624344 - RNA, 23 nt, Artificial Sequence
  Synthetic
ucccaagagaaacaagaguuaau

SEQ ID NO: 624345 - RNA, 24 nt, Artificial Sequence
  Synthetic
gucccaagagaaacaagaguuaau

SEQ ID NO: 624346 - RNA, 18 nt, Artificial Sequence
  Synthetic
cauagaaccagaguuaau

SEQ ID NO: 624347 - RNA, 19 nt, Artificial Sequence
  Synthetic
ucauagaaccagaguuaau

SEQ ID NO: 624348 - RNA, 20 nt, Artificial Sequence
  Synthetic
cucauagaaccagaguuaau

SEQ ID NO: 624349 - RNA, 21 nt, Artificial Sequence
  Synthetic
acucauagaaccagaguuaau

SEQ ID NO: 624350 - RNA, 22 nt, Artificial Sequence
  Synthetic
uacucauagaaccagaguuaau

SEQ ID NO: 624351 - RNA, 23 nt, Artificial Sequence
  Synthetic
cuacucauagaaccagaguuaau

SEQ ID NO: 624352 - RNA, 24 nt, Artificial Sequence
  Synthetic
gcuacucauagaaccagaguuaau

SEQ ID NO: 624353 - RNA, 18 nt, Artificial Sequence
  Synthetic
aaacucuccagaguuaau

SEQ ID NO: 624354 - RNA, 19 nt, Artificial Sequence
  Synthetic
caaacucuccagaguuaau

SEQ ID NO: 624355 - RNA, 20 nt, Artificial Sequence
  Synthetic
ucaaacucuccagaguuaau

SEQ ID NO: 624356 - RNA, 21 nt, Artificial Sequence
  Synthetic
cucaaacucuccagaguuaau

SEQ ID NO: 624357 - RNA, 22 nt, Artificial Sequence
  Synthetic
acucaaacucuccagaguuaau

SEQ ID NO: 624358 - RNA, 23 nt, Artificial Sequence
  Synthetic
uacucaaacucuccagaguuaau

SEQ ID NO: 624359 - RNA, 24 nt, Artificial Sequence
  Synthetic
uuacucaaacucuccagaguuaau

SEQ ID NO: 624360 - RNA, 18 nt, Artificial Sequence
  Synthetic
gagaaaucaucuguuaau

SEQ ID NO: 624361 - RNA, 19 nt, Artificial Sequence
  Synthetic
agagaaaucaucuguuaau

SEQ ID NO: 624362 - RNA, 20 nt, Artificial Sequence
  Synthetic
cagagaaaucaucuguuaau

SEQ ID NO: 624363 - RNA, 21 nt, Artificial Sequence
  Synthetic
gcagagaaaucaucuguuaau

SEQ ID NO: 624364 - RNA, 22 nt, Artificial Sequence
  Synthetic
agcagagaaaucaucuguuaau

SEQ ID NO: 624365 - RNA, 23 nt, Artificial Sequence
  Synthetic
uagcagagaaaucaucuguuaau

SEQ ID NO: 624366 - RNA, 24 nt, Artificial Sequence
  Synthetic
uuagcagagaaaucaucuguuaau

SEQ ID NO: 624367 - RNA, 18 nt, Artificial Sequence
  Synthetic
augggucuaucuguuaau
